United States Patent Application Publication US 2026/0209739 A1 - sequence listing, part 2

SEQ ID NO: 14898 - protein, 8 aa, synthetic construct
  REGION 1..8: note = DNA-directed RNA polymerase II subunit RPB2 (306-313)
DAVNVQKI

SEQ ID NO: 14899 - protein, 9 aa, synthetic construct
  REGION 1..9: note = Adipocyte plasma membrane-associated protein (180-188)
DAYKGLFEV

SEQ ID NO: 14900 - protein, 9 aa, synthetic construct
  REGION 1..9: note = Securin (108-116)
DAYPEIEKF

SEQ ID NO: 14901 - protein, 11 aa, synthetic construct
  REGION 1..11: note = Proteasome subunit beta type-4 (118-128)
DEELLGDGHSY

SEQ ID NO: 14902 - protein, 9 aa, synthetic construct
  REGION 1..9: note = DNA polymerase alpha catalytic subunit (336-344)
DEEQVFHFY

SEQ ID NO: 14903 - protein, 11 aa, synthetic construct
  REGION 1..11: note = 26S protease regulatory subunit 8 (123-133)
DEIDSIGSSRL

SEQ ID NO: 14904 - protein, 9 aa, synthetic construct
  REGION 1..9: note = N-alpha-acetyltransferase 10 (47-55)
DENGKIVGY

SEQ ID NO: 14905 - protein, 9 aa, synthetic construct
  REGION 1..9: note = 40S ribosomal protein S18 (62-70)
DEVERVITI

SEQ ID NO: 14906 - protein, 9 aa, synthetic construct
  REGION 1..9: note = Rab GDP dissociation inhibitor beta (21-29)
DFKVTEGSF

SEQ ID NO: 14907 - protein, 9 aa, synthetic construct
  REGION 1..9: note = Fatty acid synthase (2469-2477)
DGKVSVHVI

SEQ ID NO: 14908 - protein, 9 aa, synthetic construct
  REGION 1..9: note = Nucleoporin NUP53 (211-219)
DGRIFGESI

SEQ ID NO: 14909 - protein, 9 aa, synthetic construct
  REGION 1..9: note = Nicotinamide/nicotinic acid mononucleotide adenylyltransferase 1 (112-120)
DHQQNSPTL

SEQ ID NO: 14910 - protein, 14 aa, synthetic construct
  REGION 1..14: note = Glia-derived nexin (118-131)
DIVTVANAVFVKNA

SEQ ID NO: 14911 - protein, 9 aa, synthetic construct
  REGION 1..9: note = Non-POU domain-containing octamer-binding protein (226-234)
DLMRRQEEL

SEQ ID NO: 14912 - protein, 9 aa, synthetic construct
  REGION 1..9: note = Homeodomain-interacting protein kinase 1 (252-260)
DPFQQTFIV

SEQ ID NO: 14913 - protein, 9 aa, synthetic construct
  REGION 1..9: note = Mediator of RNA polymerase II transcription subunit 13-like (1410-1418)
DPYGGHRDV

SEQ ID NO: 14914 - protein, 8 aa, synthetic construct
  REGION 1..8: note = Plectin (3424-3431)
DPYSGSTI

SEQ ID NO: 14915 - protein, 9 aa, synthetic construct
  REGION 1..9: note = Elongator complex protein 2 (46-54)
DQFQKVLSL

SEQ ID NO: 14916 - protein, 10 aa, synthetic construct
  REGION 1..10: note = Ras GTPase-activating protein-binding protein 2 (285-294)
DSDNRRIIRY

SEQ ID NO: 14917 - protein, 8 aa, synthetic construct
  REGION 1..8: note = AP-3 complex subunit delta-1 (314-321)
DSDQNLKY

SEQ ID NO: 14918 - protein, 9 aa, synthetic construct
  REGION 1..9: note = Ubiquitin carboxyl-terminal hydrolase 28 (507-515)
DSYGGLRNV

SEQ ID NO: 14919 - protein, 9 aa, synthetic construct
  REGION 1..9: note = Zinc transporter ZIP6 (485-493)
DTDDRTEGY

SEQ ID NO: 14920 - protein, 8 aa, synthetic construct
  REGION 1..8: note = Poly (ADP-ribose) polymerase 14 (118-125)
DTIMATKL

SEQ ID NO: 14921 - protein, 8 aa, synthetic construct
  REGION 1..8: note = Protein S100-A9 (67-74)
DTNADKQL

SEQ ID NO: 14922 - protein, 9 aa, synthetic construct
  REGION 1..9: note = Protein FAM172A (263-271)
DVKNKVTAV

SEQ ID NO: 14923 - protein, 9 aa, synthetic construct
  REGION 1..9: note = Cytochrome c oxidase subunit 6C (57-65)
DVMKDFEEM

SEQ ID NO: 14924 - protein, 9 aa, synthetic construct
  REGION 1..9: note = N-acetyl-D-glucosamine kinase (175-183)
EAAPHDIGY

SEQ ID NO: 14925 - protein, 10 aa, synthetic construct
  REGION 1..10: note = Myosin light polypeptide 6 (148-157)
EAFVRHILSG

SEQ ID NO: 14926 - protein, 9 aa, synthetic construct
  REGION 1..9: note = Hsp70-binding protein 1 (201-209)
EAGAAGLRW

SEQ ID NO: 14927 - protein, 8 aa, synthetic construct
  REGION 1..8: note = Probable U3 small nucleolar RNA-associated protein 11 (43-50)
EAKKIERL

SEQ ID NO: 14928 - protein, 9 aa, synthetic construct
  REGION 1..9: note = Ribosomal RNA-processing protein 7 homolog A (260-268)
EEDKQRIEL

SEQ ID NO: 14929 - protein, 9 aa, synthetic construct
  REGION 1..9: note = WD40 repeat-containing protein SMU1 (197-205)
EEEKFPTQL

SEQ ID NO: 14930 - protein, 10 aa, synthetic construct
  REGION 1..10: note = Guanine nucleotide-binding protein-like 3-like protein (97-106)
EEFEHKEEVL

SEQ ID NO: 14931 - protein, 9 aa, synthetic construct
  REGION 1..9: note = Protocadherin Fat 1 (2948-2956)
EEINRQVTY

SEQ ID NO: 14932 - protein, 9 aa, synthetic construct
  REGION 1..9: note = Midasin (582-590)
EEISHLISF

SEQ ID NO: 14933 - protein, 9 aa, synthetic construct
  REGION 1..9: note = Protein strawberry notch homolog 2 (93-101)
EELGHTETY

SEQ ID NO: 14934 - protein, 9 aa, synthetic construct
  REGION 1..9: note = X-ray repair cross-complementing protein 5 (651-659)
EEQRFNNFL

SEQ ID NO: 14935 - protein, 8 aa, synthetic construct
  REGION 1..8: note = Angiomotin-like protein 2 (573-580)
EERAMRQF

SEQ ID NO: 14936 - protein, 10 aa, synthetic construct
  REGION 1..10: note = Methylmalonic aciduria and homocystinuria type D protein, mitochondrial (191-200)
EEVEIEREVL

SEQ ID NO: 14937 - protein, 9 aa, synthetic construct
  REGION 1..9: note = Mitotic checkpoint serine/threonine-protein kinase BUB1 beta (160-168)
EEYEARENF

SEQ ID NO: 14938 - protein, 9 aa, synthetic construct
  REGION 1..9: note = Mediator of RNA polymerase II transcription subunit 18 (128-136)
EFVAKGHLF

SEQ ID NO: 14939 - protein, 9 aa, synthetic construct
  REGION 1..9: note = Glycerol-3-phosphate dehydrogenase 1-like protein (49-57)
EGPEGLKLI

SEQ ID NO: 14940 - protein, 9 aa, synthetic construct
  REGION 1..9: note = 3-ketoacyl-CoA thiolase, mitochondrial (221-229)
EHARPQTTL

SEQ ID NO: 14941 - protein, 9 aa, synthetic construct
  REGION 1..9: note = COMM domain-containing protein 6 (77-85)
EIAAVIETV

SEQ ID NO: 14942 - protein, 10 aa, synthetic construct
  REGION 1..10: note = Actin-related protein 6 (47-56)
EIKDPSGLFY

SEQ ID NO: 14943 - protein, 9 aa, synthetic construct
  REGION 1..9: note = Spectrin beta chain, non-erythrocytic 1 (1987-1995)
EIKEKLLQL

SEQ ID NO: 14944 - protein, 9 aa, synthetic construct
  REGION 1..9: note = DnaJ homolog subfamily C member 8 (83-91)
EIKKRFRQL

SEQ ID NO: 14945 - protein, 9 aa, synthetic construct
  REGION 1..9: note = Heat shock protein 105 kDa (740-748)
EIKTKIKEL

SEQ ID NO: 14946 - protein, 9 aa, synthetic construct
  REGION 1..9: note = Replication protein A 14 kDa subunit (62-70)
EISGIVEVV

SEQ ID NO: 14947 - protein, 9 aa, synthetic construct
  REGION 1..9: note = Centrosomal protein of 170 kDa (1472-1480)
EISSILQEL

SEQ ID NO: 14948 - protein, 11 aa, synthetic construct
  REGION 1..11: note = Peptidyl-prolyl cis-trans isomerase CWC27 homolog (445-455)
EIYDPRNPVNK

SEQ ID NO: 14949 - protein, 9 aa, synthetic construct
  REGION 1..9: note = Serine-protein kinase ATM (1146-1154)
EIYNRKSVL

SEQ ID NO: 14950 - protein, 9 aa, synthetic construct
  REGION 1..9: note = Translin-associated protein X (45-53)
ELDARHDKY

SEQ ID NO: 14951 - protein, 9 aa, synthetic construct
  REGION 1..9: note = Ankyrin repeat domain-containing protein 40 (281-289)
ELDRQELTY

SEQ ID NO: 14952 - protein, 9 aa, synthetic construct
  REGION 1..9: note = Uncharacterized protein C16orf45 (98-106)
ELIQKIHKL

SEQ ID NO: 14953 - protein, 9 aa, synthetic construct
  REGION 1..9: note = ATP-dependent DNA helicase Q1 (34-42)
ELIQKKKVL

SEQ ID NO: 14954 - protein, 9 aa, synthetic construct
  REGION 1..9: note = Dedicator of cytokinesis protein 7 (661-669)
ELKSSISAL

SEQ ID NO: 14955 - protein, 9 aa, synthetic construct
  REGION 1..9: note = Protein Spindly (108-116)
ELKTKIEKL

SEQ ID NO: 14956 - protein, 9 aa, synthetic construct
  REGION 1..9: note = Hypoxia-inducible factor 1-alpha (705-713)
ELNPKILAL

SEQ ID NO: 14957 - protein, 9 aa, synthetic construct
  REGION 1..9: note = NF-kappa-B inhibitor-interacting Ras-like protein 1 (70-78)
ELPKHYFSF

SEQ ID NO: 14958 - protein, 9 aa, synthetic construct
  REGION 1..9: note = Transmembrane emp24 domain-containing protein 9 (163-171)
ELQLRVRQL

SEQ ID NO: 14959 - protein, 9 aa, synthetic construct
  REGION 1..9: note = FRAS1-related extracellular matrix protein 2 (2560-2568)
ELSNFELTL

SEQ ID NO: 14960 - protein, 9 aa, synthetic construct
  REGION 1..9: note = Immediate early response gene 5 protein (99-107)
EPQPERSSV

SEQ ID NO: 14961 - protein, 9 aa, synthetic construct
  REGION 1..9: note = Tubulin beta-6 chain (116-124)
EPYNATLSV

SEQ ID NO: 14962 - protein, 10 aa, synthetic construct
  REGION 1..10: note = Proline-rich protein PRCC (289-298)
EPYPYPIPTV

SEQ ID NO: 14963 - protein, 8 aa, synthetic construct
  REGION 1..8: note = Eukaryotic translation initiation factor 3 subunit A (641-648)
EQIKKTEL

SEQ ID NO: 14964 - protein, 9 aa, synthetic construct
  REGION 1..9: note = Integrator complex subunit 1 (747-755)
EQPETYYKW

SEQ ID NO: 14965 - protein, 9 aa, synthetic construct
  REGION 1..9: note = Oxysterol-binding protein-related protein 9 (151-159)
EQRKKIETL

SEQ ID NO: 14966 - protein, 13 aa, synthetic construct
  REGION 1..13: note = (1108-1120)
ESDKYAERKGAAY

SEQ ID NO: 14967 - protein, 10 aa, synthetic construct
  REGION 1..10: note = 39S ribosomal protein L2, mitochondrial (197-206)
ESEPGRGAQY

SEQ ID NO: 14968 - protein, 9 aa, synthetic construct
  REGION 1..9: note = Trafficking protein particle complex subunit 3 (73-81)
ETADVIAKV

SEQ ID NO: 14969 - protein, 11 aa, synthetic construct
  REGION 1..11: note = 60S ribosomal protein L17 (31-41)
ETAQAIKGMHI

SEQ ID NO: 14970 - protein, 11 aa, synthetic construct
  REGION 1..11: note = Semaphorin-3C (312-322)
ETDNPRTTLVY

SEQ ID NO: 14971 - protein, 9 aa, synthetic construct
  REGION 1..9: note = Maturin (26-34)
ETERRMDFY

SEQ ID NO: 14972 - protein, 9 aa, synthetic construct
  REGION 1..9: note = Type II inositol 3,4-bisphosphate 4-phosphatase (389-397)
ETERRNTGY

SEQ ID NO: 14973 - protein, 9 aa, synthetic construct
  REGION 1..9: note = Crooked neck-like protein 1 (679-687)
ETERTRNLY

SEQ ID NO: 14974 - protein, 9 aa, synthetic construct
  REGION 1..9: note = Mortality factor 4-like protein 1 (187-195)
ETFMNRVEV

SEQ ID NO: 14975 - protein, 9 aa, synthetic construct
  REGION 1..9: note = Proteasome-associated protein ECM29 homolog (349-357)
ETFPANIQV

SEQ ID NO: 14976 - protein, 9 aa, synthetic construct
  REGION 1..9: note = Nucleoporin NUP188 homolog (337-345)
ETSSVVRKI

SEQ ID NO: 14977 - protein, 9 aa, synthetic construct
  REGION 1..9: note = NF-kappa-B-repressing factor (487-495)
EVIAEAVGV

SEQ ID NO: 14978 - protein, 9 aa, synthetic construct
  REGION 1..9: note = Sphingolipid delta(4)-desaturase DES1 (150-158)
EVINTVAQV

SEQ ID NO: 14979 - protein, 9 aa, synthetic construct
  REGION 1..9: note = U11/U12 small nuclear ribonucleoprotein 48 kDa protein (239-247)
EVIRDVINV

SEQ ID NO: 14980 - protein, 9 aa, synthetic construct
  REGION 1..9: note = T-complex protein 1 subunit theta (462-470)
EVISKLYAV

SEQ ID NO: 14981 - protein, 9 aa, synthetic construct
  REGION 1..9: note = Protein O-GlcNAcase (266-274)
EVSKIIKRA

SEQ ID NO: 14982 - protein, 10 aa, synthetic construct
  REGION 1..10: note = Prolyl 3-hydroxylase OGFOD1 (211-220)
EVSPVSFHQV

SEQ ID NO: 14983 - protein, 10 aa, synthetic construct
  REGION 1..10: note = Melanoma-associated antigen 1 (222-231)
EVYDGREHSA

SEQ ID NO: 14984 - protein, 9 aa, synthetic construct
  REGION 1..9: note = Exocyst complex component 4 (587-595)
EYIHALTLL

SEQ ID NO: 14985 - protein, 11 aa, synthetic construct
  REGION 1..11: note = Inactive tyrosine-protein kinase transmembrane receptor ROR1 (4-14)
EYINQGDLHEF

SEQ ID NO: 14986 - protein, 9 aa, synthetic construct
  REGION 1..9: note = Vacuolar protein sorting-associated protein 4B (64-72)
EYLDRAEKL

SEQ ID NO: 14987 - protein, 9 aa, synthetic construct
  REGION 1..9: note = 5'-3' exoribonuclease 1 (989-997)
EYLERAPEL

SEQ ID NO: 14988 - protein, 8 aa, synthetic construct
  REGION 1..8: note = Tubulin beta chain (178-185)
EYPDRIMN

SEQ ID NO: 14989 - protein, 10 aa, synthetic construct
  REGION 1..10: note = Zinc finger protein 281 (515-524)
EYSKYLQQAF

SEQ ID NO: 14990 - protein, 9 aa, synthetic construct
  REGION 1..9: note = UPF0469 protein KIAA0907 (327-335)
EYSRFVNQI

SEQ ID NO: 14991 - protein, 9 aa, synthetic construct
  REGION 1..9: note = Melanoma-associated antigen D1 (504-512)
EYTDVYPEI

SEQ ID NO: 14992 - protein, 9 aa, synthetic construct
  REGION 1..9: note = Probable global transcription activator SNF2L2 (535-543)
EYVANLTNL

SEQ ID NO: 14993 - protein, 11 aa, synthetic construct
  REGION 1..11: note = HLA class I histocompatibility antigen, alpha chain F (43-53)
EYVDDTQFLRF

SEQ ID NO: 14994 - protein, 9 aa, synthetic construct
  REGION 1..9: note = Zinc finger protein 506 (117-125)
EYVKFLHKF

SEQ ID NO: 14995 - protein, 9 aa, synthetic construct
  REGION 1..9: note = Kinesin-like protein KIF22 (218-226)
FADFERHFL

SEQ ID NO: 14996 - protein, 9 aa, synthetic construct
  REGION 1..9: note = Phosphatidylinositol 4-phosphate 3-kinase C2 domain-containing subunit alpha (950-958)
FADQEVRSL

SEQ ID NO: 14997 - protein, 9 aa, synthetic construct
  REGION 1..9: note = E3 ubiquitin-protein ligase TRIM22 (386-394)
FAFDPSVNY

SEQ ID NO: 14998 - protein, 9 aa, synthetic construct
  REGION 1..9: note = Protein disulfide-isomerase A3 (184-192)
FAHTNVESL

SEQ ID NO: 14999 - protein, 9 aa, synthetic construct
  REGION 1..9: note = Sarcosine dehydrogenase, mitochondrial (859-867)
FAIDKTIAY

SEQ ID NO: 15000 - protein, 9 aa, synthetic construct
  REGION 1..9: note = Eukaryotic translation initiation factor 3 subunit E (53-61)
FAMDVYKNL

SEQ ID NO: 15001 - protein, 9 aa, synthetic construct
  REGION 1..9: note = Protein-tyrosine kinase 2-beta (257-265)
FANIDQETY

SEQ ID NO: 15002 - protein, 11 aa, synthetic construct
  REGION 1..11: note = Glutamine and serine-rich protein 1 (1659-1669)
FAVDPEKIQLY

SEQ ID NO: 15003 - protein, 9 aa, synthetic construct
  REGION 1..9: note = Ubiquilin-1 (50-58)
FAVPENSSV

SEQ ID NO: 15004 - protein, 10 aa, synthetic construct
  REGION 1..10: note = Eukaryotic translation initiation factor 3 subunit B (568-577)
FAWEPNGSKF

SEQ ID NO: 15005 - protein, 11 aa, synthetic construct
  REGION 1..11: note = Probable ATP-dependent RNA helicase DDX56 (464-474)
FEDNPRDLQLL

SEQ ID NO: 15006 - protein, 9 aa, synthetic construct
  REGION 1..9: note = Coatomer subunit gamma-1 (783-791)
FEKEETFTL

SEQ ID NO: 15007 - protein, 9 aa, synthetic construct
  REGION 1..9: note = Alpha-parvin (133-141)
FEKLESEKL

SEQ ID NO: 15008 - protein, 10 aa, synthetic construct
  REGION 1..10: note = Glycogen phosphorylase, brain form (327-336)
FETFPDKVAI

SEQ ID NO: 15009 - protein, 11 aa, synthetic construct
  REGION 1..11: note = Destrin (89-99)
FETKESRKEEL

SEQ ID NO: 15010 - protein, 9 aa, synthetic construct
  REGION 1..9: note = Zinc finger protein 462 (268-276)
FGDSGRLYY

SEQ ID NO: 15011 - protein, 9 aa, synthetic construct
  REGION 1..9: note = Endoplasmic reticulum-Golgi intermediate compartment protein 3 (214-222)
FHFAPGKSF

SEQ ID NO: 15012 - protein, 10 aa, synthetic construct
  REGION 1..10: note = HLA class II histocompatibility antigen, DQ alpha 1 chain (134-143)
FIDKFTPPVV

SEQ ID NO: 15013 - protein, 9 aa, synthetic construct
  REGION 1..9: note = Guanine nucleotide-binding protein G(I)/G(S)/G(T) subunit beta-1 (58-66)
FLDDNQIVT

SEQ ID NO: 15014 - protein, 9 aa, synthetic construct
  REGION 1..9: note = Basigin (25-33)
FLPEPMGTA

SEQ ID NO: 15015 - protein, 10 aa, synthetic construct
  REGION 1..10: note = Volume-regulated anion channel subunit LRRC8D (80-89)
FLSEVSENKL

SEQ ID NO: 15016 - protein, 9 aa, synthetic construct
  REGION 1..9: note = Transmembrane protein 97 (18-26)
FLSHIPITL

SEQ ID NO: 15017 - protein, 10 aa, synthetic construct
  REGION 1..10: note = Vitamin K-dependent protein S (26-35)
FLSKQQASQV

SEQ ID NO: 15018 - protein, 9 aa, synthetic construct
  REGION 1..9: note = Helicase with zinc finger domain 2 (630-638)
FRPPTRAEL

SEQ ID NO: 15019 - protein, 9 aa, synthetic construct
  REGION 1..9: note = Myeloid leukemia factor 2 (203-211)
FRQQRPLEF

SEQ ID NO: 15020 - protein, 9 aa, synthetic construct
  REGION 1..9: note = Importin subunit alpha-7 (90-98)
FSDDSDLQL

SEQ ID NO: 15021 - protein, 9 aa, synthetic construct
  REGION 1..9: note = Protein phosphatase 1D (12-20)
FSDQGGRKY

SEQ ID NO: 15022 - protein, 9 aa, synthetic construct
  REGION 1..9: note = 60S ribosomal protein L11 (98-106)
FSDTGNFGF

SEQ ID NO: 15023 - protein, 9 aa, synthetic construct
  REGION 1..9: note = Renin receptor (105-113)
FSEETPVVL

SEQ ID NO: 15024 - protein, 9 aa, synthetic construct
  REGION 1..9: note = Transforming protein RhoA (80-88)
FSIDSPDSL

SEQ ID NO: 15025 - protein, 9 aa, synthetic construct
  REGION 1..9: note = Condensin complex subunit 3 (305-313)
FSITPLSEL

SEQ ID NO: 15026 - protein, 9 aa, synthetic construct
  REGION 1..9: note = Unconventional myosin-Ib (364-372)
FSSDHLIEM

SEQ ID NO: 15027 - protein, 9 aa, synthetic construct
  REGION 1..9: note = TBC1 domain family member 22B (80-88)
FSSPSFQTL

SEQ ID NO: 15028 - protein, 9 aa, synthetic construct
  REGION 1..9: note = Basic leucine zipper and W2 domain-containing protein 2 (234-242)
FTDAGLKEL

SEQ ID NO: 15029 - protein, 9 aa, synthetic construct
  REGION 1..9: note = Multidrug resistance protein 1 (175-183)
FTDKELLAY

SEQ ID NO: 15030 - protein, 9 aa, synthetic construct
  REGION 1..9: note = Protein VPRBP (1070-1078)
FTEDHYVEF

SEQ ID NO: 15031 - protein, 10 aa, synthetic construct
  REGION 1..10: note = Neuronal calcium sensor 1 (22-31)
FTEKEVQQWY

SEQ ID NO: 15032 - protein, 9 aa, synthetic construct
  REGION 1..9: note = RNMT-activating mini protein (19-27)
FTENDKEYQ

SEQ ID NO: 15033 - protein, 13 aa, synthetic construct
  REGION 1..13: note = DNA-directed RNA polymerase II subunit RPB7 (31-43)
FTEVEGTCTGKYG

SEQ ID NO: 15034 - protein, 9 aa, synthetic construct
  REGION 1..9: note = SURP and G-patch domain-containing protein 1 (198-206)
FVAEGGPEL

SEQ ID NO: 15035 - protein, 10 aa, synthetic construct
  REGION 1..10: note = Glutamyl-tRNA(Gln) amidotransferase subunit C, mitochondrial (112-121)
FVAPPGNISL

SEQ ID NO: 15036 - protein, 9 aa, synthetic construct
  REGION 1..9: note = E3 ubiquitin-protein ligase RNF187 (182-190)
FVEEEEHFL

SEQ ID NO: 15037 - protein, 9 aa, synthetic construct
  REGION 1..9: note = Ubiquitin carboxyl-terminal hydrolase 22 (45-53)
FVWSGTAEA

SEQ ID NO: 15038 - protein, 11 aa, synthetic construct
  REGION 1..11: note = Membrane cofactor protein (69-79)
FYIPPLATHTI

SEQ ID NO: 15039 - protein, 9 aa, synthetic construct
  REGION 1..9: note = GPI transamidase component PIG-T (539-547)
FYNLLTRTF

SEQ ID NO: 15040 - protein, 9 aa, synthetic construct
  REGION 1..9: note = RNA polymerase II-associated factor 1 homolog (423-431)
GATAAAPVP

SEQ ID NO: 15041 - protein, 11 aa, synthetic construct
  REGION 1..11: note = Nuclear mitotic apparatus protein 1 (775-785)
GEAHQAETEVL

SEQ ID NO: 15042 - protein, 10 aa, synthetic construct
  REGION 1..10: note = Cytoplasmic dynein 1 light intermediate chain 2 (61-70)
GEDGSGKTTL

SEQ ID NO: 15043 - protein, 11 aa, synthetic construct
  REGION 1..11: note = von Willebrand factor A domain-containing protein 5A (208-218)
GEDKTSAQVSL

SEQ ID NO: 15044 - protein, 9 aa, synthetic construct
  REGION 1..9: note = Protein Jade-2 (168-176)
GEDLEKVTL

SEQ ID NO: 15045 - protein, 10 aa, synthetic construct
  REGION 1..10: note = Zinc finger protein 622 (359-368)
GEDPNKAEEL

SEQ ID NO: 15046 - protein, 11 aa, synthetic construct
  REGION 1..11: note = Eukaryotic translation initiation factor 3 subunit C-like protein (542-552)
GEDSAVLMERL

SEQ ID NO: 15047 - protein, 9 aa, synthetic construct
  REGION 1..9: note = Poly(U)-binding-splicing factor PUF60 (123-131)
GEDTIRQAF

SEQ ID NO: 15048 - protein, 10 aa, synthetic construct
  REGION 1..10: note = Glutamine-tRNA ligase (351-360)
GEELKGHNTL

SEQ ID NO: 15049 - protein, 9 aa, synthetic construct
  REGION 1..9: note = DNA damage-binding protein 1 (783-791)
GEEVEVHNL

SEQ ID NO: 15050 - protein, 10 aa, synthetic construct
  REGION 1..10: note = RNA-binding protein 8A (81-90)
GEIKNIHLNL

SEQ ID NO: 15051 - protein, 11 aa, synthetic construct
  REGION 1..11: note = Supervillin (797-807)
GEIKTPTGEGL

SEQ ID NO: 15052 - protein, 9 aa, synthetic construct
  REGION 1..9: note = Hsc70-interacting protein (128-136)
GELQKAIDL

SEQ ID NO: 15053 - protein, 9 aa, synthetic construct
  REGION 1..9: note = Antigen peptide transporter 2 (87-95)
GELTQGSLL

SEQ ID NO: 15054 - protein, 10 aa, synthetic construct
  REGION 1..10: note = Cytoplasmic dynein 1 heavy chain 1 (2173-2182)
GEMTALREEL

SEQ ID NO: 15055 - protein, 10 aa, synthetic construct
  REGION 1..10: note = Ras-related protein Rab-5A (27-36)
GESAVGKSSL

SEQ ID NO: 15056 - protein, 11 aa, synthetic construct
  REGION 1..11: note = U4/U6 small nuclear ribonucleoprotein Prp4 (45-55)
GESGILGKDGL

SEQ ID NO: 15057 - protein, 9 aa, synthetic construct
  REGION 1..9: note = tRNA wybutosine-synthesizing protein 2 homolog (54-62)
GETLPEQHL

SEQ ID NO: 15058 - protein, 9 aa, synthetic construct
  REGION 1..9: note = Nuclear protein localization protein 4 homolog (480-488)
GETQDFHSL

SEQ ID NO: 15059 - protein, 9 aa, synthetic construct
  REGION 1..9: note = Eukaryotic translation initiation factor 5A-1 (106-114)
GEVREDLRL

SEQ ID NO: 15060 - protein, 9 aa, synthetic construct
  REGION 1..9: note = Heterogeneous nuclear ribonucleoprotein H (422-430)
GGYGGQSSM

SEQ ID NO: 15061 - protein, 9 aa, synthetic construct
  REGION 1..9: note = Class E basic helix-loop-helix protein 41 (81-89)
GHLEKAVVL

SEQ ID NO: 15062 - protein, 9 aa, synthetic construct
  REGION 1..9: note = Guanine nucleotide-binding protein subunit beta-2-like 1 (13-21)
GHNGWVTQI

SEQ ID NO: 15063 - protein, 9 aa, synthetic construct
  REGION 1..9: note = Oxysterol-binding protein-related protein 9 (262-270)
GHSPPSSSL

SEQ ID NO: 15064 - protein, 9 aa, synthetic construct
  REGION 1..9: note = DNA replication licensing factor MCM6 (508-516)
GHYDRSKSL

SEQ ID NO: 15065 - protein, 11 aa, synthetic construct
  REGION 1..11: note = 40S ribosomal protein S15 (113-123)
GHYLGEFSITY

SEQ ID NO: 15066 - protein, 9 aa, synthetic construct
  REGION 1..9: note = Coatomer subunit alpha (731-739)
GHYQNALYL

SEQ ID NO: 15067 - protein, 9 aa, synthetic construct
  REGION 1..9: note = Poly(rC)-binding protein 1 (259-267)
GIDSSSPEV

SEQ ID NO: 15068 - protein, 9 aa, synthetic construct
  REGION 1..9: note = Mitogen-activated protein kinase kinase kinase 6 (197-205)
GLADGLVQA

SEQ ID NO: 15069 - protein, 9 aa, synthetic construct
  REGION 1..9: note = Multiple PDZ domain protein (814-822)
GLADKPLFR

SEQ ID NO: 15070 - protein, 9 aa, synthetic construct
  REGION 1..9: note = Ras GTPase-activating-like protein IQGAP3 (153-161)
GLAPQIHDL

SEQ ID NO: 15071 - protein, 9 aa, synthetic construct
  REGION 1..9: note = 26S protease regulatory subunit 8 (27-35)
GLDKQIKEI

SEQ ID NO: 15072 - protein, 9 aa, synthetic construct
  REGION 1..9: note = Nuclear autoantigenic sperm protein (409-417)
GLEEKVRAK

SEQ ID NO: 15073 - protein, 9 aa, synthetic construct
  REGION 1..9: note = Nuclear pore complex protein Nup98-Nup96 (50-58)
GLFGNSQTK

SEQ ID NO: 15074 - protein, 9 aa, synthetic construct
  REGION 1..9: note = Box C/D snoRNA protein 1 (14-22)
GLHSVAEGV

SEQ ID NO: 15075 - protein, 9 aa, synthetic construct
  REGION 1..9: note = 60S ribosomal protein L11 (85-93)
GLKVREYEL

SEQ ID NO: 15076 - protein, 9 aa, synthetic construct
  REGION 1..9: note = Kinesin-like protein KIF3A (576-584)
GLLENIRQL

SEQ ID NO: 15077 - protein, 11 aa, synthetic construct
  REGION 1..11: note = Mitochondrial import inner membrane translocase subunit TIM50 (78-88)
GLLGAGGTVSV

SEQ ID NO: 15078 - protein, 9 aa, synthetic construct
  REGION 1..9: note = C-terminal-binding protein 1 (238-246)
GLNEHNHHL

SEQ ID NO: 15079 - protein, 10 aa, synthetic construct
  REGION 1..10: note = Acyl-CoA synthetase family member 4 (721-730)
GLNSPVLIGK

SEQ ID NO: 15080 - protein, 9 aa, synthetic construct
  REGION 1..9: note = Fos-related antigen 2 (165-173)
GLQKEIAEL

SEQ ID NO: 15081 - protein, 9 aa, synthetic construct
  REGION 1..9: note = Mitofusin-1 (547-555)
GLSEPIFQL

SEQ ID NO: 15082 - protein, 9 aa, synthetic construct
  REGION 1..9: note = Serine/threonine-protein phosphatase 2B catalytic subunit beta isoform (228-236)
GLSPEIHTL

SEQ ID NO: 15083 - protein, 9 aa, synthetic construct
  REGION 1..9: note = Neurofibromin (37-45)
GLTTILKNV

SEQ ID NO: 15084 - protein, 9 aa, synthetic construct
  REGION 1..9: note = Retinoic acid receptor gamma (203-211)
GLWDKFSEL

SEQ ID NO: 15085 - protein, 9 aa, synthetic construct
  REGION 1..9: note = Uncharacterized protein C17orf85 (252-260)
GLYADTREK

SEQ ID NO: 15086 - protein, 8 aa, synthetic construct
  REGION 1..8: note = Very-long-chain (3R)-3-hydroxyacyl-CoA dehydratase 1 (106-113)
GLYKSIQK

SEQ ID NO: 15087 - protein, 9 aa, synthetic construct
  REGION 1..9: note = Tripartite motif-containing protein 65 (17-25)
GLYQDPVTL

SEQ ID NO: 15088 - protein, 10 aa, synthetic construct
  REGION 1..10: note = Thioredoxin reductase 1, cytoplasmic (282-291)
GQFIGPHRIK

SEQ ID NO: 15089 - protein, 9 aa, synthetic construct
  REGION 1..9: note = Cdc42 effector protein 3 (76-84)
GQFPGHNEF

SEQ ID NO: 15090 - protein, 9 aa, synthetic construct
  REGION 1..9: note = Regulator of chromosome condensation (439-447)
GQHTVLLVK

SEQ ID NO: 15091 - protein, 9 aa, synthetic construct
  REGION 1..9: note = Chromodomain-helicase-DNA-binding protein 4 (1164-1172)
GQNKKVMIY

SEQ ID NO: 15092 - protein, 13 aa, synthetic construct
  REGION 1..13: note = EH domain-containing protein 2 (65-77)
GQYSTGKTSFIQY

SEQ ID NO: 15093 - protein, 11 aa, synthetic construct
  REGION 1..11: note = Heterogeneous nuclear ribonucleoprotein H (256-266)
GSDRFGRDLNY

SEQ ID NO: 15094 - protein, 9 aa, synthetic construct
  REGION 1..9: note = Mitochondrial import inner membrane translocase subunit TIM50 (62-70)
GSEGPSYAK

SEQ ID NO: 15095 - protein, 11 aa, synthetic construct
  REGION 1..11: note = Ribonucleoside-diphosphate reductase subunit M2 (238-248)
GSFASIFWLKK

SEQ ID NO: 15096 - protein, 9 aa, synthetic construct
  REGION 1..9: note = HLA class I histocompatibility antigen, A-2 alpha chain (25-33)
GSHSMRYFF

SEQ ID NO: 15097 - protein, 10 aa, synthetic construct
  REGION 1..10: note = HLA class I histocompatibility antigen, A-1 alpha chain (25-34)
GSHSMRYFFT

SEQ ID NO: 15098 - protein, 9 aa, synthetic construct
  REGION 1..9: note = HLA class I histocompatibility antigen, Cw-4 alpha chain (25-33)
GSHSMRYFS

SEQ ID NO: 15099 - protein, 9 aa, synthetic construct
  REGION 1..9: note = 60S ribosomal protein L37 (23-31)
GSKAYHLQK

SEQ ID NO: 15100 - protein, 11 aa, synthetic construct
  REGION 1..11: note = Protein PRR14L (865-875)
GSLPGDKIRNK

SEQ ID NO: 15101 - protein, 10 aa, synthetic construct
  REGION 1..10: note = Smoothelin (449-458)
GTAEPGGSMK

SEQ ID NO: 15102 - protein, 11 aa, synthetic construct
  REGION 1..11: note = Embryonic stem cell-specific 5-hydroxymethylcytosine-binding protein (329-339)
GTAGLLEQWLK

SEQ ID NO: 15103 - protein, 11 aa, synthetic construct
  REGION 1..11: note = Glutamine-rich protein 1 (209-219)
GTASVLQPVKK

SEQ ID NO: 15104 - protein, 10 aa, synthetic construct
  REGION 1..10: note = Sphingosine-1-phosphate phosphatase 1 (135-144)
GTELGNELFY

SEQ ID NO: 15105 - protein, 11 aa, synthetic construct
  REGION 1..11: note = WD repeat-containing protein 92 (479-489)
GTFGATSLQQR

SEQ ID NO: 15106 - protein, 11 aa, synthetic construct
  REGION 1..11: note = Cactin isoform X2 (208-218)
GTFIWNKALEK

SEQ ID NO: 15107 - protein, 11 aa, synthetic construct
  REGION 1..11: note = Unconventional myosin-IXa (2491-2501)
GTFNPEKGKQK

SEQ ID NO: 15108 - protein, 9 aa, synthetic construct
  REGION 1..9: note = Biogenesis of lysosome-related organelles complex 1 subunit 4 (164-172)
GTFPRAFKK

SEQ ID NO: 15109 - protein, 10 aa, synthetic construct
  REGION 1..10: note = Actin-like protein 6A (362-371)
GTFQQMWISK

SEQ ID NO: 15110 - protein, 11 aa, synthetic construct
  REGION 1..11: note = Neurobeachin-like protein 1 (754-764)
GTIEKSKLITK

SEQ ID NO: 15111 - protein, 9 aa, synthetic construct
  REGION 1..9: note = Isoleucine-tRNA ligase, cytoplasmic (62-70)
GTIKDIVTR

SEQ ID NO: 15112 - protein, 12 aa, synthetic construct
  REGION 1..12: note = Histone H2B type 1-K (115-126)
GTKAVTKYTSAK

SEQ ID NO: 15113 - protein, 10 aa, synthetic construct
  REGION 1..10: note = Integrator complex subunit 5 (378-387)
GTLQPPFTAR

SEQ ID NO: 15114 - protein, 9 aa, synthetic construct
  REGION 1..9: note = Phosphomannomutase 1 (22-30)
GTLTPARQK

SEQ ID NO: 15115 - protein, 11 aa, synthetic construct
  REGION 1..11: note = Probable phospholipid-transporting ATPase IIA (238-248)
GTLTQNEMIFK

SEQ ID NO: 15116 - protein, 9 aa, synthetic construct
  REGION 1..9: note = Thioredoxin domain-containing protein 9 (203-211)
GTNFTKLEK

SEQ ID NO: 15117 - protein, 9 aa, synthetic construct
  REGION 1..9: note = Rho guanine nucleotide exchange factor 17 (1361-1369)
GTQGSPITK

SEQ ID NO: 15118 - protein, 10 aa, synthetic construct
  REGION 1..10: note = Inter-alpha-trypsin inhibitor heavy chain H5 (656-665)
GTQPGPLLKK

SEQ ID NO: 15119 - protein, 12 aa, synthetic construct
  REGION 1..12: note = Sorting nexin-1 (275-286)
GTQTLSGAGLLK

SEQ ID NO: 15120 - protein, 13 aa, synthetic construct
  REGION 1..13: note = HCLS1-binding protein 3 (136-148)
GTRSPGAAGLTSR

SEQ ID NO: 15121 - protein, 9 aa, synthetic construct
  REGION 1..9: note = Bardet-Biedl syndrome 10 protein (375-383)
GTSSLFIYK

SEQ ID NO: 15122 - protein, 9 aa, synthetic construct
  REGION 1..9: note = Proteasome subunit beta type-7 (229-237)
GTTAVLTEK

SEQ ID NO: 15123 - protein, 10 aa, synthetic construct
  REGION 1..10: note = E3 ubiquitin-protein ligase CBL (49-58)
GTVDKKMVEK

SEQ ID NO: 15124 - protein, 9 aa, synthetic construct
  REGION 1..9: note = E3 SUMO-protein ligase PIAS1 (411-419)
GTWAPMRSK

SEQ ID NO: 15125 - protein, 9 aa, synthetic construct
  REGION 1..9: note = Rho-associated protein kinase 2 (301-309)
GTYSKIMDH

SEQ ID NO: 15126 - protein, 9 aa, synthetic construct
  REGION 1..9: note = 40S ribosomal protein S16 (64-72)
GVDIRVRVK

SEQ ID NO: 15127 - protein, 10 aa, synthetic construct
  REGION 1..10: note = Phosphoribosyl pyrophosphate synthase-associated protein 1 (94-103)
GVIPYFPYSK

SEQ ID NO: 15128 - protein, 9 aa, synthetic construct
  REGION 1..9: note = Tenascin (23-31)
GVLKKVIRH

SEQ ID NO: 15129 - protein, 9 aa, synthetic construct
  REGION 1..9: note = Sterol regulatory element-binding protein 2 (852-860)
GVMSPPLSR

SEQ ID NO: 15130 - protein, 10 aa, synthetic construct
  REGION 1..10: note = NADH dehydrogenase (ubiquinone) iron-sulfur protein 6, mitochondrial (29-38)
GVRVSPTGEK

SEQ ID NO: 15131 - protein, 9 aa, synthetic construct
  REGION 1..9: note = Double-strand-break repair protein rad21 homolog (62-70)
GVVRIYHRK

SEQ ID NO: 15132 - protein, 8 aa, synthetic construct
  REGION 1..8: note = Melanoma-associated antigen B2 (231-238)
GVYDGEEH

SEQ ID NO: 15133 - protein, 9 aa, synthetic construct
  REGION 1..9: note = RNA-binding motif, single-stranded-interacting protein 2 (399-407)
GVYSFQFNK

SEQ ID NO: 15134 - protein, 9 aa, synthetic construct
  REGION 1..9: note = Glutathione synthetase (158-166)
GYMPRQYSL

SEQ ID NO: 15135 - protein, 9 aa, synthetic construct
  REGION 1..9: note = Far upstream element-binding protein 3 (340-348)
HAAHIISEL

SEQ ID NO: 15136 - protein, 9 aa, synthetic construct
  REGION 1..9: note = Ectonucleoside triphosphate diphosphohydrolase 4 (473-481)
HADLHRLKY

SEQ ID NO: 15137 - protein, 9 aa, synthetic construct
  REGION 1..9: note = V-type proton ATPase subunit B, brain isoform (310-318)
HADVSNQLY

SEQ ID NO: 15138 - protein, 9 aa, synthetic construct
  REGION 1..9: note = BRCA1-A complex subunit BRE (227-235)
HALGGSSAL

SEQ ID NO: 15139 - protein, 8 aa, synthetic construct
  REGION 1..8: note Dolichyl-diphosphooligosaccharide-proteinosyltransferase 48 kDa subunit (235-242)
HAVGKNTL

SEQ ID NO: 15140 - protein, 9 aa, synthetic construct
  REGION 1..9: note = Perilipin-3 (249-257)
HAYEHSLGK

SEQ ID NO: 15141 - protein, 9 aa, synthetic construct
  REGION 1..9: note = TBC1 domain family member 14 (206-214)
HEAEEGSKL

SEQ ID NO: 15142 - protein, 11 aa, synthetic construct
  REGION 1..11: note = DNA-directed RNA polymerases I and III subunit RPAC2 (45-55)
HEEDHTLGNSL

SEQ ID NO: 15143 - protein, 10 aa, synthetic construct
  REGION 1..10: note = Exosome complex exonuclease RRP44 (679-688)
HEEFSEHALL

SEQ ID NO: 15144 - protein, 9 aa, synthetic construct
  REGION 1..9: note = THO complex subunit 5 homolog (154-162)
HEEIDLVSL

SEQ ID NO: 15145 - protein, 9 aa, synthetic construct
  REGION 1..9: note = Tuftelin-interacting protein 11 (365-373)
HEERVISNL

SEQ ID NO: 15146 - protein, 9 aa, synthetic construct
  REGION 1..9: note = X-linked retinitis pigmentosa GTPase regulator (637-645)
HEFSKTEEL

SEQ ID NO: 15147 - protein, 9 aa, synthetic construct
  REGION 1..9: note = GON-4-like protein (1051-1059)
HEGGPDSKL

SEQ ID NO: 15148 - protein, 9 aa, synthetic construct
  REGION 1..9: note = AP-3 complex subunit delta-1 (103-111)
HEGTDVIML

SEQ ID NO: 15149 - protein, 9 aa, synthetic construct
  REGION 1..9: note = Gem-associated protein 5 (588-596)
HEHGSQPEL

SEQ ID NO: 15150 - protein, 9 aa, synthetic construct
  REGION 1..9: note = Zinc finger protein 644 (930-938)
HEIHDPQHL

SEQ ID NO: 15151 - protein, 9 aa, synthetic construct
  REGION 1..9: note = Glycerol-3-phosphate dehydrogenase, mitochondrial (539-547)
HEILNEVDL

SEQ ID NO: 15152 - protein, 9 aa, synthetic construct
  REGION 1..9: note = Eukaryotic translation initiation factor 3 subunit I (165-173)
HESGELNQY

SEQ ID NO: 15153 - protein, 9 aa, synthetic construct
  REGION 1..9: note = Insulin-like growth factor 2 mRNA-binding protein 2 (301-309)
HETGTKITI

SEQ ID NO: 15154 - protein, 9 aa, synthetic construct
  REGION 1..9: note = Inositol-trisphosphate 3-kinase B (874-882)
HEVIGSSLL

SEQ ID NO: 15155 - protein, 9 aa, synthetic construct
  REGION 1..9: note = Trabeculin-alpha (2620-2628)
HEVKEAQTL

SEQ ID NO: 15156 - protein, 10 aa, synthetic construct
  REGION 1..10: note = Translocation protein SEC62 (284-293)
HEYKGPKADL

SEQ ID NO: 15157 - protein, 8 aa, synthetic construct
  REGION 1..8: note = Bifunctional glutamate/proline-tRNA ligase (272-279)
HFETIMKY

SEQ ID NO: 15158 - protein, 9 aa, synthetic construct
  REGION 1..9: note = PTB domain-containing engulfment adapter protein 1 (23-31)
HFIPYNAKF

SEQ ID NO: 15159 - protein, 9 aa, synthetic construct
  REGION 1..9: note = Squalene synthase (268-276)
HHIPDVITY

SEQ ID NO: 15160 - protein, 9 aa, synthetic construct
  REGION 1..9: note = CD109 antigen (1425-1433)
HHSSVIFIF

SEQ ID NO: 15161 - protein, 9 aa, synthetic construct
  REGION 1..9: note = Protein Churchill (92-100)
HHVIARHEY

SEQ ID NO: 15162 - protein, 9 aa, synthetic construct
  REGION 1..9: note = SUN domain-containing protein 1 (591-599)
HHVSVTKQL

SEQ ID NO: 15163 - protein, 9 aa, synthetic construct
  REGION 1..9: note = Huntingtin (895-903)
HHYTGLLKL

SEQ ID NO: 15164 - protein, 11 aa, synthetic construct
  REGION 1..11: note = DNA-directed RNA polymerase III subunit RPC1 (122-132)
HIDEQSGKEKY

SEQ ID NO: 15165 - protein, 12 aa, synthetic construct
  REGION 1..12: note = GPI transamidase component PIG-T (548-559)
HIEEPRTGGLAK

SEQ ID NO: 15166 - protein, 9 aa, synthetic construct
  REGION 1..9: note = Peroxisomal acyl-coenzyme A oxidase 1 (21-29)
HILDGSPEK

SEQ ID NO: 15167 - protein, 11 aa, synthetic construct
  REGION 1..11: note = Kinesin-like protein KIF20B (82-92)
HILDSQTVVLK

SEQ ID NO: 15168 - protein, 10 aa, synthetic construct
  REGION 1..10: note = Protein polybromo-1 (618-627)
HILEKLLKEK

SEQ ID NO: 15169 - protein, 9 aa, synthetic construct
  REGION 1..9: note = ADNP homeobox protein 2 (899-907)
HIMPTVHTV

SEQ ID NO: 15170 - protein, 9 aa, synthetic construct
  REGION 1..9: note = Cytoskeleton-associated protein 5 (447-455)
HINDSAPEV

SEQ ID NO: 15171 - protein, 10 aa, synthetic construct
  REGION 1..10: note = Tumor suppressor candidate 3 (250-259)
HIRGPPYAHK

SEQ ID NO: 15172 - protein, 9 aa, synthetic construct
  REGION 1..9: note = E3 ubiquitin-protein ligase pellino homolog 3 (110-118)
HISTPLVSK

SEQ ID NO: 15173 - protein, 9 aa, synthetic construct
  REGION 1..9: note = Death-associated protein kinase 3 (166-174)
HKIEAGNEF

SEQ ID NO: 15174 - protein, 9 aa, synthetic construct
  REGION 1..9: note = Alpha-actinin-4 (413-421)
HLAEKFRQK

SEQ ID NO: 15175 - protein, 9 aa, synthetic construct
  REGION 1..9: note = Synembryn-A (382-390)
HLDTDVKRV

SEQ ID NO: 15176 - protein, 9 aa, synthetic construct
  REGION 1..9: note = CAD protein (188-196)
HLFNVAHTL

SEQ ID NO: 15177 - protein, 10 aa, synthetic construct
  REGION 1..10: note = AP-5 complex subunit zeta-1 (1130-1139)
HLFSGHLSTL

SEQ ID NO: 15178 - protein, 10 aa, synthetic construct
  REGION 1..10: note = Proteasome inhibitor PI31 subunit (116-125)
HLGDFHRTYK

SEQ ID NO: 15179 - protein, 9 aa, synthetic construct
  REGION 1..9: note = Cytoplasmic FMR1-interacting protein 1 (638-646)
HLINFSETL

SEQ ID NO: 15180 - protein, 11 aa, synthetic construct
  REGION 1..11: note = Centromere protein H (132-142)
HLLELNKLIMK

SEQ ID NO: 15181 - protein, 9 aa, synthetic construct
  REGION 1..9: note = Solute carrier family 35 member C2 (289-297)
HLLGDQISL

SEQ ID NO: 15182 - protein, 9 aa, synthetic construct
  REGION 1..9: note = Rotatin (987-995)
HLPVHVIGH

SEQ ID NO: 15183 - protein, 9 aa, synthetic construct
  REGION 1..9: note = SAP30-binding protein (125-133)
HLQDKIQKL

SEQ ID NO: 15184 - protein, 11 aa, synthetic construct
  REGION 1..11: note = Collagen alpha-1(XV) chain (1257-1267)
HLQDLSTIVRK

SEQ ID NO: 15185 - protein, 9 aa, synthetic construct
  REGION 1..9: note = Small integral membrane protein 17 (92-100)
HLTIMVAVV

SEQ ID NO: 15186 - protein, 10 aa, synthetic construct
  REGION 1..10: note = Dysbindin (37-46)
HLVEKQLISK

SEQ ID NO: 15187 - protein, 9 aa, synthetic construct
  REGION 1..9: note = Zinc finger and BTB domain-containing protein 7B (252-260)
HLVPEVPTV

SEQ ID NO: 15188 - protein, 10 aa, synthetic construct
  REGION 1..10: note = Ubinuclein-1 (86-95)
HLYEQGGRLK

SEQ ID NO: 15189 - protein, 10 aa, synthetic construct
  REGION 1..10: note = Fructosamine-3-kinase (111-120)
HLYNQKLREK

SEQ ID NO: 15190 - protein, 10 aa, synthetic construct
  REGION 1..10: note = Cysteine-tRNA ligase, cytoplasmic (30-39)
HLYNSLTRNK

SEQ ID NO: 15191 - protein, 9 aa, synthetic construct
  REGION 1..9: note = Protein TANC1 (1825-1833)
HLYQESISK

SEQ ID NO: 15192 - protein, 9 aa, synthetic construct
  REGION 1..9: note = Importin-7 (406-414)
HMIGSLAEI

SEQ ID NO: 15193 - protein, 11 aa, synthetic construct
  REGION 1..11: note = ATP-dependent RNA helicase DDX18 (255-265)
HMQNTPGFMYK

SEQ ID NO: 15194 - protein, 9 aa, synthetic construct
  REGION 1..9: note = Proline-rich protein 11 (150-158)
HMSGKLTNV

SEQ ID NO: 15195 - protein, 9 aa, synthetic construct
  REGION 1..9: note = Protein CutA (98-106)
HPYEVAEVI

SEQ ID NO: 15196 - protein, 9 aa, synthetic construct
  REGION 1..9: note = Cyclic AMP-dependent transcription factor ATF-6 beta (691-699)
HQASHQPLY

SEQ ID NO: 15197 - protein, 9 aa, synthetic construct
  REGION 1..9: note = NUAK family SNF1-like kinase 2 (201-209)
HQGKFLQTF

SEQ ID NO: 15198 - protein, 9 aa, synthetic construct
  REGION 1..9: note = Golgi resident protein GCP60 (496-504)
HQYPGRGVY

SEQ ID NO: 15199 - protein, 9 aa, synthetic construct
  REGION 1..9: note = Major prion protein (148-156)
HRYPNQVYY

SEQ ID NO: 15200 - protein, 9 aa, synthetic construct
  REGION 1..9: note = STAGA complex 65 subunit gamma (129-137)
HSDPESDFY

SEQ ID NO: 15201 - protein, 9 aa, synthetic construct
  REGION 1..9: note = Histone-lysine N-methyltransferase NSD3 (877-885)
HSDPMFSSY

SEQ ID NO: 15202 - protein, 10 aa, synthetic construct
  REGION 1..10: note = Protein FAM135A (1394-1403)
HSDPRQTFLY

SEQ ID NO: 15203 - protein, 9 aa, synthetic construct
  REGION 1..9: note = PERQ amino acid-rich with GYF domain-containing protein 1 (731-739)
HSDPSILGY

SEQ ID NO: 15204 - protein, 9 aa, synthetic construct
  REGION 1..9: note = NAD(P)H dehydrogenase (quinone) 1 (9-17)
HSERTSFNY

SEQ ID NO: 15205 - protein, 11 aa, synthetic construct
  REGION 1..11: note = Heterogeneous nuclear ribonucleoproteins A2/B1 (72-82)
HSIDGRVVEPK

SEQ ID NO: 15206 - protein, 10 aa, synthetic construct
  REGION 1..10: note = Rho-related BTB domain-containing protein 3 (176-185)
HSLDDFYIGK

SEQ ID NO: 15207 - protein, 9 aa, synthetic construct
  REGION 1..9: note = Cytochrome c1, heme protein, mitochondrial (27-35)
HSMDFVAYR

SEQ ID NO: 15208 - protein, 9 aa, synthetic construct
  REGION 1..9: note = FUN14 domain-containing protein 1 (39-47)
HSSGPMVEK

SEQ ID NO: 15209 - protein, 9 aa, synthetic construct
  REGION 1..9: note = Isocitrate dehydrogenase (NAD) subunit gamma, mitochondrial (342-350)
HSYATSIRK

SEQ ID NO: 15210 - protein, 9 aa, synthetic construct
  REGION 1..9: note = KAT8 regulatory NSL complex subunit 1 (802-810)
HTDMSSSSY

SEQ ID NO: 15211 - protein, 10 aa, synthetic construct
  REGION 1..10: note = Histone-lysine N-methyltransferase SETD1A (230-239)
HTITNLTTPK

SEQ ID NO: 15212 - protein, 11 aa, synthetic construct
  REGION 1..11: note = DNA damage-binding protein 2 (96-106)
HTLDSYRILQK

SEQ ID NO: 15213 - protein, 9 aa, synthetic construct
  REGION 1..9: note = Transmembraneoprotein NMB (178-186)
HTLGQYFQK

SEQ ID NO: 15214 - protein, 9 aa, synthetic construct
  REGION 1..9: note = Necdin (95-103)
HTMEFALVK

SEQ ID NO: 15215 - protein, 9 aa, synthetic construct
  REGION 1..9: note = Integrin beta-5 (781-789)
HTVDFTFNK

SEQ ID NO: 15216 - protein, 9 aa, synthetic construct
  REGION 1..9: note = Histone-lysine N-methyltransferase 2A (25-33)
HVDQDLTTY

SEQ ID NO: 15217 - protein, 9 aa, synthetic construct
  REGION 1..9: note = Adapter protein CIKS (72-80)
HVYSWPKNK

SEQ ID NO: 15218 - protein, 9 aa, synthetic construct
  REGION 1..9: note = KN motif and ankyrin repeat domain-containing protein 1 (825-833)
HYIERIQKL

SEQ ID NO: 15219 - protein, 9 aa, synthetic construct
  REGION 1..9: note = Astrotactin-2 (291-299)
HYNSHYEKF

SEQ ID NO: 15220 - protein, 9 aa, synthetic construct
  REGION 1..9: note = Tensin-1 (1660-1668)
HYPLNTVTF

SEQ ID NO: 15221 - protein, 9 aa, synthetic construct
  REGION 1..9: note = Kelch-like protein 15 (472-480)
HYSDSILTF

SEQ ID NO: 15222 - protein, 9 aa, synthetic construct
  REGION 1..9: note = ATP-dependent RNA helicase DHX36 (726-734)
IADARRKEL

SEQ ID NO: 15223 - protein, 10 aa, synthetic construct
  REGION 1..10: note = Small ubiquitin-related modifier 1 (46-55)
IADNHTPKEL

SEQ ID NO: 15224 - protein, 9 aa, synthetic construct
  REGION 1..9: note = Sarcoplasmic/endoplasmic reticulum calcium ATPase 1 (718-726)
IAMGSGTAV

SEQ ID NO: 15225 - protein, 10 aa, synthetic construct
  REGION 1..10: note = DNA-directed RNA polymerase I subunit RPA1 (1631-1640)
IAVDPRHLSL

SEQ ID NO: 15226 - protein, 9 aa, synthetic construct
  REGION 1..9: note = Derlin-3 (176-184)
IAVGHIYYF

SEQ ID NO: 15227 - protein, 11 aa, synthetic construct
  REGION 1..11: note = CD99 antigen (129-139)
IAYQKKKLCFK

SEQ ID NO: 15228 - protein, 9 aa, synthetic construct
  REGION 1..9: note Dolichyl-diphosphooligosaccharide-proteinosyltransferase subunit 1 (381-389)
IEIDSPYEI

SEQ ID NO: 15229 - protein, 9 aa, synthetic construct
  REGION 1..9: note = NEDD8-activating enzyme E1 regulatory subunit (166-174)
IESHPDNAL

SEQ ID NO: 15230 - protein, 9 aa, synthetic construct
  REGION 1..9: note = Splicing factor 3A subunit 1 (762-770)
IFIKDSNSL

SEQ ID NO: 15231 - protein, 9 aa, synthetic construct
  REGION 1..9: note = Retinoic acid receptor RXR-gamma (443-451)
IGDTPIDTF

SEQ ID NO: 15232 - protein, 9 aa, synthetic construct
  REGION 1..9: note = C-myc promoter-binding protein (1082-1090)
IGKPPLRSK

SEQ ID NO: 15233 - protein, 9 aa, synthetic construct
  REGION 1..9: note = Serine/threonine-protein kinase tousled-like 2 (421-429)
IHNEDNSQF

SEQ ID NO: 15234 - protein, 9 aa, synthetic construct
  REGION 1..9: note = Exportin-2 (769-777)
IIIPEIQKV

SEQ ID NO: 15235 - protein, 9 aa, synthetic construct
  REGION 1..9: note = Cytoplasmic dynein 1 heavy chain 1 (201-209)
IITKDLFQV

SEQ ID NO: 15236 - protein, 9 aa, synthetic construct
  REGION 1..9: note = Renin receptor (326-334)
IIYRMTNQK

SEQ ID NO: 15237 - protein, 13 aa, synthetic construct
  REGION 1..13: note = Putative heat shock 70 kDa protein 7 (30-42)
ILANDQGNRTTPS

SEQ ID NO: 15238 - protein, 9 aa, synthetic construct
  REGION 1..9: note = Very-long-chain enoyl-CoA reductase (8-16)
ILDAKTREK

SEQ ID NO: 15239 - protein, 11 aa, synthetic construct
  REGION 1..11: note = Ribosome-binding protein 1 (545-555)
ILEDEQTQRQK

SEQ ID NO: 15240 - protein, 10 aa, synthetic construct
  REGION 1..10: note = 60S ribosomal protein L19 (118-127)
ILMEHIHKLK

SEQ ID NO: 15241 - protein, 9 aa, synthetic construct
  REGION 1..9: note = Chromobox protein homolog 6 (175-183)
ILNLKVIDK

SEQ ID NO: 15242 - protein, 10 aa, synthetic construct
  REGION 1..10: note = A-kinase anchor protein 8-like (468-477)
ILNNKLISKK

SEQ ID NO: 15243 - protein, 12 aa, synthetic construct
  REGION 1..12: note = Replication factor C subunit 3 (55-66)
ILRELYGVGVEK

SEQ ID NO: 15244 - protein, 11 aa, synthetic construct
  REGION 1..11: note = Beta-crystallin B2 (110-120)
ILYENPNFTGK

SEQ ID NO: 15245 - protein, 12 aa, synthetic construct
  REGION 1..12: note = Discoidin, CUB and LCCL domain-containing protein 2 (337-348)
ILYSDDGQKWTV

SEQ ID NO: 15246 - protein, 9 aa, synthetic construct
  REGION 1..9: note = Tight junction protein ZO-1 (1314-1322)
IPEPQKPQL

SEQ ID NO: 15247 - protein, 9 aa, synthetic construct
  REGION 1..9: note = Histone H2A.V (85-93)
IPHIHKSLI

SEQ ID NO: 15248 - protein, 9 aa, synthetic construct
  REGION 1..9: note = Msx2-interacting protein (466-474)
IPIPTLPSV

SEQ ID NO: 15249 - protein, 9 aa, synthetic construct
  REGION 1..9: note = Histone-lysine N-methyltransferase 2E (370-378)
IPKGTEITI

SEQ ID NO: 15250 - protein, 9 aa, synthetic construct
  REGION 1..9: note = E3 ubiquitin-protein ligase UBR4 (92-100)
IPRNQLQSV

SEQ ID NO: 15251 - protein, 9 aa, synthetic construct
  REGION 1..9: note = Nucleoporin GLE1 (428-436)
IPVSQISTI

SEQ ID NO: 15252 - protein, 9 aa, synthetic construct
  REGION 1..9: note = ER membrane protein complex subunit 1 (895-903)
IPYSPDVQI

SEQ ID NO: 15253 - protein, 11 aa, synthetic construct
  REGION 1..11: note = Elongator complex protein 6 (249-259)
IQDKSVSFFAK

SEQ ID NO: 15254 - protein, 9 aa, synthetic construct
  REGION 1..9: note = GPI transamidase component PIG-T (440-448)
IQFERALLK

SEQ ID NO: 15255 - protein, 10 aa, synthetic construct
  REGION 1..10: note = Kelch domain-containing protein 2 (308-317)
IQFNHPYTEK

SEQ ID NO: 15256 - protein, 9 aa, synthetic construct
  REGION 1..9: note = Helicase with zinc finger domain 2 (2172-2180)
IQGPPGTGK

SEQ ID NO: 15257 - protein, 9 aa, synthetic construct
  REGION 1..9: note = Large proline-rich protein BAG6 (377-385)
IQINVGTTV

SEQ ID NO: 15258 - protein, 10 aa, synthetic construct
  REGION 1..10: note = Focadhesin (263-272)
IQLTQMSLQL

SEQ ID NO: 15259 - protein, 12 aa, synthetic construct
  REGION 1..12: note = Beta-2-microglobulin (21-32)
IQRTPKIQVYSR

SEQ ID NO: 15260 - protein, 10 aa, synthetic construct
  REGION 1..10: note = 26S proteasome non-ATPase regulatory subunit 7 (266-275)
IRSVVALHNL

SEQ ID NO: 15261 - protein, 9 aa, synthetic construct
  REGION 1..9: note = Kinesin-like protein KIF20B (1684-1692)
ISDDRNSSV

SEQ ID NO: 15262 - protein, 9 aa, synthetic construct
  REGION 1..9: note = Sperm-specific antigen 2 (226-234)
ISDEANSNF

SEQ ID NO: 15263 - protein, 9 aa, synthetic construct
  REGION 1..9: note = Lysosome-associated membraneoprotein 2 (66-74)
ISDHGTVTY

SEQ ID NO: 15264 - protein, 9 aa, synthetic construct
  REGION 1..9: note Dolichyl-diphosphooligosaccharide-proteinosyltransferase 48 kDa subunit (164-172)
ISDLGQHTL

SEQ ID NO: 15265 - protein, 9 aa, synthetic construct
  REGION 1..9: note = Dynamin-1-like protein (174-182)
ISNPNSIIL

SEQ ID NO: 15266 - protein, 9 aa, synthetic construct
  REGION 1..9: note = HEAT repeat-containing protein 1 (915-923)
ISSPVVTSL

SEQ ID NO: 15267 - protein, 11 aa, synthetic construct
  REGION 1..11: note = UBAP1-MVB12-associated (UMA)-domain containing protein 1 isoform b (69-79)
ITDLPDHLLSY

SEQ ID NO: 15268 - protein, 9 aa, synthetic construct
  REGION 1..9: note = U4/U6.U5 tri-snRNP-associated protein 2 (264-272)
ITEKEYKTY

SEQ ID NO: 15269 - protein, 10 aa, synthetic construct
  REGION 1..10: note = T-complex protein 1 subunit delta (70-79)
ITNDGATILK

SEQ ID NO: 15270 - protein, 11 aa, synthetic construct
  REGION 1..11: note = Cytoplasmic dynein 2 heavy chain 1 (74-84)
ITYESPPGLKK

SEQ ID NO: 15271 - protein, 11 aa, synthetic construct
  REGION 1..11: note = Isocitrate dehydrogenase (NADP) cytoplasmic (55-65)
ITYTPSDGTQK

SEQ ID NO: 15272 - protein, 9 aa, synthetic construct
  REGION 1..9: note = ATP-binding cassette sub-family F member 1 (656-664)
IVGPNGVGK

SEQ ID NO: 15273 - protein, 13 aa, synthetic construct
  REGION 1..13: note = Glia-derived nexin (119-131)
IVTVANAVFVKNA

SEQ ID NO: 15274 - protein, 10 aa, synthetic construct
  REGION 1..10: note = Protein enabled homolog (37-46)
IYHHTGNNTF

SEQ ID NO: 15275 - protein, 9 aa, synthetic construct
  REGION 1..9: note = Vacuolar protein sorting-associated protein 13C (1267-1275)
IYHPDIQLL

SEQ ID NO: 15276 - protein, 9 aa, synthetic construct
  REGION 1..9: note = Calpain-5 (449-457)
IYINSRSVF

SEQ ID NO: 15277 - protein, 9 aa, synthetic construct
  REGION 1..9: note = Cyclin E variant ex7del (19-27)
IYPPKLHQF

SEQ ID NO: 15278 - protein, 9 aa, synthetic construct
  REGION 1..9: note = BTB/POZ domain-containing protein 10 (83-91)
IYSTKLYRF

SEQ ID NO: 15279 - protein, 10 aa, synthetic construct
  REGION 1..10: note = Beta-soluble NSF attachment protein (71-80)
IYTDMGRFTI

SEQ ID NO: 15280 - protein, 9 aa, synthetic construct
  REGION 1..9: note = WD repeat-containing protein 1 (53-61)
IYTEHAHQV

SEQ ID NO: 15281 - protein, 9 aa, synthetic construct
  REGION 1..9: note = SMC5-SMC6 complex localization factor protein 2 (149-157)
IYVPSSYHL

SEQ ID NO: 15282 - protein, 11 aa, synthetic construct
  REGION 1..11: note = WW domain-binding protein 2 (229-239)
KAAEAAASAYY

SEQ ID NO: 15283 - protein, 9 aa, synthetic construct
  REGION 1..9: note = 40S ribosomal protein S17 (11-19)
KAARVIIEK

SEQ ID NO: 15284 - protein, 9 aa, synthetic construct
  REGION 1..9: note = F-box/WD repeat-containing protein 8 (325-333)
KAEDSARTL

SEQ ID NO: 15285 - protein, 12 aa, synthetic construct
  REGION 1..12: note = Vacuolar fusion protein CCZ1 homolog (154-165)
KAMEDGGVKLLK

SEQ ID NO: 15286 - protein, 9 aa, synthetic construct
  REGION 1..9: note = Ceramide synthase 2 (35-43)
KASDLYITL

SEQ ID NO: 15287 - protein, 9 aa, synthetic construct
  REGION 1..9: note = Vacuolar protein sorting-associated protein 11 homolog (811-819)
KASPKIFQK

SEQ ID NO: 15288 - protein, 9 aa, synthetic construct
  REGION 1..9: note = 60S ribosomal protein L4 (175-183)
KAWNDIKKV

SEQ ID NO: 15289 - protein, 11 aa, synthetic construct
  REGION 1..11: note = Replication protein A 70 kDa DNA-binding subunit (157-167)
KAYGASKTFGK

SEQ ID NO: 15290 - protein, 12 aa, synthetic construct
  REGION 1..12: note = NHP2-like protein 1 (9-20)
KAYPLADAHLTK

SEQ ID NO: 15291 - protein, 9 aa, synthetic construct
  REGION 1..9: note = WD repeat-containing protein WRAP73 (276-284)
KEAEKSPQL

SEQ ID NO: 15292 - protein, 10 aa, synthetic construct
  REGION 1..10: note = Kinesin-like protein KIF20A (425-434)
KEAGNINTSL

SEQ ID NO: 15293 - protein, 10 aa, synthetic construct
  REGION 1..10: note = Golgin subfamily B member 1 (533-542)
KEAQEEIAFL

SEQ ID NO: 15294 - protein, 10 aa, synthetic construct
  REGION 1..10: note = Transmembrane protein 165 (82-91)
KEDPATQTNL

SEQ ID NO: 15295 - protein, 9 aa, synthetic construct
  REGION 1..9: note = Zinc finger protein AEBP2 (439-447)
KEDSGKIKL

SEQ ID NO: 15296 - protein, 9 aa, synthetic construct
  REGION 1..9: note = Charged multivesicular body protein 4a (192-200)
KEEEPSVKL

SEQ ID NO: 15297 - protein, 9 aa, synthetic construct
  REGION 1..9: note = E3 ubiquitin-protein ligase makorin-1 (351-359)
KEEKQKLIL

SEQ ID NO: 15298 - protein, 9 aa, synthetic construct
  REGION 1..9: note = DNA topoisomerase I, mitochondrial (544-552)
KEENKQVAL

SEQ ID NO: 15299 - protein, 11 aa, synthetic construct
  REGION 1..11: note = DNA damage-binding protein 1 (287-297)
KEEQMDGTVTL

SEQ ID NO: 15300 - protein, 10 aa, synthetic construct
  REGION 1..10: note = TATA element modulatory factor (490-499)
KEESSSISSL

SEQ ID NO: 15301 - protein, 9 aa, synthetic construct
  REGION 1..9: note = Transcriptional adapter 3 (372-380)
KEEVSRQEL

SEQ ID NO: 15302 - protein, 9 aa, synthetic construct
  REGION 1..9: note = Peptidyl-prolyl cis-trans isomerase-like 2 (4-12)
KEFKGDEIL

SEQ ID NO: 15303 - protein, 10 aa, synthetic construct
  REGION 1..10: note = Protein transport protein Sec31A (436-445)
KEFLSRSDQL

SEQ ID NO: 15304 - protein, 9 aa, synthetic construct
  REGION 1..9: note = Heterogeneous nuclear ribonucleoprotein Q (66-74)
KEFNEDGAL

SEQ ID NO: 15305 - protein, 9 aa, synthetic construct
  REGION 1..9: note = CUGBP Elav-like family member 2 (417-425)
KEGPEGANL

SEQ ID NO: 15306 - protein, 9 aa, synthetic construct
  REGION 1..9: note = Nuclear nucleic acid-binding protein C1D (79-87)
KEHPVKQEL

SEQ ID NO: 15307 - protein, 10 aa, synthetic construct
  REGION 1..10: note = Trafficking kinesin-binding protein 2 (299-308)
KEHVIEKEEL

SEQ ID NO: 15308 - protein, 11 aa, synthetic construct
  REGION 1..11: note = HEAT repeat-containing protein 1 (449-459)
KEIADLKKQEL

SEQ ID NO: 15309 - protein, 10 aa, synthetic construct
  REGION 1..10: note = Serine palmitoyltransferase 2 (526-535)
KEIDEVGDLL

SEQ ID NO: 15310 - protein, 10 aa, synthetic construct
  REGION 1..10: note = (Pyruvate dehydrogenase (acetyl-transferring)) kinase isozyme 4, mitochondrial (34-43)
KEIDILPTQL

SEQ ID NO: 15311 - protein, 11 aa, synthetic construct
  REGION 1..11: note = Cytochrome b-c1 complex subunit Rieske, mitochondrial (182-192)
KEIEQEAAVEL

SEQ ID NO: 15312 - protein, 11 aa, synthetic construct
  REGION 1..11: note = 40S ribosomal protein S7 (47-57)
KEIEVGGGRKA

SEQ ID NO: 15313 - protein, 9 aa, synthetic construct
  REGION 1..9: note = RuvB-like 1 (172-180)
KEIIQDVTL

SEQ ID NO: 15314 - protein, 10 aa, synthetic construct
  REGION 1..10: note = Structural maintenance of chromosomes protein 4 (263-272)
KEINEKSNIL

SEQ ID NO: 15315 - protein, 10 aa, synthetic construct
  REGION 1..10: note = Deoxynucleotidyltransferase terminal-interacting protein 2 (311-320)
KEINEKSSQL

SEQ ID NO: 15316 - protein, 9 aa, synthetic construct
  REGION 1..9: note = Protein bicaudal D homolog 2 (150-158)
KEINQNVEI

SEQ ID NO: 15317 - protein, 9 aa, synthetic construct
  REGION 1..9: note = Nibrin (635-643)
KEISNNDKL

SEQ ID NO: 15318 - protein, 11 aa, synthetic construct
  REGION 1..11: note = SNW domain-containing protein 1 (141-151)
KEITEKTRVAL

SEQ ID NO: 15319 - protein, 9 aa, synthetic construct
  REGION 1..9: note = Sperm-associated antigen 5 (893-901)
KEKTEQETL

SEQ ID NO: 15320 - protein, 10 aa, synthetic construct
  REGION 1..10: note = Microfibrillar-associated protein 1 (250-259)
KELEENKRSL

SEQ ID NO: 15321 - protein, 9 aa, synthetic construct
  REGION 1..9: note = LYR motif-containing protein 2 (77-85)
KELEKTLAL

SEQ ID NO: 15322 - protein, 10 aa, synthetic construct
  REGION 1..10: note = Prefoldin subunit 1 (92-101)
KELEQKKSYL

SEQ ID NO: 15323 - protein, 10 aa, synthetic construct
  REGION 1..10: note = Developmentally-regulated GTP-binding protein 2 (161-170)
KELESVGIRL

SEQ ID NO: 15324 - protein, 10 aa, synthetic construct
  REGION 1..10: note = Ancient ubiquitous protein 1 (250-259)
KELGQTGTRL

SEQ ID NO: 15325 - protein, 10 aa, synthetic construct
  REGION 1..10: note = U2 small nuclear ribonucleoprotein B'' (57-66)
KELGSSTNAL

SEQ ID NO: 15326 - protein, 10 aa, synthetic construct
  REGION 1..10: note = TSC22 domain family protein 1 (1011-1020)
KELIEKNSQL

SEQ ID NO: 15327 - protein, 10 aa, synthetic construct
  REGION 1..10: note = Bifunctional 3'-phosphoadenosine 5'-phosphosulfate synthase 1 (235-244)
KELYVPENKL

SEQ ID NO: 15328 - protein, 11 aa, synthetic construct
  REGION 1..11: note = Polymerase I and transcript release factor (170-180)
KENLEKTRHTL

SEQ ID NO: 15329 - protein, 9 aa, synthetic construct
  REGION 1..9: note = SCY1-like protein 2 (264-272)
KEQEQAQKL

SEQ ID NO: 15330 - protein, 10 aa, synthetic construct
  REGION 1..10: note = Corepressor interacting with RBPJ 1 (48-57)
KEQESYDNRL

SEQ ID NO: 15331 - protein, 9 aa, synthetic construct
  REGION 1..9: note = Kinesin-like protein (323-331)
KEQITISQL

SEQ ID NO: 15332 - protein, 10 aa, synthetic construct
  REGION 1..10: note = Catenin alpha-1 (81-90)
KESQFLKEEL

SEQ ID NO: 15333 - protein, 9 aa, synthetic construct
  REGION 1..9: note = General transcription factor II-I repeat domain-containing protein 1 (343-351)
KETEDINTL

SEQ ID NO: 15334 - protein, 9 aa, synthetic construct
  REGION 1..9: note = Endothelial PAS domain-containing protein 1 (29-37)
KETEVFYEL

SEQ ID NO: 15335 - protein, 11 aa, synthetic construct
  REGION 1..11: note = Activator of 90 kDa heat shock protein ATPase homolog 1 (136-146)
KETFLTSPEEL

SEQ ID NO: 15336 - protein, 9 aa, synthetic construct
  REGION 1..9: note = Double-strand-break repair protein rad21 homolog (364-372)
KETGGVEKL

SEQ ID NO: 15337 - protein, 10 aa, synthetic construct
  REGION 1..10: note = Transcription factor BTF3 (46-55)
KETIMNQEKL

SEQ ID NO: 15338 - protein, 9 aa, synthetic construct
  REGION 1..9: note = RNA-binding protein PNO1 (122-130)
KETKDVSAL

SEQ ID NO: 15339 - protein, 9 aa, synthetic construct
  REGION 1..9: note = Spectrin beta chain, non-erythrocytic 1 (832-840)
KEVAELTRL

SEQ ID NO: 15340 - protein, 10 aa, synthetic construct
  REGION 1..10: note = Sequestosome-1 (324-333)
KEVDPSTGEL

SEQ ID NO: 15341 - protein, 10 aa, synthetic construct
  REGION 1..10: note = Vacuolar protein sorting-associated protein 52 homolog (10-19)
KEVESFQQLL

SEQ ID NO: 15342 - protein, 10 aa, synthetic construct
  REGION 1..10: note = Sodium/potassium-transporting ATPase subunit alpha-1 (37-46)
KEVSMDDHKL

SEQ ID NO: 15343 - protein, 11 aa, synthetic construct
  REGION 1..11: note = Actin-related protein 5 (555-565)
KEYEEKGGEYL

SEQ ID NO: 15344 - protein, 9 aa, synthetic construct
  REGION 1..9: note = Erythrocyte band 7 integral membrane protein (58-66)
KEYERAIIF

SEQ ID NO: 15345 - protein, 9 aa, synthetic construct
  REGION 1..9: note = Son of sevenless homolog 1 (679-687)
KEYIQPVQL

SEQ ID NO: 15346 - protein, 9 aa, synthetic construct
  REGION 1..9: note = Ran-binding protein 17 (349-357)
KEYPEVIRL

SEQ ID NO: 15347 - protein, 12 aa, synthetic construct
  REGION 1..12: note = Intermediate filament family orphan 2 (103-114)
KEYQETIGQIEL

SEQ ID NO: 15348 - protein, 9 aa, synthetic construct
  REGION 1..9: note = Mitochondrial ubiquitin ligase activator of NFKB 1 (158-166)
KFHPSIQSF

SEQ ID NO: 15349 - protein, 10 aa, synthetic construct
  REGION 1..10: note = Structural maintenance of chromosomes protein 4 (295-304)
KFIEENKEKF

SEQ ID NO: 15350 - protein, 9 aa, synthetic construct
  REGION 1..9: note = NADH dehydrogenase (ubiquinone) 1 alpha subcomplex subunit 12 (107-115)
KFIWTNHKF

SEQ ID NO: 15351 - protein, 9 aa, synthetic construct
  REGION 1..9: note = Kelch domain-containing protein 3 (136-144)
KFNPVSFTW

SEQ ID NO: 15352 - protein, 9 aa, synthetic construct
  REGION 1..9: note = Bromodomain and WD repeat-containing protein 1 (309-317)
KFSPRPLKF

SEQ ID NO: 15353 - protein, 9 aa, synthetic construct
  REGION 1..9: note = Protein SHQ1 homolog (255-263)
KFVNKSYLL

SEQ ID NO: 15354 - protein, 9 aa, synthetic construct
  REGION 1..9: note = Tyrosine-protein phosphatase non-receptor type 9 (176-184)
KGAFPARLK

SEQ ID NO: 15355 - protein, 9 aa, synthetic construct
  REGION 1..9: note = Protein SCAF8 (528-536)
KGLPPIRSK

SEQ ID NO: 15356 - protein, 9 aa, synthetic construct
  REGION 1..9: note = BTB/POZ domain-containing adapter for CUL3-mediated RhoA degradation protein 2 (78-86)
KHFGTILNY

SEQ ID NO: 15357 - protein, 9 aa, synthetic construct
  REGION 1..9: note = Hsp90 co-chaperone Cdc37 (147-155)
KHKTFVEKY

SEQ ID NO: 15358 - protein, 9 aa, synthetic construct
  REGION 1..9: note = Transcription intermediary factor 1-beta (340-348)
KHQEHILRF

SEQ ID NO: 15359 - protein, 9 aa, synthetic construct
  REGION 1..9: note = Proliferating cell nuclear antigen (240-248)
KIADMGHLK

SEQ ID NO: 15360 - protein, 9 aa, synthetic construct
  REGION 1..9: note = Ubiquitin-conjugating enzyme E2 G2 (125-133)
KIAKQIVQK

SEQ ID NO: 15361 - protein, 9 aa, synthetic construct
  REGION 1..9: note = Signal peptidase complex subunit 2 (40-48)
KIDDKPVKI

SEQ ID NO: 15362 - protein, 9 aa, synthetic construct
  REGION 1..9: note = T-box transcription factor TBX3 (273-281)
KIDNNPFAK

SEQ ID NO: 15363 - protein, 9 aa, synthetic construct
  REGION 1..9: note = Myeloid leukemia factor 1 (90-98)
KIGDEPPKV

SEQ ID NO: 15364 - protein, 9 aa, synthetic construct
  REGION 1..9: note = Ras GTPase-activating-like protein IQGAP1 (916-924)
KIGLLVKNK

SEQ ID NO: 15365 - protein, 11 aa, synthetic construct
  REGION 1..11: note = Replication factor C subunit 1 (468-478)
KIIDEDGLLNL

SEQ ID NO: 15366 - protein, 9 aa, synthetic construct
  REGION 1..9: note = Nucleoprotein TPR (1420-1428)
KIIDIQEKV

SEQ ID NO: 15367 - protein, 9 aa, synthetic construct
  REGION 1..9: note = Importin-8 (102-110)
KILDQYRQK

SEQ ID NO: 15368 - protein, 11 aa, synthetic construct
  REGION 1..11: note = Sorting nexin-14 (635-645)
KILPDVNLGKI

SEQ ID NO: 15369 - protein, 9 aa, synthetic construct
  REGION 1..9: note = V-type proton ATPase subunit E 2 (52-60)
KIMEYYEKK

SEQ ID NO: 15370 - protein, 9 aa, synthetic construct
  REGION 1..9: note = Heat shock protein HSP 90-alpha (389-397)
KIMKDILEK

SEQ ID NO: 15371 - protein, 9 aa, synthetic construct
  REGION 1..9: note = Calcium-independent phospholipase A2-gamma (789-797)
KINDWIKLK

SEQ ID NO: 15372 - protein, 9 aa, synthetic construct
  REGION 1..9: note = Heterogeneous nuclear ribonucleoprotein U-like protein 1 (262-270)
KINEEISVK

SEQ ID NO: 15373 - protein, 10 aa, synthetic construct
  REGION 1..10: note = UDP-glucose:glycoprotein glucosyltransferase 2 (148-157)
KINEIKKLLK

SEQ ID NO: 15374 - protein, 10 aa, synthetic construct
  REGION 1..10: note = Serine/threonine-protein phosphatase 4 regulatory subunit 3B (55-64)
KINPNTAYQK

SEQ ID NO: 15375 - protein, 10 aa, synthetic construct
  REGION 1..10: note = Oral-facial-digital syndrome 1 protein (116-125)
KINPTSSLYK

SEQ ID NO: 15376 - protein, 9 aa, synthetic construct
  REGION 1..9: note = Poly(A) polymerase alpha (641-649)
KIPTPIVGV

SEQ ID NO: 15377 - protein, 9 aa, synthetic construct
  REGION 1..9: note = Prefoldin subunit 5 (129-137)
KIQPALQEK

SEQ ID NO: 15378 - protein, 12 aa, synthetic construct
  REGION 1..12: note = Oxysterol-binding protein-related protein 9 (687-698)
KIRDIDAATEAK

SEQ ID NO: 15379 - protein, 9 aa, synthetic construct
  REGION 1..9: note = Protein IMPACT (108-116)
KIRDVLIQK

SEQ ID NO: 15380 - protein, 10 aa, synthetic construct
  REGION 1..10: note = Proto-oncogene tyrosine-protein kinase receptor Ret (156-165)
KIREYEQTLK

SEQ ID NO: 15381 - protein, 10 aa, synthetic construct
  REGION 1..10: note = Heat shock factor protein 1 (131-140)
KIRQDSVTKL

SEQ ID NO: 15382 - protein, 12 aa, synthetic construct
  REGION 1..12: note = PDZ domain-containing RING finger protein 4 (443-454)
KIRSDGTRYITK

SEQ ID NO: 15383 - protein, 11 aa, synthetic construct
  REGION 1..11: note = Insulin-like growth factor I (3-13)
KISSLPTQLFK

SEQ ID NO: 15384 - protein, 9 aa, synthetic construct
  REGION 1..9: note = Importin-7 (419-427)
KIYKDQMEY

SEQ ID NO: 15385 - protein, 9 aa, synthetic construct
  REGION 1..9: note = Mothers against decapentaplegic homolog 4 (428-436)
KIYPSAYIK

SEQ ID NO: 15386 - protein, 9 aa, synthetic construct
  REGION 1..9: note = RING finger protein 113A (151-159)
KIYRGINNY

SEQ ID NO: 15387 - protein, 10 aa, synthetic construct
  REGION 1..10: note = Prefoldin subunit 1 (28-37)
KLADIQIEQL

SEQ ID NO: 15388 - protein, 12 aa, synthetic construct
  REGION 1..12: note = DNA topoisomerase 2-alpha (976-987)
KLAEAERVGLHK

SEQ ID NO: 15389 - protein, 9 aa, synthetic construct
  REGION 1..9: note = Retinoblastoma-like protein 1 (329-337)
KLAEILYYK

SEQ ID NO: 15390 - protein, 9 aa, synthetic construct
  REGION 1..9: note = Neuron navigator 3 (940-948)
KLAEYVITK

SEQ ID NO: 15391 - protein, 11 aa, synthetic construct
  REGION 1..11: note = Protein PRR14L (1625-1635)
KLAPAMKTQKL

SEQ ID NO: 15392 - protein, 9 aa, synthetic construct
  REGION 1..9: note = Ubiquitin-40S ribosomal protein S27a (95-103)
KLAVLKYYK

SEQ ID NO: 15393 - protein, 10 aa, synthetic construct
  REGION 1..10: note = Disco-interacting protein 2 homolog A (376-385)
KLAYTLLNKL

SEQ ID NO: 15394 - protein, 9 aa, synthetic construct
  REGION 1..9: note = Conserved oligomeric Golgi complex subunit 3 (394-402)
KLDELLEKL

SEQ ID NO: 15395 - protein, 10 aa, synthetic construct
  REGION 1..10: note = REST corepressor 1 (145-154)
KLDEYIAIAK

SEQ ID NO: 15396 - protein, 10 aa, synthetic construct
  REGION 1..10: note = 40S ribosomal protein S7 (145-154)
KLDGSRLIKV

SEQ ID NO: 15397 - protein, 9 aa, synthetic construct
  REGION 1..9: note = CASP8-associated protein 2 (343-351)
KLDKNPNQV

SEQ ID NO: 15398 - protein, 9 aa, synthetic construct
  REGION 1..9: note = Cysteine and histidine-rich protein 1 (100-108)
KLEERLYSV

SEQ ID NO: 15399 - protein, 9 aa, synthetic construct
  REGION 1..9: note = Glutathione S-transferase omega-1 (152-160)
KLEEVLTNK

SEQ ID NO: 15400 - protein, 11 aa, synthetic construct
  REGION 1..11: note = Thioredoxin domain-containing protein 5 (32-42)
KLFKPGQEAVK

SEQ ID NO: 15401 - protein, 11 aa, synthetic construct
  REGION 1..11: note = Mitotic checkpoint serine/threonine-protein kinase BUB1 (954-964)
KLFPKGTIFTA

SEQ ID NO: 15402 - protein, 9 aa, synthetic construct
  REGION 1..9: note = Vacuolar protein sorting-associated protein 11 homolog (687-695)
KLFQQIMHY

SEQ ID NO: 15403 - protein, 13 aa, synthetic construct
  REGION 1..13: note = YEATS domain-containing protein 4 (115-127)
KLFQSDTNAMLGK

SEQ ID NO: 15404 - protein, 9 aa, synthetic construct
  REGION 1..9: note = Peroxisomal acyl-coenzyme A oxidase 1 (537-545)
KLFSEKLLK

SEQ ID NO: 15405 - protein, 11 aa, synthetic construct
  REGION 1..11: note = 28S ribosomal protein S33, mitochondrial (35-45)
KLFSELPLAKK

SEQ ID NO: 15406 - protein, 9 aa, synthetic construct
  REGION 1..9: note = BAH and coiled-coil domain-containing protein 1 (52-60)
KLFYKAIVR

SEQ ID NO: 15407 - protein, 10 aa, synthetic construct
  REGION 1..10: note = Nucleolar protein 58 (93-102)
KLGGVIKEKL

SEQ ID NO: 15408 - protein, 10 aa, synthetic construct
  REGION 1..10: note = Histone H1.2 (81-90)
KLGLKSLVSK

SEQ ID NO: 15409 - protein, 9 aa, synthetic construct
  REGION 1..9: note = Cytochrome c oxidase subunit NDUFA4 (39-47)
KLGPNDQYK

SEQ ID NO: 15410 - protein, 9 aa, synthetic construct
  REGION 1..9: note = DCC-interacting protein 13-alpha (553-561)
KLIDPQTQV

SEQ ID NO: 15411 - protein, 9 aa, synthetic construct
  REGION 1..9: note = DNA topoisomerase 2-beta (209-217)
KLIEVVKKK

SEQ ID NO: 15412 - protein, 9 aa, synthetic construct
  REGION 1..9: note = Dynactin subunit 4 (146-154)
KLIEYYQQL

SEQ ID NO: 15413 - protein, 10 aa, synthetic construct
  REGION 1..10: note = Glycerol-3-phosphate dehydrogenase 1-like protein (55-64)
KLISDIIREK

SEQ ID NO: 15414 - protein, 9 aa, synthetic construct
  REGION 1..9: note = Spectrin beta chain, non-erythrocytic 1 (387-395)
KLISDINKA

SEQ ID NO: 15415 - protein, 13 aa, synthetic construct
  REGION 1..13: note = Transcription elongation factor B polypeptide 1 (4-16)
KLISSDGHEFIVK

SEQ ID NO: 15416 - protein, 9 aa, synthetic construct
  REGION 1..9: note = Vacuolar protein sorting-associated protein 4B (71-79)
KLKEYLKNK

SEQ ID NO: 15417 - protein, 12 aa, synthetic construct
  REGION 1..12: note = Heterogeneous nuclear ribonucleoproteins C1/C2 (187-198)
KLKGDDLQAIKK

SEQ ID NO: 15418 - protein, 11 aa, synthetic construct
  REGION 1..11: note = Tight junction-associated protein 1 (150-160)
KLLDAKNTINK

SEQ ID NO: 15419 - protein, 11 aa, synthetic construct
  REGION 1..11: note = 26S proteasome non-ATPase regulatory subunit 7 (204-214)
KLLDIRSYLEK

SEQ ID NO: 15420 - protein, 11 aa, synthetic construct
  REGION 1..11: note = Methionine-tRNA ligase, cytoplasmic (453-463)
KLLDLKKQLAV

SEQ ID NO: 15421 - protein, 9 aa, synthetic construct
  REGION 1..9: note = Dihydrolipoyllysine-residue succinyltransferase component of 2-oxoglutarate dehydrogenase complex, mitochondrial (80-88)
KLLETQLQK

SEQ ID NO: 15422 - protein, 10 aa, synthetic construct
  REGION 1..10: note = Aspartate-tRNA ligase, cytoplasmic (373-382)
KLLGHLVKEK

SEQ ID NO: 15423 - protein, 9 aa, synthetic construct
  REGION 1..9: note = U3 small nucleolar ribonucleoprotein protein IMP3 (11-19)
KLLKQVDFL

SEQ ID NO: 15424 - protein, 9 aa, synthetic construct
  REGION 1..9: note = Protein Smaug homolog 1 (103-111)
KLLPKILAH

SEQ ID NO: 15425 - protein, 9 aa, synthetic construct
  REGION 1..9: note = Box C/D snoRNA protein 1 (321-329)
KLLPNGFTK

SEQ ID NO: 15426 - protein, 9 aa, synthetic construct
  REGION 1..9: note = Anaphase-promoting complex subunit 5 (482-490)
KLLQKLLVH

SEQ ID NO: 15427 - protein, 11 aa, synthetic construct
  REGION 1..11: note = Nucleoprotein TPR (1356-1366)
KLLSEKEVHTK

SEQ ID NO: 15428 - protein, 10 aa, synthetic construct
  REGION 1..10: note = DNA replication ATP-dependent helicase/nuclease DNA2 (580-589)
KLMENTFVSK

SEQ ID NO: 15429 - protein, 10 aa, synthetic construct
  REGION 1..10: note = Integrin alpha-9 (198-207)
KLNDEVIMNR

SEQ ID NO: 15430 - protein, 9 aa, synthetic construct
  REGION 1..9: note = Eukaryotic translation initiation factor 3 subunit C-like protein (333-341)
KLNEILQAR

SEQ ID NO: 15431 - protein, 11 aa, synthetic construct
  REGION 1..11: note = Eukaryotic translation initiation factor 3 subunit C-like protein (333-343)
KLNEILQARGK

SEQ ID NO: 15432 - protein, 9 aa, synthetic construct
  REGION 1..9: note = PHD finger protein 14 (693-701)
KLNIPAILR

SEQ ID NO: 15433 - protein, 9 aa, synthetic construct
  REGION 1..9: note = EH domain-containing protein 4 (478-486)
KLPNSVLGK

SEQ ID NO: 15434 - protein, 10 aa, synthetic construct
  REGION 1..10: note = Sarcospan (62-71)
KLPSSEPLSR

SEQ ID NO: 15435 - protein, 9 aa, synthetic construct
  REGION 1..9: note = 40S ribosomal protein S18 (106-114)
KLREDLERL

SEQ ID NO: 15436 - protein, 11 aa, synthetic construct
  REGION 1..11: note = Catenin delta-1 (688-698)
KLRETQGIEKL

SEQ ID NO: 15437 - protein, 11 aa, synthetic construct
  REGION 1..11: note = Ankycorbin (218-228)
KLSENAGIQSL

SEQ ID NO: 15438 - protein, 9 aa, synthetic construct
  REGION 1..9: note = Serine/threonine-protein kinase N1 (262-270)
KLTESNQKL

SEQ ID NO: 15439 - protein, 9 aa, synthetic construct
  REGION 1..9: note = Melanoma-associated antigen D1 (477-485)
KLVKYLMLK

SEQ ID NO: 15440 - protein, 9 aa, synthetic construct
  REGION 1..9: note = Cytochrome c oxidase subunit 5B, mitochondrial (121-129)
KLVPQQLAH

SEQ ID NO: 15441 - protein, 10 aa, synthetic construct
  REGION 1..10: note = E3 ubiquitin-protein ligase TTC3 (1097-1106)
KLWDMNPKQK

SEQ ID NO: 15442 - protein, 10 aa, synthetic construct
  REGION 1..10: note = Fatty acid desaturase 2 (413-422)
KLWLDAYLHK

SEQ ID NO: 15443 - protein, 9 aa, synthetic construct
  REGION 1..9: note = Serine/threonine-protein kinase ATR (289-297)
KLYEEPLSK

SEQ ID NO: 15444 - protein, 9 aa, synthetic construct
  REGION 1..9: note = Retinoblastoma-like protein 2 (304-312)
KLYEKKLLK

SEQ ID NO: 15445 - protein, 10 aa, synthetic construct
  REGION 1..10: note = Lamina-associated polypeptide 2, isoforms beta/gamma (140-149)
KLYEKKLLKL

SEQ ID NO: 15446 - protein, 9 aa, synthetic construct
  REGION 1..9: note = Dedicator of cytokinesis protein 7 (424-432)
KLYPDSRVR

SEQ ID NO: 15447 - protein, 9 aa, synthetic construct
  REGION 1..9: note = Protein diaphanous homolog 3 (930-938)
KLYQSIIGY

SEQ ID NO: 15448 - protein, 10 aa, synthetic construct
  REGION 1..10: note = Nuclear pore complex protein Nup98-Nup96 (1480-1489)
KLYSDSIREK

SEQ ID NO: 15449 - protein, 9 aa, synthetic construct
  REGION 1..9: note = NADH dehydrogenase (ubiquinone) iron-sulfur protein 7, mitochondrial (74-82)
KMAPALRKV

SEQ ID NO: 15450 - protein, 9 aa, synthetic construct
  REGION 1..9: note = TRPM8 channel-associated factor 1 (447-455)
KMFSHQVQK

SEQ ID NO: 15451 - protein, 12 aa, synthetic construct
  REGION 1..12: note = Heat shock cognate 71 kDa protein (82-93)
KMKEIAEAYLGK

SEQ ID NO: 15452 - protein, 10 aa, synthetic construct
  REGION 1..10: note = Neuroblast differentiation-associated protein AHNAK (380-389)
KMPKMKMPTF

SEQ ID NO: 15453 - protein, 9 aa, synthetic construct
  REGION 1..9: note = DNA replication licensing factor MCM7 (236-244)
KMQEHSDQV

SEQ ID NO: 15454 - protein, 9 aa, synthetic construct
  REGION 1..9: note = Intraflagellar transport protein 74 homolog (462-470)
KMTEEQHSL

SEQ ID NO: 15455 - protein, 9 aa, synthetic construct
  REGION 1..9: note = Nuclear receptor corepressor 1 (1336-1344)
KPYDGITTI

SEQ ID NO: 15456 - protein, 10 aa, synthetic construct
  REGION 1..10: note = Hippocampus abundant transcript-like protein 1 (216-225)
KQADPFASLK

SEQ ID NO: 15457 - protein, 9 aa, synthetic construct
  REGION 1..9: note = T-complex protein 1 subunit zeta (39-47)
KQDEPIDLF

SEQ ID NO: 15458 - protein, 9 aa, synthetic construct
  REGION 1..9: note = Catenin alpha-1 (865-873)
KQDETQTKI

SEQ ID NO: 15459 - protein, 9 aa, synthetic construct
  REGION 1..9: note = Cytoplasmic dynein 1 heavy chain 1 (1181-1189)
KQFEKQVEL

SEQ ID NO: 15460 - protein, 9 aa, synthetic construct
  REGION 1..9: note = Probable E3 ubiquitin-protein ligase makorin-2 (226-234)
KQFENPIIK

SEQ ID NO: 15461 - protein, 9 aa, synthetic construct
  REGION 1..9: note = Bromodomain adjacent to zinc finger domain protein 2A (588-596)
KQFPEVIKY

SEQ ID NO: 15462 - protein, 9 aa, synthetic construct
  REGION 1..9: note = 60S ribosomal protein L22-like 1 (69-77)
KQFSKRYLK

SEQ ID NO: 15463 - protein, 9 aa, synthetic construct
  REGION 1..9: note = Interleukin enhancer-binding factor 3 (519-527)
KQQGPILTK

SEQ ID NO: 15464 - protein, 9 aa, synthetic construct
  REGION 1..9: note = Actin-related protein 8 (80-88)
KQQGQPLYK

SEQ ID NO: 15465 - protein, 9 aa, synthetic construct
  REGION 1..9: note = SAM and SH3 domain-containing protein 1 (898-906)
KRFSEPQKL

SEQ ID NO: 15466 - protein, 9 aa, synthetic construct
  REGION 1..9: note = AP-3 complex subunit mu-2 (240-248)
KRWESERIL

SEQ ID NO: 15467 - protein, 9 aa, synthetic construct
  REGION 1..9: note = AP-3 complex subunit mu-1 (186-194)
KRWESERVL

SEQ ID NO: 15468 - protein, 9 aa, synthetic construct
  REGION 1..9: note = Rabankyrin-5 (851-859)
KSAEAILKR

SEQ ID NO: 15469 - protein, 9 aa, synthetic construct
  REGION 1..9: note = Neuron-specific calcium-binding protein hippocalcin (174-182)
KSDPSIVRL

SEQ ID NO: 15470 - protein, 10 aa, synthetic construct
  REGION 1..10: note = Pre-mRNA-processing factor 40 homolog B (165-174)
KSDTGKPYYY

SEQ ID NO: 15471 - protein, 10 aa, synthetic construct
  REGION 1..10: note = Supervillin (396-405)
KSFDEQNVPK

SEQ ID NO: 15472 - protein, 11 aa, synthetic construct
  REGION 1..11: note = Tumor protein D54 (26-36)
KSFEDRVGTIK

SEQ ID NO: 15473 - protein, 9 aa, synthetic construct
  REGION 1..9: note = Mitogen-activated protein kinase kinase kinase kinase 4 (1062-1070)
KSFGELVHK

SEQ ID NO: 15474 - protein, 11 aa, synthetic construct
  REGION 1..11: note = Myristoylated alanine-rich C-kinase substrate (162-172)
KSFKLSGFSFK

SEQ ID NO: 15475 - protein, 9 aa, synthetic construct
  REGION 1..9: note = Kinetochore protein Spc25 (11-19)
KSINEFWNK

SEQ ID NO: 15476 - protein, 9 aa, synthetic construct
  REGION 1..9: note = MICOS complex subunit MIC60 (102-110)
KSIQSGPLK

SEQ ID NO: 15477 - protein, 9 aa, synthetic construct
  REGION 1..9: note = DNA-dependent protein kinase catalytic subunit (2416-2424)
KSKDFVQVM

SEQ ID NO: 15478 - protein, 9 aa, synthetic construct
  REGION 1..9: note = Choline-phosphate cytidylyltransferase A (259-267)
KSKEFVQKV

SEQ ID NO: 15479 - protein, 9 aa, synthetic construct
  REGION 1..9: note = Phosphatidylinositol 4,5-bisphosphate 3-kinase catalytic subunit delta isoform (860-868)
KSKNPGEAL

SEQ ID NO: 15480 - protein, 10 aa, synthetic construct
  REGION 1..10: note = Arf-GAP with Rho-GAP domain, ANK repeat and PH domain-containing protein 3 (219-228)
KSLDQPFLSK

SEQ ID NO: 15481 - protein, 10 aa, synthetic construct
  REGION 1..10: note = Golgi-specific brefeldin A-resistance guanine nucleotide exchange factor 1 (944-953)
KSLEETIIQK

SEQ ID NO: 15482 - protein, 11 aa, synthetic construct
  REGION 1..11: note = Charged multivesicular body protein 2a (94-104)
KSNNSMAQAMK

SEQ ID NO: 15483 - protein, 9 aa, synthetic construct
  REGION 1..9: note = B9 domain-containing protein 1 (56-64)
KSQDVRQAL

SEQ ID NO: 15484 - protein, 12 aa, synthetic construct
  REGION 1..12: note = 5-aminolevulinate synthase, nonspecific, mitochondrial (174-185)
KTDGGDPSGLLK

SEQ ID NO: 15485 - protein, 9 aa, synthetic construct
  REGION 1..9: note = BRCA1-associated protein (26-34)
KTDGKIVQY

SEQ ID NO: 15486 - protein, 9 aa, synthetic construct
  REGION 1..9: note = Zinc finger homeobox protein 3 (90-98)
KTDKHVQKY

SEQ ID NO: 15487 - protein, 10 aa, synthetic construct
  REGION 1..10: note = Ubiquitin carboxyl-terminal hydrolase 7 (381-390)
KTDPKDPANY

SEQ ID NO: 15488 - protein, 9 aa, synthetic construct
  REGION 1..9: note = Origin recognition complex subunit 3 (194-202)
KTDPKMLSK

SEQ ID NO: 15489 - protein, 9 aa, synthetic construct
  REGION 1..9: note = U2 small nuclear ribonucleoprotein B'' (85-93)
KTDSDIISK

SEQ ID NO: 15490 - protein, 10 aa, synthetic construct
  REGION 1..10: note = Membrane metallo-endopeptidase-like 1 (728-737)
KTDVHSPLKY

SEQ ID NO: 15491 - protein, 9 aa, synthetic construct
  REGION 1..9: note = Phosphatidylinositol 4,5-bisphosphate 3-kinase catalytic subunit alpha isoform (1030-1038)
KTEQEALEY

SEQ ID NO: 15492 - protein, 9 aa, synthetic construct
  REGION 1..9: note = Vesicle-associated membrane protein-associated protein B/C (147-155)
KTETPIVSK

SEQ ID NO: 15493 - protein, 11 aa, synthetic construct
  REGION 1..11: note = Leukotriene A-4 hydrolase (355-365)
KTFGETHPFTK

SEQ ID NO: 15494 - protein, 10 aa, synthetic construct
  REGION 1..10: note = Zinc finger CCCH domain-containing protein 11A (404-413)
KTFSEVLAEK

SEQ ID NO: 15495 - protein, 11 aa, synthetic construct
  REGION 1..11: note = 60S ribosomal protein L39-like (5-15)
KTFTIKRFLAK

SEQ ID NO: 15496 - protein, 9 aa, synthetic construct
  REGION 1..9: note = Microtubule-actin cross-linking factor 1, isoforms 1/2/3/5 (99-107)
KTFTKWVNK

SEQ ID NO: 15497 - protein, 10 aa, synthetic construct
  REGION 1..10: note = Transcription initiation factor TFIID subunit 7 (78-87)
KTIDKKTFYK

SEQ ID NO: 15498 - protein, 11 aa, synthetic construct
  REGION 1..11: note = Transforming growth factor beta-1 (34-44)
KTIDMELVKRK

SEQ ID NO: 15499 - protein, 9 aa, synthetic construct
  REGION 1..9: note = Max-like protein X (125-133)
KTIDYIQFL

SEQ ID NO: 15500 - protein, 11 aa, synthetic construct
  REGION 1..11: note = Max-like protein X (125-135)
KTIDYIQFLHK

SEQ ID NO: 15501 - protein, 13 aa, synthetic construct
  REGION 1..13: note = tRNA pseudouridine synthase A, mitochondrial (110-122)
KTIEDDLVSALVR

SEQ ID NO: 15502 - protein, 9 aa, synthetic construct
  REGION 1..9: note = Polymerase delta-interacting protein 3 (147-155)
KTIQVPQQK

SEQ ID NO: 15503 - protein, 11 aa, synthetic construct
  REGION 1..11: note = Cyclin-dependent kinase 11A (11-21)
KTLDEILQEKK

SEQ ID NO: 15504 - protein, 11 aa, synthetic construct
  REGION 1..11: note = Exportin-2 (17-27)
KTLDPDPAIRR

SEQ ID NO: 15505 - protein, 12 aa, synthetic construct
  REGION 1..12: note = Coatomer subunit gamma-1 (795-806)
KTLEEAVGNIVK

SEQ ID NO: 15506 - protein, 9 aa, synthetic construct
  REGION 1..9: note = Protein prune homolog 2 (118-126)
KTLESAVVK

SEQ ID NO: 15507 - protein, 11 aa, synthetic construct
  REGION 1..11: note = Chromatin assembly factor 1 subunit B (467-477)
KTLQPSSQNTK

SEQ ID NO: 15508 - protein, 11 aa, synthetic construct
  REGION 1..11: note = RE1-silencing transcription factor (417-427)
KTMDVSKVKLK

SEQ ID NO: 15509 - protein, 11 aa, synthetic construct
  REGION 1..11: note = Arfaptin-2 (216-226)
KTMEDTLMTVK

SEQ ID NO: 15510 - protein, 9 aa, synthetic construct
  REGION 1..9: note = Asparagine synthetase domain-containing protein 1 (361-369)
KTMPTTFNR

SEQ ID NO: 15511 - protein, 9 aa, synthetic construct
  REGION 1..9: note = Uncharacterized protein C15orf41 (95-103)
KTPDFILQV

SEQ ID NO: 15512 - protein, 9 aa, synthetic construct
  REGION 1..9: note = Neuroblast differentiation-associated protein AHNAK (489-497)
KTPEMIIQK

SEQ ID NO: 15513 - protein, 10 aa, synthetic construct
  REGION 1..10: note = LIM and SH3 domain protein 1 (112-121)
KTQDQISNIK

SEQ ID NO: 15514 - protein, 9 aa, synthetic construct
  REGION 1..9: note = mRNA-capping enzyme (403-411)
KTQEPFSVR

SEQ ID NO: 15515 - protein, 11 aa, synthetic construct
  REGION 1..11: note = mRNA-capping enzyme (403-413)
KTQEPFSVRNK

SEQ ID NO: 15516 - protein, 9 aa, synthetic construct
  REGION 1..9: note = Actin-related protein 10 (403-411)
KTQPPLMKR

SEQ ID NO: 15517 - protein, 11 aa, synthetic construct
  REGION 1..11: note = Src substrate cortactin (299-309)
KTVPVEAVTSK

SEQ ID NO: 15518 - protein, 12 aa, synthetic construct
  REGION 1..12: note = X-ray repair cross-complementing protein 5 (274-285)
KTWTVVDAKTLK

SEQ ID NO: 15519 - protein, 10 aa, synthetic construct
  REGION 1..10: note = NADH dehydrogenase (ubiquinone) 1 subunit C2 (106-115)
KTYGEIFEKF

SEQ ID NO: 15520 - protein, 11 aa, synthetic construct
  REGION 1..11: note = Zinc finger protein SNAI2 (135-145)
KTYSTFSGLAK

SEQ ID NO: 15521 - protein, 10 aa, synthetic construct
  REGION 1..10: note = ETS translocation variant 1 (301-310)
KVAGERYVYK

SEQ ID NO: 15522 - protein, 9 aa, synthetic construct
  REGION 1..9: note = 5'-AMP-activated protein kinase catalytic subunit alpha-2 (41-49)
KVAVKILNR

SEQ ID NO: 15523 - protein, 9 aa, synthetic construct
  REGION 1..9: note = Heat shock cognate 71 kDa protein (601-609)
KVCNPIITK

SEQ ID NO: 15524 - protein, 8 aa, synthetic construct
  REGION 1..8: note = Proteasome activator complex subunit 3 (6-13)
KVDQEVKL

SEQ ID NO: 15525 - protein, 9 aa, synthetic construct
  REGION 1..9: note = Proteasome activator complex subunit 3 (6-14)
KVDQEVKLK

SEQ ID NO: 15526 - protein, 10 aa, synthetic construct
  REGION 1..10: note = Kinesin-like protein KIFC3 (522-531)
KVFEFGHTNR

SEQ ID NO: 15527 - protein, 11 aa, synthetic construct
  REGION 1..11: note = Nucleolin (370-380)
KVFGNEIKLEK

SEQ ID NO: 15528 - protein, 12 aa, synthetic construct
  REGION 1..12: note = CUGBP Elav-like family member 2 (453-464)
KVFIDKQTNLSK

SEQ ID NO: 15529 - protein, 9 aa, synthetic construct
  REGION 1..9: note = Cathepsin L1 (104-112)
KVFQEPLFY

SEQ ID NO: 15530 - protein, 9 aa, synthetic construct
  REGION 1..9: note = Aspartyl/asparaginyl beta-hydroxylase (462-470)
KVHYGFILK

SEQ ID NO: 15531 - protein, 13 aa, synthetic construct
  REGION 1..13: note = Homeodomain-interacting protein kinase 2 (343-355)
KVIDFGSASHVSK

SEQ ID NO: 15532 - protein, 11 aa, synthetic construct
  REGION 1..11: note = Leucine-rich repeat-containing protein 61 (158-168)
KVIDGERVIGR

SEQ ID NO: 15533 - protein, 9 aa, synthetic construct
  REGION 1..9: note = Prefoldin subunit 1 (19-27)
KVIDTQQKV

SEQ ID NO: 15534 - protein, 9 aa, synthetic construct
  REGION 1..9: note = UPF0428 protein CXorf56 (42-50)
KVIEKQLER

SEQ ID NO: 15535 - protein, 11 aa, synthetic construct
  REGION 1..11: note = Liprin-alpha-1 (251-261)
KVIELQEIISK

SEQ ID NO: 15536 - protein, 11 aa, synthetic construct
  REGION 1..11: note = Signal-induced proliferation-associated 1-like protein 2 (559-569)
KVINAENAAHK

SEQ ID NO: 15537 - protein, 9 aa, synthetic construct
  REGION 1..9: note = 60S acidic ribosomal protein P2 (41-49)
KVISELNGK

SEQ ID NO: 15538 - protein, 11 aa, synthetic construct
  REGION 1..11: note = Protein PRRC2C (1140-1150)
KVISKDLVIER

SEQ ID NO: 15539 - protein, 11 aa, synthetic construct
  REGION 1..11: note = Zinc finger protein 721 (156-166)
KVITSSSSFAK

SEQ ID NO: 15540 - protein, 12 aa, synthetic construct
  REGION 1..12: note = Probable U3 small nucleolar RNA-associated protein 11 (109-120)
KVKGVTNQTGLK

SEQ ID NO: 15541 - protein, 11 aa, synthetic construct
  REGION 1..11: note = Neuroblast differentiation-associated protein AHNAK (487-497)
KVKTPEMIIQK

SEQ ID NO: 15542 - protein, 10 aa, synthetic construct
  REGION 1..10: note = Gamma-interferon-inducible protein 16 (243-252)
KVLNTSLKEK

SEQ ID NO: 15543 - protein, 10 aa, synthetic construct
  REGION 1..10: note = E3 ubiquitin-protein ligase RNF216 (197-206)
KVLPQTILYK

SEQ ID NO: 15544 - protein, 10 aa, synthetic construct
  REGION 1..10: note = Serine/threonine-protein kinase Sgk1 (222-231)
KVLQKKAILK

SEQ ID NO: 15545 - protein, 11 aa, synthetic construct
  REGION 1..11: note = Flavin reductaseADPH) (137-147)
KVLRESGLKYV

SEQ ID NO: 15546 - protein, 10 aa, synthetic construct
  REGION 1..10: note = Polymerase I and transcript release factor (227-236)
KVPPFTFHVK

SEQ ID NO: 15547 - protein, 11 aa, synthetic construct
  REGION 1..11: note = Leucine-tRNA ligase, cytoplasmic (486-496)
KVQDVKKTIQK

SEQ ID NO: 15548 - protein, 10 aa, synthetic construct
  REGION 1..10: note = 28S ribosomal protein S29, mitochondrial (203-212)
KVQEKYVWNK

SEQ ID NO: 15549 - protein, 9 aa, synthetic construct
  REGION 1..9: note = Prelamin-A/C (108-116)
KVREEFKEL

SEQ ID NO: 15550 - protein, 10 aa, synthetic construct
  REGION 1..10: note = ATP-dependent RNA helicase DHX8 (1091-1100)
KVSDPTKLSK

SEQ ID NO: 15551 - protein, 9 aa, synthetic construct
  REGION 1..9: note = Protein O-GlcNAcase (850-858)
KVTDPSVAK

SEQ ID NO: 15552 - protein, 9 aa, synthetic construct
  REGION 1..9: note = Voltage-dependent anion-selective channel protein 1 (53-61)
KVTGSLETK

SEQ ID NO: 15553 - protein, 11 aa, synthetic construct
  REGION 1..11: note = Septin-9 (202-212)
KVVNIVPVIAK

SEQ ID NO: 15554 - protein, 9 aa, synthetic construct
  REGION 1..9: note = Arf-GAP with Rho-GAP domain, ANK repeat and PH domain-containing protein 3 (53-61)
KVYLGIRKK

SEQ ID NO: 15555 - protein, 9 aa, synthetic construct
  REGION 1..9: note = Ubiquitin carboxyl-terminal hydrolase 32 (278-286)
KYAPRFNGF

SEQ ID NO: 15556 - protein, 9 aa, synthetic construct
  REGION 1..9: note = Methionine synthase (216-224)
KYAPRPIFI

SEQ ID NO: 15557 - protein, 9 aa, synthetic construct
  REGION 1..9: note = Metastasis-associated protein MTA2 (282-290)
KYGKDFNDI

SEQ ID NO: 15558 - protein, 9 aa, synthetic construct
  REGION 1..9: note = Glycerol-3-phosphate acyltransferase 4 (365-373)
KYGMVTYLL

SEQ ID NO: 15559 - protein, 8 aa, synthetic construct
  REGION 1..8: note = Splicing factor 3B subunit 6 (41-48)
KYGPIRQI

SEQ ID NO: 15560 - protein, 9 aa, synthetic construct
  REGION 1..9: note = Inositol 1,4,5-trisphosphate receptor type 3 (117-125)
KYGSVIQLL

SEQ ID NO: 15561 - protein, 9 aa, synthetic construct
  REGION 1..9: note = KH domain-containing, RNA-binding, signal transduction-associated protein 3 (44-52)
KYIDVVINK

SEQ ID NO: 15562 - protein, 9 aa, synthetic construct
  REGION 1..9: note = Probable E3 ubiquitin-protein ligase HERC6 (822-830)
KYIDYIFNV

SEQ ID NO: 15563 - protein, 11 aa, synthetic construct
  REGION 1..11: note = Zinc finger FYVE domain-containing protein 16 (1129-1139)
KYIENLDNITF

SEQ ID NO: 15564 - protein, 9 aa, synthetic construct
  REGION 1..9: note = Serine/threonine-protein kinase RIO3 (304-312)
KYIKDDFRF

SEQ ID NO: 15565 - protein, 9 aa, synthetic construct
  REGION 1..9: note = FERM domain-containing protein 6 (210-218)
KYIKEAVRL

SEQ ID NO: 15566 - protein, 9 aa, synthetic construct
  REGION 1..9: note = ER membrane protein complex subunit 3 (66-74)
KYIPKQSFL

SEQ ID NO: 15567 - protein, 9 aa, synthetic construct
  REGION 1..9: note = Cleavage stimulation factor subunit 1 (212-220)
KYIQEAEML

SEQ ID NO: 15568 - protein, 9 aa, synthetic construct
  REGION 1..9: note = Poly(A)-specific ribonuclease PARN (21-29)
KYITKSFNF

SEQ ID NO: 15569 - protein, 9 aa, synthetic construct
  REGION 1..9: note = Tetratricopeptide repeat protein 14 (427-435)
KYMQKSLEL

SEQ ID NO: 15570 - protein, 9 aa, synthetic construct
  REGION 1..9: note = Heparan sulfate 2-sulfotransferase (241-249)
KYNLINEYF

SEQ ID NO: 15571 - protein, 9 aa, synthetic construct
  REGION 1..9: note = Homeobox protein Hox-B7 (13-21)
KYPASSSVF

SEQ ID NO: 15572 - protein, 9 aa, synthetic construct
  REGION 1..9: note = Adenosylhomocysteinase 2 (210-218)
KYPNVFKKI

SEQ ID NO: 15573 - protein, 9 aa, synthetic construct
  REGION 1..9: note = Zinc finger C2HC domain-containing protein 1A (306-314)
KYPVEWAKF

SEQ ID NO: 15574 - protein, 9 aa, synthetic construct
  REGION 1..9: note = T-box transcription factor TBX15 (239-247)
KYQPRVHVI

SEQ ID NO: 15575 - protein, 10 aa, synthetic construct
  REGION 1..10: note = Intron-binding protein aquarius (90-99)
KYSNMEQSLF

SEQ ID NO: 15576 - protein, 9 aa, synthetic construct
  REGION 1..9: note = Putative zinc finger protein 724 (149-157)
KYVKDFHKF

SEQ ID NO: 15577 - protein, 9 aa, synthetic construct
  REGION 1..9: note = Zinc finger protein 107 (80-88)
KYVKVFDKF

SEQ ID NO: 15578 - protein, 9 aa, synthetic construct
  REGION 1..9: note = Zinc finger protein 486 (191-199)
KYVKVFHQF

SEQ ID NO: 15579 - protein, 9 aa, synthetic construct
  REGION 1..9: note = Zinc finger protein 675 (148-156)
KYVKVFNKF

SEQ ID NO: 15580 - protein, 9 aa, synthetic construct
  REGION 1..9: note = Nuclear pore membraneoprotein 210 (17-25)
LAAGPSAAA

SEQ ID NO: 15581 - protein, 9 aa, synthetic construct
  REGION 1..9: note = Lck-interacting transmembrane adapter 1 (150-158)
LAALPGVSL

SEQ ID NO: 15582 - protein, 9 aa, synthetic construct
  REGION 1..9: note = Prolyl endopeptidase-like (376-384)
LADDSVRSL

SEQ ID NO: 15583 - protein, 9 aa, synthetic construct
  REGION 1..9: note = Helicase ARIP4 (250-258)
LAIVPVNTL

SEQ ID NO: 15584 - protein, 9 aa, synthetic construct
  REGION 1..9: note = Receptor-interacting serine/threonine-protein kinase 4 (637-645)
LAKQPGVSV

SEQ ID NO: 15585 - protein, 9 aa, synthetic construct
  REGION 1..9: note = Importin-9 (625-633)
LAQDIFKEL

SEQ ID NO: 15586 - protein, 9 aa, synthetic construct
  REGION 1..9: note = Exosome complex exonuclease RRP44 (767-775)
LASPIYTHF

SEQ ID NO: 15587 - protein, 9 aa, synthetic construct
  REGION 1..9: note = Serine/threonine-protein kinase 17B (265-273)
LATDFIQSL

SEQ ID NO: 15588 - protein, 9 aa, synthetic construct
  REGION 1..9: note = Junction plakoglobin (139-147)
LATRALPEL

SEQ ID NO: 15589 - protein, 9 aa, synthetic construct
  REGION 1..9: note = UBX domain-containing protein 8 (242-250)
LAVEGGQSL

SEQ ID NO: 15590 - protein, 9 aa, synthetic construct
  REGION 1..9: note = F-box only protein 32 (100-108)
LEDQQNIRL

SEQ ID NO: 15591 - protein, 9 aa, synthetic construct
  REGION 1..9: note = Ubiquitin carboxyl-terminal hydrolase 22 (475-483)
LESGHYTSF

SEQ ID NO: 15592 - protein, 9 aa, synthetic construct
  REGION 1..9: note = Gamma-aminobutyric acid receptor subunit pi (247-255)
LETYVPSTF

SEQ ID NO: 15593 - protein, 9 aa, synthetic construct
  REGION 1..9: note = Condensin-2 complex subunit H2 (434-442)
LFIATSQKF

SEQ ID NO: 15594 - protein, 9 aa, synthetic construct
  REGION 1..9: note = ATP-dependent RNA helicase DDX54 (153-161)
LILSPTREL

SEQ ID NO: 15595 - protein, 9 aa, synthetic construct
  REGION 1..9: note = Lysine-specific demethylase 4B (245-253)
LISPIILKK

SEQ ID NO: 15596 - protein, 9 aa, synthetic construct
  REGION 1..9: note = Protocadherin-1 (27-35)
LLAPSPGHA

SEQ ID NO: 15597 - protein, 11 aa, synthetic construct
  REGION 1..11: note = ETS translocation variant 5 (377-387)
LLDDPANAHFI

SEQ ID NO: 15598 - protein, 9 aa, synthetic construct
  REGION 1..9: note = ATP-binding cassette sub-family F member 3 (350-358)
LLDEPTNML

SEQ ID NO: 15599 - protein, 10 aa, synthetic construct
  REGION 1..10: note = Zinc finger protein 490 (73-82)
LLDPGQRNIY

SEQ ID NO: 15600 - protein, 9 aa, synthetic construct
  REGION 1..9: note = Probable global transcription activator SNF2L1 (721-729)
LLEKEILYY

SEQ ID NO: 15601 - protein, 13 aa, synthetic construct
  REGION 1..13: note = NKG2D ligand 3 (11-23)
LLFDWSGTGRADA

SEQ ID NO: 15602 - protein, 9 aa, synthetic construct
  REGION 1..9: note = Sterol regulatory element-binding protein 2 (843-851)
LLHSFVDSV

SEQ ID NO: 15603 - protein, 9 aa, synthetic construct
  REGION 1..9: note = Uncharacterized protein C18orf63 (124-132)
LLIQGRDFL

SEQ ID NO: 15604 - protein, 9 aa, synthetic construct
  REGION 1..9: note = Transmembrane emp24 domain-containing protein 3 (78-86)
LLKSFFTEK

SEQ ID NO: 15605 - protein, 11 aa, synthetic construct
  REGION 1..11: note = Protein disulfide-isomerase A3 (14-24)
LLLAAARLAAA

SEQ ID NO: 15606 - protein, 9 aa, synthetic construct
  REGION 1..9: note = Peptidyl-prolyl cis-trans isomerase B (16-24)
LLLPGPSAA

SEQ ID NO: 15607 - protein, 10 aa, synthetic construct
  REGION 1..10: note = Plasma alpha-L-fucosidase (19-28)
LLLPPPPCPA

SEQ ID NO: 15608 - protein, 9 aa, synthetic construct
  REGION 1..9: note = PRKC apoptosis WT1 regulator protein (216-224)
LLQEPPRTV

SEQ ID NO: 15609 - protein, 10 aa, synthetic construct
  REGION 1..10: note = Chromodomain-helicase-DNA-binding protein 7 (695-704)
LLVNSLFAGM

SEQ ID NO: 15610 - protein, 11 aa, synthetic construct
  REGION 1..11: note = Notchless protein homolog 1 (181-191)
LLWDPSTGKQV

SEQ ID NO: 15611 - protein, 9 aa, synthetic construct
  REGION 1..9: note = Adenosine 3'-phospho 5'-phosphosulfate transporter 1 (251-259)
LLYGHTVTV

SEQ ID NO: 15612 - protein, 9 aa, synthetic construct
  REGION 1..9: note = Activating signal cointegrator 1 complex subunit 1 (68-76)
LLYKHIVGK

SEQ ID NO: 15613 - protein, 9 aa, synthetic construct
  REGION 1..9: note = DNA-dependent protein kinase catalytic subunit (3482-3490)
LMTKEISSV

SEQ ID NO: 15614 - protein, 9 aa, synthetic construct
  REGION 1..9: note = Nucleus accumbens-associated protein 1 (343-351)
LPAELINQI

SEQ ID NO: 15615 - protein, 8 aa, synthetic construct
  REGION 1..8: note = Mothers against decapentaplegic homolog 2 (5-12)
LPFTPPVV

SEQ ID NO: 15616 - protein, 9 aa, synthetic construct
  REGION 1..9: note = Biorientation of chromosomes in cell division protein 1-like 1 (907-915)
LPISSATTI

SEQ ID NO: 15617 - protein, 9 aa, synthetic construct
  REGION 1..9: note = Catenin alpha-1 (553-561)
LPQEQKAKI

SEQ ID NO: 15618 - protein, 9 aa, synthetic construct
  REGION 1..9: note = E3 ubiquitin-protein ligase RNF213 (5003-5011)
LPSSVISAI

SEQ ID NO: 15619 - protein, 8 aa, synthetic construct
  REGION 1..8: note = Eukaryotic translation initiation factor 3 subunit C-like protein (816-823)
LPTVHSII

SEQ ID NO: 15620 - protein, 8 aa, synthetic construct
  REGION 1..8: note = Regulation of nuclear pre-mRNA domain-containing protein 1A (190-197)
LPVEVQEV

SEQ ID NO: 15621 - protein, 9 aa, synthetic construct
  REGION 1..9: note = CDK5 and ABL1 enzyme substrate 2 (40-48)
LPYGEGLRI

SEQ ID NO: 15622 - protein, 9 aa, synthetic construct
  REGION 1..9: note = Collagen alpha-1(XII) chain (105-113)
LPYKGGNTL

SEQ ID NO: 15623 - protein, 9 aa, synthetic construct
  REGION 1..9: note = A-kinase anchor protein 1, mitochondrial (646-654)
LPYTQSVQI

SEQ ID NO: 15624 - protein, 9 aa, synthetic construct
  REGION 1..9: note = Putative tRNA (cytidine(32)/guanosine(34)-2'-O)-methyltransferase (30-38)
LQLDKEFQL

SEQ ID NO: 15625 - protein, 9 aa, synthetic construct
  REGION 1..9: note = Double-stranded RNA-binding protein Staufen homolog 1 (119-127)
LQNEPLPER

SEQ ID NO: 15626 - protein, 10 aa, synthetic construct
  REGION 1..10: note = CD44 antigen (331-340)
LQNVDMKIGV

SEQ ID NO: 15627 - protein, 9 aa, synthetic construct
  REGION 1..9: note = Vimentin (44-52)
LRPSTSRSL

SEQ ID NO: 15628 - protein, 9 aa, synthetic construct
  REGION 1..9: note = Protein CASC5 (113-121)
LSAPIHTQM

SEQ ID NO: 15629 - protein, 10 aa, synthetic construct
  REGION 1..10: note = Fibronectin type III domain-containing protein 3B (320-329)
LSDKGRDGKY

SEQ ID NO: 15630 - protein, 9 aa, synthetic construct
  REGION 1..9: note = Cytoplasmic dynein 1 heavy chain 1 (69-77)
LSDPQVHTV

SEQ ID NO: 15631 - protein, 9 aa, synthetic construct
  REGION 1..9: note = Stress-induced-phosphoprotein 1 (194-202)
LSDPTYREL

SEQ ID NO: 15632 - protein, 9 aa, synthetic construct
  REGION 1..9: note = Cytochrome c oxidase subunit 4 isoform 1, mitochondrial (131-139)
LSDPVIHSL

SEQ ID NO: 15633 - protein, 11 aa, synthetic construct
  REGION 1..11: note = tRNA-splicing endonuclease subunit Sen54 (146-156)
LTDHTVTFLQY

SEQ ID NO: 15634 - protein, 11 aa, synthetic construct
  REGION 1..11: note = Beta-galactosidase-1-like protein 2 (348-358)
LTEAGDYTAKY

SEQ ID NO: 15635 - protein, 8 aa, synthetic construct
  REGION 1..8: note = Serine/threonine-protein kinase 24 (284-291)
LTELIDRY

SEQ ID NO: 15636 - protein, 9 aa, synthetic construct
  REGION 1..9: note = Endoplasmic reticulum-Golgi intermediate compartment protein 3 (39-47)
LTTEVHPEL

SEQ ID NO: 15637 - protein, 8 aa, synthetic construct
  REGION 1..8: note = POTE ankyrin domain family member F (708-715)
LVIDNGSG

SEQ ID NO: 15638 - protein, 12 aa, synthetic construct
  REGION 1..12: note = CD44 antigen (399-410)
LVNKESSETPDQ

SEQ ID NO: 15639 - protein, 9 aa, synthetic construct
  REGION 1..9: note = Structural maintenance of chromosomes flexible hinge domain-containing protein 1 (857-865)
LVTDIQPVL

SEQ ID NO: 15640 - protein, 9 aa, synthetic construct
  REGION 1..9: note = Cytoplasmic dynein 1 light intermediate chain 1 (179-187)
LVYKYIVQK

SEQ ID NO: 15641 - protein, 9 aa, synthetic construct
  REGION 1..9: note = Protein archease (109-117)
LYKFSADEF

SEQ ID NO: 15642 - protein, 9 aa, synthetic construct
  REGION 1..9: note = Tumor protein D54 (125-133)
LYKKTQETL

SEQ ID NO: 15643 - protein, 10 aa, synthetic construct
  REGION 1..10: note = CD109 antigen (139-148)
LYKPKQEVKF

SEQ ID NO: 15644 - protein, 9 aa, synthetic construct
  REGION 1..9: note = Ras-related GTP-binding protein C (292-300)
LYLKEVTKF

SEQ ID NO: 15645 - protein, 9 aa, synthetic construct
  REGION 1..9: note = Exportin-5 (626-634)
LYNHVKQLL

SEQ ID NO: 15646 - protein, 9 aa, synthetic construct
  REGION 1..9: note = Interferon-induced GTP-binding protein Mx2 (422-430)
LYNKIREDF

SEQ ID NO: 15647 - protein, 9 aa, synthetic construct
  REGION 1..9: note = ATPase family AAA domain-containing protein 2 (447-455)
LYPEVFEKF

SEQ ID NO: 15648 - protein, 9 aa, synthetic construct
  REGION 1..9: note = TELO2-interacting protein 2 (300-308)
LYTPEHHLI

SEQ ID NO: 15649 - protein, 9 aa, synthetic construct
  REGION 1..9: note = Formin-binding protein 1-like (181-189)
MADENKNEY

SEQ ID NO: 15650 - protein, 10 aa, synthetic construct
  REGION 1..10: note = Condensin complex subunit 1 (1002-1011)
MELLDGKQTL

SEQ ID NO: 15651 - protein, 10 aa, synthetic construct
  REGION 1..10: note = Nucleoprotein TPR (1009-1018)
MEVEKEKQEL

SEQ ID NO: 15652 - protein, 11 aa, synthetic construct
  REGION 1..11: note = Eukaryotic translation initiation factor 2 subunit 2 (6-16)
MIFDPTMSKKK

SEQ ID NO: 15653 - protein, 9 aa, synthetic construct
  REGION 1..9: note = Melanoma-associated antigen D1 (497-505)
MLRDIIREY

SEQ ID NO: 15654 - protein, 10 aa, synthetic construct
  REGION 1..10: note = Cytochrome c oxidase subunit NDUFA4 (1-10)
MLRQIIGQAK

SEQ ID NO: 15655 - protein, 9 aa, synthetic construct
  REGION 1..9: note = Tetratricopeptide repeat protein 17 (580-588)
MPDDHARKI

SEQ ID NO: 15656 - protein, 8 aa, synthetic construct
  REGION 1..8: note = Protein polybromo-1 (426-433)
MPISLQQI

SEQ ID NO: 15657 - protein, 10 aa, synthetic construct
  REGION 1..10: note = Cell division cycle protein 27 homolog (515-524)
MQAERIFSEV

SEQ ID NO: 15658 - protein, 11 aa, synthetic construct
  REGION 1..11: note = CD44 antigen (412-422)
MTADETRNLQN

SEQ ID NO: 15659 - protein, 11 aa, synthetic construct
  REGION 1..11: note = 14-3-3 protein beta/alpha (1-11)
MTMDKSELVQK

SEQ ID NO: 15660 - protein, 9 aa, synthetic construct
  REGION 1..9: note = Centromere/kinetochore protein zw10 homolog (415-423)
MTSEIHNTV

SEQ ID NO: 15661 - protein, 9 aa, synthetic construct
  REGION 1..9: note = Pyridoxal kinase (93-101)
MVVDIVQEL

SEQ ID NO: 15662 - protein, 9 aa, synthetic construct
  REGION 1..9: note = Nucleoside diphosphate kinase (76-84)
MVWEGLNVV

SEQ ID NO: 15663 - protein, 9 aa, synthetic construct
  REGION 1..9: note = Tyrosine-protein phosphatase non-receptor type 14 (204-212)
MYINEVERL

SEQ ID NO: 15664 - protein, 9 aa, synthetic construct
  REGION 1..9: note = Phosphatidate cytidylyltransferase 2 (308-316)
MYPFQIHSI

SEQ ID NO: 15665 - protein, 9 aa, synthetic construct
  REGION 1..9: note = M-phase phosphoprotein 8 (351-359)
NAFLEKKTV

SEQ ID NO: 15666 - protein, 9 aa, synthetic construct
  REGION 1..9: note = E3 ubiquitin-protein ligase RNF213 (2663-2671)
NAFLSKSSV

SEQ ID NO: 15667 - protein, 9 aa, synthetic construct
  REGION 1..9: note = H/ACA ribonucleoprotein complex subunit 4 (161-169)
NAIEGGTQL

SEQ ID NO: 15668 - protein, 9 aa, synthetic construct
  REGION 1..9: note = Protein transport protein Sec31A (866-874)
NAYPNTPYI

SEQ ID NO: 15669 - protein, 9 aa, synthetic construct
  REGION 1..9: note = Ribonuclease P/MRP protein subunit POP5 (58-66)
NAYTGIVLL

SEQ ID NO: 15670 - protein, 9 aa, synthetic construct
  REGION 1..9: note = Cytoplasmic dynein 1 heavy chain 1 (1442-1450)
NEAIVKDVL

SEQ ID NO: 15671 - protein, 10 aa, synthetic construct
  REGION 1..10: note = Hsc70-interacting protein (314-323)
NEILSDPEVL

SEQ ID NO: 15672 - protein, 8 aa, synthetic construct
  REGION 1..8: note = DENN domain-containing protein 5A (694-701)
NEITGHTY

SEQ ID NO: 15673 - protein, 9 aa, synthetic construct
  REGION 1..9: note = Nucleoprotein TPR (857-865)
NEVEQRHTL

SEQ ID NO: 15674 - protein, 9 aa, synthetic construct
  REGION 1..9: note = Serine/arginine repetitive matrix protein 2 (2175-2183)
NHAQSRIAL

SEQ ID NO: 15675 - protein, 9 aa, synthetic construct
  REGION 1..9: note = EH domain-containing protein 1 (209-217)
NHEDKIRVV

SEQ ID NO: 15676 - protein, 10 aa, synthetic construct
  REGION 1..10: note = Nuclear receptor coactivator 6 (844-853)
NHFSGHGMSF

SEQ ID NO: 15677 - protein, 9 aa, synthetic construct
  REGION 1..9: note = UDP-N-acetylhexosamine pyrophosphorylase (327-335)
NIANHFFTV

SEQ ID NO: 15678 - protein, 9 aa, synthetic construct
  REGION 1..9: note = Mediator of RNA polymerase II transcription subunit 22 (67-75)
NIVRAGESL

SEQ ID NO: 15679 - protein, 9 aa, synthetic construct
  REGION 1..9: note = Peroxisomal acyl-coenzyme A oxidase 1 (642-650)
NKAEVHESY

SEQ ID NO: 15680 - protein, 10 aa, synthetic construct
  REGION 1..10: note = FERM domain-containing protein 6 (261-270)
NLDEEKQLLY

SEQ ID NO: 15681 - protein, 8 aa, synthetic construct
  REGION 1..8: note = WD repeat-containing protein 43 (333-340)
NLIKKTVL

SEQ ID NO: 15682 - protein, 9 aa, synthetic construct
  REGION 1..9: note = C-terminal-binding protein 2 (784-792)
NLNEHNHHL

SEQ ID NO: 15683 - protein, 11 aa, synthetic construct
  REGION 1..11: note = CD44 antigen (330-340)
NLQNVDMKIGV

SEQ ID NO: 15684 - protein, 10 aa, synthetic construct
  REGION 1..10: note = E3 ubiquitin-protein ligase makorin-1 (292-301)
NPSERRFGIL

SEQ ID NO: 15685 - protein, 11 aa, synthetic construct
  REGION 1..11: note = Transcription factor COE2 (207-217)
NQGYIRNTSSI

SEQ ID NO: 15686 - protein, 9 aa, synthetic construct
  REGION 1..9: note = Interferon-induced GTP-binding protein Mx2 (643-651)
NQIPFIIQY

SEQ ID NO: 15687 - protein, 9 aa, synthetic construct
  REGION 1..9: note = Transportin-1 (49-57)
NQYPDFNNY

SEQ ID NO: 15688 - protein, 9 aa, synthetic construct
  REGION 1..9: note Dolichyl-diphosphooligosaccharide-proteinosyltransferase 48 kDa subunit (395-403)
NRLGYTHLY

SEQ ID NO: 15689 - protein, 9 aa, synthetic construct
  REGION 1..9: note = TATA-binding protein-associated factor 2N (227-235)
NSDNNTIFV

SEQ ID NO: 15690 - protein, 9 aa, synthetic construct
  REGION 1..9: note = Niban-like protein 1 (154-162)
NSDPNLHLL

SEQ ID NO: 15691 - protein, 9 aa, synthetic construct
  REGION 1..9: note = Serine/threonine-protein kinase TBK1 (330-338)
NTATIFHEL

SEQ ID NO: 15692 - protein, 10 aa, synthetic construct
  REGION 1..10: note = GREB1-like protein (1697-1706)
NTDLTQNVQY

SEQ ID NO: 15693 - protein, 10 aa, synthetic construct
  REGION 1..10: note = Eukaryotic translation initiation factor 3 subunit C-like protein (462-471)
NTDPHSQEYV

SEQ ID NO: 15694 - protein, 10 aa, synthetic construct
  REGION 1..10: note = Guanine deaminase (328-337)
NTDRPGGYSY

SEQ ID NO: 15695 - protein, 10 aa, synthetic construct
  REGION 1..10: note = 26S proteasome non-ATPase regulatory subunit 13 (227-236)
NTDRQWLIDT

SEQ ID NO: 15696 - protein, 11 aa, synthetic construct
  REGION 1..11: note = Polypyrimidine tract-binding protein 1 (102-112)
NTEEAANTMVN

SEQ ID NO: 15697 - protein, 9 aa, synthetic construct
  REGION 1..9: note = MOB kinase activator 1A (60-68)
NTVDFFNQI

SEQ ID NO: 15698 - protein, 9 aa, synthetic construct
  REGION 1..9: note = Vesicular integral-membrane protein VIP36 (305-313)
NVDDPTGNF

SEQ ID NO: 15699 - protein, 11 aa, synthetic construct
  REGION 1..11: note = Dynactin subunit 6 (105-115)
NVIESKAYVGR

SEQ ID NO: 15700 - protein, 9 aa, synthetic construct
  REGION 1..9: note = Sperm-associated antigen 16 protein (89-97)
NVPDVYTQI

SEQ ID NO: 15701 - protein, 9 aa, synthetic construct
  REGION 1..9: note = Activity-dependent neuroprotector homeobox protein (450-458)
NYIMKIHNF

SEQ ID NO: 15702 - protein, 9 aa, synthetic construct
  REGION 1..9: note = Abelson tyrosine-protein kinase 2 (124-132)
NYITPVNSL

SEQ ID NO: 15703 - protein, 9 aa, synthetic construct
  REGION 1..9: note = Opioid growth factor receptor (195-203)
NYQKRFQNL

SEQ ID NO: 15704 - protein, 9 aa, synthetic construct
  REGION 1..9: note = DNA-directed RNA polymerase II subunit RPB4 (66-74)
NYTARFSRF

SEQ ID NO: 15705 - protein, 10 aa, synthetic construct
  REGION 1..10: note = BTB/POZ domain-containing adapter for CUL3-mediated RhoA degradation protein 3 (245-254)
PEARIYEETL

SEQ ID NO: 15706 - protein, 9 aa, synthetic construct
  REGION 1..9: note = Ubiquitin-like modifier-activating enzyme 7 (898-906)
PFAPAIQTF

SEQ ID NO: 15707 - protein, 9 aa, synthetic construct
  REGION 1..9: note = Short-chain dehydrogenase/reductase 3 (219-227)
PFHTSTEMF

SEQ ID NO: 15708 - protein, 10 aa, synthetic construct
  REGION 1..10: note = Nodal modulator 2 (293-302)
PFYRGERITF

SEQ ID NO: 15709 - protein, 10 aa, synthetic construct
  REGION 1..10: note = Beta-2-microglobulin (110-119)
PKIVKWDRDM

SEQ ID NO: 15710 - protein, 9 aa, synthetic construct
  REGION 1..9: note = Proteasomal ubiquitin receptor ADRM1 (86-94)
PQCPSGRVY

SEQ ID NO: 15711 - protein, 12 aa, synthetic construct
  REGION 1..12: note = NADH dehydrogenase (ubiquinone) 1 alpha subcomplex subunit 3 (73-84)
PQGPSLEWLKKL

SEQ ID NO: 15712 - protein, 9 aa, synthetic construct
  REGION 1..9: note = Signal recognition particle 9 kDa protein (2-10)
PQYQTWEEF

SEQ ID NO: 15713 - protein, 10 aa, synthetic construct
  REGION 1..10: note = Gamma-aminobutyric acid receptor-associated protein (52-61)
PSDLTVGQFY

SEQ ID NO: 15714 - protein, 11 aa, synthetic construct
  REGION 1..11: note = B-cell CLL/lymphoma 9-like protein (1331-1341)
PSEKPSSTLQY

SEQ ID NO: 15715 - protein, 9 aa, synthetic construct
  REGION 1..9: note = Retroviral-like aspartic protease 1 (314-322)
PVGGSLEDE

SEQ ID NO: 15716 - protein, 9 aa, synthetic construct
  REGION 1..9: note = Procollagen-lysine,2-oxoglutarate 5-dioxygenase 3 (459-467)
PYISQAYVI

SEQ ID NO: 15717 - protein, 9 aa, synthetic construct
  REGION 1..9: note = Telomerase protein component 1 (1087-1095)
PYVGGLEEF

SEQ ID NO: 15718 - protein, 9 aa, synthetic construct
  REGION 1..9: note = U5 small nuclear ribonucleoprotein 200 kDa helicase (643-651)
QEDVRLIGL

SEQ ID NO: 15719 - protein, 9 aa, synthetic construct
  REGION 1..9: note = Ras GTPase-activating protein-binding protein 1 (211-219)
QEEKPEPVL

SEQ ID NO: 15720 - protein, 9 aa, synthetic construct
  REGION 1..9: note = Threonylcarbamoyladenosine tRNA methylthiotransferase (57-65)
QEENKKIVL

SEQ ID NO: 15721 - protein, 10 aa, synthetic construct
  REGION 1..10: note = Eukaryotic translation initiation factor 3 subunit K (94-103)
QEERPIRQIL

SEQ ID NO: 15722 - protein, 12 aa, synthetic construct
  REGION 1..12: note = RNA polymerase II subunit A C-terminal domain phosphatase SSU72 (177-188)
QEFEEKSGRTFL

SEQ ID NO: 15723 - protein, 9 aa, synthetic construct
  REGION 1..9: note = Clathrin heavy chain 1 (10-18)
QEHLQLQNL

SEQ ID NO: 15724 - protein, 9 aa, synthetic construct
  REGION 1..9: note = Bifunctional arginine demethylase and lysyl-hydroxylase JMJD6 (356-364)
QEHPELAVL

SEQ ID NO: 15725 - protein, 10 aa, synthetic construct
  REGION 1..10: note = F-box only protein 11 (141-150)
QEKLPDEVVL

SEQ ID NO: 15726 - protein, 10 aa, synthetic construct
  REGION 1..10: note = protein PET100 homolog, mitochondrial (48-57)
QELEEFKERL

SEQ ID NO: 15727 - protein, 10 aa, synthetic construct
  REGION 1..10: note = Protein SHQ1 homolog (236-245)
QENHATLVSF

SEQ ID NO: 15728 - protein, 10 aa, synthetic construct
  REGION 1..10: note = Histone-lysine N-methyltransferase SETD7 (253-262)
QEVDSRDWAL

SEQ ID NO: 15729 - protein, 9 aa, synthetic construct
  REGION 1..9: note = Neutral amino acid transporter B(0) (224-232)
QEVEGMNIL

SEQ ID NO: 15730 - protein, 9 aa, synthetic construct
  REGION 1..9: note = Uridine-cytidine kinase 2 (143-151)
QEVRDLFQM

SEQ ID NO: 15731 - protein, 9 aa, synthetic construct
  REGION 1..9: note = WD repeat-containing protein 3 (640-648)
QFVPKSHLF

SEQ ID NO: 15732 - protein, 9 aa, synthetic construct
  REGION 1..9: note = Niban-like protein 1 (79-87)
QISIPFLLK

SEQ ID NO: 15733 - protein, 9 aa, synthetic construct
  REGION 1..9: note = Rho-associated protein kinase 2 (563-571)
QLDETNALL

SEQ ID NO: 15734 - protein, 9 aa, synthetic construct
  REGION 1..9: note = Ras-associated and pleckstrin homology domains-containing protein 1 (496-504)
QLDHVNVYY

SEQ ID NO: 15735 - protein, 9 aa, synthetic construct
  REGION 1..9: note = Disco-interacting protein 2 homolog A (1561-1569)
QLDPIYVAY

SEQ ID NO: 15736 - protein, 9 aa, synthetic construct
  REGION 1..9: note = Transcription elongation factor SPT5 (537-545)
QLDPQTVGV

SEQ ID NO: 15737 - protein, 9 aa, synthetic construct
  REGION 1..9: note = Transcriptional repressor CTCF (65-73)
QLDPTLLQM

SEQ ID NO: 15738 - protein, 9 aa, synthetic construct
  REGION 1..9: note = Ubiquitin-40S ribosomal protein S27a (69-77)
QLEDGRTLS

SEQ ID NO: 15739 - protein, 9 aa, synthetic construct
  REGION 1..9: note = Mortality factor 4-like protein 2 (145-153)
QLFQLPAKK

SEQ ID NO: 15740 - protein, 10 aa, synthetic construct
  REGION 1..10: note = Transitional endoplasmic reticulum ATPase (50-59)
QLFRGDTVLL

SEQ ID NO: 15741 - protein, 11 aa, synthetic construct
  REGION 1..11: note = Transitional endoplasmic reticulum ATPase (50-60)
QLFRGDTVLLK

SEQ ID NO: 15742 - protein, 10 aa, synthetic construct
  REGION 1..10: note = Mitofusin-2 (172-181)
QLHAGSLVSV

SEQ ID NO: 15743 - protein, 9 aa, synthetic construct
  REGION 1..9: note = Kinesin-like protein KIF15 (1210-1218)
QLIEKNWLL

SEQ ID NO: 15744 - protein, 9 aa, synthetic construct
  REGION 1..9: note = Cleavage and polyadenylation specificity factor subunit 2 (95-103)
QLLDQIWRT

SEQ ID NO: 15745 - protein, 9 aa, synthetic construct
  REGION 1..9: note = Eukaryotic translation initiation factor 4 gamma 1 (739-747)
QLMKQVTQL

SEQ ID NO: 15746 - protein, 9 aa, synthetic construct
  REGION 1..9: note = Lanosterol 14-alpha demethylase (218-226)
QLNEKVAQL

SEQ ID NO: 15747 - protein, 9 aa, synthetic construct
  REGION 1..9: note = Pleckstrin homology-like domain family B member 1 (775-783)
QLQEKLVAL

SEQ ID NO: 15748 - protein, 9 aa, synthetic construct
  REGION 1..9: note = WD and tetratricopeptide repeats protein 1 (274-282)
QLYSKAVQR

SEQ ID NO: 15749 - protein, 9 aa, synthetic construct
  REGION 1..9: note = Zinc finger protein ubi-d4 (70-78)
QLYSYPARR

SEQ ID NO: 15750 - protein, 9 aa, synthetic construct
  REGION 1..9: note = KxDL motif-containing protein 1 (65-73)
QMSERFLHH

SEQ ID NO: 15751 - protein, 9 aa, synthetic construct
  REGION 1..9: note = Helicase with zinc finger domain 2 (1555-1563)
QPAPRSQQL

SEQ ID NO: 15752 - protein, 9 aa, synthetic construct
  REGION 1..9: note = V-type proton ATPase subunit B, brain isoform (42-50)
QPRLTYKTV

SEQ ID NO: 15753 - protein, 10 aa, synthetic construct
  REGION 1..10: note = Transmembrane protein 160 (91-100)
QSDMGREAAY

SEQ ID NO: 15754 - protein, 9 aa, synthetic construct
  REGION 1..9: note = Synaptotagmin-like protein 2 (379-387)
QSDPKPSQY

SEQ ID NO: 15755 - protein, 10 aa, synthetic construct
  REGION 1..10: note = Very long-chain specific acyl-CoA dehydrogenase, mitochondrial (600-609)
QSDPWQQELY

SEQ ID NO: 15756 - protein, 9 aa, synthetic construct
  REGION 1..9: note = E3 ubiquitin-protein ligase TRAF7 (293-301)
QTDDRFHEM

SEQ ID NO: 15757 - protein, 9 aa, synthetic construct
  REGION 1..9: note = WD repeat and FYVE domain-containing protein 3 (796-804)
QTDERLAQY

SEQ ID NO: 15758 - protein, 10 aa, synthetic construct
  REGION 1..10: note = Tetratricopeptide repeat protein 19, mitochondrial (128-137)
QTDNKKAITY

SEQ ID NO: 15759 - protein, 11 aa, synthetic construct
  REGION 1..11: note = Nuclear pore complex protein Nup133 (878-888)
QTDNQSRLQRY

SEQ ID NO: 15760 - protein, 9 aa, synthetic construct
  REGION 1..9: note = Signal recognition particle receptor subunit beta (32-40)
QTDPTLLSV

SEQ ID NO: 15761 - protein, 9 aa, synthetic construct
  REGION 1..9: note = Helicase with zinc finger domain 2 (612-620)
QTDPVTLQY

SEQ ID NO: 15762 - protein, 9 aa, synthetic construct
  REGION 1..9: note = Small G protein signaling modulator 3 (245-253)
QTDQRVLRH

SEQ ID NO: 15763 - protein, 10 aa, synthetic construct
  REGION 1..10: note = SWI/SNF-related matrix-associated actin-dependent regulator of chromatin subfamily A member 5 (85-94)
QTDRANRFEY

SEQ ID NO: 15764 - protein, 10 aa, synthetic construct
  REGION 1..10: note = Sodium-dependent lysophosphatidylcholine symporter 1 (104-113)
QTERDSATAY

SEQ ID NO: 15765 - protein, 9 aa, synthetic construct
  REGION 1..9: note = Ras GTPase-activating-like protein IQGAP1 (980-988)
QTNPTYLAK

SEQ ID NO: 15766 - protein, 9 aa, synthetic construct
  REGION 1..9: note = Mitochondrial-processing peptidase subunit alpha (144-152)
QTSRDTTMY

SEQ ID NO: 15767 - protein, 9 aa, synthetic construct
  REGION 1..9: note = DNA-directed RNA polymerase III subunit RPC5 (106-114)
QTTSNTSRY

SEQ ID NO: 15768 - protein, 9 aa, synthetic construct
  REGION 1..9: note = Catenin beta-1 (78-86)
QVADIDGQY

SEQ ID NO: 15769 - protein, 9 aa, synthetic construct
  REGION 1..9: note = Regulator of microtubule dynamics protein 1 (253-261)
QVDPNFYSK

SEQ ID NO: 15770 - protein, 10 aa, synthetic construct
  REGION 1..10: note = Cell division cycle protein 27 homolog (594-603)
QVDPNYAYAY

SEQ ID NO: 15771 - protein, 14 aa, synthetic construct
  REGION 1..14: note = Protein Tob2 (303-316)
QVFGGGANSLFLEK

SEQ ID NO: 15772 - protein, 11 aa, synthetic construct
  REGION 1..11: note = UPF0488 protein C8orf33 (189-199)
QVQPVDGATRK

SEQ ID NO: 15773 - protein, 9 aa, synthetic construct
  REGION 1..9: note = Dynamin-like 120 kDa protein, mitochondrial (858-866)
QVYRRHFLK

SEQ ID NO: 15774 - protein, 9 aa, synthetic construct
  REGION 1..9: note = Zinc finger MIZ domain-containing protein 2 (283-291)
QYAPSTAQF

SEQ ID NO: 15775 - protein, 9 aa, synthetic construct
  REGION 1..9: note = HEAT repeat-containing protein 6 (870-878)
QYARIWNAL

SEQ ID NO: 15776 - protein, 9 aa, synthetic construct
  REGION 1..9: note = Ubiquitin carboxyl-terminal hydrolase 48 (677-685)
QYFPKAPEF

SEQ ID NO: 15777 - protein, 9 aa, synthetic construct
  REGION 1..9: note = DNA-directed RNA polymerase III subunit RPC2 (60-68)
QYKDVPITY

SEQ ID NO: 15778 - protein, 11 aa, synthetic construct
  REGION 1..11: note = Negative elongation factor A (142-152)
QYLNKNALTTL

SEQ ID NO: 15779 - protein, 9 aa, synthetic construct
  REGION 1..9: note = Laminin subunit alpha-4 (1299-1307)
QYNDGLSHF

SEQ ID NO: 15780 - protein, 9 aa, synthetic construct
  REGION 1..9: note = Protein spire homolog 1 (293-301)
QYNPLPIEY

SEQ ID NO: 15781 - protein, 9 aa, synthetic construct
  REGION 1..9: note = Protein transport protein Sec61 subunit alpha isoform 1 (275-283)
QYNTYPIKL

SEQ ID NO: 15782 - protein, 10 aa, synthetic construct
  REGION 1..10: note = Protein transport protein Sec61 subunit alpha isoform 1 (275-284)
QYNTYPIKLF

SEQ ID NO: 15783 - protein, 9 aa, synthetic construct
  REGION 1..9: note = Gem-associated protein 5 (1174-1182)
QYQEAFQKL

SEQ ID NO: 15784 - protein, 9 aa, synthetic construct
  REGION 1..9: note = E3 ubiquitin-protein ligase RNF213 (2046-2054)
QYQKVPVLF

SEQ ID NO: 15785 - protein, 9 aa, synthetic construct
  REGION 1..9: note = Spectrin beta chain, non-erythrocytic 2 (18-26)
QYSDINNRW

SEQ ID NO: 15786 - protein, 9 aa, synthetic construct
  REGION 1..9: note = Ubiquitin-like modifier-activating enzyme 1 (717-725)
QYSNNIRQL

SEQ ID NO: 15787 - protein, 9 aa, synthetic construct
  REGION 1..9: note = Phosphatidylinositol transfer protein beta isoform (56-64)
QYTHKIYHL

SEQ ID NO: 15788 - protein, 9 aa, synthetic construct
  REGION 1..9: note = Laminin subunit gamma-1 (6-14)
RAAPALRPR

SEQ ID NO: 15789 - protein, 9 aa, synthetic construct
  REGION 1..9: note = CCAAT/enhancer-binding protein beta (62-70)
RAIDFSPYL

SEQ ID NO: 15790 - protein, 11 aa, synthetic construct
  REGION 1..11: note = X-ray repair cross-complementing protein 6 (586-596)
RAYGLKSGLKK

SEQ ID NO: 15791 - protein, 9 aa, synthetic construct
  REGION 1..9: note = Filamin-B (649-657)
RAYGPGLEK

SEQ ID NO: 15792 - protein, 9 aa, synthetic construct
  REGION 1..9: note = Ras and Rab interactor 2 (179-187)
RDVLPFTLK

SEQ ID NO: 15793 - protein, 11 aa, synthetic construct
  REGION 1..11: note = Glutamine-tRNA ligase (34-44)
REAATQAQQTL

SEQ ID NO: 15794 - protein, 11 aa, synthetic construct
  REGION 1..11: note = Pre-mRNA-processing-splicing factor 8 (1275-1285)
REAVVNTQELL

SEQ ID NO: 15795 - protein, 9 aa, synthetic construct
  REGION 1..9: note = TFIIH basal transcription factor complex helicase XPB subunit (472-480)
REDDKIVDL

SEQ ID NO: 15796 - protein, 11 aa, synthetic construct
  REGION 1..11: note = Nuclear pore complex protein Nup107 (142-152)
REDDPGEAASM

SEQ ID NO: 15797 - protein, 10 aa, synthetic construct
  REGION 1..10: note = Translationally-controlled tumor protein (152-161)
REDGVTPYMI

SEQ ID NO: 15798 - protein, 9 aa, synthetic construct
  REGION 1..9: note = Catenin beta-1 (457-465)
REDITEPAI

SEQ ID NO: 15799 - protein, 12 aa, synthetic construct
  REGION 1..12: note = Histone-lysine N-methyltransferase 2D (2065-2076)
REDPGTGMGSSL

SEQ ID NO: 15800 - protein, 11 aa, synthetic construct
  REGION 1..11: note = Protein ELYS (1949-1959)
REDSNLESSQL

SEQ ID NO: 15801 - protein, 11 aa, synthetic construct
  REGION 1..11: note = DNA damage-inducible transcript 4 protein (39-49)
REEGFDRSTSL

SEQ ID NO: 15802 - protein, 10 aa, synthetic construct
  REGION 1..10: note = Protein THEMIS2 (210-219)
REENPEFTSL

SEQ ID NO: 15803 - protein, 10 aa, synthetic construct
  REGION 1..10: note = Serine/threonine-protein phosphatase 2B catalytic subunit beta isoform (441-450)
REESESVLTL

SEQ ID NO: 15804 - protein, 10 aa, synthetic construct
  REGION 1..10: note = Poly(rC)-binding protein 2 (40-49)
REESGARINI

SEQ ID NO: 15805 - protein, 10 aa, synthetic construct
  REGION 1..10: note = Vigilin (608-617)
REESNTKIDL

SEQ ID NO: 15806 - protein, 9 aa, synthetic construct
  REGION 1..9: note = Double-strand-break repair protein rad21 homolog (146-154)
REEVGNISI

SEQ ID NO: 15807 - protein, 9 aa, synthetic construct
  REGION 1..9: note = U3 small nucleolar RNA-associated protein 14 homolog A (370-378)
REFEERRSL

SEQ ID NO: 15808 - protein, 11 aa, synthetic construct
  REGION 1..11: note = ADP-ribose pyrophosphatase, mitochondrial (229-239)
REFGEEALNSL

SEQ ID NO: 15809 - protein, 9 aa, synthetic construct
  REGION 1..9: note = Procollagen-lysine,2-oxoglutarate 5-dioxygenase 2 (100-108)
REFIAPVTL

SEQ ID NO: 15810 - protein, 10 aa, synthetic construct
  REGION 1..10: note = Peptidyl-prolyl cis-trans isomerase FKBP14 (202-211)
REFTYKHDEL

SEQ ID NO: 15811 - protein, 9 aa, synthetic construct
  REGION 1..9: note = Splicing factor 3B subunit 1 (390-398)
REIDERNRP

SEQ ID NO: 15812 - protein, 10 aa, synthetic construct
  REGION 1..10: note = Nucleolin (546-555)
REIEGRAIRL

SEQ ID NO: 15813 - protein, 9 aa, synthetic construct
  REGION 1..9: note = Cytoplasmic dynein 1 heavy chain 1 (254-262)
REIQKVTKL

SEQ ID NO: 15814 - protein, 11 aa, synthetic construct
  REGION 1..11: note = Death-associated protein kinase 3 (69-79)
REIRHPNIITL

SEQ ID NO: 15815 - protein, 10 aa, synthetic construct
  REGION 1..10: note = E3 ubiquitin-protein ligase BRE1B (440-449)
REKDDANFKL

SEQ ID NO: 15816 - protein, 9 aa, synthetic construct
  REGION 1..9: note = Transcription factor AP-2 alpha (Activating enhancer binding protein 2 alpha), isoform CRA_c (266-274)
REKLDKIGL

SEQ ID NO: 15817 - protein, 9 aa, synthetic construct
  REGION 1..9: note = Putative pituitary tumor-transforming gene 3 protein (153-161)
RELEKLFQL

SEQ ID NO: 15818 - protein, 10 aa, synthetic construct
  REGION 1..10: note = Guanine nucleotide-binding protein G(I)/G(S)/G(T) subunit beta-2 (137-146)
RELPGHTGYL

SEQ ID NO: 15819 - protein, 10 aa, synthetic construct
  REGION 1..10: note = Glycosylphosphatidylinositol anchor attachment 1 protein (565-574)
RELQEAPLSL

SEQ ID NO: 15820 - protein, 10 aa, synthetic construct
  REGION 1..10: note = Ataxin-10 (119-128)
RELRVEQESL

SEQ ID NO: 15821 - protein, 10 aa, synthetic construct
  REGION 1..10: note = TSC22 domain family protein 3 (77-86)
RELVEKNSQL

SEQ ID NO: 15822 - protein, 11 aa, synthetic construct
  REGION 1..11: note = Src substrate cortactin (59-69)
RENVFQEHQTL

SEQ ID NO: 15823 - protein, 11 aa, synthetic construct
  REGION 1..11: note = WW domain-containing transcription regulator protein 1 (308-318)
REQSTDSGLGL

SEQ ID NO: 15824 - protein, 9 aa, synthetic construct
  REGION 1..9: note = Endoplasmin (427-435)
RETLQQHKL

SEQ ID NO: 15825 - protein, 10 aa, synthetic construct
  REGION 1..10: note = Rho guanine nucleotide exchange factor 2 (633-642)
REVEGLKDLL

SEQ ID NO: 15826 - protein, 9 aa, synthetic construct
  REGION 1..9: note = Bifunctional methylenetetrahydrofolate dehydrogenase/cyclohydrolase, mitochondrial (337-345)
REVLKSKEL

SEQ ID NO: 15827 - protein, 9 aa, synthetic construct
  REGION 1..9: note = Phosphoserine aminotransferase (319-327)
RFLDKALEL

SEQ ID NO: 15828 - protein, 10 aa, synthetic construct
  REGION 1..10: note = AP-5 complex subunit sigma-1 (172-181)
RFLPHGQLLF

SEQ ID NO: 15829 - protein, 9 aa, synthetic construct
  REGION 1..9: note = Arf-GAP with coiled-coil, ANK repeat and PH domain-containing protein 2 (770-778)
RFQQDSQKF

SEQ ID NO: 15830 - protein, 9 aa, synthetic construct
  REGION 1..9: note = NADH dehydrogenase (ubiquinone) 1 beta subcomplex subunit 5, mitochondrial (61-69)
RFYDRRFLK

SEQ ID NO: 15831 - protein, 11 aa, synthetic construct
  REGION 1..11: note = Putative helicase MOV-10 (450-460)
RGLDDIKDLKV

SEQ ID NO: 15832 - protein, 11 aa, synthetic construct
  REGION 1..11: note = Protein EFR3 homolog A (165-175)
RIAGIRGIQGV

SEQ ID NO: 15833 - protein, 11 aa, synthetic construct
  REGION 1..11: note = Nuclear cap-binding protein subunit 1 (194-204)
RIFANTESYLK

SEQ ID NO: 15834 - protein, 9 aa, synthetic construct
  REGION 1..9: note = Transcription cofactor vestigial-like protein 4 (79-87)
RIFNPHLNK

SEQ ID NO: 15835 - protein, 9 aa, synthetic construct
  REGION 1..9: note = Tubulin polyglutamylase TTLL7 (765-773)
RIFNRVFNR

SEQ ID NO: 15836 - protein, 10 aa, synthetic construct
  REGION 1..10: note = Centrosomal protein of 192 kDa (1349-1358)
RIFPDKFVLK

SEQ ID NO: 15837 - protein, 9 aa, synthetic construct
  REGION 1..9: note = V-type proton ATPase subunit B, brain isoform (380-388)
RIFPKEMLK

SEQ ID NO: 15838 - protein, 9 aa, synthetic construct
  REGION 1..9: note = COUP transcription factor 2 (293-301)
RIFQEQVEK

SEQ ID NO: 15839 - protein, 9 aa, synthetic construct
  REGION 1..9: note = BolA-like protein 3 (99-107)
RIFTSVPKR

SEQ ID NO: 15840 - protein, 10 aa, synthetic construct
  REGION 1..10: note = Serine/threonine-protein kinase PLK2 (71-80)
RIIVDPTTGK

SEQ ID NO: 15841 - protein, 9 aa, synthetic construct
  REGION 1..9: note = Exostosin-2 (166-174)
RIKETAQAM

SEQ ID NO: 15842 - protein, 11 aa, synthetic construct
  REGION 1..11: note = Calcium-independent phospholipase A2-gamma (131-141)
RIKSTLNSVSK

SEQ ID NO: 15843 - protein, 11 aa, synthetic construct
  REGION 1..11: note = Inactive tyrosine-protein kinase 7 (630-640)
RILDPTKLGPR

SEQ ID NO: 15844 - protein, 11 aa, synthetic construct
  REGION 1..11: note = MORC family CW-type zinc finger protein 3 (659-669)
RILEMNDKYVK

SEQ ID NO: 15845 - protein, 9 aa, synthetic construct
  REGION 1..9: note = Eukaryotic translation initiation factor 3 subunit C-like protein (507-515)
RILHTYYKF

SEQ ID NO: 15846 - protein, 10 aa, synthetic construct
  REGION 1..10: note = DNA polymerase alpha subunit B (497-506)
RILKHILTQR

SEQ ID NO: 15847 - protein, 9 aa, synthetic construct
  REGION 1..9: note = Chromodomain-helicase-DNA-binding protein 4 (623-631)
RILNHSVDK

SEQ ID NO: 15848 - protein, 9 aa, synthetic construct
  REGION 1..9: note = Catechol O-methyltransferase (58-66)
RILNHVLQH

SEQ ID NO: 15849 - protein, 10 aa, synthetic construct
  REGION 1..10: note = Cleavage stimulation factor subunit 2 tau variant (180-189)
RIMDPEIALK

SEQ ID NO: 15850 - protein, 9 aa, synthetic construct
  REGION 1..9: note = Rho GTPase-activating protein 7 (278-286)
RINVPMVRK

SEQ ID NO: 15851 - protein, 11 aa, synthetic construct
  REGION 1..11: note = Pleckstrin homology domain-containing family A member 5 (177-187)
RIQDVMEGLSK

SEQ ID NO: 15852 - protein, 9 aa, synthetic construct
  REGION 1..9: note = ATP-dependent RNA helicase DDX19B (454-462)
RIQEHFNKK

SEQ ID NO: 15853 - protein, 9 aa, synthetic construct
  REGION 1..9: note Dolichyl-diphosphooligosaccharide-proteinosyltransferase subunit DAD1 (74-82)
RIQINPQNK

SEQ ID NO: 15854 - protein, 9 aa, synthetic construct
  REGION 1..9: note = Dynamin-like 120 kDa protein, mitochondrial (500-508)
RIQQIIEGK

SEQ ID NO: 15855 - protein, 11 aa, synthetic construct
  REGION 1..11: note = Coronin-2B (108-118)
RIWEIPEGGLK

SEQ ID NO: 15856 - protein, 12 aa, synthetic construct
  REGION 1..12: note = Coronin-2B (113-124)
RIWEIPEGGLKR

SEQ ID NO: 15857 - protein, 9 aa, synthetic construct
  REGION 1..9: note = E3 ubiquitin-protein ligase HECTD1 (480-488)
RIWEPTYTI

SEQ ID NO: 15858 - protein, 10 aa, synthetic construct
  REGION 1..10: note = Protein kinase C iota type (269-278)
RIYAMKVVKK

SEQ ID NO: 15859 - protein, 10 aa, synthetic construct
  REGION 1..10: note = DNA dC-dU-editing enzyme APOBEC-3B (119-128)
RIYDYDPLYK

SEQ ID NO: 15860 - protein, 12 aa, synthetic construct
  REGION 1..12: note = Fragile X mental retardation syndrome-related protein 1 (263-274)
RIYGESADAVKK

SEQ ID NO: 15861 - protein, 11 aa, synthetic construct
  REGION 1..11: note = Arpin (3-13)
RIYHDGALRNK

SEQ ID NO: 15862 - protein, 9 aa, synthetic construct
  REGION 1..9: note = Long-chain-fatty-acid-CoA ligase 3 (389-397)
RIYKNVMNK

SEQ ID NO: 15863 - protein, 12 aa, synthetic construct
  REGION 1..12: note = Reticulon-1 (565-576)
RIYKSVLQAVQK

SEQ ID NO: 15864 - protein, 9 aa, synthetic construct
  REGION 1..9: note = Protein MMS22-like (284-292)
RIYSKFHQK

SEQ ID NO: 15865 - protein, 11 aa, synthetic construct
  REGION 1..11: note = Cytoplasmic dynein 1 heavy chain 1 (1603-1613)
RLADLLGKIQK

SEQ ID NO: 15866 - protein, 9 aa, synthetic construct
  REGION 1..9: note = NADH dehydrogenase (ubiquinone) 1 beta subcomplex subunit 4 (36-44)
RLAIRAQLK

SEQ ID NO: 15867 - protein, 9 aa, synthetic construct
  REGION 1..9: note = Vacuolar protein sorting-associated protein 51 homolog (159-167)
RLAQQLRQR

SEQ ID NO: 15868 - protein, 9 aa, synthetic construct
  REGION 1..9: note = Replication initiator 1 (39-47)
RLASLQSEV

SEQ ID NO: 15869 - protein, 9 aa, synthetic construct
  REGION 1..9: note = HEAT repeat-containing protein 2 (751-759)
RLDDVSNDV

SEQ ID NO: 15870 - protein, 9 aa, synthetic construct
  REGION 1..9: note = Arf-GAP with Rho-GAP domain, ANK repeat and PH domain-containing protein 1 (106-114)
RLDTDHLRY

SEQ ID NO: 15871 - protein, 10 aa, synthetic construct
  REGION 1..10: note = Centrosomal protein of 41 kDa (29-38)
RLDTGNSMTK

SEQ ID NO: 15872 - protein, 9 aa, synthetic construct
  REGION 1..9: note = Protein flightless-1 homolog (672-680)
RLFAEKINK

SEQ ID NO: 15873 - protein, 9 aa, synthetic construct
  REGION 1..9: note = Elongator complex protein 2 (264-272)
RLFAPWKRK

SEQ ID NO: 15874 - protein, 9 aa, synthetic construct
  REGION 1..9: note = NEDD8-conjugating enzyme Ubc12 (158-166)
RLFEQNVQR

SEQ ID NO: 15875 - protein, 9 aa, synthetic construct
  REGION 1..9: note = Synaptonemal complex protein SC65 (104-112)
RLFGRVLER

SEQ ID NO: 15876 - protein, 9 aa, synthetic construct
  REGION 1..9: note = Plectin (177-185)
RLFNAIIHR

SEQ ID NO: 15877 - protein, 10 aa, synthetic construct
  REGION 1..10: note = Transformation/transcription domain-associated protein (1453-1462)
RLFPNSFNDK

SEQ ID NO: 15878 - protein, 10 aa, synthetic construct
  REGION 1..10: note = Zinc finger protein ZXDC (460-469)
RLFTSKHSMK

SEQ ID NO: 15879 - protein, 9 aa, synthetic construct
  REGION 1..9: note = Insulin-degrading enzyme (683-691)
RLHIEALLH

SEQ ID NO: 15880 - protein, 11 aa, synthetic construct
  REGION 1..11: note = Proteasome subunit alpha type-4 (20-30)
RLIAQRYLLQY

SEQ ID NO: 15881 - protein, 10 aa, synthetic construct
  REGION 1..10: note = Probable ATP-dependent RNA helicase DDX17 (304-313)
RLIDFLESGK

SEQ ID NO: 15882 - protein, 11 aa, synthetic construct
  REGION 1..11: note = General transcription factor 3C polypeptide 1 (377-387)
RLIESLFTIQK

SEQ ID NO: 15883 - protein, 12 aa, synthetic construct
  REGION 1..12: note = Protein S100-A13 (77-88)
RLIGELAKEIRK

SEQ ID NO: 15884 - protein, 11 aa, synthetic construct
  REGION 1..11: note = ATP synthase subunit a (41-51)
RLITTQQWLIK

SEQ ID NO: 15885 - protein, 11 aa, synthetic construct
  REGION 1..11: note = Peroxisomal multifunctional enzyme type 2 (634-644)
RLKDIGPEVVK

SEQ ID NO: 15886 - protein, 9 aa, synthetic construct
  REGION 1..9: note = Cardiolipin synthase (CMP-forming) (235-243)
RLKPTFISK

SEQ ID NO: 15887 - protein, 12 aa, synthetic construct
  REGION 1..12: note = Eukaryotic translation initiation factor 3 subunit A (340-351)
RLLDMDGIIVEK

SEQ ID NO: 15888 - protein, 9 aa, synthetic construct
  REGION 1..9: note = Oxidation resistance protein 1 (21-37)
RLLDSEIKL

SEQ ID NO: 15889 - protein, 10 aa, synthetic construct
  REGION 1..10: note = Mucosa-associated lymphoid tissue lymphoma translocation protein 1 (834-843)
RLLEDKKITV

SEQ ID NO: 15890 - protein, 11 aa, synthetic construct
  REGION 1..11: note = Condensin-2 complex subunit D3 (225-235)
RLLPKFSLKEK

SEQ ID NO: 15891 - protein, 10 aa, synthetic construct
  REGION 1..10: note = Uridine-cytidine kinase-like 1 (31-40)
RLLPPVGTGR

SEQ ID NO: 15892 - protein, 10 aa, synthetic construct
  REGION 1..10: note = Lymphokine-activated killer T-cell-originated protein kinase (81-90)
RLMDEAKILK

SEQ ID NO: 15893 - protein, 9 aa, synthetic construct
  REGION 1..9: note = GCN1 general control of amino-acid synthesis 1-like 1 (961-969)
RLMEIYQEK

SEQ ID NO: 15894 - protein, 9 aa, synthetic construct
  REGION 1..9: note = RILP-like protein 1 (200-208)
RLMKINHDL

SEQ ID NO: 15895 - protein, 9 aa, synthetic construct
  REGION 1..9: note = Sperm-specific antigen 2 (294-302)
RLMKTLSKL

SEQ ID NO: 15896 - protein, 9 aa, synthetic construct
  REGION 1..9: note = Glyoxylate reductase/hydroxypyruvate reductase (5-13)
RLMKVFVTR

SEQ ID NO: 15897 - protein, 9 aa, synthetic construct
  REGION 1..9: note = Bombesin receptor-activated protein C6orf89 (119-127)
RLMSLPIAK

SEQ ID NO: 15898 - protein, 10 aa, synthetic construct
  REGION 1..10: note = Fibronectin type-III domain-containing protein 3A (948-957)
RLNESTSYKF

SEQ ID NO: 15899 - protein, 9 aa, synthetic construct
  REGION 1..9: note = DNA damage-binding protein 1 (1057-1065)
RLNKVIKSV

SEQ ID NO: 15900 - protein, 10 aa, synthetic construct
  REGION 1..10: note = Serine/threonine-protein phosphatase 2A 56 kDa regulatory subunit delta isoform (408-417)
RLNPQYPMFR

SEQ ID NO: 15901 - protein, 9 aa, synthetic construct
  REGION 1..9: note = Tuberin (712-720)
RLPESLRYK

SEQ ID NO: 15902 - protein, 9 aa, synthetic construct
  REGION 1..9: note = Poly (ADP-ribose) polymerase 10 (221-229)
RLPGPLGTV

SEQ ID NO: 15903 - protein, 10 aa, synthetic construct
  REGION 1..10: note = Lipase maturation factor 1 (191-200)
RLPQHTPTSR

SEQ ID NO: 15904 - protein, 9 aa, synthetic construct
  REGION 1..9: note = ER membrane protein complex subunit 7 (133-141)
RLPYPLQMK

SEQ ID NO: 15905 - protein, 10 aa, synthetic construct
  REGION 1..10: note = Guanine nucleotide-binding protein G(s) subunit alpha isoforms short (255-264)
RLQEALNLFK

SEQ ID NO: 15906 - protein, 9 aa, synthetic construct
  REGION 1..9: note = Syntaxin-18 (265-273)
RLQEIFTEK

SEQ ID NO: 15907 - protein, 9 aa, synthetic construct
  REGION 1..9: note = Pyridoxal-dependent decarboxylase domain-containing protein 1 (365-373)
RLQESLKKV

SEQ ID NO: 15908 - protein, 10 aa, synthetic construct
  REGION 1..10: note = Serine/threonine-protein kinase SIK2 (468-477)
RLQKPSLLSK

SEQ ID NO: 15909 - protein, 9 aa, synthetic construct
  REGION 1..9: note = ELAV-like protein 1 (85-93)
RLQSKTIKV

SEQ ID NO: 15910 - protein, 9 aa, synthetic construct
  REGION 1..9: note = E3 ubiquitin-protein ligase UBR5 (21-29)
RLREVSEKL

SEQ ID NO: 15911 - protein, 9 aa, synthetic construct
  REGION 1..9: note = Pituitary tumor-transforming gene 1 protein-interacting protein (14-22)
RLRLGGAAL

SEQ ID NO: 15912 - protein, 9 aa, synthetic construct
  REGION 1..9: note = Serine/arginine-rich splicing factor 6 (8-16)
RLSYNVREK

SEQ ID NO: 15913 - protein, 10 aa, synthetic construct
  REGION 1..10: note = DNA mismatch repair protein Mlh1 (265-274)
RLVESTSLRK

SEQ ID NO: 15914 - protein, 10 aa, synthetic construct
  REGION 1..10: note = E3 SUMO-protein ligase RanBP2 (170-179)
RLVEVYRSTK

SEQ ID NO: 15915 - protein, 9 aa, synthetic construct
  REGION 1..9: note = V-type proton ATPase subunit E 2 (44-52)
RLVQTQRLK

SEQ ID NO: 15916 - protein, 9 aa, synthetic construct
  REGION 1..9: note = Sterol regulatory element-binding protein 2 (632-640)
RLVRWLLKK

SEQ ID NO: 15917 - protein, 9 aa, synthetic construct
  REGION 1..9: note = Protein disulfide-isomerase A3 (115-123)
RLWHIQSKK

SEQ ID NO: 15918 - protein, 9 aa, synthetic construct
  REGION 1..9: note = Transducin beta-like protein 3 (102-110)
RLWKAIHTA

SEQ ID NO: 15919 - protein, 10 aa, synthetic construct
  REGION 1..10: note = GRAM domain-containing protein 1B (198-207)
RLWQNALLEK

SEQ ID NO: 15920 - protein, 10 aa, synthetic construct
  REGION 1..10: note = Inositol 1,4,5-trisphosphate receptor type 3 (801-810)
RLWTEIPTAI

SEQ ID NO: 15921 - protein, 9 aa, synthetic construct
  REGION 1..9: note = Annexin A5 (89-97)
RLYDAYELK

SEQ ID NO: 15922 - protein, 10 aa, synthetic construct
  REGION 1..10: note = DNA damage-binding protein 1 (134-143)
RLYDGLFKVI

SEQ ID NO: 15923 - protein, 9 aa, synthetic construct
  REGION 1..9: note = Nesprin-1 (318-326)
RLYDLPAKR

SEQ ID NO: 15924 - protein, 9 aa, synthetic construct
  REGION 1..9: note = Annexin A2 (273-281)
RLYDSMKGK

SEQ ID NO: 15925 - protein, 9 aa, synthetic construct
  REGION 1..9: note = DNA topoisomerase 3-alpha (407-415)
RLYEFIVRH

SEQ ID NO: 15926 - protein, 9 aa, synthetic construct
  REGION 1..9: note = Glutamine-tRNA ligase (679-687)
RLYERLFQH

SEQ ID NO: 15927 - protein, 12 aa, synthetic construct
  REGION 1..12: note = Eukaryotic translation initiation factor 3 subunit A (172-183)
RLYHDIAQQAFK

SEQ ID NO: 15928 - protein, 9 aa, synthetic construct
  REGION 1..9: note = GPI transamidase component PIG-T (503-511)
RLYTEPLLV

SEQ ID NO: 15929 - protein, 9 aa, synthetic construct
  REGION 1..9: note = 2-hydroxyacyl-CoA lyase 1 (135-143)
RLYTKFSAR

SEQ ID NO: 15930 - protein, 8 aa, synthetic construct
  REGION 1..8: note = Uncharacterized protein (677-684)
RLYVGREK

SEQ ID NO: 15931 - protein, 9 aa, synthetic construct
  REGION 1..9: note = Protein sel-1 homolog 3 (282-290)
RMDYPVFTV

SEQ ID NO: 15932 - protein, 11 aa, synthetic construct
  REGION 1..11: note = Vimentin (13-23)
RMFGGPGTASR

SEQ ID NO: 15933 - protein, 9 aa, synthetic construct
  REGION 1..9: note = Dynamin-1 (271-279)
RMGTPYLQK

SEQ ID NO: 15934 - protein, 9 aa, synthetic construct
  REGION 1..9: note = Eukaryotic translation initiation factor 3 subunit C-like protein (709-717)
RMISKQFHH

SEQ ID NO: 15935 - protein, 10 aa, synthetic construct
  REGION 1..10: note = Protein FAM208B (229-238)
RMKDPTFLGK

SEQ ID NO: 15936 - protein, 10 aa, synthetic construct
  REGION 1..10: note = UPF0585 protein C16orf13 (168-177)
RMVDMPANNK

SEQ ID NO: 15937 - protein, 9 aa, synthetic construct
  REGION 1..9: note = 60S ribosomal protein L13a (117-125)
RMVVPAALK

SEQ ID NO: 15938 - protein, 9 aa, synthetic construct
  REGION 1..9: note = Cytoplasmic FMR1-interacting protein 1 (286-294)
RMYLTPSEK

SEQ ID NO: 15939 - protein, 10 aa, synthetic construct
  REGION 1..10: note = Phosphatidate cytidylyltransferase 2 (307-316)
RMYPFQIHSI

SEQ ID NO: 15940 - protein, 9 aa, synthetic construct
  REGION 1..9: note = RNA cytidine acetyltransferase (629-637)
RPAERLDYL

SEQ ID NO: 15941 - protein, 9 aa, synthetic construct
  REGION 1..9: note = Cell division cycle protein 23 homolog (423-431)
RPNDSRMLV

SEQ ID NO: 15942 - protein, 9 aa, synthetic construct
  REGION 1..9: note = Transgelin-2 (44-52)
RPQPGRENF

SEQ ID NO: 15943 - protein, 10 aa, synthetic construct
  REGION 1..10: note = Myosin regulatory light polypeptide 9 (14-23)
RPQRATSNVF

SEQ ID NO: 15944 - protein, 9 aa, synthetic construct
  REGION 1..9: note = Pre-mRNA-splicing factor SYF1 (370-378)
RPREIINTY

SEQ ID NO: 15945 - protein, 10 aa, synthetic construct
  REGION 1..10: note = Trafficking protein particle complex subunit 4 (100-109)
RPRLTSNEKL

SEQ ID NO: 15946 - protein, 10 aa, synthetic construct
  REGION 1..10: note = Cytochrome c oxidase assembly factor 3 homolog, mitochondrial (39-48)
RQAELAQWQK

SEQ ID NO: 15947 - protein, 9 aa, synthetic construct
  REGION 1..9: note = Focal adhesion kinase 1 (476-484)
RQFDHPHIV

SEQ ID NO: 15948 - protein, 11 aa, synthetic construct
  REGION 1..11: note = Acidic fibroblast growth factor intracellular-binding protein (136-146)
RQFDNFKRVFK

SEQ ID NO: 15949 - protein, 11 aa, synthetic construct
  REGION 1..11: note = MICOS complex subunit MIC19 (130-140)
RQLEEKDRVLK

SEQ ID NO: 15950 - protein, 11 aa, synthetic construct
  REGION 1..11: note = 40S ribosomal protein S29 (44-54)
RQYAKDIGFIK

SEQ ID NO: 15951 - protein, 10 aa, synthetic construct
  REGION 1..10: note = F-box only protein 33 (21-30)
RQYDKFLTHF

SEQ ID NO: 15952 - protein, 9 aa, synthetic construct
  REGION 1..9: note = SH2B adapter protein 1 (560-568)
RRGEYVLTF

SEQ ID NO: 15953 - protein, 9 aa, synthetic construct
  REGION 1..9: note = Multivesicular body subunit 12A (198-206)
RRNDSIYEA

SEQ ID NO: 15954 - protein, 9 aa, synthetic construct
  REGION 1..9: note = Chloride intracellular channel protein 1 (50-58)
RRTETVQKL

SEQ ID NO: 15955 - protein, 9 aa, synthetic construct
  REGION 1..9: note = Eukaryotic translation initiation factor 3 subunit L (327-335)
RRYQDAIRV

SEQ ID NO: 15956 - protein, 9 aa, synthetic construct
  REGION 1..9: note = Breast cancer metastasis-suppressor 1-like protein (255-263)
RSEEGRLYY

SEQ ID NO: 15957 - protein, 11 aa, synthetic construct
  REGION 1..11: note = Putative protein N-methyltransferase FAM86B1 (27-37)
RSFPWQSLEAK

SEQ ID NO: 15958 - protein, 11 aa, synthetic construct
  REGION 1..11: note = Dual specificity protein kinase CLK1 (60-70)
RSINEKDYHSR

SEQ ID NO: 15959 - protein, 11 aa, synthetic construct
  REGION 1..11: note = Transmembrane protein 209 (277-287)
RSMGDYAQTLK

SEQ ID NO: 15960 - protein, 9 aa, synthetic construct
  REGION 1..9: note = Annexin A11 (302-310)
RSNEHIREL

SEQ ID NO: 15961 - protein, 9 aa, synthetic construct
  REGION 1..9: note = Cullin-associated NEDD8-dissociated protein 1 (758-766)
RSTDSIRLL

SEQ ID NO: 15962 - protein, 9 aa, synthetic construct
  REGION 1..9: note = Non-structural maintenance of chromosomes element 4 homolog A (203-211)
RTAENTFNK

SEQ ID NO: 15963 - protein, 11 aa, synthetic construct
  REGION 1..11: note = Nephrocystin-1 (181-191)
RTDPHWSAVQK

SEQ ID NO: 15964 - protein, 10 aa, synthetic construct
  REGION 1..10: note = Arginine-glutamic acid dipeptide repeats protein (74-83)
RTDTGEITSY

SEQ ID NO: 15965 - protein, 11 aa, synthetic construct
  REGION 1..11: note = Ectonucleoside triphosphate diphosphohydrolase 6 (319-329)
RTEEVKHVDFY

SEQ ID NO: 15966 - protein, 12 aa, synthetic construct
  REGION 1..12: note = Protein LSM12 homolog (95-106)
RTEKEEKLSQAY

SEQ ID NO: 15967 - protein, 10 aa, synthetic construct
  REGION 1..10: note = Tubulin-tyrosine ligase-like protein 12 (394-403)
RTELPQFVSY

SEQ ID NO: 15968 - protein, 9 aa, synthetic construct
  REGION 1..9: note = A-kinase anchor protein 13 (994-1002)
RTFSYIKNK

SEQ ID NO: 15969 - protein, 12 aa, synthetic construct
  REGION 1..12: note = Biogenesis of lysosome-related organelles complex 1 subunit 1 (106-117)
RTIATALEYVYK

SEQ ID NO: 15970 - protein, 9 aa, synthetic construct
  REGION 1..9: note = WASH complex subunit 7 (330-338)
RTIDKKFYK

SEQ ID NO: 15971 - protein, 9 aa, synthetic construct
  REGION 1..9: note = Leucine-rich repeat-containing protein 57 (41-49)
RTIDLSNNK

SEQ ID NO: 15972 - protein, 12 aa, synthetic construct
  REGION 1..12: note = DNA damage-binding protein 2 (181-192)
RTIDVFDGNSGK

SEQ ID NO: 15973 - protein, 11 aa, synthetic construct
  REGION 1..11: note = F-box only protein 25 (19-29)
RTILEMTQILK

SEQ ID NO: 15974 - protein, 11 aa, synthetic construct
  REGION 1..11: note = DDB1- and CUL4-associated factor 4 (390-400)
RTIPSPYPASK

SEQ ID NO: 15975 - protein, 9 aa, synthetic construct
  REGION 1..9: note = Protein CEBPZOS (3-11)
RTLEPLAKK

SEQ ID NO: 15976 - protein, 12 aa, synthetic construct
  REGION 1..12: note = Solute carrier family 22 member 18 (377-388)
RTLGPTVGGLLY

SEQ ID NO: 15977 - protein, 9 aa, synthetic construct
  REGION 1..9: note = Coatomer subunit gamma-2 (309-317)
RTLNKVAMK

SEQ ID NO: 15978 - protein, 12 aa, synthetic construct
  REGION 1..12: note = Nuclear factor 1 C-type (82-93)
RTLPSTSSSGSK

SEQ ID NO: 15979 - protein, 9 aa, synthetic construct
  REGION 1..9: note = Pinin (6-14)
RTLQEQLEK

SEQ ID NO: 15980 - protein, 11 aa, synthetic construct
  REGION 1..11: note = Ornithine decarboxylase antizyme 1 (32-42)
RTMPLLSLHSR

SEQ ID NO: 15981 - protein, 9 aa, synthetic construct
  REGION 1..9: note = 2,4-dienoyl-CoA reductase, mitochondrial (33-41)
RTNFFSNWK

SEQ ID NO: 15982 - protein, 9 aa, synthetic construct
  REGION 1..9: note = Endoplasmic reticulum-Golgi intermediate compartment protein 3 (297-305)
RTNQFSVTR

SEQ ID NO: 15983 - protein, 9 aa, synthetic construct
  REGION 1..9: note = RNA-binding protein 26 (515-523)
RTNSPGFQK

SEQ ID NO: 15984 - protein, 10 aa, synthetic construct
  REGION 1..10: note = Breast cancer type 2 susceptibility protein (2034-2043)
RTPEHLISQK

SEQ ID NO: 15985 - protein, 9 aa, synthetic construct
  REGION 1..9: note = Short transient receptor potential channel 4-associated protein (364-372)
RTQLPQSMK

SEQ ID NO: 15986 - protein, 11 aa, synthetic construct
  REGION 1..11: note = Signal recognition particle 14 kDa protein (21-31)
RTSGSVYITLK

SEQ ID NO: 15987 - protein, 9 aa, synthetic construct
  REGION 1..9: note = Histone-lysine N-methyltransferase 2A (1655-1663)
RTTSHLLRY

SEQ ID NO: 15988 - protein, 10 aa, synthetic construct
  REGION 1..10: note = Diphosphoinositol polyphosphate phosphohydrolase 3-alpha (9-18)
RTYDPEGFKK

SEQ ID NO: 15989 - protein, 11 aa, synthetic construct
  REGION 1..11: note = Transcription factor p65 (287-297)
RTYETFKSIMK

SEQ ID NO: 15990 - protein, 10 aa, synthetic construct
  REGION 1..10: note = Ras and Rab interactor 1 (442-451)
RTYSPSAQVK

SEQ ID NO: 15991 - protein, 11 aa, synthetic construct
  REGION 1..11: note = Ras and Rab interactor 1 (442-452)
RTYSPSAQVKR

SEQ ID NO: 15992 - protein, 11 aa, synthetic construct
  REGION 1..11: note = Acyl-CoA dehydrogenase family member 10 (557-567)
RVAAILQGVYK

SEQ ID NO: 15993 - protein, 11 aa, synthetic construct
  REGION 1..11: note = Cytochrome c oxidase subunit 7A-related protein, mitochondrial (26-36)
RVAPGQLGHEK

SEQ ID NO: 15994 - protein, 9 aa, synthetic construct
  REGION 1..9: note = E3 ubiquitin-protein ligase TRIP12 (1581-1589)
RVAPRLDRK

SEQ ID NO: 15995 - protein, 11 aa, synthetic construct
  REGION 1..11: note = Coiled-coil domain-containing protein 115 (34-44)
RVEEGWLSLAK

SEQ ID NO: 15996 - protein, 9 aa, synthetic construct
  REGION 1..9: note = Serine/threonine-protein kinase B-raf (158-166)
RVFLPNKQR

SEQ ID NO: 15997 - protein, 11 aa, synthetic construct
  REGION 1..11: note = Coatomer subunit gamma-1 (32-42)
RVFNETPINPR

SEQ ID NO: 15998 - protein, 9 aa, synthetic construct
  REGION 1..9: note = Arf-GAP with GTPase, ANK repeat and PH domain-containing protein 3 (240-248)
RVFQDVAQK

SEQ ID NO: 15999 - protein, 10 aa, synthetic construct
  REGION 1..10: note = 28S ribosomal protein S15, mitochondrial (238-247)
RVFQETQKLK

SEQ ID NO: 16000 - protein, 11 aa, synthetic construct
  REGION 1..11: note = 28S ribosomal protein S15, mitochondrial (238-248)
RVFQETQKLKK

SEQ ID NO: 16001 - protein, 9 aa, synthetic construct
  REGION 1..9: note = EH domain-containing protein 2 (305-313)
RVHAYIISY

SEQ ID NO: 16002 - protein, 10 aa, synthetic construct
  REGION 1..10: note = L-lactate dehydrogenase A chain (269-278)
RVHPVSTMIK

SEQ ID NO: 16003 - protein, 10 aa, synthetic construct
  REGION 1..10: note = E3 ubiquitin-protein ligase NEDD4 (24-33)
RVIAGIGLAK

SEQ ID NO: 16004 - protein, 9 aa, synthetic construct
  REGION 1..9: note = 60S ribosomal protein L3 (156-164)
RVIAHTQMR

SEQ ID NO: 16005 - protein, 9 aa, synthetic construct
  REGION 1..9: note = Lon protease homolog 2, peroxisomal (241-249)
RVIAIRPIR

SEQ ID NO: 16006 - protein, 9 aa, synthetic construct
  REGION 1..9: note = Ran GTPase-activating protein 1 (67-75)
RVIAKALEK

SEQ ID NO: 16007 - protein, 10 aa, synthetic construct
  REGION 1..10: note = SAFB-like transcription modulator (26-35)
RVIDLKSELK

SEQ ID NO: 16008 - protein, 11 aa, synthetic construct
  REGION 1..11: note = Histone-binding protein RBBP7 (58-68)
RVINEEYKIWK

SEQ ID NO: 16009 - protein, 9 aa, synthetic construct
  REGION 1..9: note = Pumilio homolog 2 (311-319)
RVIQRILEH

SEQ ID NO: 16010 - protein, 11 aa, synthetic construct
  REGION 1..11: note = 60S ribosomal protein L13 (167-177)
RVITEEEKNFK

SEQ ID NO: 16011 - protein, 12 aa, synthetic construct
  REGION 1..12: note = Cullin-4A (273-284)
RVITYLDHSTQK

SEQ ID NO: 16012 - protein, 10 aa, synthetic construct
  REGION 1..10: note = COX assembly mitochondrial protein 2 homolog (63-72)
RVIVTHGSLK

SEQ ID NO: 16013 - protein, 12 aa, synthetic construct
  REGION 1..12: note = Guanine nucleotide-binding protein G(I)/G(S)/G(O) subunit gamma-5 (25-36)
RVKVSQAAADLK

SEQ ID NO: 16014 - protein, 11 aa, synthetic construct
  REGION 1..11: note = Monofunctional C1-tetrahydrofolate synthase, mitochondrial (497-507)
RVLDTNDRFLR

SEQ ID NO: 16015 - protein, 9 aa, synthetic construct
  REGION 1..9: note = 3-hydroxybutyrate dehydrogenase type 2 (55-63)
RVLDVTKKK

SEQ ID NO: 16016 - protein, 10 aa, synthetic construct
  REGION 1..10: note = Cysteine-rich with EGF-like domain protein 1 (411-420)
RVLEGFIKGR

SEQ ID NO: 16017 - protein, 12 aa, synthetic construct
  REGION 1..12: note = Serine hydroxymethyltransferase, mitochondrial (374-385)
RVLELVSITANK

SEQ ID NO: 16018 - protein, 12 aa, synthetic construct
  REGION 1..12: note = Lon protease homolog 2, peroxisomal (308-319)
RVLEYLAVRQLK

SEQ ID NO: 16019 - protein, 9 aa, synthetic construct
  REGION 1..9: note = Focadhesin (1784-1792)
RVLPEFKKK

SEQ ID NO: 16020 - protein, 11 aa, synthetic construct
  REGION 1..11: note = Zinc finger MYM-type protein 1 (867-877)
RVLSVTGILSK

SEQ ID NO: 16021 - protein, 9 aa, synthetic construct
  REGION 1..9: note = Exostosin-like 2 (12-20)
RVMGIRVLR

SEQ ID NO: 16022 - protein, 11 aa, synthetic construct
  REGION 1..11: note = Inner centromere protein (907-917)
RVPSSLAYSLK

SEQ ID NO: 16023 - protein, 10 aa, synthetic construct
  REGION 1..10: note = DNA topoisomerase I, mitochondrial (376-385)
RVPVEKPVYK

SEQ ID NO: 16024 - protein, 9 aa, synthetic construct
  REGION 1..9: note = 6-phosphofructo-2-kinase/fructose-2,6-bisphosphatase 3 (43-51)
RVQDHIQSR

SEQ ID NO: 16025 - protein, 10 aa, synthetic construct
  REGION 1..10: note = Melanoma inhibitory activity protein 3 (1184-1193)
RVQEENARLK

SEQ ID NO: 16026 - protein, 9 aa, synthetic construct
  REGION 1..9: note = DNA replication licensing factor MCM3 (234-242)
RVQVVGTYR

SEQ ID NO: 16027 - protein, 14 aa, synthetic construct
  REGION 1..14: note = LysM and putative peptidoglycan-binding domain-containing protein 2 (74-87)
RVRAGDTLQGIALK

SEQ ID NO: 16028 - protein, 11 aa, synthetic construct
  REGION 1..11: note = Galectin-1 (11-21)
RVRGEVAPDAK

SEQ ID NO: 16029 - protein, 9 aa, synthetic construct
  REGION 1..9: note = Protein phosphatase methylesterase 1 (228-236)
RVSMVGQVK

SEQ ID NO: 16030 - protein, 10 aa, synthetic construct
  REGION 1..10: note = SLAIN motif-containing protein 2 (375-384)
RVSPQPMISR

SEQ ID NO: 16031 - protein, 9 aa, synthetic construct
  REGION 1..9: note = RNA-binding protein Raly (133-141)
RVTVPLVRR

SEQ ID NO: 16032 - protein, 9 aa, synthetic construct
  REGION 1..9: note = 5'-AMP-activated protein kinase subunit gamma-1 (236-244)
RVVDIYSKF

SEQ ID NO: 16033 - protein, 9 aa, synthetic construct
  REGION 1..9: note = Clathrin heavy chain 1 (903-911)
RVVGKYCEK

SEQ ID NO: 16034 - protein, 10 aa, synthetic construct
  REGION 1..10: note = Coatomer subunit alpha (160-169)
RVWDISGLRK

SEQ ID NO: 16035 - protein, 9 aa, synthetic construct
  REGION 1..9: note = SWI/SNF complex subunit SMARCC1 (56-64)
RVWLGKHYK

SEQ ID NO: 16036 - protein, 11 aa, synthetic construct
  REGION 1..11: note = Charged multivesicular body protein 1a (46-56)
RVYAENAIRKK

SEQ ID NO: 16037 - protein, 10 aa, synthetic construct
  REGION 1..10: note = WD repeat-containing protein 74 (208-217)
RVYDPASPQR

SEQ ID NO: 16038 - protein, 10 aa, synthetic construct
  REGION 1..10: note = Protein Churchill (86-95)
RVYHAVSVMR

SEQ ID NO: 16039 - protein, 9 aa, synthetic construct
  REGION 1..9: note = Cytochrome c oxidase assembly protein COX14 (33-41)
RVYHYFQWR

SEQ ID NO: 16040 - protein, 11 aa, synthetic construct
  REGION 1..11: note = Uncharacterized protein KIAA1522 (239-249)
RVYRDDTFVGR

SEQ ID NO: 16041 - protein, 9 aa, synthetic construct
  REGION 1..9: note = Poly(U)-binding-splicing factor PUF60 (112-120)
RVYVGSIYY

SEQ ID NO: 16042 - protein, 9 aa, synthetic construct
  REGION 1..9: note = Adipocyte plasma membrane-associated protein (296-304)
RVYVSGLMK

SEQ ID NO: 16043 - protein, 11 aa, synthetic construct
  REGION 1..11: note = Histone-lysine N-methyltransferase 2A (2053-2063)
RVYWSTTDARK

SEQ ID NO: 16044 - protein, 11 aa, synthetic construct
  REGION 1..11: note = 60S ribosome subunit biogenesis protein NIP7 homolog (43-53)
RVYYVSEKIMK

SEQ ID NO: 16045 - protein, 9 aa, synthetic construct
  REGION 1..9: note = Kinesin-like protein KIF2C (467-475)
RYADRVKEL

SEQ ID NO: 16046 - protein, 10 aa, synthetic construct
  REGION 1..10: note = Protein-cysteine N-palmitoyltransferase HHAT (337-346)
RYFDVGLHNF

SEQ ID NO: 16047 - protein, 9 aa, synthetic construct
  REGION 1..9: note = von Willebrand factor A domain-containing protein 8 (1836-1844)
RYGIHPAKF

SEQ ID NO: 16048 - protein, 9 aa, synthetic construct
  REGION 1..9: note = Serine/threonine-protein kinase PLK2 (271-279)
RYIDTHNRV

SEQ ID NO: 16049 - protein, 9 aa, synthetic construct
  REGION 1..9: note = Deoxyguanosine kinase, mitochondrial (148-156)
RYIFAKNLF

SEQ ID NO: 16050 - protein, 9 aa, synthetic construct
  REGION 1..9: note = Rho GTPase-activating protein 35 (208-216)
RYIRDAHTF

SEQ ID NO: 16051 - protein, 9 aa, synthetic construct
  REGION 1..9: note = Structural maintenance of chromosomes protein 5 (245-253)
RYKQDVERF

SEQ ID NO: 16052 - protein, 11 aa, synthetic construct
  REGION 1..11: note = Tumor suppressor candidate 3 (18-28)
RYLPTGSFPFL

SEQ ID NO: 16053 - protein, 9 aa, synthetic construct
  REGION 1..9: note = Potassium voltage-gated channel subfamily G member 1 (168-176)
RYLQKIEEF

SEQ ID NO: 16054 - protein, 9 aa, synthetic construct
  REGION 1..9: note = Cell division cycle protein 16 homolog (320-328)
RYLSKATTL

SEQ ID NO: 16055 - protein, 9 aa, synthetic construct
  REGION 1..9: note = Histone-binding protein RBBP7 (130-138)
RYMPQNPHI

SEQ ID NO: 16056 - protein, 9 aa, synthetic construct
  REGION 1..9: note = Kelch-like protein 24 (592-600)
RYNEKCFKL

SEQ ID NO: 16057 - protein, 9 aa, synthetic construct
  REGION 1..9: note = Kelch-like protein 20 (478-486)
RYNPRTNQW

SEQ ID NO: 16058 - protein, 9 aa, synthetic construct
  REGION 1..9: note = Thyroid transcription factor 1-associated protein 26 (88-96)
RYPDNLKHL

SEQ ID NO: 16059 - protein, 10 aa, synthetic construct
  REGION 1..10: note = Thyroid transcription factor 1-associated protein 26 (88-97)
RYPDNLKHLY

SEQ ID NO: 16060 - protein, 9 aa, synthetic construct
  REGION 1..9: note = Serine/threonine-protein phosphatase 4 catalytic subunit (103-111)
RYPDRITLI

SEQ ID NO: 16061 - protein, 9 aa, synthetic construct
  REGION 1..9: note = Lysophosphatidylcholine acyltransferase 1 (98-106)
RYPNKLDTI

SEQ ID NO: 16062 - protein, 10 aa, synthetic construct
  REGION 1..10: note = CCR4-NOT transcription complex subunit 1 (438-447)
RYPNSHTHYF

SEQ ID NO: 16063 - protein, 9 aa, synthetic construct
  REGION 1..9: note = Uncharacterized protein C1orf43 (178-186)
RYQEALSEL

SEQ ID NO: 16064 - protein, 9 aa, synthetic construct
  REGION 1..9: note = YTH domain-containing protein 1 (550-558)
RYQEVDRRF

SEQ ID NO: 16065 - protein, 9 aa, synthetic construct
  REGION 1..9: note = High affinity cationic amino acid transporter 1 (419-427)
RYQPEQPNL

SEQ ID NO: 16066 - protein, 9 aa, synthetic construct
  REGION 1..9: note = Centrosomal protein of 89 kDa (331-339)
RYQTKFRHL

SEQ ID NO: 16067 - protein, 9 aa, synthetic construct
  REGION 1..9: note = Leucine zipper putative tumor suppressor 1 (36-44)
RYSDGLLRF

SEQ ID NO: 16068 - protein, 9 aa, synthetic construct
  REGION 1..9: note = Myotubularin related protein 6 (594-602)
RYSEYAEEF

SEQ ID NO: 16069 - protein, 9 aa, synthetic construct
  REGION 1..9: note = Rap guanine nucleotide exchange factor 6 (57-65)
RYSGNQVLF

SEQ ID NO: 16070 - protein, 9 aa, synthetic construct
  REGION 1..9: note = Cation-independent mannose-6-phosphate receptor (1582-1590)
RYVDQVLQL

SEQ ID NO: 16071 - protein, 9 aa, synthetic construct
  REGION 1..9: note = Calpain-5 (466-474)
RYVIIPTTF

SEQ ID NO: 16072 - protein, 9 aa, synthetic construct
  REGION 1..9: note = Histone-lysine N-methyltransferase EHMT2 (935-943)
RYYGNISRF

SEQ ID NO: 16073 - protein, 10 aa, synthetic construct
  REGION 1..10: note = Myosin-9 (104-113)
RYYSGLIYTY

SEQ ID NO: 16074 - protein, 9 aa, synthetic construct
  REGION 1..9: note = Fanconi anemia group C protein (413-421)
SAAEPPTAL

SEQ ID NO: 16075 - protein, 9 aa, synthetic construct
  REGION 1..9: note = V-type proton ATPase 16 kDa proteolipid subunit (20-28)
SAAMVFSAL

SEQ ID NO: 16076 - protein, 9 aa, synthetic construct
  REGION 1..9: note = Factor VIII intron 22 protein (251-259)
SAAPSPAAL

SEQ ID NO: 16077 - protein, 9 aa, synthetic construct
  REGION 1..9: note = Phosphoacetylglucosamine mutase (515-523)
SADHLAHEV

SEQ ID NO: 16078 - protein, 9 aa, synthetic construct
  REGION 1..9: note = Melanoma-associated antigen 1 (62-70)
SAFPTTINF

SEQ ID NO: 16079 - protein, 9 aa, synthetic construct
  REGION 1..9: note = Multiple epidermal growth factor-like domains protein 8 (745-753)
SAGPGHSEL

SEQ ID NO: 16080 - protein, 9 aa, synthetic construct
  REGION 1..9: note = AT-rich interactive domain-containing protein 2 (319-327)
SAHSHFISL

SEQ ID NO: 16081 - protein, 9 aa, synthetic construct
  REGION 1..9: note = ADP-ribosylation factor GTPase-activating protein 3 (167-175)
SAIAEPSSL

SEQ ID NO: 16082 - protein, 9 aa, synthetic construct
  REGION 1..9: note = Catenin alpha-1 (366-374)
SAIDKMTKK

SEQ ID NO: 16083 - protein, 9 aa, synthetic construct
  REGION 1..9: note = COBW domain-containing protein 5 (82-90)
SALEKSLAV

SEQ ID NO: 16084 - protein, 12 aa, synthetic construct
  REGION 1..12: note = Vimentin (42-53)
SALRPSTSRSLY

SEQ ID NO: 16085 - protein, 10 aa, synthetic construct
  REGION 1..10: note = Putative annexin A2-like protein (89-98)
SALSGHLETV

SEQ ID NO: 16086 - protein, 9 aa, synthetic construct
  REGION 1..9: note = Ran GTPase-activating protein 1 (174-182)
SAQGKPLAL

SEQ ID NO: 16087 - protein, 9 aa, synthetic construct
  REGION 1..9: note = Protein virilizer homolog (804-812)
SAVGHVFSL

SEQ ID NO: 16088 - protein, 9 aa, synthetic construct
  REGION 1..9: note = MICAL-like protein 2 (424-432)
SAVPPGTSL

SEQ ID NO: 16089 - protein, 10 aa, synthetic construct
  REGION 1..10: note = Eukaryotic peptide chain release factor GTP-binding subunit ERF3A (27-36)
SEAEPGGGSL

SEQ ID NO: 16090 - protein, 9 aa, synthetic construct
  REGION 1..9: note = Neuron navigator 2 (1899-1907)
SEAETVMQL

SEQ ID NO: 16091 - protein, 9 aa, synthetic construct
  REGION 1..9: note = Transportin-1 (59-67)
SEDEPTRSL

SEQ ID NO: 16092 - protein, 9 aa, synthetic construct
  REGION 1..9: note = Zinc finger protein 217 (77-85)
SEDLNKHVL

SEQ ID NO: 16093 - protein, 9 aa, synthetic construct
  REGION 1..9: note = Vacuolar protein sorting-associated protein 35 (500-508)
SEDPDQQYL

SEQ ID NO: 16094 - protein, 10 aa, synthetic construct
  REGION 1..10: note = Protein CASC3 (106-115)
SEEENSKVEL

SEQ ID NO: 16095 - protein, 9 aa, synthetic construct
  REGION 1..9: note = Ribosome biogenesis protein BOP1 (459-467)
SEEERQVGL

SEQ ID NO: 16096 - protein, 9 aa, synthetic construct
  REGION 1..9: note = GPI-anchor transamidase (176-184)
SEEITNIEL

SEQ ID NO: 16097 - protein, 10 aa, synthetic construct
  REGION 1..10: note = Tyrosine-protein kinase JAK1 (600-609)
SEEKKIKVIL

SEQ ID NO: 16098 - protein, 9 aa, synthetic construct
  REGION 1..9: note = DNA mismatch repair protein Msh2 (900-908)
SEENITIKL

SEQ ID NO: 16099 - protein, 9 aa, synthetic construct
  REGION 1..9: note = Selenocysteine insertion sequence-binding protein 2 (597-605)
SEEPPGTEL

SEQ ID NO: 16100 - protein, 11 aa, synthetic construct
  REGION 1..11: note = Rac GTPase-activating protein 1 (44-54)
SEEQKSALAFL

SEQ ID NO: 16101 - protein, 10 aa, synthetic construct
  REGION 1..10: note = X-ray repair cross-complementing protein 5 (546-555)
SEEQRFNNFL

SEQ ID NO: 16102 - protein, 9 aa, synthetic construct
  REGION 1..9: note = Caspase-8 (168-176)
SEEVSRSEL

SEQ ID NO: 16103 - protein, 9 aa, synthetic construct
  REGION 1..9: note = E3 ubiquitin-protein ligase UBR5 (2161-2169)
SEGPPLTSF

SEQ ID NO: 16104 - protein, 12 aa, synthetic construct
  REGION 1..12: note = Basigin (49-60)
SEHINEGETAML

SEQ ID NO: 16105 - protein, 11 aa, synthetic construct
  REGION 1..11: note = Kinesin-like protein KIF20A (608-618)
SEHLDTQKELL

SEQ ID NO: 16106 - protein, 11 aa, synthetic construct
  REGION 1..11: note = La-related protein 4 (384-394)
SEHSTEGSVSL

SEQ ID NO: 16107 - protein, 13 aa, synthetic construct
  REGION 1..13: note = AP-1 complex subunit beta-1 (185-197)
SEIAESHPSSNLL

SEQ ID NO: 16108 - protein, 10 aa, synthetic construct
  REGION 1..10: note = Endothelial PAS domain-containing protein 1 (345-354)
SEIEKNDVVF

SEQ ID NO: 16109 - protein, 11 aa, synthetic construct
  REGION 1..11: note = Centrosomal protein of 170 kDa (569-579)
SEIGEKQDTEL

SEQ ID NO: 16110 - protein, 10 aa, synthetic construct
  REGION 1..10: note = Protein OS-9 (136-145)
SEIKGEVLYL

SEQ ID NO: 16111 - protein, 11 aa, synthetic construct
  REGION 1..11: note = BCL-6 corepressor (765-775)
SEILETSSTKL

SEQ ID NO: 16112 - protein, 13 aa, synthetic construct
  REGION 1..13: note = AP-2 complex subunit beta (185-197)
SEISESHPNSNLL

SEQ ID NO: 16113 - protein, 10 aa, synthetic construct
  REGION 1..10: note = E3 ubiquitin-protein ligase UBR4 (365-374)
SEITDPESFL

SEQ ID NO: 16114 - protein, 10 aa, synthetic construct
  REGION 1..10: note = Centrin-1 (98-107)
SEKDTKEEIL

SEQ ID NO: 16115 - protein, 10 aa, synthetic construct
  REGION 1..10: note = Ubiquitin carboxyl-terminal hydrolase 43 (210-219)
SEKLPPEATK

SEQ ID NO: 16116 - protein, 9 aa, synthetic construct
  REGION 1..9: note = Spatacsin (742-750)
SELLKNMGF

SEQ ID NO: 16117 - protein, 9 aa, synthetic construct
  REGION 1..9: note = Nuclear pore complex protein Nup155 (1180-1188)
SELMDITKL

SEQ ID NO: 16118 - protein, 10 aa, synthetic construct
  REGION 1..10: note = WD repeat-containing protein 43 (123-132)
SENKEEPVKL

SEQ ID NO: 16119 - protein, 10 aa, synthetic construct
  REGION 1..10: note = Caspase recruitment domain-containing protein 19 (24-33)
SEQQVDRIIL

SEQ ID NO: 16120 - protein, 10 aa, synthetic construct
  REGION 1..10: note = Protein deglycase DJ-1 (83-92)
SESAAVKEIL

SEQ ID NO: 16121 - protein, 11 aa, synthetic construct
  REGION 1..11: note = Coatomer subunit gamma-1 (429-439)
SESKETGLSHL

SEQ ID NO: 16122 - protein, 9 aa, synthetic construct
  REGION 1..9: note = Probable ubiquitin carboxyl-terminal hydrolase FAF-X (1855-1863)
SETAGSTKY

SEQ ID NO: 16123 - protein, 10 aa, synthetic construct
  REGION 1..10: note = Homocysteine-responsive endoplasmic reticulum-resident ubiquitin-like domain member 1 protein (3-12)
SETEPEPVTL

SEQ ID NO: 16124 - protein, 9 aa, synthetic construct
  REGION 1..9: note = DNA-dependent protein kinase catalytic subunit (1564-1572)
SETINTELL

SEQ ID NO: 16125 - protein, 10 aa, synthetic construct
  REGION 1..10: note = Adipocyte plasma membrane-associated protein (402-411)
SEVHEHDGHL

SEQ ID NO: 16126 - protein, 9 aa, synthetic construct
  REGION 1..9: note = Ubiquitin-like modifier-activating enzyme 1 (251-259)
SEVQGMVEL

SEQ ID NO: 16127 - protein, 11 aa, synthetic construct
  REGION 1..11: note = Zinc finger and BTB domain-containing protein 2 (491-501)
SEVTEPDHPVL

SEQ ID NO: 16128 - protein, 10 aa, synthetic construct
  REGION 1..10: note = 60S ribosomal protein L28 (37-46)
SFRYNGLIHR

SEQ ID NO: 16129 - protein, 9 aa, synthetic construct
  REGION 1..9: note = Prelamin-A/C (424-432)
SGDPAEYNL

SEQ ID NO: 16130 - protein, 9 aa, synthetic construct
  REGION 1..9: note = Replication protein A 70 kDa DNA-binding subunit (149-157)
SGMGSTVSK

SEQ ID NO: 16131 - protein, 9 aa, synthetic construct
  REGION 1..9: note = Exocyst complex component 4 (448-456)
SHAISMSAY

SEQ ID NO: 16132 - protein, 9 aa, synthetic construct
  REGION 1..9: note = Unconventional myosin-Ib (546-554)
SHALIKSLF

SEQ ID NO: 16133 - protein, 9 aa, synthetic construct
  REGION 1..9: note = Transcription factor 4 (246-254)
SHIPQSSSY

SEQ ID NO: 16134 - protein, 9 aa, synthetic construct
  REGION 1..9: note = Dual specificity mitogen-activated protein kinase kinase 1 (86-94)
SHKPSGLVM

SEQ ID NO: 16135 - protein, 9 aa, synthetic construct
  REGION 1..9: note = Rho-related GTP-binding protein RhoE (218-226)
SHMPSRPEL

SEQ ID NO: 16136 - protein, 9 aa, synthetic construct
  REGION 1..9: note = Reticulon-3 (10-18)
SHSISSSSF

SEQ ID NO: 16137 - protein, 9 aa, synthetic construct
  REGION 1..9: note = Aminoacylase-1 (79-87)
SHTDVVPVF

SEQ ID NO: 16138 - protein, 9 aa, synthetic construct
  REGION 1..9: note = Sialin (259-267)
SHYEKEYIL

SEQ ID NO: 16139 - protein, 9 aa, synthetic construct
  REGION 1..9: note = Solute carrier family 35 member C2 (273-281)
SIAGIFKEV

SEQ ID NO: 16140 - protein, 9 aa, synthetic construct
  REGION 1..9: note = 40S ribosomal protein S4, X isoform (72-80)
SIDKTGENF

SEQ ID NO: 16141 - protein, 11 aa, synthetic construct
  REGION 1..11: note = YTH domain-containing family protein 1 (434-444)
SIFDDFAHYEK

SEQ ID NO: 16142 - protein, 11 aa, synthetic construct
  REGION 1..11: note = YTH domain-containing family protein 2 (707-717)
SIFDDFSHYEK

SEQ ID NO: 16143 - protein, 9 aa, synthetic construct
  REGION 1..9: note = Transmembrane emp24 domain-containing protein 7 (192-200)
SIGQVFLLK

SEQ ID NO: 16144 - protein, 9 aa, synthetic construct
  REGION 1..9: note = Kit ligand (99-107)
SIIDKLVNI

SEQ ID NO: 16145 - protein, 9 aa, synthetic construct
  REGION 1..9: note = Heat shock protein HSP 90-alpha (763-771)
SIIETLRQK

SEQ ID NO: 16146 - protein, 12 aa, synthetic construct
  REGION 1..12: note = Poly(rC)-binding protein 2 (27-38)
SIIGKKGESVKK

SEQ ID NO: 16147 - protein, 9 aa, synthetic construct
  REGION 1..9: note = NADH dehydrogenase (ubiquinone) 1 alpha subcomplex subunit 13 (40-48)
SIMKWNRER

SEQ ID NO: 16148 - protein, 9 aa, synthetic construct
  REGION 1..9: note = Sterol regulatory element-binding protein 1 (338-346)
SINDKIIEL

SEQ ID NO: 16149 - protein, 10 aa, synthetic construct
  REGION 1..10: note = Ubiquitin-associated protein 2-like (325-334)
SIPQKPQTNK

SEQ ID NO: 16150 - protein, 11 aa, synthetic construct
  REGION 1..11: note = Alkyldihydroxyacetonephosphate synthase, peroxisomal (630-640)
SISDVGFGMLK

SEQ ID NO: 16151 - protein, 9 aa, synthetic construct
  REGION 1..9: note = Progressive ankylosis protein homolog (165-173)
SISDVIAQV

SEQ ID NO: 16152 - protein, 12 aa, synthetic construct
  REGION 1..12: note = Insulin-like growth factor 2 mRNA-binding protein 2 (181-192)
SIYNPERTITVK

SEQ ID NO: 16153 - protein, 11 aa, synthetic construct
  REGION 1..11: note = Fibronectin type III domain-containing protein 3B (555-565)
SIYRGPSHTYK

SEQ ID NO: 16154 - protein, 10 aa, synthetic construct
  REGION 1..10: note = Nuclear receptor coactivator 3 (336-345)
SLADGTIVTA

SEQ ID NO: 16155 - protein, 9 aa, synthetic construct
  REGION 1..9: note = Calmodulin-regulated spectrin-associated protein 2 (271-279)
SLADSLYNL

SEQ ID NO: 16156 - protein, 10 aa, synthetic construct
  REGION 1..10: note = ATPase family AAA domain-containing protein 2 (410-419)
SLADVDPMQL

SEQ ID NO: 16157 - protein, 9 aa, synthetic construct
  REGION 1..9: note = Wiskott-Aldrich syndrome protein family member 2 (67-75)
SLAERVDRL

SEQ ID NO: 16158 - protein, 9 aa, synthetic construct
  REGION 1..9: note = Histone H1x (66-74)
SLAKIYTEA

SEQ ID NO: 16159 - protein, 9 aa, synthetic construct
  REGION 1..9: note = Discoidin, CUB and LCCL domain-containing protein 2 (222-230)
SLANNVTSV

SEQ ID NO: 16160 - protein, 12 aa, synthetic construct
  REGION 1..12: note = Prohibitin (227-238)
SLATAGDGLIEL

SEQ ID NO: 16161 - protein, 9 aa, synthetic construct
  REGION 1..9: note = Arf-GAP with Rho-GAP domain, ANK repeat and PH domain-containing protein 3 (220-228)
SLDQPFLSK

SEQ ID NO: 16162 - protein, 9 aa, synthetic construct
  REGION 1..9: note = Transcription intermediary factor 1-beta (265-273)
SLDQPGGTL

SEQ ID NO: 16163 - protein, 9 aa, synthetic construct
  REGION 1..9: note Dolichyl-diphosphooligosaccharide-proteinosyltransferase subunit 2 (40-48)
SLDRPFTNL

SEQ ID NO: 16164 - protein, 10 aa, synthetic construct
  REGION 1..10: note = Spatacsin (1958-1967)
SLDSQKFVTV

SEQ ID NO: 16165 - protein, 9 aa, synthetic construct
  REGION 1..9: note = Mothers against decapentaplegic homolog 6 (187-195)
SLDTLLEAV

SEQ ID NO: 16166 - protein, 10 aa, synthetic construct
  REGION 1..10: note = Activating transcription factor 7-interacting protein 2 (272-281)
SLDTNNNSHY

SEQ ID NO: 16167 - protein, 9 aa, synthetic construct
  REGION 1..9: note = Transcription factor E2-alpha (165-173)
SLDTQPKKV

SEQ ID NO: 16168 - protein, 10 aa, synthetic construct
  REGION 1..10: note = Transformation/transcription domain-associated protein (976-985)
SLEDNKHALY

SEQ ID NO: 16169 - protein, 10 aa, synthetic construct
  REGION 1..10: note = Probable E3 ubiquitin-protein ligase HERC6 (177-186)
SLEGIPLAQV

SEQ ID NO: 16170 - protein, 9 aa, synthetic construct
  REGION 1..9: note = Uncharacterized protein C17orf112 (97-105)
SLELDPPSL

SEQ ID NO: 16171 - protein, 9 aa, synthetic construct
  REGION 1..9: note = Transmembrane emp24 domain-containing protein 9 (130-138)
SLFAGGMLR

SEQ ID NO: 16172 - protein, 10 aa, synthetic construct
  REGION 1..10: note = Splicing factor 3A subunit 3 (299-308)
SLFAKNPKSK

SEQ ID NO: 16173 - protein, 9 aa, synthetic construct
  REGION 1..9: note = Probable E3 ubiquitin-protein ligase HECTD4 (550-558)
SLFGGTSGL

SEQ ID NO: 16174 - protein, 9 aa, synthetic construct
  REGION 1..9: note = ADP-ribosylation factor 4 (7-15)
SLFSRLFGK

SEQ ID NO: 16175 - protein, 10 aa, synthetic construct
  REGION 1..10: note = Leukocyte tyrosine kinase receptor (149-158)
SLGLGESLYI

SEQ ID NO: 16176 - protein, 10 aa, synthetic construct
  REGION 1..10: note = PRELI domain containing protein 3A (115-124)
SLGSYLESLM

SEQ ID NO: 16177 - protein, 11 aa, synthetic construct
  REGION 1..11: note = Epidermal growth factor receptor kinase substrate 8 (115-125)
SLIDLESKNEL

SEQ ID NO: 16178 - protein, 10 aa, synthetic construct
  REGION 1..10: note = Sugar phosphate exchanger 3 (370-379)
SLIGYSLFSV

SEQ ID NO: 16179 - protein, 9 aa, synthetic construct
  REGION 1..9: note = Type I inositol 3,4-bisphosphate 4-phosphatase (107-115)
SLINQMTQV

SEQ ID NO: 16180 - protein, 9 aa, synthetic construct
  REGION 1..9: note = Kinectin (369-377)
SLKAHVQEV

SEQ ID NO: 16181 - protein, 9 aa, synthetic construct
  REGION 1..9: note Dolichyl-diphosphooligosaccharide-proteinosyltransferase 48 kDa subunit (66-74)
SLKDRGFEL

SEQ ID NO: 16182 - protein, 9 aa, synthetic construct
  REGION 1..9: note = Gamma-interferon-inducible protein 16 (248-256)
SLKEKFNGK

SEQ ID NO: 16183 - protein, 9 aa, synthetic construct
  REGION 1..9: note = KN motif and ankyrin repeat domain-containing protein 1 (464-472)
SLKEKIYRL

SEQ ID NO: 16184 - protein, 10 aa, synthetic construct
  REGION 1..10: note = Histone-lysine N-methyltransferase NSD2 (177-186)
SLLEQGLVEA

SEQ ID NO: 16185 - protein, 12 aa, synthetic construct
  REGION 1..12: note = TSC22 domain family protein 1 (28-39)
SLLGTENASVRL

SEQ ID NO: 16186 - protein, 12 aa, synthetic construct
  REGION 1..12: note = Homocysteine-responsive endoplasmic reticulum-resident ubiquitin-like domain member 1 protein (221-232)
SLLPEGPPAIAN

SEQ ID NO: 16187 - protein, 9 aa, synthetic construct
  REGION 1..9: note = Ankyrin repeat and KH domain-containing protein 1 (2544-2552)
SLLPSVPAL

SEQ ID NO: 16188 - protein, 9 aa, synthetic construct
  REGION 1..9: note = E3 ubiquitin-protein ligase TRIM38 (21-29)
SLMTNPVSI

SEQ ID NO: 16189 - protein, 9 aa, synthetic construct
  REGION 1..9: note = Coiled-coil domain-containing protein 93 (321-329)
SLNKQIAQK

SEQ ID NO: 16190 - protein, 9 aa, synthetic construct
  REGION 1..9: note = Deubiquitinating protein VCIP135 (181-189)
SLNSNVYDV

SEQ ID NO: 16191 - protein, 9 aa, synthetic construct
  REGION 1..9: note = Disintegrin and metalloproteinase domain-containing protein 10 (100-108)
SLNTGIITV

SEQ ID NO: 16192 - protein, 9 aa, synthetic construct
  REGION 1..9: note = E3 ubiquitin-protein ligase BRE1B (149-157)
SLQNHNHQL

SEQ ID NO: 16193 - protein, 9 aa, synthetic construct
  REGION 1..9: note = DNA primase small subunit (265-273)
SLQRWEHLK

SEQ ID NO: 16194 - protein, 9 aa, synthetic construct
  REGION 1..9: note = Integrin alpha-3 (452-460)
SLSDHIVLL

SEQ ID NO: 16195 - protein, 9 aa, synthetic construct
  REGION 1..9: note = Pleckstrin homology-like domain family B member 2 (117-125)
SLSGYPLGR

SEQ ID NO: 16196 - protein, 9 aa, synthetic construct
  REGION 1..9: note = GDH/6PGL endoplasmic bifunctional protein (741-749)
SLSLPLINR

SEQ ID NO: 16197 - protein, 12 aa, synthetic construct
  REGION 1..12: note = 26S proteasome non-ATPase regulatory subunit 3 (262-273)
SLYDQAEKLVSK

SEQ ID NO: 16198 - protein, 9 aa, synthetic construct
  REGION 1..9: note = Delta(24)-sterol reductase (399-407)
SLYHKLREK

SEQ ID NO: 16199 - protein, 13 aa, synthetic construct
  REGION 1..13: note = D-beta-hydroxybutyrate dehydrogenase, mitochondrial (246-258)
SLYSPESIQAIAK

SEQ ID NO: 16200 - protein, 9 aa, synthetic construct
  REGION 1..9: note = TATA box-binding protein-associated factor RNA polymerase I subunit B (255-263)
SLYWLSTQK

SEQ ID NO: 16201 - protein, 9 aa, synthetic construct
  REGION 1..9: note = Bifunctional 3'-phosphoadenosine 5'-phosphosulfate synthase 2 (537-545)
SMAPGLTSV

SEQ ID NO: 16202 - protein, 9 aa, synthetic construct
  REGION 1..9: note = Protein SON (1023-1031)
SMMSPMAER

SEQ ID NO: 16203 - protein, 9 aa, synthetic construct
  REGION 1..9: note = Small nuclear ribonucleoprotein Sm D1 (35-43)
SMNTHLKAV

SEQ ID NO: 16204 - protein, 9 aa, synthetic construct
  REGION 1..9: note = Ubiquitin carboxyl-terminal hydrolase isozyme L5 (131-139)
SNSDVIRQV

SEQ ID NO: 16205 - protein, 9 aa, synthetic construct
  REGION 1..9: note = Chloride channel CLIC-like protein 1 (324-332)
SPAAEKAQL

SEQ ID NO: 16206 - protein, 9 aa, synthetic construct
  REGION 1..9: note = Eukaryotic translation initiation factor 2A (347-355)
SPHGHILVL

SEQ ID NO: 16207 - protein, 11 aa, synthetic construct
  REGION 1..11: note = Zinc finger SWIM domain-containing protein 7 (59-69)
SPSGRRVYQVL

SEQ ID NO: 16208 - protein, 9 aa, synthetic construct
  REGION 1..9: note = Spermatogenesis-associated protein 20 (30-38)
SPTSRLNSL

SEQ ID NO: 16209 - protein, 9 aa, synthetic construct
  REGION 1..9: note = mRNA-decapping enzyme 1A (62-70)
SPYHGFTIV

SEQ ID NO: 16210 - protein, 9 aa, synthetic construct
  REGION 1..9: note = Complex I assembly factor TIMMDC1, mitochondrial (108-116)
SQAEIYHNR

SEQ ID NO: 16211 - protein, 11 aa, synthetic construct
  REGION 1..11: note = Centromere protein J (1081-1091)
SQISSGTQVEK

SEQ ID NO: 16212 - protein, 9 aa, synthetic construct
  REGION 1..9: note = G protein pathway suppressor 2 (319-327)
SQNPRFYHK

SEQ ID NO: 16213 - protein, 9 aa, synthetic construct
  REGION 1..9: note = T-complex protein 1 subunit eta (157-165)
SQQKAFFAK

SEQ ID NO: 16214 - protein, 10 aa, synthetic construct
  REGION 1..10: note = 3-hydroxy-3-methylglutaryl-coenzyme A reductase (226-235)
SREGRPIWQL

SEQ ID NO: 16215 - protein, 9 aa, synthetic construct
  REGION 1..9: note = Protein CYR61 (3-11)
SRIARALAL

SEQ ID NO: 16216 - protein, 9 aa, synthetic construct
  REGION 1..9: note = Polyadenylate-binding protein 4 (289-297)
SRYQGVNLY

SEQ ID NO: 16217 - protein, 10 aa, synthetic construct
  REGION 1..10: note = NUMB protein (52-61)
SSATTSPFFK

SEQ ID NO: 16218 - protein, 9 aa, synthetic construct
  REGION 1..9: note = Nucleoporin GLE1 (16-24)
SSDKGRLCY

SEQ ID NO: 16219 - protein, 10 aa, synthetic construct
  REGION 1..10: note = Rho guanine nucleotide exchange factor 35 (173-182)
SSDNSGQTRY

SEQ ID NO: 16220 - protein, 9 aa, synthetic construct
  REGION 1..9: note = Integrin alpha-7 (233-241)
SSDPDQLVY

SEQ ID NO: 16221 - protein, 11 aa, synthetic construct
  REGION 1..11: note = Transcriptional coactivator YAP1 (331-341)
SSDPFLNSGTY

SEQ ID NO: 16222 - protein, 9 aa, synthetic construct
  REGION 1..9: note = Plastin-3 (113-121)
SSEGTQHSY

SEQ ID NO: 16223 - protein, 10 aa, synthetic construct
  REGION 1..10: note = Spermatogenesis-associated serine-rich protein 2 (123-132)
SSEKGGMNGY

SEQ ID NO: 16224 - protein, 11 aa, synthetic construct
  REGION 1..11: note = Myotubularin-related protein 14 (229-239)
SSEKVDKAQRY

SEQ ID NO: 16225 - protein, 9 aa, synthetic construct
  REGION 1..9: note = Liprin-beta-1 (506-514)
SSFGRGFFK

SEQ ID NO: 16226 - protein, 9 aa, synthetic construct
  REGION 1..9: note = Breast cancer type 2 susceptibility protein (661-669)
SSFGTILRK

SEQ ID NO: 16227 - protein, 9 aa, synthetic construct
  REGION 1..9: note = 60S ribosomal protein L28 (14-22)
SSFLIKRNK

SEQ ID NO: 16228 - protein, 9 aa, synthetic construct
  REGION 1..9: note = AP-3 complex subunit mu-2 (10-18)
SSGDIFLEK

SEQ ID NO: 16229 - protein, 9 aa, synthetic construct
  REGION 1..9: note = Deoxynucleotidyltransferase terminal-interacting protein 2 (562-570)
SSIDPGLSI

SEQ ID NO: 16230 - protein, 9 aa, synthetic construct
  REGION 1..9: note = 60S ribosomal protein L28 (91-99)
SSIRHMIRK

SEQ ID NO: 16231 - protein, 12 aa, synthetic construct
  REGION 1..12: note = Dermcidin (63-74)
SSLLEKGLDGAK

SEQ ID NO: 16232 - protein, 9 aa, synthetic construct
  REGION 1..9: note = Integrator complex subunit 3 (459-467)
SSLNHIVEK

SEQ ID NO: 16233 - protein, 9 aa, synthetic construct
  REGION 1..9: note = Retinoblastoma-like protein 2 (834-842)
SSLSLFFRK

SEQ ID NO: 16234 - protein, 10 aa, synthetic construct
  REGION 1..10: note = GATS-like protein 2 (89-98)
SSSQPIGVTK

SEQ ID NO: 16235 - protein, 11 aa, synthetic construct
  REGION 1..11: note = Synaptotagmin-like protein 2 (280-290)
SSSTDSETLRY

SEQ ID NO: 16236 - protein, 11 aa, synthetic construct
  REGION 1..11: note = WD repeat-containing protein 62 (49-59)
STASEETVQNR

SEQ ID NO: 16237 - protein, 9 aa, synthetic construct
  REGION 1..9: note = Cyclic AMP-responsive element-binding protein 3-like protein 2 (116-124)
STDFPSTSI

SEQ ID NO: 16238 - protein, 12 aa, synthetic construct
  REGION 1..12: note = ETS-related transcription factor Elf-1 (430-441)
STDPSAGTGSQK

SEQ ID NO: 16239 - protein, 10 aa, synthetic construct
  REGION 1..10: note = Epidermal growth factor receptor kinase substrate 8 (476-485)
STEHSSVSEY

SEQ ID NO: 16240 - protein, 9 aa, synthetic construct
  REGION 1..9: note = Nuclear receptor subfamily 2 group C member 2 (226-234)
STEKIYIRK

SEQ ID NO: 16241 - protein, 10 aa, synthetic construct
  REGION 1..10: note = V-type proton ATPase subunit H (296-305)
STERETRQEY

SEQ ID NO: 16242 - protein, 10 aa, synthetic construct
  REGION 1..10: note = Nucleolar protein 56 (354-363)
STFIGRAAAK

SEQ ID NO: 16243 - protein, 11 aa, synthetic construct
  REGION 1..11: note = Ankyrin repeat and KH domain-containing protein 1 (1842-1852)
STFQPANKLNK

SEQ ID NO: 16244 - protein, 11 aa, synthetic construct
  REGION 1..11: note = 5-aminolevulinate synthase, nonspecific, mitochondrial (212-222)
STFQYDRFFEK

SEQ ID NO: 16245 - protein, 9 aa, synthetic construct
  REGION 1..9: note = Nuclear autoantigen Sp-100 (389-397)
STFRESFKK

SEQ ID NO: 16246 - protein, 10 aa, synthetic construct
  REGION 1..10: note = Zinc finger protein SNAI2 (138-147)
STFSGLAKHK

SEQ ID NO: 16247 - protein, 12 aa, synthetic construct
  REGION 1..12: note = Oxidative stress-responsive serine-rich protein 1 (96-107)
STIASSSSSQLK

SEQ ID NO: 16248 - protein, 9 aa, synthetic construct
  REGION 1..9: note = Clathrin interactor 1 (210-218)
STIDDTISK

SEQ ID NO: 16249 - protein, 11 aa, synthetic construct
  REGION 1..11: note = Ligand-dependent nuclear receptor-interacting factor 1 (338-348)
STIDPSGTRSK

SEQ ID NO: 16250 - protein, 10 aa, synthetic construct
  REGION 1..10: note = Regulation of nuclear pre-mRNA domain-containing protein 2 (942-951)
STIEFKNMLK

SEQ ID NO: 16251 - protein, 9 aa, synthetic construct
  REGION 1..9: note = Probable RNA-binding protein 23 (53-61)
STIGETSNR

SEQ ID NO: 16252 - protein, 12 aa, synthetic construct
  REGION 1..12: note = Hexokinase-2 (408-419)
STIGVDGSVYKK

SEQ ID NO: 16253 - protein, 11 aa, synthetic construct
  REGION 1..11: note = Transcription intermediary factor 1-alpha (597-607)
STIMLDNIVRK

SEQ ID NO: 16254 - protein, 9 aa, synthetic construct
  REGION 1..9: note = Tigger transposable element-derived protein 2 (379-387)
STITKAWKK

SEQ ID NO: 16255 - protein, 11 aa, synthetic construct
  REGION 1..11: note = Mediator of RNA polymerase II transcription subunit 20 (51-61)
STLGSQGQTGK

SEQ ID NO: 16256 - protein, 9 aa, synthetic construct
  REGION 1..9: note = KN motif and ankyrin repeat domain-containing protein 1 (972-980)
STLKSIMKK

SEQ ID NO: 16257 - protein, 11 aa, synthetic construct
  REGION 1..11: note = Alanine-tRNA ligase, cytoplasmic (3-13)
STLTASEIRQR

SEQ ID NO: 16258 - protein, 9 aa, synthetic construct
  REGION 1..9: note = Guanine nucleotide-binding protein G(I)/G(S)/G(O) subunit gamma-12 (7-15)
STNNIAQAR

SEQ ID NO: 16259 - protein, 9 aa, synthetic construct
  REGION 1..9: note = AP-3 complex subunit delta-1 (232-240)
STNNWVLIK

SEQ ID NO: 16260 - protein, 9 aa, synthetic construct
  REGION 1..9: note = Guanine nucleotide-binding protein G(I)/G(S)/G(O) subunit gamma-5 (55-63)
STNPFRPQK

SEQ ID NO: 16261 - protein, 11 aa, synthetic construct
  REGION 1..11: note = ATP synthase F(0) complex subunit B1, mitochondrial (228-238)
STQQEKETIAK

SEQ ID NO: 16262 - protein, 10 aa, synthetic construct
  REGION 1..10: note = Band 4.1-like protein 2 (78-87)
STTTTTHITK

SEQ ID NO: 16263 - protein, 9 aa, synthetic construct
  REGION 1..9: note = Mediator of RNA polymerase II transcription subunit 25 (129-137)
STVAPGSGL

SEQ ID NO: 16264 - protein, 9 aa, synthetic construct
  REGION 1..9: note = SEC14-like protein 1 (142-150)
STVEKIAMK

SEQ ID NO: 16265 - protein, 11 aa, synthetic construct
  REGION 1..11: note = Signal recognition particle 14 kDa protein (68-78)
STVVSSKEVNK

SEQ ID NO: 16266 - protein, 10 aa, synthetic construct
  REGION 1..10: note = Cleavage and polyadenylation specificity factor subunit 3 (66-75)
STYGTHIHEK

SEQ ID NO: 16267 - protein, 10 aa, synthetic construct
  REGION 1..10: note = DmX-like protein 2 (1766-1775)
STYISILNQK

SEQ ID NO: 16268 - protein, 11 aa, synthetic construct
  REGION 1..11: note = Lysosomal protective protein (339-349)
STYLNNPYVRK

SEQ ID NO: 16269 - protein, 10 aa, synthetic construct
  REGION 1..10: note = E3 ubiquitin-protein ligase HECTD1 (546-555)
STYNLQILTR

SEQ ID NO: 16270 - protein, 11 aa, synthetic construct
  REGION 1..11: note = Protein FAM84B (105-115)
STYTPENLLNK

SEQ ID NO: 16271 - protein, 10 aa, synthetic construct
  REGION 1..10: note = Lysine-specific demethylase 5B (847-856)
SVAQQLLNGK

SEQ ID NO: 16272 - protein, 9 aa, synthetic construct
  REGION 1..9: note = Perilipin-2 (129-137)
SVASTITGV

SEQ ID NO: 16273 - protein, 11 aa, synthetic construct
  REGION 1..11: note = Oral-facial-digital syndrome 1 protein (92-102)
SVFFPESGLAK

SEQ ID NO: 16274 - protein, 11 aa, synthetic construct
  REGION 1..11: note = Short coiled-coil protein (42-52)
SVFQTTDTKSK

SEQ ID NO: 16275 - protein, 9 aa, synthetic construct
  REGION 1..9: note = Centromere protein F (215-223)
SVFSWQQEK

SEQ ID NO: 16276 - protein, 11 aa, synthetic construct
  REGION 1..11: note = Probable 18S rRNA (guanine-N(7))-methyltransferase (228-238)
SVFTNERFPLR

SEQ ID NO: 16277 - protein, 12 aa, synthetic construct
  REGION 1..12: note = Protein FAN (644-655)
SVFTTSQDSTLK

SEQ ID NO: 16278 - protein, 9 aa, synthetic construct
  REGION 1..9: note = Acyl-CoA desaturase (245-253)
SVFVATFLR

SEQ ID NO: 16279 - protein, 9 aa, synthetic construct
  REGION 1..9: note = Nitric oxide synthase-interacting protein (147-155)
SVGPPSKDK

SEQ ID NO: 16280 - protein, 10 aa, synthetic construct
  REGION 1..10: note = V-type proton ATPase subunit d 1 (68-77)
SVIDDRLKEK

SEQ ID NO: 16281 - protein, 11 aa, synthetic construct
  REGION 1..11: note = Striatin (234-244)
SVIDTSTIVRK

SEQ ID NO: 16282 - protein, 11 aa, synthetic construct
  REGION 1..11: note = Phosducin-like protein (220-230)
SVIGASSQFTR

SEQ ID NO: 16283 - protein, 9 aa, synthetic construct
  REGION 1..9: note = Protein fuzzy homolog (41-49)
SVIGSLNGV

SEQ ID NO: 16284 - protein, 9 aa, synthetic construct
  REGION 1..9: note = MAP kinase-activating death domain protein (1140-1148)
SVIGVSPAV

SEQ ID NO: 16285 - protein, 9 aa, synthetic construct
  REGION 1..9: note = Tubby-related protein 3 (322-330)
SVIIPGMTL

SEQ ID NO: 16286 - protein, 9 aa, synthetic construct
  REGION 1..9: note = ETS-related transcription factor Elf-1 (531-539)
SVIKTQETK

SEQ ID NO: 16287 - protein, 9 aa, synthetic construct
  REGION 1..9: note = SEC14 domain and spectrin repeat-containing protein 1 (4-12)
SVILPILKK

SEQ ID NO: 16288 - protein, 9 aa, synthetic construct
  REGION 1..9: note = Serine/threonine-protein kinase RIO1 (130-138)
SVINKVTEK

SEQ ID NO: 16289 - protein, 9 aa, synthetic construct
  REGION 1..9: note = NHS-like protein 1 (635-643)
SVINVFVGR

SEQ ID NO: 16290 - protein, 11 aa, synthetic construct
  REGION 1..11: note = E3 ubiquitin-protein ligase Topors (307-317)
SVLGKDEQINK

SEQ ID NO: 16291 - protein, 9 aa, synthetic construct
  REGION 1..9: note = Nuclear pore complex protein Nup50 (280-288)
SVLGSLSSV

SEQ ID NO: 16292 - protein, 9 aa, synthetic construct
  REGION 1..9: note = Superkiller viralicidic activity 2-like 2 (759-767)
SVLKSIQEV

SEQ ID NO: 16293 - protein, 9 aa, synthetic construct
  REGION 1..9: note = Nuclear pore membraneoprotein 210 (659-667)
SVLNFATNR

SEQ ID NO: 16294 - protein, 12 aa, synthetic construct
  REGION 1..12: note = Little elongation complex subunit 1 (852-863)
SVLPNQVSVITK

SEQ ID NO: 16295 - protein, 11 aa, synthetic construct
  REGION 1..11: note = Lysine-specific demethylase 3A (512-522)
SVLTDPAKLKK

SEQ ID NO: 16296 - protein, 9 aa, synthetic construct
  REGION 1..9: note = Enhancer of mRNA-decapping protein 4 (927-935)
SVMAQVRQK

SEQ ID NO: 16297 - protein, 10 aa, synthetic construct
  REGION 1..10: note = Poly(U)-binding-splicing factor PUF60 (174-183)
SVMLGGRNIK

SEQ ID NO: 16298 - protein, 9 aa, synthetic construct
  REGION 1..9: note = TGF-beta-activated kinase 1 and MAP3K7-binding protein 2 (354-362)
SVNSQTLNR

SEQ ID NO: 16299 - protein, 10 aa, synthetic construct
  REGION 1..10: note = Rho GDP-dissociation inhibitor 1 (24-33)
SVNYKPPAQK

SEQ ID NO: 16300 - protein, 10 aa, synthetic construct
  REGION 1..10: note = LON peptidase N-terminal domain and RING finger protein 1 (418-427)
SVQEKGVLLK

SEQ ID NO: 16301 - protein, 9 aa, synthetic construct
  REGION 1..9: note = Kinesin-like protein KIF11 (750-758)
SVQENIQQK

SEQ ID NO: 16302 - protein, 9 aa, synthetic construct
  REGION 1..9: note = DNA topoisomerase 2-binding protein 1 (587-595)
SVQEYFVRK

SEQ ID NO: 16303 - protein, 9 aa, synthetic construct
  REGION 1..9: note = Zinc-binding alcohol dehydrogenase domain-containing protein 2 (299-307)
SVQGFFLNH

SEQ ID NO: 16304 - protein, 11 aa, synthetic construct
  REGION 1..11: note = E3 ubiquitin-protein ligase MARCH7 (13-23)
SVQPSSSLSAR

SEQ ID NO: 16305 - protein, 11 aa, synthetic construct
  REGION 1..11: note = MAP7 domain-containing protein 3 (532-542)
SVQSASSTVKK

SEQ ID NO: 16306 - protein, 10 aa, synthetic construct
  REGION 1..10: note = BRCA1-associated RING domain protein 1 (162-171)
SVQTQPAIKK

SEQ ID NO: 16307 - protein, 9 aa, synthetic construct
  REGION 1..9: note = DNA-directed RNA polymerase, mitochondrial (77-85)
SVSEVVVNR

SEQ ID NO: 16308 - protein, 10 aa, synthetic construct
  REGION 1..10: note = GAS2-like protein 3 (568-577)
SVSPVKATQK

SEQ ID NO: 16309 - protein, 9 aa, synthetic construct
  REGION 1..9: note = Lipoma-preferred partner (35-43)
SVSTQQPPK

SEQ ID NO: 16310 - protein, 9 aa, synthetic construct
  REGION 1..9: note = Probable 8-oxo-dGTP diphosphatase NUDT15 (78-86)
SVVNSFIEK

SEQ ID NO: 16311 - protein, 9 aa, synthetic construct
  REGION 1..9: note = Transmembrane and TPR repeat-containing protein 2 (627-635)
SVYKEAIQK

SEQ ID NO: 16312 - protein, 9 aa, synthetic construct
  REGION 1..9: note = Cytoplasmic dynein 1 heavy chain 1 (2957-2965)
SVYQIKVHR

SEQ ID NO: 16313 - protein, 9 aa, synthetic construct
  REGION 1..9: note = Tetratricopeptide repeat protein 28 (60-68)
SYHNYVLEL

SEQ ID NO: 16314 - protein, 9 aa, synthetic construct
  REGION 1..9: note = Long-chain-fatty-acid-CoA ligase 3 (616-624)
SYHSYVIGF

SEQ ID NO: 16315 - protein, 9 aa, synthetic construct
  REGION 1..9: note = 14-3-3 protein beta/alpha (212-220)
SYKDSTLIM

SEQ ID NO: 16316 - protein, 9 aa, synthetic construct
  REGION 1..9: note = Serine/threonine-protein kinase 24 (88-96)
SYLKDTKLW

SEQ ID NO: 16317 - protein, 9 aa, synthetic construct
  REGION 1..9: note = Selenoprotein N (310-318)
SYLPFTEAF

SEQ ID NO: 16318 - protein, 9 aa, synthetic construct
  REGION 1..9: note = Zinc finger protein 383 (239-247)
SYLSQHQRI

SEQ ID NO: 16319 - protein, 9 aa, synthetic construct
  REGION 1..9: note = Tumor necrosis factor receptor superfamily member 3 (87-95)
SYNEHWNYL

SEQ ID NO: 16320 - protein, 9 aa, synthetic construct
  REGION 1..9: note = Transmembrane protein 39A (477-485)
SYPLNSYEL

SEQ ID NO: 16321 - protein, 9 aa, synthetic construct
  REGION 1..9: note = Tetraspanin-10 (217-225)
SYQDWQQNL

SEQ ID NO: 16322 - protein, 9 aa, synthetic construct
  REGION 1..9: note = Calcyclin-binding protein (124-132)
SYSMIVNNL

SEQ ID NO: 16323 - protein, 9 aa, synthetic construct
  REGION 1..9: note = Transmembrane protein 39A (363-371)
SYSNAPQHI

SEQ ID NO: 16324 - protein, 9 aa, synthetic construct
  REGION 1..9: note = Serine/threonine-protein kinase LATS2 (554-562)
SYSPYAFKF

SEQ ID NO: 16325 - protein, 9 aa, synthetic construct
  REGION 1..9: note = AF4/FMR2 family member 4 (1095-1103)
SYVQVTSNF

SEQ ID NO: 16326 - protein, 11 aa, synthetic construct
  REGION 1..11: note = Basement membrane-specific heparan sulfate proteoglycan core protein (176-186)
SYVTSPQGFQF

SEQ ID NO: 16327 - protein, 9 aa, synthetic construct
  REGION 1..9: note = Transcription factor BTF3 (82-90)
TADDKKLQF

SEQ ID NO: 16328 - protein, 9 aa, synthetic construct
  REGION 1..9: note Dolichyl-diphosphooligosaccharide-proteinosyltransferase 48 kDa subunit (78-86)
TADDPSLSL

SEQ ID NO: 16329 - protein, 10 aa, synthetic construct
  REGION 1..10: note = Transducin beta-like protein 3 (197-206)
TADHNLLLYE

SEQ ID NO: 16330 - protein, 9 aa, synthetic construct
  REGION 1..9: note = Lymphocyte cytosolic protein 2 (227-235)
TAKLPAPSI

SEQ ID NO: 16331 - protein, 9 aa, synthetic construct
  REGION 1..9: note = Pyridine nucleotide-disulfide oxidoreductase domain-containing protein 1 (42-50)
TASPVIKAV

SEQ ID NO: 16332 - protein, 9 aa, synthetic construct
  REGION 1..9: note = Programmed cell death 6-interacting protein (658-666)
TAYDNFVEL

SEQ ID NO: 16333 - protein, 14 aa, synthetic construct
  REGION 1..14: note = Cullin-4B (24-37)
TDGNTSTTPPTSAK

SEQ ID NO: 16334 - protein, 9 aa, synthetic construct
  REGION 1..9: note = Putative sodium-coupled neutral amino acid transporter 10 (253-261)
TEATAGNVL

SEQ ID NO: 16335 - protein, 11 aa, synthetic construct
  REGION 1..11: note = Optineurin (373-383)
TEDEKSKLTVL

SEQ ID NO: 16336 - protein, 12 aa, synthetic construct
  REGION 1..12: note = Nuclear factor erythroid 2-related factor 2 (160-171)
TEDPNQLTVNSL

SEQ ID NO: 16337 - protein, 11 aa, synthetic construct
  REGION 1..11: note = Actin-related protein 2/3 complex subunit 1A (312-322)
TEDRNTALETL

SEQ ID NO: 16338 - protein, 9 aa, synthetic construct
  REGION 1..9: note = Dynactin subunit 2 (131-139)
TEEKLTPVL

SEQ ID NO: 16339 - protein, 10 aa, synthetic construct
  REGION 1..10: note = Dynactin subunit 2 (131-140)
TEEKLTPVLL

SEQ ID NO: 16340 - protein, 10 aa, synthetic construct
  REGION 1..10: note = Protein fuzzy homolog (371-380)
TEEPGTGVRL

SEQ ID NO: 16341 - protein, 11 aa, synthetic construct
  REGION 1..11: note = BRF1 protein (61-71)
TEFEDTPTSQL

SEQ ID NO: 16342 - protein, 10 aa, synthetic construct
  REGION 1..10: note = Dystonin (2514-2523)
TEIDSKWQEL

SEQ ID NO: 16343 - protein, 9 aa, synthetic construct
  REGION 1..9: note = Protein TBRG4 (216-224)
TEIEDSHTL

SEQ ID NO: 16344 - protein, 9 aa, synthetic construct
  REGION 1..9: note = RuvB-like 1 (44-52)
TEIKKTEVL

SEQ ID NO: 16345 - protein, 9 aa, synthetic construct
  REGION 1..9: note = MIF2 suppressor (12-20)
TENNDHINL

SEQ ID NO: 16346 - protein, 9 aa, synthetic construct
  REGION 1..9: note = Sodium/potassium-transporting ATPase subunit alpha-1 (206-214)
TENQSGVSF

SEQ ID NO: 16347 - protein, 9 aa, synthetic construct
  REGION 1..9: note = Eukaryotic translation initiation factor 3 subunit L (482-490)
TEQEFRIQL

SEQ ID NO: 16348 - protein, 10 aa, synthetic construct
  REGION 1..10: note = Golgi-associated PDZ and coiled-coil motif-containing protein (106-115)
TETQAEKVVL

SEQ ID NO: 16349 - protein, 10 aa, synthetic construct
  REGION 1..10: note Dolichyl-diphosphooligosaccharide-proteinosyltransferase subunit 2 (371-380)
TEVGITNVDL

SEQ ID NO: 16350 - protein, 10 aa, synthetic construct
  REGION 1..10: note = Apoptosis-inducing factor 2 (163-172)
TEYPEKEVTL

SEQ ID NO: 16351 - protein, 9 aa, synthetic construct
  REGION 1..9: note = Fibronectin type III domain-containing protein 3B (635-643)
THLKPGTLY

SEQ ID NO: 16352 - protein, 9 aa, synthetic construct
  REGION 1..9: note = Transcription factor 12 (468-476)
THREDSVSL

SEQ ID NO: 16353 - protein, 9 aa, synthetic construct
  REGION 1..9: note = N-alpha-acetyltransferase 25, NatB auxiliary subunit (500-508)
THSPSNAQF

SEQ ID NO: 16354 - protein, 9 aa, synthetic construct
  REGION 1..9: note = Minor histocompatibility antigen H13 (287-295)
THTYFYTSF

SEQ ID NO: 16355 - protein, 9 aa, synthetic construct
  REGION 1..9: note = GLTSCR1-like protein (169-177)
THVPVGASF

SEQ ID NO: 16356 - protein, 9 aa, synthetic construct
  REGION 1..9: note = Asparagine synthetase (glutamine-hydrolyzing) (553-561)
THYKSAVKA

SEQ ID NO: 16357 - protein, 11 aa, synthetic construct
  REGION 1..11: note = Sorting nexin-18 (279-289)
TIDDPTKQTKF

SEQ ID NO: 16358 - protein, 9 aa, synthetic construct
  REGION 1..9: note = Clathrin interactor 1 (211-219)
TIDDTISKF

SEQ ID NO: 16359 - protein, 9 aa, synthetic construct
  REGION 1..9: note = Nucleolar GTP-binding protein 1 (163-171)
TIDPNTRTL

SEQ ID NO: 16360 - protein, 13 aa, synthetic construct
  REGION 1..13: note = Signal transducer and activator of transcription 5B (372-384)
TIISEQQAKSLLK

SEQ ID NO: 16361 - protein, 9 aa, synthetic construct
  REGION 1..9: note = Sorting nexin-14 (74-82)
TIKYKPKQL

SEQ ID NO: 16362 - protein, 11 aa, synthetic construct
  REGION 1..11: note = Heterogeneous nuclear ribonucleoproteins A2/B1 (164-174)
TINGHNAEVRK

SEQ ID NO: 16363 - protein, 10 aa, synthetic construct
  REGION 1..10: note = Similar to calcium-independent phospholipase A2 (165-174)
TIVNRGITPK

SEQ ID NO: 16364 - protein, 11 aa, synthetic construct
  REGION 1..11: note = Cytoplasmic dynein 1 heavy chain 1 (1281-1291)
TIYEGKFGRLK

SEQ ID NO: 16365 - protein, 9 aa, synthetic construct
  REGION 1..9: note = Melanoma-associated antigen D1 (153-161)
TKVGPNATY

SEQ ID NO: 16366 - protein, 9 aa, synthetic construct
  REGION 1..9: note = Calmodulin-binding transcription activator 1 (1179-1187)
TLAEHIIEA

SEQ ID NO: 16367 - protein, 12 aa, synthetic construct
  REGION 1..12: note = Syndecan-3 (348-359)
TLEEPKQASVTY

SEQ ID NO: 16368 - protein, 12 aa, synthetic construct
  REGION 1..12: note = Septin-7 (426-437)
TLEKNKKKGKIF

SEQ ID NO: 16369 - protein, 11 aa, synthetic construct
  REGION 1..11: note = Histone-lysine N-methyltransferase ASH1L (2959-2969)
TLFIPENSFRK

SEQ ID NO: 16370 - protein, 11 aa, synthetic construct
  REGION 1..11: note = Uncharacterized protein C1orf198 (300-310)
TLFSEPKFAQV

SEQ ID NO: 16371 - protein, 11 aa, synthetic construct
  REGION 1..11: note = Signal recognition particle receptor subunit beta (114-124)
TLIDLPGHESL

SEQ ID NO: 16372 - protein, 9 aa, synthetic construct
  REGION 1..9: note = Conserved oligomeric Golgi complex subunit 5 (271-279)
TLKDTITSV

SEQ ID NO: 16373 - protein, 9 aa, synthetic construct
  REGION 1..9: note = Transcription intermediary factor 1-beta (187-195)
TLQKSTKEV

SEQ ID NO: 16374 - protein, 9 aa, synthetic construct
  REGION 1..9: note = Cell division cycle protein 20 homolog (304-312)
TLSGHSQEV

SEQ ID NO: 16375 - protein, 9 aa, synthetic construct
  REGION 1..9: note = Zinc finger BED domain-containing protein 4 (953-961)
TLSQVIPMV

SEQ ID NO: 16376 - protein, 9 aa, synthetic construct
  REGION 1..9: note = Ubiquitin-60S ribosomal protein L40 (12-20)
TLTGKTITL

SEQ ID NO: 16377 - protein, 9 aa, synthetic construct
  REGION 1..9: note = Sodium/potassium-transporting ATPase subunit alpha-3 (782-790)
TLTSNIPEI

SEQ ID NO: 16378 - protein, 11 aa, synthetic construct
  REGION 1..11: note = Putative heat shock protein HSP 90-beta 2 (85-95)
TLVDTGIGMTK

SEQ ID NO: 16379 - protein, 11 aa, synthetic construct
  REGION 1..11: note = Lathosterol oxidase (245-255)
TLWDRIGGSFK

SEQ ID NO: 16380 - protein, 9 aa, synthetic construct
  REGION 1..9: note = Nicotinamide phosphoribosyltransferase (435-443)
TPAGNFVTL

SEQ ID NO: 16381 - protein, 9 aa, synthetic construct
  REGION 1..9: note = SH3 domain-containing protein 19 (137-145)
TPAPRPLLL

SEQ ID NO: 16382 - protein, 9 aa, synthetic construct
  REGION 1..9: note = Ephrin-A5 (207-215)
TPRIPSRLL

SEQ ID NO: 16383 - protein, 9 aa, synthetic construct
  REGION 1..9: note = 40S ribosomal protein S2 (285-293)
TQAPAVATT

SEQ ID NO: 16384 - protein, 9 aa, synthetic construct
  REGION 1..9: note = RNA-binding protein EWS (33-41)
TQAYGQQSY

SEQ ID NO: 16385 - protein, 9 aa, synthetic construct
  REGION 1..9: note = 28S ribosomal protein S12, mitochondrial (115-123)
TQDLPGVKL

SEQ ID NO: 16386 - protein, 11 aa, synthetic construct
  REGION 1..11: note = Synphilin-1 (60-70)
TQKPTGIADVY

SEQ ID NO: 16387 - protein, 9 aa, synthetic construct
  REGION 1..9: note = U5 small nuclear ribonucleoprotein 200 kDa helicase (1765-1773)
TQNPNYYNL

SEQ ID NO: 16388 - protein, 9 aa, synthetic construct
  REGION 1..9: note = SWI/SNF-related matrix-associated actin-dependent regulator of chromatin subfamily D member 1 (436-444)
TQREFMLSF

SEQ ID NO: 16389 - protein, 9 aa, synthetic construct
  REGION 1..9: note = Protein FAM204A (125-133)
TQWKELTQY

SEQ ID NO: 16390 - protein, 9 aa, synthetic construct
  REGION 1..9: note = Cytoskeleton-associated protein 2 (274-282)
TSANVTIRK

SEQ ID NO: 16391 - protein, 9 aa, synthetic construct
  REGION 1..9: note = Uncharacterized protein KIAA2013 (598-606)
TSAPTGHTF

SEQ ID NO: 16392 - protein, 9 aa, synthetic construct
  REGION 1..9: note = Long-chain-fatty-acid-CoA ligase 4 (10-18)
TSDKPGSPY

SEQ ID NO: 16393 - protein, 9 aa, synthetic construct
  REGION 1..9: note = Zinc finger MYM-type protein 1 (293-301)
TSDLGKTEL

SEQ ID NO: 16394 - protein, 9 aa, synthetic construct
  REGION 1..9: note = Importin subunit alpha-4 (81-89)
TSDNPVVQL

SEQ ID NO: 16395 - protein, 9 aa, synthetic construct
  REGION 1..9: note = Dual specificity mitogen-activated protein kinase kinase 3 (150-158)
TSLDKFYRK

SEQ ID NO: 16396 - protein, 11 aa, synthetic construct
  REGION 1..11: note = Prothymosin alpha (8-18)
TSSEITTKDLK

SEQ ID NO: 16397 - protein, 9 aa, synthetic construct
  REGION 1..9: note = Histone-lysine N-methyltransferase SETD2 (1436-1444)
TSVPPGSAL

SEQ ID NO: 16398 - protein, 9 aa, synthetic construct
  REGION 1..9: note = Metastasis-associated protein MTA2 (312-320)
TTDRYIQQK

SEQ ID NO: 16399 - protein, 9 aa, synthetic construct
  REGION 1..9: note = Cyclin-dependent kinase 1 (25-33)
TTGQVVAMK

SEQ ID NO: 16400 - protein, 11 aa, synthetic construct
  REGION 1..11: note = ATP-dependent RNA helicase DHX8 (1166-1176)
TTIDPRWLVEF

SEQ ID NO: 16401 - protein, 9 aa, synthetic construct
  REGION 1..9: note = Splicing factor 3A subunit 1 (123-131)
TTQQQLPQK

SEQ ID NO: 16402 - protein, 9 aa, synthetic construct
  REGION 1..9: note = Germinal-center associated nuclear protein (203-211)
TTSNFTFSK

SEQ ID NO: 16403 - protein, 9 aa, synthetic construct
  REGION 1..9: note = Vacuolar protein sorting-associated protein 35 (375-383)
TTVEIFNKL

SEQ ID NO: 16404 - protein, 10 aa, synthetic construct
  REGION 1..10: note = Eukaryotic translation initiation factor 3 subunit L (353-362)
TTYKYEMINK

SEQ ID NO: 16405 - protein, 9 aa, synthetic construct
  REGION 1..9: note = Cofilin-1 (12-20)
TVDDPYATF

SEQ ID NO: 16406 - protein, 9 aa, synthetic construct
  REGION 1..9: note = CCAAT/enhancer-binding protein beta (266-274)
TVDKHSDEY

SEQ ID NO: 16407 - protein, 11 aa, synthetic construct
  REGION 1..11: note = WD repeat-containing protein 48 (379-389)
TVDKNMPKFNK

SEQ ID NO: 16408 - protein, 9 aa, synthetic construct
  REGION 1..9: note = TRAF2 and NCK-interacting protein kinase (352-360)
TVEEGQRLK

SEQ ID NO: 16409 - protein, 10 aa, synthetic construct
  REGION 1..10: note = Nicotinamide phosphoribosyltransferase (460-469)
TVFKNGKVTK

SEQ ID NO: 16410 - protein, 9 aa, synthetic construct
  REGION 1..9: note = E3 ubiquitin-protein ligase RNF213 (4830-4838)
TVFLSTWNK

SEQ ID NO: 16411 - protein, 9 aa, synthetic construct
  REGION 1..9: note = Chromatin assembly factor 1 subunit B (444-452)
TVIRDPPSI

SEQ ID NO: 16412 - protein, 9 aa, synthetic construct
  REGION 1..9: note = Glycine-tRNA ligase (350-358)
TVLGYFIGR

SEQ ID NO: 16413 - protein, 11 aa, synthetic construct
  REGION 1..11: note = Beta-lactamase-like protein 2 (237-247)
TVMELVKIIYK

SEQ ID NO: 16414 - protein, 9 aa, synthetic construct
  REGION 1..9: note = Probable U3 small nucleolar RNA-associated protein 11 (238-246)
TVNSPAIYK

SEQ ID NO: 16415 - protein, 10 aa, synthetic construct
  REGION 1..10: note = Complex I assembly factor TIMMDC1, mitochondrial (151-160)
TVNTSLNVYR

SEQ ID NO: 16416 - protein, 9 aa, synthetic construct
  REGION 1..9: note = Coiled-coil domain-containing protein 66 (124-132)
TVNTSLVGK

SEQ ID NO: 16417 - protein, 9 aa, synthetic construct
  REGION 1..9: note = Exportin-1 (648-656)
TVQEHLIEK

SEQ ID NO: 16418 - protein, 9 aa, synthetic construct
  REGION 1..9: note = SWI/SNF-related matrix-associated actin-dependent regulator of chromatin subfamily A containing DEAD/H box 1 (109-117)
TVQEKTFNK

SEQ ID NO: 16419 - protein, 9 aa, synthetic construct
  REGION 1..9: note = Collagen alpha-3(VI) chain (2723-2731)
TVRPPVAVK

SEQ ID NO: 16420 - protein, 9 aa, synthetic construct
  REGION 1..9: note = Cleavage and polyadenylation specificity factor subunit 3 (440-448)
TVTTVILEV

SEQ ID NO: 16421 - protein, 11 aa, synthetic construct
  REGION 1..11: note = Transformation/transcription domain-associated protein (10-20)
TVVDQTTLMKK

SEQ ID NO: 16422 - protein, 12 aa, synthetic construct
  REGION 1..12: note = Endoplasmic reticulum-Golgi intermediate compartment protein 1 (103-114)
TVYEDKSGKQRY

SEQ ID NO: 16423 - protein, 12 aa, synthetic construct
  REGION 1..12: note = HIG1 domain family member 2A, mitochondrial (27-38)
TVYRNPESFKEK

SEQ ID NO: 16424 - protein, 9 aa, synthetic construct
  REGION 1..9: note = Neuroblastoma-amplified sequence (1950-1958)
TYADTLNHL

SEQ ID NO: 16425 - protein, 9 aa, synthetic construct
  REGION 1..9: note = Dystonin (672-680)
TYAEKLHRL

SEQ ID NO: 16426 - protein, 9 aa, synthetic construct
  REGION 1..9: note = Unconventional myosin-Va (386-394)
TYIKPISKL

SEQ ID NO: 16427 - protein, 9 aa, synthetic construct
  REGION 1..9: note = Protein transport protein Sec24B (640-648)
TYINPFVSF

SEQ ID NO: 16428 - protein, 11 aa, synthetic construct
  REGION 1..11: note = MORN repeat-containing protein 1 (177-187)
TYKGQWHSDVF

SEQ ID NO: 16429 - protein, 9 aa, synthetic construct
  REGION 1..9: note = Nesprin-2 (2589-2597)
TYLDKIKKF

SEQ ID NO: 16430 - protein, 9 aa, synthetic construct
  REGION 1..9: note = Interferon-induced protein with tetratricopeptide repeats 1 (116-124)
TYLDKVENI

SEQ ID NO: 16431 - protein, 9 aa, synthetic construct
  REGION 1..9: note = Putative UDP-GlcNAc:betaGal beta-1,3-N-acetylglucosaminyltransferase LOC100288842 (347-355)
TYLDSFKRF

SEQ ID NO: 16432 - protein, 11 aa, synthetic construct
  REGION 1..11: note = Tenascin (710-720)
TYLPAPEGLKF

SEQ ID NO: 16433 - protein, 9 aa, synthetic construct
  REGION 1..9: note = Mid1-interacting protein 1 (6-14)
TYNQKHSLF

SEQ ID NO: 16434 - protein, 9 aa, synthetic construct
  REGION 1..9: note = Glycogenin-2 (121-129)
TYSPAFKQF

SEQ ID NO: 16435 - protein, 9 aa, synthetic construct
  REGION 1..9: note = 60S ribosomal protein L28 (24-32)
TYSTEPNNL

SEQ ID NO: 16436 - protein, 11 aa, synthetic construct
  REGION 1..11: note = Vacuolar protein sorting-associated protein 13B (523-533)
TYTEIAGMQRF

SEQ ID NO: 16437 - protein, 9 aa, synthetic construct
  REGION 1..9: note = 5'-3' exoribonuclease 1 (313-321)
TYVTILPEL

SEQ ID NO: 16438 - protein, 9 aa, synthetic construct
  REGION 1..9: note = EF-hand calcium-binding domain-containing protein 11 (105-113)
TYYRGFLTL

SEQ ID NO: 16439 - protein, 9 aa, synthetic construct
  REGION 1..9: note = Exocyst complex component 4 (15-23)
VAAAHSVVL

SEQ ID NO: 16440 - protein, 9 aa, synthetic construct
  REGION 1..9: note = Pre-mRNA-splicing factor RBM22 (282-290)
VAAEKSFNK

SEQ ID NO: 16441 - protein, 9 aa, synthetic construct
  REGION 1..9: note = Protein disulfide-isomerase A4 (76-84)
VADKDTVLL

SEQ ID NO: 16442 - protein, 10 aa, synthetic construct
  REGION 1..10: note Dolichyl-diphosphooligosaccharide-proteinosyltransferase 48 kDa subunit (203-212)
VADPDNPLVL

SEQ ID NO: 16443 - protein, 11 aa, synthetic construct
  REGION 1..11: note = KN motif and ankyrin repeat domain-containing protein 2 (489-499)
VADPTAHRRSL

SEQ ID NO: 16444 - protein, 9 aa, synthetic construct
  REGION 1..9: note = 40S ribosomal protein S5 (11-19)
VAETPDIKL

SEQ ID NO: 16445 - protein, 9 aa, synthetic construct
  REGION 1..9: note = ATP-dependent 6-phosphofructokinase, liver type (717-725)
VAFSPVTEL

SEQ ID NO: 16446 - protein, 9 aa, synthetic construct
  REGION 1..9: note = Inosine-5'-monophosphate dehydrogenase 2 (219-227)
VAIIARTDL

SEQ ID NO: 16447 - protein, 9 aa, synthetic construct
  REGION 1..9: note = Transmembrane protein 41B (243-251)
VAIKAGTTL

SEQ ID NO: 16448 - protein, 11 aa, synthetic construct
  REGION 1..11: note = Importin-9 (102-112)
VAMSPELIQQF

SEQ ID NO: 16449 - protein, 9 aa, synthetic construct
  REGION 1..9: note = Cytochrome c oxidase subunit 7A2, mitochondrial (75-83)
VASFPKKQE

SEQ ID NO: 16450 - protein, 9 aa, synthetic construct
  REGION 1..9: note = Transketolase (365-373)
VATEKAVEL

SEQ ID NO: 16451 - protein, 9 aa, synthetic construct
  REGION 1..9: note = Hydroxyacylglutathione hydrolase-like protein (26-34)
VAVDVAVPK

SEQ ID NO: 16452 - protein, 14 aa, synthetic construct
  REGION 1..14: note = Myosin-9 (1950-1963)
VDGKADGAEAKPAE

SEQ ID NO: 16453 - protein, 9 aa, synthetic construct
  REGION 1..9: note = StAR-related lipid transfer protein 13 (841-849)
VEAPPSVVL

SEQ ID NO: 16454 - protein, 10 aa, synthetic construct
  REGION 1..10: note = Cytoplasmic dynein 1 heavy chain 1 (236-245)
VEDPTFLNQL

SEQ ID NO: 16455 - protein, 10 aa, synthetic construct
  REGION 1..10: note = Protein strawberry notch homolog 1 (1087-1096)
VEDRSGILTL

SEQ ID NO: 16456 - protein, 11 aa, synthetic construct
  REGION 1..11: note = Condensin complex subunit 3 (683-693)
VEETATAKNVL

SEQ ID NO: 16457 - protein, 10 aa, synthetic construct
  REGION 1..10: note = Serine/threonine-protein phosphatase 2A 55 kDa regulatory subunit B alpha isoform (34-43)
VEFNHSGELL

SEQ ID NO: 16458 - protein, 11 aa, synthetic construct
  REGION 1..11: note = Dynactin subunit 3 (113-123)
VEITEESKALL

SEQ ID NO: 16459 - protein, 11 aa, synthetic construct
  REGION 1..11: note = Coatomer subunit delta (229-239)
VENEDKKGVQL

SEQ ID NO: 16460 - protein, 12 aa, synthetic construct
  REGION 1..12: note = Transmembrane emp24 domain-containing protein 4 (79-90)
VEVKDPDGKVVL

SEQ ID NO: 16461 - protein, 10 aa, synthetic construct
  REGION 1..10: note = Neuroblast differentiation-associated protein AHNAK (866-875)
VEVQGPDWHL

SEQ ID NO: 16462 - protein, 9 aa, synthetic construct
  REGION 1..9: note = Coatomer subunit alpha (256-264)
VFHPRQELI

SEQ ID NO: 16463 - protein, 9 aa, synthetic construct
  REGION 1..9: note = Alpha-internexin (107-115)
VFIEKVHQL

SEQ ID NO: 16464 - protein, 9 aa, synthetic construct
  REGION 1..9: note = Protein unc-119 homolog B (162-170)
VGDKPVSNF

SEQ ID NO: 16465 - protein, 9 aa, synthetic construct
  REGION 1..9: note = Dehydrogenase/reductase SDR family member on chromosome X (20-28)
VILAQLLRR

SEQ ID NO: 16466 - protein, 10 aa, synthetic construct
  REGION 1..10: note = Transcription initiation factor IIA subunit 1 (21-30)
VINDVRDIFL

SEQ ID NO: 16467 - protein, 9 aa, synthetic construct
  REGION 1..9: note = Protein FAM208B (1046-1054)
VINPEPITL

SEQ ID NO: 16468 - protein, 9 aa, synthetic construct
  REGION 1..9: note = Copine-2 (523-531)
VLAELPQQV

SEQ ID NO: 16469 - protein, 11 aa, synthetic construct
  REGION 1..11: note = High affinity cationic amino acid transporter 1 (147-157)
VLAENPDIFAV

SEQ ID NO: 16470 - protein, 13 aa, synthetic construct
  REGION 1..13: note = Neudesin (19-31)
VLALAPGLPTARA

SEQ ID NO: 16471 - protein, 13 aa, synthetic construct
  REGION 1..13: note = Activating signal cointegrator 1 complex subunit 2 (166-178)
VLFGKGNSPLLQK

SEQ ID NO: 16472 - protein, 11 aa, synthetic construct
  REGION 1..11: note = Acyl-CoA:lysophosphatidylglycerol acyltransferase 1 (180-190)
VLFPEGGFLRK

SEQ ID NO: 16473 - protein, 9 aa, synthetic construct
  REGION 1..9: note = Importin-7 (169-177)
VLIQKQIFK

SEQ ID NO: 16474 - protein, 9 aa, synthetic construct
  REGION 1..9: note = Tight junction protein ZO-1 (1634-1642)
VLSSIETGV

SEQ ID NO: 16475 - protein, 9 aa, synthetic construct
  REGION 1..9: note = Interleukin-4 receptor subunit alpha (335-343)
VLWPESISV

SEQ ID NO: 16476 - protein, 12 aa, synthetic construct
  REGION 1..12: note Dolichyl-diphosphooligosaccharide-proteinosyltransferase subunit 4 (23-34)
VLYHYVAVNNPK

SEQ ID NO: 16477 - protein, 11 aa, synthetic construct
  REGION 1..11: note = Clathrin heavy chain 1 (788-798)
VLYLYRNNLQK

SEQ ID NO: 16478 - protein, 9 aa, synthetic construct
  REGION 1..9: note = ADNP homeobox protein 2 (968-976)
VMHDSSFSV

SEQ ID NO: 16479 - protein, 10 aa, synthetic construct
  REGION 1..10: note = Myosin-10 (1967-1976)
VNETQPPQSE

SEQ ID NO: 16480 - protein, 9 aa, synthetic construct
  REGION 1..9: note = Fas-activated serine/threonine kinase (383-391)
VPIFPQPLI

SEQ ID NO: 16481 - protein, 11 aa, synthetic construct
  REGION 1..11: note = DNA-(apurinic or apyrimidinic site) lyase (172-182)
VPNAGRGLVRL

SEQ ID NO: 16482 - protein, 9 aa, synthetic construct
  REGION 1..9: note = Eukaryotic translation initiation factor 3 subunit A (428-436)
VPQLQNNTI

SEQ ID NO: 16483 - protein, 9 aa, synthetic construct
  REGION 1..9: note = Zinc finger CCCH domain-containing protein 7A (237-245)
VPVMPLTSI

SEQ ID NO: 16484 - protein, 8 aa, synthetic construct
  REGION 1..8: note = Cellular tumor antigen p53 (218-225)
VPYEPPEV

SEQ ID NO: 16485 - protein, 9 aa, synthetic construct
  REGION 1..9: note = 40S ribosomal protein S11 (120-128)
VQIGDIVTV

SEQ ID NO: 16486 - protein, 9 aa, synthetic construct
  REGION 1..9: note = Golgin-45 (153-161)
VQTEVNREL

SEQ ID NO: 16487 - protein, 9 aa, synthetic construct
  REGION 1..9: note = Centrosomal protein of 192 kDa (314-322)
VRNPRITSL

SEQ ID NO: 16488 - protein, 9 aa, synthetic construct
  REGION 1..9: note = Oxidoreductase HTATIP2 (105-113)
VRVDRDYVL

SEQ ID NO: 16489 - protein, 9 aa, synthetic construct
  REGION 1..9: note = Serine/threonine-protein phosphatase 4 catalytic subunit (102-110)
VRYPDRITL

SEQ ID NO: 16490 - protein, 9 aa, synthetic construct
  REGION 1..9: note = Phosphorylated CTD-interacting factor 1 (411-419)
VSAPPMPSV

SEQ ID NO: 16491 - protein, 9 aa, synthetic construct
  REGION 1..9: note = Protein prenyltransferase alpha subunit repeat-containing protein 1 (214-222)
VSDHSGFHY

SEQ ID NO: 16492 - protein, 12 aa, synthetic construct
  REGION 1..12: note = Nuclear protein localization protein 4 homolog (316-327)
VSEDTRKGTVRY

SEQ ID NO: 16493 - protein, 9 aa, synthetic construct
  REGION 1..9: note = Neuronal regeneration-related protein (79-87)
VSQEPFPNK

SEQ ID NO: 16494 - protein, 9 aa, synthetic construct
  REGION 1..9: note = Mannosyl-oligosaccharide glucosidase (210-218)
VTDGKEVLL

SEQ ID NO: 16495 - protein, 9 aa, synthetic construct
  REGION 1..9: note = Attractin (8-16)
VTDGPGNYK

SEQ ID NO: 16496 - protein, 9 aa, synthetic construct
  REGION 1..9: note = U3 small nucleolar ribonucleoprotein protein IMP3 (23-31)
VTDHNLHEL

SEQ ID NO: 16497 - protein, 9 aa, synthetic construct
  REGION 1..9: note = Protocadherin Fat 1 (1217-1225)
VTDNGSPPK

SEQ ID NO: 16498 - protein, 10 aa, synthetic construct
  REGION 1..10: note = Death-inducer obliterator 1 (716-725)
VTDNRYKSKY

SEQ ID NO: 16499 - protein, 11 aa, synthetic construct
  REGION 1..11: note = Fructose-bisphosphate aldolase A (87-97)
VTEKVLAAVYK

SEQ ID NO: 16500 - protein, 11 aa, synthetic construct
  REGION 1..11: note = Prefoldin subunit 4 (11-21)
VTFEDQQKINK

SEQ ID NO: 16501 - protein, 11 aa, synthetic construct
  REGION 1..11: note = Phosphoserine aminotransferase (349-359)
VTIEDVQKLAA

SEQ ID NO: 16502 - protein, 13 aa, synthetic construct
  REGION 1..13: note = Phosphate carrier protein, mitochondrial (107-119)
VTLKEDGVRGLAK

SEQ ID NO: 16503 - protein, 10 aa, synthetic construct
  REGION 1..10: note = Apoptosis inhibitor 5 (368-377)
VTLSWKPVQK

SEQ ID NO: 16504 - protein, 10 aa, synthetic construct
  REGION 1..10: note = Small subunit processome component 20 homolog (830-839)
VTNPDIAAKK

SEQ ID NO: 16505 - protein, 9 aa, synthetic construct
  REGION 1..9: note = Putative PIP5K1A and PSMD4-like protein (656-664)
VTVPPGPSL

SEQ ID NO: 16506 - protein, 10 aa, synthetic construct
  REGION 1..10: note = Something about silencing protein 10 (302-311)
VTYRNLINKL

SEQ ID NO: 16507 - protein, 9 aa, synthetic construct
  REGION 1..9: note = 116 kDa U5 small nuclear ribonucleoprotein component (795-803)
VVAQEPLHR

SEQ ID NO: 16508 - protein, 9 aa, synthetic construct
  REGION 1..9: note = E3 ubiquitin-protein ligase TRIM23 (309-317)
VVDAHVREK

SEQ ID NO: 16509 - protein, 9 aa, synthetic construct
  REGION 1..9: note = X-ray repair cross-complementing protein 5 (174-182)
VVDAKTLKK

SEQ ID NO: 16510 - protein, 12 aa, synthetic construct
  REGION 1..12: note = DNA damage-binding protein 1 (364-375)
VVDLERQGQGQL

SEQ ID NO: 16511 - protein, 11 aa, synthetic construct
  REGION 1..11: note = Vacuolar protein sorting-associated protein 45 (3-13)
VVFAVKQYISK

SEQ ID NO: 16512 - protein, 11 aa, synthetic construct
  REGION 1..11: note = 60S ribosomal protein L8 (15-25)
VVFRDPYRFKK

SEQ ID NO: 16513 - protein, 10 aa, synthetic construct
  REGION 1..10: note = Rho-related BTB domain-containing protein 3 (256-265)
VVFYNPNLKK

SEQ ID NO: 16514 - protein, 11 aa, synthetic construct
  REGION 1..11: note = Protein FAM171B (18-28)
VVLLKARLVPA

SEQ ID NO: 16515 - protein, 11 aa, synthetic construct
  REGION 1..11: note = Clathrin interactor 1 (17-27)
VVMNYSEIESK

SEQ ID NO: 16516 - protein, 11 aa, synthetic construct
  REGION 1..11: note = Protein disulfide-isomerase A4 (356-366)
VVMQPEKFQSK

SEQ ID NO: 16517 - protein, 10 aa, synthetic construct
  REGION 1..10: note = Sulfate anion transporter 1 (417-426)
VVSATVVLLV

SEQ ID NO: 16518 - protein, 9 aa, synthetic construct
  REGION 1..9: note = 26S proteasome non-ATPase regulatory subunit 14 (143-151)
VVVDPIQSV

SEQ ID NO: 16519 - protein, 9 aa, synthetic construct
  REGION 1..9: note = Sodium/potassium-transporting ATPase subunit alpha-1 (185-193)
VVVGDLVEV

SEQ ID NO: 16520 - protein, 9 aa, synthetic construct
  REGION 1..9: note = Receptor tyrosine-protein kinase erbB-3 (147-155)
VYIEKNDKL

SEQ ID NO: 16521 - protein, 9 aa, synthetic construct
  REGION 1..9: note = Uncharacterized protein C5orf42 (702-710)
VYILQPEVI

SEQ ID NO: 16522 - protein, 10 aa, synthetic construct
  REGION 1..10: note = Small nuclear ribonucleoprotein Sm D3 (61-70)
VYIRGSKIRF

SEQ ID NO: 16523 - protein, 9 aa, synthetic construct
  REGION 1..9: note = Selenoprotein K (56-64)
VYISNGQVL

SEQ ID NO: 16524 - protein, 9 aa, synthetic construct
  REGION 1..9: note = Fibronectin type III domain-containing protein 3B (651-659)
VYKGEEATF

SEQ ID NO: 16525 - protein, 8 aa, synthetic construct
  REGION 1..8: note = Transmembrane protein 41B (71-78)
VYKNFPQL

SEQ ID NO: 16526 - protein, 9 aa, synthetic construct
  REGION 1..9: note = Surfeit locus protein 4 (220-228)
VYKPMHDFL

SEQ ID NO: 16527 - protein, 10 aa, synthetic construct
  REGION 1..10: note = Mitogen-activated protein kinase-binding protein 1 (356-365)
VYNDHSIYVW

SEQ ID NO: 16528 - protein, 9 aa, synthetic construct
  REGION 1..9: note CMP-N-acetylneuraminate-beta-galactosamide-alpha-2,3-sialyl transf erase 1 (190-198)
VYPESFREL

SEQ ID NO: 16529 - protein, 9 aa, synthetic construct
  REGION 1..9: note = Inactive tyrosine-protein kinase 7 (603-611)
VYQGHTALL

SEQ ID NO: 16530 - protein, 9 aa, synthetic construct
  REGION 1..9: note = Bcl-2 homologous antagonist/killer (142-150)
VYQHGLTGF

SEQ ID NO: 16531 - protein, 9 aa, synthetic construct
  REGION 1..9: note = Rho GTPase-activating protein 5 (413-421)
VYQNHVQHL

SEQ ID NO: 16532 - protein, 9 aa, synthetic construct
  REGION 1..9: note = Mitochondrial peptide methionine sulfoxide reductase (82-90)
VYQPEHMSF

SEQ ID NO: 16533 - protein, 11 aa, synthetic construct
  REGION 1..11: note = Complex I assembly factor TIMMDC1, mitochondrial (158-168)
VYRNKDALSHF

SEQ ID NO: 16534 - protein, 10 aa, synthetic construct
  REGION 1..10: note = Unconventional myosin-XVIIIa (453-462)
VYSEKVMHMF

SEQ ID NO: 16535 - protein, 10 aa, synthetic construct
  REGION 1..10: note = Latent-transforming growth factor beta-binding protein 3 (448-457)
VYSSAEFHSL

SEQ ID NO: 16536 - protein, 9 aa, synthetic construct
  REGION 1..9: note = Uncharacterized protein C11orf80 (292-300)
VYTLLTTHL

SEQ ID NO: 16537 - protein, 9 aa, synthetic construct
  REGION 1..9: note = Integrin alpha-11 (440-448)
VYVAGAPRF

SEQ ID NO: 16538 - protein, 9 aa, synthetic construct
  REGION 1..9: note = Angiomotin (598-606)
VYVDKVEKM

SEQ ID NO: 16539 - protein, 9 aa, synthetic construct
  REGION 1..9: note = Early endosome antigen 1 (285-293)
VYVQELQKL

SEQ ID NO: 16540 - protein, 9 aa, synthetic construct
  REGION 1..9: note = Transformation/transcription domain-associated protein (1973-1981)
VYYPVRHHL

SEQ ID NO: 16541 - protein, 9 aa, synthetic construct
  REGION 1..9: note = Actin-binding protein anillin (212-220)
WEDDVNHSF

SEQ ID NO: 16542 - protein, 9 aa, synthetic construct
  REGION 1..9: note = AP-5 complex subunit zeta-1 (1307-1315)
YAAGVHSVL

SEQ ID NO: 16543 - protein, 10 aa, synthetic construct
  REGION 1..10: note = Proline-rich protein 12 (50-59)
YAAPHPLQSY

SEQ ID NO: 16544 - protein, 9 aa, synthetic construct
  REGION 1..9: note = A-kinase anchor protein 12 (1228-1236)
YADEKTKDV

SEQ ID NO: 16545 - protein, 9 aa, synthetic construct
  REGION 1..9: note = Maturin (34-42)
YADPGVSFY

SEQ ID NO: 16546 - protein, 9 aa, synthetic construct
  REGION 1..9: note = Integrin alpha-V (110-118)
YAKDDPLEF

SEQ ID NO: 16547 - protein, 9 aa, synthetic construct
  REGION 1..9: note = Ras-related protein Rab-1B (43-51)
YASENVNKL

SEQ ID NO: 16548 - protein, 9 aa, synthetic construct
  REGION 1..9: note = Acetyl-CoA carboxylase 2 (1068-1076)
YASNITSVL

SEQ ID NO: 16549 - protein, 10 aa, synthetic construct
  REGION 1..10: note = Translocon-associated protein subunit beta (33-42)
YAVEGRDLTL

SEQ ID NO: 16550 - protein, 8 aa, synthetic construct
  REGION 1..8: note = Melanoma-associated antigen B2 (233-240)
YDGEEHSV

SEQ ID NO: 16551 - protein, 11 aa, synthetic construct
  REGION 1..11: note = Protein phosphatase 1A (59-69)
YDGHAGSQVAK

SEQ ID NO: 16552 - protein, 9 aa, synthetic construct
  REGION 1..9: note = NAD(P)H dehydrogenase (quinone) 1 (130-138)
YDKGPFRSK

SEQ ID NO: 16553 - protein, 10 aa, synthetic construct
  REGION 1..10: note = Proteasome subunit beta type-4 (177-186)
YEAPSLATGY

SEQ ID NO: 16554 - protein, 9 aa, synthetic construct
  REGION 1..9: note = RNA-binding motif protein, X-linked 2 (84-92)
YEDQRSTIL

SEQ ID NO: 16555 - protein, 9 aa, synthetic construct
  REGION 1..9: note = SAP30-binding protein (41-49)
YGEDDFSRL

SEQ ID NO: 16556 - protein, 9 aa, synthetic construct
  REGION 1..9: note = Tubulin-specific chaperone C (219-227)
YGNPNTLRL

SEQ ID NO: 16557 - protein, 9 aa, synthetic construct
  REGION 1..9: note = Regulator of microtubule dynamics protein 1 (188-196)
YIIKEHFEK

SEQ ID NO: 16558 - protein, 9 aa, synthetic construct
  REGION 1..9: note = Tensin-3 (11-19)
YITERIIAV

SEQ ID NO: 16559 - protein, 9 aa, synthetic construct
  REGION 1..9: note = Uncharacterized protein CXorf57 (109-117)
YLDPSLNSL

SEQ ID NO: 16560 - protein, 9 aa, synthetic construct
  REGION 1..9: note = Ragulator complex protein LAMTOR2 (114-122)
YLEEPLTQV

SEQ ID NO: 16561 - protein, 9 aa, synthetic construct
  REGION 1..9: note = HLA class I histocompatibility antigen, B-15 alpha chain (195-203)
YLENGKETL

SEQ ID NO: 16562 - protein, 9 aa, synthetic construct
  REGION 1..9: note = Proteasome activator complex subunit 4 (1375-1383)
YLEPKLTQV

SEQ ID NO: 16563 - protein, 9 aa, synthetic construct
  REGION 1..9: note = Inhibitor of nuclear factor kappa-B kinase subunit alpha (354-362)
YLFDKSKTV

SEQ ID NO: 16564 - protein, 9 aa, synthetic construct
  REGION 1..9: note = Unconventional myosin-X (243-251)
YLLEKNRVV

SEQ ID NO: 16565 - protein, 11 aa, synthetic construct
  REGION 1..11: note = Protein-lysine N-methyltransferase EEF2KMT (112-122)
YLLPSGGSVTL

SEQ ID NO: 16566 - protein, 9 aa, synthetic construct
  REGION 1..9: note = ER lumen protein-retaining receptor 3 (196-204)
YLYVTKVLK

SEQ ID NO: 16567 - protein, 10 aa, synthetic construct
  REGION 1..10: note = Zinc-binding alcohol dehydrogenase domain-containing protein 2 (355-364)
YMYMGKNTGK

SEQ ID NO: 16568 - protein, 9 aa, synthetic construct
  REGION 1..9: note = Ubiquitin-60S ribosomal protein L40 (64-72)
YNIQKESTL

SEQ ID NO: 16569 - protein, 10 aa, synthetic construct
  REGION 1..10: note = Disabled homolog 2-interacting protein (418-427)
YPDDRTARTL

SEQ ID NO: 16570 - protein, 11 aa, synthetic construct
  REGION 1..11: note = 7-methylguanosine phosphate-specific 5'-nucleotidase (85-95)
YPIEIDPHRTV

SEQ ID NO: 16571 - protein, 9 aa, synthetic construct
  REGION 1..9: note = RNA polymerase II-associated protein 3 (96-104)
YPKEADIVI

SEQ ID NO: 16572 - protein, 9 aa, synthetic construct
  REGION 1..9: note = Rabankyrin-5 (262-270)
YPLHKAIKV

SEQ ID NO: 16573 - protein, 9 aa, synthetic construct
  REGION 1..9: note = AP-1 complex subunit beta-1 (421-429)
YPNKYESVI

SEQ ID NO: 16574 - protein, 9 aa, synthetic construct
  REGION 1..9: note = Ataxin-2 (759-767)
YPVPVSPGV

SEQ ID NO: 16575 - protein, 9 aa, synthetic construct
  REGION 1..9: note = Ataxin-2-like protein (752-760)
YPYPVSNSV

SEQ ID NO: 16576 - protein, 9 aa, synthetic construct
  REGION 1..9: note = Long-chain-fatty-acid-CoA ligase 3 (709-717)
YQADIERMY

SEQ ID NO: 16577 - protein, 9 aa, synthetic construct
  REGION 1..9: note = RNA-binding motif protein 22 (253-261)
YQFGEIRTI

SEQ ID NO: 16578 - protein, 9 aa, synthetic construct
  REGION 1..9: note = Copine-1 (66-74)
YRFETVQKL

SEQ ID NO: 16579 - protein, 8 aa, synthetic construct
  REGION 1..8: note = Fibronectin type III domain-containing protein 3B (557-564)
YRGPSHTY

SEQ ID NO: 16580 - protein, 9 aa, synthetic construct
  REGION 1..9: note = Myosin-9 (40-48)
YRIGQSKVF

SEQ ID NO: 16581 - protein, 9 aa, synthetic construct
  REGION 1..9: note = Fatty acid desaturase 2 (166-174)
YRKPKWNHL

SEQ ID NO: 16582 - protein, 9 aa, synthetic construct
  REGION 1..9: note = Breast cancer anti-estrogen resistance protein 3 (757-765)
YRMNAERIL

SEQ ID NO: 16583 - protein, 9 aa, synthetic construct
  REGION 1..9: note = Unconventional myosin-Ib (72-80)
YRNRNFYEL

SEQ ID NO: 16584 - protein, 9 aa, synthetic construct
  REGION 1..9: note = Constitutive coactivator of PPAR-gamma-like protein 1 (602-610)
YRPVRQYVY

SEQ ID NO: 16585 - protein, 9 aa, synthetic construct
  REGION 1..9: note = E3 ubiquitin-protein ligase MARCH6 (469-477)
YSDAPVSEL

SEQ ID NO: 16586 - protein, 11 aa, synthetic construct
  REGION 1..11: note = Discoidin, CUB and LCCL domain-containing protein 2 (339-349)
YSDDGQKWTVY

SEQ ID NO: 16587 - protein, 9 aa, synthetic construct
  REGION 1..9: note = TM2 domain-containing protein 2 (68-76)
YSDVEHTSV

SEQ ID NO: 16588 - protein, 9 aa, synthetic construct
  REGION 1..9: note = Caveolin-2 (19-27)
YSHHSGLEY

SEQ ID NO: 16589 - protein, 11 aa, synthetic construct
  REGION 1..11: note = Calcium-responsive transactivator (198-208)
YSSAQGGSQHY

SEQ ID NO: 16590 - protein, 10 aa, synthetic construct
  REGION 1..10: note = Paxillin (31-40)
YSYPTGNHTY

SEQ ID NO: 16591 - protein, 9 aa, synthetic construct
  REGION 1..9: note = Uridine phosphorylase 1 (20-28)
YTEKDKQAY

SEQ ID NO: 16592 - protein, 11 aa, synthetic construct
  REGION 1..11: note = Nucleolin (463-473)
YTGEKGQNQDY

SEQ ID NO: 16593 - protein, 9 aa, synthetic construct
  REGION 1..9: note = Melanophilin (121-129)
YYEHVKARF

SEQ ID NO: 16594 - protein, 9 aa, synthetic construct
  REGION 1..9: note = 26S proteasome non-ATPase regulatory subunit 3 (212-220)
YYHARVYEF

SEQ ID NO: 16595 - protein, 9 aa, synthetic construct
  REGION 1..9: note = Neuroepithelial cell-transforming gene 1 protein (222-230)
YYIDKLEYL

SEQ ID NO: 16596 - protein, 9 aa, synthetic construct
  REGION 1..9: note = Disheveled-associated activator of morphogenesis 2 (101-109)
YYIDRINSM

SEQ ID NO: 16597 - protein, 10 aa, synthetic construct
  REGION 1..10: note = DNA-dependent protein kinase catalytic subunit (3101-3110)
YYIQNGIQSF

SEQ ID NO: 16598 - protein, 9 aa, synthetic construct
  REGION 1..9: note = Coiled-coil domain-containing protein 130 (79-87)
YYTTPIYRF

SEQ ID NO: 16599 - protein, 9 aa, synthetic construct
  REGION 1..9: note = RING finger protein 145 (469-477)
YYVNGTYRL

SEQ ID NO: 16600 - protein, 9 aa, synthetic construct
  REGION 1..9: note = EH domain-containing protein 4 (505-513)
ALAKHLIKI

SEQ ID NO: 16601 - protein, 8 aa, synthetic construct
  REGION 1..8: note = Ubiquitin carboxyl-terminal hydrolase 10 (606-613)
FGGHIRSV

SEQ ID NO: 16602 - protein, 7 aa, synthetic construct
  REGION 1..7: note = Guanine nucleotide-binding protein subunit beta-5 (322-328)
FGHENRV

SEQ ID NO: 16603 - protein, 10 aa, synthetic construct
  REGION 1..10: note = Alpha-actinin-3 (113-122)
FIASKGVKLV

SEQ ID NO: 16604 - protein, 9 aa, synthetic construct
  REGION 1..9: note = Transcriptional regulator Kaiso (564-572)
FMSSHIKSV

SEQ ID NO: 16605 - protein, 11 aa, synthetic construct
  REGION 1..11: note = DNA fragmentation factor subunit alpha (139-149)
ILLSEEDLQML

SEQ ID NO: 16606 - protein, 9 aa, synthetic construct
  REGION 1..9: note = Serine/threonine-protein kinase ULK3 (108-116)
ILPEKVARV

SEQ ID NO: 16607 - protein, 9 aa, synthetic construct
  REGION 1..9: note = Protein-lysine N-methyltransferase EEF2KMT (154-162)
KLDSPRVTV

SEQ ID NO: 16608 - protein, 9 aa, synthetic construct
  REGION 1..9: note = WASH complex subunit 7 (85-93)
KVLNKVITV

SEQ ID NO: 16609 - protein, 8 aa, synthetic construct
  REGION 1..8: note = Myelin expression factor 2 (298-305)
LFDRPMHV

SEQ ID NO: 16610 - protein, 9 aa, synthetic construct
  REGION 1..9: note = cAMP-specific 3',5'-cyclic phosphodiesterase 4B (450-458)
LLADLKTMV

SEQ ID NO: 16611 - protein, 9 aa, synthetic construct
  REGION 1..9: note = Multifunctional methyltransferase subunit TRM112-like protein (8-16)
LLSSHVRGV

SEQ ID NO: 16612 - protein, 7 aa, synthetic construct
  REGION 1..7: note = 60S ribosomal protein L19 (120-126)
MEHIHKL

SEQ ID NO: 16613 - protein, 9 aa, synthetic construct
  REGION 1..9: note = Melanoma antigen preferentially expressed in tumors (394-402)
QLLALLPSL

SEQ ID NO: 16614 - protein, 9 aa, synthetic construct
  REGION 1..9: note = Proteasome activator complex subunit 4 (564-572)
QLLSEITRV

SEQ ID NO: 16615 - protein, 9 aa, synthetic construct
  REGION 1..9: note = Eukaryotic translation initiation factor 3 subunit C (478-486)
QVCAIIERV

SEQ ID NO: 16616 - protein, 9 aa, synthetic construct
  REGION 1..9: note = Methylsterol monooxygenase 1 (33-41)
RIYKYIHKV

SEQ ID NO: 16617 - protein, 9 aa, synthetic construct
  REGION 1..9: note = Spectrin beta chain, erythrocytic (86-94)
RMLIKLLEV

SEQ ID NO: 16618 - protein, 11 aa, synthetic construct
  REGION 1..11: note = NHP2-like protein 1 (118-128)
SIQQSIERLLV

SEQ ID NO: 16619 - protein, 9 aa, synthetic construct
  REGION 1..9: note = Erlin-2 (41-49)
SLFSAVHKI

SEQ ID NO: 16620 - protein, 9 aa, synthetic construct
  REGION 1..9: note = Protein FAM214A (403-411)
SLHSKLFRV

SEQ ID NO: 16621 - protein, 9 aa, synthetic construct
  REGION 1..9: note = Vacuole membrane protein 1 (82-90)
SLWSIISKV

SEQ ID NO: 16622 - protein, 9 aa, synthetic construct
  REGION 1..9: note = Potassium voltage-gated channel subfamily KQT member 5 (530-538)
SMLGRVVKV

SEQ ID NO: 16623 - protein, 9 aa, synthetic construct
  REGION 1..9: note = Sialate O-acetylesterase (32-40)
TIMKKVTSV

SEQ ID NO: 16624 - protein, 11 aa, synthetic construct
  REGION 1..11: note = Protein ELFN1 (17-27)
TLLHAGGLARA

SEQ ID NO: 16625 - protein, 9 aa, synthetic construct
  REGION 1..9: note = Reticulocalbin-1 (21-29)
VLAPRVLRA

SEQ ID NO: 16626 - protein, 9 aa, synthetic construct
  REGION 1..9: note = Eukaryotic translation initiation factor 3 subunit A (379-387)
VLQYVVPEV

SEQ ID NO: 16627 - protein, 9 aa, synthetic construct
  REGION 1..9: note = Intraflagellar transport protein 81 homolog (117-125)
YLARFLIKL

SEQ ID NO: 16628 - protein, 9 aa, synthetic construct
  REGION 1..9: note = Small subunit processome component 20 homolog (154-162)
YLYKYLWRL

SEQ ID NO: 16629 - protein, 15 aa, synthetic construct
  REGION 1..15: note = Serum albumin (438-452)
KVPQVSTPTLVEVSR

SEQ ID NO: 16630 - protein, 9 aa, synthetic construct
  REGION 1..9: note = Beta-secretase 2 (5-13)
ARALLLPLL

SEQ ID NO: 16631 - protein, 9 aa, synthetic construct
  REGION 1..9: note = Proteasome subunit beta type-4 (79-87)
ARFRNISRI

SEQ ID NO: 16632 - protein, 10 aa, synthetic construct
  REGION 1..10: note = Protein sel-1 homolog 1 (629-638)
ARIKLGDYHF

SEQ ID NO: 16633 - protein, 10 aa, synthetic construct
  REGION 1..10: note = Lon protease homolog 2, peroxisomal (291-300)
ARILLDNDHY

SEQ ID NO: 16634 - protein, 11 aa, synthetic construct
  REGION 1..11: note = NAD(P)H dehydrogenase (quinone) 1 (128-138)
ARIQILEGWKK

SEQ ID NO: 16635 - protein, 9 aa, synthetic construct
  REGION 1..9: note = Zinc finger protein 721 (73-81)
ARVKVFSKF

SEQ ID NO: 16636 - protein, 9 aa, synthetic construct
  REGION 1..9: note = TATA-box-binding protein (218-226)
ARVVQKLGF

SEQ ID NO: 16637 - protein, 22 aa, synthetic construct
  REGION 1..22: note = Plectin (3368-3389)
ATTAALLLEAQAATGFLVDPVR

SEQ ID NO: 16638 - protein, 9 aa, synthetic construct
  REGION 1..9: note = Coatomer subunit alpha (338-346)
DRFLRQLDF

SEQ ID NO: 16639 - protein, 9 aa, synthetic construct
  REGION 1..9: note = Mannosyl-oligosaccharide glucosidase (370-378)
ERFEKTFQL

SEQ ID NO: 16640 - protein, 9 aa, synthetic construct
  REGION 1..9: note = General transcription factor II-I (386-394)
ERIRFVIKK

SEQ ID NO: 16641 - protein, 9 aa, synthetic construct
  REGION 1..9: note = NADH dehydrogenase (ubiquinone) 1 beta subcomplex subunit 4 (35-43)
ERLAIRAQL

SEQ ID NO: 16642 - protein, 9 aa, synthetic construct
  REGION 1..9: note = Cytoplasmic dynein 1 heavy chain 1 (2441-2449)
FQLEHIMDL

SEQ ID NO: 16643 - protein, 9 aa, synthetic construct
  REGION 1..9: note = AP-2 complex subunit sigma (52-60)
FRNFKIIYR

SEQ ID NO: 16644 - protein, 10 aa, synthetic construct
  REGION 1..10: note = Protein scribble homolog (1146-1155)
GRDGRLRVGL

SEQ ID NO: 16645 - protein, 10 aa, synthetic construct
  REGION 1..10: note = Disintegrin and metalloproteinase domain-containing protein 10 (14-23)
GRFEGFIQTR

SEQ ID NO: 16646 - protein, 11 aa, synthetic construct
  REGION 1..11: note = Mitogen-activated protein kinase kinase kinase 12 (175-185)
GRFHGEEVAVK

SEQ ID NO: 16647 - protein, 10 aa, synthetic construct
  REGION 1..10: note = Rho guanine nucleotide exchange factor 2 (459-468)
GRFKDVLVLL

SEQ ID NO: 16648 - protein, 9 aa, synthetic construct
  REGION 1..9: note Dolichyl-diphosphooligosaccharide-proteinosyltransferase subunit STT3A (230-238)
GRFSHRIYV

SEQ ID NO: 16649 - protein, 9 aa, synthetic construct
  REGION 1..9: note = Small nuclear ribonucleoprotein-associated proteins B and B' (17-25)
GRIFIGTFK

SEQ ID NO: 16650 - protein, 9 aa, synthetic construct
  REGION 1..9: note = Sorbitol dehydrogenase (55-63)
GRIGNFIVK

SEQ ID NO: 16651 - protein, 10 aa, synthetic construct
  REGION 1..10: note = Sorbitol dehydrogenase (55-64)
GRIGNFIVKK

SEQ ID NO: 16652 - protein, 9 aa, synthetic construct
  REGION 1..9: note = Dystonin (345-353)
GRIKLLQGY

SEQ ID NO: 16653 - protein, 9 aa, synthetic construct
  REGION 1..9: note = 26S protease regulatory subunit 6B (325-333)
GRLDRKIEF

SEQ ID NO: 16654 - protein, 9 aa, synthetic construct
  REGION 1..9: note = Serine/threonine-protein phosphatase 6 regulatory subunit 3 (311-319)
GRLGSFHEL

SEQ ID NO: 16655 - protein, 10 aa, synthetic construct
  REGION 1..10: note = H(+)/Cl(-) exchange transporter 3 (772-781)
GRLLGIITKK

SEQ ID NO: 16656 - protein, 9 aa, synthetic construct
  REGION 1..9: note = Thioredoxin reductase 1, cytoplasmic (45-53)
GRLQKLLKM

SEQ ID NO: 16657 - protein, 9 aa, synthetic construct
  REGION 1..9: note = Aurora kinase A-interacting protein (40-48)
GRLTSQLLR

SEQ ID NO: 16658 - protein, 10 aa, synthetic construct
  REGION 1..10: note = Lon protease homolog 2, peroxisomal (714-723)
GRLVRSDVAM

SEQ ID NO: 16659 - protein, 10 aa, synthetic construct
  REGION 1..10: note = Up-regulated during skeletal muscle growth protein 5 (26-35)
GRMNCVLATY

SEQ ID NO: 16660 - protein, 9 aa, synthetic construct
  REGION 1..9: note = Tetratricopeptide repeat protein 12 (373-381)
GRSLIINHL

SEQ ID NO: 16661 - protein, 10 aa, synthetic construct
  REGION 1..10: note = Plectin (2680-2689)
GRSSIAGLLL

SEQ ID NO: 16662 - protein, 9 aa, synthetic construct
  REGION 1..9: note = Nucleolar protein 11 (40-48)
GRTVILYKV

SEQ ID NO: 16663 - protein, 16 aa, synthetic construct
  REGION 1..16: note = HLA class I histocompatibility antigen, A-1 alpha chain (25-40)
GSHSMRYFFTSVSRPG

SEQ ID NO: 16664 - protein, 9 aa, synthetic construct
  REGION 1..9: note = Transcription factor E2F4 (157-165)
IRAPSGTSL

SEQ ID NO: 16665 - protein, 9 aa, synthetic construct
  REGION 1..9: note = CAP-Gly domain-containing linker protein 4 (454-462)
IRFFGTTNF

SEQ ID NO: 16666 - protein, 11 aa, synthetic construct
  REGION 1..11: note = Glutamine synthetase (323-333)
IRIPRTVGQEK

SEQ ID NO: 16667 - protein, 11 aa, synthetic construct
  REGION 1..11: note = NADH dehydrogenase (ubiquinone) iron-sulfur protein 5 (8-18)
KRFGLNIDRWL

SEQ ID NO: 16668 - protein, 10 aa, synthetic construct
  REGION 1..10: note = Cytoplasmic dynein 2 heavy chain 1 (804-813)
KRFIGIPNQF

SEQ ID NO: 16669 - protein, 9 aa, synthetic construct
  REGION 1..9: note = DNA-dependent protein kinase catalytic subunit (1074-1082)
KRLGASLAF

SEQ ID NO: 16670 - protein, 9 aa, synthetic construct
  REGION 1..9: note = Fatty acyl-CoA reductase 1 (327-335)
KRNPLEQAF

SEQ ID NO: 16671 - protein, 9 aa, synthetic construct
  REGION 1..9: note = ATP-dependent RNA helicase DDX18 (403-411)
KRTTTFFQF

SEQ ID NO: 16672 - protein, 10 aa, synthetic construct
  REGION 1..10: note = Talin-1 (357-366)
KRWAASPKSF

SEQ ID NO: 16673 - protein, 9 aa, synthetic construct
  REGION 1..9: note = ATP-dependent RNA helicase DHX8 (289-297)
KRWEGLVHI

SEQ ID NO: 16674 - protein, 9 aa, synthetic construct
  REGION 1..9: note = Eukaryotic translation initiation factor 4 gamma 1 (570-578)
KRYDREFLL

SEQ ID NO: 16675 - protein, 9 aa, synthetic construct
  REGION 1..9: note = E3 ubiquitin-protein ligase RNF213 (1227-1235)
LRDSHIFQL

SEQ ID NO: 16676 - protein, 9 aa, synthetic construct
  REGION 1..9: note = Eukaryotic initiation factor 4A-II (229-237)
MRDPIRILV

SEQ ID NO: 16677 - protein, 9 aa, synthetic construct
  REGION 1..9: note = Abhydrolase domain-containing protein 2 (327-335)
MRYLHRIYV

SEQ ID NO: 16678 - protein, 9 aa, synthetic construct
  REGION 1..9: note = Uncharacterized protein C15orf41 (140-148)
NRFGPGLVI

SEQ ID NO: 16679 - protein, 9 aa, synthetic construct
  REGION 1..9: note = Heat shock protein HSP 90-alpha (808-816)
NRIYRMIKL

SEQ ID NO: 16680 - protein, 9 aa, synthetic construct
  REGION 1..9: note = Guanine nucleotide-binding protein G(s) subunit alpha isoforms short (265-273)
NRWLRTISV

SEQ ID NO: 16681 - protein, 14 aa, synthetic construct
  REGION 1..14: note = Zinc finger protein 608 (42-55)
PASPGAGNPPGTPK

SEQ ID NO: 16682 - protein, 9 aa, synthetic construct
  REGION 1..9: note = Eukaryotic translation initiation factor 3 subunit L (152-160)
QRFESYYNY

SEQ ID NO: 16683 - protein, 9 aa, synthetic construct
  REGION 1..9: note = Eukaryotic translation initiation factor 3 subunit A (316-324)
QRMSTRVLL

SEQ ID NO: 16684 - protein, 9 aa, synthetic construct
  REGION 1..9: note = Transmembrane protein 141 (54-62)
RKFPYPLQW

SEQ ID NO: 16685 - protein, 11 aa, synthetic construct
  REGION 1..11: note = Nuclear envelope integral membrane protein 1 (157-167)
RRFDPKLFLVF

SEQ ID NO: 16686 - protein, 11 aa, synthetic construct
  REGION 1..11: note = Unconventional myosin-Id (770-780)
RRFEEALQTIF

SEQ ID NO: 16687 - protein, 13 aa, synthetic construct
  REGION 1..13: note = Pre-mRNA-processing-splicing factor 8 (820-832)
RRFSPIPFPPLSY

SEQ ID NO: 16688 - protein, 9 aa, synthetic construct
  REGION 1..9: note = Exportin-1 (596-604)
RRHFVQVQV

SEQ ID NO: 16689 - protein, 10 aa, synthetic construct
  REGION 1..10: note = Negative elongation factor C/D (83-92)
RRIAQEVQRF

SEQ ID NO: 16690 - protein, 10 aa, synthetic construct
  REGION 1..10: note = cAMP-dependent protein kinase type I-beta regulatory subunit (232-241)
RRILMGSTLR

SEQ ID NO: 16691 - protein, 10 aa, synthetic construct
  REGION 1..10: note = Cytoplasmic FMR1-interacting protein 2 (148-157)
RRKDFVSEAY

SEQ ID NO: 16692 - protein, 9 aa, synthetic construct
  REGION 1..9: note = Nuclear pore complex protein Nup98-Nup96 (778-786)
RRKEVVVYL

SEQ ID NO: 16693 - protein, 10 aa, synthetic construct
  REGION 1..10: note = NADH dehydrogenase (ubiquinone) 1 alpha subcomplex subunit 13 (49-58)
RRLQIEDFEA

SEQ ID NO: 16694 - protein, 10 aa, synthetic construct
  REGION 1..10: note = Signal peptide peptidase-like 2A (5-14)
RRLSPAGAAL

SEQ ID NO: 16695 - protein, 13 aa, synthetic construct
  REGION 1..13: note = Splicing factor, proline- and glutamine-rich (547-559)
RRMEELHNQEMQK

SEQ ID NO: 16696 - protein, 9 aa, synthetic construct
  REGION 1..9: note = Probable ATP-dependent RNA helicase DDX10 (353-361)
RRMEVYNEF

SEQ ID NO: 16697 - protein, 12 aa, synthetic construct
  REGION 1..12: note = 40S ribosomal protein S21 (60-71)
RRMGESDDSILR

SEQ ID NO: 16698 - protein, 9 aa, synthetic construct
  REGION 1..9: note = HLA class II histocompatibility antigen, DQ beta 1 chain (88-96)
RRVEPTVTI

SEQ ID NO: 16699 - protein, 12 aa, synthetic construct
  REGION 1..12: note = HLA class I histocompatibility antigen, B-15 alpha chain (193-204)
RRYLENGKETLQ

SEQ ID NO: 16700 - protein, 9 aa, synthetic construct
  REGION 1..9: note = Glucoside xylosyltransferase 1 (2-10)
RRYLRVVVL

SEQ ID NO: 16701 - protein, 11 aa, synthetic construct
  REGION 1..11: note = Eukaryotic initiation factor 4A-I (168-178)
RRYLSPKYIKM

SEQ ID NO: 16702 - protein, 15 aa, synthetic construct
  REGION 1..15: note = HLA class II histocompatibility antigen, DR alpha chain (48-62)
SFEAQGALANIAVDK

SEQ ID NO: 16703 - protein, 10 aa, synthetic construct
  REGION 1..10: note = EH domain-containing protein 4 (129-138)
SRFGNAFLNR

SEQ ID NO: 16704 - protein, 10 aa, synthetic construct
  REGION 1..10: note = Cohesin subunit SA-2 (369-378)
SRFKDRIVSM

SEQ ID NO: 16705 - protein, 9 aa, synthetic construct
  REGION 1..9: note = Nucleolar pre-ribosomal-associated protein 1 (628-636)
SRFNRYYSL

SEQ ID NO: 16706 - protein, 9 aa, synthetic construct
  REGION 1..9: note = 26S proteasome non-ATPase regulatory subunit 13 (153-161)
SRFYDLSSK

SEQ ID NO: 16707 - protein, 9 aa, synthetic construct
  REGION 1..9: note = Lysine-specific demethylase 3A (1085-1093)
SRLPNYFVR

SEQ ID NO: 16708 - protein, 9 aa, synthetic construct
  REGION 1..9: note = RRP12-like protein (519-527)
TRLGFFTTY

SEQ ID NO: 16709 - protein, 9 aa, synthetic construct
  REGION 1..9: note = Voltage-dependent anion-selective channel protein 2 (165-173)
TRNNFAVGY

SEQ ID NO: 16710 - protein, 11 aa, synthetic construct
  REGION 1..11: note Dolichyl-diphosphooligosaccharide-proteinosyltransferase 48 kDa subunit (358-368)
VRIDPFVRTFL

SEQ ID NO: 16711 - protein, 9 aa, synthetic construct
  REGION 1..9: note = Phosphatidylinositol 4-phosphate 5-kinase type-1 alpha (54-62)
YRFVKKLEH

SEQ ID NO: 16712 - protein, 9 aa, synthetic construct
  REGION 1..9: note = PERQ amino acid-rich with GYF domain-containing protein 2 (41-49)
YRYGREEML

SEQ ID NO: 16713 - protein, 9 aa, synthetic construct
  REGION 1..9: note = Alpha-actinin-1 (567-575)
AILGIHNEV

SEQ ID NO: 16714 - protein, 9 aa, synthetic construct
  REGION 1..9: note = CCR4-NOT transcription complex subunit 1 (2294-2302)
AIQEQITRV

SEQ ID NO: 16715 - protein, 10 aa, synthetic construct
  REGION 1..10: note = GEM-interacting protein (553-562)
ALDVQGIYRV

SEQ ID NO: 16716 - protein, 10 aa, synthetic construct
  REGION 1..10: note = Glycogen phosphorylase, brain form (417-426)
ALFPGDVDRL

SEQ ID NO: 16717 - protein, 13 aa, synthetic construct
  REGION 1..13: note = T-complex protein 1 subunit gamma (186-198)
EENGRKEIDIKKY

SEQ ID NO: 16718 - protein, 9 aa, synthetic construct
  REGION 1..9: note = Glycerol-3-phosphate dehydrogenase, mitochondrial (467-475)
ETARKFLYY

SEQ ID NO: 16719 - protein, 9 aa, synthetic construct
  REGION 1..9: note = Hexokinase-2 (850-858)
GLDALKVTV

SEQ ID NO: 16720 - protein, 9 aa, synthetic construct
  REGION 1..9: note = NF-kappa-B-repressing factor (193-201)
GSDKINYTY

SEQ ID NO: 16721 - protein, 9 aa, synthetic construct
  REGION 1..9: note = Galectin-3 (217-225)
HLLQYNHRV

SEQ ID NO: 16722 - protein, 9 aa, synthetic construct
  REGION 1..9: note = Serine-protein kinase ATM (2898-2906)
KILPTPETV

SEQ ID NO: 16723 - protein, 9 aa, synthetic construct
  REGION 1..9: note = F-box only protein 7 (226-234)
KINNEIRSV

SEQ ID NO: 16724 - protein, 9 aa, synthetic construct
  REGION 1..9: note = DNA topoisomerase 2-beta (151-159)
KLDETGVAL

SEQ ID NO: 16725 - protein, 10 aa, synthetic construct
  REGION 1..10: note = Coatomer subunit gamma-1 (75-84)
KLFQSNDPTL

SEQ ID NO: 16726 - protein, 10 aa, synthetic construct
  REGION 1..10: note = Protein S100-A6 (47-56)
KLQDAEIARL

SEQ ID NO: 16727 - protein, 9 aa, synthetic construct
  REGION 1..9: note = Nucleoprotein TPR (699-707)
KLQEQVTDL

SEQ ID NO: 16728 - protein, 9 aa, synthetic construct
  REGION 1..9: note = Unconventional myosin-Ic (409-417)
KLQQLFIEL

SEQ ID NO: 16729 - protein, 9 aa, synthetic construct
  REGION 1..9: note = 26S proteasome non-ATPase regulatory subunit 11 (159-167)
KMDDKALLV

SEQ ID NO: 16730 - protein, 9 aa, synthetic construct
  REGION 1..9: note = Serine/threonine-protein kinase/endoribonuclease IRE1 (690-698)
KPHNILISM

SEQ ID NO: 16731 - protein, 9 aa, synthetic construct
  REGION 1..9: note = Zinc finger protein 277 (158-166)
KSELGLNFY

SEQ ID NO: 16732 - protein, 9 aa, synthetic construct
  REGION 1..9: note = Profilin-1 (105-113)
KTDKTLVLL

SEQ ID NO: 16733 - protein, 9 aa, synthetic construct
  REGION 1..9: note = RHO/RAC effector protein (462-470)
KTERSDLEY

SEQ ID NO: 16734 - protein, 9 aa, synthetic construct
  REGION 1..9: note = Replication protein A 70 kDa DNA-binding subunit (489-497)
KVIDQQNGL

SEQ ID NO: 16735 - protein, 9 aa, synthetic construct
  REGION 1..9: note = Plectin (2572-2580)
LLAEENQRL

SEQ ID NO: 16736 - protein, 9 aa, synthetic construct
  REGION 1..9: note = Clathrin heavy chain 1 (333-341)
NIIPYITNV

SEQ ID NO: 16737 - protein, 9 aa, synthetic construct
  REGION 1..9: note = Cell division cycle protein 27 homolog (216-224)
NLESSNSKY

SEQ ID NO: 16738 - protein, 10 aa, synthetic construct
  REGION 1..10: note = Band 4.1-like protein 2 (252-261)
NLLEKDYFGL

SEQ ID NO: 16739 - protein, 9 aa, synthetic construct
  REGION 1..9: note = Keratin, type I cytoskeletal 18 (100-108)
RLAADDFRV

SEQ ID NO: 16740 - protein, 10 aa, synthetic construct
  REGION 1..10: note = Vacuolar protein sorting-associated protein 35 (226-235)
RLSQLEGVNV

SEQ ID NO: 16741 - protein, 9 aa, synthetic construct
  REGION 1..9: note = DNA topoisomerase 2-alpha (230-238)
SLDKDIVAL

SEQ ID NO: 16742 - protein, 9 aa, synthetic construct
  REGION 1..9: note = Ubiquitin carboxyl-terminal hydrolase 14 (241-249)
SLIDQFFGV

SEQ ID NO: 16743 - protein, 9 aa, synthetic construct
  REGION 1..9: note = Calcium-binding mitochondrial carrier protein Aralar1 (25-33)
STEVDGERY

SEQ ID NO: 16744 - protein, 9 aa, synthetic construct
  REGION 1..9: note = Thymosin beta-10 (26-34)
TETQEKNTL

SEQ ID NO: 16745 - protein, 9 aa, synthetic construct
  REGION 1..9: note = L-lactate dehydrogenase B chain (323-331)
TLWDIQKDL

SEQ ID NO: 16746 - protein, 9 aa, synthetic construct
  REGION 1..9: note = SAM and SH3 domain-containing protein 1 (299-307)
VLDERSALY

SEQ ID NO: 16747 - protein, 9 aa, synthetic construct
  REGION 1..9: note = Centromere protein F (684-692)
VLDSKSVEV

SEQ ID NO: 16748 - protein, 10 aa, synthetic construct
  REGION 1..10: note = N(G),N(G)-dimethylarginine dimethylaminohydrolase 1 (92-101)
VLFTGREFFV

SEQ ID NO: 16749 - protein, 20 aa, synthetic construct
  REGION 1..20: note = Cytochrome c oxidase subunit 7C, mitochondrial (44-63)
YFGSAFATPFLVVRHQLLKT

SEQ ID NO: 16750 - protein, 9 aa, synthetic construct
  REGION 1..9: note = GTP-binding protein Rit1 (134-142)
YIDDVFHAL

SEQ ID NO: 16751 - protein, 9 aa, synthetic construct
  REGION 1..9: note = WASH complex subunit 7 (733-741)
YLDKTFYNL

SEQ ID NO: 16752 - protein, 10 aa, synthetic construct
  REGION 1..10: note = Coatomer subunit alpha (707-716)
YLITGNLEKL

SEQ ID NO: 16753 - protein, 9 aa, synthetic construct
  REGION 1..9: note = cAMP-dependent protein kinase type I-alpha regulatory subunit (126-134)
AALAKAIEK

SEQ ID NO: 16754 - protein, 8 aa, synthetic construct
  REGION 1..8: note = Fatty acid synthase (1645-1652)
AASVPVVY

SEQ ID NO: 16755 - protein, 9 aa, synthetic construct
  REGION 1..9: note = Matrix Gla protein (90-98)
AAYNRYFRK

SEQ ID NO: 16756 - protein, 8 aa, synthetic construct
  REGION 1..8: note = 60S ribosomal protein L10 (29-36)
AKIRIFDL

SEQ ID NO: 16757 - protein, 9 aa, synthetic construct
  REGION 1..9: note = Sushi repeat-containing protein SRPX isoform 4 (328-336)
ALLDQFYEK

SEQ ID NO: 16758 - protein, 10 aa, synthetic construct
  REGION 1..10: note = Zinc finger MYM-type protein 4 (757-766)
ASAGPPSLRK

SEQ ID NO: 16759 - protein, 10 aa, synthetic construct
  REGION 1..10: note = Thymosin beta-10 (16-25)
ASFDKAKLKK

SEQ ID NO: 16760 - protein, 9 aa, synthetic construct
  REGION 1..9: note = Glycogen phosphorylase, muscle form (303-311)
ATLQDIIRR

SEQ ID NO: 16761 - protein, 9 aa, synthetic construct
  REGION 1..9: note = Cell surfaceoprotein MUC18 (577-585)
AVLYFLYKK

SEQ ID NO: 16762 - protein, 8 aa, synthetic construct
  REGION 1..8: note = Torsin-1A-interacting protein 1 (433-440)
AYSSFRSV

SEQ ID NO: 16763 - protein, 8 aa, synthetic construct
  REGION 1..8: note = Nucleolin (415-422)
DAAEIRLV

SEQ ID NO: 16764 - protein, 8 aa, synthetic construct
  REGION 1..8: note = Prohibitin (233-240)
DGLIELRK

SEQ ID NO: 16765 - protein, 7 aa, synthetic construct
  REGION 1..7: note = Lysine-specific demethylase 5B (46-52)
FAFIHKI

SEQ ID NO: 16766 - protein, 9 aa, synthetic construct
  REGION 1..9: note = Polypeptide N-acetylgalactosaminyltransferase 5 (282-290)
FPKVRILRL

SEQ ID NO: 16767 - protein, 10 aa, synthetic construct
  REGION 1..10: note = Dual specificity protein phosphatase 6 (130-139)
FYLEGGFSKF

SEQ ID NO: 16768 - protein, 9 aa, synthetic construct
  REGION 1..9: note = Multiple PDZ domain protein (777-785)
GTVRIGVAK

SEQ ID NO: 16769 - protein, 10 aa, synthetic construct
  REGION 1..10: note = Calcyphosin (120-129)
GVYSGRAHPK

SEQ ID NO: 16770 - protein, 10 aa, synthetic construct
  REGION 1..10: note = PEST proteolytic signal-containing nuclear protein (144-153)
HLGNVHDQDN

SEQ ID NO: 16771 - protein, 10 aa, synthetic construct
  REGION 1..10: note = DAZ-associated protein 1 (397-406)
HNVQGFHPYR

SEQ ID NO: 16772 - protein, 15 aa, synthetic construct
  REGION 1..15: note = Ribonucleoprotein PTB-binding 1 (737-751)
HSQGLGGHYADSYLK

SEQ ID NO: 16773 - protein, 9 aa, synthetic construct
  REGION 1..9: note = Melanocyte protein PMEL (189-197)
HTMEVTVYH

SEQ ID NO: 16774 - protein, 11 aa, synthetic construct
  REGION 1..11: note = Neurosecretory protein VGF (2-12)
KALRLSASALF

SEQ ID NO: 16775 - protein, 9 aa, synthetic construct
  REGION 1..9: note = Serine/threonine-protein kinase Nek7 (81-89)
KEIDLLKQL

SEQ ID NO: 16776 - protein, 9 aa, synthetic construct
  REGION 1..9: note = Calpain-3 (10-18)
KVLNTVVNK

SEQ ID NO: 16777 - protein, 9 aa, synthetic construct
  REGION 1..9: note = (Pyruvate dehydrogenase (acetyl-transferring))-phosphatase 1, mitochondrial (542-550)
LPEELARMY

SEQ ID NO: 16778 - protein, 7 aa, synthetic construct
  REGION 1..7: note = Vimentin (116-122)
NYIDKVR

SEQ ID NO: 16779 - protein, 8 aa, synthetic construct
  REGION 1..8: note = Vimentin (116-123)
NYIDKVRF

SEQ ID NO: 16780 - protein, 8 aa, synthetic construct
  REGION 1..8: note = Lysine-specific demethylase 5B (45-52)
PFAFIHKI

SEQ ID NO: 16781 - protein, 8 aa, synthetic construct
  REGION 1..8: note = Isoleucine-tRNA ligase, cytoplasmic (611-618)
PVSIIQKY

SEQ ID NO: 16782 - protein, 9 aa, synthetic construct
  REGION 1..9: note = Ankyrin-2 (1316-1324)
PYMAKFVVF

SEQ ID NO: 16783 - protein, 7 aa, synthetic construct
  REGION 1..7: note = Plectin (3425-3431)
PYSGSTI

SEQ ID NO: 16784 - protein, 9 aa, synthetic construct
  REGION 1..9: note = Crooked neck-like protein 1 (372-380)
RFEEKHAYF

SEQ ID NO: 16785 - protein, 9 aa, synthetic construct
  REGION 1..9: note = Vimentin (122-130)
RFLEQQNKI

SEQ ID NO: 16786 - protein, 9 aa, synthetic construct
  REGION 1..9: note = Membrane-associated transporter protein (209-217)
RLLGTEFQV

SEQ ID NO: 16787 - protein, 8 aa, synthetic construct
  REGION 1..8: note = V-type proton ATPase subunit B, kidney isoform (40-47)
RSGQVLEV

SEQ ID NO: 16788 - protein, 9 aa, synthetic construct
  REGION 1..9: note = Sialidase-4 (192-200)
RTSPHSFAF

SEQ ID NO: 16789 - protein, 9 aa, synthetic construct
  REGION 1..9: note = Tubulin beta-6 chain (244-252)
RYLTVATVF

SEQ ID NO: 16790 - protein, 9 aa, synthetic construct
  REGION 1..9: note = Transcription elongation factor SPT5 (361-369)
RYSRKGFLF

SEQ ID NO: 16791 - protein, 9 aa, synthetic construct
  REGION 1..9: note = Zinc finger MYM-type protein 4 (758-766)
SAGPPSLRK

SEQ ID NO: 16792 - protein, 9 aa, synthetic construct
  REGION 1..9: note = Melanoma-associated antigen 1 (230-238)
SAYGEPRKL

SEQ ID NO: 16793 - protein, 13 aa, synthetic construct
  REGION 1..13: note = Heterogeneous nuclear ribonucleoproteins A2/B1 (289-301)
SGGSGGYGGRSRY

SEQ ID NO: 16794 - protein, 13 aa, synthetic construct
  REGION 1..13: note = Elongation factor 1-alpha 1 (18-30)
SGKSTTTGHLIYK

SEQ ID NO: 16795 - protein, 9 aa, synthetic construct
  REGION 1..9: note = G protein pathway suppressor 2 (319-327)
SQNPRFYHK

SEQ ID NO: 16796 - protein, 9 aa, synthetic construct
  REGION 1..9: note = Nuclear pore complex protein Nup205 (214-222)
SSLYIILKK

SEQ ID NO: 16797 - protein, 9 aa, synthetic construct
  REGION 1..9: note = RNA binding motif protein, X-linked-like-1 (142-150)
SSRGPLPVK

SEQ ID NO: 16798 - protein, 10 aa, synthetic construct
  REGION 1..10: note = Mitochondrial fission factor (79-88)
STPFKPLALK

SEQ ID NO: 16799 - protein, 17 aa, synthetic construct
  REGION 1..17: note = Prelamin-A/C (479-495)
SVGGSGGGSFGDNLVTR

SEQ ID NO: 16800 - protein, 9 aa, synthetic construct
  REGION 1..9: note = Zinc finger MIZ domain-containing protein 1 (594-602)
SVLQGLLKK

SEQ ID NO: 16801 - protein, 9 aa, synthetic construct
  REGION 1..9: note = Anaphase-promoting complex subunit 5 (50-58)
SVVGLFLRH

SEQ ID NO: 16802 - protein, 11 aa, synthetic construct
  REGION 1..11: note = Prohibitin (230-240)
TAGDGLIELRK

SEQ ID NO: 16803 - protein, 15 aa, synthetic construct
  REGION 1..15: note = RNA polymerase II-associated factor 1 homolog (4-18)
TIQTQAQREDGHRPN

SEQ ID NO: 16804 - protein, 15 aa, synthetic construct
  REGION 1..15: note = Thymosin beta-10 (33-47)
TLPTKETIEQEKRSE

SEQ ID NO: 16805 - protein, 17 aa, synthetic construct
  REGION 1..17: note = Thymosin beta-10 (33-49)
TLPTKETIEQEKRSEIS

SEQ ID NO: 16806 - protein, 14 aa, synthetic construct
  REGION 1..14: note = Golgi-specific brefeldin A-resistance guanine nucleotide exchange factor 1 (535-548)
TPRPTDPIPTSEVN

SEQ ID NO: 16807 - protein, 11 aa, synthetic construct
  REGION 1..11: note = KH domain-containing, RNA-binding, signal transduction-associated protein 1 (33-43)
TPSRQPPLPHR

SEQ ID NO: 16808 - protein, 15 aa, synthetic construct
  REGION 1..15: note = Probable ATP-dependent RNA helicase DDX5 (556-570)
TSFRTGNPTGTYQNG

SEQ ID NO: 16809 - protein, 8 aa, synthetic construct
  REGION 1..8: note = Elongation factor 1-alpha 1 (23-30)
TTGHLIYK

SEQ ID NO: 16810 - protein, 15 aa, synthetic construct
  REGION 1..15: note = Vimentin (446-460)
TVETRDGQVINETSQ

SEQ ID NO: 16811 - protein, 14 aa, synthetic construct
  REGION 1..14: note = Serum albumin (439-452)
VPQVSTPTLVEVSR

SEQ ID NO: 16812 - protein, 9 aa, synthetic construct
  REGION 1..9: note = Melanoma-associated antigen F1 (199-207)
VQPSKYHFL

SEQ ID NO: 16813 - protein, 8 aa, synthetic construct
  REGION 1..8: note = Vimentin (117-124)
YIDKVRFL

SEQ ID NO: 16814 - protein, 9 aa, synthetic construct
  REGION 1..9: note = Fatty acid synthase (2288-2296)
YYIDCIRQV

SEQ ID NO: 16815 - protein, 9 aa, synthetic construct
  REGION 1..9: note = Zinc finger protein 552 (2-10)
AAAALRFPV

SEQ ID NO: 16816 - protein, 10 aa, synthetic construct
  REGION 1..10: note = Colipase-like protein 2 (3-12)
AALALVAGVL

SEQ ID NO: 16817 - protein, 9 aa, synthetic construct
  REGION 1..9: note = ATP-binding cassette sub-family G member 1 (538-546)
AALGTMTSL

SEQ ID NO: 16818 - protein, 9 aa, synthetic construct
  REGION 1..9: note = Integrin beta-7 (351-359)
AALPVYQEL

SEQ ID NO: 16819 - protein, 9 aa, synthetic construct
  REGION 1..9: note = Translocon-associated protein subunit delta (2-10)
AAMASLGAL

SEQ ID NO: 16820 - protein, 9 aa, synthetic construct
  REGION 1..9: note = Fumarate hydratase, mitochondrial (264-272)
AAMPRIYEL

SEQ ID NO: 16821 - protein, 8 aa, synthetic construct
  REGION 1..8: note = Interferon-induced GTP-binding protein Mx1 (15-22)
AASHPLLL

SEQ ID NO: 16822 - protein, 9 aa, synthetic construct
  REGION 1..9: note = Basement membrane-specific heparan sulfate proteoglycan core protein (1503-1511)
AASISAVSL

SEQ ID NO: 16823 - protein, 9 aa, synthetic construct
  REGION 1..9: note = Zinc finger and BTB domain-containing protein 7B (478-486)
AASPAGLDL

SEQ ID NO: 16824 - protein, 9 aa, synthetic construct
  REGION 1..9: note = Poly(rC)-binding protein 2 (92-100)
AASRPPVTL

SEQ ID NO: 16825 - protein, 11 aa, synthetic construct
  REGION 1..11: note = Protein phosphatase inhibitor 2 (2-12)
AASTASHRPIK

SEQ ID NO: 16826 - protein, 9 aa, synthetic construct
  REGION 1..9: note = Transcription factor jun-B (200-208)
AAVGTGSSY

SEQ ID NO: 16827 - protein, 9 aa, synthetic construct
  REGION 1..9: note = Carnitine O-palmitoyltransferase 1, liver isoform (476-484)
ADAPIVAHL

SEQ ID NO: 16828 - protein, 10 aa, synthetic construct
  REGION 1..10: note = Protein CDV3 homolog (2-11)
AETEERSLDN

SEQ ID NO: 16829 - protein, 9 aa, synthetic construct
  REGION 1..9: note = Cirhin (640-648)
AFKISKIYK

SEQ ID NO: 16830 - protein, 9 aa, synthetic construct
  REGION 1..9: note = Tyrosine-protein kinase HCK (301-309)
AFLAEANVM

SEQ ID NO: 16831 - protein, 9 aa, synthetic construct
  REGION 1..9: note = 2-oxoglutarate dehydrogenase, mitochondrial (85-93)
AGAPPGTAY

SEQ ID NO: 16832 - protein, 8 aa, synthetic construct
  REGION 1..8: note = Fc receptor-like A (58-65)
AGFQVKAY

SEQ ID NO: 16833 - protein, 9 aa, synthetic construct
  REGION 1..9: note = Piezo-type mechanosensitive ion channel component 1 (211-219)
AGIAHPSAL

SEQ ID NO: 16834 - protein, 10 aa, synthetic construct
  REGION 1..10: note = Uncharacterized protein ENSP00000382042 (147-156)
AGTGGSPALL

SEQ ID NO: 16835 - protein, 9 aa, synthetic construct
  REGION 1..9: note = Glycogen debranching enzyme (1193-1201)
AGTLDQPLF

SEQ ID NO: 16836 - protein, 10 aa, synthetic construct
  REGION 1..10: note = Abelson tyrosine-protein kinase 2 (1157-1166)
AGVPGTNPVL

SEQ ID NO: 16837 - protein, 9 aa, synthetic construct
  REGION 1..9: note = Heterogeneous nuclear ribonucleoprotein F (403-411)
AGYSGQNSM

SEQ ID NO: 16838 - protein, 9 aa, synthetic construct
  REGION 1..9: note = Spectrin alpha chain, non-erythrocytic 1 (2132-2140)
AHDAFRSSL

SEQ ID NO: 16839 - protein, 9 aa, synthetic construct
  REGION 1..9: note = ER degradation-enhancing alpha-mannosidase-like protein 1 (264-272)
AHDLAVRLL

SEQ ID NO: 16840 - protein, 9 aa, synthetic construct
  REGION 1..9: note = DmX-like protein 2 (2940-2948)
AHDSAIKAL

SEQ ID NO: 16841 - protein, 9 aa, synthetic construct
  REGION 1..9: note = Testicular acid phosphatase (287-295)
AHDSTLLAL

SEQ ID NO: 16842 - protein, 9 aa, synthetic construct
  REGION 1..9: note = Lysosomal acid phosphatase (285-293)
AHDTTLVAL

SEQ ID NO: 16843 - protein, 11 aa, synthetic construct
  REGION 1..11: note = U4/U6 small nuclear ribonucleoprotein Prp3 (510-520)
AHEEANAARKL

SEQ ID NO: 16844 - protein, 9 aa, synthetic construct
  REGION 1..9: note = Protein FAM195A (93-101)
AHEENVRFV

SEQ ID NO: 16845 - protein, 9 aa, synthetic construct
  REGION 1..9: note = Synemin (147-155)
AHERDVREL

SEQ ID NO: 16846 - protein, 9 aa, synthetic construct
  REGION 1..9: note = NADH dehydrogenase (ubiquinone) 1 alpha subcomplex subunit 1 (39-47)
AHFGYHWSL

SEQ ID NO: 16847 - protein, 9 aa, synthetic construct
  REGION 1..9: note = GDP-mannose 4,6 dehydratase (74-82)
AHIEGNMKL

SEQ ID NO: 16848 - protein, 9 aa, synthetic construct
  REGION 1..9: note = Striatin-3 (531-539)
AHIGPVLSL

SEQ ID NO: 16849 - protein, 9 aa, synthetic construct
  REGION 1..9: note = Nuclear factor erythroid 2-related factor 2 (106-114)
AHIPKSDAL

SEQ ID NO: 16850 - protein, 9 aa, synthetic construct
  REGION 1..9: note = Nucleolar RNA helicase 2 (616-624)
AHISGATSV

SEQ ID NO: 16851 - protein, 9 aa, synthetic construct
  REGION 1..9: note = Coatomer subunit beta' (555-563)
AHLDRTMYL

SEQ ID NO: 16852 - protein, 9 aa, synthetic construct
  REGION 1..9: note = Nuclear inhibitor of protein phosphatase 1 (172-180)
AHNKRISTL

SEQ ID NO: 16853 - protein, 8 aa, synthetic construct
  REGION 1..8: note = Suppressor of SWI4 1 homolog (136-143)
AHPPLLVL

SEQ ID NO: 16854 - protein, 9 aa, synthetic construct
  REGION 1..9: note = Exosome complex component CSL4 (156-164)
AHSESGIQM

SEQ ID NO: 16855 - protein, 10 aa, synthetic construct
  REGION 1..10: note = DNA mismatch repair protein Msh6 (457-466)
AHSGFPEIAF

SEQ ID NO: 16856 - protein, 9 aa, synthetic construct
  REGION 1..9: note = 60S ribosomal protein L18a (121-129)
AHSIQIMKV

SEQ ID NO: 16857 - protein, 9 aa, synthetic construct
  REGION 1..9: note = Sodium-coupled neutral amino acid transporter 5 (74-82)
AHTGVIFFL

SEQ ID NO: 16858 - protein, 9 aa, synthetic construct
  REGION 1..9: note = AP-2 complex subunit mu (194-202)
AHVSGRVVM

SEQ ID NO: 16859 - protein, 9 aa, synthetic construct
  REGION 1..9: note = Trafficking protein particle complex subunit 5 (162-170)
AHWHKGTTL

SEQ ID NO: 16860 - protein, 9 aa, synthetic construct
  REGION 1..9: note = LIM and SH3 domain protein 1 (55-63)
AHYPKQSFT

SEQ ID NO: 16861 - protein, 9 aa, synthetic construct
  REGION 1..9: note = Endoplasmic reticulum-Golgi intermediate compartment protein 3 (313-321)
AIIGGMFTV

SEQ ID NO: 16862 - protein, 9 aa, synthetic construct
  REGION 1..9: note = Parafibromin (184-192)
AIKAKIMAK

SEQ ID NO: 16863 - protein, 9 aa, synthetic construct
  REGION 1..9: note = Exportin-4 (825-833)
AILFNFLMD

SEQ ID NO: 16864 - protein, 9 aa, synthetic construct
  REGION 1..9: note = Protein arginine N-methyltransferase 5 (168-176)
AILPTSIFL

SEQ ID NO: 16865 - protein, 10 aa, synthetic construct
  REGION 1..10: note = Bifunctional glutamate/proline-tRNA ligase (215-224)
AKAALLNQHY

SEQ ID NO: 16866 - protein, 10 aa, synthetic construct
  REGION 1..10: note = Exportin-5 (744-753)
AKAGGFVVGY

SEQ ID NO: 16867 - protein, 9 aa, synthetic construct
  REGION 1..9: note = DNA replication licensing factor MCM7 (470-478)
AKAGILTTL

SEQ ID NO: 16868 - protein, 9 aa, synthetic construct
  REGION 1..9: note = DNA replication licensing factor MCM5 (470-478)
AKAGITTTL

SEQ ID NO: 16869 - protein, 9 aa, synthetic construct
  REGION 1..9: note = Peptidase M20 domain-containing protein 2 (398-406)
AKALAMTAL

SEQ ID NO: 16870 - protein, 10 aa, synthetic construct
  REGION 1..10: note = Proteasome subunit beta type-2 (125-134)
AKAPFAAHGY

SEQ ID NO: 16871 - protein, 9 aa, synthetic construct
  REGION 1..9: note = Drebrin (614-622)
AKAPPPVFY

SEQ ID NO: 16872 - protein, 9 aa, synthetic construct
  REGION 1..9: note = CCAAT/enhancer-binding protein beta (241-249)
AKAPPTACY

SEQ ID NO: 16873 - protein, 9 aa, synthetic construct
  REGION 1..9: note = Ragulator complex protein LAMTOR2 (106-114)
AKAQALVQY

SEQ ID NO: 16874 - protein, 9 aa, synthetic construct
  REGION 1..9: note = Protein PRRC2C (2502-2510)
AKAQSGLAF

SEQ ID NO: 16875 - protein, 9 aa, synthetic construct
  REGION 1..9: note = ATP-dependent RNA helicase A (181-189)
AKARLNQYF

SEQ ID NO: 16876 - protein, 11 aa, synthetic construct
  REGION 1..11: note = Heterogeneous nuclear ribonucleoprotein L (247-257)
AKASLNGADIY

SEQ ID NO: 16877 - protein, 9 aa, synthetic construct
  REGION 1..9: note = NAD(P)H-hydrate epimerase (96-104)
AKAYPPTSM

SEQ ID NO: 16878 - protein, 9 aa, synthetic construct
  REGION 1..9: note = 1-phosphatidylinositol 4,5-bisphosphate phosphodiesterase beta-1 (127-135)
AKEWTNEVF

SEQ ID NO: 16879 - protein, 10 aa, synthetic construct
  REGION 1..10: note = Cell division cycle-associated 7-like protein (291-300)
AKFAEEFYSF

SEQ ID NO: 16880 - protein, 9 aa, synthetic construct
  REGION 1..9: note = Cathepsin D (193-201)
AKFDGILGM

SEQ ID NO: 16881 - protein, 10 aa, synthetic construct
  REGION 1..10: note = Crooked neck-like protein 1 (420-429)
AKFEENQKEF

SEQ ID NO: 16882 - protein, 9 aa, synthetic construct
  REGION 1..9: note = Staphylococcal nuclease domain-containing protein 1 (248-256)
AKFFTESRL

SEQ ID NO: 16883 - protein, 9 aa, synthetic construct
  REGION 1..9: note = Pre-mRNA-processing factor 19 (487-495)
AKFIASTGM

SEQ ID NO: 16884 - protein, 9 aa, synthetic construct
  REGION 1..9: note = Squalene monooxygenase (243-251)
AKFIEGVVL

SEQ ID NO: 16885 - protein, 9 aa, synthetic construct
  REGION 1..9: note = DCN1-like protein 2 (152-160)
AKFKDFYQF

SEQ ID NO: 16886 - protein, 10 aa, synthetic construct
  REGION 1..10: note = DnaJ homolog subfamily B member 9 (65-74)
AKFREIAEAY

SEQ ID NO: 16887 - protein, 9 aa, synthetic construct
  REGION 1..9: note = Nitrogen permease regulator 3-like protein (366-374)
AKFSLPVSL

SEQ ID NO: 16888 - protein, 11 aa, synthetic construct
  REGION 1..11: note = DNA-directed RNA polymerases I and III subunit RPAC1 (223-233)
AKFSPVATASY

SEQ ID NO: 16889 - protein, 9 aa, synthetic construct
  REGION 1..9: note = Ubiquitin-like modifier-activating enzyme 1 (321-329)
AKFSRPAQL

SEQ ID NO: 16890 - protein, 9 aa, synthetic construct
  REGION 1..9: note = Staphylococcal nuclease domain-containing protein 1 (738-746)
AKFVDGEWY

SEQ ID NO: 16891 - protein, 9 aa, synthetic construct
  REGION 1..9: note = 60S ribosomal protein L31 (74-82)
AKGIRNVPY

SEQ ID NO: 16892 - protein, 9 aa, synthetic construct
  REGION 1..9: note = Cullin-1 (220-228)
AKGPTLTVY

SEQ ID NO: 16893 - protein, 9 aa, synthetic construct
  REGION 1..9: note = NACHT, LRR and PYD domains-containing protein 7 (625-633)
AKGVFLENY

SEQ ID NO: 16894 - protein, 9 aa, synthetic construct
  REGION 1..9: note = Cystatin-B (90-98)
AKHDELTYF

SEQ ID NO: 16895 - protein, 12 aa, synthetic construct
  REGION 1..12: note = T-complex protein 1 subunit theta (19-30)
AKHFSGLEEAVY

SEQ ID NO: 16896 - protein, 9 aa, synthetic construct
  REGION 1..9: note = Unconventional myosin-Va (1821-1829)
AKHIFPVTF

SEQ ID NO: 16897 - protein, 9 aa, synthetic construct
  REGION 1..9: note = Fatty aldehyde dehydrogenase (198-206)
AKHLTPVTL

SEQ ID NO: 16898 - protein, 9 aa, synthetic construct
  REGION 1..9: note = AP-2 complex subunit sigma (44-52)
AKHTNFVEF

SEQ ID NO: 16899 - protein, 9 aa, synthetic construct
  REGION 1..9: note = F-box DNA helicase 1 (835-843)
AKIAVVEKY

SEQ ID NO: 16900 - protein, 11 aa, synthetic construct
  REGION 1..11: note = Carnitine O-palmitoyltransferase 1, liver isoform (75-85)
AKIDPSLGIIA

SEQ ID NO: 16901 - protein, 9 aa, synthetic construct
  REGION 1..9: note = D(2) dopamine receptor (338-346)
AKIFEIQTM

SEQ ID NO: 16902 - protein, 9 aa, synthetic construct
  REGION 1..9: note = Poly(rC)-binding protein 2 (308-316)
AKINEIRQM

SEQ ID NO: 16903 - protein, 9 aa, synthetic construct
  REGION 1..9: note = Reticulon-2 (522-530)
AKIPGTGAL

SEQ ID NO: 16904 - protein, 11 aa, synthetic construct
  REGION 1..11: note = Protein SET (89-99)
AKIPNFWVTTF

SEQ ID NO: 16905 - protein, 11 aa, synthetic construct
  REGION 1..11: note = COBW domain-containing protein 6 (40-50)
AKIPVTIITGY

SEQ ID NO: 16906 - protein, 11 aa, synthetic construct
  REGION 1..11: note Dolichyl-diphosphooligosaccharide-proteinosyltransferase subunit 1 (125-135)
AKISVIVETVY

SEQ ID NO: 16907 - protein, 9 aa, synthetic construct
  REGION 1..9: note = Nuclear fragile X mental retardation-interacting protein 2 (350-358)
AKIVPKISY

SEQ ID NO: 16908 - protein, 9 aa, synthetic construct
  REGION 1..9: note = Poly (ADP-ribose) polymerase 3 (121-129)
AKKDFEKKF

SEQ ID NO: 16909 - protein, 9 aa, synthetic construct
  REGION 1..9: note = DnaJ homolog subfamily C member 7 (40-48)
AKKDYNEAY

SEQ ID NO: 16910 - protein, 9 aa, synthetic construct
  REGION 1..9: note = Double-stranded RNA-binding protein Staufen homolog 1 (297-305)
AKKEKEPEY

SEQ ID NO: 16911 - protein, 9 aa, synthetic construct
  REGION 1..9: note = Translocation protein SEC62 (64-72)
AKKGEEALF

SEQ ID NO: 16912 - protein, 9 aa, synthetic construct
  REGION 1..9: note = SWI/SNF complex subunit SMARCC2 (316-324)
AKKGPSTPY

SEQ ID NO: 16913 - protein, 9 aa, synthetic construct
  REGION 1..9: note = Myosin light chain 1/3, skeletal muscle isoform (105-113)
AKKIEFEQF

SEQ ID NO: 16914 - protein, 9 aa, synthetic construct
  REGION 1..9: note = Probable ATP-dependent RNA helicase DDX6 (351-359)
AKKISQLGY

SEQ ID NO: 16915 - protein, 9 aa, synthetic construct
  REGION 1..9: note = Poly (ADP-ribose) polymerase 8 (686-694)
AKKLFGSTF

SEQ ID NO: 16916 - protein, 9 aa, synthetic construct
  REGION 1..9: note = Serine/threonine-protein phosphatase 2A 56 kDa regulatory subunit delta isoform (231-239)
AKKYIDQKF

SEQ ID NO: 16917 - protein, 9 aa, synthetic construct
  REGION 1..9: note = Nucleolar RNA helicase 2 (386-394)
AKKYMKSTY

SEQ ID NO: 16918 - protein, 11 aa, synthetic construct
  REGION 1..11: note = Interferon-induced, double-stranded RNA-activated protein kinase (313-323)
AKLDHVNIVHY

SEQ ID NO: 16919 - protein, 9 aa, synthetic construct
  REGION 1..9: note = Golgin subfamily A member 4 (798-806)
AKLDVFQSY

SEQ ID NO: 16920 - protein, 9 aa, synthetic construct
  REGION 1..9: note = Zinc finger Ran-binding domain-containing protein 2 (94-102)
AKLEERTGY

SEQ ID NO: 16921 - protein, 9 aa, synthetic construct
  REGION 1..9: note = Pre-mRNA-splicing factor ATP-dependent RNA helicase PRP16 (1082-1090)
AKLKGIGEY

SEQ ID NO: 16922 - protein, 9 aa, synthetic construct
  REGION 1..9: note = DNA replication licensing factor MCM5 (557-565)
AKLKKFIAY

SEQ ID NO: 16923 - protein, 10 aa, synthetic construct
  REGION 1..10: note = Transmembrane and coiled-coil domain-containing protein 1 (115-124)
AKLPFTPLSY

SEQ ID NO: 16924 - protein, 9 aa, synthetic construct
  REGION 1..9: note = ATP-dependent RNA helicase A (856-864)
AKLPIEPRF

SEQ ID NO: 16925 - protein, 9 aa, synthetic construct
  REGION 1..9: note = Peptidyl-prolyl cis-trans isomerase FKBP1A (73-81)
AKLTISPDY

SEQ ID NO: 16926 - protein, 11 aa, synthetic construct
  REGION 1..11: note = Heterogeneous nuclear ribonucleoprotein U (422-432)
AKNGQDLGVAF

SEQ ID NO: 16927 - protein, 9 aa, synthetic construct
  REGION 1..9: note = Pre-mRNA-processing-splicing factor 8 (1011-1019)
AKNNVVINY

SEQ ID NO: 16928 - protein, 9 aa, synthetic construct
  REGION 1..9: note = Immunoglobulin superfamily member 10 (2607-2615)
AKNPLGSDY

SEQ ID NO: 16929 - protein, 11 aa, synthetic construct
  REGION 1..11: note = ADP-ribosylation factor GTPase-activating protein 3 (30-40)
AKNPSWASITY

SEQ ID NO: 16930 - protein, 10 aa, synthetic construct
  REGION 1..10: note = Transmembrane protein 214 (356-365)
AKPDSTLHTY

SEQ ID NO: 16931 - protein, 10 aa, synthetic construct
  REGION 1..10: note = Nucleolar GTP-binding protein 2 (401-410)
AKPEYISKTY

SEQ ID NO: 16932 - protein, 9 aa, synthetic construct
  REGION 1..9: note = Vacuolar protein sorting-associated protein 41 homolog (804-812)
AKPFSVVVF

SEQ ID NO: 16933 - protein, 9 aa, synthetic construct
  REGION 1..9: note = 116 kDa U5 small nuclear ribonucleoprotein component (445-453)
AKPKIEHTY

SEQ ID NO: 16934 - protein, 9 aa, synthetic construct
  REGION 1..9: note = Olfactomedin-like protein 2B (2-10)
AKPRLLVLY

SEQ ID NO: 16935 - protein, 10 aa, synthetic construct
  REGION 1..10: note = RNA-binding protein 38 (113-122)
AKPRSLQTGF

SEQ ID NO: 16936 - protein, 9 aa, synthetic construct
  REGION 1..9: note = 116 kDa U5 small nuclear ribonucleoprotein component (962-970)
AKQDVVLNY

SEQ ID NO: 16937 - protein, 9 aa, synthetic construct
  REGION 1..9: note = Nuclear pore complex protein Nup153 (293-301)
AKQLSAQSY

SEQ ID NO: 16938 - protein, 9 aa, synthetic construct
  REGION 1..9: note = Proteasome activator complex subunit 1 (189-197)
AKQPHVGDY

SEQ ID NO: 16939 - protein, 9 aa, synthetic construct
  REGION 1..9: note = Mitochondrial import receptor subunit TOM7 homolog (8-16)
AKQRLQQLF

SEQ ID NO: 16940 - protein, 9 aa, synthetic construct
  REGION 1..9: note = Protein disulfide-isomerase A4 (244-252)
AKRFDVSGY

SEQ ID NO: 16941 - protein, 9 aa, synthetic construct
  REGION 1..9: note = Serine/threonine-protein phosphatase PP1-beta catalytic subunit (258-266)
AKRQLVTLF

SEQ ID NO: 16942 - protein, 8 aa, synthetic construct
  REGION 1..8: note = Putative uncharacterized protein C10orf113 (2-9)
AKSERRIY

SEQ ID NO: 16943 - protein, 9 aa, synthetic construct
  REGION 1..9: note = Serine/threonine-protein kinase/endoribonuclease IRE1 (276-284)
AKSKLTPTL

SEQ ID NO: 16944 - protein, 10 aa, synthetic construct
  REGION 1..10: note = Gamma-taxilin (369-378)
AKSNELFTTF

SEQ ID NO: 16945 - protein, 9 aa, synthetic construct
  REGION 1..9: note = Cullin-1 (38-46)
AKSRYMELY

SEQ ID NO: 16946 - protein, 9 aa, synthetic construct
  REGION 1..9: note = Protein disulfide-isomerase TMX3 (363-371)
AKSTIVSIF

SEQ ID NO: 16947 - protein, 9 aa, synthetic construct
  REGION 1..9: note = Coiled-coil domain-containing protein 115 (51-59)
AKSVGPLQY

SEQ ID NO: 16948 - protein, 9 aa, synthetic construct
  REGION 1..9: note = Cyclin-dependent kinase 14 (280-288)
AKSVPSHTY

SEQ ID NO: 16949 - protein, 9 aa, synthetic construct
  REGION 1..9: note = Nuclear nucleic acid-binding protein C1D (53-61)
AKVDLVSAY

SEQ ID NO: 16950 - protein, 10 aa, synthetic construct
  REGION 1..10: note = Plastin-2 (19-28)
AKVDTDGNGY

SEQ ID NO: 16951 - protein, 9 aa, synthetic construct
  REGION 1..9: note = Transmembrane protein 14D (103-111)
AKVGVRMLM

SEQ ID NO: 16952 - protein, 9 aa, synthetic construct
  REGION 1..9: note = 60S ribosomal protein L27 (114-122)
AKVKFEERY

SEQ ID NO: 16953 - protein, 8 aa, synthetic construct
  REGION 1..8: note = Neuroblast differentiation-associated protein AHNAK (5180-5187)
AKVKTPSF

SEQ ID NO: 16954 - protein, 9 aa, synthetic construct
  REGION 1..9: note = Nck-associated protein 1-like (512-520)
AKVMNLIVF

SEQ ID NO: 16955 - protein, 9 aa, synthetic construct
  REGION 1..9: note Dolichyl-diphosphooligosaccharide-proteinosyltransferase subunit STT3A (520-528)
AKVMSWWDY

SEQ ID NO: 16956 - protein, 9 aa, synthetic construct
  REGION 1..9: note = Eukaryotic translation initiation factor 3 subunit L (142-150)
AKVSGGPSL

SEQ ID NO: 16957 - protein, 9 aa, synthetic construct
  REGION 1..9: note = Condensin-2 complex subunit D3 (362-370)
AKVVDKSEY

SEQ ID NO: 16958 - protein, 9 aa, synthetic construct
  REGION 1..9: note = Cytoskeleton-associated protein 5 (1205-1213)
AKWLQDEMF

SEQ ID NO: 16959 - protein, 11 aa, synthetic construct
  REGION 1..11: note = DNA-directed RNA polymerase II subunit RPB3 (174-184)
AKWNPTAGVAF

SEQ ID NO: 16960 - protein, 9 aa, synthetic construct
  REGION 1..9: note = Enhancer of mRNA-decapping protein 4 (124-132)
AKYDWEQKY

SEQ ID NO: 16961 - protein, 9 aa, synthetic construct
  REGION 1..9: note = Myotubularin-related protein 6 (102-110)
AKYEDLYAF

SEQ ID NO: 16962 - protein, 9 aa, synthetic construct
  REGION 1..9: note = CXXC-type zinc finger protein 1 (507-515)
AKYESQTSF

SEQ ID NO: 16963 - protein, 9 aa, synthetic construct
  REGION 1..9: note = Guanine nucleotide-binding protein G(s) subunit alpha isoforms XLas (980-988)
AKYFIRDEF

SEQ ID NO: 16964 - protein, 9 aa, synthetic construct
  REGION 1..9: note = Integrator complex subunit 10 (304-312)
AKYKNQVVY

SEQ ID NO: 16965 - protein, 11 aa, synthetic construct
  REGION 1..11: note = 40S ribosomal protein S5 (46-56)
AKYLPHSAGRY

SEQ ID NO: 16966 - protein, 11 aa, synthetic construct
  REGION 1..11: note = Nucleolar protein 56 (319-329)
AKYPASTVQIL

SEQ ID NO: 16967 - protein, 9 aa, synthetic construct
  REGION 1..9: note = Proteasome activator complex subunit 3 (194-202)
AKYPHVEDY

SEQ ID NO: 16968 - protein, 9 aa, synthetic construct
  REGION 1..9: note = V-type proton ATPase subunit C 1 (110-118)
AKYPIKQSL

SEQ ID NO: 16969 - protein, 9 aa, synthetic construct
  REGION 1..9: note = Probable ATP-dependent RNA helicase DDX10 (280-288)
AKYSTPATL

SEQ ID NO: 16970 - protein, 9 aa, synthetic construct
  REGION 1..9: note = 26S proteasome non-ATPase regulatory subunit 12 (367-375)
AKYYTRITM

SEQ ID NO: 16971 - protein, 10 aa, synthetic construct
  REGION 1..10: note = Serine/arginine repetitive matrix protein 2 (2360-2369)
ALAPASLTSA

SEQ ID NO: 16972 - protein, 9 aa, synthetic construct
  REGION 1..9: note = Protein FAM217A (258-266)
ALDLHNLAL

SEQ ID NO: 16973 - protein, 9 aa, synthetic construct
  REGION 1..9: note = HAUS augmin-like complex subunit 8 (77-85)
ALDTTRHEL

SEQ ID NO: 16974 - protein, 10 aa, synthetic construct
  REGION 1..10: note = Mesoderm development candidate 1 (248-257)
ALFSGPLVQA

SEQ ID NO: 16975 - protein, 9 aa, synthetic construct
  REGION 1..9: note = Zinc finger protein 827 (563-571)
ALFSQDISV

SEQ ID NO: 16976 - protein, 9 aa, synthetic construct
  REGION 1..9: note = DNA-directed RNA polymerase I subunit RPA49 (297-305)
ALGPGVPHI

SEQ ID NO: 16977 - protein, 10 aa, synthetic construct
  REGION 1..10: note = Fatty acid desaturase 2 (422-431)
ALLDIIRSLK

SEQ ID NO: 16978 - protein, 9 aa, synthetic construct
  REGION 1..9: note = Symplekin (780-788)
ALLPQNHKL

SEQ ID NO: 16979 - protein, 9 aa, synthetic construct
  REGION 1..9: note = Transmembrane protein 147 (135-143)
ALSTLALYV

SEQ ID NO: 16980 - protein, 10 aa, synthetic construct
  REGION 1..10: note = Protein HIRA (789-798)
ALTAAATLSV

SEQ ID NO: 16981 - protein, 9 aa, synthetic construct
  REGION 1..9: note = ATP-binding cassette sub-family B member 8, mitochondrial (142-150)
ALVNVQIPL

SEQ ID NO: 16982 - protein, 9 aa, synthetic construct
  REGION 1..9: note = Serine/threonine-protein phosphatase 6 regulatory ankyrin repeat subunit A (155-163)
ALVPLLSNV

SEQ ID NO: 16983 - protein, 9 aa, synthetic construct
  REGION 1..9: note = Protein transport protein Sec61 subunit alpha isoform 2 (274-282)
ALVSNLYVI

SEQ ID NO: 16984 - protein, 9 aa, synthetic construct
  REGION 1..9: note = E3 ubiquitin-protein ligase UBR4 (709-717)
ALYHFNHSL

SEQ ID NO: 16985 - protein, 9 aa, synthetic construct
  REGION 1..9: note = Tetratricopeptide repeat protein 13 (724-732)
ALYKDLTAK

SEQ ID NO: 16986 - protein, 9 aa, synthetic construct
  REGION 1..9: note = E3 ubiquitin-protein ligase UBR5 (376-384)
ALYSELLAV

SEQ ID NO: 16987 - protein, 9 aa, synthetic construct
  REGION 1..9: note = Protein spinster homolog 3 (269-277)
AMAFVTGAL

SEQ ID NO: 16988 - protein, 9 aa, synthetic construct
  REGION 1..9: note = 28S ribosomal protein S9, mitochondrial (347-355)
AMAKALCSF

SEQ ID NO: 16989 - protein, 11 aa, synthetic construct
  REGION 1..11: note = Probable ribosome biogenesis protein RLP24 (92-102)
AMKRVEEIKQK

SEQ ID NO: 16990 - protein, 9 aa, synthetic construct
  REGION 1..9: note = Melanocyte-stimulating hormone receptor (198-206)
AMLVLMAVL

SEQ ID NO: 16991 - protein, 9 aa, synthetic construct
  REGION 1..9: note = Enteropeptidase (878-886)
AMMHLEFKV

SEQ ID NO: 16992 - protein, 9 aa, synthetic construct
  REGION 1..9: note = 60S ribosomal protein L11 (162-170)
AMRWFQQKY

SEQ ID NO: 16993 - protein, 9 aa, synthetic construct
  REGION 1..9: note = Multivesicular body subunit 12A (38-46)
APASFGKSF

SEQ ID NO: 16994 - protein, 9 aa, synthetic construct
  REGION 1..9: note = Hypoxia-inducible factor 1-alpha (828-836)
APIQGSRNL

SEQ ID NO: 16995 - protein, 9 aa, synthetic construct
  REGION 1..9: note = Transcriptional activator Myb (224-232)
AQAPPTAQL

SEQ ID NO: 16996 - protein, 9 aa, synthetic construct
  REGION 1..9: note = Serine/threonine-protein phosphatase 2B catalytic subunit beta isoform (292-300)
AQDAGYRMY

SEQ ID NO: 16997 - protein, 8 aa, synthetic construct
  REGION 1..8: note = Transcription intermediary factor 1-beta (762-769)
AQDVGRMF

SEQ ID NO: 16998 - protein, 9 aa, synthetic construct
  REGION 1..9: note = Poly(A) polymerase gamma (579-587)
AQGLSIPVI

SEQ ID NO: 16999 - protein, 9 aa, synthetic construct
  REGION 1..9: note = Ribosomal RNA processing protein 1 homolog A (91-99)
AQHLFLQAF

SEQ ID NO: 17000 - protein, 9 aa, synthetic construct
  REGION 1..9: note = Very-long-chain enoyl-CoA reductase (83-91)
AQISWVTVF

SEQ ID NO: 17001 - protein, 9 aa, synthetic construct
  REGION 1..9: note = Disintegrin and metalloproteinase domain-containing protein 15 (301-309)
AQLVTGTSF

SEQ ID NO: 17002 - protein, 10 aa, synthetic construct
  REGION 1..10: note = Protein YIF1B (52-61)
AQRAPGGLSY

SEQ ID NO: 17003 - protein, 9 aa, synthetic construct
  REGION 1..9: note = Activator of basal transcription 1 (212-220)
AQRPTEQEL

SEQ ID NO: 17004 - protein, 8 aa, synthetic construct
  REGION 1..8: note = UBX domain-containing protein 4 (350-357)
AQTVGNTY

SEQ ID NO: 17005 - protein, 9 aa, synthetic construct
  REGION 1..9: note = Uncharacterized protein C11orf24 (193-201)
AQVPKSSAL

SEQ ID NO: 17006 - protein, 10 aa, synthetic construct
  REGION 1..10: note = Asparagine synthetase (glutamine-hydrolyzing) (277-286)
AQVQYPLQTF

SEQ ID NO: 17007 - protein, 9 aa, synthetic construct
  REGION 1..9: note = Elongation factor 1-gamma (93-101)
AQVVQWVSF

SEQ ID NO: 17008 - protein, 9 aa, synthetic construct
  REGION 1..9: note = Transmembrane protein 147 (151-159)
AQVWMITRY

SEQ ID NO: 17009 - protein, 9 aa, synthetic construct
  REGION 1..9: note = Replication initiator 1 (187-195)
AQWDQLVAH

SEQ ID NO: 17010 - protein, 9 aa, synthetic construct
  REGION 1..9: note = Probable helicase with zinc finger domain (470-478)
AQYKEISKF

SEQ ID NO: 17011 - protein, 9 aa, synthetic construct
  REGION 1..9: note = Ribonuclease K6 (120-128)
AQYKFFIVA

SEQ ID NO: 17012 - protein, 9 aa, synthetic construct
  REGION 1..9: note = Centromere protein N (267-275)
AQYKLETKF

SEQ ID NO: 17013 - protein, 10 aa, synthetic construct
  REGION 1..10: note = Periodic tryptophan protein 1 homolog (372-381)
ARSDKPIFTL

SEQ ID NO: 17014 - protein, 9 aa, synthetic construct
  REGION 1..9: note = Olfactory receptor 5K3 (240-248)
ASHFLSVSI

SEQ ID NO: 17015 - protein, 9 aa, synthetic construct
  REGION 1..9: note = N-acetyllactosaminide beta-1,6-N-acetylglucosaminyl-transferase, isoform A (153-161)
ASKKESVVY

SEQ ID NO: 17016 - protein, 9 aa, synthetic construct
  REGION 1..9: note = Cytoplasmic FMR1-interacting protein 1 (658-666)
ASMMEYVLY

SEQ ID NO: 17017 - protein, 10 aa, synthetic construct
  REGION 1..10: note = Utrophin (3369-3378)
ASPQHSALSY

SEQ ID NO: 17018 - protein, 9 aa, synthetic construct
  REGION 1..9: note = RNA-binding protein NOB1 (403-411)
ASRKKFVKK

SEQ ID NO: 17019 - protein, 9 aa, synthetic construct
  REGION 1..9: note = Nodal modulator 2 (823-831)
ASSPLITVF

SEQ ID NO: 17020 - protein, 9 aa, synthetic construct
  REGION 1..9: note = Asparagine synthetase (glutamine-hydrolyzing) (544-552)
ATDPSARTL

SEQ ID NO: 17021 - protein, 9 aa, synthetic construct
  REGION 1..9: note = Ribosomal RNA processing protein 1 homolog B (664-672)
ATHPPGPAV

SEQ ID NO: 17022 - protein, 9 aa, synthetic construct
  REGION 1..9: note = Polyadenylate-binding protein 1 (359-367)
ATKPLYVAL

SEQ ID NO: 17023 - protein, 9 aa, synthetic construct
  REGION 1..9: note = ATP-dependent 6-phosphofructokinase, muscle type (150-158)
ATKSSYLNI

SEQ ID NO: 17024 - protein, 9 aa, synthetic construct
  REGION 1..9: note = Transmembrane protein 9B (2-10)
ATLWGGLLR

SEQ ID NO: 17025 - protein, 9 aa, synthetic construct
  REGION 1..9: note = Serine/threonine-protein phosphatase 6 regulatory subunit 1 (821-829)
ATRDPSTSV

SEQ ID NO: 17026 - protein, 9 aa, synthetic construct
  REGION 1..9: note = Leukocyte-associated immunoglobulin-like receptor 1 (224-232)
ATVNGLPEK

SEQ ID NO: 17027 - protein, 9 aa, synthetic construct
  REGION 1..9: note = 40S ribosomal protein S5 (40-48)
AVKEKYAKY

SEQ ID NO: 17028 - protein, 9 aa, synthetic construct
  REGION 1..9: note = Oligoribonuclease, mitochondrial (109-117)
AVKESTITL

SEQ ID NO: 17029 - protein, 9 aa, synthetic construct
  REGION 1..9: note = 39S ribosomal protein L44, mitochondrial (114-122)
AVLLNLKSN

SEQ ID NO: 17030 - protein, 10 aa, synthetic construct
  REGION 1..10: note = Ig lambda-2 chain C regions (41-50)
AWKADSSPVK

SEQ ID NO: 17031 - protein, 9 aa, synthetic construct
  REGION 1..9: note = Nucleolar transcription factor 1 (644-652)
AYKEYISNK

SEQ ID NO: 17032 - protein, 10 aa, synthetic construct
  REGION 1..10: note = Translocon-associated protein subunit gamma (76-85)
AYKNVKFVLK

SEQ ID NO: 17033 - protein, 9 aa, synthetic construct
  REGION 1..9: note = Serine-protein kinase ATM (740-748)
AYKSELFQK

SEQ ID NO: 17034 - protein, 9 aa, synthetic construct
  REGION 1..9: note = Poly (ADP-ribose) polymerase (365-373)
AYPEYLITF

SEQ ID NO: 17035 - protein, 12 aa, synthetic construct
  REGION 1..12: note = Sialoadhesin (1671-1682)
CKQSMGENSVEM

SEQ ID NO: 17036 - protein, 9 aa, synthetic construct
  REGION 1..9: note = Transmembrane inner ear expressed protein (21-29)
CLAGVAGQL

SEQ ID NO: 17037 - protein, 9 aa, synthetic construct
  REGION 1..9: note = Tetraspanin-18 (82-90)
CLLLFFFLF

SEQ ID NO: 17038 - protein, 9 aa, synthetic construct
  REGION 1..9: note = Asparagine-tRNA ligase, cytoplasmic (537-545)
CLYPRFVQR

SEQ ID NO: 17039 - protein, 11 aa, synthetic construct
  REGION 1..11: note = Protein-glutamine gamma-glutamyltransferase 4 (213-223)
CRAMCAMMSFE

SEQ ID NO: 17040 - protein, 10 aa, synthetic construct
  REGION 1..10: note = Pentatricopeptide repeat domain-containing protein 3, mitochondrial (34-43)
CRFYSGSATL

SEQ ID NO: 17041 - protein, 9 aa, synthetic construct
  REGION 1..9: note = Endothelin-1 receptor (88-96)
CTIFIVGMV

SEQ ID NO: 17042 - protein, 9 aa, synthetic construct
  REGION 1..9: note = cAMP-dependent protein kinase type I-alpha regulatory subunit (109-117)
DAASYVRKV

SEQ ID NO: 17043 - protein, 9 aa, synthetic construct
  REGION 1..9: note = DnaJ homolog subfamily B member 9 (12-20)
DAEAKFREI

SEQ ID NO: 17044 - protein, 9 aa, synthetic construct
  REGION 1..9: note = Catenin beta-1 (145-153)
DAELATRAI

SEQ ID NO: 17045 - protein, 9 aa, synthetic construct
  REGION 1..9: note = Protein disulfide-isomerase A5 (441-449)
DAFKDDRKI

SEQ ID NO: 17046 - protein, 8 aa, synthetic construct
  REGION 1..8: note = Asparagine synthetase (glutamine-hydrolyzing) (9-16)
DAFRFENV

SEQ ID NO: 17047 - protein, 9 aa, synthetic construct
  REGION 1..9: note = Protein FAM127A (61-69)
DALKVTFLI

SEQ ID NO: 17048 - protein, 9 aa, synthetic construct
  REGION 1..9: note = Importin subunit beta-1 (627-635)
DALMAVSTL

SEQ ID NO: 17049 - protein, 8 aa, synthetic construct
  REGION 1..8: note = Eukaryotic translation initiation factor 3 subunit A (504-511)
DAPIGPHL

SEQ ID NO: 17050 - protein, 11 aa, synthetic construct
  REGION 1..11: note = Dermcidin (86-96)
DAVEDLESVGK

SEQ ID NO: 17051 - protein, 8 aa, synthetic construct
  REGION 1..8: note = DNA polymerase delta catalytic subunit (515-522)
DAYLPLRL

SEQ ID NO: 17052 - protein, 9 aa, synthetic construct
  REGION 1..9: note = Oral-facial-digital syndrome 1 protein (185-193)
DAYPQRIKF

SEQ ID NO: 17053 - protein, 9 aa, synthetic construct
  REGION 1..9: note = Splicing factor, arginine/serine-rich 15 (540-548)
DAYRALQKL

SEQ ID NO: 17054 - protein, 8 aa, synthetic construct
  REGION 1..8: note = Period circadian protein homolog 1 (771-778)
DAYRPVGL

SEQ ID NO: 17055 - protein, 9 aa, synthetic construct
  REGION 1..9: note = Torsin-1A-interacting protein 2 (317-325)
DAYTSSQKV

SEQ ID NO: 17056 - protein, 12 aa, synthetic construct
  REGION 1..12: note = Autism susceptibility gene 2 protein (283-294)
DCCKEPIFEPVV

SEQ ID NO: 17057 - protein, 10 aa, synthetic construct
  REGION 1..10: note = Voltage-dependent T-type calcium channel subunit alpha-1G (1640-1649)
DEALKICNYI

SEQ ID NO: 17058 - protein, 9 aa, synthetic construct
  REGION 1..9: note = Signal peptidase complex subunit 2 (82-90)
DGRLTICTI

SEQ ID NO: 17059 - protein, 10 aa, synthetic construct
  REGION 1..10: note = Alanine-tRNA ligase, cytoplasmic (300-309)
DHARTITVAL

SEQ ID NO: 17060 - protein, 9 aa, synthetic construct
  REGION 1..9: note = SRSF protein kinase 2 (597-605)
DHIAHIIEL

SEQ ID NO: 17061 - protein, 8 aa, synthetic construct
  REGION 1..8: note = Laminin subunit beta-3 (1159-1166)
DHINGRVL

SEQ ID NO: 17062 - protein, 9 aa, synthetic construct
  REGION 1..9: note = Coatomer subunit gamma-1 (762-770)
DHIQKVMKL

SEQ ID NO: 17063 - protein, 9 aa, synthetic construct
  REGION 1..9: note = Protein Hook homolog 2 (130-138)
DHIQRIMTL

SEQ ID NO: 17064 - protein, 9 aa, synthetic construct
  REGION 1..9: note = V-type proton ATPase subunit S1 (458-466)
DHKGPTISL

SEQ ID NO: 17065 - protein, 9 aa, synthetic construct
  REGION 1..9: note = Cyclin-Y-like protein 2 (84-92)
DHPKASTIF

SEQ ID NO: 17066 - protein, 9 aa, synthetic construct
  REGION 1..9: note = Calponin-2 (202-210)
DHSTISLQM

SEQ ID NO: 17067 - protein, 8 aa, synthetic construct
  REGION 1..8: note = Integrin beta-7 (722-729)
DHTQAIVL

SEQ ID NO: 17068 - protein, 8 aa, synthetic construct
  REGION 1..8: note = Lipopolysaccharide-responsive and beige-like anchor protein (1946-1953)
DHVTATQL

SEQ ID NO: 17069 - protein, 9 aa, synthetic construct
  REGION 1..9: note = BPI fold-containing family A member 2 (98-106)
DIFGLKISN

SEQ ID NO: 17070 - protein, 11 aa, synthetic construct
  REGION 1..11: note = BPI fold-containing family A member 2 (98-108)
DIFGLKISNSL

SEQ ID NO: 17071 - protein, 10 aa, synthetic construct
  REGION 1..10: note = 60S ribosomal protein L4 (35-44)
DIVNFVHTNL

SEQ ID NO: 17072 - protein, 9 aa, synthetic construct
  REGION 1..9: note = Solute carrier family 2, facilitated glucose transporter member 2 (4-12)
DKVTGTLVF

SEQ ID NO: 17073 - protein, 9 aa, synthetic construct
  REGION 1..9: note = 1,2-dihydroxy-3-keto-5-methylthiopentene dioxygenase (44-52)
DKYENDPEL

SEQ ID NO: 17074 - protein, 9 aa, synthetic construct
  REGION 1..9: note = Peroxidasin-like protein (813-821)
DLDHTVPAL

SEQ ID NO: 17075 - protein, 9 aa, synthetic construct
  REGION 1..9: note = Mitochondrial import receptor subunit TOM6 homolog (66-74)
DLMAPQPGV

SEQ ID NO: 17076 - protein, 9 aa, synthetic construct
  REGION 1..9: note = Phosphorylase b kinase gamma catalytic chain, skeletal muscle/heart isoform (105-113)
DLMKRGELF

SEQ ID NO: 17077 - protein, 9 aa, synthetic construct
  REGION 1..9: note = Inosine-5'-monophosphate dehydrogenase 1 (77-85)
DMAIAMALM

SEQ ID NO: 17078 - protein, 12 aa, synthetic construct
  REGION 1..12: note = Type II inositol 1,4,5-trisphosphate 5-phosphatase (2-13)
DQSVAIQETLAE

SEQ ID NO: 17079 - protein, 9 aa, synthetic construct
  REGION 1..9: note = Proline and serine-rich protein 3 (2-10)
DRSLPVFSI

SEQ ID NO: 17080 - protein, 9 aa, synthetic construct
  REGION 1..9: note = Nucleotide exchange factor SIL1 (410-418)
DRYRQDPQL

SEQ ID NO: 17081 - protein, 9 aa, synthetic construct
  REGION 1..9: note = Cyclin-Y-like protein 2 (130-138)
DSIASQPHL

SEQ ID NO: 17082 - protein, 8 aa, synthetic construct
  REGION 1..8: note = Hexokinase-2 (815-822)
DSIIVKEV

SEQ ID NO: 17083 - protein, 8 aa, synthetic construct
  REGION 1..8: note = 60S ribosomal protein L6 (255-262)
DSQILPKI

SEQ ID NO: 17084 - protein, 9 aa, synthetic construct
  REGION 1..9: note = Small ubiquitin-related modifier 1 (30-38)
DSSEIHFKV

SEQ ID NO: 17085 - protein, 9 aa, synthetic construct
  REGION 1..9: note = Integrin beta-7 (374-382)
DSSNVVQLI

SEQ ID NO: 17086 - protein, 9 aa, synthetic construct
  REGION 1..9: note = Ig lambda-2 chain C regions (45-53)
DSSPVKAGV

SEQ ID NO: 17087 - protein, 9 aa, synthetic construct
  REGION 1..9: note = Sterol O-acyltransferase 1 (310-318)
DSYPRNPTV

SEQ ID NO: 17088 - protein, 8 aa, synthetic construct
  REGION 1..8: note = Store-operated calcium entry-associated regulatory factor (74-81)
DSYTPKVI

SEQ ID NO: 17089 - protein, 9 aa, synthetic construct
  REGION 1..9: note = Disintegrin and metalloproteinase domain-containing protein 15 (247-255)
DTFFRPLNV

SEQ ID NO: 17090 - protein, 8 aa, synthetic construct
  REGION 1..8: note = Sialidase-1 (75-82)
DTFRIPLI

SEQ ID NO: 17091 - protein, 9 aa, synthetic construct
  REGION 1..9: note = WD repeat-containing protein 54 (273-281)
DTFVHIWKL

SEQ ID NO: 17092 - protein, 9 aa, synthetic construct
  REGION 1..9: note = Protein FAM117A (93-101)
DTILSSYLL

SEQ ID NO: 17093 - protein, 10 aa, synthetic construct
  REGION 1..10: note = Ankyrin repeat and SOCS box protein 3 (420-429)
DTLIFTLEFT

SEQ ID NO: 17094 - protein, 9 aa, synthetic construct
  REGION 1..9: note = WD repeat-containing protein 26 (376-384)
DTTVIIWQV

SEQ ID NO: 17095 - protein, 9 aa, synthetic construct
  REGION 1..9: note = Signal recognition particle receptor subunit beta (154-162)
DVAEFLYQV

SEQ ID NO: 17096 - protein, 9 aa, synthetic construct
  REGION 1..9: note = 60S ribosomal protein L23a (120-128)
DVAKVNTLI

SEQ ID NO: 17097 - protein, 9 aa, synthetic construct
  REGION 1..9: note = G2/M phase-specific E3 ubiquitin-protein ligase (493-501)
DVAQIIIRI

SEQ ID NO: 17098 - protein, 9 aa, synthetic construct
  REGION 1..9: note = Inorganic pyrophosphatase (42-50)
DVFHMVVEV

SEQ ID NO: 17099 - protein, 9 aa, synthetic construct
  REGION 1..9: note = Carboxylesterase 3 (415-423)
DVFINVPTV

SEQ ID NO: 17100 - protein, 9 aa, synthetic construct
  REGION 1..9: note = Bardet-Biedl syndrome 7 protein (53-61)
EAAAVFKTL

SEQ ID NO: 17101 - protein, 9 aa, synthetic construct
  REGION 1..9: note = Exocyst complex component 5 (158-166)
EAADIIQKL

SEQ ID NO: 17102 - protein, 9 aa, synthetic construct
  REGION 1..9: note = Lysine-specific histone demethylase 1A (710-718)
EAAGIMENI

SEQ ID NO: 17103 - protein, 11 aa, synthetic construct
  REGION 1..11: note = Probable phospholipid-transporting ATPase VA (700-710)
EAALVYAARAY

SEQ ID NO: 17104 - protein, 9 aa, synthetic construct
  REGION 1..9: note = Kelch-like protein 6 (450-458)
EAAPLLVHV

SEQ ID NO: 17105 - protein, 9 aa, synthetic construct
  REGION 1..9: note = Coatomer subunit gamma-1 (269-277)
EAASAIVNL

SEQ ID NO: 17106 - protein, 9 aa, synthetic construct
  REGION 1..9: note = Nesprin-3 (176-184)
EAASLFNRI

SEQ ID NO: 17107 - protein, 10 aa, synthetic construct
  REGION 1..10: note = snRNA-activating protein complex subunit 4 (237-246)
EAEKEIQDIN

SEQ ID NO: 17108 - protein, 9 aa, synthetic construct
  REGION 1..9: note = L-xylulose reductase (98-106)
EAFDRSFEV

SEQ ID NO: 17109 - protein, 10 aa, synthetic construct
  REGION 1..10: note = Protein flightless-1 homolog (516-525)
EAFHGKFYEA

SEQ ID NO: 17110 - protein, 9 aa, synthetic construct
  REGION 1..9: note = Mortality factor 4-like protein 2 (113-121)
EAFKNRMEV

SEQ ID NO: 17111 - protein, 9 aa, synthetic construct
  REGION 1..9: note = Pre-B-cell leukemia transcription factor-interacting protein 1 (166-174)
EAGPPQPMV

SEQ ID NO: 17112 - protein, 9 aa, synthetic construct
  REGION 1..9: note = E3 ubiquitin-protein ligase UBR2 (256-264)
EAIGFATTV

SEQ ID NO: 17113 - protein, 8 aa, synthetic construct
  REGION 1..8: note = 60S ribosomal protein L10 (63-70)
EALEAARI

SEQ ID NO: 17114 - protein, 8 aa, synthetic construct
  REGION 1..8: note = Steroid hormone receptor ERR1 (353-360)
EALHEALL

SEQ ID NO: 17115 - protein, 9 aa, synthetic construct
  REGION 1..9: note = Very-long-chain (3R)-3-hydroxyacyl-CoA dehydratase 3 (293-301)
EAVSVIQSI

SEQ ID NO: 17116 - protein, 9 aa, synthetic construct
  REGION 1..9: note = Paired amphipathic helix protein Sin3a (1166-1174)
ECRFKLNSY

SEQ ID NO: 17117 - protein, 12 aa, synthetic construct
  REGION 1..12: note = RNA polymerase I-specific transcription initiation factor RRN3 (604-615)
EDDDFLKGEVPQ

SEQ ID NO: 17118 - protein, 9 aa, synthetic construct
  REGION 1..9: note = MICAL C-terminal-like protein (368-376)
EDVPTLLEK

SEQ ID NO: 17119 - protein, 9 aa, synthetic construct
  REGION 1..9: note = Protein transport protein Sec24C (408-416)
EEASPYVVD

SEQ ID NO: 17120 - protein, 11 aa, synthetic construct
  REGION 1..11: note = PHD finger protein 10 (446-456)
EEMMFCDMCDR

SEQ ID NO: 17121 - protein, 9 aa, synthetic construct
  REGION 1..9: note = FERM domain-containing protein 6 (338-346)
EENEEKKQY

SEQ ID NO: 17122 - protein, 9 aa, synthetic construct
  REGION 1..9: note = Epiplakin (2700-2708)
EERLSKVSF

SEQ ID NO: 17123 - protein, 12 aa, synthetic construct
  REGION 1..12: note = Salivary acidic proline-rich phosphoprotein 1/2 (44-55)
EERQGPPLGGQQ

SEQ ID NO: 17124 - protein, 9 aa, synthetic construct
  REGION 1..9: note = Inactive ubiquitin carboxyl-terminal hydrolase 17-like protein 4 (449-457)
EFNVRKVEG

SEQ ID NO: 17125 - protein, 9 aa, synthetic construct
  REGION 1..9: note = Kinesin heavy chain isoform 5A (583-591)
EFTVARLYI

SEQ ID NO: 17126 - protein, 9 aa, synthetic construct
  REGION 1..9: note = Hyaluronan and proteoglycan link protein 2 (201-209)
EGSVRYPVL

SEQ ID NO: 17127 - protein, 8 aa, synthetic construct
  REGION 1..8: note = Gem-associated protein 5 (589-596)
EHGSQPEL

SEQ ID NO: 17128 - protein, 9 aa, synthetic construct
  REGION 1..9: note = Filamin-B (2269-2277)
EHIPESPYL

SEQ ID NO: 17129 - protein, 9 aa, synthetic construct
  REGION 1..9: note = Protein Hook homolog 1 (136-144)
EHIQNIMTL

SEQ ID NO: 17130 - protein, 9 aa, synthetic construct
  REGION 1..9: note = 26S proteasome non-ATPase regulatory subunit 11 (348-356)
EHISSLIKL

SEQ ID NO: 17131 - protein, 9 aa, synthetic construct
  REGION 1..9: note = Intraflagellar transport protein 46 homolog (70-78)
EHLPVSAEI

SEQ ID NO: 17132 - protein, 9 aa, synthetic construct
  REGION 1..9: note = Kinesin-like protein KIF21B (1412-1420)
EHQINQIAL

SEQ ID NO: 17133 - protein, 9 aa, synthetic construct
  REGION 1..9: note = Zinc finger and BTB domain-containing protein 38 (220-228)
EHSYAVSSV

SEQ ID NO: 17134 - protein, 9 aa, synthetic construct
  REGION 1..9: note = Fructose-bisphosphate aldolase A (156-164)
EHTPSALAI

SEQ ID NO: 17135 - protein, 9 aa, synthetic construct
  REGION 1..9: note = Ribosome-binding protein 1 (768-776)
EHVKEVQQL

SEQ ID NO: 17136 - protein, 9 aa, synthetic construct
  REGION 1..9: note = OTU domain-containing protein 6B (276-284)
EHYNSVTRL

SEQ ID NO: 17137 - protein, 9 aa, synthetic construct
  REGION 1..9: note = E3 ubiquitin-protein ligase UBR4 (401-409)
EHYQNFQLL

SEQ ID NO: 17138 - protein, 9 aa, synthetic construct
  REGION 1..9: note = 26S protease regulatory subunit 4 (130-138)
EHYVSILSF

SEQ ID NO: 17139 - protein, 9 aa, synthetic construct
  REGION 1..9: note = Epsin-2 (42-50)
EIADLTYNV

SEQ ID NO: 17140 - protein, 9 aa, synthetic construct
  REGION 1..9: note = Telomere-associated protein RIF1 (220-228)
EIASITEQL

SEQ ID NO: 17141 - protein, 10 aa, synthetic construct
  REGION 1..10: note = General transcription factor II-I (577-586)
EIFNLKFAQA

SEQ ID NO: 17142 - protein, 10 aa, synthetic construct
  REGION 1..10: note = Atlastin-3 (199-208)
EIFQKPFQTL

SEQ ID NO: 17143 - protein, 9 aa, synthetic construct
  REGION 1..9: note = DNA-directed RNA polymerase III subunit RPC5 (655-663)
EIFSKNYRV

SEQ ID NO: 17144 - protein, 10 aa, synthetic construct
  REGION 1..10: note = C-X-C motif chemokine 9 (62-71)
EIIATLKNGV

SEQ ID NO: 17145 - protein, 9 aa, synthetic construct
  REGION 1..9: note = Uncharacterized protein CXorf23 (474-482)
EIITIIHQV

SEQ ID NO: 17146 - protein, 9 aa, synthetic construct
  REGION 1..9: note = Serine/threonine-protein kinase TBK1 (497-505)
EISDIHTKL

SEQ ID NO: 17147 - protein, 9 aa, synthetic construct
  REGION 1..9: note = Constitutive coactivator of peroxisome proliferator-activated receptor gamma (111-119)
EISRIFHYI

SEQ ID NO: 17148 - protein, 9 aa, synthetic construct
  REGION 1..9: note = Centrosomal protein of 170 kDa protein B (1491-1499)
EISSILKEL

SEQ ID NO: 17149 - protein, 9 aa, synthetic construct
  REGION 1..9: note = Testis-specific Y-encoded-like protein 2 (468-476)
EITDINENI

SEQ ID NO: 17150 - protein, 9 aa, synthetic construct
  REGION 1..9: note = Oxysterols receptor LXR-beta (280-288)
EIVDFAKQV

SEQ ID NO: 17151 - protein, 10 aa, synthetic construct
  REGION 1..10: note = Tubulin beta-4B chain (3-12)
EIVHLQAGQC

SEQ ID NO: 17152 - protein, 9 aa, synthetic construct
  REGION 1..9: note = Activating transcription factor 7-interacting protein 2 (101-109)
EIVHSETKL

SEQ ID NO: 17153 - protein, 9 aa, synthetic construct
  REGION 1..9: note = Ras GTPase-activating-like protein IQGAP2 (753-761)
EIVKIQSLL

SEQ ID NO: 17154 - protein, 9 aa, synthetic construct
  REGION 1..9: note = Williams-Beuren syndrome chromosomal region 16 protein (214-222)
EIYSESHRV

SEQ ID NO: 17155 - protein, 10 aa, synthetic construct
  REGION 1..10: note = Protein S100-A8 (6-15)
EKALNSIIDV

SEQ ID NO: 17156 - protein, 10 aa, synthetic construct
  REGION 1..10: note = Zinc finger protein 559 (97-106)
EKALSEHSCL

SEQ ID NO: 17157 - protein, 9 aa, synthetic construct
  REGION 1..9: note = Replication protein A 32 kDa subunit (84-92)
EKAPTNIVY

SEQ ID NO: 17158 - protein, 9 aa, synthetic construct
  REGION 1..9: note = Pre-mRNA-processing factor 40 homolog A (475-483)
EKMTSTTRY

SEQ ID NO: 17159 - protein, 10 aa, synthetic construct
  REGION 1..10: note = Transcriptional repressor p66-beta (434-443)
EKNGKILCEQ

SEQ ID NO: 17160 - protein, 10 aa, synthetic construct
  REGION 1..10: note = Valine-tRNA ligase (271-280)
EKRDPGVITY

SEQ ID NO: 17161 - protein, 9 aa, synthetic construct
  REGION 1..9: note = Transcriptional regulator Kaiso (528-536)
EKVFPLAEY

SEQ ID NO: 17162 - protein, 9 aa, synthetic construct
  REGION 1..9: note = Tyrosine-tRNA ligase, cytoplasmic (281-289)
EKWGGNKTY

SEQ ID NO: 17163 - protein, 9 aa, synthetic construct
  REGION 1..9: note = E3 ubiquitin-protein ligase synoviolin (216-224)
ELFTGFIKV

SEQ ID NO: 17164 - protein, 10 aa, synthetic construct
  REGION 1..10: note = Cohesin subunit SA-2 (1209-1218)
ELKPDFFDPA

SEQ ID NO: 17165 - protein, 9 aa, synthetic construct
  REGION 1..9: note = Cytospin-A (413-421)
ELQATLQEL

SEQ ID NO: 17166 - protein, 9 aa, synthetic construct
  REGION 1..9: note = E3 ubiquitin-protein ligase UBR4 (3813-3821)
ELSKIIQKV

SEQ ID NO: 17167 - protein, 9 aa, synthetic construct
  REGION 1..9: note = 60S ribosomal protein L36 (89-97)
ELSNVLAAM

SEQ ID NO: 17168 - protein, 10 aa, synthetic construct
  REGION 1..10: note = Glutamate-rich protein 3 (1485-1494)
ELSPESLQAM

SEQ ID NO: 17169 - protein, 9 aa, synthetic construct
  REGION 1..9: note = Mini-chromosome maintenance complex-binding protein (343-351)
ELSPVRAEL

SEQ ID NO: 17170 - protein, 12 aa, synthetic construct
  REGION 1..12: note = Dynamin-binding protein (804-815)
EMCIERIMVPMQ

SEQ ID NO: 17171 - protein, 10 aa, synthetic construct
  REGION 1..10: note = GLIPR1-like protein 2 (312-321)
EMEMEIMEME

SEQ ID NO: 17172 - protein, 12 aa, synthetic construct
  REGION 1..12: note = Pleckstrin homology domain-containing family G member 3 (582-593)
EMGGAAQEPESL

SEQ ID NO: 17173 - protein, 9 aa, synthetic construct
  REGION 1..9: note = Contactin-1 (416-424)
EMNPMKKKI

SEQ ID NO: 17174 - protein, 8 aa, synthetic construct
  REGION 1..8: note = Putative vomeronasal receptor-like protein 4 (2-9)
EMTKLFSY

SEQ ID NO: 17175 - protein, 10 aa, synthetic construct
  REGION 1..10: note = Putative vomeronasal receptor-like protein 4 (2-11)
EMTKLFSYIV

SEQ ID NO: 17176 - protein, 9 aa, synthetic construct
  REGION 1..9: note = Cyclin-H (240-248)
ENRTCLSQL

SEQ ID NO: 17177 - protein, 9 aa, synthetic construct
  REGION 1..9: note = 3-phosphoinositide-dependent protein kinase 1 (57-65)
EPRPGAGSL

SEQ ID NO: 17178 - protein, 9 aa, synthetic construct
  REGION 1..9: note = Gamma-glutamyltransferase 6 (2-10)
ERAEEPVVY

SEQ ID NO: 17179 - protein, 9 aa, synthetic construct
  REGION 1..9: note = Integrin beta-7 (243-251)
EREVGRQSV

SEQ ID NO: 17180 - protein, 9 aa, synthetic construct
  REGION 1..9: note = Serine/threonine-protein kinase pim-3 (34-42)
ESFEKAYQV

SEQ ID NO: 17181 - protein, 9 aa, synthetic construct
  REGION 1..9: note = Endoplasmin (550-558)
ESSPFVERL

SEQ ID NO: 17182 - protein, 9 aa, synthetic construct
  REGION 1..9: note = Lamina-associated polypeptide 2, isoforms beta/gamma (277-285)
ESTPIAETI

SEQ ID NO: 17183 - protein, 12 aa, synthetic construct
  REGION 1..12: note = Dermcidin (92-103)
ESVGKGAVHDVK

SEQ ID NO: 17184 - protein, 9 aa, synthetic construct
  REGION 1..9: note = Elongation factor 2 (311-319)
ETAKLIEKL

SEQ ID NO: 17185 - protein, 10 aa, synthetic construct
  REGION 1..10: note Dolichyl-diphosphooligosaccharide-proteinosyltransferase 48 kDa subunit (318-327)
ETAPPNAYTV

SEQ ID NO: 17186 - protein, 9 aa, synthetic construct
  REGION 1..9: note = Heat shock protein HSP 90-beta (13-21)
ETFAFQAEI

SEQ ID NO: 17187 - protein, 9 aa, synthetic construct
  REGION 1..9: note = Cyclin-dependent kinase 6 (69-77)
ETFEHPNVV

SEQ ID NO: 17188 - protein, 9 aa, synthetic construct
  REGION 1..9: note = Serine/threonine-protein phosphatase 2A catalytic subunit beta isoform (226-234)
ETFNHANGL

SEQ ID NO: 17189 - protein, 12 aa, synthetic construct
  REGION 1..12: note = Protein diaphanous homolog 1 (1255-1266)
ETFPTILEEAKE

SEQ ID NO: 17190 - protein, 9 aa, synthetic construct
  REGION 1..9: note = Serine/threonine-protein kinase 17B (257-265)
ETFSSVSQL

SEQ ID NO: 17191 - protein, 9 aa, synthetic construct
  REGION 1..9: note = Transcription elongation factor SPT6 (1159-1167)
ETFYIGKLI

SEQ ID NO: 17192 - protein, 9 aa, synthetic construct
  REGION 1..9: note = SWI/SNF-related matrix-associated actin-dependent regulator of chromatin subfamily D member 2 (442-450)
ETIESINQL

SEQ ID NO: 17193 - protein, 10 aa, synthetic construct
  REGION 1..10: note = Ribonuclease H2 subunit C (135-144)
ETIPGPDAKV

SEQ ID NO: 17194 - protein, 10 aa, synthetic construct
  REGION 1..10: note = MOB kinase activator 1A (129-138)
ETLFPSKIGV

SEQ ID NO: 17195 - protein, 9 aa, synthetic construct
  REGION 1..9: note = Cystatin-B (15-23)
ETQHIADQV

SEQ ID NO: 17196 - protein, 9 aa, synthetic construct
  REGION 1..9: note = Heat shock protein HSP 90-beta (478-486)
ETQKSIYYI

SEQ ID NO: 17197 - protein, 10 aa, synthetic construct
  REGION 1..10: note = Wiskott-Aldrich syndrome protein (285-294)
ETSKLIYDFI

SEQ ID NO: 17198 - protein, 9 aa, synthetic construct
  REGION 1..9: note = Elongation factor 1-alpha 1 (81-89)
ETSKYYVTI

SEQ ID NO: 17199 - protein, 9 aa, synthetic construct
  REGION 1..9: note = Protein virilizer homolog (61-69)
ETSPHTFQL

SEQ ID NO: 17200 - protein, 9 aa, synthetic construct
  REGION 1..9: note = Splicing factor 3B subunit 1 (1221-1229)
ETSPHVIQA

SEQ ID NO: 17201 - protein, 10 aa, synthetic construct
  REGION 1..10: note = G1/S-specific cyclin-D2 (114-123)
ETSPLTAEKL

SEQ ID NO: 17202 - protein, 9 aa, synthetic construct
  REGION 1..9: note = Neurexin-3 (1375-1383)
ETTKDSLSM

SEQ ID NO: 17203 - protein, 9 aa, synthetic construct
  REGION 1..9: note = Mucin-16 (2346-2354)
ETTVKTSDI

SEQ ID NO: 17204 - protein, 9 aa, synthetic construct
  REGION 1..9: note = Non-structural maintenance of chromosomes element 1 homolog (182-190)
ETYPDAVKI

SEQ ID NO: 17205 - protein, 9 aa, synthetic construct
  REGION 1..9: note = Alanine-tRNA ligase, cytoplasmic (688-696)
ETYPDPVRV

SEQ ID NO: 17206 - protein, 10 aa, synthetic construct
  REGION 1..10: note = Actin-related protein 2 (129-138)
ETYQFSGVYV

SEQ ID NO: 17207 - protein, 9 aa, synthetic construct
  REGION 1..9: note = Pre-mRNA-processing-splicing factor 8 (1844-1852)
EVAALIRSL

SEQ ID NO: 17208 - protein, 9 aa, synthetic construct
  REGION 1..9: note = Ankyrin repeat and KH domain-containing protein 1 (519-527)
EVADFLIKA

SEQ ID NO: 17209 - protein, 9 aa, synthetic construct
  REGION 1..9: note = PRKCA-binding protein (85-93)
EVAKMIQEV

SEQ ID NO: 17210 - protein, 9 aa, synthetic construct
  REGION 1..9: note = A-kinase anchor protein 9 (1455-1463)
EVAKVIVSM

SEQ ID NO: 17211 - protein, 9 aa, synthetic construct
  REGION 1..9: note = Histone acetyltransferase KAT8 (250-258)
EVDGKDHKI

SEQ ID NO: 17212 - protein, 11 aa, synthetic construct
  REGION 1..11: note = Nucleolin (411-421)
EVFEDAAEIRL

SEQ ID NO: 17213 - protein, 9 aa, synthetic construct
  REGION 1..9: note = Nucleolin (504-512)
EVFEKATFI

SEQ ID NO: 17214 - protein, 9 aa, synthetic construct
  REGION 1..9: note = Desmoplakin (745-753)
EVFGLFQKL

SEQ ID NO: 17215 - protein, 9 aa, synthetic construct
  REGION 1..9: note = Splicing factor 3B subunit 3 (57-65)
EVFGVIRSL

SEQ ID NO: 17216 - protein, 9 aa, synthetic construct
  REGION 1..9: note = E2F-associated phosphoprotein (273-281)
EVFHFFNVL

SEQ ID NO: 17217 - protein, 9 aa, synthetic construct
  REGION 1..9: note = Vacuolar protein sorting-associated protein 8 homolog (935-943)
EVFNYIHNI

SEQ ID NO: 17218 - protein, 9 aa, synthetic construct
  REGION 1..9: note = Actin-binding LIM protein 1 (747-755)
EVFREIFGM

SEQ ID NO: 17219 - protein, 10 aa, synthetic construct
  REGION 1..10: note = Replication protein A 32 kDa subunit (62-71)
EVFRIGNVEI

SEQ ID NO: 17220 - protein, 9 aa, synthetic construct
  REGION 1..9: note = Phenylalanine-tRNA ligase alpha subunit (418-426)
EVFSYHQGL

SEQ ID NO: 17221 - protein, 9 aa, synthetic construct
  REGION 1..9: note = Non-canonical poly(A) RNA polymerase PAPD7 (185-193)
EVFTGGISS

SEQ ID NO: 17222 - protein, 9 aa, synthetic construct
  REGION 1..9: note = Cytochrome b-245 heavy chain (203-211)
EVFWYTHHL

SEQ ID NO: 17223 - protein, 10 aa, synthetic construct
  REGION 1..10: note = Sigma non-opioid intracellular receptor 1 (144-153)
EVFYPGETVV

SEQ ID NO: 17224 - protein, 9 aa, synthetic construct
  REGION 1..9: note = Phosphomannomutase 1 (68-76)
EVIEKFDYV

SEQ ID NO: 17225 - protein, 9 aa, synthetic construct
  REGION 1..9: note = Centromere/kinetochore protein zw10 homolog (663-671)
EVIGKITAL

SEQ ID NO: 17226 - protein, 9 aa, synthetic construct
  REGION 1..9: note = Protein phosphatase 1G (109-117)
EVIKELAQI

SEQ ID NO: 17227 - protein, 9 aa, synthetic construct
  REGION 1..9: note = Importin-9 (267-275)
EVLKAVTAL

SEQ ID NO: 17228 - protein, 9 aa, synthetic construct
  REGION 1..9: note = Nuclear receptor-binding factor 2 (2-10)
EVMEGPLNL

SEQ ID NO: 17229 - protein, 9 aa, synthetic construct
  REGION 1..9: note = Uncharacterized protein KIAA1143 (71-79)
EVMKIKAEI

SEQ ID NO: 17230 - protein, 9 aa, synthetic construct
  REGION 1..9: note = C-1-tetrahydrofolate synthase, cytoplasmic (80-88)
EVMKYITSL

SEQ ID NO: 17231 - protein, 9 aa, synthetic construct
  REGION 1..9: note = Probable ubiquitin carboxyl-terminal hydrolase FAF-X (357-365)
EVNKVISSV

SEQ ID NO: 17232 - protein, 9 aa, synthetic construct
  REGION 1..9: note = Programmed cell death protein 4 (355-363)
EVPHFHHEL

SEQ ID NO: 17233 - protein, 9 aa, synthetic construct
  REGION 1..9: note = InaD-like protein (626-634)
EVPPPFTLV

SEQ ID NO: 17234 - protein, 9 aa, synthetic construct
  REGION 1..9: note = Gypsy retrotransposon integrase-like protein 1 (184-192)
EVSKAIINI

SEQ ID NO: 17235 - protein, 9 aa, synthetic construct
  REGION 1..9: note = DNA-directed RNA polymerase III subunit RPC3 (143-151)
EVSNTFVRL

SEQ ID NO: 17236 - protein, 9 aa, synthetic construct
  REGION 1..9: note = CAP-Gly domain-containing linker protein 1 (841-849)
EVSQVKETL

SEQ ID NO: 17237 - protein, 10 aa, synthetic construct
  REGION 1..10: note = Double-stranded RNA-specific adenosine deaminase (806-815)
EVTPVTGASL

SEQ ID NO: 17238 - protein, 9 aa, synthetic construct
  REGION 1..9: note = Multiple C2 and transmembrane domain-containing protein 1 (410-418)
EVVGSYFSV

SEQ ID NO: 17239 - protein, 10 aa, synthetic construct
  REGION 1..10: note = Monocarboxylate transporter 4 (456-465)
EVVHTPETSV

SEQ ID NO: 17240 - protein, 9 aa, synthetic construct
  REGION 1..9: note = E3 ubiquitin-protein ligase RNF114 (34-42)
EVYEKPVQV

SEQ ID NO: 17241 - protein, 11 aa, synthetic construct
  REGION 1..11: note = Sorting nexin-17 (460-470)
FAFEGIGDEDL

SEQ ID NO: 17242 - protein, 10 aa, synthetic construct
  REGION 1..10: note = Coiled-coil domain-containing protein 60 (70-79)
FAILREETAK

SEQ ID NO: 17243 - protein, 9 aa, synthetic construct
  REGION 1..9: note = Serpin B6 (11-19)
FALNLLKTL

SEQ ID NO: 17244 - protein, 9 aa, synthetic construct
  REGION 1..9: note = Inactive phospholipase D5 (72-80)
FALVCCFAI

SEQ ID NO: 17245 - protein, 9 aa, synthetic construct
  REGION 1..9: note = Actin-like protein 6A (118-126)
FANGRSTGL

SEQ ID NO: 17246 - protein, 9 aa, synthetic construct
  REGION 1..9: note = Fatty acid synthase (1720-1728)
FANSRDTSF

SEQ ID NO: 17247 - protein, 9 aa, synthetic construct
  REGION 1..9: note = DNA polymerase delta subunit 2 (24-32)
FARVPVATY

SEQ ID NO: 17248 - protein, 10 aa, synthetic construct
  REGION 1..10: note = Microtubule cross-linking factor 1 (1586-1595)
FASPLHSLEM

SEQ ID NO: 17249 - protein, 9 aa, synthetic construct
  REGION 1..9: note = ATP synthase subunit delta, mitochondrial (42-50)
FASPTQVFF

SEQ ID NO: 17250 - protein, 9 aa, synthetic construct
  REGION 1..9: note = Alanine-tRNA ligase, cytoplasmic (346-354)
FATLVDVVV

SEQ ID NO: 17251 - protein, 11 aa, synthetic construct
  REGION 1..11: note = G patch domain-containing protein 2 (148-158)
FAVDNVGNRTL

SEQ ID NO: 17252 - protein, 9 aa, synthetic construct
  REGION 1..9: note = Protein disulfide-isomerase A2 (456-464)
FAVHGFPTL

SEQ ID NO: 17253 - protein, 9 aa, synthetic construct
  REGION 1..9: note = Translocon-associated protein subunit gamma (75-83)
FAYKNVKFV

SEQ ID NO: 17254 - protein, 9 aa, synthetic construct
  REGION 1..9: note = Transmembrane protein 214 (326-334)
FAYMPNNSL

SEQ ID NO: 17255 - protein, 9 aa, synthetic construct
  REGION 1..9: note = 28S ribosomal protein S29, mitochondrial (117-125)
FAYPAIRYL

SEQ ID NO: 17256 - protein, 9 aa, synthetic construct
  REGION 1..9: note = Protein furry homolog-like (828-836)
FAYTRLQLL

SEQ ID NO: 17257 - protein, 8 aa, synthetic construct
  REGION 1..8: note = Transmembrane and coiled-coil domain-containing protein 1 (109-116)
FDGRVVAK

SEQ ID NO: 17258 - protein, 9 aa, synthetic construct
  REGION 1..9: note = ATP-binding cassette sub-family A member 9 (420-428)
FDKILPAEY

SEQ ID NO: 17259 - protein, 8 aa, synthetic construct
  REGION 1..8: note = Peroxidasin-like protein (1168-1175)
FEDLQNEI

SEQ ID NO: 17260 - protein, 10 aa, synthetic construct
  REGION 1..10: note = Unconventional myosin-Ih (75-84)
FELPPHVYAI

SEQ ID NO: 17261 - protein, 9 aa, synthetic construct
  REGION 1..9: note = Band 4.1-like protein 1 (692-700)
FEPVKTETM

SEQ ID NO: 17262 - protein, 12 aa, synthetic construct
  REGION 1..12: note = Gigaxonin (459-470)
FGAVACGVAMEL

SEQ ID NO: 17263 - protein, 10 aa, synthetic construct
  REGION 1..10: note = Cysteine andine-rich protein 1 (180-189)
FGFGQGAGAL

SEQ ID NO: 17264 - protein, 9 aa, synthetic construct
  REGION 1..9: note = Protein FAM60A (2-10)
FGFHKPKMY

SEQ ID NO: 17265 - protein, 9 aa, synthetic construct
  REGION 1..9: note = Acyl-CoA-binding domain-containing protein 6 (141-149)
FGGPVISSL

SEQ ID NO: 17266 - protein, 9 aa, synthetic construct
  REGION 1..9: note = Hydroxyacyl-coenzyme A dehydrogenase, mitochondrial (302-310)
FGKKTGEGF

SEQ ID NO: 17267 - protein, 9 aa, synthetic construct
  REGION 1..9: note = EH domain-containing protein 1 (42-50)
FHEFHSPAL

SEQ ID NO: 17268 - protein, 9 aa, synthetic construct
  REGION 1..9: note = Forkhead box protein N2 (278-286)
FHHPSAVRL

SEQ ID NO: 17269 - protein, 9 aa, synthetic construct
  REGION 1..9: note = B-lymphocyte antigen CD20 (62-70)
FHIALGGLL

SEQ ID NO: 17270 - protein, 9 aa, synthetic construct
  REGION 1..9: note = Endoplasmic reticulum-Golgi intermediate compartment protein 2 (185-193)
FHITVGKAI

SEQ ID NO: 17271 - protein, 9 aa, synthetic construct
  REGION 1..9: note = Complement receptor type 2 (1016-1024)
FHLEAREVY

SEQ ID NO: 17272 - protein, 9 aa, synthetic construct
  REGION 1..9: note = Eukaryotic elongation factor 2 kinase (553-561)
FHLEHAANL

SEQ ID NO: 17273 - protein, 9 aa, synthetic construct
  REGION 1..9: note Dolichyl-diphosphooligosaccharide-proteinosyltransferase subunit 2 (579-587)
FHLGHAAML

SEQ ID NO: 17274 - protein, 9 aa, synthetic construct
  REGION 1..9: note = Brain-specific angiogenesis inhibitor 1-associated protein 2 (97-105)
FHNELLTQL

SEQ ID NO: 17275 - protein, 9 aa, synthetic construct
  REGION 1..9: note = Large subunit GTPase 1 homolog (597-605)
FHQENVRAL

SEQ ID NO: 17276 - protein, 9 aa, synthetic construct
  REGION 1..9: note = tRNA (uracil(54)-C(5))-methyltransferase homolog (396-404)
FHTGQAEKI

SEQ ID NO: 17277 - protein, 10 aa, synthetic construct
  REGION 1..10: note = E3 ubiquitin-protein ligase UHRF1 (36-45)
FHVEPGLQRL

SEQ ID NO: 17278 - protein, 9 aa, synthetic construct
  REGION 1..9: note = Minor histocompatibility protein HA-1 (190-198)
FHYESNNDL

SEQ ID NO: 17279 - protein, 9 aa, synthetic construct
  REGION 1..9: note = Gamma-adducin (307-315)
FHYIFNVQL

SEQ ID NO: 17280 - protein, 9 aa, synthetic construct
  REGION 1..9: note = Protein RER1 (79-87)
FIAFLSPKV

SEQ ID NO: 17281 - protein, 9 aa, synthetic construct
  REGION 1..9: note = Mitochondrial import receptor subunit TOM5 homolog (43-51)
FILKKLDSI

SEQ ID NO: 17282 - protein, 9 aa, synthetic construct
  REGION 1..9: note = Neutral amino acid transporter B(0) (175-183)
FILPIGATV

SEQ ID NO: 17283 - protein, 9 aa, synthetic construct
  REGION 1..9: note = Nectin-1 (509-517)
FISKKEWYV

SEQ ID NO: 17284 - protein, 9 aa, synthetic construct
  REGION 1..9: note = Desmoplakin (2300-2308)
FIVDPVSNL

SEQ ID NO: 17285 - protein, 9 aa, synthetic construct
  REGION 1..9: note = Zinc finger protein 460 (554-562)
FIVEETLPL

SEQ ID NO: 17286 - protein, 9 aa, synthetic construct
  REGION 1..9: note = Elongation factor 1-gamma (16-24)
FKALIAAQY

SEQ ID NO: 17287 - protein, 9 aa, synthetic construct
  REGION 1..9: note = Ubiquilin-1 (61-69)
FKEEISKRF

SEQ ID NO: 17288 - protein, 9 aa, synthetic construct
  REGION 1..9: note = Nuclear pore complex protein Nup153 (924-932)
FKFGDQGGF

SEQ ID NO: 17289 - protein, 9 aa, synthetic construct
  REGION 1..9: note = Thioredoxin-interacting protein (370-378)
FKFMPPPTY

SEQ ID NO: 17290 - protein, 9 aa, synthetic construct
  REGION 1..9: note = Protein SCAF11 (1115-1123)
FKFVEQQSY

SEQ ID NO: 17291 - protein, 10 aa, synthetic construct
  REGION 1..10: note = Casein kinase II subunit alpha (197-206)
FKGPELLVDY

SEQ ID NO: 17292 - protein, 10 aa, synthetic construct
  REGION 1..10: note = Ras association domain-containing protein 2 (212-221)
FKIENSAEEF

SEQ ID NO: 17293 - protein, 9 aa, synthetic construct
  REGION 1..9: note = Septin-6 (197-205)
FKIKITSEL

SEQ ID NO: 17294 - protein, 9 aa, synthetic construct
  REGION 1..9: note = Ubiquitin carboxyl-terminal hydrolase 33 (150-158)
FKIPSNTTL

SEQ ID NO: 17295 - protein, 10 aa, synthetic construct
  REGION 1..10: note = SLIT-ROBO Rho GTPase-activating protein 3 (765-774)
FKKGASLLLY

SEQ ID NO: 17296 - protein, 10 aa, synthetic construct
  REGION 1..10: note = ETS domain-containing protein Elk-4 (163-172)
FKLIKTENPA

SEQ ID NO: 17297 - protein, 9 aa, synthetic construct
  REGION 1..9: note = Nucleoporin-like protein 2 (303-311)
FKSPAASSF

SEQ ID NO: 17298 - protein, 10 aa, synthetic construct
  REGION 1..10: note = Mini-chromosome maintenance complex-binding protein (250-259)
FKVNDILELY

SEQ ID NO: 17299 - protein, 9 aa, synthetic construct
  REGION 1..9: note = U2 small nuclear ribonucleoprotein auxiliary factor 35 kDa subunit-related protein 2 (256-264)
FKVSCNLEP

SEQ ID NO: 17300 - protein, 9 aa, synthetic construct
  REGION 1..9: note = Ubiquitin-conjugating enzyme E2 T (132-140)
FKYNKPAFL

SEQ ID NO: 17301 - protein, 9 aa, synthetic construct
  REGION 1..9: note = Bestrophin-3 (595-603)
FLGSSHTSL

SEQ ID NO: 17302 - protein, 10 aa, synthetic construct
  REGION 1..10: note = Heparan-alpha-glucosaminide N-acetyltransferase (512-521)
FLGVQAGKIL

SEQ ID NO: 17303 - protein, 9 aa, synthetic construct
  REGION 1..9: note = Acetyl-CoA carboxylase 1 (2174-2182)
FLIPIYHQV

SEQ ID NO: 17304 - protein, 9 aa, synthetic construct
  REGION 1..9: note = Rho-associated protein kinase 1 (316-324)
FLTDREVRL

SEQ ID NO: 17305 - protein, 9 aa, synthetic construct
  REGION 1..9: note = AP-2 complex subunit alpha-1 (812-820)
FLTPPLLSV

SEQ ID NO: 17306 - protein, 10 aa, synthetic construct
  REGION 1..10: note = Bardet-Biedl syndrome 1 protein (409-418)
FLYNEALYSL

SEQ ID NO: 17307 - protein, 9 aa, synthetic construct
  REGION 1..9: note = Adiponectin receptor protein 1 (163-171)
FMAPLQEKV

SEQ ID NO: 17308 - protein, 9 aa, synthetic construct
  REGION 1..9: note = Protein SGT1 homolog (332-340)
FMESGGTVL

SEQ ID NO: 17309 - protein, 9 aa, synthetic construct
  REGION 1..9: note = Cyclin-dependent kinase 13 (131-139)
FPITAIREI

SEQ ID NO: 17310 - protein, 9 aa, synthetic construct
  REGION 1..9: note = Actin-like protein 6A (99-107)
FQAILDHTY

SEQ ID NO: 17311 - protein, 10 aa, synthetic construct
  REGION 1..10: note = Nuclear pore complex protein Nup153 (1395-1404)
FQFGSSTTNF

SEQ ID NO: 17312 - protein, 9 aa, synthetic construct
  REGION 1..9: note = Choline-phosphate cytidylyltransferase B (242-250)
FQNQVDKMK

SEQ ID NO: 17313 - protein, 9 aa, synthetic construct
  REGION 1..9: note = Fibrillin-3 (594-602)
FRCQCLGGL

SEQ ID NO: 17314 - protein, 9 aa, synthetic construct
  REGION 1..9: note = Polycystin-1 (3465-3473)
FSASDEDLI

SEQ ID NO: 17315 - protein, 9 aa, synthetic construct
  REGION 1..9: note = Chromodomain-helicase-DNA-binding protein 4 (167-175)
FSEEDYRTL

SEQ ID NO: 17316 - protein, 9 aa, synthetic construct
  REGION 1..9: note = Integrin beta-7 (227-235)
FSFHHVLSL

SEQ ID NO: 17317 - protein, 10 aa, synthetic construct
  REGION 1..10: note = GPALPP motifs-containing protein 1 (331-340)
FSHGKGNMFL

SEQ ID NO: 17318 - protein, 9 aa, synthetic construct
  REGION 1..9: note = Transcription intermediary factor 1-beta (125-133)
FSKDIVENY

SEQ ID NO: 17319 - protein, 9 aa, synthetic construct
  REGION 1..9: note = Meiosis arrest female protein 1 (1734-1742)
FSLAPITKL

SEQ ID NO: 17320 - protein, 8 aa, synthetic construct
  REGION 1..8: note = Chromosome transmission fidelity protein 8 homolog isoform 2 (371-378)
FSQSSGTL

SEQ ID NO: 17321 - protein, 9 aa, synthetic construct
  REGION 1..9: note = Protein PRRC2A (165-173)
FSREEFPTL

SEQ ID NO: 17322 - protein, 9 aa, synthetic construct
  REGION 1..9: note = V-type proton ATPase subunit D (79-87)
FSTTVIQNV

SEQ ID NO: 17323 - protein, 8 aa, synthetic construct
  REGION 1..8: note = Nodal modulator 2 (329-336)
FSVTGRVL

SEQ ID NO: 17324 - protein, 9 aa, synthetic construct
  REGION 1..9: note = ETS domain-containing protein Elk-3 (331-339)
FTAQTPNGL

SEQ ID NO: 17325 - protein, 10 aa, synthetic construct
  REGION 1..10: note = ATP synthase subunit delta, mitochondrial (40-49)
FTFASPTQVF

SEQ ID NO: 17326 - protein, 11 aa, synthetic construct
  REGION 1..11: note = E3 SUMO-protein ligase RanBP2 (1132-1142)
FTFHGPGKSVF

SEQ ID NO: 17327 - protein, 9 aa, synthetic construct
  REGION 1..9: note = Embigin (129-137)
FTIINSKQM

SEQ ID NO: 17328 - protein, 9 aa, synthetic construct
  REGION 1..9: note = Protein transport protein Sec23B (392-400)
FTKDFNGDF

SEQ ID NO: 17329 - protein, 9 aa, synthetic construct
  REGION 1..9: note = Protein TFG (363-371)
FTSLPGSTM

SEQ ID NO: 17330 - protein, 9 aa, synthetic construct
  REGION 1..9: note = Nuclear factor of activated T-cells, cytoplasmic 2 (454-462)
FTYHPVPAI

SEQ ID NO: 17331 - protein, 9 aa, synthetic construct
  REGION 1..9: note = Phosphomannomutase 2 (157-165)
FVADLRKEF

SEQ ID NO: 17332 - protein, 9 aa, synthetic construct
  REGION 1..9: note = V-type proton ATPase subunit G 1 (102-110)
FVCDIRPEI

SEQ ID NO: 17333 - protein, 9 aa, synthetic construct
  REGION 1..9: note = T-box transcription factor TBX20 (45-53)
FVEKSSCAQ

SEQ ID NO: 17334 - protein, 9 aa, synthetic construct
  REGION 1..9: note = Dual specificity protein phosphatase 4 (364-372)
FVFSFPVSV

SEQ ID NO: 17335 - protein, 9 aa, synthetic construct
  REGION 1..9: note = RNA-binding protein PNO1 (136-144)
FVKAFILGF

SEQ ID NO: 17336 - protein, 9 aa, synthetic construct
  REGION 1..9: note = Serine/threonine-protein kinase mTOR (725-733)
FVMPFLRKM

SEQ ID NO: 17337 - protein, 9 aa, synthetic construct
  REGION 1..9: note = 60S ribosomal protein L36 (39-47)
FVRDMIREV

SEQ ID NO: 17338 - protein, 9 aa, synthetic construct
  REGION 1..9: note = Melanoma-associated antigen C2 (265-273)
FVYGEPREL

SEQ ID NO: 17339 - protein, 9 aa, synthetic construct
  REGION 1..9: note = Beta-1,3-galactosyltransferase 5 (36-44)
FVYKKDGNF

SEQ ID NO: 17340 - protein, 9 aa, synthetic construct
  REGION 1..9: note = Olfactory receptor 12D2 (250-258)
FYAPVLFTY

SEQ ID NO: 17341 - protein, 9 aa, synthetic construct
  REGION 1..9: note = Laminin subunit alpha-5 (1849-1857)
FYRDVKGLF

SEQ ID NO: 17342 - protein, 9 aa, synthetic construct
  REGION 1..9: note = Erythrocyte band 7 integral membrane protein (75-83)
GAKGPGLFF

SEQ ID NO: 17343 - protein, 9 aa, synthetic construct
  REGION 1..9: note = Forkhead box protein O3 (542-550)
GALGGSRAL

SEQ ID NO: 17344 - protein, 9 aa, synthetic construct
  REGION 1..9: note = Tumor necrosis factor receptor superfamily member 18 (5-13)
GAMGAFRAL

SEQ ID NO: 17345 - protein, 9 aa, synthetic construct
  REGION 1..9: note = Leukocyte elastase inhibitor (309-317)
GARDIFISK

SEQ ID NO: 17346 - protein, 9 aa, synthetic construct
  REGION 1..9: note = Solute carrier family 22 member 9 (444-452)
GASALANTL

SEQ ID NO: 17347 - protein, 9 aa, synthetic construct
  REGION 1..9: note = Alpha-enolase (122-130)
GAVEKGVPL

SEQ ID NO: 17348 - protein, 9 aa, synthetic construct
  REGION 1..9: note = Importin subunit alpha-5 (169-177)
GAVPIFIEL

SEQ ID NO: 17349 - protein, 9 aa, synthetic construct
  REGION 1..9: note = 60S ribosomal protein L15 (2-10)
GAYKYIQEL

SEQ ID NO: 17350 - protein, 10 aa, synthetic construct
  REGION 1..10: note = Nuclease EXOG, mitochondrial (105-114)
GDADRKHCKF

SEQ ID NO: 17351 - protein, 9 aa, synthetic construct
  REGION 1..9: note = Lariat debranching enzyme (502-510)
GEDLTKVPL

SEQ ID NO: 17352 - protein, 8 aa, synthetic construct
  REGION 1..8: note = Leucine-rich repeat LGI family member 4 (2-9)
GGAGILLL

SEQ ID NO: 17353 - protein, 9 aa, synthetic construct
  REGION 1..9: note = Anosmin-1 (412-420)
GGIQTQLPF

SEQ ID NO: 17354 - protein, 9 aa, synthetic construct
  REGION 1..9: note = Cold-inducible RNA-binding protein (133-141)
GGYGGSRDY

SEQ ID NO: 17355 - protein, 9 aa, synthetic construct
  REGION 1..9: note = Acetyl-CoA carboxylase 2 (352-360)
GHASENPKL

SEQ ID NO: 17356 - protein, 9 aa, synthetic construct
  REGION 1..9: note = Guanine nucleotide-binding protein subunit beta-5 (365-373)
GHENRVSTL

SEQ ID NO: 17357 - protein, 11 aa, synthetic construct
  REGION 1..11: note = Rho guanine nucleotide exchange factor 2 (157-167)
GHFNDESPLGL

SEQ ID NO: 17358 - protein, 9 aa, synthetic construct
  REGION 1..9: note = DNA polymerase delta catalytic subunit (784-792)
GHFPSPIRL

SEQ ID NO: 17359 - protein, 9 aa, synthetic construct
  REGION 1..9: note = Factor VIII intron 22 protein (163-171)
GHFQRAAQL

SEQ ID NO: 17360 - protein, 9 aa, synthetic construct
  REGION 1..9: note = Centrosomal protein of 152 kDa (1140-1148)
GHHAQPLAL

SEQ ID NO: 17361 - protein, 9 aa, synthetic construct
  REGION 1..9: note = Inosine-5'-monophosphate dehydrogenase 2 (371-379)
GHIAKALAL

SEQ ID NO: 17362 - protein, 10 aa, synthetic construct
  REGION 1..10: note = Selenocysteine-specific elongation factor (14-23)
GHIDSGKTAL

SEQ ID NO: 17363 - protein, 9 aa, synthetic construct
  REGION 1..9: note = Hairy/enhancer-of-split related with YRPW motif protein 1 (176-184)
GHIPWGTVF

SEQ ID NO: 17364 - protein, 12 aa, synthetic construct
  REGION 1..12: note = Transcription factor AP-1 (86-97)
GHITTTPTPTQF

SEQ ID NO: 17365 - protein, 9 aa, synthetic construct
  REGION 1..9: note = U5 small nuclear ribonucleoprotein 40 kDa protein (107-115)
GHSGAVMEL

SEQ ID NO: 17366 - protein, 9 aa, synthetic construct
  REGION 1..9: note = Scaffold attachment factor B1 (858-866)
GHSGPGHMM

SEQ ID NO: 17367 - protein, 9 aa, synthetic construct
  REGION 1..9: note = Proteasome subunit beta type-4 (125-133)
GHSYSPRAI

SEQ ID NO: 17368 - protein, 11 aa, synthetic construct
  REGION 1..11: note = Inactive tyrosine-protein kinase transmembrane receptor ROR1 (927-937)
GHTESMISAEL

SEQ ID NO: 17369 - protein, 9 aa, synthetic construct
  REGION 1..9: note = Cytochrome b-c1 complex subunit 2, mitochondrial (445-453)
GHTPFVDEL

SEQ ID NO: 17370 - protein, 9 aa, synthetic construct
  REGION 1..9: note = Tetratricopeptide repeat protein 8 (471-479)
GHVEQARAL

SEQ ID NO: 17371 - protein, 9 aa, synthetic construct
  REGION 1..9: note = Centromere protein M (155-163)
GHVPGVSAL

SEQ ID NO: 17372 - protein, 9 aa, synthetic construct
  REGION 1..9: note = Inosine-5'-monophosphate dehydrogenase 1 (371-379)
GHVVKALAL

SEQ ID NO: 17373 - protein, 9 aa, synthetic construct
  REGION 1..9: note = Ubiquitin carboxyl-terminal hydrolase 1 (592-600)
GHYTASVKV

SEQ ID NO: 17374 - protein, 9 aa, synthetic construct
  REGION 1..9: note = Tubulin beta-4B chain (104-112)
GHYTEGAEL

SEQ ID NO: 17375 - protein, 9 aa, synthetic construct
  REGION 1..9: note = Ubiquitin-like-conjugating enzyme ATG3 (118-126)
GITEAVKEI

SEQ ID NO: 17376 - protein, 9 aa, synthetic construct
  REGION 1..9: note = Phospholipid phosphatase 5 (2-10)
GKAAAAVAF

SEQ ID NO: 17377 - protein, 10 aa, synthetic construct
  REGION 1..10: note = Sterol regulatory element-binding protein 2 (933-942)
GKADGQQSSF

SEQ ID NO: 17378 - protein, 9 aa, synthetic construct
  REGION 1..9: note = Zinc finger protein 623 (381-389)
GKAFFLSSY

SEQ ID NO: 17379 - protein, 9 aa, synthetic construct
  REGION 1..9: note = Zinc finger protein 791 (278-286)
GKAFIFPSF

SEQ ID NO: 17380 - protein, 9 aa, synthetic construct
  REGION 1..9: note = Zinc finger protein with KRAB and SCAN domains 1 (495-503)
GKAFNRNSY

SEQ ID NO: 17381 - protein, 9 aa, synthetic construct
  REGION 1..9: note = Zinc finger protein 397 (375-383)
GKAFSQSSY

SEQ ID NO: 17382 - protein, 9 aa, synthetic construct
  REGION 1..9: note = Zinc finger protein 791 (362-370)
GKAFSRISY

SEQ ID NO: 17383 - protein, 10 aa, synthetic construct
  REGION 1..10: note = Zinc finger protein 460 (370-379)
GKAFTHYSTY

SEQ ID NO: 17384 - protein, 9 aa, synthetic construct
  REGION 1..9: note = Coatomer subunit delta (13-21)
GKAIVSRQF

SEQ ID NO: 17385 - protein, 9 aa, synthetic construct
  REGION 1..9: note = O-acetyl-ADP-ribose deacetylase MACROD1 (208-216)
GKAKITGGY

SEQ ID NO: 17386 - protein, 9 aa, synthetic construct
  REGION 1..9: note = 2',3'-cyclic-nucleotide 3'-phosphodiesterase (260-268)
GKAPGAEEY

SEQ ID NO: 17387 - protein, 9 aa, synthetic construct
  REGION 1..9: note = Ig lambda chain V-II region BOH (43-51)
GKAPKLIIY

SEQ ID NO: 17388 - protein, 9 aa, synthetic construct
  REGION 1..9: note = Ig kappa chain V-I region Walker (63-71)
GKAPKLLIY

SEQ ID NO: 17389 - protein, 9 aa, synthetic construct
  REGION 1..9: note = Filamin-B (876-884)
GKAPLNVQF

SEQ ID NO: 17390 - protein, 9 aa, synthetic construct
  REGION 1..9: note = SH2 domain-containing protein 3C (476-484)
GKASPSPSL

SEQ ID NO: 17391 - protein, 9 aa, synthetic construct
  REGION 1..9: note = Parafibromin (46-54)
GKEGQPREY

SEQ ID NO: 17392 - protein, 9 aa, synthetic construct
  REGION 1..9: note = 40S ribosomal protein S11 (29-37)
GKEKLPRYY

SEQ ID NO: 17393 - protein, 10 aa, synthetic construct
  REGION 1..10: note = Transmembrane emp24 domain-containing protein 10 (93-102)
GKFAFTTEDY

SEQ ID NO: 17394 - protein, 9 aa, synthetic construct
  REGION 1..9: note = ER membrane protein complex subunit 1 (28-36)
GKFDWRQQY

SEQ ID NO: 17395 - protein, 9 aa, synthetic construct
  REGION 1..9: note = Nucleolar protein 56 (40-48)
GKFHSIVRL

SEQ ID NO: 17396 - protein, 10 aa, synthetic construct
  REGION 1..10: note = Putative ATP-dependent RNA helicase DHX30 (1039-1048)
GKFKPNSVTY

SEQ ID NO: 17397 - protein, 10 aa, synthetic construct
  REGION 1..10: note = Kinesin light chain 1 (395-404)
GKFKQAETLY

SEQ ID NO: 17398 - protein, 10 aa, synthetic construct
  REGION 1..10: note = Transcription activator BRG1 (851-860)
GKFNVLLTTY

SEQ ID NO: 17399 - protein, 9 aa, synthetic construct
  REGION 1..9: note = 60S ribosomal protein L10a (132-140)
GKFPSLLTH

SEQ ID NO: 17400 - protein, 9 aa, synthetic construct
  REGION 1..9: note = Microtubule-associated protein RP/EB family member 1 (99-107)
GKFQDNFEF

SEQ ID NO: 17401 - protein, 12 aa, synthetic construct
  REGION 1..12: note = Glycogen phosphorylase, brain form (810-821)
GKFSSDRTITEY

SEQ ID NO: 17402 - protein, 9 aa, synthetic construct
  REGION 1..9: note = 60S ribosome subunit biogenesis protein NIP7 homolog (71-79)
GKFTKTHKF

SEQ ID NO: 17403 - protein, 11 aa, synthetic construct
  REGION 1..11: note = ATP-dependent RNA helicase DDX19B (186-196)
GKFYPELKLAY

SEQ ID NO: 17404 - protein, 9 aa, synthetic construct
  REGION 1..9: note = Serine/threonine-protein kinase pim-2 (39-47)
GKGGFGTVF

SEQ ID NO: 17405 - protein, 9 aa, synthetic construct
  REGION 1..9: note = Tyrosine-protein kinase Fer (570-578)
GKGNFGEVY

SEQ ID NO: 17406 - protein, 9 aa, synthetic construct
  REGION 1..9: note = YTH domain-containing family protein 2 (451-459)
GKGPVYLLF

SEQ ID NO: 17407 - protein, 10 aa, synthetic construct
  REGION 1..10: note = MYCBP-associated protein (359-368)
GKGWPFSAVT

SEQ ID NO: 17408 - protein, 11 aa, synthetic construct
  REGION 1..11: note = 60S ribosomal protein L36a (16-26)
GKHQPHKVTQY

SEQ ID NO: 17409 - protein, 9 aa, synthetic construct
  REGION 1..9: note = SWI/SNF complex subunit SMARCC1 (93-101)
GKHVTNPAF

SEQ ID NO: 17410 - protein, 9 aa, synthetic construct
  REGION 1..9: note = DNA damage-binding protein 1 (59-67)
GKIAVMELF

SEQ ID NO: 17411 - protein, 10 aa, synthetic construct
  REGION 1..10: note = Acidic leucine-rich nuclear phosphoprotein 32 family member B (32-41)
GKIEGLTAEF

SEQ ID NO: 17412 - protein, 9 aa, synthetic construct
  REGION 1..9: note = Endothelial differentiation-related factor 1 (122-130)
GKIERAIGL

SEQ ID NO: 17413 - protein, 9 aa, synthetic construct
  REGION 1..9: note = Heterogeneous nuclear ribonucleoprotein A3 (150-158)
GKIETIEVM

SEQ ID NO: 17414 - protein, 9 aa, synthetic construct
  REGION 1..9: note = Peptidyl-prolyl cis-trans isomerase B (203-211)
GKIEVEKPF

SEQ ID NO: 17415 - protein, 11 aa, synthetic construct
  REGION 1..11: note = Macrophage migration inhibitory factor (66-76)
GKIGGAQNRSY

SEQ ID NO: 17416 - protein, 9 aa, synthetic construct
  REGION 1..9: note = Phospholipase ABHD3 (231-239)
GKIGSKTPL

SEQ ID NO: 17417 - protein, 9 aa, synthetic construct
  REGION 1..9: note = D-dopachrome decarboxylase (109-117)
GKIGTVMTF

SEQ ID NO: 17418 - protein, 9 aa, synthetic construct
  REGION 1..9: note = Protein YIF1B (244-252)
GKIGYYLVL

SEQ ID NO: 17419 - protein, 9 aa, synthetic construct
  REGION 1..9: note = Nucleolar GTP-binding protein 2 (54-62)
GKIIKPLQY

SEQ ID NO: 17420 - protein, 10 aa, synthetic construct
  REGION 1..10: note = Nucleolar protein 58 (195-204)
GKIISDNLTY

SEQ ID NO: 17421 - protein, 9 aa, synthetic construct
  REGION 1..9: note = Nucleolar GTP-binding protein 2 (534-542)
GKINVVPQF

SEQ ID NO: 17422 - protein, 9 aa, synthetic construct
  REGION 1..9: note = Protein YIPF5 (145-153)
GKIQFGYVY

SEQ ID NO: 17423 - protein, 10 aa, synthetic construct
  REGION 1..10: note = TBC1 domain family member 9 (117-126)
GKIQGIIAEY

SEQ ID NO: 17424 - protein, 9 aa, synthetic construct
  REGION 1..9: note = Nucleolysin TIAR (121-129)
GKISDARVV

SEQ ID NO: 17425 - protein, 9 aa, synthetic construct
  REGION 1..9: note = Ras GTPase-activating protein 1 (354-362)
GKISKQEAY

SEQ ID NO: 17426 - protein, 8 aa, synthetic construct
  REGION 1..8: note = Solute carrier family 35 member E2B (319-326)
GKISPVTF

SEQ ID NO: 17427 - protein, 9 aa, synthetic construct
  REGION 1..9: note = 40S ribosomal protein S4, X isoform (167-175)
GKITDFIKF

SEQ ID NO: 17428 - protein, 9 aa, synthetic construct
  REGION 1..9: note = Calcium channel flower homolog (141-149)
GKKGDAISY

SEQ ID NO: 17429 - protein, 9 aa, synthetic construct
  REGION 1..9: note = Signal recognition particle receptor subunit beta (226-234)
GKKGKEFEF

SEQ ID NO: 17430 - protein, 9 aa, synthetic construct
  REGION 1..9: note = Sodium-coupled neutral amino acid transporter 2 (58-66)
GKKKYETEF

SEQ ID NO: 17431 - protein, 9 aa, synthetic construct
  REGION 1..9: note = Barrier-to-autointegration factor (31-39)
GKKLEERGF

SEQ ID NO: 17432 - protein, 9 aa, synthetic construct
  REGION 1..9: note = Amyloid protein-binding protein 2 (502-510)
GKKLFGEGY

SEQ ID NO: 17433 - protein, 9 aa, synthetic construct
  REGION 1..9: note = C-1-tetrahydrofolate synthase, cytoplasmic (332-340)
GKLAREIGL

SEQ ID NO: 17434 - protein, 9 aa, synthetic construct
  REGION 1..9: note = Sterol regulatory element-binding protein 2 (730-738)
GKLGFLASY

SEQ ID NO: 17435 - protein, 10 aa, synthetic construct
  REGION 1..10: note = T-cell-specific surfaceoprotein CD28 (88-97)
GKLGNESVTF

SEQ ID NO: 17436 - protein, 11 aa, synthetic construct
  REGION 1..11: note = T-cell-specific surfaceoprotein CD28 (88-98)
GKLGNESVTFY

SEQ ID NO: 17437 - protein, 9 aa, synthetic construct
  REGION 1..9: note = Guanine nucleotide-binding protein G(I)/G(S)/G(T) subunit beta-1 (77-85)
GKLIIWDSY

SEQ ID NO: 17438 - protein, 8 aa, synthetic construct
  REGION 1..8: note = Sterile alpha motif domain-containing protein 9-like (1531-1538)
GKLISVEY

SEQ ID NO: 17439 - protein, 9 aa, synthetic construct
  REGION 1..9: note = RNA-binding protein FUS (331-339)
GKLKGEATV

SEQ ID NO: 17440 - protein, 9 aa, synthetic construct
  REGION 1..9: note = Hydroxysteroid dehydrogenase-like protein 2 (382-390)
GKLKPTMAF

SEQ ID NO: 17441 - protein, 9 aa, synthetic construct
  REGION 1..9: note = Endoplasmic reticulum-Golgi intermediate compartment protein 3 (5-13)
GKLKQFDAY

SEQ ID NO: 17442 - protein, 9 aa, synthetic construct
  REGION 1..9: note = Tripartite motif-containing protein 26 (302-310)
GKLLRDLEY

SEQ ID NO: 17443 - protein, 10 aa, synthetic construct
  REGION 1..10: note = Protein PRRC2A (1913-1922)
GKLPAGGVLY

SEQ ID NO: 17444 - protein, 9 aa, synthetic construct
  REGION 1..9: note = RRP12-like protein (5-13)
GKLPSGVSA

SEQ ID NO: 17445 - protein, 8 aa, synthetic construct
  REGION 1..8: note = Proteasome subunit alpha type-2 (17-24)
GKLVQIEY

SEQ ID NO: 17446 - protein, 9 aa, synthetic construct
  REGION 1..9: note = Pre-mRNA-processing-splicing factor 8 (1462-1470)
GKLWNLNNY

SEQ ID NO: 17447 - protein, 9 aa, synthetic construct
  REGION 1..9: note = Non-specific lipid-transfer protein (510-518)
GKMNPQSAF

SEQ ID NO: 17448 - protein, 9 aa, synthetic construct
  REGION 1..9: note = Vitamin D 25-hydroxylase (287-295)
GKNDPSSTF

SEQ ID NO: 17449 - protein, 9 aa, synthetic construct
  REGION 1..9: note = FACT complex subunit SSRP1 (142-150)
GKNEVTLEF

SEQ ID NO: 17450 - protein, 9 aa, synthetic construct
  REGION 1..9: note = Protein disulfide-isomerase A2 (395-403)
GKNFEQVAF

SEQ ID NO: 17451 - protein, 9 aa, synthetic construct
  REGION 1..9: note = Embigin (163-171)
GKNKPLISY

SEQ ID NO: 17452 - protein, 9 aa, synthetic construct
  REGION 1..9: note = Pre-mRNA-splicing factor SLU7 (301-309)
GKNPDEVSY

SEQ ID NO: 17453 - protein, 10 aa, synthetic construct
  REGION 1..10: note = Cell cycle control protein 50A (320-329)
GKNPFLGIAY

SEQ ID NO: 17454 - protein, 9 aa, synthetic construct
  REGION 1..9: note = WD repeat-containing protein 75 (353-361)
GKPGHLQFY

SEQ ID NO: 17455 - protein, 10 aa, synthetic construct
  REGION 1..10: note = Aurora kinase A (325-334)
GKPPFEANTY

SEQ ID NO: 17456 - protein, 9 aa, synthetic construct
  REGION 1..9: note = Filamin-B (863-871)
GKPTHFTVY

SEQ ID NO: 17457 - protein, 9 aa, synthetic construct
  REGION 1..9: note = Dual specificity protein phosphatase 5 (162-170)
GKPVVNVSY

SEQ ID NO: 17458 - protein, 9 aa, synthetic construct
  REGION 1..9: note = Actin-like protein 6A (61-69)
GKQGGPTYY

SEQ ID NO: 17459 - protein, 10 aa, synthetic construct
  REGION 1..10: note = F-box only protein 21 (396-405)
GKREGIDQSY

SEQ ID NO: 17460 - protein, 9 aa, synthetic construct
  REGION 1..9: note = Probable ATP-dependent RNA helicase DDX5 (500-508)
GKRGGFNTF

SEQ ID NO: 17461 - protein, 9 aa, synthetic construct
  REGION 1..9: note = Hydroxymethylglutaryl-CoA synthase, cytoplasmic (367-375)
GKRIGVFSY

SEQ ID NO: 17462 - protein, 9 aa, synthetic construct
  REGION 1..9: note = Protein S100-A4 (47-55)
GKRTDEAAF

SEQ ID NO: 17463 - protein, 9 aa, synthetic construct
  REGION 1..9: note = Cell cycle progression protein 1 (410-418)
GKSDSPNVY

SEQ ID NO: 17464 - protein, 9 aa, synthetic construct
  REGION 1..9: note = C-myc promoter-binding protein (1422-1430)
GKSEVTSSF

SEQ ID NO: 17465 - protein, 9 aa, synthetic construct
  REGION 1..9: note = Zinc finger protein 213 (379-387)
GKSFSRSAY

SEQ ID NO: 17466 - protein, 9 aa, synthetic construct
  REGION 1..9: note = Zinc finger protein 557 (403-411)
GKSFTSNSY

SEQ ID NO: 17467 - protein, 9 aa, synthetic construct
  REGION 1..9: note = Nuclear receptor corepressor 1 (1214-1222)
GKSGHILSY

SEQ ID NO: 17468 - protein, 11 aa, synthetic construct
  REGION 1..11: note = Polyadenylate-binding protein 1 (228-238)
GKSKGFGFVSF

SEQ ID NO: 17469 - protein, 9 aa, synthetic construct
  REGION 1..9: note = Constitutive coactivator of PPAR-gamma-like protein 1 (209-217)
GKSLTTSQY

SEQ ID NO: 17470 - protein, 10 aa, synthetic construct
  REGION 1..10: note = Heterogeneous nuclear ribonucleoprotein U (185-194)
GKSSGPTSLF

SEQ ID NO: 17471 - protein, 11 aa, synthetic construct
  REGION 1..11: note = Elongation factor 1-alpha 1 (19-29)
GKSTTTGHLIY

SEQ ID NO: 17472 - protein, 9 aa, synthetic construct
  REGION 1..9: note = Zinc finger protein 845 (333-341)
GKTFSQTSY

SEQ ID NO: 17473 - protein, 10 aa, synthetic construct
  REGION 1..10: note = Sodium-coupled neutral amino acid transporter 5 (46-55)
GKTSFGMSVF

SEQ ID NO: 17474 - protein, 9 aa, synthetic construct
  REGION 1..9: note = Ras-related protein Rab-6A (25-33)
GKTSLITRF

SEQ ID NO: 17475 - protein, 9 aa, synthetic construct
  REGION 1..9: note = ATP-dependent RNA helicase DHX8 (593-601)
GKTTQITQY

SEQ ID NO: 17476 - protein, 9 aa, synthetic construct
  REGION 1..9: note = Pre-mRNA-splicing factor ATP-dependent RNA helicase PRP16 (560-568)
GKTTQLTQY

SEQ ID NO: 17477 - protein, 9 aa, synthetic construct
  REGION 1..9: note = ATP-dependent RNA helicase DHX36 (235-243)
GKTTQVTQF

SEQ ID NO: 17478 - protein, 9 aa, synthetic construct
  REGION 1..9: note = Adenosylhomocysteinase (213-221)
GKVAVVAGY

SEQ ID NO: 17479 - protein, 9 aa, synthetic construct
  REGION 1..9: note = Major facilitator superfamily domain-containing protein 1 (287-295)
GKVFFTEKF

SEQ ID NO: 17480 - protein, 9 aa, synthetic construct
  REGION 1..9: note = Zinc finger protein 264 (349-357)
GKVFKHRSY

SEQ ID NO: 17481 - protein, 9 aa, synthetic construct
  REGION 1..9: note = DNA polymerase delta catalytic subunit (997-1005)
GKVGGLLAF

SEQ ID NO: 17482 - protein, 11 aa, synthetic construct
  REGION 1..11: note = Estradiol 17-beta-dehydrogenase 8 (159-169)
GKVGNVGQTNY

SEQ ID NO: 17483 - protein, 10 aa, synthetic construct
  REGION 1..10: note = WD repeat domain phosphoinositide-interacting protein 4 (281-290)
GKVGPMIGQY

SEQ ID NO: 17484 - protein, 9 aa, synthetic construct
  REGION 1..9: note = Dual specificity protein phosphatase 16 (647-655)
GKVGSQSSF

SEQ ID NO: 17485 - protein, 9 aa, synthetic construct
  REGION 1..9: note = Protein lin-7 homolog C (165-173)
GKVKLVVRY

SEQ ID NO: 17486 - protein, 9 aa, synthetic construct
  REGION 1..9: note = Apoptosis-associated speck-like protein containing a CARD (138-146)
GKVLTDEQY

SEQ ID NO: 17487 - protein, 9 aa, synthetic construct
  REGION 1..9: note = E3 ubiquitin-protein ligase synoviolin (58-66)
GKVMGKVFF

SEQ ID NO: 17488 - protein, 9 aa, synthetic construct
  REGION 1..9: note = Poly (ADP-ribose) polymerase 1 (46-54)
GKVPHWYHF

SEQ ID NO: 17489 - protein, 9 aa, synthetic construct
  REGION 1..9: note = DNA-directed RNA polymerase II subunit RPB1 (572-580)
GKVPQPAIL

SEQ ID NO: 17490 - protein, 9 aa, synthetic construct
  REGION 1..9: note = Nucleolar complex protein 2 homolog (575-583)
GKVQENSAY

SEQ ID NO: 17491 - protein, 11 aa, synthetic construct
  REGION 1..11: note = Major vault protein (396-406)
GKVRAVIGSTY

SEQ ID NO: 17492 - protein, 9 aa, synthetic construct
  REGION 1..9: note = 40S ribosomal protein S4, X isoform (74-82)
GKVRTDITY

SEQ ID NO: 17493 - protein, 9 aa, synthetic construct
  REGION 1..9: note = 40S ribosomal protein S4, Y isoform 1 (74-82)
GKVRVDVTY

SEQ ID NO: 17494 - protein, 9 aa, synthetic construct
  REGION 1..9: note = ATP-dependent RNA helicase DHX8 (270-278)
GKVTSIMQF

SEQ ID NO: 17495 - protein, 9 aa, synthetic construct
  REGION 1..9: note = G2/mitotic-specific cyclin-B2 (323-331)
GKWNLKQQY

SEQ ID NO: 17496 - protein, 9 aa, synthetic construct
  REGION 1..9: note = Transcription initiation factor IIE subunit beta (135-143)
GKYAFKPKY

SEQ ID NO: 17497 - protein, 9 aa, synthetic construct
  REGION 1..9: note = Interferon-induced protein 44 (72-80)
GKYASIILF

SEQ ID NO: 17498 - protein, 9 aa, synthetic construct
  REGION 1..9: note = WD repeat-containing protein 44 (704-712)
GKYAVIGTY

SEQ ID NO: 17499 - protein, 9 aa, synthetic construct
  REGION 1..9: note = Kinesin light chain 1 (353-361)
GKYEEVEYY

SEQ ID NO: 17500 - protein, 9 aa, synthetic construct
  REGION 1..9: note = Transketolase (139-147)
GKYFDKASY

SEQ ID NO: 17501 - protein, 9 aa, synthetic construct
  REGION 1..9: note = Golgi pH regulator A (283-291)
GKYFNFLGY

SEQ ID NO: 17502 - protein, 11 aa, synthetic construct
  REGION 1..11: note = Ethanolamine kinase 1 (257-267)
GKYFSLIPTGF

SEQ ID NO: 17503 - protein, 12 aa, synthetic construct
  REGION 1..12: note = Solute carrier family 35 member B1 (38-49)
GKYGEGAKQETF

SEQ ID NO: 17504 - protein, 11 aa, synthetic construct
  REGION 1..11: note = Phosphatidylinositol 3-kinase regulatory subunit alpha (388-398)
GKYGFSDPLTF

SEQ ID NO: 17505 - protein, 9 aa, synthetic construct
  REGION 1..9: note = DNA-directed RNA polymerase II subunit RPB7 (40-48)
GKYGFVIAV

SEQ ID NO: 17506 - protein, 9 aa, synthetic construct
  REGION 1..9: note = Neutral amino acid transporter A (295-303)
GKYIFASIL

SEQ ID NO: 17507 - protein, 9 aa, synthetic construct
  REGION 1..9: note = ER membrane protein complex subunit 3 (65-73)
GKYIPKQSF

SEQ ID NO: 17508 - protein, 10 aa, synthetic construct
  REGION 1..10: note = Protein phosphatase 1K, mitochondrial (350-359)
GKYKNSEINF

SEQ ID NO: 17509 - protein, 10 aa, synthetic construct
  REGION 1..10: note = Peptidyl-prolyl cis-trans isomerase FKBP4 (284-293)
GKYKQALLQY

SEQ ID NO: 17510 - protein, 9 aa, synthetic construct
  REGION 1..9: note = Protein transport protein Sec31A (487-495)
GKYLELLGY

SEQ ID NO: 17511 - protein, 9 aa, synthetic construct
  REGION 1..9: note = Catalase (272-280)
GKYPSWTFY

SEQ ID NO: 17512 - protein, 9 aa, synthetic construct
  REGION 1..9: note = Transmembrane protein 222 (176-184)
GKYVSVGAF

SEQ ID NO: 17513 - protein, 9 aa, synthetic construct
  REGION 1..9: note = 5'-nucleotidase domain-containing protein 1 (122-130)
GKYYFYDNY

SEQ ID NO: 17514 - protein, 8 aa, synthetic construct
  REGION 1..8: note = Plasmalemma vesicle-associated protein (2-9)
GLAMEHGG

SEQ ID NO: 17515 - protein, 9 aa, synthetic construct
  REGION 1..9: note = DC-STAMP domain-containing protein 2 (243-251)
GLASLVQVF

SEQ ID NO: 17516 - protein, 8 aa, synthetic construct
  REGION 1..8: note = Protein sel-1 homolog 3 (550-557)
GLHQISSI

SEQ ID NO: 17517 - protein, 9 aa, synthetic construct
  REGION 1..9: note = 40S ribosomal protein S3a (61-69)
GLKGRVFEV

SEQ ID NO: 17518 - protein, 9 aa, synthetic construct
  REGION 1..9: note = Integrin beta-7 (317-325)
GLYSRSTEF

SEQ ID NO: 17519 - protein, 11 aa, synthetic construct
  REGION 1..11: note = Solute carrier family 25 member 46 (162-172)
GMGSTFIVQGV

SEQ ID NO: 17520 - protein, 9 aa, synthetic construct
  REGION 1..9: note = DNA damage-binding protein 1 (56-64)
GMYGKIAVM

SEQ ID NO: 17521 - protein, 9 aa, synthetic construct
  REGION 1..9: note = 60S ribosomal protein L8 (131-139)
GNYATVISH

SEQ ID NO: 17522 - protein, 9 aa, synthetic construct
  REGION 1..9: note = Huntingtin (77-85)
GPAVAEEPL

SEQ ID NO: 17523 - protein, 9 aa, synthetic construct
  REGION 1..9: note = Salivary acidic proline-rich phosphoprotein 1/2 (83-91)
GPPPPQGKP

SEQ ID NO: 17524 - protein, 11 aa, synthetic construct
  REGION 1..11: note = Basic salivary proline-rich protein 2 (59-69)
GPPPQGGNQPQ

SEQ ID NO: 17525 - protein, 11 aa, synthetic construct
  REGION 1..11: note = Basic salivary proline-rich protein 4 (248-258)
GPPQQEGNKPQ

SEQ ID NO: 17526 - protein, 11 aa, synthetic construct
  REGION 1..11: note = Basic salivary proline-rich protein 2 (368-378)
GPPQQEGNNPQ

SEQ ID NO: 17527 - protein, 9 aa, synthetic construct
  REGION 1..9: note = Ig kappa chain V-I region WAT (41-49)
GQAPKVLIY

SEQ ID NO: 17528 - protein, 10 aa, synthetic construct
  REGION 1..10: note = Thioredoxin domain-containing protein 5 (57-66)
GQDPHSKHLY

SEQ ID NO: 17529 - protein, 9 aa, synthetic construct
  REGION 1..9: note = Protein FAM179B (288-296)
GQDRFQSYI

SEQ ID NO: 17530 - protein, 9 aa, synthetic construct
  REGION 1..9: note = Nucleosome-remodeling factor subunit BPTF (843-851)
GQEGKYRVY

SEQ ID NO: 17531 - protein, 9 aa, synthetic construct
  REGION 1..9: note = Rho GTPase-activating protein 1 (183-191)
GQKIFYVNY

SEQ ID NO: 17532 - protein, 9 aa, synthetic construct
  REGION 1..9: note = Endoplasmic reticulum lectin 1 (141-149)
GQKINIHEY

SEQ ID NO: 17533 - protein, 9 aa, synthetic construct
  REGION 1..9: note = Chromodomain-helicase-DNA-binding protein 2 (905-913)
GQKKQVNIY

SEQ ID NO: 17534 - protein, 9 aa, synthetic construct
  REGION 1..9: note = Immunoglobulin superfamily member 10 (2429-2437)
GQKPVILTY

SEQ ID NO: 17535 - protein, 9 aa, synthetic construct
  REGION 1..9: note = Fibronectin (679-687)
GQLISIQQY

SEQ ID NO: 17536 - protein, 9 aa, synthetic construct
  REGION 1..9: note = Lysine-specific demethylase 4B (78-86)
GQSGLFTQY

SEQ ID NO: 17537 - protein, 9 aa, synthetic construct
  REGION 1..9: note = FERM domain-containing protein 3 (200-208)
GQSPPVAEF

SEQ ID NO: 17538 - protein, 9 aa, synthetic construct
  REGION 1..9: note = RNA-binding protein EWS (62-70)
GQTAYATSY

SEQ ID NO: 17539 - protein, 8 aa, synthetic construct
  REGION 1..8: note = Guanine nucleotide-binding protein subunit beta-2-like 1 (295-302)
GQTLFAGY

SEQ ID NO: 17540 - protein, 9 aa, synthetic construct
  REGION 1..9: note = Protein ELYS (807-815)
GQVKLIQGF

SEQ ID NO: 17541 - protein, 9 aa, synthetic construct
  REGION 1..9: note = Zinc finger protein 507 (577-585)
GQVKTGISM

SEQ ID NO: 17542 - protein, 10 aa, synthetic construct
  REGION 1..10: note = Probable ATP-dependent RNA helicase DDX17 (631-640)
GQYTYGQGTY

SEQ ID NO: 17543 - protein, 9 aa, synthetic construct
  REGION 1..9: note = LanC-like protein 1 (154-162)
GRIGYIYAL

SEQ ID NO: 17544 - protein, 9 aa, synthetic construct
  REGION 1..9: note = Gamma-interferon-inducible protein 16 (464-472)
GSHFPGPFM

SEQ ID NO: 17545 - protein, 9 aa, synthetic construct
  REGION 1..9: note = NADH dehydrogenase (ubiquinone) 1 alpha subcomplex subunit 8 (164-172)
GSRFYFWTK

SEQ ID NO: 17546 - protein, 9 aa, synthetic construct
  REGION 1..9: note = Proteasome subunit beta type-4 (73-81)
GSYGSLARF

SEQ ID NO: 17547 - protein, 10 aa, synthetic construct
  REGION 1..10: note = Egl nine homolog 2 (272-281)
GSYVINGRTK

SEQ ID NO: 17548 - protein, 9 aa, synthetic construct
  REGION 1..9: note = Olfactory receptor 8I2 (193-201)
GTEMVSFVL

SEQ ID NO: 17549 - protein, 9 aa, synthetic construct
  REGION 1..9: note = Dual adapter for phosphotyrosine and 3-phosphotyrosine and 3-phosphoinositide (165-173)
GTKEGYLTK

SEQ ID NO: 17550 - protein, 9 aa, synthetic construct
  REGION 1..9: note = Large proline-rich protein BAG6 (391-399)
GTRPPPTPN

SEQ ID NO: 17551 - protein, 9 aa, synthetic construct
  REGION 1..9: note = Splicing factor 3A subunit 2 (300-308)
GVHPPAPGV

SEQ ID NO: 17552 - protein, 9 aa, synthetic construct
  REGION 1..9: note = Centrosomal protein of 76 kDa (224-232)
GVTSLTVEL

SEQ ID NO: 17553 - protein, 9 aa, synthetic construct
  REGION 1..9: note = Programmed cell death 6-interacting protein (279-287)
HAAELIKTV

SEQ ID NO: 17554 - protein, 9 aa, synthetic construct
  REGION 1..9: note = UDP-glucose:glycoprotein glucosyltransferase 1 (566-574)
HAFQTLTHI

SEQ ID NO: 17555 - protein, 9 aa, synthetic construct
  REGION 1..9: note = Methionine synthase (601-609)
HAIKSGMDM

SEQ ID NO: 17556 - protein, 9 aa, synthetic construct
  REGION 1..9: note = KH domain-containing, RNA-binding, signal transduction-associated protein 1 (246-254)
HAMEEVKKF

SEQ ID NO: 17557 - protein, 9 aa, synthetic construct
  REGION 1..9: note = Dynein heavy chain 6, axonemal (1387-1395)
HARDIVTEL

SEQ ID NO: 17558 - protein, 8 aa, synthetic construct
  REGION 1..8: note = Putative sodium-coupled neutral amino acid transporter 10 (698-705)
HAVLLQVI

SEQ ID NO: 17559 - protein, 11 aa, synthetic construct
  REGION 1..11: note = HLA class I histocompatibility antigen, A-30 alpha chain (140-150)
HAYDGKDYIAL

SEQ ID NO: 17560 - protein, 8 aa, synthetic construct
  REGION 1..8: note = Tryptophan 2,3-dioxygenase (67-74)
HDEHLFII

SEQ ID NO: 17561 - protein, 8 aa, synthetic construct
  REGION 1..8: note = G1/S-specific cyclin-D2 (157-164)
HDFIEHIL

SEQ ID NO: 17562 - protein, 9 aa, synthetic construct
  REGION 1..9: note = Splicing factor, proline- and glutamine-rich (29-37)
HDFRSPPPG

SEQ ID NO: 17563 - protein, 9 aa, synthetic construct
  REGION 1..9: note = MKL/myocardin-like protein 1 (831-839)
HDGPEPLSL

SEQ ID NO: 17564 - protein, 9 aa, synthetic construct
  REGION 1..9: note = Rho guanine nucleotide exchange factor 5 (1170-1178)
HEDQKLQEV

SEQ ID NO: 17565 - protein, 11 aa, synthetic construct
  REGION 1..11: note = Dedicator of cytokinesis protein 9 (933-943)
HEELTKSMTTI

SEQ ID NO: 17566 - protein, 9 aa, synthetic construct
  REGION 1..9: note = Protein phosphatase 2C-like domain-containing protein 1 (71-79)
HEIDLTGIF

SEQ ID NO: 17567 - protein, 10 aa, synthetic construct
  REGION 1..10: note = Histatin-3 (34-43)
HEKHHSHRGY

SEQ ID NO: 17568 - protein, 9 aa, synthetic construct
  REGION 1..9: note = Protocadherin-9 (1071-1079)
HEPVGSGTL

SEQ ID NO: 17569 - protein, 9 aa, synthetic construct
  REGION 1..9: note = 60S ribosomal protein L36a-like (90-98)
HFELGGDKK

SEQ ID NO: 17570 - protein, 11 aa, synthetic construct
  REGION 1..11: note = Cancer/testis antigen 47A (120-130)
HFVLLDMVHSL

SEQ ID NO: 17571 - protein, 10 aa, synthetic construct
  REGION 1..10: note = Neuroblast differentiation-associated protein AHNAK (5535-5544)
HGAAPDISVK

SEQ ID NO: 17572 - protein, 8 aa, synthetic construct
  REGION 1..8: note = Centrosomal protein of 97 kDa (154-161)
HGNIITSL

SEQ ID NO: 17573 - protein, 9 aa, synthetic construct
  REGION 1..9: note = Ubiquitin carboxyl-terminal hydrolase 19 (562-570)
HHAFQPSKL

SEQ ID NO: 17574 - protein, 8 aa, synthetic construct
  REGION 1..8: note = E3 SUMO-protein ligase CBX4 (399-406)
HHAVGLNL

SEQ ID NO: 17575 - protein, 10 aa, synthetic construct
  REGION 1..10: note = Thyroid hormone receptor-associated protein 3 (641-650)
HHFGSSGMTL

SEQ ID NO: 17576 - protein, 9 aa, synthetic construct
  REGION 1..9: note = Beta-galactoside alpha-2,6-sialyltransferase 2 (354-362)
HHFIDSSLY

SEQ ID NO: 17577 - protein, 9 aa, synthetic construct
  REGION 1..9: note = Protein virilizer homolog (679-687)
HHFLELVTL

SEQ ID NO: 17578 - protein, 8 aa, synthetic construct
  REGION 1..8: note = L-aminoadipate-semialdehyde dehydrogenase-phosphopantetheinyl transferase (238-245)
HHFVAVAL

SEQ ID NO: 17579 - protein, 9 aa, synthetic construct
  REGION 1..9: note = PCNA-interacting partner (385-393)
HHGTSILTL

SEQ ID NO: 17580 - protein, 9 aa, synthetic construct
  REGION 1..9: note = E3 SUMO-protein ligase CBX4 (398-406)
HHHAVGLNL

SEQ ID NO: 17581 - protein, 9 aa, synthetic construct
  REGION 1..9: note = Transcriptional repressor protein YY1 (76-84)
HHHHHPPMI

SEQ ID NO: 17582 - protein, 10 aa, synthetic construct
  REGION 1..10: note = Histone deacetylase complex subunit SAP130 (202-211)
HHIMTTNVQM

SEQ ID NO: 17583 - protein, 10 aa, synthetic construct
  REGION 1..10: note = Vacuolar protein sorting-associated protein 11 homolog (554-563)
HHIPEQTTQL

SEQ ID NO: 17584 - protein, 8 aa, synthetic construct
  REGION 1..8: note = Drebrin-like protein (362-369)
HHIQGQGL

SEQ ID NO: 17585 - protein, 9 aa, synthetic construct
  REGION 1..9: note = Protein PRRC2B (1834-1842)
HHIQRAIGL

SEQ ID NO: 17586 - protein, 9 aa, synthetic construct
  REGION 1..9: note = Fructose-bisphosphate aldolase A (220-228)
HHIYLEGTL

SEQ ID NO: 17587 - protein, 9 aa, synthetic construct
  REGION 1..9: note = Queuine tRNA-ribosyltransferase subunit QTRTD1 (365-373)
HHLLVTNEL

SEQ ID NO: 17588 - protein, 9 aa, synthetic construct
  REGION 1..9: note = MMS19 nucleotide excision repair protein homolog (102-110)
HHLVIPSVL

SEQ ID NO: 17589 - protein, 9 aa, synthetic construct
  REGION 1..9: note = Transcription factor ETV6 (170-178)
HHNPPTIEL

SEQ ID NO: 17590 - protein, 9 aa, synthetic construct
  REGION 1..9: note = Eukaryotic translation initiation factor 2-alpha kinase 1 (119-127)
HHNRAITHL

SEQ ID NO: 17591 - protein, 9 aa, synthetic construct
  REGION 1..9: note = Fas apoptotic inhibitory molecule 3 (176-184)
HHSSPTTQI

SEQ ID NO: 17592 - protein, 9 aa, synthetic construct
  REGION 1..9: note = Gamma-glutamyltranspeptidase 1 (532-540)
HHTQIASTF

SEQ ID NO: 17593 - protein, 9 aa, synthetic construct
  REGION 1..9: note = Zinc transporter 6 (356-364)
HHVIPMPLL

SEQ ID NO: 17594 - protein, 11 aa, synthetic construct
  REGION 1..11: note = GLTSCR1-like protein (415-425)
HHVQTINGQLL

SEQ ID NO: 17595 - protein, 9 aa, synthetic construct
  REGION 1..9: note = Nucleolar RNA helicase 2 (218-226)
HHVYSGKDL

SEQ ID NO: 17596 - protein, 9 aa, synthetic construct
  REGION 1..9: note = GMP synthase (glutamine-hydrolyzing) (22-30)
HHYEGAVVI

SEQ ID NO: 17597 - protein, 10 aa, synthetic construct
  REGION 1..10: note = GMP synthase (glutamine-hydrolyzing) (22-31)
HHYEGAVVIL

SEQ ID NO: 17598 - protein, 9 aa, synthetic construct
  REGION 1..9: note = Membralin (447-455)
HHYELPAIL

SEQ ID NO: 17599 - protein, 10 aa, synthetic construct
  REGION 1..10: note = G/T mismatch-specific thymine DNAosylase (150-159)
HHYPGPGNHF

SEQ ID NO: 17600 - protein, 9 aa, synthetic construct
  REGION 1..9: note = Suppression of tumorigenicity 18 protein (571-579)
HIAAAAAIL

SEQ ID NO: 17601 - protein, 9 aa, synthetic construct
  REGION 1..9: note = Cytochrome b-c1 complex subunit 9 (55-63)
HIKHKYENK

SEQ ID NO: 17602 - protein, 9 aa, synthetic construct
  REGION 1..9: note = Phosphofurin acidic cluster sorting protein 1 (734-742)
HKFPDEDSY

SEQ ID NO: 17603 - protein, 9 aa, synthetic construct
  REGION 1..9: note = Heterogeneous nuclear ribonucleoproteins C1/C2 (49-57)
HKGFAFVQY

SEQ ID NO: 17604 - protein, 9 aa, synthetic construct
  REGION 1..9: note = 60S ribosomal protein L31 (30-38)
HKRIHGVGF

SEQ ID NO: 17605 - protein, 9 aa, synthetic construct
  REGION 1..9: note = Mitotic checkpoint serine/threonine-protein kinase BUB1 (430-438)
HKVANTSSF

SEQ ID NO: 17606 - protein, 10 aa, synthetic construct
  REGION 1..10: note = JmjC domain-containing protein 8 (176-185)
HKVDLPFQEY

SEQ ID NO: 17607 - protein, 10 aa, synthetic construct
  REGION 1..10: note = 40S ribosomal protein S7 (168-177)
HKVETFSGVY

SEQ ID NO: 17608 - protein, 10 aa, synthetic construct
  REGION 1..10: note = Histone-lysine N-methyltransferase SETD2 (1284-1293)
HKYQQNAEQY

SEQ ID NO: 17609 - protein, 11 aa, synthetic construct
  REGION 1..11: note = Protein S100-A4 (17-27)
HKYSGKEGDKF

SEQ ID NO: 17610 - protein, 9 aa, synthetic construct
  REGION 1..9: note = Calpain-12 (697-705)
HLDGGEGVI

SEQ ID NO: 17611 - protein, 12 aa, synthetic construct
  REGION 1..12: note = Tyrosine-protein kinase BAZ1B (365-376)
HLEEMMKMMSPN

SEQ ID NO: 17612 - protein, 11 aa, synthetic construct
  REGION 1..11: note = Catalase (466-476)
HLKDAQIFIQK

SEQ ID NO: 17613 - protein, 9 aa, synthetic construct
  REGION 1..9: note = Neuropeptide FF receptor 1 (270-278)
HMLVMVALF

SEQ ID NO: 17614 - protein, 10 aa, synthetic construct
  REGION 1..10: note = AP-1 complex subunit gamma-like 2 (576-585)
HMRAAILEKM

SEQ ID NO: 17615 - protein, 9 aa, synthetic construct
  REGION 1..9: note = Uncharacterized protein C2orf16 (1260-1268)
HNLPESDSE

SEQ ID NO: 17616 - protein, 9 aa, synthetic construct
  REGION 1..9: note = E3 ubiquitin-protein ligase CBL (213-221)
HPISSGLEA

SEQ ID NO: 17617 - protein, 9 aa, synthetic construct
  REGION 1..9: note = Ubiquitin-conjugating enzyme E2 variant 3 (119-127)
HPKSVIVGL

SEQ ID NO: 17618 - protein, 10 aa, synthetic construct
  REGION 1..10: note = Microtubule-associated protein 4 (1128-1137)
HPTLSGGGDQ

SEQ ID NO: 17619 - protein, 9 aa, synthetic construct
  REGION 1..9: note = Ataxin-2-like protein (896-904)
HQAGQAPHL

SEQ ID NO: 17620 - protein, 9 aa, synthetic construct
  REGION 1..9: note = Programmed cell death protein 10 (162-170)
HQKKEFVKY

SEQ ID NO: 17621 - protein, 10 aa, synthetic construct
  REGION 1..10: note = Transcription activator BRG1 (178-187)
HQLRAQIMAY

SEQ ID NO: 17622 - protein, 9 aa, synthetic construct
  REGION 1..9: note = RNA polymerase-associated protein CTR9 homolog (714-722)
HQNTEVVLY

SEQ ID NO: 17623 - protein, 10 aa, synthetic construct
  REGION 1..10: note = Ubiquitin-conjugating enzyme E2 J1 (238-247)
HQPTQPVAKN

SEQ ID NO: 17624 - protein, 11 aa, synthetic construct
  REGION 1..11: note = 40S ribosomal protein S29 (3-13)
HQQLYWSHPRK

SEQ ID NO: 17625 - protein, 12 aa, synthetic construct
  REGION 1..12: note = MORC family CW-type zinc finger protein 3 (528-539)
HQVPPQSEPESN

SEQ ID NO: 17626 - protein, 9 aa, synthetic construct
  REGION 1..9: note = TBC1 domain family member 2B (111-119)
HSAGAVTVL

SEQ ID NO: 17627 - protein, 9 aa, synthetic construct
  REGION 1..9: note = Serine palmitoyltransferase 2 (403-411)
HSAVYATSL

SEQ ID NO: 17628 - protein, 9 aa, synthetic construct
  REGION 1..9: note = Protein virilizer homolog (1566-1574)
HSELERSFL

SEQ ID NO: 17629 - protein, 8 aa, synthetic construct
  REGION 1..8: note = Hematopoietic SH2 domain-containing protein (62-69)
HSHVGYTL

SEQ ID NO: 17630 - protein, 9 aa, synthetic construct
  REGION 1..9: note = Thrombospondin type-1 domain-containing protein 7B (289-297)
HSKSWAIEI

SEQ ID NO: 17631 - protein, 9 aa, synthetic construct
  REGION 1..9: note = Paired box protein Pax-9 (196-204)
HSVTDILGI

SEQ ID NO: 17632 - protein, 9 aa, synthetic construct
  REGION 1..9: note = Proteasome subunit beta type-4 (134-142)
HSWLTRAMY

SEQ ID NO: 17633 - protein, 9 aa, synthetic construct
  REGION 1..9: note = E3 SUMO-protein ligase RanBP2 (3152-3160)
HTGPGLLSM

SEQ ID NO: 17634 - protein, 9 aa, synthetic construct
  REGION 1..9: note = Cytochrome b-245 heavy chain (115-123)
HTIAHLFNV

SEQ ID NO: 17635 - protein, 10 aa, synthetic construct
  REGION 1..10: note = Heterogeneous nuclear ribonucleoproteins A2/B1 (163-172)
HTINGHNAEV

SEQ ID NO: 17636 - protein, 10 aa, synthetic construct
  REGION 1..10: note = Heterogeneous nuclear ribonucleoprotein A3 (189-198)
HTINGHNCEV

SEQ ID NO: 17637 - protein, 9 aa, synthetic construct
  REGION 1..9: note = Mucin-3A (1830-1838)
HTLTPSTAL

SEQ ID NO: 17638 - protein, 9 aa, synthetic construct
  REGION 1..9: note = Eukaryotic translation initiation factor 4 gamma 1 (354-362)
HTVEIHEPN

SEQ ID NO: 17639 - protein, 9 aa, synthetic construct
  REGION 1..9: note = Nucleoporin NUP188 homolog (1451-1459)
HTVGFILQL

SEQ ID NO: 17640 - protein, 9 aa, synthetic construct
  REGION 1..9: note = 5-phosphohydroxy-L-lysine phospho-lyase (166-174)
HVAPLPDTY

SEQ ID NO: 17641 - protein, 10 aa, synthetic construct
  REGION 1..10: note = Extracellular matrix protein FRAS1 (3372-3381)
HVCSNLVTTY

SEQ ID NO: 17642 - protein, 10 aa, synthetic construct
  REGION 1..10: note = Cystatin-B (58-67)
HVGDEDFVHL

SEQ ID NO: 17643 - protein, 12 aa, synthetic construct
  REGION 1..12: note = Microtubule-associated protein 4 (1016-1027)
HVPGGGNVQIQN

SEQ ID NO: 17644 - protein, 9 aa, synthetic construct
  REGION 1..9: note = Transmembrane protein 201 (96-104)
HVVSSAPSL

SEQ ID NO: 17645 - protein, 11 aa, synthetic construct
  REGION 1..11: note = Cholinesterase (154-164)
HVYDGKFLARV

SEQ ID NO: 17646 - protein, 9 aa, synthetic construct
  REGION 1..9: note = 60S ribosomal protein L26 (61-69)
HYKGQQIGK

SEQ ID NO: 17647 - protein, 9 aa, synthetic construct
  REGION 1..9: note = HEAT repeat-containing protein 1 (578-586)
IAADILIKE

SEQ ID NO: 17648 - protein, 10 aa, synthetic construct
  REGION 1..10: note = Protein PRRC2C (2676-2685)
IAGRSTTPTS

SEQ ID NO: 17649 - protein, 9 aa, synthetic construct
  REGION 1..9: note = Endoplasmic reticulum lectin 1 (311-319)
IAIGSQPVL

SEQ ID NO: 17650 - protein, 9 aa, synthetic construct
  REGION 1..9: note = Monoacylglycerol lipase ABHD12 (84-92)
IAIPFLIKL

SEQ ID NO: 17651 - protein, 9 aa, synthetic construct
  REGION 1..9: note = Endoplasmin (166-174)
IAKSGTSEF

SEQ ID NO: 17652 - protein, 9 aa, synthetic construct
  REGION 1..9: note = Msx2-interacting protein (613-621)
IAPKITSVI

SEQ ID NO: 17653 - protein, 9 aa, synthetic construct
  REGION 1..9: note = Mitotic checkpoint serine/threonine-protein kinase BUB1 (382-390)
IAPPVPLKA

SEQ ID NO: 17654 - protein, 9 aa, synthetic construct
  REGION 1..9: note = Large proline-rich protein BAG6 (504-512)
IARPTPPQA

SEQ ID NO: 17655 - protein, 9 aa, synthetic construct
  REGION 1..9: note = Low-density lipoprotein receptor-related protein 1B (2001-2009)
IAVHPEKGL

SEQ ID NO: 17656 - protein, 10 aa, synthetic construct
  REGION 1..10: note = Signal transducing adapter molecule 2 (292-301)
IDEDKMDRAL

SEQ ID NO: 17657 - protein, 9 aa, synthetic construct
  REGION 1..9: note = Omega-amidase NIT2 (246-254)
IDLKKLAEI

SEQ ID NO: 17658 - protein, 9 aa, synthetic construct
  REGION 1..9: note = DENN domain-containing protein 1A (78-86)
IDSKQRFGF

SEQ ID NO: 17659 - protein, 9 aa, synthetic construct
  REGION 1..9: note = Histone-lysine N-methyltransferase EHMT1 (1232-1240)
IEAGEQLGF

SEQ ID NO: 17660 - protein, 8 aa, synthetic construct
  REGION 1..8: note = Basic helix-loop-helix domain-containing protein KIAA2018 (1140-1147)
IFDQENLE

SEQ ID NO: 17661 - protein, 9 aa, synthetic construct
  REGION 1..9: note = Neutral cholesterol ester hydrolase 1 (382-390)
IFTSWPTNF

SEQ ID NO: 17662 - protein, 9 aa, synthetic construct
  REGION 1..9: note = Olfactory receptor 5H15 (106-114)
IGVTTECFL

SEQ ID NO: 17663 - protein, 9 aa, synthetic construct
  REGION 1..9: note = Heterogeneous nuclear ribonucleoprotein U (749-757)
IGYPYPRAP

SEQ ID NO: 17664 - protein, 9 aa, synthetic construct
  REGION 1..9: note = BolA-like protein 2 (67-75)
IHAFEQKTL

SEQ ID NO: 17665 - protein, 9 aa, synthetic construct
  REGION 1..9: note = Histone H3.1 (113-121)
IHAKRVTIM

SEQ ID NO: 17666 - protein, 9 aa, synthetic construct
  REGION 1..9: note = Two pore calcium channel protein 1 (44-52)
IHDSQAPSL

SEQ ID NO: 17667 - protein, 9 aa, synthetic construct
  REGION 1..9: note = Probable ATP-dependent RNA helicase DDX41 (201-209)
IHHPTPIQI

SEQ ID NO: 17668 - protein, 9 aa, synthetic construct
  REGION 1..9: note = T-complex protein 1 subunit eta (281-289)
IHHSGAKVV

SEQ ID NO: 17669 - protein, 10 aa, synthetic construct
  REGION 1..10: note = T-complex protein 1 subunit eta (281-290)
IHHSGAKVVL

SEQ ID NO: 17670 - protein, 9 aa, synthetic construct
  REGION 1..9: note = Leucine-rich repeat-containing protein 16A (481-489)
IHNITSLDI

SEQ ID NO: 17671 - protein, 9 aa, synthetic construct
  REGION 1..9: note = UDP-N-acetylglucosamine-peptide N-acetylglucosaminyltransferase 110 kDa subunit (628-636)
IHQDGIHIL

SEQ ID NO: 17672 - protein, 9 aa, synthetic construct
  REGION 1..9: note = Calcium/calmodulin-dependent protein kinase type 1 (286-294)
IHQSVSEQI

SEQ ID NO: 17673 - protein, 10 aa, synthetic construct
  REGION 1..10: note = G-protein coupled receptor 98 (3507-3516)
IHSFTPASGI

SEQ ID NO: 17674 - protein, 9 aa, synthetic construct
  REGION 1..9: note = Wee1-like protein kinase (417-425)
IHSMSLVHM

SEQ ID NO: 17675 - protein, 9 aa, synthetic construct
  REGION 1..9: note = Toll-like receptor 9 (587-595)
IHSQVSQQL

SEQ ID NO: 17676 - protein, 9 aa, synthetic construct
  REGION 1..9: note = Tumor suppressor candidate 2 (99-107)
IHVDFPVIL

SEQ ID NO: 17677 - protein, 9 aa, synthetic construct
  REGION 1..9: note = DNA replication licensing factor MCM5 (694-702)
IIKDFTKQK

SEQ ID NO: 17678 - protein, 10 aa, synthetic construct
  REGION 1..10: note = Kelch-like protein 6 (114-123)
IIKGVDAETM

SEQ ID NO: 17679 - protein, 10 aa, synthetic construct
  REGION 1..10: note = Transcription factor Sp2 (277-286)
IIQAGNNLLI

SEQ ID NO: 17680 - protein, 9 aa, synthetic construct
  REGION 1..9: note = Stress-associated endoplasmic reticulum protein 1 (58-66)
IIQSIRMGM

SEQ ID NO: 17681 - protein, 9 aa, synthetic construct
  REGION 1..9: note = HEAT repeat-containing protein 5B (1006-1014)
IITTVGPEL

SEQ ID NO: 17682 - protein, 9 aa, synthetic construct
  REGION 1..9: note = Annexin A7 (223-231)
IKAAFKTSY

SEQ ID NO: 17683 - protein, 10 aa, synthetic construct
  REGION 1..10: note = Tetraspanin-8 (198-207)
IKDFLAKNLI

SEQ ID NO: 17684 - protein, 9 aa, synthetic construct
  REGION 1..9: note = Copine-3 (135-143)
IKDNRVVLF

SEQ ID NO: 17685 - protein, 9 aa, synthetic construct
  REGION 1..9: note = AP-3 complex subunit mu-1 (102-110)
IKDNVVIVY

SEQ ID NO: 17686 - protein, 9 aa, synthetic construct
  REGION 1..9: note = Geminin (90-98)
IKENPSSQY

SEQ ID NO: 17687 - protein, 9 aa, synthetic construct
  REGION 1..9: note = X-ray repair cross-complementing protein 5 (647-655)
IKFSEEQRF

SEQ ID NO: 17688 - protein, 9 aa, synthetic construct
  REGION 1..9: note = Serine/threonine-protein kinase TAO1 (83-91)
IKHPNSIEY

SEQ ID NO: 17689 - protein, 9 aa, synthetic construct
  REGION 1..9: note = 60S ribosomal protein L12 (98-106)
IKHSGNITF

SEQ ID NO: 17690 - protein, 9 aa, synthetic construct
  REGION 1..9: note = Alkyldihydroxyacetonephosphate synthase, peroxisomal (379-387)
IKIRPVPEY

SEQ ID NO: 17691 - protein, 9 aa, synthetic construct
  REGION 1..9: note = Probable ATP-dependent RNA helicase DDX52 (255-263)
IKISEGTGF

SEQ ID NO: 17692 - protein, 9 aa, synthetic construct
  REGION 1..9: note = Nucleolar and spindle-associated protein 1 (108-116)
IKISNPTEF

SEQ ID NO: 17693 - protein, 9 aa, synthetic construct
  REGION 1..9: note = Serine/threonine-protein kinase 17A (79-87)
IKKDSGKEF

SEQ ID NO: 17694 - protein, 9 aa, synthetic construct
  REGION 1..9: note = Dynein light chain 1, cytoplasmic (42-50)
IKKEFDKKY

SEQ ID NO: 17695 - protein, 9 aa, synthetic construct
  REGION 1..9: note = Endoplasmin (472-480)
IKKIADDKY

SEQ ID NO: 17696 - protein, 10 aa, synthetic construct
  REGION 1..10: note = Elongation factor 2 (570-579)
IKKSDPVVSY

SEQ ID NO: 17697 - protein, 9 aa, synthetic construct
  REGION 1..9: note = DNA ligase 1 (608-616)
IKLPSVTSF

SEQ ID NO: 17698 - protein, 9 aa, synthetic construct
  REGION 1..9: note = Acetyl-coenzyme A transporter 1 (305-313)
IKMPAVLTF

SEQ ID NO: 17699 - protein, 9 aa, synthetic construct
  REGION 1..9: note = Ribulose-phosphate 3-epimerase (119-127)
IKPGTSVEY

SEQ ID NO: 17700 - protein, 8 aa, synthetic construct
  REGION 1..8: note = Serine/threonine-protein kinase tousled-like 1 (482-489)
IKPPIIHY

SEQ ID NO: 17701 - protein, 10 aa, synthetic construct
  REGION 1..10: note = Eukaryotic translation initiation factor 5B (366-375)
IKRLEELEAK

SEQ ID NO: 17702 - protein, 9 aa, synthetic construct
  REGION 1..9: note = F-box only protein 11 (714-722)
IKTDSNPTL

SEQ ID NO: 17703 - protein, 10 aa, synthetic construct
  REGION 1..10: note = 60S ribosomal protein L11 (117-126)
IKYDPSIGIY

SEQ ID NO: 17704 - protein, 9 aa, synthetic construct
  REGION 1..9: note = Ubiquitin carboxyl-terminal hydrolase 40 (723-731)
ILIQDSHDD

SEQ ID NO: 17705 - protein, 9 aa, synthetic construct
  REGION 1..9: note = E3 ubiquitin-protein ligase UBR4 (654-662)
ILNFITSSM

SEQ ID NO: 17706 - protein, 9 aa, synthetic construct
  REGION 1..9: note = ATP-dependent RNA helicase DDX18 (529-537)
ILRPEELGF

SEQ ID NO: 17707 - protein, 11 aa, synthetic construct
  REGION 1..11: note = Trace amine-associated receptor 6 (212-222)
IMIILYGNIFL

SEQ ID NO: 17708 - protein, 9 aa, synthetic construct
  REGION 1..9: note = DNA polymerase delta subunit 2 (258-266)
INKAKYLTK

SEQ ID NO: 17709 - protein, 9 aa, synthetic construct
  REGION 1..9: note = 40S ribosomal protein S18 (5-13)
IPEKFQHIL

SEQ ID NO: 17710 - protein, 9 aa, synthetic construct
  REGION 1..9: note = Nuclear factor of activated T-cells, cytoplasmic 2 (331-339)
IPESSGRIV

SEQ ID NO: 17711 - protein, 8 aa, synthetic construct
  REGION 1..8: note = Nuclear factor erythroid 2-related factor 2 (443-450)
IPFPVEKI

SEQ ID NO: 17712 - protein, 9 aa, synthetic construct
  REGION 1..9: note = Tetra-peptide repeat homeobox protein 1 (109-117)
IPGPLPGSI

SEQ ID NO: 17713 - protein, 9 aa, synthetic construct
  REGION 1..9: note = DNA replication licensing factor MCM6 (79-87)
IQEEFYRVY

SEQ ID NO: 17714 - protein, 11 aa, synthetic construct
  REGION 1..11: note = Poly (ADP-ribose) polymerase 8 (10-20)
IQKDIDVVIQK

SEQ ID NO: 17715 - protein, 9 aa, synthetic construct
  REGION 1..9: note = DNA-directed RNA polymerase II subunit RPB4 (134-142)
IQTKRSFQY

SEQ ID NO: 17716 - protein, 9 aa, synthetic construct
  REGION 1..9: note = Serine/threonine-protein phosphatase 4 regulatory subunit 2 (40-48)
IQWSQFKGY

SEQ ID NO: 17717 - protein, 9 aa, synthetic construct
  REGION 1..9: note = Maestro heat-like repeat-containing protein family member 1 (525-533)
IQYDAHASL

SEQ ID NO: 17718 - protein, 9 aa, synthetic construct
  REGION 1..9: note = Protein capicua homolog (862-870)
IRFTLPPGT

SEQ ID NO: 17719 - protein, 10 aa, synthetic construct
  REGION 1..10: note = Inactive serine/threonine-protein kinase VRK3 (422-431)
IRPSETLQKY

SEQ ID NO: 17720 - protein, 9 aa, synthetic construct
  REGION 1..9: note = Sphingomyelin phosphodiesterase 3 (179-187)
ISAASFSSL

SEQ ID NO: 17721 - protein, 9 aa, synthetic construct
  REGION 1..9: note = Sodium channel protein type 5 subunit alpha (1758-1766)
ISFLIVVNM

SEQ ID NO: 17722 - protein, 9 aa, synthetic construct
  REGION 1..9: note = Calsyntenin-1 (783-791)
ISNEFKVEV

SEQ ID NO: 17723 - protein, 10 aa, synthetic construct
  REGION 1..10: note = Calcineurin subunit B type 2 (107-116)
ISNGELFQVL

SEQ ID NO: 17724 - protein, 9 aa, synthetic construct
  REGION 1..9: note = AT-rich interactive domain-containing protein 2 (1322-1330)
ISNGPSLEL

SEQ ID NO: 17725 - protein, 9 aa, synthetic construct
  REGION 1..9: note = THUMP domain-containing protein 3 (77-85)
ISVESLAQV

SEQ ID NO: 17726 - protein, 9 aa, synthetic construct
  REGION 1..9: note = Methylcrotonoyl-CoA carboxylase subunit alpha, mitochondrial (547-555)
ISYTRNMTL

SEQ ID NO: 17727 - protein, 9 aa, synthetic construct
  REGION 1..9: note = Kelch repeat and BTB domain-containing protein 12 (77-85)
ITAESVSVL

SEQ ID NO: 17728 - protein, 9 aa, synthetic construct
  REGION 1..9: note = Titin (15022-15030)
ITKNTADLK

SEQ ID NO: 17729 - protein, 11 aa, synthetic construct
  REGION 1..11: note = Elongation factor 1-alpha 1 (170-180)
IVKEVSTYIKK

SEQ ID NO: 17730 - protein, 9 aa, synthetic construct
  REGION 1..9: note = Nucleolar protein 58 (41-49)
IVKLKHFEK

SEQ ID NO: 17731 - protein, 9 aa, synthetic construct
  REGION 1..9: note = NADH dehydrogenase (ubiquinone) 1 beta subcomplex subunit 1 (7-15)
IVRDHWVHV

SEQ ID NO: 17732 - protein, 9 aa, synthetic construct
  REGION 1..9: note = Serine/threonine-protein kinase RIO1 (209-217)
IYKTSILVF

SEQ ID NO: 17733 - protein, 9 aa, synthetic construct
  REGION 1..9: note = 60S ribosomal protein L4 (269-277)
KAASLKSNY

SEQ ID NO: 17734 - protein, 9 aa, synthetic construct
  REGION 1..9: note = Pre-mRNA-splicing factor SYF2 (221-229)
KAERFYGKY

SEQ ID NO: 17735 - protein, 9 aa, synthetic construct
  REGION 1..9: note = Zinc finger protein 215 (386-394)
KAFCRSSSL

SEQ ID NO: 17736 - protein, 9 aa, synthetic construct
  REGION 1..9: note = Integrin alpha-4 (236-244)
KAFLDKQNQ

SEQ ID NO: 17737 - protein, 9 aa, synthetic construct
  REGION 1..9: note = Spermatid perinuclear RNA-binding protein (384-392)
KAIDLMNAL

SEQ ID NO: 17738 - protein, 9 aa, synthetic construct
  REGION 1..9: note = Collagen alpha-6(VI) chain (501-509)
KAIENIRQM

SEQ ID NO: 17739 - protein, 9 aa, synthetic construct
  REGION 1..9: note = T-complex protein 1 subunit gamma (163-171)
KAISRWSSL

SEQ ID NO: 17740 - protein, 9 aa, synthetic construct
  REGION 1..9: note = 60S ribosomal protein L7 (53-61)
KAKHYHKEY

SEQ ID NO: 17741 - protein, 9 aa, synthetic construct
  REGION 1..9: note = N(G),N(G)-dimethylarginine dimethylaminohydrolase 1 (196-204)
KALKIMQQM

SEQ ID NO: 17742 - protein, 9 aa, synthetic construct
  REGION 1..9: note = Zinc finger protein 491 (250-258)
KALSRLISF

SEQ ID NO: 17743 - protein, 9 aa, synthetic construct
  REGION 1..9: note = Inositol 1,4,5-trisphosphate receptor type 3 (2312-2320)
KAMVMDMEF

SEQ ID NO: 17744 - protein, 10 aa, synthetic construct
  REGION 1..10: note = Mid1-interacting protein 1 (164-173)
KANILTNRYK

SEQ ID NO: 17745 - protein, 9 aa, synthetic construct
  REGION 1..9: note = Phosphoenolpyruvate carboxykinase, cytosolic (GTP) (547-555)
KASTKLTPI

SEQ ID NO: 17746 - protein, 9 aa, synthetic construct
  REGION 1..9: note = Zinc finger protein 726 (174-182)
KCKNCVKSF

SEQ ID NO: 17747 - protein, 9 aa, synthetic construct
  REGION 1..9: note = PDZ domain-containing protein 8 (559-567)
KDGNKPPPL

SEQ ID NO: 17748 - protein, 9 aa, synthetic construct
  REGION 1..9: note = Zinc finger protein 470 (79-87)
KDPWVIKGG

SEQ ID NO: 17749 - protein, 9 aa, synthetic construct
  REGION 1..9: note = HIV Tat-specific factor 1 (234-242)
KDYKKKLSM

SEQ ID NO: 17750 - protein, 9 aa, synthetic construct
  REGION 1..9: note = Glucose-6-phosphate translocase (212-220)
KEESTLQEL

SEQ ID NO: 17751 - protein, 9 aa, synthetic construct
  REGION 1..9: note = Protein bassoon (2970-2978)
KEIDAKLKY

SEQ ID NO: 17752 - protein, 9 aa, synthetic construct
  REGION 1..9: note = Nuclear fragile X mental retardation-interacting protein 2 (667-675)
KEMESIWNL

SEQ ID NO: 17753 - protein, 9 aa, synthetic construct
  REGION 1..9: note = Desmoplakin (423-431)
KEREKILEY

SEQ ID NO: 17754 - protein, 9 aa, synthetic construct
  REGION 1..9: note = Protein FAM91A1 (752-760)
KESLQNLLH

SEQ ID NO: 17755 - protein, 9 aa, synthetic construct
  REGION 1..9: note = Complement C4-A (189-197)
KEVYMPSSI

SEQ ID NO: 17756 - protein, 10 aa, synthetic construct
  REGION 1..10: note = Heterogeneous nuclear ribonucleoprotein U (565-574)
KFIEIAARKK

SEQ ID NO: 17757 - protein, 9 aa, synthetic construct
  REGION 1..9: note = Ciliogenesis-associated TTC17-interacting protein (302-310)
KFLDRKEEL

SEQ ID NO: 17758 - protein, 10 aa, synthetic construct
  REGION 1..10: note = Heparan-sulfate 6-O-sulfotransferase 2 (519-528)
KFLKGRLLQT

SEQ ID NO: 17759 - protein, 10 aa, synthetic construct
  REGION 1..10: note = 78 kDa glucose-regulated protein (113-122)
KFLPFKVVEK

SEQ ID NO: 17760 - protein, 9 aa, synthetic construct
  REGION 1..9: note = Protein SON (16-24)
KFREIQQEL

SEQ ID NO: 17761 - protein, 10 aa, synthetic construct
  REGION 1..10: note = Mothers against decapentaplegic homolog 9 (159-168)
KFRSASLHSE

SEQ ID NO: 17762 - protein, 11 aa, synthetic construct
  REGION 1..11: note = Stabilin-2 (1755-1765)
KFSNLIQDSGL

SEQ ID NO: 17763 - protein, 9 aa, synthetic construct
  REGION 1..9: note = Desmoglein-2 (639-647)
KGAKGFTPI

SEQ ID NO: 17764 - protein, 9 aa, synthetic construct
  REGION 1..9: note = Tumor necrosis factor ligand superfamily member 11 (257-265)
KGGSTKYWS

SEQ ID NO: 17765 - protein, 11 aa, synthetic construct
  REGION 1..11: note = Arginase-1 (153-163)
KGKIPDVPGFS

SEQ ID NO: 17766 - protein, 10 aa, synthetic construct
  REGION 1..10: note = Casein kinase I isoform delta (242-251)
KGYPSEFATY

SEQ ID NO: 17767 - protein, 11 aa, synthetic construct
  REGION 1..11: note = 40S ribosomal protein S17 (49-59)
KIAGYVTHLMK

SEQ ID NO: 17768 - protein, 9 aa, synthetic construct
  REGION 1..9: note = Repetin (489-497)
KIDRQDQSY

SEQ ID NO: 17769 - protein, 9 aa, synthetic construct
  REGION 1..9: note = T-complex protein 1 subunit eta (135-143)
KIKEIAVTV

SEQ ID NO: 17770 - protein, 9 aa, synthetic construct
  REGION 1..9: note = V-type proton ATPase catalytic subunit A (596-604)
KIKSDYAQL

SEQ ID NO: 17771 - protein, 9 aa, synthetic construct
  REGION 1..9: note = Potassium-transporting ATPase alpha chain 1 (737-745)
KKADIGVAM

SEQ ID NO: 17772 - protein, 9 aa, synthetic construct
  REGION 1..9: note = Histone H1.4 (63-71)
KKALAAAGY

SEQ ID NO: 17773 - protein, 9 aa, synthetic construct
  REGION 1..9: note = Ezrin (262-270)
KKAPDFVFY

SEQ ID NO: 17774 - protein, 9 aa, synthetic construct
  REGION 1..9: note = C1GALT1-specific chaperone 1 (160-168)
KKDPSQPFY

SEQ ID NO: 17775 - protein, 9 aa, synthetic construct
  REGION 1..9: note = Cofilin-1 (95-103)
KKEDLVFIF

SEQ ID NO: 17776 - protein, 10 aa, synthetic construct
  REGION 1..10: note = 116 kDa U5 small nuclear ribonucleoprotein component (421-430)
KKFFGEFTGF

SEQ ID NO: 17777 - protein, 9 aa, synthetic construct
  REGION 1..9: note = Squalene monooxygenase (15-23)
KKFGDFITL

SEQ ID NO: 17778 - protein, 9 aa, synthetic construct
  REGION 1..9: note = UPF0729 protein C18orf32 (17-25)
KKFLEPYIY

SEQ ID NO: 17779 - protein, 9 aa, synthetic construct
  REGION 1..9: note = Cholesterol 24-hydroxylase (94-102)
KKFLMSTKY

SEQ ID NO: 17780 - protein, 11 aa, synthetic construct
  REGION 1..11: note = Spermidine synthase (134-144)
KKFLPGMAIGY

SEQ ID NO: 17781 - protein, 10 aa, synthetic construct
  REGION 1..10: note = Probable global transcription activator SNF2L2 (1110-1119)
KKFNEPGSQY

SEQ ID NO: 17782 - protein, 10 aa, synthetic construct
  REGION 1..10: note = TRAF-interacting protein with FHA domain-containing protein A (76-85)
KKFNSSVLSF

SEQ ID NO: 17783 - protein, 12 aa, synthetic construct
  REGION 1..12: note = Nicotinamide phosphoribosyltransferase (330-341)
KKFPVTENSKGY

SEQ ID NO: 17784 - protein, 11 aa, synthetic construct
  REGION 1..11: note = Cell cycle progression protein 1 (523-533)
KKFSDSVKSTF

SEQ ID NO: 17785 - protein, 10 aa, synthetic construct
  REGION 1..10: note = 40S ribosomal protein S7 (85-94)
KKFSGKHVVF

SEQ ID NO: 17786 - protein, 11 aa, synthetic construct
  REGION 1..11: note = Lupus La protein (165-175)
KKFVETPGQKY

SEQ ID NO: 17787 - protein, 9 aa, synthetic construct
  REGION 1..9: note = Zinc finger protein 451 (219-227)
KKFVTQQQY

SEQ ID NO: 17788 - protein, 9 aa, synthetic construct
  REGION 1..9: note = Melanoma inhibitory activity protein 3 (67-75)
KKGDPVYVY

SEQ ID NO: 17789 - protein, 9 aa, synthetic construct
  REGION 1..9: note = Protein FAM173B (108-116)
KKGFTAVGY

SEQ ID NO: 17790 - protein, 9 aa, synthetic construct
  REGION 1..9: note = SEC14-like protein 1 (157-165)
KKGKEIIEY

SEQ ID NO: 17791 - protein, 9 aa, synthetic construct
  REGION 1..9: note = Na(+)/H(+) exchange regulatory cofactor NHE-RF1 (158-166)
KKGPSGYGF

SEQ ID NO: 17792 - protein, 9 aa, synthetic construct
  REGION 1..9: note = Serine/threonine-protein kinase RIO3 (353-361)
KKHILVMSF

SEQ ID NO: 17793 - protein, 9 aa, synthetic construct
  REGION 1..9: note = Heat shock protein HSP 90-beta (203-211)
KKHSQFIGY

SEQ ID NO: 17794 - protein, 9 aa, synthetic construct
  REGION 1..9: note = Dynactin subunit 3 (59-67)
KKIEDLIKY

SEQ ID NO: 17795 - protein, 9 aa, synthetic construct
  REGION 1..9: note = 60S ribosomal protein L23a (88-96)
KKIEDNNTL

SEQ ID NO: 17796 - protein, 10 aa, synthetic construct
  REGION 1..10: note = Nardilysin (992-1001)
KKIEEFLSSF

SEQ ID NO: 17797 - protein, 9 aa, synthetic construct
  REGION 1..9: note = Leydig cell tumor 10 kDa protein homolog (59-67)
KKIEHDVVM

SEQ ID NO: 17798 - protein, 9 aa, synthetic construct
  REGION 1..9: note = Brain-specific angiogenesis inhibitor 1-associated protein 2-like protein 1 (106-114)
KKIELDVKY

SEQ ID NO: 17799 - protein, 10 aa, synthetic construct
  REGION 1..10: note = General transcription factor 3C polypeptide 4 (563-572)
KKIESSGVTY

SEQ ID NO: 17800 - protein, 10 aa, synthetic construct
  REGION 1..10: note = T-complex protein 1 subunit gamma (353-362)
KKIGDEYFTF

SEQ ID NO: 17801 - protein, 9 aa, synthetic construct
  REGION 1..9: note = Gamma-interferon-inducible protein 16 (256-264)
KKIIIISDY

SEQ ID NO: 17802 - protein, 9 aa, synthetic construct
  REGION 1..9: note = Synaptojanin-2 (121-129)
KKILSSGVF

SEQ ID NO: 17803 - protein, 9 aa, synthetic construct
  REGION 1..9: note = Golgin-45 (320-328)
KKIPSTVEF

SEQ ID NO: 17804 - protein, 9 aa, synthetic construct
  REGION 1..9: note = RNA exonuclease 4 (342-350)
KKIRDTQKY

SEQ ID NO: 17805 - protein, 9 aa, synthetic construct
  REGION 1..9: note = 60S ribosomal protein L23a (38-46)
KKIRTSPTF

SEQ ID NO: 17806 - protein, 9 aa, synthetic construct
  REGION 1..9: note = Stress-induced-phosphoprotein 1 (237-245)
KKKDFDTAL

SEQ ID NO: 17807 - protein, 10 aa, synthetic construct
  REGION 1..10: note = Protein DEK (143-152)
KKKEEMLKKF

SEQ ID NO: 17808 - protein, 9 aa, synthetic construct
  REGION 1..9: note = Protein KIAA2022 (1378-1386)
KKKINSGSQ

SEQ ID NO: 17809 - protein, 9 aa, synthetic construct
  REGION 1..9: note = Regulatory factor X-associated protein (175-183)
KKKKSDQAL

SEQ ID NO: 17810 - protein, 9 aa, synthetic construct
  REGION 1..9: note = UBX domain-containing protein 4 (377-385)
KKKLLDLEL

SEQ ID NO: 17811 - protein, 10 aa, synthetic construct
  REGION 1..10: note = Prefoldin subunit 3 (51-60)
KKLDEQYQKY

SEQ ID NO: 17812 - protein, 10 aa, synthetic construct
  REGION 1..10: note = Non-specific lipid-transfer protein (442-451)
KKLEEEGEQF

SEQ ID NO: 17813 - protein, 10 aa, synthetic construct
  REGION 1..10: note = Alpha-taxilin (423-432)
KKLEKETTMY

SEQ ID NO: 17814 - protein, 9 aa, synthetic construct
  REGION 1..9: note = Mitogen-activated protein kinase kinase kinase 1 (792-800)
KKLLSLLTF

SEQ ID NO: 17815 - protein, 10 aa, synthetic construct
  REGION 1..10: note = Cold shock domain-containing protein E1 (411-420)
KKLPKGTVSF

SEQ ID NO: 17816 - protein, 9 aa, synthetic construct
  REGION 1..9: note = Hexokinase-2 (146-154)
KKLPLGFTF

SEQ ID NO: 17817 - protein, 9 aa, synthetic construct
  REGION 1..9: note = 14-3-3 protein theta (74-82)
KKLQLIKDY

SEQ ID NO: 17818 - protein, 9 aa, synthetic construct
  REGION 1..9: note = Nibrin (236-244)
KKLSSAVVF

SEQ ID NO: 17819 - protein, 10 aa, synthetic construct
  REGION 1..10: note = Clustered mitochondria protein homolog (294-303)
KKNFAVLQKK

SEQ ID NO: 17820 - protein, 9 aa, synthetic construct
  REGION 1..9: note = General transcription factor II-I (644-652)
KKPELVISY

SEQ ID NO: 17821 - protein, 10 aa, synthetic construct
  REGION 1..10: note = SUMO-activating enzyme subunit 1 (117-126)
KKPESFFTQF

SEQ ID NO: 17822 - protein, 9 aa, synthetic construct
  REGION 1..9: note = Poly(ADP-ribose)ohydrolase (689-697)
KKPTGLVTF

SEQ ID NO: 17823 - protein, 9 aa, synthetic construct
  REGION 1..9: note = DnaJ homolog subfamily C member 3 (406-414)
KKQEIIKAY

SEQ ID NO: 17824 - protein, 10 aa, synthetic construct
  REGION 1..10: note = Ankyrin repeat domain-containing protein 17 (1650-1659)
KKQPSVLVTF

SEQ ID NO: 17825 - protein, 9 aa, synthetic construct
  REGION 1..9: note = Transmembrane emp24 domain-containing protein 3 (82-90)
KKQYDSFTY

SEQ ID NO: 17826 - protein, 10 aa, synthetic construct
  REGION 1..10: note = Heterogeneous nuclear ribonucleoproteins A2/B1 (151-160)
KKRGFGFVTF

SEQ ID NO: 17827 - protein, 9 aa, synthetic construct
  REGION 1..9: note = Heterogeneous nuclear ribonucleoproteins C1/C2 (29-37)
KKSDVEAIF

SEQ ID NO: 17828 - protein, 9 aa, synthetic construct
  REGION 1..9: note = RNA-binding protein Raly (34-42)
KKSDVETIF

SEQ ID NO: 17829 - protein, 9 aa, synthetic construct
  REGION 1..9: note = Endoplasmin (404-412)
KKSDYIKLY

SEQ ID NO: 17830 - protein, 9 aa, synthetic construct
  REGION 1..9: note = Exocyst complex component 2 (196-204)
KKSEGSLAY

SEQ ID NO: 17831 - protein, 8 aa, synthetic construct
  REGION 1..8: note = ATPase family AAA domain-containing protein 5 (1559-1566)
KKSQKKKQ

SEQ ID NO: 17832 - protein, 9 aa, synthetic construct
  REGION 1..9: note = 60S ribosomal protein L18a (55-63)
KKSSGEIVY

SEQ ID NO: 17833 - protein, 9 aa, synthetic construct
  REGION 1..9: note = Copper transport protein ATOX1 (56-64)
KKTGKTVSY

SEQ ID NO: 17834 - protein, 9 aa, synthetic construct
  REGION 1..9: note = Melanoma-associated antigen 1 (104-112)
KKVADLVGF

SEQ ID NO: 17835 - protein, 9 aa, synthetic construct
  REGION 1..9: note = ATP-dependent RNA helicase DDX18 (647-655)
KKVEKSKIF

SEQ ID NO: 17836 - protein, 9 aa, synthetic construct
  REGION 1..9: note = Polyadenylate-binding protein 1 (268-276)
KKVERQTEL

SEQ ID NO: 17837 - protein, 10 aa, synthetic construct
  REGION 1..10: note = Asparagine synthetase (glutamine-hydrolyzing) (131-140)
KKVFLGRDTY

SEQ ID NO: 17838 - protein, 9 aa, synthetic construct
  REGION 1..9: note = 60S ribosomal protein L37a (6-14)
KKVGIVGKY

SEQ ID NO: 17839 - protein, 9 aa, synthetic construct
  REGION 1..9: note = 60S ribosomal protein L23 (74-82)
KKVHPAVVI

SEQ ID NO: 17840 - protein, 9 aa, synthetic construct
  REGION 1..9: note = Acyl-CoA desaturase (337-345)
KKVSKAAIL

SEQ ID NO: 17841 - protein, 9 aa, synthetic construct
  REGION 1..9: note = Condensin-2 complex subunit G2 (421-429)
KKVTGELAF

SEQ ID NO: 17842 - protein, 9 aa, synthetic construct
  REGION 1..9: note = Sorting nexin-29 (261-269)
KKVTNIISF

SEQ ID NO: 17843 - protein, 10 aa, synthetic construct
  REGION 1..10: note = 3-hydroxyisobutyryl-CoA hydrolase, mitochondrial (73-82)
KKWEQDPETF

SEQ ID NO: 17844 - protein, 10 aa, synthetic construct
  REGION 1..10: note = Rho-related GTP-binding protein RhoE (115-124)
KKWKGEIQEF

SEQ ID NO: 17845 - protein, 9 aa, synthetic construct
  REGION 1..9: note = Conserved oligomeric Golgi complex subunit 2 (378-386)
KKWNLPVYF

SEQ ID NO: 17846 - protein, 9 aa, synthetic construct
  REGION 1..9: note = Oxysterol-binding protein 1 (288-296)
KKWQKSLQY

SEQ ID NO: 17847 - protein, 10 aa, synthetic construct
  REGION 1..10: note = Cytosolic phospholipase A2 (379-388)
KKYEENPLHF

SEQ ID NO: 17848 - protein, 9 aa, synthetic construct
  REGION 1..9: note = F-BAR and double SH3 domains protein 2 (153-161)
KKYFETEQM

SEQ ID NO: 17849 - protein, 10 aa, synthetic construct
  REGION 1..10: note = Cysteine andine-rich protein 1 (64-73)
KKYGPKGYGY

SEQ ID NO: 17850 - protein, 10 aa, synthetic construct
  REGION 1..10: note = WD repeat-containing protein 82 (62-71)
KKYGVDLIRY

SEQ ID NO: 17851 - protein, 9 aa, synthetic construct
  REGION 1..9: note = Gamma-interferon-inducible protein 16 (3-11)
KKYKNIVLL

SEQ ID NO: 17852 - protein, 10 aa, synthetic construct
  REGION 1..10: note = AT-rich interactive domain-containing protein 4B (387-396)
KKYLYGFEEY

SEQ ID NO: 17853 - protein, 11 aa, synthetic construct
  REGION 1..11: note = 116 kDa U5 small nuclear ribonucleoprotein component (63-73)
KKYYPTAEEVY

SEQ ID NO: 17854 - protein, 9 aa, synthetic construct
  REGION 1..9: note = Astrocytic phosphoprotein PEA-15 (122-130)
KLAPPPKKA

SEQ ID NO: 17855 - protein, 9 aa, synthetic construct
  REGION 1..9: note = Remodeling and spacing factor 1 (587-595)
KLEKSKKTF

SEQ ID NO: 17856 - protein, 12 aa, synthetic construct
  REGION 1..12: note = Zymogen granule protein 16 homolog B (100-111)
KLGALGGNTQEV

SEQ ID NO: 17857 - protein, 8 aa, synthetic construct
  REGION 1..8: note = Ubiquitin carboxyl-terminal hydrolase 3 (107-114)
KLGLVQKV

SEQ ID NO: 17858 - protein, 9 aa, synthetic construct
  REGION 1..9: note = Sister chromatid cohesion protein PDS5 homolog A (112-120)
KLKDIFLFI

SEQ ID NO: 17859 - protein, 9 aa, synthetic construct
  REGION 1..9: note = DDB1- and CUL4-associated factor 13 (376-384)
KLKEKFQHY

SEQ ID NO: 17860 - protein, 11 aa, synthetic construct
  REGION 1..11: note = Heterogeneous nuclear ribonucleoproteins C1/C2 (187-197)
KLKGDDLQAIK

SEQ ID NO: 17861 - protein, 9 aa, synthetic construct
  REGION 1..9: note = Rap guanine nucleotide exchange factor 2 (828-836)
KLPNKYEKL

SEQ ID NO: 17862 - protein, 9 aa, synthetic construct
  REGION 1..9: note = Dynein heavy chain 1, axonemal (2025-2033)
KLPPLLKPY

SEQ ID NO: 17863 - protein, 10 aa, synthetic construct
  REGION 1..10: note = Signal peptidase complex subunit 2 (173-182)
KLTFISGRTK

SEQ ID NO: 17864 - protein, 10 aa, synthetic construct
  REGION 1..10: note = Heterogeneous nuclear ribonucleoprotein U-like protein 2 (521-530)
KLVQIASRTK

SEQ ID NO: 17865 - protein, 10 aa, synthetic construct
  REGION 1..10: note = Dedicator of cytokinesis protein 3 (182-191)
KMHLSSRQSV

SEQ ID NO: 17866 - protein, 9 aa, synthetic construct
  REGION 1..9: note = Neuroblast differentiation-associated protein AHNAK (5087-5095)
KMYFPDVEF

SEQ ID NO: 17867 - protein, 9 aa, synthetic construct
  REGION 1..9: note = A-kinase anchor protein 9 (1420-1428)
KNIDGTIEF

SEQ ID NO: 17868 - protein, 8 aa, synthetic construct
  REGION 1..8: note = Nucleoporin p58/p45 (71-78)
KPATGFTL

SEQ ID NO: 17869 - protein, 8 aa, synthetic construct
  REGION 1..8: note = MARCKS-related protein (96-103)
KPFKLSGL

SEQ ID NO: 17870 - protein, 9 aa, synthetic construct
  REGION 1..9: note = Zinc finger and BTB domain-containing protein 38 (175-183)
KQFQSPSTL

SEQ ID NO: 17871 - protein, 10 aa, synthetic construct
  REGION 1..10: note = ADP-sugar pyrophosphatase (81-90)
KQFRPPMGGY

SEQ ID NO: 17872 - protein, 9 aa, synthetic construct
  REGION 1..9: note = 26S protease regulatory subunit 8 (30-38)
KQIKEIKEV

SEQ ID NO: 17873 - protein, 9 aa, synthetic construct
  REGION 1..9: note = Ubiquitin-40S ribosomal protein S27a (48-56)
KQLEDGRTL

SEQ ID NO: 17874 - protein, 9 aa, synthetic construct
  REGION 1..9: note = tRNA selenocysteine 1-associated protein 1 (88-96)
KQPDNSPEY

SEQ ID NO: 17875 - protein, 9 aa, synthetic construct
  REGION 1..9: note = MARVEL domain-containing protein 2 (540-548)
KQRIQEYDK

SEQ ID NO: 17876 - protein, 9 aa, synthetic construct
  REGION 1..9: note = Heat shock 70 kDa protein 1B (423-431)
KQTQIFTTY

SEQ ID NO: 17877 - protein, 9 aa, synthetic construct
  REGION 1..9: note = Mortality factor 4-like protein 1 (38-46)
KQVKYFIHY

SEQ ID NO: 17878 - protein, 10 aa, synthetic construct
  REGION 1..10: note = ADP-ribosylation factor-binding protein GGA2 (311-320)
KQVMEGRVTF

SEQ ID NO: 17879 - protein, 12 aa, synthetic construct
  REGION 1..12: note = 60S ribosomal protein L17 (74-85)
KQWGWTQGRWPK

SEQ ID NO: 17880 - protein, 9 aa, synthetic construct
  REGION 1..9: note = ATP-dependent RNA helicase DDX3X (264-272)
KQYPISLVL

SEQ ID NO: 17881 - protein, 9 aa, synthetic construct
  REGION 1..9: note = Cancer-related nucleoside-triphosphatase (73-81)
KRECRVGQY

SEQ ID NO: 17882 - protein, 10 aa, synthetic construct
  REGION 1..10: note = Unconventional myosin-VIIb (624-633)
KRPSTLGSQF

SEQ ID NO: 17883 - protein, 11 aa, synthetic construct
  REGION 1..11: note = Vigilin (550-560)
KSDIVQLRGPK

SEQ ID NO: 17884 - protein, 10 aa, synthetic construct
  REGION 1..10: note = Cyclin-dependent kinase-like 5 (680-689)
KSEGGVYHDP

SEQ ID NO: 17885 - protein, 9 aa, synthetic construct
  REGION 1..9: note = Clathrin heavy chain 1 (706-714)
KSFEGLFYF

SEQ ID NO: 17886 - protein, 9 aa, synthetic construct
  REGION 1..9: note = General transcription factor 3C polypeptide 2 (146-154)
KSKAELLLL

SEQ ID NO: 17887 - protein, 11 aa, synthetic construct
  REGION 1..11: note = Calcyclin-binding protein (33-43)
KSKIETEIKNK

SEQ ID NO: 17888 - protein, 9 aa, synthetic construct
  REGION 1..9: note = Dol-P-Glc:Glc(2)Man(9)GlcNAc(2)-PP-Dol alpha-1,2-glucosyltransferase (389-397)
KSKSIFWNL

SEQ ID NO: 17889 - protein, 9 aa, synthetic construct
  REGION 1..9: note = Leucine-rich repeat-containing protein 40 (210-218)
KSLPAEINR

SEQ ID NO: 17890 - protein, 9 aa, synthetic construct
  REGION 1..9: note = Solute carrier family 7 member 13 (416-424)
KSPNVHYVY

SEQ ID NO: 17891 - protein, 9 aa, synthetic construct
  REGION 1..9: note = Aromatase (99-107)
KSSSMFHIM

SEQ ID NO: 17892 - protein, 9 aa, synthetic construct
  REGION 1..9: note = Thromboxane-A synthase (118-126)
KSVADSVLF

SEQ ID NO: 17893 - protein, 11 aa, synthetic construct
  REGION 1..11: note = Hypoxia up-regulated protein 1 (249-259)
KTKEAGMQPQL

SEQ ID NO: 17894 - protein, 10 aa, synthetic construct
  REGION 1..10: note = Translin (76-85)
KTKFPAEQYY

SEQ ID NO: 17895 - protein, 9 aa, synthetic construct
  REGION 1..9: note = RNA-binding protein PNO1 (189-197)
KTKFTIENV

SEQ ID NO: 17896 - protein, 9 aa, synthetic construct
  REGION 1..9: note = DNA damage-binding protein 1 (915-923)
KTKGDFILV

SEQ ID NO: 17897 - protein, 9 aa, synthetic construct
  REGION 1..9: note = N-acetylgalactosamine kinase (102-110)
KTKPLWHNY

SEQ ID NO: 17898 - protein, 9 aa, synthetic construct
  REGION 1..9: note = Splicing factor 3B subunit 3 (294-302)
KTKSMFFFL

SEQ ID NO: 17899 - protein, 12 aa, synthetic construct
  REGION 1..12: note = Heterogeneous nuclear ribonucleoproteins A2/B1 (3-14)
KTLETVPLERKK

SEQ ID NO: 17900 - protein, 9 aa, synthetic construct
  REGION 1..9: note = ADP-ribosylation factor-like protein 11 (25-33)
KTTLLYKLK

SEQ ID NO: 17901 - protein, 9 aa, synthetic construct
  REGION 1..9: note = Catenin alpha-2 (794-802)
KVKAEVQNL

SEQ ID NO: 17902 - protein, 9 aa, synthetic construct
  REGION 1..9: note = Serine/threonine-protein phosphatase 2A 65 kDa regulatory subunit A alpha isoform (305-313)
KVKEFCENL

SEQ ID NO: 17903 - protein, 9 aa, synthetic construct
  REGION 1..9: note = Septin-7 (364-372)
KVKEKVQKL

SEQ ID NO: 17904 - protein, 9 aa, synthetic construct
  REGION 1..9: note = Kelch-like protein 24 (128-136)
KVKITTENV

SEQ ID NO: 17905 - protein, 11 aa, synthetic construct
  REGION 1..11: note = Ubiquitin-40S ribosomal protein S27a (97-107)
KVKLAVLKYYK

SEQ ID NO: 17906 - protein, 10 aa, synthetic construct
  REGION 1..10: note = Thioredoxin-like protein 4A (51-60)
KVKNFAVIYL

SEQ ID NO: 17907 - protein, 9 aa, synthetic construct
  REGION 1..9: note = FACT complex subunit SPT16 (424-432)
KVKNVGIFL

SEQ ID NO: 17908 - protein, 10 aa, synthetic construct
  REGION 1..10: note = Peptidylprolyl isomerase domain and WD repeat-containing protein 1 (65-74)
KVLEFERVYL

SEQ ID NO: 17909 - protein, 10 aa, synthetic construct
  REGION 1..10: note = Exocyst complex component 4 (568-577)
KVLGVQRPLL

SEQ ID NO: 17910 - protein, 10 aa, synthetic construct
  REGION 1..10: note = 60S ribosomal protein L15 (5-14)
KYIQELWRKK

SEQ ID NO: 17911 - protein, 9 aa, synthetic construct
  REGION 1..9: note = Proto-oncogene vav (272-280)
KYKERFLVY

SEQ ID NO: 17912 - protein, 10 aa, synthetic construct
  REGION 1..10: note = 60S ribosomal protein L35 (77-86)
KYKPLDLRPK

SEQ ID NO: 17913 - protein, 12 aa, synthetic construct
  REGION 1..12: note = Protein mab-21-like 3 (2-13)
KYLTVGDLEDCL

SEQ ID NO: 17914 - protein, 9 aa, synthetic construct
  REGION 1..9: note = Protein archease (35-43)
KYPPVNRKY

SEQ ID NO: 17915 - protein, 9 aa, synthetic construct
  REGION 1..9: note = RNA-binding protein 42 (445-453)
KYVGSRPIK

SEQ ID NO: 17916 - protein, 9 aa, synthetic construct
  REGION 1..9: note = Suppressor of tumorigenicity 7 protein-like (66-74)
LAAVTVFLN

SEQ ID NO: 17917 - protein, 9 aa, synthetic construct
  REGION 1..9: note = Cytochrome c oxidase assembly protein COX14 (7-15)
LADIGYKTF

SEQ ID NO: 17918 - protein, 10 aa, synthetic construct
  REGION 1..10: note = Serine/arginine repetitive matrix protein 2 (2256-2265)
LADSRTPAAA

SEQ ID NO: 17919 - protein, 9 aa, synthetic construct
  REGION 1..9: note = Neutral amino acid transporter A (75-83)
LAFPGEMLL

SEQ ID NO: 17920 - protein, 9 aa, synthetic construct
  REGION 1..9: note = Apolipoprotein B receptor (1069-1077)
LAHPGMMQE

SEQ ID NO: 17921 - protein, 10 aa, synthetic construct
  REGION 1..10: note = Dystrophin-related protein 2 (299-308)
LAISDVHLSM

SEQ ID NO: 17922 - protein, 9 aa, synthetic construct
  REGION 1..9: note = Microtubule-associated protein 4 (558-566)
LAKDGVLTL

SEQ ID NO: 17923 - protein, 9 aa, synthetic construct
  REGION 1..9: note = Renin receptor (203-211)
LAKDHSPDL

SEQ ID NO: 17924 - protein, 9 aa, synthetic construct
  REGION 1..9: note = Minor histocompatibility antigen H13 (335-343)
LAKGEVTEM

SEQ ID NO: 17925 - protein, 9 aa, synthetic construct
  REGION 1..9: note = Nectin-1 (16-24)
LALGLTAFF

SEQ ID NO: 17926 - protein, 11 aa, synthetic construct
  REGION 1..11: note = Heterogeneous nuclear ribonucleoprotein M (609-619)
LAMGGGGGASF

SEQ ID NO: 17927 - protein, 10 aa, synthetic construct
  REGION 1..10: note = Golgin subfamily A member 3 (204-213)
LAMTKEYSFL

SEQ ID NO: 17928 - protein, 9 aa, synthetic construct
  REGION 1..9: note = Thioredoxin-interacting protein (222-230)
LANGQTKVL

SEQ ID NO: 17929 - protein, 11 aa, synthetic construct
  REGION 1..11: note = Orexin receptor type 1 (225-235)
LAPLGLMAMAY

SEQ ID NO: 17930 - protein, 9 aa, synthetic construct
  REGION 1..9: note = Dynein heavy chain 6, axonemal (1621-1629)
LARKMTQMY

SEQ ID NO: 17931 - protein, 9 aa, synthetic construct
  REGION 1..9: note = Nucleolar protein 16 (58-66)
LAVDPNRAV

SEQ ID NO: 17932 - protein, 9 aa, synthetic construct
  REGION 1..9: note = Ectonucleoside triphosphate diphosphohydrolase 1 (33-41)
LAVGLTQNK

SEQ ID NO: 17933 - protein, 9 aa, synthetic construct
  REGION 1..9: note = 60S ribosomal protein L29 (96-104)
LAYIAHPKL

SEQ ID NO: 17934 - protein, 9 aa, synthetic construct
  REGION 1..9: note = Potassium-transporting ATPase alpha chain 2 (598-606)
LCFVGLLSM

SEQ ID NO: 17935 - protein, 10 aa, synthetic construct
  REGION 1..10: note = Eukaryotic translation initiation factor 3 subunit C-like protein (635-644)
LDIQSSGRAK

SEQ ID NO: 17936 - protein, 9 aa, synthetic construct
  REGION 1..9: note = Cullin-7 (163-171)
LDLLMHMLS

SEQ ID NO: 17937 - protein, 9 aa, synthetic construct
  REGION 1..9: note = Sodium-driven chloride bicarbonate exchanger (854-862)
LDLLMVAVM

SEQ ID NO: 17938 - protein, 9 aa, synthetic construct
  REGION 1..9: note = Fibrillin-3 (2702-2710)
LDSEALLTL

SEQ ID NO: 17939 - protein, 9 aa, synthetic construct
  REGION 1..9: note = Uncharacterized protein C9orf171 (285-293)
LDTFPTEAD

SEQ ID NO: 17940 - protein, 10 aa, synthetic construct
  REGION 1..10: note = Ankyrin repeat and LEM domain-containing protein 1 (184-193)
LEADPGPPSL

SEQ ID NO: 17941 - protein, 8 aa, synthetic construct
  REGION 1..8: note = Core histone macro-H2A.1 (61-68)
LELAGNAA

SEQ ID NO: 17942 - protein, 9 aa, synthetic construct
  REGION 1..9: note = Alpha-mannosidase 2x (1106-1114)
LFHGLDVVF

SEQ ID NO: 17943 - protein, 9 aa, synthetic construct
  REGION 1..9: note = Vasohibin-2 (48-56)
LFHVNKSGF

SEQ ID NO: 17944 - protein, 9 aa, synthetic construct
  REGION 1..9: note = Pre-mRNA-processing factor 17 (418-426)
LGAVNTIVF

SEQ ID NO: 17945 - protein, 9 aa, synthetic construct
  REGION 1..9: note = Pumilio homolog 1 (673-681)
LGFGSSSSL

SEQ ID NO: 17946 - protein, 9 aa, synthetic construct
  REGION 1..9: note = Putative nuclease HARBI1 (77-85)
LGFYTSGSF

SEQ ID NO: 17947 - protein, 10 aa, synthetic construct
  REGION 1..10: note = Hyaluronidase-4 (205-214)
LGIKSRPKGL

SEQ ID NO: 17948 - protein, 10 aa, synthetic construct
  REGION 1..10: note = NF-kappa-B-repressing factor (591-600)
LGLDVERVNK

SEQ ID NO: 17949 - protein, 9 aa, synthetic construct
  REGION 1..9: note = G-protein coupled receptor family C group 6 member A (447-455)
LGVLKNVTF

SEQ ID NO: 17950 - protein, 9 aa, synthetic construct
  REGION 1..9: note = L-xylulose reductase (27-35)
LHATGARVV

SEQ ID NO: 17951 - protein, 9 aa, synthetic construct
  REGION 1..9: note = Sterol regulatory element-binding protein 1 (1037-1045)
LHEATARLM

SEQ ID NO: 17952 - protein, 9 aa, synthetic construct
  REGION 1..9: note = U3 small nucleolar ribonucleoprotein protein MPP10 (405-413)
LHFDHAVRM

SEQ ID NO: 17953 - protein, 9 aa, synthetic construct
  REGION 1..9: note = Nucleoporin Nup43 (101-109)
LHHPNNQTL

SEQ ID NO: 17954 - protein, 9 aa, synthetic construct
  REGION 1..9: note = Delta(14)-sterol reductase (279-287)
LHHPQPLGL

SEQ ID NO: 17955 - protein, 9 aa, synthetic construct
  REGION 1..9: note = Phospholipid-transporting ATPase ID (589-597)
LHHSTQELL

SEQ ID NO: 17956 - protein, 10 aa, synthetic construct
  REGION 1..10: note = Neuron navigator 3 (2128-2137)
LHHVGSLSDI

SEQ ID NO: 17957 - protein, 9 aa, synthetic construct
  REGION 1..9: note = GTP-binding protein 1 (551-559)
LHIDQRLVF

SEQ ID NO: 17958 - protein, 9 aa, synthetic construct
  REGION 1..9: note = Cyclin-I (151-159)
LHIFHAIAV

SEQ ID NO: 17959 - protein, 9 aa, synthetic construct
  REGION 1..9: note = Thioredoxin domain-containing protein 9 (138-146)
LHIKVIPTL

SEQ ID NO: 17960 - protein, 9 aa, synthetic construct
  REGION 1..9: note = Myb-binding protein 1A (438-446)
LHMPERAVF

SEQ ID NO: 17961 - protein, 9 aa, synthetic construct
  REGION 1..9: note = Probable ATP-dependent RNA helicase DDX56 (212-220)
LHNPVTLKL

SEQ ID NO: 17962 - protein, 9 aa, synthetic construct
  REGION 1..9: note = Gem-associated protein 5 (107-115)
LHQHTISTL

SEQ ID NO: 17963 - protein, 9 aa, synthetic construct
  REGION 1..9: note = G patch domain-containing protein 8 (828-836)
LHQKSPSQY

SEQ ID NO: 17964 - protein, 9 aa, synthetic construct
  REGION 1..9: note = Actin-binding LIM protein 1 (664-672)
LHRPVSTDF

SEQ ID NO: 17965 - protein, 9 aa, synthetic construct
  REGION 1..9: note = Cytochrome c oxidase subunit 2 (160-168)
LHSWAVPTL

SEQ ID NO: 17966 - protein, 9 aa, synthetic construct
  REGION 1..9: note = IQ motif and SEC7 domain-containing protein 1 (263-271)
LHTEEAPAL

SEQ ID NO: 17967 - protein, 9 aa, synthetic construct
  REGION 1..9: note = Selenoprotein S (22-30)
LHTTVGSLL

SEQ ID NO: 17968 - protein, 9 aa, synthetic construct
  REGION 1..9: note = Plectin (1023-1031)
LHVDMKSLL

SEQ ID NO: 17969 - protein, 9 aa, synthetic construct
  REGION 1..9: note = Unconventional myosin-Ih (186-194)
LIEKSRVVY

SEQ ID NO: 17970 - protein, 11 aa, synthetic construct
  REGION 1..11: note = Heat shock 70 kDa protein 1-like (198-208)
LIFDLGGGTFD

SEQ ID NO: 17971 - protein, 9 aa, synthetic construct
  REGION 1..9: note = DnaJ homolog subfamily C member 13 (1046-1054)
LILNMLITM

SEQ ID NO: 17972 - protein, 9 aa, synthetic construct
  REGION 1..9: note = Probable ATP-dependent RNA helicase DDX59 (275-283)
LILTPTREL

SEQ ID NO: 17973 - protein, 9 aa, synthetic construct
  REGION 1..9: note = Integrin beta-7 (381-389)
LIMDAYNSL

SEQ ID NO: 17974 - protein, 9 aa, synthetic construct
  REGION 1..9: note = Leucine-rich repeat and fibronectin type-III domain-containing protein 4 (447-455)
LIYRIVPAS

SEQ ID NO: 17975 - protein, 9 aa, synthetic construct
  REGION 1..9: note = Protein disulfide-isomerase A2 (328-336)
LKAEAAPTL

SEQ ID NO: 17976 - protein, 9 aa, synthetic construct
  REGION 1..9: note = Mini-chromosome maintenance complex-binding protein (430-438)
LKFIPHKDY

SEQ ID NO: 17977 - protein, 9 aa, synthetic construct
  REGION 1..9: note = RNA-binding protein 8A (113-121)
LKGYTLVEY

SEQ ID NO: 17978 - protein, 9 aa, synthetic construct
  REGION 1..9: note = Mannosyl-oligosaccharide glucosidase (326-334)
LKIPISIEF

SEQ ID NO: 17979 - protein, 9 aa, synthetic construct
  REGION 1..9: note = ER membrane protein complex subunit 1 (411-419)
LKKDDSVGY

SEQ ID NO: 17980 - protein, 11 aa, synthetic construct
  REGION 1..11: note = DENN domain-containing protein 4C (704-714)
LKLFDRPQELK

SEQ ID NO: 17981 - protein, 9 aa, synthetic construct
  REGION 1..9: note = Eukaryotic translation initiation factor 3 subunit D (447-455)
LKLGYVSRY

SEQ ID NO: 17982 - protein, 9 aa, synthetic construct
  REGION 1..9: note = Serine/threonine-protein kinase PAK 2 (301-309)
LKNPNIVNF

SEQ ID NO: 17983 - protein, 9 aa, synthetic construct
  REGION 1..9: note = Elongation factor 1-alpha 1 (272-280)
LKPGMVVTF

SEQ ID NO: 17984 - protein, 9 aa, synthetic construct
  REGION 1..9: note = X-ray repair cross-complementing protein 6 (281-289)
LKPPPIKLY

SEQ ID NO: 17985 - protein, 9 aa, synthetic construct
  REGION 1..9: note = Choline/ethanolaminephosphotransferase 1 (48-56)
LKRLEEHRY

SEQ ID NO: 17986 - protein, 9 aa, synthetic construct
  REGION 1..9: note = Renin receptor (22-30)
LKSPGSVVF

SEQ ID NO: 17987 - protein, 9 aa, synthetic construct
  REGION 1..9: note = Nucleolin (323-331)
LKTGISDVF

SEQ ID NO: 17988 - protein, 9 aa, synthetic construct
  REGION 1..9: note = 26S protease regulatory subunit 7 (33-41)
LKTYGQSTY

SEQ ID NO: 17989 - protein, 8 aa, synthetic construct
  REGION 1..8: note = 60S ribosomal protein L19 (125-132)
LKVKGNVF

SEQ ID NO: 17990 - protein, 9 aa, synthetic construct
  REGION 1..9: note = Forkhead box protein O3 (93-101)
LLEDSARVL

SEQ ID NO: 17991 - protein, 9 aa, synthetic construct
  REGION 1..9: note = Dynein heavy chain 9, axonemal (368-376)
LLIQQASNY

SEQ ID NO: 17992 - protein, 11 aa, synthetic construct
  REGION 1..11: note = Dynein heavy chain 10, axonemal (1334-1344)
LLLDLKNEALR

SEQ ID NO: 17993 - protein, 9 aa, synthetic construct
  REGION 1..9: note = ER membrane protein complex subunit 3 (6-14)
LLLDSNIRL

SEQ ID NO: 17994 - protein, 9 aa, synthetic construct
  REGION 1..9: note = Echinoderm microtubule-associated protein-like 4 (278-286)
LLPTGKIVY

SEQ ID NO: 17995 - protein, 9 aa, synthetic construct
  REGION 1..9: note = Chromodomain-helicase-DNA-binding protein 2 (628-636)
LLYKTLIDF

SEQ ID NO: 17996 - protein, 9 aa, synthetic construct
  REGION 1..9: note = Integrator complex subunit 10 (519-527)
LMCYMVLPI

SEQ ID NO: 17997 - protein, 11 aa, synthetic construct
  REGION 1..11: note = Melatonin receptor type 1A (106-116)
LMGLSVIGSIF

SEQ ID NO: 17998 - protein, 9 aa, synthetic construct
  REGION 1..9: note = DNA-dependent protein kinase catalytic subunit (2219-2227)
LMKHVFHPK

SEQ ID NO: 17999 - protein, 11 aa, synthetic construct
  REGION 1..11: note = Eukaryotic translation initiation factor 3 subunit H (211-221)
LMWELEKKSAV

SEQ ID NO: 18000 - protein, 9 aa, synthetic construct
  REGION 1..9: note = CTP synthase 2 (334-342)
LMYIDSIDL

SEQ ID NO: 18001 - protein, 9 aa, synthetic construct
  REGION 1..9: note = Ubiquitin-like modifier-activating enzyme ATG7 (128-136)
LNKFLLLTF

SEQ ID NO: 18002 - protein, 10 aa, synthetic construct
  REGION 1..10: note = Carboxy-terminal domain RNA polymerase II polypeptide A small phosphatase 1 (54-63)
LPAHSGAPLL

SEQ ID NO: 18003 - protein, 9 aa, synthetic construct
  REGION 1..9: note = Neutrophil cytosol factor 4 (89-97)
LPAKVYVGV

SEQ ID NO: 18004 - protein, 9 aa, synthetic construct
  REGION 1..9: note = GPI transamidase component PIG-T (430-438)
LPANSVTKV

SEQ ID NO: 18005 - protein, 9 aa, synthetic construct
  REGION 1..9: note = Tyrosine-protein phosphatase non-receptor type 12 (677-685)
LPERTPESF

SEQ ID NO: 18006 - protein, 9 aa, synthetic construct
  REGION 1..9: note = Collagen alpha-2(IV) chain (385-393)
LPGPPGLSI

SEQ ID NO: 18007 - protein, 9 aa, synthetic construct
  REGION 1..9: note = DDB1- and CUL4-associated factor 13 (548-556)
LPKSIYSQI

SEQ ID NO: 18008 - protein, 9 aa, synthetic construct
  REGION 1..9: note = Interferon regulatory factor 2-binding protein-like (271-279)
LPPPPPHAL

SEQ ID NO: 18009 - protein, 9 aa, synthetic construct
  REGION 1..9: note = Neutral amino acid transporter A (142-150)
LPTHDLPLI

SEQ ID NO: 18010 - protein, 8 aa, synthetic construct
  REGION 1..8: note = General transcription factor 3C polypeptide 2 (665-672)
LPYNGVTV

SEQ ID NO: 18011 - protein, 9 aa, synthetic construct
  REGION 1..9: note = Signal peptidase complex catalytic subunit SEC11C (158-166)
LPYVGMVTI

SEQ ID NO: 18012 - protein, 9 aa, synthetic construct
  REGION 1..9: note = WD repeat-containing protein 34 (423-431)
LQAPPLTSL

SEQ ID NO: 18013 - protein, 9 aa, synthetic construct
  REGION 1..9: note = Protein unc-13 homolog C (117-125)
LQELSSIES

SEQ ID NO: 18014 - protein, 9 aa, synthetic construct
  REGION 1..9: note = TBC1 domain family member 4 (1186-1194)
LQESSYSCE

SEQ ID NO: 18015 - protein, 10 aa, synthetic construct
  REGION 1..10: note = WD repeat-containing protein 82 (288-297)
LQFNPKFMTF

SEQ ID NO: 18016 - protein, 11 aa, synthetic construct
  REGION 1..11: note = Serine/threonine-protein kinase RIO2 (521-531)
LQKGEANIFTK

SEQ ID NO: 18017 - protein, 10 aa, synthetic construct
  REGION 1..10: note = WAS protein family homolog 1 (40-49)
LQKVSGDIFS

SEQ ID NO: 18018 - protein, 9 aa, synthetic construct
  REGION 1..9: note = Tubulin beta chain (42-50)
LQLDRISVY

SEQ ID NO: 18019 - protein, 9 aa, synthetic construct
  REGION 1..9: note = Tubulin beta-4B chain (42-50)
LQLERINVY

SEQ ID NO: 18020 - protein, 9 aa, synthetic construct
  REGION 1..9: note = Acyl-coenzyme A synthetase ACSM5, mitochondrial (112-120)
LQPGDRMML

SEQ ID NO: 18021 - protein, 9 aa, synthetic construct
  REGION 1..9: note = GPI transamidase component PIG-T (58-66)
LQREGVSHY

SEQ ID NO: 18022 - protein, 9 aa, synthetic construct
  REGION 1..9: note = Splicing factor 1 (254-262)
LREDDNRIL

SEQ ID NO: 18023 - protein, 9 aa, synthetic construct
  REGION 1..9: note = FH1/FH2 domain-containing protein 1 (1156-1164)
LSKGPGLEV

SEQ ID NO: 18024 - protein, 10 aa, synthetic construct
  REGION 1..10: note = Phosphatidylethanolamine-binding protein 1 (5-14)
LSKWSGPLSL

SEQ ID NO: 18025 - protein, 8 aa, synthetic construct
  REGION 1..8: note = FYVE, RhoGEF and PH domain-containing protein 5 (524-531)
LSLEGKPL

SEQ ID NO: 18026 - protein, 9 aa, synthetic construct
  REGION 1..9: note = Cilia- and flagella-associated protein 54 (689-697)
LSMLKSMLL

SEQ ID NO: 18027 - protein, 9 aa, synthetic construct
  REGION 1..9: note = Alpha-ketoglutarate-dependent dioxygenase alkB homolog 7, mitochondrial (104-112)
LSSVHVLDL

SEQ ID NO: 18028 - protein, 9 aa, synthetic construct
  REGION 1..9: note = WD repeat-containing protein 7 (683-691)
LTDPDIHVL

SEQ ID NO: 18029 - protein, 9 aa, synthetic construct
  REGION 1..9: note = Transcription factor SOX-30 (235-243)
LVHGSAEVI

SEQ ID NO: 18030 - protein, 9 aa, synthetic construct
  REGION 1..9: note = 60S ribosomal protein L32 (7-15)
LVKPKIVKK

SEQ ID NO: 18031 - protein, 9 aa, synthetic construct
  REGION 1..9: note = Probable ATP-dependent RNA helicase DDX41 (390-398)
LVKPVTINV

SEQ ID NO: 18032 - protein, 9 aa, synthetic construct
  REGION 1..9: note = Cationic amino acid transporter 3 (165-173)
LVLIVGFTF

SEQ ID NO: 18033 - protein, 9 aa, synthetic construct
  REGION 1..9: note = Mitogen-activated protein kinase kinase kinase 10 (901-909)
LVSFGRTLT

SEQ ID NO: 18034 - protein, 9 aa, synthetic construct
  REGION 1..9: note = Glypican-4 (385-393)
LVTDVKEKL

SEQ ID NO: 18035 - protein, 9 aa, synthetic construct
  REGION 1..9: note = Transmembrane protein with metallophosphoesterase domain (414-422)
LYQVAQATF

SEQ ID NO: 18036 - protein, 9 aa, synthetic construct
  REGION 1..9: note = Transcription factor SOX-6 (312-320)
MAAAAASGL

SEQ ID NO: 18037 - protein, 9 aa, synthetic construct
  REGION 1..9: note = 28S ribosomal protein S14, mitochondrial (1-9)
MAAFMLGSL

SEQ ID NO: 18038 - protein, 9 aa, synthetic construct
  REGION 1..9: note = Steroid 21-hydroxylase (283-291)
MAAVDLLIG

SEQ ID NO: 18039 - protein, 9 aa, synthetic construct
  REGION 1..9: note = XK-related protein 5 (595-603)
MADISPILG

SEQ ID NO: 18040 - protein, 8 aa, synthetic construct
  REGION 1..8: note = Histone-binding protein RBBP4 (1-8)
MADKEAAF

SEQ ID NO: 18041 - protein, 9 aa, synthetic construct
  REGION 1..9: note = N-acetylated-alpha-linked acidic dipeptidase 2 (1-9)
MAESRGRLY

SEQ ID NO: 18042 - protein, 9 aa, synthetic construct
  REGION 1..9: note = Mucin-17 (161-169)
MAFVSTAPL

SEQ ID NO: 18043 - protein, 9 aa, synthetic construct
  REGION 1..9: note = Butyrophilin-like protein 8 (1-9)
MALMLSLVL

SEQ ID NO: 18044 - protein, 10 aa, synthetic construct
  REGION 1..10: note = Zinc finger protein 28 (1-10)
MALPQGLLTF

SEQ ID NO: 18045 - protein, 10 aa, synthetic construct
  REGION 1..10: note = Major facilitator superfamily domain-containing protein 9 (295-304)
MAMAVMLYYS

SEQ ID NO: 18046 - protein, 9 aa, synthetic construct
  REGION 1..9: note = Splicing factor 3A subunit 1 (775-783)
MANGAVIHL

SEQ ID NO: 18047 - protein, 9 aa, synthetic construct
  REGION 1..9: note = Small nuclear ribonucleoprotein-associated protein N (189-197)
MAPPPGMRP

SEQ ID NO: 18048 - protein, 8 aa, synthetic construct
  REGION 1..8: note = HLA class I histocompatibility antigen, Cw-7 alpha chain (4-11)
MAPRALLL

SEQ ID NO: 18049 - protein, 9 aa, synthetic construct
  REGION 1..9: note = Coiled-coil domain-containing protein 42A (261-269)
MATLNLFQI

SEQ ID NO: 18050 - protein, 9 aa, synthetic construct
  REGION 1..9: note = Frizzled-4 (474-482)
MAVEMLKIF

SEQ ID NO: 18051 - protein, 9 aa, synthetic construct
  REGION 1..9: note = Interferon alpha-inducible protein 6 (45-53)
MAVGGGLAV

SEQ ID NO: 18052 - protein, 11 aa, synthetic construct
  REGION 1..11: note = Thyroid adenoma-associated protein (70-80)
MCDPTIQSCLD

SEQ ID NO: 18053 - protein, 9 aa, synthetic construct
  REGION 1..9: note = Putative tripartite motif-containing protein 49B (236-244)
MCHKPDVEL

SEQ ID NO: 18054 - protein, 9 aa, synthetic construct
  REGION 1..9: note = C-C chemokine receptor type 9 (118-126)
MCKVVNSMY

SEQ ID NO: 18055 - protein, 9 aa, synthetic construct
  REGION 1..9: note = Centrosomal protein of 72 kDa (190-198)
MDADDEAVL

SEQ ID NO: 18056 - protein, 10 aa, synthetic construct
  REGION 1..10: note = Rho guanine nucleotide exchange factor 12 (1356-1365)
MDHMIMTPEM

SEQ ID NO: 18057 - protein, 9 aa, synthetic construct
  REGION 1..9: note = Adenosine receptor A2b (219-227)
MDHSRTTLQ

SEQ ID NO: 18058 - protein, 9 aa, synthetic construct
  REGION 1..9: note = Protein CREG1 (164-172)
MDIAKHSLF

SEQ ID NO: 18059 - protein, 9 aa, synthetic construct
  REGION 1..9: note = P2X purinoceptor 7 (140-148)
MDPQSKGIQ

SEQ ID NO: 18060 - protein, 10 aa, synthetic construct
  REGION 1..10: note = 40S ribosomal protein S28 (1-10)
MDTSRVQPIK

SEQ ID NO: 18061 - protein, 9 aa, synthetic construct
  REGION 1..9: note = F-box only protein 44 (151-159)
MDTTRPDIE

SEQ ID NO: 18062 - protein, 12 aa, synthetic construct
  REGION 1..12: note = BEN domain-containing protein 7 (1-12)
MEFSERKRSRKS

SEQ ID NO: 18063 - protein, 10 aa, synthetic construct
  REGION 1..10: note = Rho guanine nucleotide exchange factor 11 (1442-1451)
MELAHRELLK

SEQ ID NO: 18064 - protein, 12 aa, synthetic construct
  REGION 1..12: note = Nitric oxide synthase, endothelial (1137-1148)
MELDEAGDVIGV

SEQ ID NO: 18065 - protein, 8 aa, synthetic construct
  REGION 1..8: note = Pseudouridylate synthase 7 homolog (1-8)
MEMTEMTG

SEQ ID NO: 18066 - protein, 9 aa, synthetic construct
  REGION 1..9: note = Lethal(3)malignant brain tumor-like protein 3 (52-60)
MENVKKATA

SEQ ID NO: 18067 - protein, 12 aa, synthetic construct
  REGION 1..12: note = Heme oxygenase 1 (1-12)
MERPQPDSMPQD

SEQ ID NO: 18068 - protein, 9 aa, synthetic construct
  REGION 1..9: note = Metalloreductase STEAP2 (1-9)
MESISMMGS

SEQ ID NO: 18069 - protein, 9 aa, synthetic construct
  REGION 1..9: note = CD97 antigen (1-9)
MGGRVFLAF

SEQ ID NO: 18070 - protein, 10 aa, synthetic construct
  REGION 1..10: note = Putative uncharacterized protein ENSP00000381562 (1-10)
MGSIPSKPCN

SEQ ID NO: 18071 - protein, 9 aa, synthetic construct
  REGION 1..9: note = Ubiquitin carboxyl-terminal hydrolase isozyme L3 (111-119)
MHFESGSTL

SEQ ID NO: 18072 - protein, 9 aa, synthetic construct
  REGION 1..9: note = Complex I assembly factor TMEM126B, mitochondrial (35-43)
MHGQPSPSL

SEQ ID NO: 18073 - protein, 9 aa, synthetic construct
  REGION 1..9: note = Transmembrane protein 114 (102-110)
MHGTFVILL

SEQ ID NO: 18074 - protein, 10 aa, synthetic construct
  REGION 1..10: note = Leucine-twenty homeobox (1-10)
MHPSLATMGK

SEQ ID NO: 18075 - protein, 9 aa, synthetic construct
  REGION 1..9: note = Protein Tob1 (226-234)
MHSLYGLGL

SEQ ID NO: 18076 - protein, 9 aa, synthetic construct
  REGION 1..9: note = Deoxyribonuclease-1-like 1 (1-9)
MHYPTALLF

SEQ ID NO: 18077 - protein, 9 aa, synthetic construct
  REGION 1..9: note = Neuronal acetylcholine receptor subunit alpha-4 (314-322)
MIFVTLSIV

SEQ ID NO: 18078 - protein, 9 aa, synthetic construct
  REGION 1..9: note = Eukaryotic translation initiation factor 3 subunit L (359-367)
MINKQNEQM

SEQ ID NO: 18079 - protein, 10 aa, synthetic construct
  REGION 1..10: note = Lysosomal protective protein (1-10)
MIRAAPPPLF

SEQ ID NO: 18080 - protein, 10 aa, synthetic construct
  REGION 1..10: note = 60S ribosomal protein L18a (1-10)
MKASGTLREY

SEQ ID NO: 18081 - protein, 9 aa, synthetic construct
  REGION 1..9: note = Lymphocyte antigen 86 (1-9)
MKGFTATLF

SEQ ID NO: 18082 - protein, 9 aa, synthetic construct
  REGION 1..9: note = Sodium-coupled neutral amino acid transporter 5 (188-196)
MKHLGYLGY

SEQ ID NO: 18083 - protein, 9 aa, synthetic construct
  REGION 1..9: note = Neurexin-3 (694-702)
MKIIMPMVM

SEQ ID NO: 18084 - protein, 9 aa, synthetic construct
  REGION 1..9: note = Dentin matrix acidic phosphoprotein 1 (1-9)
MKISILLMF

SEQ ID NO: 18085 - protein, 9 aa, synthetic construct
  REGION 1..9: note = Sarcoplasmic/endoplasmic reticulum calcium ATPase 2 (479-487)
MKKEFTLEF

SEQ ID NO: 18086 - protein, 10 aa, synthetic construct
  REGION 1..10: note = 60S ribosomal protein L18a (54-63)
MKKSSGEIVY

SEQ ID NO: 18087 - protein, 9 aa, synthetic construct
  REGION 1..9: note = Lysine-tRNA ligase (406-414)
MKLPETNLF

SEQ ID NO: 18088 - protein, 10 aa, synthetic construct
  REGION 1..10: note = Glucose-fructose oxidoreductase domain-containing protein 2 (1-10)
MKMLPGVGVF

SEQ ID NO: 18089 - protein, 9 aa, synthetic construct
  REGION 1..9: note = Striatin-interacting protein 1 (733-741)
MKTMSAIYQ

SEQ ID NO: 18090 - protein, 9 aa, synthetic construct
  REGION 1..9: note = Zinc finger protein 425 (38-46)
MKTNYETLD

SEQ ID NO: 18091 - protein, 9 aa, synthetic construct
  REGION 1..9: note = Peptidyl-prolyl cis-trans isomerase B (9-17)
MKVLLAAAL

SEQ ID NO: 18092 - protein, 9 aa, synthetic construct
  REGION 1..9: note = Protein tyrosine phosphatase type IVA 1 (124-132)
MKYEDAVQF

SEQ ID NO: 18093 - protein, 11 aa, synthetic construct
  REGION 1..11: note = Transmembrane protein 50A (102-112)
MLAFGSLIASM

SEQ ID NO: 18094 - protein, 11 aa, synthetic construct
  REGION 1..11: note = Inactive phospholipase C-like protein 1 (259-269)
MLEDTSVELIK

SEQ ID NO: 18095 - protein, 10 aa, synthetic construct
  REGION 1..10: note = Tyrosine-protein phosphatase non-receptor type 2 (134-143)
MLFKETGFSV

SEQ ID NO: 18096 - protein, 12 aa, synthetic construct
  REGION 1..12: note = SPARC-related modular calcium-binding protein 1 (1-12)
MLPARCARLLTP

SEQ ID NO: 18097 - protein, 9 aa, synthetic construct
  REGION 1..9: note = E3 ubiquitin-protein ligase TRIM22 (248-256)
MLQDVIDVM

SEQ ID NO: 18098 - protein, 9 aa, synthetic construct
  REGION 1..9: note = Condensin complex subunit 1 (56-64)
MLQHFDTIY

SEQ ID NO: 18099 - protein, 9 aa, synthetic construct
  REGION 1..9: note = Fibronectin (1-9)
MLRGPGPGL

SEQ ID NO: 18100 - protein, 9 aa, synthetic construct
  REGION 1..9: note = Protein S100-A8 (1-9)
MLTELEKAL

SEQ ID NO: 18101 - protein, 10 aa, synthetic construct
  REGION 1..10: note = NACHT, LRR and PYD domains-containing protein 4 (169-178)
MMAWSDNKIF

SEQ ID NO: 18102 - protein, 9 aa, synthetic construct
  REGION 1..9: note = Eukaryotic translation initiation factor 4 gamma 1 (88-96)
MMIPSQISY

SEQ ID NO: 18103 - protein, 9 aa, synthetic construct
  REGION 1..9: note = Olfactory receptor 4K1 (112-120)
MMLLVAMAY

SEQ ID NO: 18104 - protein, 10 aa, synthetic construct
  REGION 1..10: note = BUB3-interacting and GLEBS motif-containing protein ZNF207 (185-194)
MMPMGGMMPP

SEQ ID NO: 18105 - protein, 8 aa, synthetic construct
  REGION 1..8: note = C-myc promoter-binding protein (618-625)
MMTKTQMF

SEQ ID NO: 18106 - protein, 8 aa, synthetic construct
  REGION 1..8: note = Protein SSX4 (1-8)
MNGDDAFA

SEQ ID NO: 18107 - protein, 8 aa, synthetic construct
  REGION 1..8: note = Putative uncharacterized protein ENSP00000383407 (1-8)
MNLFCISL

SEQ ID NO: 18108 - protein, 11 aa, synthetic construct
  REGION 1..11: note = Coiled-coil domain-containing protein 127 (1-11)
MNNLNDPPNWN

SEQ ID NO: 18109 - protein, 9 aa, synthetic construct
  REGION 1..9: note = General transcription factor IIF subunit 1 (417-425)
MPAAKRLRL

SEQ ID NO: 18110 - protein, 9 aa, synthetic construct
  REGION 1..9: note = Actin-related protein 2/3 complex subunit 3 (1-9)
MPAYHSSLM

SEQ ID NO: 18111 - protein, 9 aa, synthetic construct
  REGION 1..9: note = Kelch domain-containing protein 10 (360-368)
MPEPVYFHC

SEQ ID NO: 18112 - protein, 10 aa, synthetic construct
  REGION 1..10: note = von Willebrand factor A domain-containing protein 5B2 (1-10)
MPGLYCPSSW

SEQ ID NO: 18113 - protein, 9 aa, synthetic construct
  REGION 1..9: note = Acid ceramidase (1-9)
MPGRSCVAL

SEQ ID NO: 18114 - protein, 8 aa, synthetic construct
  REGION 1..8: note = Eukaryotic translation initiation factor 2 subunit 1 (223-230)
MPIKINLI

SEQ ID NO: 18115 - protein, 12 aa, synthetic construct
  REGION 1..12: note = Cytochrome c oxidase subunit 8C, mitochondrial (1-12)
MPLLRGRCPARR

SEQ ID NO: 18116 - protein, 12 aa, synthetic construct
  REGION 1..12: note = Retrotransposon gag domain-containing protein 1 (964-975)
MPLMSAMASGEM

SEQ ID NO: 18117 - protein, 12 aa, synthetic construct
  REGION 1..12: note = BUB3-interacting and GLEBS motif-containing protein ZNF207 (181-192)
MPPGMMPMGGMM

SEQ ID NO: 18118 - protein, 9 aa, synthetic construct
  REGION 1..9: note = Pre-mRNA-processing-splicing factor 8 (108-116)
MPWEQIRDV

SEQ ID NO: 18119 - protein, 9 aa, synthetic construct
  REGION 1..9: note = Protein diaphanous homolog 2 (733-741)
MPYEDIRNV

SEQ ID NO: 18120 - protein, 9 aa, synthetic construct
  REGION 1..9: note = Nuclear receptor coactivator 2 (1151-1159)
MQDPNFHTM

SEQ ID NO: 18121 - protein, 9 aa, synthetic construct
  REGION 1..9: note = Heterogeneous nuclear ribonucleoprotein H (352-360)
MQHRYVELF

SEQ ID NO: 18122 - protein, 9 aa, synthetic construct
  REGION 1..9: note = Myosin-7 (77-85)
MQQNPPKFD

SEQ ID NO: 18123 - protein, 9 aa, synthetic construct
  REGION 1..9: note = Laminin subunit alpha-2 (1349-1357)
MRQSRISEI

SEQ ID NO: 18124 - protein, 10 aa, synthetic construct
  REGION 1..10: note = Toll-like receptor 3 (1-10)
MRQTLPCIYF

SEQ ID NO: 18125 - protein, 8 aa, synthetic construct
  REGION 1..8: note = Transmembrane channel-like protein 2 (170-177)
MRSKPWPM

SEQ ID NO: 18126 - protein, 9 aa, synthetic construct
  REGION 1..9: note = Clathrin coat assembly protein AP180 (156-164)
MRTMAPEKL

SEQ ID NO: 18127 - protein, 9 aa, synthetic construct
  REGION 1..9: note = Glucose-6-phosphate translocase (266-274)
MSALEVGGL

SEQ ID NO: 18128 - protein, 8 aa, synthetic construct
  REGION 1..8: note = RING finger protein 148 (1-8)
MSFLRITP

SEQ ID NO: 18129 - protein, 9 aa, synthetic construct
  REGION 1..9: note = Nesprin-1 (4697-4705)
MSKVPTDLA

SEQ ID NO: 18130 - protein, 8 aa, synthetic construct
  REGION 1..8: note = Zinc finger protein ZFPM2 (1-8)
MSRRKQSK

SEQ ID NO: 18131 - protein, 9 aa, synthetic construct
  REGION 1..9: note = Cerebral dopamine neurotrophic factor (103-111)
MSVHMPAMK

SEQ ID NO: 18132 - protein, 9 aa, synthetic construct
  REGION 1..9: note = Heat shock protein 105 kDa (1-9)
MSVVGLDVG

SEQ ID NO: 18133 - protein, 9 aa, synthetic construct
  REGION 1..9: note = Solute carrier family 35 member E2B (144-152)
MTMLFVGLM

SEQ ID NO: 18134 - protein, 9 aa, synthetic construct
  REGION 1..9: note = Integrin beta-7 (1-9)
MVALPMVLV

SEQ ID NO: 18135 - protein, 10 aa, synthetic construct
  REGION 1..10: note = Testis- and ovary-specific PAZ domain-containing protein 1 (583-592)
MVIKEPIIKD

SEQ ID NO: 18136 - protein, 8 aa, synthetic construct
  REGION 1..8: note = Transmembrane and coiled-coil domain-containing protein 1 (85-92)
MVRMKSMF

SEQ ID NO: 18137 - protein, 8 aa, synthetic construct
  REGION 1..8: note = Vomeronasal type-1 receptor 3 (279-286)
MVSPFVLM

SEQ ID NO: 18138 - protein, 9 aa, synthetic construct
  REGION 1..9: note = Receptor expression-enhancing protein 2 (1-9)
MVSWIISRL

SEQ ID NO: 18139 - protein, 9 aa, synthetic construct
  REGION 1..9: note = Secretogranin-1 (32-40)
MVTRCIIEV

SEQ ID NO: 18140 - protein, 10 aa, synthetic construct
  REGION 1..10: note = Protocadherin-19 (125-134)
NAPSFPAAQI

SEQ ID NO: 18141 - protein, 9 aa, synthetic construct
  REGION 1..9: note = Exportin-6 (750-758)
NHASLISAL

SEQ ID NO: 18142 - protein, 9 aa, synthetic construct
  REGION 1..9: note = Olfactomedin-like protein 2B (387-395)
NHASVGPTL

SEQ ID NO: 18143 - protein, 9 aa, synthetic construct
  REGION 1..9: note = Serine-protein kinase ATM (1801-1809)
NHDIWIKTL

SEQ ID NO: 18144 - protein, 12 aa, synthetic construct
  REGION 1..12: note = Histone-binding protein RBBP4 (122-133)
NHEGEVNRARYM

SEQ ID NO: 18145 - protein, 9 aa, synthetic construct
  REGION 1..9: note = WD repeat-containing protein 6 (772-780)
NHISSVRAV

SEQ ID NO: 18146 - protein, 9 aa, synthetic construct
  REGION 1..9: note = Integrator complex subunit 3 (462-470)
NHIVEKRVL

SEQ ID NO: 18147 - protein, 9 aa, synthetic construct
  REGION 1..9: note = Protein RMD5 homolog A (226-234)
NHQKDIQVL

SEQ ID NO: 18148 - protein, 9 aa, synthetic construct
  REGION 1..9: note = Protein dopey-2 (223-231)
NHQLTVKSL

SEQ ID NO: 18149 - protein, 9 aa, synthetic construct
  REGION 1..9: note = Protein FAM193A (991-999)
NHSEPRPGL

SEQ ID NO: 18150 - protein, 9 aa, synthetic construct
  REGION 1..9: note = Myb-binding protein 1A (554-562)
NHSHNVTTV

SEQ ID NO: 18151 - protein, 9 aa, synthetic construct
  REGION 1..9: note = E3 ubiquitin-protein ligase RNF19A (822-830)
NHSHQTMEL

SEQ ID NO: 18152 - protein, 11 aa, synthetic construct
  REGION 1..11: note = Vesicle transport protein SFT2B (73-83)
NIASIGSTIFL

SEQ ID NO: 18153 - protein, 9 aa, synthetic construct
  REGION 1..9: note = Bardet-Biedl syndrome 4 protein (82-90)
NIQESLELF

SEQ ID NO: 18154 - protein, 9 aa, synthetic construct
  REGION 1..9: note = V-type proton ATPase 116 kDa subunit a isoform 3 (810-818)
NKFYSGTGY

SEQ ID NO: 18155 - protein, 9 aa, synthetic construct
  REGION 1..9: note = WD repeat-containing protein 82 (83-91)
NKIDDTIRY

SEQ ID NO: 18156 - protein, 9 aa, synthetic construct
  REGION 1..9: note = C-X-C chemokine receptor type 4 (37-45)
NKIFLPTIY

SEQ ID NO: 18157 - protein, 12 aa, synthetic construct
  REGION 1..12: note = Sialic acid-binding Ig-like lectin 9 (225-236)
NKTVHLNVSYPP

SEQ ID NO: 18158 - protein, 9 aa, synthetic construct
  REGION 1..9: note = Zinc finger and BTB domain-containing protein 38 (494-502)
NKVFALAEY

SEQ ID NO: 18159 - protein, 9 aa, synthetic construct
  REGION 1..9: note = Probable ubiquitin carboxyl-terminal hydrolase FAF-X (359-367)
NKVISSVSY

SEQ ID NO: 18160 - protein, 9 aa, synthetic construct
  REGION 1..9: note = Monocarboxylate transporter 1 (81-89)
NKYGSRIVM

SEQ ID NO: 18161 - protein, 9 aa, synthetic construct
  REGION 1..9: note = Bifunctional glutamate/proline-tRNA ligase (369-377)
NKYNVYPTY

SEQ ID NO: 18162 - protein, 11 aa, synthetic construct
  REGION 1..11: note = 60S ribosomal protein L7 (146-156)
NLKSVNELIYK

SEQ ID NO: 18163 - protein, 9 aa, synthetic construct
  REGION 1..9: note = Protein MMS22-like (862-870)
NLSEVKSIF

SEQ ID NO: 18164 - protein, 10 aa, synthetic construct
  REGION 1..10: note = Leucine-rich repeat and calponin homology domain-containing protein 2 (140-149)
NLYHNCIKTI

SEQ ID NO: 18165 - protein, 9 aa, synthetic construct
  REGION 1..9: note = Lysine-specific histone demethylase 1A (492-500)
NLYKAPILL

SEQ ID NO: 18166 - protein, 8 aa, synthetic construct
  REGION 1..8: note = Dynein regulatory complex protein 1 (2-9)
NPPGSLEA

SEQ ID NO: 18167 - protein, 9 aa, synthetic construct
  REGION 1..9: note = F-box only protein 8 (11-19)
NQQLQQEGY

SEQ ID NO: 18168 - protein, 9 aa, synthetic construct
  REGION 1..9: note = Serine/arginine repetitive matrix protein 2 (1399-1407)
NQSISSPVL

SEQ ID NO: 18169 - protein, 9 aa, synthetic construct
  REGION 1..9: note = COP9 signalosome complex subunit 2 (34-42)
NQYYNSKAL

SEQ ID NO: 18170 - protein, 10 aa, synthetic construct
  REGION 1..10: note = Gamma-aminobutyric acid receptor subunit delta (246-255)
NRGVYIIQSY

SEQ ID NO: 18171 - protein, 11 aa, synthetic construct
  REGION 1..11: note = Anaphase-promoting complex subunit CDC26 (75-85)
NRSSQFGSLEF

SEQ ID NO: 18172 - protein, 9 aa, synthetic construct
  REGION 1..9: note = Ubiquitin-like modifier-activating enzyme 1 (449-457)
NRYDGQVAV

SEQ ID NO: 18173 - protein, 9 aa, synthetic construct
  REGION 1..9: note = Small G protein signaling modulator 3 (329-337)
NSASIFNTL

SEQ ID NO: 18174 - protein, 8 aa, synthetic construct
  REGION 1..8: note = Nuclear transcription factor Y subunit alpha (232-239)
NSGGMVMM

SEQ ID NO: 18175 - protein, 9 aa, synthetic construct
  REGION 1..9: note = Unconventional myosin-XV (3472-3480)
NSSYPYVEI

SEQ ID NO: 18176 - protein, 9 aa, synthetic construct
  REGION 1..9: note = Junction plakoglobin (584-592)
NTIPLFVQL

SEQ ID NO: 18177 - protein, 9 aa, synthetic construct
  REGION 1..9: note = Olfactory receptor 5D18 (7-15)
NTSGTTFTL

SEQ ID NO: 18178 - protein, 9 aa, synthetic construct
  REGION 1..9: note = Kinetochore protein Nuf2 (10-18)
NVAEIVIHI

SEQ ID NO: 18179 - protein, 10 aa, synthetic construct
  REGION 1..10: note = Sodium- and chloride-dependentine transporter 2 (288-297)
NVIICYTLFY

SEQ ID NO: 18180 - protein, 12 aa, synthetic construct
  REGION 1..12: note = Alpha-enolase (118-129)
NVINGGSHAGNK

SEQ ID NO: 18181 - protein, 9 aa, synthetic construct
  REGION 1..9: note = Clustered mitochondria protein homolog (96-104)
NVLDHFSEL

SEQ ID NO: 18182 - protein, 10 aa, synthetic construct
  REGION 1..10: note = Myosin regulatory light chain 12B (155-164)
NYIEFTRILK

SEQ ID NO: 18183 - protein, 8 aa, synthetic construct
  REGION 1..8: note = Protein LYRIC (498-505)
PAEVLVKN

SEQ ID NO: 18184 - protein, 10 aa, synthetic construct
  REGION 1..10: note = Peroxiredoxin-4 (260-269)
PAGKLKYFDK

SEQ ID NO: 18185 - protein, 9 aa, synthetic construct
  REGION 1..9: note = Leucine-rich repeat-containing protein 26 (63-71)
PAVPPGLSL

SEQ ID NO: 18186 - protein, 9 aa, synthetic construct
  REGION 1..9: note = StAR-related lipid transfer protein 13 (243-251)
PFHPKNEKP

SEQ ID NO: 18187 - protein, 10 aa, synthetic construct
  REGION 1..10: note = Dystrophia myotonica WD repeat-containing protein (517-526)
PFSIGRFATL

SEQ ID NO: 18188 - protein, 10 aa, synthetic construct
  REGION 1..10: note = B-lymphocyte antigen CD19 (99-108)
PGPPSEKAWQ

SEQ ID NO: 18189 - protein, 9 aa, synthetic construct
  REGION 1..9: note = Zinc finger protein 853 (438-446)
PGYVVVQEL

SEQ ID NO: 18190 - protein, 12 aa, synthetic construct
  REGION 1..12: note = DNA replication licensing factor MCM6 (505-516)
PISGHYDRSKSL

SEQ ID NO: 18191 - protein, 10 aa, synthetic construct
  REGION 1..10: note = UPF0428 protein CXorf56 (2-11)
PKVVSRSVVC

SEQ ID NO: 18192 - protein, 9 aa, synthetic construct
  REGION 1..9: note = Integrin beta-6 (709-717)
PMIMLGVSL

SEQ ID NO: 18193 - protein, 10 aa, synthetic construct
  REGION 1..10: note = AF4/FMR2 family member 2 (271-280)
PPGLYCKTSM

SEQ ID NO: 18194 - protein, 9 aa, synthetic construct
  REGION 1..9: note = Basic salivary proline-rich protein 4 (50-58)
PPPPPGKPQ

SEQ ID NO: 18195 - protein, 9 aa, synthetic construct
  REGION 1..9: note = RAS guanyl-releasing protein 2 (400-408)
PPPRPPVLE

SEQ ID NO: 18196 - protein, 9 aa, synthetic construct
  REGION 1..9: note = Coiled-coil domain-containing protein 8 (89-97)
PPRLVVGTY

SEQ ID NO: 18197 - protein, 12 aa, synthetic construct
  REGION 1..12: note = RNA-binding protein FUS (344-355)
PPSAKAAIDWFD

SEQ ID NO: 18198 - protein, 8 aa, synthetic construct
  REGION 1..8: note = Cornulin (2-9)
PQLLQNIN

SEQ ID NO: 18199 - protein, 9 aa, synthetic construct
  REGION 1..9: note = Sialate O-acetylesterase (378-386)
PRDKQTVAY

SEQ ID NO: 18200 - protein, 9 aa, synthetic construct
  REGION 1..9: note = Metastasis-associated in colon cancer protein 1 (382-390)
PSFTVVLTV

SEQ ID NO: 18201 - protein, 11 aa, synthetic construct
  REGION 1..11: note = ATP synthase F(0) complex subunit B1, mitochondrial (43-53)
PVPPLPEYGGK

SEQ ID NO: 18202 - protein, 9 aa, synthetic construct
  REGION 1..9: note = MAP7 domain-containing protein 3 (645-653)
QAEDHLKLK

SEQ ID NO: 18203 - protein, 9 aa, synthetic construct
  REGION 1..9: note = 26S proteasome non-ATPase regulatory subunit 12 (265-273)
QALKSVVLY

SEQ ID NO: 18204 - protein, 9 aa, synthetic construct
  REGION 1..9: note = Bromodomain-containing protein 8 (465-473)
QERDKPVPL

SEQ ID NO: 18205 - protein, 10 aa, synthetic construct
  REGION 1..10: note = Prolyl endopeptidase (268-277)
QESSGIAGIL

SEQ ID NO: 18206 - protein, 9 aa, synthetic construct
  REGION 1..9: note = Mitochondrial import inner membrane translocase subunit Tim17-B (140-148)
QFRNAPPFL

SEQ ID NO: 18207 - protein, 9 aa, synthetic construct
  REGION 1..9: note = 60S acidic ribosomal protein P2 (57-65)
QGIGKLASV

SEQ ID NO: 18208 - protein, 11 aa, synthetic construct
  REGION 1..11: note = Salivary acidic proline-rich phosphoprotein 1/2 (82-92)
QGPPPPQGKPQ

SEQ ID NO: 18209 - protein, 9 aa, synthetic construct
  REGION 1..9: note = Protocadherin Fat 4 (557-565)
QGVHPKVSY

SEQ ID NO: 18210 - protein, 9 aa, synthetic construct
  REGION 1..9: note = Transmembrane protein 205 (75-83)
QHAWAQLTF

SEQ ID NO: 18211 - protein, 9 aa, synthetic construct
  REGION 1..9: note = MICOS complex subunit MIC10 (59-67)
QHDFQAPYL

SEQ ID NO: 18212 - protein, 8 aa, synthetic construct
  REGION 1..8: note = CX3C chemokine receptor 1 (144-151)
QHGVTISL

SEQ ID NO: 18213 - protein, 9 aa, synthetic construct
  REGION 1..9: note = 60S ribosomal protein L8 (217-225)
QHIGKPSTI

SEQ ID NO: 18214 - protein, 9 aa, synthetic construct
  REGION 1..9: note = Inositol polyphosphate 5-phosphatase K (105-113)
QHLPYIQIL

SEQ ID NO: 18215 - protein, 9 aa, synthetic construct
  REGION 1..9: note = Torsin-3A (137-145)
QHLVQQLVL

SEQ ID NO: 18216 - protein, 11 aa, synthetic construct
  REGION 1..11: note = Forkhead box protein J3 (593-603)
QHMMPSQAFQM

SEQ ID NO: 18217 - protein, 9 aa, synthetic construct
  REGION 1..9: note = PAX-interacting protein 1 (506-514)
QHQLQQQQL

SEQ ID NO: 18218 - protein, 9 aa, synthetic construct
  REGION 1..9: note = Dual specificity tyrosine-phosphorylation-regulated kinase 1A (475-483)
QHSFFKKTA

SEQ ID NO: 18219 - protein, 9 aa, synthetic construct
  REGION 1..9: note = G protein-regulated inducer of neurite outgrowth 3 (749-757)
QHSVFQSML

SEQ ID NO: 18220 - protein, 9 aa, synthetic construct
  REGION 1..9: note = Histone-lysine N-methyltransferase 2E (207-215)
QHTPTSITL

SEQ ID NO: 18221 - protein, 9 aa, synthetic construct
  REGION 1..9: note = Class A basic helix-loop-helix protein 15 (151-159)
QHYQQQQQV

SEQ ID NO: 18222 - protein, 9 aa, synthetic construct
  REGION 1..9: note = Glutathione peroxidase 7 (62-70)
QHYRALQQL

SEQ ID NO: 18223 - protein, 9 aa, synthetic construct
  REGION 1..9: note = N-terminal EF-hand calcium-binding protein 2 (176-184)
QIQSLLSSV

SEQ ID NO: 18224 - protein, 10 aa, synthetic construct
  REGION 1..10: note = Ig heavy chain V-II region MCE (1-10)
QITLKESGPT

SEQ ID NO: 18225 - protein, 9 aa, synthetic construct
  REGION 1..9: note = CDGSH iron-sulfur domain-containing protein 3, mitochondrial (119-127)
QKAEVGSPL

SEQ ID NO: 18226 - protein, 9 aa, synthetic construct
  REGION 1..9: note = Splicing factor 3B subunit 3 (1087-1095)
QKAEVIMNY

SEQ ID NO: 18227 - protein, 9 aa, synthetic construct
  REGION 1..9: note = Apolipoprotein L6 (219-227)
QKAFAGTTL

SEQ ID NO: 18228 - protein, 10 aa, synthetic construct
  REGION 1..10: note = Synapsin-2 (317-326)
QKIGNNYKAY

SEQ ID NO: 18229 - protein, 9 aa, synthetic construct
  REGION 1..9: note = E3 ubiquitin-protein ligase DTX3L (683-691)
QKLIFTVGY

SEQ ID NO: 18230 - protein, 12 aa, synthetic construct
  REGION 1..12: note = Very-long-chain enoyl-CoA reductase (66-77)
QKLPVGTTATLY

SEQ ID NO: 18231 - protein, 9 aa, synthetic construct
  REGION 1..9: note = ATP-dependent DNA helicase Q1 (438-446)
QKLYEMVSY

SEQ ID NO: 18232 - protein, 10 aa, synthetic construct
  REGION 1..10: note = Melanoma inhibitory activity protein 3 (1518-1527)
QKVEILNELY

SEQ ID NO: 18233 - protein, 9 aa, synthetic construct
  REGION 1..9: note = Clathrin interactor 1 (130-138)
QKVKELVEF

SEQ ID NO: 18234 - protein, 9 aa, synthetic construct
  REGION 1..9: note = Cell growth-regulating nucleolar protein (56-64)
QKYGGKGYE

SEQ ID NO: 18235 - protein, 11 aa, synthetic construct
  REGION 1..11: note = Pre-mRNA-processing-splicing factor 8 (573-583)
QLADGLQYIFA

SEQ ID NO: 18236 - protein, 9 aa, synthetic construct
  REGION 1..9: note = Chloride transport protein 6 (651-659)
QLISNNIKF

SEQ ID NO: 18237 - protein, 9 aa, synthetic construct
  REGION 1..9: note = Probable helicase senataxin (307-315)
QLMDPIVAF

SEQ ID NO: 18238 - protein, 9 aa, synthetic construct
  REGION 1..9: note = BRCA1-associated protein (505-513)
QNKLKEEER

SEQ ID NO: 18239 - protein, 9 aa, synthetic construct
  REGION 1..9: note = dCTP pyrophosphatase 1 (52-60)
QPRNLLLAL

SEQ ID NO: 18240 - protein, 9 aa, synthetic construct
  REGION 1..9: note = E3 ubiquitin-protein ligase TRIM37 (638-646)
QPRPPASLL

SEQ ID NO: 18241 - protein, 12 aa, synthetic construct
  REGION 1..12: note = Salivary acidic proline-rich phosphoprotein 1/2 (81-92)
QQGPPPPQGKPQ

SEQ ID NO: 18242 - protein, 9 aa, synthetic construct
  REGION 1..9: note = GTP-binding protein 1 (587-595)
QQIKMQSTK

SEQ ID NO: 18243 - protein, 9 aa, synthetic construct
  REGION 1..9: note = Titin (1700-1708)
QQKPFFKKK

SEQ ID NO: 18244 - protein, 9 aa, synthetic construct
  REGION 1..9: note = Histamine H1 receptor (130-138)
QQPLRYLKY

SEQ ID NO: 18245 - protein, 9 aa, synthetic construct
  REGION 1..9: note = 5-oxoprolinase (164-172)
QQPVDLGAL

SEQ ID NO: 18246 - protein, 9 aa, synthetic construct
  REGION 1..9: note = Protein sel-1 homolog 3 (692-700)
QQRLAQMLF

SEQ ID NO: 18247 - protein, 9 aa, synthetic construct
  REGION 1..9: note = 60S ribosomal protein L3 (203-211)
QQVPVNQVF

SEQ ID NO: 18248 - protein, 9 aa, synthetic construct
  REGION 1..9: note = Pyruvate dehydrogenase protein X component, mitochondrial (463-471)
QRQLITVTM

SEQ ID NO: 18249 - protein, 9 aa, synthetic construct
  REGION 1..9: note = E3 ubiquitin-protein ligase RBBP6 (887-895)
QSHRSRNIG

SEQ ID NO: 18250 - protein, 9 aa, synthetic construct
  REGION 1..9: note = Mismatch repair endonuclease PMS2 (237-245)
QSLIPFVQL

SEQ ID NO: 18251 - protein, 9 aa, synthetic construct
  REGION 1..9: note = Myosin-7 (419-427)
QVIYATGAL

SEQ ID NO: 18252 - protein, 10 aa, synthetic construct
  REGION 1..10: note = CD160 antigen (101-110)
QVTPLHSGTY

SEQ ID NO: 18253 - protein, 9 aa, synthetic construct
  REGION 1..9: note = tRNA (adenine(58)-N(1))-methyltransferase non-catalytic subunit TRM6 (198-206)
RAGNKMIVM

SEQ ID NO: 18254 - protein, 9 aa, synthetic construct
  REGION 1..9: note = Nucleolar GTP-binding protein 2 (400-408)
RAKPEYISK

SEQ ID NO: 18255 - protein, 10 aa, synthetic construct
  REGION 1..10: note = Solute carrier family 15 member 3 (102-111)
RAVALSLLLY

SEQ ID NO: 18256 - protein, 9 aa, synthetic construct
  REGION 1..9: note = tRNA dimethylallyltransferase, mitochondrial (8-16)
RAVPVGSGL

SEQ ID NO: 18257 - protein, 10 aa, synthetic construct
  REGION 1..10: note = Translocating chain-associated membrane protein 1 (154-163)
RAYPHNLMTF

SEQ ID NO: 18258 - protein, 11 aa, synthetic construct
  REGION 1..11: note = Phosphoribosyl pyrophosphate synthase-associated protein 1 (68-78)
RDVNTAVMELL

SEQ ID NO: 18259 - protein, 9 aa, synthetic construct
  REGION 1..9: note = Voltage-dependent L-type calcium channel subunit alpha-1D (1825-1833)
REDPEIHGY

SEQ ID NO: 18260 - protein, 10 aa, synthetic construct
  REGION 1..10: note = Inner nuclear membrane protein Man1 (459-468)
REEVSPTGSF

SEQ ID NO: 18261 - protein, 9 aa, synthetic construct
  REGION 1..9: note = Gamma-glutamyltranspeptidase 1 (107-115)
REVAPRLAF

SEQ ID NO: 18262 - protein, 9 aa, synthetic construct
  REGION 1..9: note = Ras-related protein Rab-30 (70-78)
RFRSITQSY

SEQ ID NO: 18263 - protein, 9 aa, synthetic construct
  REGION 1..9: note = UHRF1-binding protein 1-like (15-23)
RFTKNLSPD

SEQ ID NO: 18264 - protein, 9 aa, synthetic construct
  REGION 1..9: note = DNA-directed RNA polymerase I subunit RPA2 (766-774)
RGFAHGSVY

SEQ ID NO: 18265 - protein, 11 aa, synthetic construct
  REGION 1..11: note = Endothelial differentiation-related factor 1 (133-143)
RGKDIGKPIEK

SEQ ID NO: 18266 - protein, 9 aa, synthetic construct
  REGION 1..9: note = NADH dehydrogenase (ubiquinone) iron-sulfur protein 2, mitochondrial (118-126)
RGTEKLIEY

SEQ ID NO: 18267 - protein, 9 aa, synthetic construct
  REGION 1..9: note = Membrane-associated tyrosine- and threonine-specific cdc2-inhibitory kinase (33-41)
RHAEPGFSL

SEQ ID NO: 18268 - protein, 9 aa, synthetic construct
  REGION 1..9: note = Colorectal mutant cancer protein (800-808)
RHETQVRML

SEQ ID NO: 18269 - protein, 10 aa, synthetic construct
  REGION 1..10: note = Beta-1,4-galactosyltransferase 6 (247-256)
RHFAAKLDKY

SEQ ID NO: 18270 - protein, 9 aa, synthetic construct
  REGION 1..9: note = Exophilin-5 (1818-1826)
RHFSESTSI

SEQ ID NO: 18271 - protein, 9 aa, synthetic construct
  REGION 1..9: note = PDZ domain-containing protein GIPC1 (190-198)
RHYEVARLL

SEQ ID NO: 18272 - protein, 10 aa, synthetic construct
  REGION 1..10: note = 26S proteasome non-ATPase regulatory subunit 14 (198-207)
RHYYSITINY

SEQ ID NO: 18273 - protein, 9 aa, synthetic construct
  REGION 1..9: note = Ubiquitin carboxyl-terminal hydrolase 40 (780-788)
RIKAIKELK

SEQ ID NO: 18274 - protein, 10 aa, synthetic construct
  REGION 1..10: note = ADP-ribosylation factor-like protein 2-binding protein (84-93)
RIPEFNMAAF

SEQ ID NO: 18275 - protein, 9 aa, synthetic construct
  REGION 1..9: note = U5 small nuclear ribonucleoprotein 200 kDa helicase (234-242)
RIQSKLYRA

SEQ ID NO: 18276 - protein, 10 aa, synthetic construct
  REGION 1..10: note = 60S ribosomal protein L4 (268-277)
RKAASLKSNY

SEQ ID NO: 18277 - protein, 9 aa, synthetic construct
  REGION 1..9: note = Selenoprotein H (8-16)
RKAEAAVVA

SEQ ID NO: 18278 - protein, 9 aa, synthetic construct
  REGION 1..9: note = Polyadenylate-binding protein 4 (374-382)
RKAHLTNQY

SEQ ID NO: 18279 - protein, 9 aa, synthetic construct
  REGION 1..9: note = Sterol regulatory element-binding protein 2 (371-379)
RKAIDYIKY

SEQ ID NO: 18280 - protein, 9 aa, synthetic construct
  REGION 1..9: note = DNA-directed RNA polymerase II subunit RPB1 (1375-1383)
RKALERELY

SEQ ID NO: 18281 - protein, 10 aa, synthetic construct
  REGION 1..10: note = Mid1-interacting protein 1 (163-172)
RKANILTNRY

SEQ ID NO: 18282 - protein, 11 aa, synthetic construct
  REGION 1..11: note = 26S proteasome non-ATPase regulatory subunit 3 (314-324)
RKAPQHTAVGF

SEQ ID NO: 18283 - protein, 9 aa, synthetic construct
  REGION 1..9: note = 60S ribosomal protein L23 (90-98)
RKDGVFLYF

SEQ ID NO: 18284 - protein, 9 aa, synthetic construct
  REGION 1..9: note = Eukaryotic translation initiation factor 5B (376-384)
RKEEERLEQ

SEQ ID NO: 18285 - protein, 9 aa, synthetic construct
  REGION 1..9: note = Uridine-cytidine kinase 2 (119-127)
RKEETVTVY

SEQ ID NO: 18286 - protein, 10 aa, synthetic construct
  REGION 1..10: note = Histone H2B type 1-K (34-43)
RKESYSVYVY

SEQ ID NO: 18287 - protein, 10 aa, synthetic construct
  REGION 1..10: note = MOB kinase activator 3A (20-29)
RKFEPGTQRF

SEQ ID NO: 18288 - protein, 9 aa, synthetic construct
  REGION 1..9: note = Group XV phospholipase A2 (296-304)
RKFFQDIGF

SEQ ID NO: 18289 - protein, 11 aa, synthetic construct
  REGION 1..11: note = General transcription factor II-I (878-888)
RKFGEAIGMGF

SEQ ID NO: 18290 - protein, 9 aa, synthetic construct
  REGION 1..9: note = Ribosome biogenesis protein TSR3 homolog (186-194)
RKFKWGKGF

SEQ ID NO: 18291 - protein, 11 aa, synthetic construct
  REGION 1..11: note = Elongation factor 1-gamma (51-61)
RKFPAGKVPAF

SEQ ID NO: 18292 - protein, 9 aa, synthetic construct
  REGION 1..9: note = Actin filament-associated protein 1-like 2 (481-489)
RKFSEPNTY

SEQ ID NO: 18293 - protein, 9 aa, synthetic construct
  REGION 1..9: note = Casein kinase I isoform delta (98-106)
RKFSLKTVL

SEQ ID NO: 18294 - protein, 9 aa, synthetic construct
  REGION 1..9: note = 60S ribosomal protein L35 (70-78)
RKFYKGKKY

SEQ ID NO: 18295 - protein, 9 aa, synthetic construct
  REGION 1..9: note = Eukaryotic peptide chain release factor GTP-binding subunit ERF3B (315-323)
RKGEFETGF

SEQ ID NO: 18296 - protein, 10 aa, synthetic construct
  REGION 1..10: note = Cytochrome c oxidase subunit 5A, mitochondrial (71-80)
RKGINTLVTY

SEQ ID NO: 18297 - protein, 9 aa, synthetic construct
  REGION 1..9: note = Heat shock protein HSP 90-alpha (512-520)
RKHGLEVIY

SEQ ID NO: 18298 - protein, 10 aa, synthetic construct
  REGION 1..10: note = Nardilysin (545-554)
RKIEDNEFHY

SEQ ID NO: 18299 - protein, 10 aa, synthetic construct
  REGION 1..10: note = Lamin-B1 (473-482)
RKIGDTSVSY

SEQ ID NO: 18300 - protein, 9 aa, synthetic construct
  REGION 1..9: note = Mediator of RNA polymerase II transcription subunit 23 (123-131)
RKIIGGVDY

SEQ ID NO: 18301 - protein, 9 aa, synthetic construct
  REGION 1..9: note = Immunoglobulin superfamily member 10 (1201-1209)
RKIPWQQNF

SEQ ID NO: 18302 - protein, 9 aa, synthetic construct
  REGION 1..9: note = Ubiquitin carboxyl-terminal hydrolase 22 (420-428)
RKITTYVSF

SEQ ID NO: 18303 - protein, 9 aa, synthetic construct
  REGION 1..9: note = 60S ribosomal protein L10 (38-46)
RKKAKVDEF

SEQ ID NO: 18304 - protein, 9 aa, synthetic construct
  REGION 1..9: note = Cytochrome c oxidase subunit 6C (45-53)
RKKAYADFY

SEQ ID NO: 18305 - protein, 9 aa, synthetic construct
  REGION 1..9: note = Protein ENL (20-28)
RKKPTTEGF

SEQ ID NO: 18306 - protein, 10 aa, synthetic construct
  REGION 1..10: note = 60S ribosomal protein L15 (12-21)
RKKQSDVMRF

SEQ ID NO: 18307 - protein, 9 aa, synthetic construct
  REGION 1..9: note = Cytochrome c1, heme protein, mitochondrial (317-325)
RKLAYRPPK

SEQ ID NO: 18308 - protein, 11 aa, synthetic construct
  REGION 1..11: note = CD2 antigen cytoplasmic tail-binding protein 2 (320-330)
RKLDPPGGQFY

SEQ ID NO: 18309 - protein, 9 aa, synthetic construct
  REGION 1..9: note = Protein O-GlcNAcase (156-164)
RKLDQVSQF

SEQ ID NO: 18310 - protein, 9 aa, synthetic construct
  REGION 1..9: note = Neurabin-2 (179-187)
RKLDVVVRF

SEQ ID NO: 18311 - protein, 11 aa, synthetic construct
  REGION 1..11: note = Prohibitin (239-249)
RKLEAAEDIAY

SEQ ID NO: 18312 - protein, 9 aa, synthetic construct
  REGION 1..9: note = Thyroid transcription factor 1-associated protein 26 (59-67)
RKLKIQQSY

SEQ ID NO: 18313 - protein, 9 aa, synthetic construct
  REGION 1..9: note = Pre-mRNA-processing factor 19 (422-430)
RKLKNFKTL

SEQ ID NO: 18314 - protein, 9 aa, synthetic construct
  REGION 1..9: note = Toll-like receptor 9 (337-345)
RKLNLSFNY

SEQ ID NO: 18315 - protein, 10 aa, synthetic construct
  REGION 1..10: note = von Willebrand factor A domain-containing protein 9 (424-433)
RKLPEKTQTF

SEQ ID NO: 18316 - protein, 9 aa, synthetic construct
  REGION 1..9: note = UAP56-interacting factor (165-173)
RKNNIPANF

SEQ ID NO: 18317 - protein, 10 aa, synthetic construct
  REGION 1..10: note = Activating signal cointegrator 1 complex subunit 1 (17-26)
RKNPVQEQTY

SEQ ID NO: 18318 - protein, 9 aa, synthetic construct
  REGION 1..9: note = 5'-AMP-activated protein kinase catalytic subunit alpha-1 (447-455)
RKNPVTSTY

SEQ ID NO: 18319 - protein, 10 aa, synthetic construct
  REGION 1..10: note = Nuclear pore complex protein Nup98-Nup96 (1206-1215)
RKPDEDMKLY

SEQ ID NO: 18320 - protein, 10 aa, synthetic construct
  REGION 1..10: note = Ubiquitin carboxyl-terminal hydrolase 47 (700-709)
RKPDQVFQSY

SEQ ID NO: 18321 - protein, 9 aa, synthetic construct
  REGION 1..9: note = Transcriptional regulator ATRX (81-89)
RKPSIVTKY

SEQ ID NO: 18322 - protein, 9 aa, synthetic construct
  REGION 1..9: note = Bifunctional polynucleotide phosphatase/kinase (483-491)
RKQFEAPTL

SEQ ID NO: 18323 - protein, 9 aa, synthetic construct
  REGION 1..9: note = DNA-dependent protein kinase catalytic subunit (70-78)
RKSLNSIEF

SEQ ID NO: 18324 - protein, 9 aa, synthetic construct
  REGION 1..9: note = Serine/threonine-protein phosphatase 6 regulatory subunit 1 (134-142)
RKTDQLVSF

SEQ ID NO: 18325 - protein, 11 aa, synthetic construct
  REGION 1..11: note = Histone H4 (79-89)
RKTVTAMDVVY

SEQ ID NO: 18326 - protein, 9 aa, synthetic construct
  REGION 1..9: note = Flap endonuclease 1 (29-37)
RKVAIDASM

SEQ ID NO: 18327 - protein, 11 aa, synthetic construct
  REGION 1..11: note = 60S ribosome subunit biogenesis protein NIP7 homolog (154-164)
RKVDPMAIVVF

SEQ ID NO: 18328 - protein, 10 aa, synthetic construct
  REGION 1..10: note = E3 ubiquitin/ISG15 ligase TRIM25 (236-245)
RKVEQLQQEY

SEQ ID NO: 18329 - protein, 9 aa, synthetic construct
  REGION 1..9: note = Mitochondrial carrier homolog 2 (287-295)
RKVPFGKTY

SEQ ID NO: 18330 - protein, 9 aa, synthetic construct
  REGION 1..9: note = Fatty acid desaturase 1 (40-48)
RKVYNISEF

SEQ ID NO: 18331 - protein, 9 aa, synthetic construct
  REGION 1..9: note = Glucose-6-phosphate translocase (126-134)
RKWFEPSQF

SEQ ID NO: 18332 - protein, 12 aa, synthetic construct
  REGION 1..12: note = Heterogeneous nuclear ribonucleoprotein R (145-156)
RKYGGPPPDSVY

SEQ ID NO: 18333 - protein, 9 aa, synthetic construct
  REGION 1..9: note = Serine/threonine-protein phosphatase 4 catalytic subunit (132-140)
RKYGSVTVW

SEQ ID NO: 18334 - protein, 9 aa, synthetic construct
  REGION 1..9: note = Vigilin (87-95)
RKYKDMNQF

SEQ ID NO: 18335 - protein, 9 aa, synthetic construct
  REGION 1..9: note = Lysine-specific demethylase 5A (773-781)
RKYPENDLF

SEQ ID NO: 18336 - protein, 9 aa, synthetic construct
  REGION 1..9: note = Pre-mRNA-processing-splicing factor 8 (217-225)
RKYVNGSTY

SEQ ID NO: 18337 - protein, 9 aa, synthetic construct
  REGION 1..9: note = Max-binding protein MNT (295-303)
RLAELKHEL

SEQ ID NO: 18338 - protein, 9 aa, synthetic construct
  REGION 1..9: note = Protein unc-93 homolog B1 (374-382)
RLAYLLVAY

SEQ ID NO: 18339 - protein, 9 aa, synthetic construct
  REGION 1..9: note = Nuclear pore complex protein Nup85 (162-170)
RLDEARQML

SEQ ID NO: 18340 - protein, 9 aa, synthetic construct
  REGION 1..9: note = Acetyl-CoA carboxylase 2 (765-773)
RLGGIPVGV

SEQ ID NO: 18341 - protein, 9 aa, synthetic construct
  REGION 1..9: note = X-ray repair cross-complementing protein 6 (517-525)
RLGSLVDEF

SEQ ID NO: 18342 - protein, 9 aa, synthetic construct
  REGION 1..9: note = N-alpha-acetyltransferase 35, NatC auxiliary subunit (331-339)
RLIDRIKTV

SEQ ID NO: 18343 - protein, 10 aa, synthetic construct
  REGION 1..10: note = Cyclic GMP-AMP synthase (353-362)
RLKPFYLVPK

SEQ ID NO: 18344 - protein, 9 aa, synthetic construct
  REGION 1..9: note = Myosin light chain kinase 2, skeletal/cardiac muscle (553-561)
RLKSQILLK

SEQ ID NO: 18345 - protein, 9 aa, synthetic construct
  REGION 1..9: note = tRNA wybutosine-synthesizing protein 4 (311-319)
RLSPVSPAL

SEQ ID NO: 18346 - protein, 9 aa, synthetic construct
  REGION 1..9: note = DnaJ homolog subfamily C member 8 (45-53)
RLTRPGSSY

SEQ ID NO: 18347 - protein, 9 aa, synthetic construct
  REGION 1..9: note = C-type lectin domain family 4 member F (36-44)
RLVQATPAF

SEQ ID NO: 18348 - protein, 9 aa, synthetic construct
  REGION 1..9: note = Proteasome assembly chaperone 4 (20-28)
RLWEQLVHF

SEQ ID NO: 18349 - protein, 10 aa, synthetic construct
  REGION 1..10: note = Laminin subunit beta-3 (1125-1134)
RMKDMELELL

SEQ ID NO: 18350 - protein, 9 aa, synthetic construct
  REGION 1..9: note = Cytochrome c oxidase assembly protein COX15 homolog (153-161)
RMWGRLVGL

SEQ ID NO: 18351 - protein, 9 aa, synthetic construct
  REGION 1..9: note = Histone deacetylase complex subunit SAP18 (117-125)
RPGYRVKEI

SEQ ID NO: 18352 - protein, 10 aa, synthetic construct
  REGION 1..10: note = R3H domain-containing protein 2 (2-11)
RPPVTKASSF

SEQ ID NO: 18353 - protein, 9 aa, synthetic construct
  REGION 1..9: note = Short transient receptor potential channel 4-associated protein (31-39)
RPRPGNILL

SEQ ID NO: 18354 - protein, 9 aa, synthetic construct
  REGION 1..9: note = Glycogen synthase kinase-3 beta (306-314)
RPRTPPEAI

SEQ ID NO: 18355 - protein, 9 aa, synthetic construct
  REGION 1..9: note = Transcription initiation factor IIB (169-177)
RQEGVPRTF

SEQ ID NO: 18356 - protein, 10 aa, synthetic construct
  REGION 1..10: note = Protein FAM46A (224-233)
RQFEFSVDSF

SEQ ID NO: 18357 - protein, 9 aa, synthetic construct
  REGION 1..9: note = Pre-rRNA-processing protein TSR1 homolog (574-582)
RQGTPLIAF

SEQ ID NO: 18358 - protein, 9 aa, synthetic construct
  REGION 1..9: note = NADH dehydrogenase (ubiquinone) 1 subunit C2 (59-67)
RQLLYITAF

SEQ ID NO: 18359 - protein, 9 aa, synthetic construct
  REGION 1..9: note = Cytochrome b-245 heavy chain (147-155)
RQNESYLNF

SEQ ID NO: 18360 - protein, 9 aa, synthetic construct
  REGION 1..9: note = Rho GTPase-activating protein 4 (492-500)
RQPRPSSQY

SEQ ID NO: 18361 - protein, 10 aa, synthetic construct
  REGION 1..10: note = Protein strawberry notch homolog 1 (79-88)
RQQPPSTTTF

SEQ ID NO: 18362 - protein, 9 aa, synthetic construct
  REGION 1..9: note = Large proline-rich protein BAG6 (780-788)
RSFFHQHYL

SEQ ID NO: 18363 - protein, 9 aa, synthetic construct
  REGION 1..9: note = DnaJ homolog subfamily C member 10 (220-228)
RSKESLVSF

SEQ ID NO: 18364 - protein, 9 aa, synthetic construct
  REGION 1..9: note = DNA-dependent protein kinase catalytic subunit (3046-3054)
RSKLKLLLQ

SEQ ID NO: 18365 - protein, 10 aa, synthetic construct
  REGION 1..10: note = Protein SON (1072-1081)
RSMMSPMADR

SEQ ID NO: 18366 - protein, 9 aa, synthetic construct
  REGION 1..9: note = Small nuclear ribonucleoprotein E (28-36)
RSQIQVWLY

SEQ ID NO: 18367 - protein, 10 aa, synthetic construct
  REGION 1..10: note = PHD finger protein 3 (815-824)
RTKYIDDTVK

SEQ ID NO: 18368 - protein, 9 aa, synthetic construct
  REGION 1..9: note = 60S ribosomal protein L34 (24-32)
RTPGNRIVY

SEQ ID NO: 18369 - protein, 9 aa, synthetic construct
  REGION 1..9: note = Androglobin (1138-1146)
RTSKPDAFI

SEQ ID NO: 18370 - protein, 9 aa, synthetic construct
  REGION 1..9: note = Eukaryotic translation initiation factor 2 subunit 2 (182-190)
RVFNIMREK

SEQ ID NO: 18371 - protein, 9 aa, synthetic construct
  REGION 1..9: note = Ankyrin repeat domain-containing protein 13C (353-361)
RVGNFLADF

SEQ ID NO: 18372 - protein, 9 aa, synthetic construct
  REGION 1..9: note = Eyes absent homolog 1 (440-448)
RVKEIYNTY

SEQ ID NO: 18373 - protein, 9 aa, synthetic construct
  REGION 1..9: note = NADH dehydrogenase (ubiquinone) 1 beta subcomplex subunit 5, mitochondrial (150-158)
RVKELEVRK

SEQ ID NO: 18374 - protein, 9 aa, synthetic construct
  REGION 1..9: note = Histone-lysine N-methyltransferase EZH2 (18-26)
RVKSEYMRL

SEQ ID NO: 18375 - protein, 9 aa, synthetic construct
  REGION 1..9: note = Bystin (257-265)
RVRDDVAEY

SEQ ID NO: 18376 - protein, 9 aa, synthetic construct
  REGION 1..9: note = Ribonucleoside-diphosphate reductase subunit M2 (288-296)
RVREIIINA

SEQ ID NO: 18377 - protein, 9 aa, synthetic construct
  REGION 1..9: note = Leydig cell tumor 10 kDa protein homolog (42-50)
RVVQQQKLK

SEQ ID NO: 18378 - protein, 10 aa, synthetic construct
  REGION 1..10: note = Thioredoxin-related transmembrane protein 2 (198-207)
RYTDVSTRYK

SEQ ID NO: 18379 - protein, 9 aa, synthetic construct
  REGION 1..9: note = Dipeptidyl peptidase 3 (692-700)
SAAGLIRSF

SEQ ID NO: 18380 - protein, 9 aa, synthetic construct
  REGION 1..9: note = Cyclin-dependent kinase 11B (785-793)
SAAGPGFSL

SEQ ID NO: 18381 - protein, 9 aa, synthetic construct
  REGION 1..9: note = Fanconi anemia group M protein (1313-1321)
SAAKNEELL

SEQ ID NO: 18382 - protein, 9 aa, synthetic construct
  REGION 1..9: note = Integrin beta-7 (338-346)
SAANIQPIF

SEQ ID NO: 18383 - protein, 9 aa, synthetic construct
  REGION 1..9: note = Deleted in malignant brain tumors 1 protein (202-210)
SAAQPQSTL

SEQ ID NO: 18384 - protein, 9 aa, synthetic construct
  REGION 1..9: note = Cell division cycle and apoptosis regulator protein 1 (253-261)
SAASITPLL

SEQ ID NO: 18385 - protein, 9 aa, synthetic construct
  REGION 1..9: note = Magnesium transporter protein 1 (108-116)
SAFTNRIFF

SEQ ID NO: 18386 - protein, 9 aa, synthetic construct
  REGION 1..9: note = Rho guanine nucleotide exchange factor 2 (122-130)
SAIYPSDSF

SEQ ID NO: 18387 - protein, 9 aa, synthetic construct
  REGION 1..9: note = Pleckstrin homology domain-containing family B member 1 (11-19)
SALESPFEE

SEQ ID NO: 18388 - protein, 9 aa, synthetic construct
  REGION 1..9: note = 14-3-3 protein eta (25-33)
SAMKAVTEL

SEQ ID NO: 18389 - protein, 11 aa, synthetic construct
  REGION 1..11: note = Nuclease-sensitive element-binding protein 1 (314-324)
SAPEAEQGGAE

SEQ ID NO: 18390 - protein, 9 aa, synthetic construct
  REGION 1..9: note = Peroxisomal multifunctional enzyme type 2 (151-159)
SASGIYGNF

SEQ ID NO: 18391 - protein, 9 aa, synthetic construct
  REGION 1..9: note = Multidrug resistance-associated protein 4 (326-334)
SASKIIVFV

SEQ ID NO: 18392 - protein, 9 aa, synthetic construct
  REGION 1..9: note = CapZ-interacting protein (15-23)
SASPSVAQL

SEQ ID NO: 18393 - protein, 9 aa, synthetic construct
  REGION 1..9: note = Mucin-20 (558-566)
SAVGKTTSF

SEQ ID NO: 18394 - protein, 9 aa, synthetic construct
  REGION 1..9: note = ADP-dependent glucokinase (7-15)
SAYAGFLAL

SEQ ID NO: 18395 - protein, 9 aa, synthetic construct
  REGION 1..9: note = AFG3-like protein 2 (656-664)
SAYAQIVQF

SEQ ID NO: 18396 - protein, 11 aa, synthetic construct
  REGION 1..11: note = HLA class I histocompatibility antigen, Cw-7 alpha chain (115-125)
SAYDGKDYIAL

SEQ ID NO: 18397 - protein, 9 aa, synthetic construct
  REGION 1..9: note = Heterogeneous nuclear ribonucleoprotein D-like (363-371)
SAYGGDQNY

SEQ ID NO: 18398 - protein, 9 aa, synthetic construct
  REGION 1..9: note = Cyclic AMP-responsive element-binding protein 1 (143-151)
SDAPGVPRI

SEQ ID NO: 18399 - protein, 9 aa, synthetic construct
  REGION 1..9: note = Obscurin (2339-2347)
SDGLYRKLI

SEQ ID NO: 18400 - protein, 10 aa, synthetic construct
  REGION 1..10: note = Transgelin-2 (163-172)
SDNQLQEGKN

SEQ ID NO: 18401 - protein, 11 aa, synthetic construct
  REGION 1..11: note = Histone H2B type 1-K (113-123)
SEGTKAVTKYT

SEQ ID NO: 18402 - protein, 10 aa, synthetic construct
  REGION 1..10: note = Tumor protein D54 (166-175)
SFEDRVGTIK

SEQ ID NO: 18403 - protein, 12 aa, synthetic construct
  REGION 1..12: note = Ubiquitin-conjugating enzyme E2 J1 (236-247)
SFHQPTQPVAKN

SEQ ID NO: 18404 - protein, 9 aa, synthetic construct
  REGION 1..9: note = Lipase member J (205-213)
SFKKFIGSK

SEQ ID NO: 18405 - protein, 10 aa, synthetic construct
  REGION 1..10: note = DNA damage-binding protein 1 (1096-1105)
SFLDISRPKM

SEQ ID NO: 18406 - protein, 10 aa, synthetic construct
  REGION 1..10: note = Dynein heavy chain 14, axonemal (3238-3247)
SFLNMRVPTL

SEQ ID NO: 18407 - protein, 9 aa, synthetic construct
  REGION 1..9: note = Actin-related protein 3 (170-178)
SGDGVTHVI

SEQ ID NO: 18408 - protein, 9 aa, synthetic construct
  REGION 1..9: note = Protein phosphatase 1 regulatory subunit 14B (21-29)
SGGPGPRVY

SEQ ID NO: 18409 - protein, 10 aa, synthetic construct
  REGION 1..10: note Dolichyl-diphosphooligosaccharide-proteinosyltransferase subunit 1 (272-281)
SGISSIRSFK

SEQ ID NO: 18410 - protein, 9 aa, synthetic construct
  REGION 1..9: note = Kinesin-like protein KIFC2 (600-608)
SHALVTLTL

SEQ ID NO: 18411 - protein, 9 aa, synthetic construct
  REGION 1..9: note = Sorting nexin-19 (151-159)
SHAVAQSVL

SEQ ID NO: 18412 - protein, 9 aa, synthetic construct
  REGION 1..9: note = Probable E3 ubiquitin-protein ligase HERC4 (280-288)
SHEINPRKV

SEQ ID NO: 18413 - protein, 12 aa, synthetic construct
  REGION 1..12: note = Mucin-7 (41-52)
SHFELPHYPGLL

SEQ ID NO: 18414 - protein, 9 aa, synthetic construct
  REGION 1..9: note = Histone-lysine N-methyltransferase 2D (2564-2572)
SHFGPGPTL

SEQ ID NO: 18415 - protein, 8 aa, synthetic construct
  REGION 1..8: note = Putative uncharacterized protein FLJ37218 (158-165)
SHFTDQEL

SEQ ID NO: 18416 - protein, 9 aa, synthetic construct
  REGION 1..9: note = Tapasin (318-326)
SHFYPSGGL

SEQ ID NO: 18417 - protein, 9 aa, synthetic construct
  REGION 1..9: note = Translational activator GCN1 (674-682)
SHHPSLVAV

SEQ ID NO: 18418 - protein, 9 aa, synthetic construct
  REGION 1..9: note = Transcriptional repressor p66-beta (322-330)
SHIQPGTVN

SEQ ID NO: 18419 - protein, 9 aa, synthetic construct
  REGION 1..9: note = Disintegrin and metalloproteinase domain-containing protein 10 (377-385)
SHITFAHEV

SEQ ID NO: 18420 - protein, 9 aa, synthetic construct
  REGION 1..9: note = Niemann-Pick C1 protein (1169-1177)
SHITRAFTV

SEQ ID NO: 18421 - protein, 9 aa, synthetic construct
  REGION 1..9: note = Endothelial PAS domain-containing protein 1 (49-57)
SHLDKASIM

SEQ ID NO: 18422 - protein, 9 aa, synthetic construct
  REGION 1..9: note = Retrotransposon-derived protein PEG10 (219-227)
SHLEVAKSL

SEQ ID NO: 18423 - protein, 9 aa, synthetic construct
  REGION 1..9: note Dolichyl-diphosphooligosaccharide-proteinosyltransferase subunit 2 (169-177)
SHLSQQADL

SEQ ID NO: 18424 - protein, 9 aa, synthetic construct
  REGION 1..9: note = Protein FAM78A (95-103)
SHMEFYNQY

SEQ ID NO: 18425 - protein, 9 aa, synthetic construct
  REGION 1..9: note = THO complex subunit 5 homolog (470-478)
SHMETTMKL

SEQ ID NO: 18426 - protein, 9 aa, synthetic construct
  REGION 1..9: note = Nicastrin (219-227)
SHMHAVIST

SEQ ID NO: 18427 - protein, 9 aa, synthetic construct
  REGION 1..9: note = Regulation of nuclear pre-mRNA domain-containing protein 2 (503-511)
SHNPLANIL

SEQ ID NO: 18428 - protein, 9 aa, synthetic construct
  REGION 1..9: note = Myotubularin-related protein 6 (41-49)
SHQKETWIL

SEQ ID NO: 18429 - protein, 12 aa, synthetic construct
  REGION 1..12: note = Cytochrome c oxidase subunit 7B, mitochondrial (25-36)
SHQKRTPDFHDK

SEQ ID NO: 18430 - protein, 9 aa, synthetic construct
  REGION 1..9: note = Transmembrane protein 201 (295-303)
SHQTGVVAL

SEQ ID NO: 18431 - protein, 9 aa, synthetic construct
  REGION 1..9: note = Squalene monooxygenase (461-469)
SHSFVVNIL

SEQ ID NO: 18432 - protein, 9 aa, synthetic construct
  REGION 1..9: note = Zinc transporter ZIP6 (388-396)
SHSHEEPAM

SEQ ID NO: 18433 - protein, 9 aa, synthetic construct
  REGION 1..9: note = Transmembrane protein 214 (503-511)
SHSSFQASL

SEQ ID NO: 18434 - protein, 9 aa, synthetic construct
  REGION 1..9: note = 39S ribosomal protein L17, mitochondrial (167-175)
SHTAQTPGI

SEQ ID NO: 18435 - protein, 9 aa, synthetic construct
  REGION 1..9: note = CLOCK-interacting pacemaker (249-257)
SHVAKAPSL

SEQ ID NO: 18436 - protein, 9 aa, synthetic construct
  REGION 1..9: note = Pre-mRNA-processing-splicing factor 8 (2254-2262)
SHYERVQML

SEQ ID NO: 18437 - protein, 9 aa, synthetic construct
  REGION 1..9: note = DNA-binding protein RFX7 (154-162)
SHYIGTKSM

SEQ ID NO: 18438 - protein, 9 aa, synthetic construct
  REGION 1..9: note = Dual specificity protein kinase CLK1 (54-62)
SHYLESRSI

SEQ ID NO: 18439 - protein, 9 aa, synthetic construct
  REGION 1..9: note = Protein EVI2B (202-210)
SIAAILIGV

SEQ ID NO: 18440 - protein, 9 aa, synthetic construct
  REGION 1..9: note = DNA-directed RNA polymerase II subunit RPB2 (468-476)
SIAPRMMSV

SEQ ID NO: 18441 - protein, 9 aa, synthetic construct
  REGION 1..9: note = E3 ubiquitin-protein ligase RNF19A (93-101)
SIESIHSEM

SEQ ID NO: 18442 - protein, 9 aa, synthetic construct
  REGION 1..9: note = Translocon-associated protein subunit delta (126-134)
SIIPPLFTV

SEQ ID NO: 18443 - protein, 12 aa, synthetic construct
  REGION 1..12: note = Alpha-enolase (2-13)
SILKIHAREIFD

SEQ ID NO: 18444 - protein, 9 aa, synthetic construct
  REGION 1..9: note = Copper-transporting ATPase 2 (876-884)
SINAHGSVL

SEQ ID NO: 18445 - protein, 9 aa, synthetic construct
  REGION 1..9: note = Protein Smaug homolog 2 (352-360)
SIQKLRERQ

SEQ ID NO: 18446 - protein, 9 aa, synthetic construct
  REGION 1..9: note = CCR4-NOT transcription complex subunit 1 (312-320)
SISAPGSGI

SEQ ID NO: 18447 - protein, 9 aa, synthetic construct
  REGION 1..9: note = AP-5 complex subunit mu-1 (477-485)
SKAPAPVTY

SEQ ID NO: 18448 - protein, 9 aa, synthetic construct
  REGION 1..9: note = Ubiquitin carboxyl-terminal hydrolase 19 (576-584)
SKASQFTGY

SEQ ID NO: 18449 - protein, 9 aa, synthetic construct
  REGION 1..9: note = Putative tRNA (cytidine(32)/guanosine(34)-2'-O)-methyltransferase (5-13)
SKDKRDVYY

SEQ ID NO: 18450 - protein, 9 aa, synthetic construct
  REGION 1..9: note = 40S ribosomal protein S6 (148-156)
SKEDDVRQY

SEQ ID NO: 18451 - protein, 9 aa, synthetic construct
  REGION 1..9: note = 60S ribosomal protein L11 (158-166)
SKEEAMRWF

SEQ ID NO: 18452 - protein, 9 aa, synthetic construct
  REGION 1..9: note = Gamma-glutamyltranspeptidase 1 (30-38)
SKEPDNHVY

SEQ ID NO: 18453 - protein, 9 aa, synthetic construct
  REGION 1..9: note = NADH dehydrogenase (ubiquinone) 1 beta subcomplex subunit 8, mitochondrial (175-183)
SKEPERVVH

SEQ ID NO: 18454 - protein, 9 aa, synthetic construct
  REGION 1..9: note = Neuroblast differentiation-associated protein AHNAK (5611-5619)
SKFAGGLHF

SEQ ID NO: 18455 - protein, 9 aa, synthetic construct
  REGION 1..9: note = Core-binding factor subunit beta (10-18)
SKFENEEFF

SEQ ID NO: 18456 - protein, 10 aa, synthetic construct
  REGION 1..10: note = Proteasomal ATPase-associated factor 1 (78-87)
SKFLAPYTTF

SEQ ID NO: 18457 - protein, 11 aa, synthetic construct
  REGION 1..11: note = CWF19-like protein 2 (623-633)
SKFMGKTDGDY

SEQ ID NO: 18458 - protein, 9 aa, synthetic construct
  REGION 1..9: note = Transcription intermediary factor 1-alpha (457-465)
SKFPTQISL

SEQ ID NO: 18459 - protein, 9 aa, synthetic construct
  REGION 1..9: note = 40S ribosomal protein S25 (101-109)
SKHRAQVIY

SEQ ID NO: 18460 - protein, 11 aa, synthetic construct
  REGION 1..11: note = Proteasome subunit beta type-7 (75-85)
SKIHFISPNIY

SEQ ID NO: 18461 - protein, 9 aa, synthetic construct
  REGION 1..9: note = 60S ribosomal protein L18a (148-156)
SKIKFPLPH

SEQ ID NO: 18462 - protein, 9 aa, synthetic construct
  REGION 1..9: note = Serine/threonine-protein phosphatase 4 regulatory subunit 3B (54-62)
SKINPNTAY

SEQ ID NO: 18463 - protein, 9 aa, synthetic construct
  REGION 1..9: note = Signal recognition particle receptor subunit alpha (128-136)
SKIRAPTTM

SEQ ID NO: 18464 - protein, 9 aa, synthetic construct
  REGION 1..9: note = NUAK family SNF1-like kinase 2 (123-131)
SKIVIVMEY

SEQ ID NO: 18465 - protein, 10 aa, synthetic construct
  REGION 1..10: note = E3 ubiquitin-protein ligase RING1 (108-117)
SKIYPSREEY

SEQ ID NO: 18466 - protein, 9 aa, synthetic construct
  REGION 1..9: note = 60S ribosomal protein L19 (112-120)
SKKIDRHMY

SEQ ID NO: 18467 - protein, 9 aa, synthetic construct
  REGION 1..9: note = HAUS augmin-like complex subunit 8 (124-132)
SKKPESTSF

SEQ ID NO: 18468 - protein, 9 aa, synthetic construct
  REGION 1..9: note = 60S ribosomal protein L10 (168-176)
SKKWGFTKF

SEQ ID NO: 18469 - protein, 10 aa, synthetic construct
  REGION 1..10: note = Golgi-associated PDZ and coiled-coil motif-containing protein (448-457)
SKLDDLHTLY

SEQ ID NO: 18470 - protein, 9 aa, synthetic construct
  REGION 1..9: note = Protein yippee-like 5 (78-86)
SKLGWIYEF

SEQ ID NO: 18471 - protein, 11 aa, synthetic construct
  REGION 1..11: note = Eukaryotic translation initiation factor 2A (459-469)
SKLHEEEPPQN

SEQ ID NO: 18472 - protein, 12 aa, synthetic construct
  REGION 1..12: note = T-complex protein 1 subunit eta (291-302)
SKLPIGDVATQY

SEQ ID NO: 18473 - protein, 9 aa, synthetic construct
  REGION 1..9: note = Ubiquitin-protein ligase E3C (217-225)
SKLPSSIEY

SEQ ID NO: 18474 - protein, 9 aa, synthetic construct
  REGION 1..9: note = Laminin subunit alpha-5 (3479-3487)
SKLPVTVGF

SEQ ID NO: 18475 - protein, 9 aa, synthetic construct
  REGION 1..9: note = Anaphase-promoting complex subunit 5 (144-152)
SKLSFSQVF

SEQ ID NO: 18476 - protein, 9 aa, synthetic construct
  REGION 1..9: note = Protein Red (280-288)
SKLTQILSY

SEQ ID NO: 18477 - protein, 9 aa, synthetic construct
  REGION 1..9: note = GPN-loop GTPase 2 (178-186)
SKMDLIEHY

SEQ ID NO: 18478 - protein, 10 aa, synthetic construct
  REGION 1..10: note = Hsp90 co-chaperone Cdc37 (322-331)
SKMDPTDAKY

SEQ ID NO: 18479 - protein, 9 aa, synthetic construct
  REGION 1..9: note = Ubiquitin-conjugating enzyme E2 A (74-82)
SKMFHPNVY

SEQ ID NO: 18480 - protein, 9 aa, synthetic construct
  REGION 1..9: note = Deoxyribonuclease-2-alpha (168-176)
SKMGKQLTY

SEQ ID NO: 18481 - protein, 9 aa, synthetic construct
  REGION 1..9: note = Small nuclear ribonucleoprotein-associated protein N (7-15)
SKMLQHIDY

SEQ ID NO: 18482 - protein, 9 aa, synthetic construct
  REGION 1..9: note = A-kinase anchor protein 9 (893-901)
SKNKQELEY

SEQ ID NO: 18483 - protein, 9 aa, synthetic construct
  REGION 1..9: note = Intraflagellar transport protein 80 homolog (558-566)
SKNPHIVSF

SEQ ID NO: 18484 - protein, 9 aa, synthetic construct
  REGION 1..9: note = E3 SUMO-protein ligase RanBP2 (1103-1111)
SKNVSGISF

SEQ ID NO: 18485 - protein, 9 aa, synthetic construct
  REGION 1..9: note = Protein yippee-like 3 (5-13)
SKPKTFQAY

SEQ ID NO: 18486 - protein, 9 aa, synthetic construct
  REGION 1..9: note = Coatomer subunit alpha (279-287)
SKRTGVQTF

SEQ ID NO: 18487 - protein, 9 aa, synthetic construct
  REGION 1..9: note = Calcium-dependent secretion activator 1 (390-398)
SKSDVVLSF

SEQ ID NO: 18488 - protein, 9 aa, synthetic construct
  REGION 1..9: note = S-adenosylmethionine synthase isoform type-2 (180-188)
SKTQVTVQY

SEQ ID NO: 18489 - protein, 9 aa, synthetic construct
  REGION 1..9: note = Protein YIPF1 (188-196)
SKVMNIVSY

SEQ ID NO: 18490 - protein, 9 aa, synthetic construct
  REGION 1..9: note = Nucleolar complex protein 4 homolog (137-145)
SKWEGNYLF

SEQ ID NO: 18491 - protein, 9 aa, synthetic construct
  REGION 1..9: note = EBNA1-binding protein 2 (257-265)
SKWNTRESY

SEQ ID NO: 18492 - protein, 10 aa, synthetic construct
  REGION 1..10: note = Nuclease-sensitive element-binding protein 1 (136-145)
SKYAADRNHY

SEQ ID NO: 18493 - protein, 9 aa, synthetic construct
  REGION 1..9: note = Transcription factor MafG (109-117)
SKYEALQTF

SEQ ID NO: 18494 - protein, 10 aa, synthetic construct
  REGION 1..10: note = 7-dehydrocholesterol reductase (453-462)
SKYGRDWERY

SEQ ID NO: 18495 - protein, 9 aa, synthetic construct
  REGION 1..9: note = Gamma-tubulin complex component 6 (1622-1630)
SKYSGVFSF

SEQ ID NO: 18496 - protein, 11 aa, synthetic construct
  REGION 1..11: note = V-type proton ATPase catalytic subunit A (264-274)
SKYSNSDVIIY

SEQ ID NO: 18497 - protein, 9 aa, synthetic construct
  REGION 1..9: note = DNA polymerase delta catalytic subunit (737-745)
SKYTVENGY

SEQ ID NO: 18498 - protein, 11 aa, synthetic construct
  REGION 1..11: note = Fatty acid synthase (1747-1757)
SLAEEKLQASV

SEQ ID NO: 18499 - protein, 12 aa, synthetic construct
  REGION 1..12: note = Intraflagellar transport protein 140 homolog (561-572)
SLAELVPGVGGI

SEQ ID NO: 18500 - protein, 9 aa, synthetic construct
  REGION 1..9: note = DNA topoisomerase 3-beta-1 (12-20)
SLAQSIAKI

SEQ ID NO: 18501 - protein, 9 aa, synthetic construct
  REGION 1..9: note = PMS1 protein homolog 1 (605-613)
SLFNGSHYL

SEQ ID NO: 18502 - protein, 9 aa, synthetic construct
  REGION 1..9: note = Nuclear pore membraneoprotein 210-like (625-633)
SLGHTLVTV

SEQ ID NO: 18503 - protein, 9 aa, synthetic construct
  REGION 1..9: note = Bifunctional glutamate/proline-tRNA ligase (786-794)
SLKAEYKEK

SEQ ID NO: 18504 - protein, 9 aa, synthetic construct
  REGION 1..9: note = Bifunctional glutamate/proline-tRNA ligase (859-867)
SLKAQYKEK

SEQ ID NO: 18505 - protein, 9 aa, synthetic construct
  REGION 1..9: note = Heterogeneous nuclear ribonucleoprotein M (86-94)
SLKDLVKEK

SEQ ID NO: 18506 - protein, 8 aa, synthetic construct
  REGION 1..8: note = Serine/threonine-protein phosphatase 2A 65 kDa regulatory subunit A alpha isoform (403-410)
SLLPAIVE

SEQ ID NO: 18507 - protein, 10 aa, synthetic construct
  REGION 1..10: note = Protein transport protein Sec23B (156-165)
SLLPPDALVG

SEQ ID NO: 18508 - protein, 9 aa, synthetic construct
  REGION 1..9: note = Nesprin-1 (5397-5405)
SLQLAEVAL

SEQ ID NO: 18509 - protein, 9 aa, synthetic construct
  REGION 1..9: note = Tetratricopeptide repeat protein 28 (1301-1309)
SLWPVPVAA

SEQ ID NO: 18510 - protein, 9 aa, synthetic construct
  REGION 1..9: note = Probable E3 ubiquitin-protein ligase HECTD4 (1660-1668)
SMAAEVIAL

SEQ ID NO: 18511 - protein, 9 aa, synthetic construct
  REGION 1..9: note = Ribonuclease 3 (661-669)
SMHQILLYL

SEQ ID NO: 18512 - protein, 12 aa, synthetic construct
  REGION 1..12: note = B-cell CLL/lymphoma 9-like protein (1201-1212)
SMMMAPGGPDSL

SEQ ID NO: 18513 - protein, 10 aa, synthetic construct
  REGION 1..10: note = Titin (34201-34210)
SMTEMKFASM

SEQ ID NO: 18514 - protein, 12 aa, synthetic construct
  REGION 1..12: note = Protein S100-A7 (2-13)
SNTQAERSIIGM

SEQ ID NO: 18515 - protein, 12 aa, synthetic construct
  REGION 1..12: note = Basic salivary proline-rich protein 4 (241-252)
SPPGKPQGPPQQ

SEQ ID NO: 18516 - protein, 8 aa, synthetic construct
  REGION 1..8: note = Protein kinase C-binding protein 1 (698-705)
SPTVHLGL

SEQ ID NO: 18517 - protein, 9 aa, synthetic construct
  REGION 1..9: note = Protein AF-17 (915-923)
SQAGGAPTL

SEQ ID NO: 18518 - protein, 9 aa, synthetic construct
  REGION 1..9: note = 4F2 cell-surface antigen heavy chain (436-444)
SQARLLTSF

SEQ ID NO: 18519 - protein, 9 aa, synthetic construct
  REGION 1..9: note Dolichyl-diphosphooligosaccharide-proteinosyltransferase subunit 1 (210-218)
SQDTFKVHY

SEQ ID NO: 18520 - protein, 9 aa, synthetic construct
  REGION 1..9: note = Arf-GAP with SH3 domain, ANK repeat and PH domain-containing protein 2 (285-293)
SQIRQSTAY

SEQ ID NO: 18521 - protein, 9 aa, synthetic construct
  REGION 1..9: note = DNA mismatch repair protein Msh2 (717-725)
SQLKGVSTF

SEQ ID NO: 18522 - protein, 10 aa, synthetic construct
  REGION 1..10: note = Fanconi anemia group E protein (322-331)
SQMDLLCAQL

SEQ ID NO: 18523 - protein, 9 aa, synthetic construct
  REGION 1..9: note = Multidrug resistance-associated protein 4 (661-669)
SQQSSRPSL

SEQ ID NO: 18524 - protein, 9 aa, synthetic construct
  REGION 1..9: note = Heat shock protein 105 kDa (552-560)
SQSPPSPEL

SEQ ID NO: 18525 - protein, 9 aa, synthetic construct
  REGION 1..9: note = Cystatin-B (45-53)
SQVVAGTNY

SEQ ID NO: 18526 - protein, 10 aa, synthetic construct
  REGION 1..10: note = NEDD8-activating enzyme E1 catalytic subunit (290-299)
SQYNIRGVTY

SEQ ID NO: 18527 - protein, 9 aa, synthetic construct
  REGION 1..9: note = WD repeat-containing protein 97 (311-319)
SRDSTVKVW

SEQ ID NO: 18528 - protein, 12 aa, synthetic construct
  REGION 1..12: note = Nuclease-sensitive element-binding protein 1 (309-320)
SSAPEAEQGGAE

SEQ ID NO: 18529 - protein, 10 aa, synthetic construct
  REGION 1..10: note = Hematological and neurological expressed 1 protein (91-100)
SSGDFLDLKG

SEQ ID NO: 18530 - protein, 10 aa, synthetic construct
  REGION 1..10: note = Synaptotagmin-like protein 2 (602-611)
SSGMTSLSSV

SEQ ID NO: 18531 - protein, 9 aa, synthetic construct
  REGION 1..9: note = HLA class I histocompatibility antigen, alpha chain G (301-309)
SSLPTIPIM

SEQ ID NO: 18532 - protein, 9 aa, synthetic construct
  REGION 1..9: note = Mucin-1 (130-138)
STAPPAHGV

SEQ ID NO: 18533 - protein, 9 aa, synthetic construct
  REGION 1..9: note = Sperm-associated antigen 5 (305-313)
STCLTPNLV

SEQ ID NO: 18534 - protein, 9 aa, synthetic construct
  REGION 1..9: note = V-type proton ATPase catalytic subunit A (16-24)
STFGYVHGV

SEQ ID NO: 18535 - protein, 9 aa, synthetic construct
  REGION 1..9: note = Uncharacterized protein C20orf195 (2-10)
STHVAGLGL

SEQ ID NO: 18536 - protein, 10 aa, synthetic construct
  REGION 1..10: note = Ubiquitin carboxyl-terminal hydrolase 3 (394-403)
STKKFWIQKL

SEQ ID NO: 18537 - protein, 9 aa, synthetic construct
  REGION 1..9: note = Heat shock cognate 71 kDa protein (340-348)
STRIPKIQK

SEQ ID NO: 18538 - protein, 9 aa, synthetic construct
  REGION 1..9: note = Putativeosylation-dependent cell adhesion molecule 1 (14-22)
STSLAILDV

SEQ ID NO: 18539 - protein, 10 aa, synthetic construct
  REGION 1..10: note = Microtubule-actin cross-linking factor 1, isoforms 1/2/3/5 (844-853)
SVASLVGRSK

SEQ ID NO: 18540 - protein, 10 aa, synthetic construct
  REGION 1..10: note = Zinc finger protein 638 (1228-1237)
SVFAEERNLK

SEQ ID NO: 18541 - protein, 9 aa, synthetic construct
  REGION 1..9: note = Heat shock protein HSP 90-alpha (658-666)
SVKDLVILL

SEQ ID NO: 18542 - protein, 9 aa, synthetic construct
  REGION 1..9: note = Eukaryotic translation initiation factor 3 subunit E (27-35)
SVKEIYNEK

SEQ ID NO: 18543 - protein, 12 aa, synthetic construct
  REGION 1..12: note = Cytoskeleton-associated protein 2 (388-399)
SVVTQHEPAGQN

SEQ ID NO: 18544 - protein, 10 aa, synthetic construct
  REGION 1..10: note = Echinoderm microtubule-associated protein-like 4 (184-193)
SWENSDDSRN

SEQ ID NO: 18545 - protein, 10 aa, synthetic construct
  REGION 1..10: note = Cold-inducible RNA-binding protein (163-172)
SYDSYATHNE

SEQ ID NO: 18546 - protein, 11 aa, synthetic construct
  REGION 1..11: note = 14-3-3 protein theta (210-220)
SYKDSTLIMQL

SEQ ID NO: 18547 - protein, 9 aa, synthetic construct
  REGION 1..9: note = Nucleolar and coiled-body phosphoprotein 1 (681-689)
SYRGGSISV

SEQ ID NO: 18548 - protein, 8 aa, synthetic construct
  REGION 1..8: note = Asparagine synthetase (glutamine-hydrolyzing) (409-416)
TAAHGLEL

SEQ ID NO: 18549 - protein, 10 aa, synthetic construct
  REGION 1..10: note = Ribosome biogenesis protein BOP1 (10-19)
TAAPSVRPEK

SEQ ID NO: 18550 - protein, 10 aa, synthetic construct
  REGION 1..10: note = Poly(rC)-binding protein 2 (91-100)
TAASRPPVTL

SEQ ID NO: 18551 - protein, 9 aa, synthetic construct
  REGION 1..9: note = Elongation factor 2 (73-81)
TAISLFYEL

SEQ ID NO: 18552 - protein, 10 aa, synthetic construct
  REGION 1..10: note = Ubiquitin-associated protein 2-like (322-331)
TAISQPASGN

SEQ ID NO: 18553 - protein, 12 aa, synthetic construct
  REGION 1..12: note = Intraflagellar transport protein 88 homolog (62-73)
TAKISSTAVTRP

SEQ ID NO: 18554 - protein, 8 aa, synthetic construct
  REGION 1..8: note = Max-like protein X (152-159)
TALKIMKV

SEQ ID NO: 18555 - protein, 9 aa, synthetic construct
  REGION 1..9: note = Nuclear pore membraneoprotein 210 (1573-1581)
TASKVIVAV

SEQ ID NO: 18556 - protein, 12 aa, synthetic construct
  REGION 1..12: note = Syndecan-1 (220-231)
TAVVAVEPDRRN

SEQ ID NO: 18557 - protein, 9 aa, synthetic construct
  REGION 1..9: note = Probable C-mannosyltransferase DPY19L3 (463-471)
TAYNLIHTI

SEQ ID NO: 18558 - protein, 9 aa, synthetic construct
  REGION 1..9: note = XK-related protein 9 (255-263)
TCISMEFLY

SEQ ID NO: 18559 - protein, 11 aa, synthetic construct
  REGION 1..11: note = Uncharacterized protein C9orf78 (274-284)
TDDYHYEKFKK

SEQ ID NO: 18560 - protein, 8 aa, synthetic construct
  REGION 1..8: note = Bcl-2-associated transcription factor 1 (341-348)
TDEESRVF

SEQ ID NO: 18561 - protein, 10 aa, synthetic construct
  REGION 1..10: note = Bcl-2-associated transcription factor 1 (341-350)
TDEESRVFLL

SEQ ID NO: 18562 - protein, 12 aa, synthetic construct
  REGION 1..12: note = Pleiotropic regulator 1 (74-85)
TDSYVHKQYPAN

SEQ ID NO: 18563 - protein, 9 aa, synthetic construct
  REGION 1..9: note = PRA1 family protein 3 (180-188)
TDYISKVKE

SEQ ID NO: 18564 - protein, 9 aa, synthetic construct
  REGION 1..9: note = Testis-expressed sequence 10 protein (733-741)
TEAVFHSLL

SEQ ID NO: 18565 - protein, 11 aa, synthetic construct
  REGION 1..11: note = Pre-mRNA cleavage complex 2 protein Pcf11 (561-571)
TEEERPQETTN

SEQ ID NO: 18566 - protein, 10 aa, synthetic construct
  REGION 1..10: note = cTAGE family member 5 (795-804)
TEHPEPQQET

SEQ ID NO: 18567 - protein, 12 aa, synthetic construct
  REGION 1..12: note = Tumor protein D52 (213-224)
TEPLPEKTQESL

SEQ ID NO: 18568 - protein, 12 aa, synthetic construct
  REGION 1..12: note = BAG family molecular chaperone regulator 4 (167-178)
TEVPSTYRSSGN

SEQ ID NO: 18569 - protein, 11 aa, synthetic construct
  REGION 1..11: note = Non-POU domain-containing octamer-binding protein (6-16)
TFNLEKQNHTP

SEQ ID NO: 18570 - protein, 12 aa, synthetic construct
  REGION 1..12: note = Non-POU domain-containing octamer-binding protein (6-17)
TFNLEKQNHTPR

SEQ ID NO: 18571 - protein, 10 aa, synthetic construct
  REGION 1..10: note = U2 snRNP-associated SURP motif-containing protein (134-143)
TFVRGGVVNA

SEQ ID NO: 18572 - protein, 12 aa, synthetic construct
  REGION 1..12: note = Ubiquitin-associated protein 2-like (225-236)
TGHFEPDDGTSA

SEQ ID NO: 18573 - protein, 12 aa, synthetic construct
  REGION 1..12: note = E3 ubiquitin-protein ligase HUWE1 (2557-2568)
TGHTIHVHYPGN

SEQ ID NO: 18574 - protein, 10 aa, synthetic construct
  REGION 1..10: note = Transcriptional repressor p66-beta (558-567)
TGIGGHKGPS

SEQ ID NO: 18575 - protein, 12 aa, synthetic construct
  REGION 1..12: note = Peptidyl-prolyl cis-trans isomerase FKBP1A (28-39)
TGMLEDGKKFDS

SEQ ID NO: 18576 - protein, 11 aa, synthetic construct
  REGION 1..11: note = Probable ATP-dependent RNA helicase DDX5 (560-570)
TGNPTGTYQNG

SEQ ID NO: 18577 - protein, 8 aa, synthetic construct
  REGION 1..8: note = 60S ribosomal protein L13 (151-158)
TGPVMPVR

SEQ ID NO: 18578 - protein, 12 aa, synthetic construct
  REGION 1..12: note = AT-rich interactive domain-containing protein 1A (1514-1525)
TGSAPQGPAYHG

SEQ ID NO: 18579 - protein, 12 aa, synthetic construct
  REGION 1..12: note = Nuclear pore complex protein Nup153 (406-417)
TGYEKNMTPGQN

SEQ ID NO: 18580 - protein, 9 aa, synthetic construct
  REGION 1..9: note = Pumilio homolog 3 (361-369)
THDGARVAM

SEQ ID NO: 18581 - protein, 9 aa, synthetic construct
  REGION 1..9: note = Glutaryl-CoA dehydrogenase, mitochondrial (416-424)
THDIHALIL

SEQ ID NO: 18582 - protein, 9 aa, synthetic construct
  REGION 1..9: note = Nuclear pore complex protein Nup88 (408-416)
THEAGVHSV

SEQ ID NO: 18583 - protein, 9 aa, synthetic construct
  REGION 1..9: note = Endonuclease G, mitochondrial (227-235)
THFFKVLIL

SEQ ID NO: 18584 - protein, 9 aa, synthetic construct
  REGION 1..9: note = Bax inhibitor 1 (51-59)
THFIQAGLL

SEQ ID NO: 18585 - protein, 9 aa, synthetic construct
  REGION 1..9: note = BMP/retinoic acid-inducible neural-specific protein 2 (144-152)
THFLLSATL

SEQ ID NO: 18586 - protein, 9 aa, synthetic construct
  REGION 1..9: note = HEAT repeat-containing protein 1 (721-729)
THFPFAIRV

SEQ ID NO: 18587 - protein, 9 aa, synthetic construct
  REGION 1..9: note = Transitional endoplasmic reticulum ATPase (403-411)
THGHVGADL

SEQ ID NO: 18588 - protein, 9 aa, synthetic construct
  REGION 1..9: note = Zinc finger protein 638 (449-457)
THIESCRQL

SEQ ID NO: 18589 - protein, 8 aa, synthetic construct
  REGION 1..8: note = Leucine-rich PPR motif-containing protein, mitochondrial (1095-1102)
THIKGFTL

SEQ ID NO: 18590 - protein, 9 aa, synthetic construct
  REGION 1..9: note = Probable C-mannosyltransferase DPY19L1 (228-236)
THILRATKL

SEQ ID NO: 18591 - protein, 10 aa, synthetic construct
  REGION 1..10: note = Guanine nucleotide-binding protein-like 3-like protein (251-260)
THIRVGVVGL

SEQ ID NO: 18592 - protein, 12 aa, synthetic construct
  REGION 1..12: note = Neuroblast differentiation-associated protein AHNAK (1576-1587)
THKISMPDVGLN

SEQ ID NO: 18593 - protein, 9 aa, synthetic construct
  REGION 1..9: note = Homeodomain-interacting protein kinase 3 (1110-1118)
THLGGQPTL

SEQ ID NO: 18594 - protein, 9 aa, synthetic construct
  REGION 1..9: note = Nck-associated protein 1-like (1054-1062)
THLKEFLVV

SEQ ID NO: 18595 - protein, 8 aa, synthetic construct
  REGION 1..8: note = Bone marrow stromal antigen 2 (67-74)
THLLQQEL

SEQ ID NO: 18596 - protein, 9 aa, synthetic construct
  REGION 1..9: note = Dol-P-Man:Man(5)GlcNAc(2)-PP-Dol alpha-1,3-mannosyltransferase (381-389)
THLLRLLVL

SEQ ID NO: 18597 - protein, 9 aa, synthetic construct
  REGION 1..9: note = Myocyte-specific enhancer factor 2C (372-380)
THLSQSSNL

SEQ ID NO: 18598 - protein, 9 aa, synthetic construct
  REGION 1..9: note Dolichyl-diphosphooligosaccharide-proteinosyltransferase 48 kDa subunit (400-408)
THLYSSTQV

SEQ ID NO: 18599 - protein, 9 aa, synthetic construct
  REGION 1..9: note = Bifunctional glutamate/proline-tRNA ligase (1422-1430)
THMVVANTM

SEQ ID NO: 18600 - protein, 9 aa, synthetic construct
  REGION 1..9: note = C-myc promoter-binding protein (1300-1308)
THSSPSFNL

SEQ ID NO: 18601 - protein, 9 aa, synthetic construct
  REGION 1..9: note = Heterogeneous nuclear ribonucleoprotein R (25-33)
THTEHYKTL

SEQ ID NO: 18602 - protein, 9 aa, synthetic construct
  REGION 1..9: note = Stromal cell-derived factor 2 (95-103)
THVNTGRNL

SEQ ID NO: 18603 - protein, 9 aa, synthetic construct
  REGION 1..9: note Dolichyl-diphosphooligosaccharide-proteinosyltransferase subunit 2 (26-34)
THYLTKHDV

SEQ ID NO: 18604 - protein, 11 aa, synthetic construct
  REGION 1..11: note = Lymphoid-restricted membrane protein (375-385)
TIASLPRNIGN

SEQ ID NO: 18605 - protein, 12 aa, synthetic construct
  REGION 1..12: note = Myosin-binding protein H-like (137-148)
TIDILVIERPGP

SEQ ID NO: 18606 - protein, 9 aa, synthetic construct
  REGION 1..9: note = Glycerol-3-phosphate dehydrogenase 1-like protein (285-293)
TIEELEKEM

SEQ ID NO: 18607 - protein, 12 aa, synthetic construct
  REGION 1..12: note = BPI fold-containing family A member 2 (157-168)
TIETDPQTHQPV

SEQ ID NO: 18608 - protein, 9 aa, synthetic construct
  REGION 1..9: note = MOB kinase activator 1A (192-200)
TILKRLFRV

SEQ ID NO: 18609 - protein, 9 aa, synthetic construct
  REGION 1..9: note = Protein sel-1 homolog 1 (219-227)
TKALERVSY

SEQ ID NO: 18610 - protein, 9 aa, synthetic construct
  REGION 1..9: note = WD repeat-containing protein 5 (45-53)
TKAVSSVKF

SEQ ID NO: 18611 - protein, 9 aa, synthetic construct
  REGION 1..9: note = Transforming protein RhoA (163-171)
TKDGVREVF

SEQ ID NO: 18612 - protein, 9 aa, synthetic construct
  REGION 1..9: note = Disintegrin and metalloproteinase domain-containing protein 17 (159-167)
TKDKRMLVY

SEQ ID NO: 18613 - protein, 9 aa, synthetic construct
  REGION 1..9: note = Ras GTPase-activating-like protein IQGAP2 (912-920)
TKFMDTVIF

SEQ ID NO: 18614 - protein, 9 aa, synthetic construct
  REGION 1..9: note = Vigilin (613-621)
TKIDLPAEN

SEQ ID NO: 18615 - protein, 11 aa, synthetic construct
  REGION 1..11: note = Vigilin (613-623)
TKIDLPAENSN

SEQ ID NO: 18616 - protein, 9 aa, synthetic construct
  REGION 1..9: note = Vesicular integral-membrane protein VIP36 (290-298)
TKIEPSVNF

SEQ ID NO: 18617 - protein, 9 aa, synthetic construct
  REGION 1..9: note = Ubiquitin carboxyl-terminal hydrolase 33 (627-635)
TKISTHVSF

SEQ ID NO: 18618 - protein, 9 aa, synthetic construct
  REGION 1..9: note = Nucleoprotein TPR (712-720)
TKISTQLDF

SEQ ID NO: 18619 - protein, 12 aa, synthetic construct
  REGION 1..12: note = Eukaryotic translation initiation factor 4 gamma 1 (1070-1081)
TKITKPGSIDSN

SEQ ID NO: 18620 - protein, 9 aa, synthetic construct
  REGION 1..9: note = Pre-mRNA-processing factor 19 (264-272)
TKKVTSVVF

SEQ ID NO: 18621 - protein, 9 aa, synthetic construct
  REGION 1..9: note = Serine/threonine-protein kinase 24 (105-113)
TKLWIIMEY

SEQ ID NO: 18622 - protein, 9 aa, synthetic construct
  REGION 1..9: note = Parafibromin (282-290)
TKQPIPAAY

SEQ ID NO: 18623 - protein, 9 aa, synthetic construct
  REGION 1..9: note = Cerebral cavernous malformations 2 protein (253-261)
TKVDIKETY

SEQ ID NO: 18624 - protein, 9 aa, synthetic construct
  REGION 1..9: note = S-adenosylmethionine synthase isoform type-2 (288-296)
TKVDRSAAY

SEQ ID NO: 18625 - protein, 9 aa, synthetic construct
  REGION 1..9: note = ER membrane protein complex subunit 3 (138-146)
TKVPFPLTL

SEQ ID NO: 18626 - protein, 10 aa, synthetic construct
  REGION 1..10: note = ATP-binding cassette sub-family F member 2 (592-601)
TKWPGDILAY

SEQ ID NO: 18627 - protein, 9 aa, synthetic construct
  REGION 1..9: note = 60S ribosomal protein L17 (45-53)
TKYLKDVTL

SEQ ID NO: 18628 - protein, 8 aa, synthetic construct
  REGION 1..8: note = DNA dC-dU-editing enzyme APOBEC-3C (84-91)
TKYQVTWY

SEQ ID NO: 18629 - protein, 10 aa, synthetic construct
  REGION 1..10: note = Tetratricopeptide repeat protein 27 (205-214)
TLAENCIDQV

SEQ ID NO: 18630 - protein, 9 aa, synthetic construct
  REGION 1..9: note = Proliferation-associated protein 2G4 (386-394)
TLEENEAGD

SEQ ID NO: 18631 - protein, 9 aa, synthetic construct
  REGION 1..9: note = Protein FAM185A (259-267)
TLGSVHGNI

SEQ ID NO: 18632 - protein, 12 aa, synthetic construct
  REGION 1..12: note = 60S ribosomal protein L23a (126-137)
TLIRPDGEKKAY

SEQ ID NO: 18633 - protein, 9 aa, synthetic construct
  REGION 1..9: note = Transcription elongation factor SPT6 (835-843)
TLKKFLLNK

SEQ ID NO: 18634 - protein, 9 aa, synthetic construct
  REGION 1..9: note = AP-5 complex subunit mu-1 (115-123)
TLSPRPPLI

SEQ ID NO: 18635 - protein, 9 aa, synthetic construct
  REGION 1..9: note = 40S ribosomal protein S7 (121-129)
TLTAVHDAI

SEQ ID NO: 18636 - protein, 11 aa, synthetic construct
  REGION 1..11: note = 40S ribosomal protein S7 (121-131)
TLTAVHDAILE

SEQ ID NO: 18637 - protein, 12 aa, synthetic construct
  REGION 1..12: note = Translocating chain-associated membrane protein 1 (357-368)
TLTSNVADSPRN

SEQ ID NO: 18638 - protein, 12 aa, synthetic construct
  REGION 1..12: note = Peptidyl-prolyl cis-trans isomerase FKBP1A (97-108)
TLVFDVELLKLE

SEQ ID NO: 18639 - protein, 9 aa, synthetic construct
  REGION 1..9: note = Serine/threonine-protein kinase RIO2 (243-251)
TMIDFPQMV

SEQ ID NO: 18640 - protein, 10 aa, synthetic construct
  REGION 1..10: note = CDC42 small effector protein 1 (26-35)
TMIGEPMNFV

SEQ ID NO: 18641 - protein, 12 aa, synthetic construct
  REGION 1..12: note = Far upstream element-binding protein 2 (277-288)
TNVDKPLRIIGD

SEQ ID NO: 18642 - protein, 12 aa, synthetic construct
  REGION 1..12: note = Cell division cycle 5-like protein (373-384)
TNVDTPLKGGLN

SEQ ID NO: 18643 - protein, 10 aa, synthetic construct
  REGION 1..10: note = Vacuolar protein sorting-associated protein VTA1 homolog (224-233)
TPAEVPHSTG

SEQ ID NO: 18644 - protein, 12 aa, synthetic construct
  REGION 1..12: note = Vacuolar protein sorting-associated protein VTA1 homolog (224-235)
TPAEVPHSTGVA

SEQ ID NO: 18645 - protein, 10 aa, synthetic construct
  REGION 1..10: note = Polyadenylate-binding protein 1 (502-511)
TPAVRTVPQY

SEQ ID NO: 18646 - protein, 8 aa, synthetic construct
  REGION 1..8: note = Ubiquitin-associated protein 2-like (952-959)
TPFQQPSG

SEQ ID NO: 18647 - protein, 9 aa, synthetic construct
  REGION 1..9: note = IST1 homolog (241-249)
TPFSYPLPK

SEQ ID NO: 18648 - protein, 11 aa, synthetic construct
  REGION 1..11: note = IST1 homolog (241-251)
TPFSYPLPKGP

SEQ ID NO: 18649 - protein, 12 aa, synthetic construct
  REGION 1..12: note = TBC1 domain family member 30 (869-880)
TPIFSPFPSVKP

SEQ ID NO: 18650 - protein, 8 aa, synthetic construct
  REGION 1..8: note = Eukaryotic translation initiation factor 4 gamma 1 (647-654)
TPLRPLDP

SEQ ID NO: 18651 - protein, 9 aa, synthetic construct
  REGION 1..9: note = Eukaryotic translation initiation factor 4 gamma 1 (647-655)
TPLRPLDPT

SEQ ID NO: 18652 - protein, 10 aa, synthetic construct
  REGION 1..10: note = Eukaryotic translation initiation factor 4 gamma 1 (647-656)
TPLRPLDPTR

SEQ ID NO: 18653 - protein, 11 aa, synthetic construct
  REGION 1..11: note = Eukaryotic translation initiation factor 4 gamma 1 (647-657)
TPLRPLDPTRL

SEQ ID NO: 18654 - protein, 12 aa, synthetic construct
  REGION 1..12: note = Intercellular adhesion molecule 1 (521-532)
TPMKPNTQATPP

SEQ ID NO: 18655 - protein, 12 aa, synthetic construct
  REGION 1..12: note = Vesicular, overexpressed in cancer, prosurvival protein 1 (160-171)
TPPPPYEQVVKA

SEQ ID NO: 18656 - protein, 12 aa, synthetic construct
  REGION 1..12: note = GTPase-activating protein and VPS9 domain-containing protein 1 (462-473)
TPQLSPATTPAN

SEQ ID NO: 18657 - protein, 9 aa, synthetic construct
  REGION 1..9: note = Translocating chain-associated membrane protein 2 (334-342)
TPRLPARLI

SEQ ID NO: 18658 - protein, 9 aa, synthetic construct
  REGION 1..9: note = Target of Nesh-SH3 (160-168)
TPRPTGTPL

SEQ ID NO: 18659 - protein, 12 aa, synthetic construct
  REGION 1..12: note = Acidic leucine-rich nuclear phosphoprotein 32 family member A (15-26)
TPSDVKELVLDN

SEQ ID NO: 18660 - protein, 11 aa, synthetic construct
  REGION 1..11: note = ATP-dependent RNA helicase A (18-28)
TPSYEIRAVGN

SEQ ID NO: 18661 - protein, 9 aa, synthetic construct
  REGION 1..9: note = Protein DENND6A (343-351)
TQAPPSVIL

SEQ ID NO: 18662 - protein, 9 aa, synthetic construct
  REGION 1..9: note = Gamma-glutamyltranspeptidase 1 (475-483)
TQITTATAL

SEQ ID NO: 18663 - protein, 9 aa, synthetic construct
  REGION 1..9: note = Disks large homolog 5 (356-364)
TQQRDTAIQ

SEQ ID NO: 18664 - protein, 9 aa, synthetic construct
  REGION 1..9: note = U3 small nucleolar RNA-associated protein 14 homolog A (567-575)
TQSPSVKSL

SEQ ID NO: 18665 - protein, 9 aa, synthetic construct
  REGION 1..9: note = Splicing factor 1 (362-370)
TQSRPPWMN

SEQ ID NO: 18666 - protein, 11 aa, synthetic construct
  REGION 1..11: note = Serine/threonine-protein kinase VRK1 (378-388)
TQTEEAIQTRS

SEQ ID NO: 18667 - protein, 8 aa, synthetic construct
  REGION 1..8: note = Elongation factor 1-gamma (409-416)
TQTLVREY

SEQ ID NO: 18668 - protein, 9 aa, synthetic construct
  REGION 1..9: note = Nucleolar protein 58 (259-267)
TQVIEISEY

SEQ ID NO: 18669 - protein, 9 aa, synthetic construct
  REGION 1..9: note = Lon protease homolog 2, peroxisomal (556-564)
TREAGVRSL

SEQ ID NO: 18670 - protein, 11 aa, synthetic construct
  REGION 1..11: note = Fibronectin type III domain-containing protein 3B (182-192)
TREDQYSKPPH

SEQ ID NO: 18671 - protein, 9 aa, synthetic construct
  REGION 1..9: note = Myotubularin-related protein 10 (495-503)
TRISLFGTF

SEQ ID NO: 18672 - protein, 9 aa, synthetic construct
  REGION 1..9: note = Uncharacterized protein DKFZp434B061 (517-525)
TRSPPTASL

SEQ ID NO: 18673 - protein, 9 aa, synthetic construct
  REGION 1..9: note = Putative coiled-coil-helix-coiled-coil-helix domain-containing protein CHCHD2P9, mitochondrial (9-17)
TSRMAPPAS

SEQ ID NO: 18674 - protein, 10 aa, synthetic construct
  REGION 1..10: note = Splicing factor 1 (361-370)
TTQSRPPWMN

SEQ ID NO: 18675 - protein, 9 aa, synthetic construct
  REGION 1..9: note = Ubiquitin carboxyl-terminal hydrolase 22 (424-432)
TYVSFPLEL

SEQ ID NO: 18676 - protein, 9 aa, synthetic construct
  REGION 1..9: note = Ataxin-7 (448-456)
VEKHLNAQL

SEQ ID NO: 18677 - protein, 9 aa, synthetic construct
  REGION 1..9: note = X-ray repair cross-complementing protein 6 (231-239)
VHFEESSKL

SEQ ID NO: 18678 - protein, 9 aa, synthetic construct
  REGION 1..9: note = Sorting nexin-19 (246-254)
VILPLISRL

SEQ ID NO: 18679 - protein, 9 aa, synthetic construct
  REGION 1..9: note = Eukaryotic translation initiation factor 3 subunit G (59-67)
VINGNIKTV

SEQ ID NO: 18680 - protein, 9 aa, synthetic construct
  REGION 1..9: note = Inositol-tetrakisphosphate 1-kinase (261-269)
VIRELSRAL

SEQ ID NO: 18681 - protein, 9 aa, synthetic construct
  REGION 1..9: note = Serine/threonine-protein phosphatase 2A 65 kDa regulatory subunit A beta isoform (174-182)
VKAEIRQQF

SEQ ID NO: 18682 - protein, 9 aa, synthetic construct
  REGION 1..9: note = T-complex protein 1 subunit theta (234-242)
VKDAKIAVY

SEQ ID NO: 18683 - protein, 9 aa, synthetic construct
  REGION 1..9: note = Nodal modulator 2 (43-51)
VKSDVEINY

SEQ ID NO: 18684 - protein, 9 aa, synthetic construct
  REGION 1..9: note = Elongation factor 2 (480-488)
VKTGTITTF

SEQ ID NO: 18685 - protein, 9 aa, synthetic construct
  REGION 1..9: note = Alpha/beta hydrolase domain-containing protein 14B (150-158)
VKTPALIVY

SEQ ID NO: 18686 - protein, 9 aa, synthetic construct
  REGION 1..9: note = Eukaryotic translation initiation factor 3 subunit E (278-286)
VKVIQQESY

SEQ ID NO: 18687 - protein, 9 aa, synthetic construct
  REGION 1..9: note = Exocyst complex component 3 (40-48)
VLQRSLVTV

SEQ ID NO: 18688 - protein, 9 aa, synthetic construct
  REGION 1..9: note = HLA class II histocompatibility antigen, DRB1-11 beta chain (21-29)
VLSSPLALA

SEQ ID NO: 18689 - protein, 9 aa, synthetic construct
  REGION 1..9: note = Cytoplasmic dynein 1 heavy chain 1 (1684-1692)
VMFKTPVSI

SEQ ID NO: 18690 - protein, 9 aa, synthetic construct
  REGION 1..9: note = HEAT repeat-containing protein 1 (171-179)
VPLAKGTLI

SEQ ID NO: 18691 - protein, 9 aa, synthetic construct
  REGION 1..9: note = DNA-(apurinic or apyrimidinic site) lyase (172-180)
VPNAGRGLV

SEQ ID NO: 18692 - protein, 9 aa, synthetic construct
  REGION 1..9: note = DDB1- and CUL4-associated factor 13 (189-197)
VPREYIRAL

SEQ ID NO: 18693 - protein, 10 aa, synthetic construct
  REGION 1..10: note = Transketolase (505-514)
VPRSGKPAEL

SEQ ID NO: 18694 - protein, 9 aa, synthetic construct
  REGION 1..9: note = Calcineurin-binding protein cabin-1 (1016-1024)
VPRTERPAL

SEQ ID NO: 18695 - protein, 9 aa, synthetic construct
  REGION 1..9: note = ATP-dependent RNA helicase DDX24 (664-672)
VPRTSEIYV

SEQ ID NO: 18696 - protein, 9 aa, synthetic construct
  REGION 1..9: note = Transient receptor potential cation channel subfamily V member 2 (284-292)
VQLEDIRNL

SEQ ID NO: 18697 - protein, 9 aa, synthetic construct
  REGION 1..9: note = Putative eukaryotic translation initiation factor 2 subunit 3-like protein (234-242)
VVCEYIVKK

SEQ ID NO: 18698 - protein, 9 aa, synthetic construct
  REGION 1..9: note = ATP-citrate synthase (56-64)
VVKPDQLIK

SEQ ID NO: 18699 - protein, 9 aa, synthetic construct
  REGION 1..9: note = U4/U6 small nuclear ribonucleoprotein Prp31 (433-441)
VVYGGKSTI

SEQ ID NO: 18700 - protein, 9 aa, synthetic construct
  REGION 1..9: note = Integrin beta-7 (770-778)
WKQDSNPLY

SEQ ID NO: 18701 - protein, 8 aa, synthetic construct
  REGION 1..8: note = Heterogeneous nuclear ribonucleoprotein U (421-428)
YAKNGQDL

SEQ ID NO: 18702 - protein, 9 aa, synthetic construct
  REGION 1..9: note = Eukaryotic translation initiation factor 2 subunit 3 (83-91)
YANAKIYKL

SEQ ID NO: 18703 - protein, 9 aa, synthetic construct
  REGION 1..9: note = Pyruvate kinase PKM (83-91)
YHAETIKNV

SEQ ID NO: 18704 - protein, 9 aa, synthetic construct
  REGION 1..9: note = Interferon-induced GTP-binding protein Mx1 (584-592)
YHQEASKRI

SEQ ID NO: 18705 - protein, 10 aa, synthetic construct
  REGION 1..10: note = 60S ribosomal protein L15 (53-62)
YKAKQGYVIY

SEQ ID NO: 18706 - protein, 9 aa, synthetic construct
  REGION 1..9: note = Bifunctional glutamate/proline-tRNA ligase (791-799)
YKEKTGQEY

SEQ ID NO: 18707 - protein, 10 aa, synthetic construct
  REGION 1..10: note = Eukaryotic translation initiation factor 3 subunit G (70-79)
YKIDEDGKKF

SEQ ID NO: 18708 - protein, 9 aa, synthetic construct
  REGION 1..9: note = Elongation factor 1-alpha 1 (254-262)
YKIGGIGTV

SEQ ID NO: 18709 - protein, 8 aa, synthetic construct
  REGION 1..8: note = Coatomer subunit alpha (73-80)
YKIKVWNY

SEQ ID NO: 18710 - protein, 8 aa, synthetic construct
  REGION 1..8: note = 60S ribosomal protein L5 (219-226)
YKKQFSQY

SEQ ID NO: 18711 - protein, 9 aa, synthetic construct
  REGION 1..9: note = Eukaryotic translation initiation factor 3 subunit B (253-261)
YKLDKQHTF

SEQ ID NO: 18712 - protein, 9 aa, synthetic construct
  REGION 1..9: note = Cathepsin B (219-227)
YKQDKHYGY

SEQ ID NO: 18713 - protein, 12 aa, synthetic construct
  REGION 1..12: note = Peroxisomal carnitine O-octanoyltransferase (254-265)
YLIGLDPENLAL

SEQ ID NO: 18714 - protein, 9 aa, synthetic construct
  REGION 1..9: note = Putative ATP-dependent RNA helicase DDX11-like protein 8 (448-456)
YLLEKFVAV

SEQ ID NO: 18715 - protein, 10 aa, synthetic construct
  REGION 1..10: note = G1/S-specific cyclin-E1 (243-252)
YLNDLHEVLL

SEQ ID NO: 18716 - protein, 9 aa, synthetic construct
  REGION 1..9: note = DNA replication complex GINS protein PSF1 (79-87)
YLYDRLLRI

SEQ ID NO: 18717 - protein, 9 aa, synthetic construct
  REGION 1..9: note = Adenomatous polyposis coli protein (899-907)
YPADLAHKI

SEQ ID NO: 18718 - protein, 9 aa, synthetic construct
  REGION 1..9: note = Cathepsin D (203-211)
YPRISVNNV

SEQ ID NO: 18719 - protein, 9 aa, synthetic construct
  REGION 1..9: note Dolichyl-diphosphooligosaccharide-proteinosyltransferase subunit 2 (53-61)
YSIVGLSSL

SEQ ID NO: 18720 - protein, 9 aa, synthetic construct
  REGION 1..9: note = Staphylococcal nuclease domain-containing protein 1 (178-186)
YTIENPRHF

SEQ ID NO: 18721 - protein, 9 aa, synthetic construct
  REGION 1..9: note = Glycogen synthase kinase-3 beta (134-142)
YVPETVYRV

SEQ ID NO: 18722 - protein, 9 aa, synthetic construct
  REGION 1..9: note = Titin (24337-24345)
ESDPIVAQY

SEQ ID NO: 18723 - protein, 8 aa, synthetic construct
  REGION 1..8: note = Thymidylate synthase (255-262)
AHIYLNHI

SEQ ID NO: 18724 - protein, 8 aa, synthetic construct
  REGION 1..8: note = Store-operated calcium entry-associated regulatory factor (104-111)
AYKFGKTV

SEQ ID NO: 18725 - protein, 9 aa, synthetic construct
  REGION 1..9: note = Junction plakoglobin (136-144)
DAELATRAL

SEQ ID NO: 18726 - protein, 8 aa, synthetic construct
  REGION 1..8: note = U1 small nuclear ribonucleoprotein 70 kDa (100-107)
DAFKTLFV

SEQ ID NO: 18727 - protein, 8 aa, synthetic construct
  REGION 1..8: note = Interferon-induced helicase C domain-containing protein 1 (514-521)
DAFTIKTV

SEQ ID NO: 18728 - protein, 8 aa, synthetic construct
  REGION 1..8: note = Gamma-interferon-inducible protein 16 (59-66)
DAGLGKLI

SEQ ID NO: 18729 - protein, 9 aa, synthetic construct
  REGION 1..9: note = Ubiquitin carboxyl-terminal hydrolase 30 (44-52)
DAHELFHVI

SEQ ID NO: 18730 - protein, 9 aa, synthetic construct
  REGION 1..9: note = Ubiquitin carboxyl-terminal hydrolase 51 (682-690)
DAIITKATI

SEQ ID NO: 18731 - protein, 9 aa, synthetic construct
  REGION 1..9: note = ATP-dependent RNA helicase DDX50 (215-223)
DAIRSLASV

SEQ ID NO: 18732 - protein, 9 aa, synthetic construct
  REGION 1..9: note = WD repeat-containing protein 11 (348-356)
DAIRVTKTV

SEQ ID NO: 18733 - protein, 9 aa, synthetic construct
  REGION 1..9: note = Protein disulfide-isomerase TMX3 (362-370)
DAKSTIVSI

SEQ ID NO: 18734 - protein, 9 aa, synthetic construct
  REGION 1..9: note = Cell division cycle protein 16 homolog (426-434)
DALEKIKAI

SEQ ID NO: 18735 - protein, 8 aa, synthetic construct
  REGION 1..8: note = Protein FAM127A (61-68)
DALKVTFL

SEQ ID NO: 18736 - protein, 9 aa, synthetic construct
  REGION 1..9: note = Glucosamine-6-phosphate isomerase 2 (125-133)
DAREVMILI

SEQ ID NO: 18737 - protein, 9 aa, synthetic construct
  REGION 1..9: note = Little elongation complex subunit 2 (170-178)
DARLFTEKI

SEQ ID NO: 18738 - protein, 10 aa, synthetic construct
  REGION 1..10: note = Myotubularin (299-308)
DAYHNAELFF

SEQ ID NO: 18739 - protein, 9 aa, synthetic construct
  REGION 1..9: note = C-Jun-amino-terminal kinase-interacting protein 4 (932-940)
DAYKDQISV

SEQ ID NO: 18740 - protein, 9 aa, synthetic construct
  REGION 1..9: note = Interleukin-1 receptor accessory protein-like 1 (406-414)
DAYLSYTKV

SEQ ID NO: 18741 - protein, 8 aa, synthetic construct
  REGION 1..8: note = T-complex protein 1 subunit eta (49-56)
DGATILKL

SEQ ID NO: 18742 - protein, 8 aa, synthetic construct
  REGION 1..8: note = Non-specific lipid-transfer protein (348-355)
DGFKANLV

SEQ ID NO: 18743 - protein, 8 aa, synthetic construct
  REGION 1..8: note = Ankyrin-1 (176-183)
DGFTPLAV

SEQ ID NO: 18744 - protein, 8 aa, synthetic construct
  REGION 1..8: note = Transmembrane protein 106C (116-123)
DGIKVVKV

SEQ ID NO: 18745 - protein, 8 aa, synthetic construct
  REGION 1..8: note = Retrotransposon-derived protein PEG10 (644-651)
DGLITPTI

SEQ ID NO: 18746 - protein, 9 aa, synthetic construct
  REGION 1..9: note = Phosphatidate phosphatase LPIN1 (456-464)
DGLRDLPSI

SEQ ID NO: 18747 - protein, 8 aa, synthetic construct
  REGION 1..8: note = Phosphatidylinositol transfer protein alpha isoform (159-166)
DPAKFKSI

SEQ ID NO: 18748 - protein, 9 aa, synthetic construct
  REGION 1..9: note = Structural maintenance of chromosomes protein 3 (21-29)
DPFSSKHNV

SEQ ID NO: 18749 - protein, 8 aa, synthetic construct
  REGION 1..8: note = Interferon regulatory factor 4 (120-127)
DPYKVYRI

SEQ ID NO: 18750 - protein, 9 aa, synthetic construct
  REGION 1..9: note = Interferon regulatory factor 4 (120-128)
DPYKVYRIV

SEQ ID NO: 18751 - protein, 8 aa, synthetic construct
  REGION 1..8: note = Plectin (4002-4009)
DPYSGKLI

SEQ ID NO: 18752 - protein, 9 aa, synthetic construct
  REGION 1..9: note = All-trans-retinol 13,14-reductase (23-31)
IAFHTIPVI

SEQ ID NO: 18753 - protein, 9 aa, synthetic construct
  REGION 1..9: note = Putative pre-mRNA-splicing factor ATP-dependent RNA helicase DHX16 (412-420)
IANHQVLII

SEQ ID NO: 18754 - protein, 9 aa, synthetic construct
  REGION 1..9: note = RNA-binding protein 12 (28-36)
IPDGGVHIV

SEQ ID NO: 18755 - protein, 9 aa, synthetic construct
  REGION 1..9: note = Integrator complex subunit 4 (508-516)
IPFSKPVKV

SEQ ID NO: 18756 - protein, 11 aa, synthetic construct
  REGION 1..11: note = 14-3-3 protein zeta/delta (126-136)
IPNASQAESKV

SEQ ID NO: 18757 - protein, 8 aa, synthetic construct
  REGION 1..8: note = U5 small nuclear ribonucleoprotein 200 kDa helicase (821-828)
LPAHTVII

SEQ ID NO: 18758 - protein, 8 aa, synthetic construct
  REGION 1..8: note = Transportin-2 (392-399)
LPHLLPLL

SEQ ID NO: 18759 - protein, 9 aa, synthetic construct
  REGION 1..9: note = Histone-lysine N-methyltransferase SETD1A (1210-1218)
LPLDHASLV

SEQ ID NO: 18760 - protein, 9 aa, synthetic construct
  REGION 1..9: note = Polyhomeotic-like protein 3 (456-464)
LPLPASPVV

SEQ ID NO: 18761 - protein, 8 aa, synthetic construct
  REGION 1..8: note = Microphthalmia-associated transcription factor (107-114)
LPPPGLTI

SEQ ID NO: 18762 - protein, 8 aa, synthetic construct
  REGION 1..8: note = Flotillin-2 (345-352)
LPQIAAKI

SEQ ID NO: 18763 - protein, 9 aa, synthetic construct
  REGION 1..9: note = G1/S-specific cyclin-D3 (98-106)
LPRDRQALV

SEQ ID NO: 18764 - protein, 9 aa, synthetic construct
  REGION 1..9: note = Cyclic AMP-dependent transcription factor ATF-6 beta (296-304)
LPRPERKSI

SEQ ID NO: 18765 - protein, 11 aa, synthetic construct
  REGION 1..11: note = Charged multivesicular body protein 2b (147-157)
LPSASTSKATI

SEQ ID NO: 18766 - protein, 8 aa, synthetic construct
  REGION 1..8: note = Msx2-interacting protein (1295-1302)
LPYSNITV

SEQ ID NO: 18767 - protein, 8 aa, synthetic construct
  REGION 1..8: note = LIM domain kinase 2 (146-153)
LPYSVTLI

SEQ ID NO: 18768 - protein, 9 aa, synthetic construct
  REGION 1..9: note = Isoleucine-tRNA ligase, cytoplasmic (986-994)
MAREVINRI

SEQ ID NO: 18769 - protein, 8 aa, synthetic construct
  REGION 1..8: note = Probable ATP-dependent RNA helicase DHX37 (780-787)
NAYKTPLL

SEQ ID NO: 18770 - protein, 9 aa, synthetic construct
  REGION 1..9: note = Ubiquitin D (25-33)
NPYDSVKKI

SEQ ID NO: 18771 - protein, 10 aa, synthetic construct
  REGION 1..10: note = Host cell factor 1 (1378-1387)
PDATSSHRTV

SEQ ID NO: 18772 - protein, 8 aa, synthetic construct
  REGION 1..8: note = Queuine tRNA-ribosyltransferase subunit QTRTD1 (121-128)
PEDKPRLI

SEQ ID NO: 18773 - protein, 9 aa, synthetic construct
  REGION 1..9: note = Zinc finger and BTB domain-containing protein 7B (219-227)
PLPPPPPPP

SEQ ID NO: 18774 - protein, 8 aa, synthetic construct
  REGION 1..8: note = E3 ubiquitin-protein ligase UBR5 (666-673)
PVGKVLKV

SEQ ID NO: 18775 - protein, 9 aa, synthetic construct
  REGION 1..9: note = Probable ATP-dependent RNA helicase DDX5 (308-316)
SANHNILQI

SEQ ID NO: 18776 - protein, 8 aa, synthetic construct
  REGION 1..8: note = Lys-63-specific deubiquitinase BRCC36 (236-243)
SAVELPKI

SEQ ID NO: 18777 - protein, 9 aa, synthetic construct
  REGION 1..9: note = A-kinase anchor protein 9 (740-748)
SDAYQTREI

SEQ ID NO: 18778 - protein, 9 aa, synthetic construct
  REGION 1..9: note = WD repeat-containing protein 35 (500-508)
TASDKILIV

SEQ ID NO: 18779 - protein, 8 aa, synthetic construct
  REGION 1..8: note = Ubiquitin carboxyl-terminal hydrolase 36 (521-528)
TPTHMPTI

SEQ ID NO: 18780 - protein, 9 aa, synthetic construct
  REGION 1..9: note = DNA damage-binding protein 1 (463-471)
VAHQQLIQI

SEQ ID NO: 18781 - protein, 9 aa, synthetic construct
  REGION 1..9: note = Something about silencing protein 10 (290-298)
VPAHGHPVI

SEQ ID NO: 18782 - protein, 9 aa, synthetic construct
  REGION 1..9: note = RING finger protein unkempt homolog (549-557)
VPHPGSITI

SEQ ID NO: 18783 - protein, 9 aa, synthetic construct
  REGION 1..9: note = Ecto-NOX disulfide-thiol exchanger 1 (100-108)
VPPPPPTEV

SEQ ID NO: 18784 - protein, 9 aa, synthetic construct
  REGION 1..9: note = Epidermal growth factor receptor kinase substrate 8 (711-719)
VPRQNVPVI

SEQ ID NO: 18785 - protein, 8 aa, synthetic construct
  REGION 1..8: note = NEDD8-conjugating enzyme Ubc12 (86-93)
YPHDPPKV

SEQ ID NO: 18786 - protein, 8 aa, synthetic construct
  REGION 1..8: note = Protein SMG7 (359-366)
YPLPAVKV

SEQ ID NO: 18787 - protein, 8 aa, synthetic construct
  REGION 1..8: note = Nicotinamide phosphoribosyltransferase (26-33)
YPPNTSKV

SEQ ID NO: 18788 - protein, 9 aa, synthetic construct
  REGION 1..9: note = E3 ubiquitin-protein ligase RNF144A (27-35)
YPVEQMTTI

SEQ ID NO: 18789 - protein, 8 aa, synthetic construct
  REGION 1..8: note = Elongation of very long chain fatty acids protein 1 (202-209)
YPVIIHLI

SEQ ID NO: 18790 - protein, 9 aa, synthetic construct
  REGION 1..9: note = Mediator of RNA polymerase II transcription subunit 15 (438-446)
ARTPQNFSV

SEQ ID NO: 18791 - protein, 10 aa, synthetic construct
  REGION 1..10: note = Tubulin beta chain (335-344)
AVFRGRMSMK

SEQ ID NO: 18792 - protein, 16 aa, synthetic construct
  REGION 1..16: note = Myosin regulatory light chain 12A (110-125)
DEEATGTIQEDYLREL

SEQ ID NO: 18793 - protein, 16 aa, synthetic construct
  REGION 1..16: note = MARCKS-related protein (153-168)
EPQAKGAEASAASEEE

SEQ ID NO: 18794 - protein, 9 aa, synthetic construct
  REGION 1..9: note = Cytochrome c oxidase subunit 7C, mitochondrial (49-57)
FATPFLVVR

SEQ ID NO: 18795 - protein, 19 aa, synthetic construct
  REGION 1..19: note = Cytochrome c oxidase subunit 8A, mitochondrial (26-44)
FLLPAGWILSHLETYRRPE

SEQ ID NO: 18796 - protein, 15 aa, synthetic construct
  REGION 1..15: note = Disintegrin and metalloproteinase domain-containing protein 10 (292-306)
FPNIGVEKFLELNSE

SEQ ID NO: 18797 - protein, 9 aa, synthetic construct
  REGION 1..9: note = Hermansky-Pudlak syndrome 5 protein (380-388)
FQNSVIASR

SEQ ID NO: 18798 - protein, 10 aa, synthetic construct
  REGION 1..10: note = NADH dehydrogenase (ubiquinone) flavoprotein 3, mitochondrial (107-116)
FTDEGVPKFL

SEQ ID NO: 18799 - protein, 16 aa, synthetic construct
  REGION 1..16: note = Myristoylated alanine-rich C-kinase substrate (191-206)
GGKDEAAGGAAAAAAE

SEQ ID NO: 18800 - protein, 13 aa, synthetic construct
  REGION 1..13: note = Heat shock cognate 71 kDa protein (484-496)
GILNVSAVDKSTG

SEQ ID NO: 18801 - protein, 16 aa, synthetic construct
  REGION 1..16: note = Heat shock cognate 71 kDa protein (484-499)
GILNVSAVDKSTGKEN

SEQ ID NO: 18802 - protein, 15 aa, synthetic construct
  REGION 1..15: note = Myristoylated alanine-rich C-kinase substrate (192-206)
GKDEAAGGAAAAAAE

SEQ ID NO: 18803 - protein, 16 aa, synthetic construct
  REGION 1..16: note = Gamma-secretase C-terminal fragment 59 (185-200)
GSEDKVVEVAEEEEVA

SEQ ID NO: 18804 - protein, 8 aa, synthetic construct
  REGION 1..8: note = 26S proteasome non-ATPase regulatory subunit 12 (115-122)
ITDLPIKL

SEQ ID NO: 18805 - protein, 14 aa, synthetic construct
  REGION 1..14: note = Myristoylated alanine-rich C-kinase substrate (193-206)
KDEAAGGAAAAAAE

SEQ ID NO: 18806 - protein, 17 aa, synthetic construct
  REGION 1..17: note = NEDD4 family-interacting protein 1 (63-79)
KPPSYNVATTLPSYDEA

SEQ ID NO: 18807 - protein, 14 aa, synthetic construct
  REGION 1..14: note = HLA class I histocompatibility antigen, A-24 alpha chain (143-156)
KRKWEAAHVAEQQR

SEQ ID NO: 18808 - protein, 13 aa, synthetic construct
  REGION 1..13: note = Glyceraldehyde-3-phosphate dehydrogenase (27-39)
KVDIVAINDPFID

SEQ ID NO: 18809 - protein, 18 aa, synthetic construct
  REGION 1..18: note = Cytochrome c oxidase subunit 8A, mitochondrial (27-44)
LLPAGWILSHLETYRRPE

SEQ ID NO: 18810 - protein, 14 aa, synthetic construct
  REGION 1..14: note = HLA class I histocompatibility antigen, Cw-7 alpha chain (154-167)
LRSWTAADTAAQIT

SEQ ID NO: 18811 - protein, 16 aa, synthetic construct
  REGION 1..16: note = HLA class I histocompatibility antigen, B-15 alpha chain (239-254)
LTWQRDGEDQTQDTEL

SEQ ID NO: 18812 - protein, 18 aa, synthetic construct
  REGION 1..18: note = HLA class I histocompatibility antigen, B-15 alpha chain (239-256)
LTWQRDGEDQTQDTELVE

SEQ ID NO: 18813 - protein, 23 aa, synthetic construct
  REGION 1..23: note = NADH dehydrogenase (ubiquinone) 1 alpha subcomplex subunit 8 (150-172)
PSPEIEGDLQPATHGSRFYFWTK

SEQ ID NO: 18814 - protein, 9 aa, synthetic construct
  REGION 1..9: note = Probable ATP-dependent RNA helicase DDX47 (371-379)
QRIEHLIGK

SEQ ID NO: 18815 - protein, 10 aa, synthetic construct
  REGION 1..10: note = Ras GTPase-activating-like protein IQGAP3 (482-491)
QRYFDALLKL

SEQ ID NO: 18816 - protein, 9 aa, synthetic construct
  REGION 1..9: note = Prelamin-A/C (213-221)
QSRIRIDSL

SEQ ID NO: 18817 - protein, 9 aa, synthetic construct
  REGION 1..9: note = Proteasome subunit beta type-2 (170-178)
RFILNLPTF

SEQ ID NO: 18818 - protein, 10 aa, synthetic construct
  REGION 1..10: note = Unconventional myosin-IXa (1043-1052)
RQASVIIQRF

SEQ ID NO: 18819 - protein, 12 aa, synthetic construct
  REGION 1..12: note = DNA polymerase delta subunit 3 (416-427)
RQVSITGFFQRK

SEQ ID NO: 18820 - protein, 10 aa, synthetic construct
  REGION 1..10: note = Calcipressin-1 (161-170)
RRPEYTPIHL

SEQ ID NO: 18821 - protein, 15 aa, synthetic construct
  REGION 1..15: note = Glyceraldehyde-3-phosphate dehydrogenase (25-39)
SGKVDIVAINDPFID

SEQ ID NO: 18822 - protein, 9 aa, synthetic construct
  REGION 1..9: note = Mitotic checkpoint serine/threonine-protein kinase BUB1 beta (486-494)
SQKIPGMTL

SEQ ID NO: 18823 - protein, 15 aa, synthetic construct
  REGION 1..15: note = HLA class I histocompatibility antigen, B-15 alpha chain (155-169)
SSWTAADTAAQITQR

SEQ ID NO: 18824 - protein, 11 aa, synthetic construct
  REGION 1..11: note = L-lactate dehydrogenase A chain (255-265)
SVADLAESIMK

SEQ ID NO: 18825 - protein, 15 aa, synthetic construct
  REGION 1..15: note = IST1 homolog (278-292)
TPPSYESVDDINADK

SEQ ID NO: 18826 - protein, 16 aa, synthetic construct
  REGION 1..16: note = IST1 homolog (278-293)
TPPSYESVDDINADKN

SEQ ID NO: 18827 - protein, 9 aa, synthetic construct
  REGION 1..9: note = Palladin (534-542)
VADGYPVRL

SEQ ID NO: 18828 - protein, 10 aa, synthetic construct
  REGION 1..10: note = Interferon-induced transmembrane protein 2 (89-98)
VGDVTGAQAY

SEQ ID NO: 18829 - protein, 20 aa, synthetic construct
  REGION 1..20: note = 78 kDa glucose-regulated protein (425-444)
VPTKKSQIFSTASDNQPTVT

SEQ ID NO: 18830 - protein, 21 aa, synthetic construct
  REGION 1..21: note = Cytochrome c oxidase subunit 8A, mitochondrial (24-44)
VTFLLPAGWILSHLETYRRPE

SEQ ID NO: 18831 - protein, 14 aa, synthetic construct
  REGION 1..14: note = Alpha-enolase (70-83)
VVIGMDVAASEFFR

SEQ ID NO: 18832 - protein, 16 aa, synthetic construct
  REGION 1..16: note = HLA class I histocompatibility antigen, B-15 alpha chain (241-256)
WQRDGEDQTQDTELVE

SEQ ID NO: 18833 - protein, 14 aa, synthetic construct
  REGION 1..14: note = Vesicle-fusing ATPase (118-131)
AAEFIQQFNNQAFS

SEQ ID NO: 18834 - protein, 15 aa, synthetic construct
  REGION 1..15: note = Moesin (14-28)
AELEFAIQPNTTGKQ

SEQ ID NO: 18835 - protein, 16 aa, synthetic construct
  REGION 1..16: note = Moesin (13-28)
DAELEFAIQPNTTGKQ

SEQ ID NO: 18836 - protein, 15 aa, synthetic construct
  REGION 1..15: note = Dihydropyrimidinase-related protein 2 (340-354)
DENQFVAVTSTNAAK

SEQ ID NO: 18837 - protein, 16 aa, synthetic construct
  REGION 1..16: note = Dihydropyrimidinase-related protein 2 (340-355)
DENQFVAVTSTNAAKV

SEQ ID NO: 18838 - protein, 11 aa, synthetic construct
  REGION 1..11: note = Putative ATP-dependent RNA helicase DHX33 (87-97)
EAISDSLLRKY

SEQ ID NO: 18839 - protein, 9 aa, synthetic construct
  REGION 1..9: note = Ubiquitin-associated protein 2-like (88-96)
EGNPDTHSW

SEQ ID NO: 18840 - protein, 14 aa, synthetic construct
  REGION 1..14: note = Moesin (15-28)
ELEFAIQPNTTGKQ

SEQ ID NO: 18841 - protein, 16 aa, synthetic construct
  REGION 1..16: note = Acylamino-acid-releasing enzyme (440-455)
GQDSILSLPGNVGHQD

SEQ ID NO: 18842 - protein, 15 aa, synthetic construct
  REGION 1..15: note = Serine/threonine-protein phosphatase 2A 65 kDa regulatory subunit A alpha isoform (202-216)
KSEIIPMFSNLASDE

SEQ ID NO: 18843 - protein, 9 aa, synthetic construct
  REGION 1..9: note = 60 kDa heat shock protein, mitochondrial (397-405)
LSDGVAVLK

SEQ ID NO: 18844 - protein, 14 aa, synthetic construct
  REGION 1..14: note = Disintegrin and metalloproteinase domain-containing protein 10 (83-96)
SDEFKVETSNKVLD

SEQ ID NO: 18845 - protein, 15 aa, synthetic construct
  REGION 1..15: note = Peptidyl-prolyl cis-trans isomerase A (77-91)
SIYGEKFEDENFILK

SEQ ID NO: 18846 - protein, 16 aa, synthetic construct
  REGION 1..16: note = Serine/threonine-protein phosphatase 2A 65 kDa regulatory subunit A alpha isoform (201-216)
VKSEIIPMFSNLASDE

SEQ ID NO: 18847 - protein, 17 aa, synthetic construct
  REGION 1..17: note = Serine/threonine-protein phosphatase 2A 65 kDa regulatory subunit A alpha isoform (201-217)
VKSEIIPMFSNLASDEQ

SEQ ID NO: 18848 - protein, 14 aa, synthetic construct
  REGION 1..14: note = Solute carrier family 2, facilitated glucose transporter member 1 (140-153)
VPMYVGEVSPTALR

SEQ ID NO: 18849 - protein, 15 aa, synthetic construct
  REGION 1..15: note = Glyceraldehyde-3-phosphate dehydrogenase (116-130)
AKRVIISAPSADAPM

SEQ ID NO: 18850 - protein, 15 aa, synthetic construct
  REGION 1..15: note = Glyceraldehyde-3-phosphate dehydrogenase (202-216)
ALQNIIPASTGAAKA

SEQ ID NO: 18851 - protein, 15 aa, synthetic construct
  REGION 1..15: note = 60 kDa heat shock protein, mitochondrial (35-49)
DARALMLQGVDLLAD

SEQ ID NO: 18852 - protein, 15 aa, synthetic construct
  REGION 1..15: note = Tubulin beta-4B chain (22-36)
EVISDEHGIDPTGTY

SEQ ID NO: 18853 - protein, 15 aa, synthetic construct
  REGION 1..15: note = Glyceraldehyde-3-phosphate dehydrogenase (269-283)
ISWYDNEFGYSNRVV

SEQ ID NO: 18854 - protein, 8 aa, synthetic construct
  REGION 1..8: note = RNA cytidine acetyltransferase (478-485)
DAPAHHLF

SEQ ID NO: 18855 - protein, 29 aa, synthetic construct
  REGION 1..29: note = Alpha-synuclein (103-131)
NEEGAPQEGILEDMPVDPDNEAYEMPSEE

SEQ ID NO: 18856 - protein, 5 aa, synthetic construct
  REGION 1..5: note = Carbonic anhydrase 2 (85-89)
DGTYR

SEQ ID NO: 18857 - protein, 5 aa, synthetic construct
  REGION 1..5: note = Carbonic anhydrase 2 (155-159)
GLQKV

SEQ ID NO: 18858 - protein, 5 aa, synthetic construct
  REGION 1..5: note = Carbonic anhydrase 2 (22-26)
IAKGE

SEQ ID NO: 18859 - protein, 5 aa, synthetic construct
  REGION 1..5: note = Carbonic anhydrase 2 (253-257)
RQIKA

SEQ ID NO: 18860 - protein, 5 aa, synthetic construct
  REGION 1..5: note = Carbonic anhydrase 2 (218-222)
SSEQV

SEQ ID NO: 18861 - protein, 15 aa, synthetic construct
  REGION 1..15: note = Complement factor H (1110-1124)
GPPPPIDNGDITSFP

SEQ ID NO: 18862 - protein, 11 aa, synthetic construct
  REGION 1..11: note = Complement factor H (1112-1122)
PPPIDNGDITS

SEQ ID NO: 18863 - protein, 10 aa, synthetic construct
  REGION 1..10: note = Glutathione peroxidase 1 (7-16)
AAAAAAQSVY

SEQ ID NO: 18864 - protein, 12 aa, synthetic construct
  REGION 1..12: note = RalBP1-associated Eps domain-containing protein 2 (13-24)
AAAAAGGGCGSG

SEQ ID NO: 18865 - protein, 25 aa, synthetic construct
  REGION 1..25: note = Pre-mRNA-processing factor 40 homolog A (251-275)
AAAAVVAAAAAAAAAAAAANANAST

SEQ ID NO: 18866 - protein, 11 aa, synthetic construct
  REGION 1..11: note = Cytochrome b-c1 complex subunit 9 (2-12)
AAATLTSKLYS

SEQ ID NO: 18867 - protein, 62 aa, synthetic construct
  REGION 1..62: note = Cytochrome b-c1 complex subunit 9 (2-63)
AAATLTSKLYSLLFRRTSTFALTIIVGVMFFERAFDQGADAIYDHINEGKLWKHIKHKYENK

SEQ ID NO: 18868 - protein, 9 aa, synthetic construct
  REGION 1..9: note = Semaphorin-3A (191-199)
AADFMGRDF

SEQ ID NO: 18869 - protein, 9 aa, synthetic construct
  REGION 1..9: note = 60S ribosomal protein L28 (54-62)
AADGKGVVV

SEQ ID NO: 18870 - protein, 9 aa, synthetic construct
  REGION 1..9: note = Glia-derived nexin (209-217)
AADGKSYQV

SEQ ID NO: 18871 - protein, 9 aa, synthetic construct
  REGION 1..9: note = AF4/FMR2 family member 4 (993-1001)
AADKRLTVL

SEQ ID NO: 18872 - protein, 9 aa, synthetic construct
  REGION 1..9: note = Enhancer of mRNA-decapping protein 4 (854-862)
AADLNLVLY

SEQ ID NO: 18873 - protein, 14 aa, synthetic construct
  REGION 1..14: note = Core histone macro-H2A.2 (57-70)
AAEILELAGNAARD

SEQ ID NO: 18874 - protein, 15 aa, synthetic construct
  REGION 1..15: note = Melanotransferrin (591-605)
AAELRSEDYELLCPN

SEQ ID NO: 18875 - protein, 10 aa, synthetic construct
  REGION 1..10: note = Cholinesterase (211-220)
AAFGGNPKSV

SEQ ID NO: 18876 - protein, 9 aa, synthetic construct
  REGION 1..9: note = Phospholipid transfer protein (155-163)
AAFGGTFKK

SEQ ID NO: 18877 - protein, 9 aa, synthetic construct
  REGION 1..9: note = Bax inhibitor 1 (88-96)
AAGAYVHMV

SEQ ID NO: 18878 - protein, 13 aa, synthetic construct
  REGION 1..13: note = Ran-binding protein 9 (182-194)
AAGPGPAGGAPTP

SEQ ID NO: 18879 - protein, 15 aa, synthetic construct
  REGION 1..15: note = SKI family transcriptional corepressor 2 (519-533)
AAGSAEAAPPPGQPP

SEQ ID NO: 18880 - protein, 14 aa, synthetic construct
  REGION 1..14: note = Fatty acid synthase (859-872)
AAIYNIDTSSESPD

SEQ ID NO: 18881 - protein, 15 aa, synthetic construct
  REGION 1..15: note = Fatty acid synthase (859-873)
AAIYNIDTSSESPDH

SEQ ID NO: 18882 - protein, 16 aa, synthetic construct
  REGION 1..16: note = Fatty acid synthase (859-874)
AAIYNIDTSSESPDHY

SEQ ID NO: 18883 - protein, 8 aa, synthetic construct
  REGION 1..8: note = Spectrin beta chain, non-erythrocytic 4 (2141-2148)
AAKAAPLL

SEQ ID NO: 18884 - protein, 15 aa, synthetic construct
  REGION 1..15: note = Talin-1 (859-873)
AAKILADATAKMVEA

SEQ ID NO: 18885 - protein, 12 aa, synthetic construct
  REGION 1..12: note = Prohibitin (2-13)
AAKVFESIGKFG

SEQ ID NO: 18886 - protein, 14 aa, synthetic construct
  REGION 1..14: note = Prohibitin (2-15)
AAKVFESIGKFGLA

SEQ ID NO: 18887 - protein, 15 aa, synthetic construct
  REGION 1..15: note = Beta-secretase 2 (74-88)
AANFLAMVDNLQGDS

SEQ ID NO: 18888 - protein, 9 aa, synthetic construct
  REGION 1..9: note = Rho guanine nucleotide exchange factor 2 (516-524)
AAPPEMYEV

SEQ ID NO: 18889 - protein, 9 aa, synthetic construct
  REGION 1..9: note = Collagen alpha-1(VI) chain (3-11)
AARALLPLL

SEQ ID NO: 18890 - protein, 9 aa, synthetic construct
  REGION 1..9: note = U2 small nuclear ribonucleoprotein B'' (202-210)
AARDALQGF

SEQ ID NO: 18891 - protein, 13 aa, synthetic construct
  REGION 1..13: note = Transport and Golgi organization protein 6 homolog (2-14)
AARQAVGSGAQET

SEQ ID NO: 18892 - protein, 8 aa, synthetic construct
  REGION 1..8: note = Protein AATF (31-38)
AARVIDRF

SEQ ID NO: 18893 - protein, 16 aa, synthetic construct
  REGION 1..16: note = Dachshund homolog 1 (110-125)
AASNGSGGGGGGISAG

SEQ ID NO: 18894 - protein, 19 aa, synthetic construct
  REGION 1..19: note = HLA class I histocompatibility antigen, A-23 alpha chain (347-365)
AASSDSAQGSDVSLTACKV

SEQ ID NO: 18895 - protein, 9 aa, synthetic construct
  REGION 1..9: note = Talin-1 (2432-2440)
AASTAQLLV

SEQ ID NO: 18896 - protein, 9 aa, synthetic construct
  REGION 1..9: note = Amyloid-like protein 2 (10-18)
AATGRLLLL

SEQ ID NO: 18897 - protein, 9 aa, synthetic construct
  REGION 1..9: note = Protein BTG1 (17-25)
AAVSFISKF

SEQ ID NO: 18898 - protein, 9 aa, synthetic construct
  REGION 1..9: note = Basement membrane-specific heparan sulfate proteoglycan core protein (1409-1417)
AAYGGKLRY

SEQ ID NO: 18899 - protein, 9 aa, synthetic construct
  REGION 1..9: note = Glycogen phosphorylase, muscle form (154-162)
AAYGYGIRY

SEQ ID NO: 18900 - protein, 10 aa, synthetic construct
  REGION 1..10: note = Tyrosine-tRNA ligase, cytoplasmic (339-348)
AAYPDPSKQK

SEQ ID NO: 18901 - protein, 10 aa, synthetic construct
  REGION 1..10: note = SPRY domain-containing SOCS box protein 1 (218-227)
ADAPLHSVGY

SEQ ID NO: 18902 - protein, 9 aa, synthetic construct
  REGION 1..9: note = Ataxin-10 (381-389)
ADASLLKKV

SEQ ID NO: 18903 - protein, 13 aa, synthetic construct
  REGION 1..13: note = Histidine triad nucleotide-binding protein 1 (2-14)
ADEIAKAQVARPG

SEQ ID NO: 18904 - protein, 9 aa, synthetic construct
  REGION 1..9: note = Eukaryotic initiation factor 4A-II (185-193)
ADEMLSRGF

SEQ ID NO: 18905 - protein, 9 aa, synthetic construct
  REGION 1..9: note = Cyclin-dependent kinase 4 (83-91)
ADFGLARIY

SEQ ID NO: 18906 - protein, 9 aa, synthetic construct
  REGION 1..9: note = Cyclin-dependent kinase 13 (240-248)
ADFGLARLY

SEQ ID NO: 18907 - protein, 7 aa, synthetic construct
  REGION 1..7: note = Coatomer subunit gamma-1 (761-767)
ADHIQKV

SEQ ID NO: 18908 - protein, 7 aa, synthetic construct
  REGION 1..7: note = Eukaryotic translation initiation factor 3 subunit H (222-228)
ADKHELL

SEQ ID NO: 18909 - protein, 7 aa, synthetic construct
  REGION 1..7: note = Dual specificity protein phosphatase 14 (94-100)
ADKIHSV

SEQ ID NO: 18910 - protein, 7 aa, synthetic construct
  REGION 1..7: note = Transformation/transcription domain-associated protein (380-386)
ADLVHHV

SEQ ID NO: 18911 - protein, 9 aa, synthetic construct
  REGION 1..9: note = Threonine-tRNA ligase, cytoplasmic (147-155)
ADNTVIAKV

SEQ ID NO: 18912 - protein, 17 aa, synthetic construct
  REGION 1..17: note = H(+)/Cl(-) exchange transporter 7 (526-542)
ADPGKYALMGAAAQLGG

SEQ ID NO: 18913 - protein, 9 aa, synthetic construct
  REGION 1..9: note = Cyclin-dependent kinase 18 (414-422)
AEAALSHSY

SEQ ID NO: 18914 - protein, 9 aa, synthetic construct
  REGION 1..9: note = Actin-binding protein anillin (758-766)
AEAERLLLI

SEQ ID NO: 18915 - protein, 12 aa, synthetic construct
  REGION 1..12: note = T-box transcription factor TBX2 (61-72)
AEAGLHVSALGP

SEQ ID NO: 18916 - protein, 10 aa, synthetic construct
  REGION 1..10: note = Synemin (1056-1065)
AEAPAAGIRF

SEQ ID NO: 18917 - protein, 10 aa, synthetic construct
  REGION 1..10: note = IgGFc-binding protein (407-416)
AEATTNLGLL

SEQ ID NO: 18918 - protein, 12 aa, synthetic construct
  REGION 1..12: note = Probable methyltransferase TARBP1 (184-195)
AEDAAALVAGRL

SEQ ID NO: 18919 - protein, 9 aa, synthetic construct
  REGION 1..9: note = Filamin-B (9-17)
AEDAPWKKI

SEQ ID NO: 18920 - protein, 10 aa, synthetic construct
  REGION 1..10: note = Cytochrome c oxidase subunit 6B1 (2-11)
AEDMETKIKN

SEQ ID NO: 18921 - protein, 10 aa, synthetic construct
  REGION 1..10: note = Voltage-dependent L-type calcium channel subunit alpha-1C (919-928)
AEDPVQHTSF

SEQ ID NO: 18922 - protein, 10 aa, synthetic construct
  REGION 1..10: note = F-box/WD repeat-containing protein 8 (326-335)
AEDSARTLLY

SEQ ID NO: 18923 - protein, 11 aa, synthetic construct
  REGION 1..11: note = ATP-binding cassette sub-family B member 8, mitochondrial (351-361)
AEELGRGIALF

SEQ ID NO: 18924 - protein, 9 aa, synthetic construct
  REGION 1..9: note = Vimentin (287-295)
AEEWYKSKF

SEQ ID NO: 18925 - protein, 21 aa, synthetic construct
  REGION 1..21: note = Proliferation-associated protein 2G4 (162-182)
AEFEVHEVYAVDVLVSSGEGK

SEQ ID NO: 18926 - protein, 12 aa, synthetic construct
  REGION 1..12: note = Gamma-secretase C-terminal fragment 59 (563-574)
AEFRHDSGYEVH

SEQ ID NO: 18927 - protein, 13 aa, synthetic construct
  REGION 1..13: note = Gamma-secretase C-terminal fragment 59 (563-575)
AEFRHDSGYEVHH

SEQ ID NO: 18928 - protein, 14 aa, synthetic construct
  REGION 1..14: note = Gamma-secretase C-terminal fragment 59 (563-576)
AEFRHDSGYEVHHQ

SEQ ID NO: 18929 - protein, 15 aa, synthetic construct
  REGION 1..15: note = Gamma-secretase C-terminal fragment 59 (563-577)
AEFRHDSGYEVHHQK

SEQ ID NO: 18930 - protein, 12 aa, synthetic construct
  REGION 1..12: note = Ataxin-10 (295-306)
AEGDISNVANGF

SEQ ID NO: 18931 - protein, 7 aa, synthetic construct
  REGION 1..7: note = Baculoviral IAP repeat-containing protein 6 (1093-1099)
AEGIHNF

SEQ ID NO: 18932 - protein, 10 aa, synthetic construct
  REGION 1..10: note = Zinc finger protein 516 (373-382)
AEGPSDTKQF

SEQ ID NO: 18933 - protein, 11 aa, synthetic construct
  REGION 1..11: note = Synemin (327-337)
AEHVENMPSEF

SEQ ID NO: 18934 - protein, 9 aa, synthetic construct
  REGION 1..9: note = Intraflagellar transport protein 81 homolog (43-51)
AEIDPKQLV

SEQ ID NO: 18935 - protein, 11 aa, synthetic construct
  REGION 1..11: note = Nucleolar pre-ribosomal-associated protein 1 (403-413)
AEIIGGERSVF

SEQ ID NO: 18936 - protein, 7 aa, synthetic construct
  REGION 1..7: note = Poly (ADP-ribose) polymerase 1 (811-817)
AEIIRKY

SEQ ID NO: 18937 - protein, 12 aa, synthetic construct
  REGION 1..12: note = Sorting nexin-18 (397-408)
AEKDEMVGANFF

SEQ ID NO: 18938 - protein, 12 aa, synthetic construct
  REGION 1..12: note = Actin-binding protein anillin (451-462)
AEKGGNSKSKQL

SEQ ID NO: 18939 - protein, 9 aa, synthetic construct
  REGION 1..9: note = A-kinase anchor protein 9 (834-842)
AEKNFEVNY

SEQ ID NO: 18940 - protein, 9 aa, synthetic construct
  REGION 1..9: note = Ribosomal protein S6 kinase alpha-5 (41-49)
AEKVGIENF

SEQ ID NO: 18941 - protein, 8 aa, synthetic construct
  REGION 1..8: note = Guanine nucleotide-binding protein G(olf) subunit alpha (78-85)
AEKVLAGK

SEQ ID NO: 18942 - protein, 12 aa, synthetic construct
  REGION 1..12: note = Myosin-10 (1603-1614)
AELEDERKQRAL

SEQ ID NO: 18943 - protein, 10 aa, synthetic construct
  REGION 1..10: note = Synemin (111-120)
AELGAQQREL

SEQ ID NO: 18944 - protein, 9 aa, synthetic construct
  REGION 1..9: note = YTH domain-containing family protein 3 (480-488)
AEMKSVVDY

SEQ ID NO: 18945 - protein, 12 aa, synthetic construct
  REGION 1..12: note = YTH domain-containing family protein 3 (480-491)
AEMKSVVDYNAY

SEQ ID NO: 18946 - protein, 11 aa, synthetic construct
  REGION 1..11: note = Melanoma-associated antigen 4 (134-144)
AEMLERVIKNY

SEQ ID NO: 18947 - protein, 11 aa, synthetic construct
  REGION 1..11: note = Melanoma-associated antigen 9 (132-142)
AEMLESVIKNY

SEQ ID NO: 18948 - protein, 7 aa, synthetic construct
  REGION 1..7: note = Probable ATP-dependent RNA helicase DHX37 (108-114)
AEMRLFY

SEQ ID NO: 18949 - protein, 11 aa, synthetic construct
  REGION 1..11: note = Synemin (1391-1401)
AEMTSGVSRSF

SEQ ID NO: 18950 - protein, 9 aa, synthetic construct
  REGION 1..9: note = Obscurin (5874-5882)
AENKLHVSL

SEQ ID NO: 18951 - protein, 9 aa, synthetic construct
  REGION 1..9: note = Plexin-B2 (399-407)
AENNHTVAF

SEQ ID NO: 18952 - protein, 10 aa, synthetic construct
  REGION 1..10: note = Heterogeneous nuclear ribonucleoprotein U (399-408)
AENPGKYNIL

SEQ ID NO: 18953 - protein, 9 aa, synthetic construct
  REGION 1..9: note = Protocadherin gamma-B2 (110-118)
AENPLNIFY

SEQ ID NO: 18954 - protein, 9 aa, synthetic construct
  REGION 1..9: note Dolichyl-diphosphooligosaccharide-proteinosyltransferase subunit 2 (312-320)
AEPDNKNVY

SEQ ID NO: 18955 - protein, 10 aa, synthetic construct
  REGION 1..10: note = RING finger protein 112 (134-143)
AEPLLLVRIN

SEQ ID NO: 18956 - protein, 11 aa, synthetic construct
  REGION 1..11: note = Plectin (1676-1686)
AEQELEKQRQL

SEQ ID NO: 18957 - protein, 10 aa, synthetic construct
  REGION 1..10: note = Intraflagellar transport protein 81 homolog (40-49)
AEQENLGKKL

SEQ ID NO: 18958 - protein, 13 aa, synthetic construct
  REGION 1..13: note = Transcription factor SOX-10 (195-207)
AEQGGTAAIQAHY

SEQ ID NO: 18959 - protein, 10 aa, synthetic construct
  REGION 1..10: note = Vacuolar protein sorting-associated protein 13D (998-1007)
AEQGGTPIRY

SEQ ID NO: 18960 - protein, 9 aa, synthetic construct
  REGION 1..9: note = Tetratricopeptide repeat protein 19, mitochondrial (155-163)
AEQLFKATM

SEQ ID NO: 18961 - protein, 10 aa, synthetic construct
  REGION 1..10: note = Vacuolar protein sorting-associated protein 18 homolog (210-219)
AERGPDGRSF

SEQ ID NO: 18962 - protein, 9 aa, synthetic construct
  REGION 1..9: note = COP9 signalosome complex subunit 7a (56-64)
AESDFASTF

SEQ ID NO: 18963 - protein, 9 aa, synthetic construct
  REGION 1..9: note = Tumor suppressor candidate 3 (279-287)
AESHIILVL

SEQ ID NO: 18964 - protein, 9 aa, synthetic construct
  REGION 1..9: note = Melanoma-associated antigen 4 (102-110)
AESLFREAL

SEQ ID NO: 18965 - protein, 10 aa, synthetic construct
  REGION 1..10: note = Peroxisome assembly protein 12 (45-54)
AESNPTHYGF

SEQ ID NO: 18966 - protein, 10 aa, synthetic construct
  REGION 1..10: note = Collagen alpha-1(XI) chain (281-290)
AESVTEGPTV

SEQ ID NO: 18967 - protein, 9 aa, synthetic construct
  REGION 1..9: note = Procollagen-lysine,2-oxoglutarate 5-dioxygenase 3 (47-55)
AETEGYLRF

SEQ ID NO: 18968 - protein, 10 aa, synthetic construct
  REGION 1..10: note = Procollagen-lysine,2-oxoglutarate 5-dioxygenase 3 (47-56)
AETEGYLRFL

SEQ ID NO: 18969 - protein, 9 aa, synthetic construct
  REGION 1..9: note = Melanoma-associated antigen 4 (280-288)
AETSYVKVL

SEQ ID NO: 18970 - protein, 11 aa, synthetic construct
  REGION 1..11: note = Melanoma-associated antigen 1 (272-282)
AETSYVKVLEY

SEQ ID NO: 18971 - protein, 12 aa, synthetic construct
  REGION 1..12: note = THO complex subunit 5 homolog (41-52)
AEVDLRDPGRDY

SEQ ID NO: 18972 - protein, 11 aa, synthetic construct
  REGION 1..11: note = Peptidase M20 domain-containing protein 2 (78-88)
AEVGAAAALGV

SEQ ID NO: 18973 - protein, 7 aa, synthetic construct
  REGION 1..7: note = Probable cation-transporting ATPase 13A2 (443-449)
AFLPLVP

SEQ ID NO: 18974 - protein, 31 aa, synthetic construct
  REGION 1..31: note = Heat shock protein HSP 90-beta (38-68)
AFMEALQAGADISMIGQFGVGFYSAYLVAEK

SEQ ID NO: 18975 - protein, 11 aa, synthetic construct
  REGION 1..11: note = Integrin alpha-7 (107-117)
AFSPDSHYLLF

SEQ ID NO: 18976 - protein, 7 aa, synthetic construct
  REGION 1..7: note = Clustered mitochondria protein homolog (332-338)
AFVEHRY

SEQ ID NO: 18977 - protein, 9 aa, synthetic construct
  REGION 1..9: note = DnaJ homolog subfamily C member 3 (224-232)
AFYKISTLY

SEQ ID NO: 18978 - protein, 11 aa, synthetic construct
  REGION 1..11: note = SKI family transcriptional corepressor 2 (437-447)
AGAGGAGAAPK

SEQ ID NO: 18979 - protein, 9 aa, synthetic construct
  REGION 1..9: note = Actin, gamma-enteric smooth muscle (23-31)
AGDDAPRAV

SEQ ID NO: 18980 - protein, 16 aa, synthetic construct
  REGION 1..16: note = Tripartite motif-containing protein 67 (85-100)
AGGLGGGAGGGGDHAD

SEQ ID NO: 18981 - protein, 8 aa, synthetic construct
  REGION 1..8: note = Cytochrome c oxidase subunit 6C (68-75)
AGIFQSVK

SEQ ID NO: 18982 - protein, 23 aa, synthetic construct
  REGION 1..23: note = Histone-lysine N-methyltransferase EHMT1 (702-724)
AGLGRPTPGLSQGPGKETLESAL

SEQ ID NO: 18983 - protein, 26 aa, synthetic construct
  REGION 1..26: note = Trifunctional enzyme subunit beta, mitochondrial (344-369)
AGLTMNDIDAFEFHEAFSGQILANFK

SEQ ID NO: 18984 - protein, 12 aa, synthetic construct
  REGION 1..12: note = Collagen alpha-2(IV) chain (15-26)
AGPPGITGFPGF

SEQ ID NO: 18985 - protein, 10 aa, synthetic construct
  REGION 1..10: note = HLA class I histocompatibility antigen, B-8 alpha chain (89-98)
AGSHTLQSMY

SEQ ID NO: 18986 - protein, 8 aa, synthetic construct
  REGION 1..8: note = Actin-related protein 2/3 complex subunit 5 (75-82)
AGSIVLKV

SEQ ID NO: 18987 - protein, 9 aa, synthetic construct
  REGION 1..9: note = Glucosylceramidase (22-30)
AGSLTGLLL

SEQ ID NO: 18988 - protein, 13 aa, synthetic construct
  REGION 1..13: note = CD44 antigen (31-43)
AGVFHVEKNGRYS

SEQ ID NO: 18989 - protein, 12 aa, synthetic construct
  REGION 1..12: note = Cytochrome c oxidase subunit 5B, mitochondrial (118-129)
AHYKLVPQQLAH

SEQ ID NO: 18990 - protein, 9 aa, synthetic construct
  REGION 1..9: note = H(+)/Cl(-) exchange transporter 5 (533-541)
AIAGRLLGV

SEQ ID NO: 18991 - protein, 9 aa, synthetic construct
  REGION 1..9: note = HEAT repeat-containing protein 2 (474-482)
AIATELAQA

SEQ ID NO: 18992 - protein, 9 aa, synthetic construct
  REGION 1..9: note = Tetratricopeptide repeat protein 28 (1994-2002)
AIDEKVQAV

SEQ ID NO: 18993 - protein, 9 aa, synthetic construct
  REGION 1..9: note = Prolow-density lipoprotein receptor-related protein 1 (1748-1756)
AIDFPESKL

SEQ ID NO: 18994 - protein, 8 aa, synthetic construct
  REGION 1..8: note = L-dopachrome tautomerase (63-70)
AIDLPVSV

SEQ ID NO: 18995 - protein, 8 aa, synthetic construct
  REGION 1..8: note = CCR4-NOT transcription complex subunit 1 (94-101)
AIDNPLHY

SEQ ID NO: 18996 - protein, 9 aa, synthetic construct
  REGION 1..9: note = Leucine-rich repeat-containing protein 1 (516-524)
AIDRVTTSV

SEQ ID NO: 18997 - protein, 14 aa, synthetic construct
  REGION 1..14: note = Clathrin heavy chain 1 (1124-1137)
AIDSYIKADDPSSY

SEQ ID NO: 18998 - protein, 15 aa, synthetic construct
  REGION 1..15: note = Clathrin heavy chain 1 (1124-1138)
AIDSYIKADDPSSYM

SEQ ID NO: 18999 - protein, 8 aa, synthetic construct
  REGION 1..8: note = Eukaryotic translation initiation factor 4 gamma 1 (748-755)
AIDTEERL

SEQ ID NO: 19000 - protein, 9 aa, synthetic construct
  REGION 1..9: note = Probable phospholipid-transporting ATPase VB (1005-1013)
AIFQGKLEK

SEQ ID NO: 19001 - protein, 10 aa, synthetic construct
  REGION 1..10: note = Tubulin beta-2A chain (315-324)
AIFRGRMSMK

SEQ ID NO: 19002 - protein, 22 aa, synthetic construct
  REGION 1..22: note = Aldose reductase (156-177)
AIGISNFNHLQVEMILNKPGLK

SEQ ID NO: 19003 - protein, 9 aa, synthetic construct
  REGION 1..9: note = General transcription factor 3C polypeptide 1 (642-650)
AIIATGCFG

SEQ ID NO: 19004 - protein, 9 aa, synthetic construct
  REGION 1..9: note = Receptor-type tyrosine-protein phosphatase zeta (195-203)
AIIDGVESV

SEQ ID NO: 19005 - protein, 9 aa, synthetic construct
  REGION 1..9: note = Protein TANC1 (414-422)
AIISKLVAL

SEQ ID NO: 19006 - protein, 9 aa, synthetic construct
  REGION 1..9: note = Putative endoplasmin-like protein (265-273)
AIKDKIEKA

SEQ ID NO: 19007 - protein, 9 aa, synthetic construct
  REGION 1..9: note = Kinesin-like protein KIF2A (638-646)
AILEQKIDI

SEQ ID NO: 19008 - protein, 9 aa, synthetic construct
  REGION 1..9: note = CLIP-associating protein 2 (795-803)
AILKYIETL

SEQ ID NO: 19009 - protein, 9 aa, synthetic construct
  REGION 1..9: note = Heat shock 70 kDa protein 4 (381-389)
AILSPAFKV

SEQ ID NO: 19010 - protein, 9 aa, synthetic construct
  REGION 1..9: note = Arginyl-tRNA-protein transferase 1 (382-390)
AIMPYGVYK

SEQ ID NO: 19011 - protein, 9 aa, synthetic construct
  REGION 1..9: note = Probable ATP-dependent RNA helicase DDX17 (464-472)
AINPKLMQL

SEQ ID NO: 19012 - protein, 10 aa, synthetic construct
  REGION 1..10: note = Polypyrimidine tract-binding protein 1 (346-355)
AIPGLAGAGN

SEQ ID NO: 19013 - protein, 11 aa, synthetic construct
  REGION 1..11: note = Moesin (19-29)
AIQPNTTGKQL

SEQ ID NO: 19014 - protein, 13 aa, synthetic construct
  REGION 1..13: note = Moesin (19-31)
AIQPNTTGKQLFD

SEQ ID NO: 19015 - protein, 9 aa, synthetic construct
  REGION 1..9: note = EH domain-containing protein 2 (17-25)
AIRTVTSAL

SEQ ID NO: 19016 - protein, 10 aa, synthetic construct
  REGION 1..10: note = DNA-dependent protein kinase catalytic subunit (460-469)
AIVKVFLALA

SEQ ID NO: 19017 - protein, 12 aa, synthetic construct
  REGION 1..12: note = Solute carrier family 23 member 2 (58-69)
AIYTTENGIAEK

SEQ ID NO: 19018 - protein, 8 aa, synthetic construct
  REGION 1..8: note = Nuclear factor of activated T-cells 5 (154-161)
AKAPHYVL

SEQ ID NO: 19019 - protein, 32 aa, synthetic construct
  REGION 1..32: note = ATP synthase subunit epsilon, mitochondrial (20-51)
AKAVRDALKTEFKANAEKTSGSNVKIVKVKKE

SEQ ID NO: 19020 - protein, 14 aa, synthetic construct
  REGION 1..14: note = Alpha-protein kinase 2 (1992-2005)
AKIYAAEAQPLEGF

SEQ ID NO: 19021 - protein, 9 aa, synthetic construct
  REGION 1..9: note = Choline-phosphate cytidylyltransferase A (99-107)
AKNLFPNTY

SEQ ID NO: 19022 - protein, 9 aa, synthetic construct
  REGION 1..9: note = Putative hexokinase HKDC1 (389-397)
ALAAILTRL

SEQ ID NO: 19023 - protein, 13 aa, synthetic construct
  REGION 1..13: note = AT-rich interactive domain-containing protein 1B (2130-2142)
ALAARAIAVQKGS

SEQ ID NO: 19024 - protein, 9 aa, synthetic construct
  REGION 1..9: note = Lamin-B receptor (330-338)
ALAATVFCV

SEQ ID NO: 19025 - protein, 14 aa, synthetic construct
  REGION 1..14: note = Chondroitin sulfate proteoglycan 4 (1294-1307)
ALADEPPSLDPVQS

SEQ ID NO: 19026 - protein, 11 aa, synthetic construct
  REGION 1..11: note = Metastasis-associated protein MTA1 (57-67)
ALADKHATLSV

SEQ ID NO: 19027 - protein, 11 aa, synthetic construct
  REGION 1..11: note = Probable ATP-dependent RNA helicase DDX27 (69-79)
ALADVMSQLKK

SEQ ID NO: 19028 - protein, 9 aa, synthetic construct
  REGION 1..9: note = Seizure 6-like protein 2 (50-58)
ALAELLHGA

SEQ ID NO: 19029 - protein, 9 aa, synthetic construct
  REGION 1..9: note = Helicase SKI2W (784-792)
ALAELTKRL

SEQ ID NO: 19030 - protein, 10 aa, synthetic construct
  REGION 1..10: note = Chloride channel protein 2 (506-515)
ALAGAVTHTV

SEQ ID NO: 19031 - protein, 9 aa, synthetic construct
  REGION 1..9: note = RNA 3'-terminal phosphate cyclase (317-325)
ALANGVSRI

SEQ ID NO: 19032 - protein, 9 aa, synthetic construct
  REGION 1..9: note = La-related protein 1 (672-680)
ALANKLFGA

SEQ ID NO: 19033 - protein, 9 aa, synthetic construct
  REGION 1..9: note = Beclin-1 (316-324)
ALANKMGLK

SEQ ID NO: 19034 - protein, 10 aa, synthetic construct
  REGION 1..10: note = Nicastrin (550-559)
ALANLTGTVV

SEQ ID NO: 19035 - protein, 9 aa, synthetic construct
  REGION 1..9: note = Poly(rC)-binding protein 4 (256-264)
ALAQYLITA

SEQ ID NO: 19036 - protein, 9 aa, synthetic construct
  REGION 1..9: note = Oxidation resistance protein 1 (776-784)
ALASEPLKV

SEQ ID NO: 19037 - protein, 9 aa, synthetic construct
  REGION 1..9: note = Kinesin light chain 4 (108-116)
ALASHLSTV

SEQ ID NO: 19038 - protein, 9 aa, synthetic construct
  REGION 1..9: note = E3 ubiquitin-protein ligase TRIM33 (830-838)
ALASLENHV

SEQ ID NO: 19039 - protein, 10 aa, synthetic construct
  REGION 1..10: note = Ataxin-10 (300-309)
ALATIRLLDV

SEQ ID NO: 19040 - protein, 9 aa, synthetic construct
  REGION 1..9: note = Catenin alpha-1 (336-344)
ALCPQVINA

SEQ ID NO: 19041 - protein, 9 aa, synthetic construct
  REGION 1..9: note = Pre-mRNA-processing factor 40 homolog B (616-624)
ALDAGNIKL

SEQ ID NO: 19042 - protein, 9 aa, synthetic construct
  REGION 1..9: note = Coiled-coil domain-containing protein 14 (192-200)
ALDANIARL

SEQ ID NO: 19043 - protein, 9 aa, synthetic construct
  REGION 1..9: note = Hyccin (259-267)
ALDDIIYRA

SEQ ID NO: 19044 - protein, 9 aa, synthetic construct
  REGION 1..9: note = Protein transport protein Sec16A (815-823)
ALDFTLSRT

SEQ ID NO: 19045 - protein, 9 aa, synthetic construct
  REGION 1..9: note = Rho GTPase-activating protein 5 (624-632)
ALDGKIYEL

SEQ ID NO: 19046 - protein, 8 aa, synthetic construct
  REGION 1..8: note = Endoplasmin (90-97)
ALDKIRLI

SEQ ID NO: 19047 - protein, 7 aa, synthetic construct
  REGION 1..7: note = Heat shock protein HSP 90-beta (1-7)
ALDKIRY

SEQ ID NO: 19048 - protein, 10 aa, synthetic construct
  REGION 1..10: note = Puromycin-sensitive aminopeptidase-like protein (412-421)
ALDNSHPIEV

SEQ ID NO: 19049 - protein, 11 aa, synthetic construct
  REGION 1..11: note = Ubiquitin-like modifier-activating enzyme 1 (574-584)
ALDNVDARMYM

SEQ ID NO: 19050 - protein, 9 aa, synthetic construct
  REGION 1..9: note = Receptor-type tyrosine-protein phosphatase gamma (213-221)
ALDPIIHGL

SEQ ID NO: 19051 - protein, 9 aa, synthetic construct
  REGION 1..9: note = Chromobox protein homolog 8 (299-307)
ALDPNGTRV

SEQ ID NO: 19052 - protein, 9 aa, synthetic construct
  REGION 1..9: note = Microtubule-associated protein 1A (1498-1506)
ALDQKVRSV

SEQ ID NO: 19053 - protein, 9 aa, synthetic construct
  REGION 1..9: note = Cathepsin F (223-231)
ALDRGTAQY

SEQ ID NO: 19054 - protein, 9 aa, synthetic construct
  REGION 1..9: note = Probable helicase with zinc finger domain (1495-1503)
ALDRIHGSV

SEQ ID NO: 19055 - protein, 9 aa, synthetic construct
  REGION 1..9: note = Integrin beta-8 (291-299)
ALDSKLAGI

SEQ ID NO: 19056 - protein, 9 aa, synthetic construct
  REGION 1..9: note = C-type lectin domain family 11 member A (131-139)
ALDTRVVEL

SEQ ID NO: 19057 - protein, 9 aa, synthetic construct
  REGION 1..9: note = Keratin, type I cytoskeletal 27 (352-360)
ALEEQLHQV

SEQ ID NO: 19058 - protein, 9 aa, synthetic construct
  REGION 1..9: note = Serine-protein kinase ATM (1512-1520)
ALENHLHVI

SEQ ID NO: 19059 - protein, 9 aa, synthetic construct
  REGION 1..9: note = Tetratricopeptide repeat protein 28 (936-944)
ALEQHIASV

SEQ ID NO: 19060 - protein, 9 aa, synthetic construct
  REGION 1..9: note = DNA-dependent protein kinase catalytic subunit (315-323)
ALESFLKQV

SEQ ID NO: 19061 - protein, 9 aa, synthetic construct
  REGION 1..9: note = Uridine phosphorylase 1 (48-56)
ALFGDVKFV

SEQ ID NO: 19062 - protein, 9 aa, synthetic construct
  REGION 1..9: note = Ankyrin repeat and SAM domain-containing protein 1A (255-263)
ALFGKTDVV

SEQ ID NO: 19063 - protein, 11 aa, synthetic construct
  REGION 1..11: note = Eukaryotic translation initiation factor 2-alpha kinase 4 (1102-1112)
ALFMDHSGMLV

SEQ ID NO: 19064 - protein, 9 aa, synthetic construct
  REGION 1..9: note = Protein transport protein Sec61 subunit alpha isoform 2 (88-96)
ALFNGAQKL

SEQ ID NO: 19065 - protein, 10 aa, synthetic construct
  REGION 1..10: note = Transforming growth factor-beta-induced protein ig-h3 (2-11)
ALFVRLLALA

SEQ ID NO: 19066 - protein, 8 aa, synthetic construct
  REGION 1..8: note = Jerky protein homolog (486-493)
ALGAVVKV

SEQ ID NO: 19067 - protein, 10 aa, synthetic construct
  REGION 1..10: note = GTP-binding protein 2 (438-447)
ALGDFDRALL

SEQ ID NO: 19068 - protein, 8 aa, synthetic construct
  REGION 1..8: note = Ankyrin repeat domain-containing protein 40 (19-26)
ALGDIREV

SEQ ID NO: 19069 - protein, 9 aa, synthetic construct
  REGION 1..9: note = Integrin alpha-11 (344-352)
ALGDRIFSL

SEQ ID NO: 19070 - protein, 26 aa, synthetic construct
  REGION 1..26: note = Collagen alpha-3(VI) chain (105-130)
ALGFAGGELANIGLALDFVVENHFTR

SEQ ID NO: 19071 - protein, 8 aa, synthetic construct
  REGION 1..8: note = Fucose-1-phosphate guanylyltransferase (126-133)
ALGKIFTA

SEQ ID NO: 19072 - protein, 12 aa, synthetic construct
  REGION 1..12: note = NAD(P) transhydrogenase, mitochondrial (649-660)
ALGMIGVAGGLA

SEQ ID NO: 19073 - protein, 10 aa, synthetic construct
  REGION 1..10: note = ATP-binding cassette sub-family A member 13 (1237-1246)
ALGNALVSVK

SEQ ID NO: 19074 - protein, 8 aa, synthetic construct
  REGION 1..8: note = ATP-binding cassette sub-family B member 8, mitochondrial (320-327)
ALGNVRTV

SEQ ID NO: 19075 - protein, 9 aa, synthetic construct
  REGION 1..9: note = T-box transcription factor TBX2 (69-77)
ALGPHPPAA

SEQ ID NO: 19076 - protein, 9 aa, synthetic construct
  REGION 1..9: note = Dolichol-phosphate mannosyltransferase subunit 3 (74-82)
ALGTVGYRV

SEQ ID NO: 19077 - protein, 9 aa, synthetic construct
  REGION 1..9: note = Methionine-tRNA ligase, cytoplasmic (168-176)
ALHSWFQTL

SEQ ID NO: 19078 - protein, 9 aa, synthetic construct
  REGION 1..9: note = X-ray repair cross-complementing protein 5 (456-464)
ALIDSMSLA

SEQ ID NO: 19079 - protein, 10 aa, synthetic construct
  REGION 1..10: note = Gamma-tubulin complex component 2 (186-195)
ALIGDFLIGA

SEQ ID NO: 19080 - protein, 10 aa, synthetic construct
  REGION 1..10: note = Sodium-dependent phosphate transporter 2 (216-225)
ALISFGVALL

SEQ ID NO: 19081 - protein, 9 aa, synthetic construct
  REGION 1..9: note = Outer dense fiber protein 2-like (357-365)
ALKDEVVSV

SEQ ID NO: 19082 - protein, 9 aa, synthetic construct
  REGION 1..9: note = Lysine-specific demethylase 5B (1044-1052)
ALKDSVQRA

SEQ ID NO: 19083 - protein, 7 aa, synthetic construct
  REGION 1..7: note = Max-like protein X (153-159)
ALKIMKV

SEQ ID NO: 19084 - protein, 9 aa, synthetic construct
  REGION 1..9: note = Poly (ADP-ribose) polymerase 1 (194-202)
ALKKQLPGV

SEQ ID NO: 19085 - protein, 9 aa, synthetic construct
  REGION 1..9: note = Chondroitin sulfate proteoglycan 4 (2314-2322)
ALKNGQYWV

SEQ ID NO: 19086 - protein, 26 aa, synthetic construct
  REGION 1..26: note = ATP synthase subunit epsilon, mitochondrial (26-51)
ALKTEFKANAEKTSGSNVKIVKVKKE

SEQ ID NO: 19087 - protein, 9 aa, synthetic construct
  REGION 1..9: note = Ubiquitin thioesterase OTUB1 (103-111)
ALLDDSKEL

SEQ ID NO: 19088 - protein, 11 aa, synthetic construct
  REGION 1..11: note = Eukaryotic translation initiation factor 3 subunit C-like protein (633-643)
ALLDIQSSGRA

SEQ ID NO: 19089 - protein, 9 aa, synthetic construct
  REGION 1..9: note = Dystonin (5774-5782)
ALLDSLNEV

SEQ ID NO: 19090 - protein, 10 aa, synthetic construct
  REGION 1..10: note = G1/S-specific cyclin-D1 (253-262)
ALLESSLRQA

SEQ ID NO: 19091 - protein, 11 aa, synthetic construct
  REGION 1..11: note = Phosphatidylinositol 3-kinase catalytic subunit type 3 (575-585)
ALLGDNEKMNL

SEQ ID NO: 19092 - protein, 9 aa, synthetic construct
  REGION 1..9: note = WD repeat and FYVE domain-containing protein 3 (1152-1160)
ALLGHTDTV

SEQ ID NO: 19093 - protein, 12 aa, synthetic construct
  REGION 1..12: note = ATP-binding cassette sub-family A member 13 (940-951)
ALLGTNGAGKTT

SEQ ID NO: 19094 - protein, 9 aa, synthetic construct
  REGION 1..9: note = Immunity-related GTPase family Q protein (318-326)
ALLLPDAPL

SEQ ID NO: 19095 - protein, 9 aa, synthetic construct
  REGION 1..9: note = Ubiquitin-like modifier-activating enzyme 6 (782-790)
ALLNILSEV

SEQ ID NO: 19096 - protein, 9 aa, synthetic construct
  REGION 1..9: note = Transmembrane O-methyltransferase (232-240)
ALLPAGATV

SEQ ID NO: 19097 - protein, 11 aa, synthetic construct
  REGION 1..11: note = Insulin receptor substrate 2 (417-427)
ALLPAGGALQH

SEQ ID NO: 19098 - protein, 9 aa, synthetic construct
  REGION 1..9: note = General vesicular transport factor p115 (852-860)
ALLQETKEL

SEQ ID NO: 19099 - protein, 10 aa, synthetic construct
  REGION 1..10: note = Sulfate transporter (251-260)
ALLSGFVTGA

SEQ ID NO: 19100 - protein, 9 aa, synthetic construct
  REGION 1..9: note = Protein eva-1 homolog A (15-23)
ALLSNILAA

SEQ ID NO: 19101 - protein, 9 aa, synthetic construct
  REGION 1..9: note = Putative tyrosine-protein phosphatase auxilin (822-830)
ALLSTMHTV

SEQ ID NO: 19102 - protein, 10 aa, synthetic construct
  REGION 1..10: note = Ankyrin repeat and SOCS box protein 11 (33-42)
ALLTHFYIVK

SEQ ID NO: 19103 - protein, 9 aa, synthetic construct
  REGION 1..9: note = Multiple epidermal growth factor-like domains protein 8 (1267-1275)
ALLTNVSSV

SEQ ID NO: 19104 - protein, 11 aa, synthetic construct
  REGION 1..11: note = Protein TANC2 (1001-1011)
ALMDKEGLTAL

SEQ ID NO: 19105 - protein, 11 aa, synthetic construct
  REGION 1..11: note = Calpain-3 (37-47)
ALMDTDGSGKL

SEQ ID NO: 19106 - protein, 13 aa, synthetic construct
  REGION 1..13: note = Calpain-3 (37-49)
ALMDTDGSGKLNL

SEQ ID NO: 19107 - protein, 9 aa, synthetic construct
  REGION 1..9: note = Protein cordon-bleu (1169-1177)
ALMEAIHSA

SEQ ID NO: 19108 - protein, 11 aa, synthetic construct
  REGION 1..11: note = Bestrophin-1 (462-472)
ALMEHPEVSQV

SEQ ID NO: 19109 - protein, 9 aa, synthetic construct
  REGION 1..9: note = Integrin beta-8 (662-670)
ALMEQQHYV

SEQ ID NO: 19110 - protein, 21 aa, synthetic construct
  REGION 1..21: note = 60 kDa heat shock protein, mitochondrial (38-58)
ALMLQGVDLLADAVAVTMGPK

SEQ ID NO: 19111 - protein, 9 aa, synthetic construct
  REGION 1..9: note = HLA class II histocompatibility antigen, DQ beta 1 chain (103-111)
ALNHHNLLV

SEQ ID NO: 19112 - protein, 9 aa, synthetic construct
  REGION 1..9: note = Putative ribosome-binding factor A, mitochondrial (243-251)
ALNKQIMEY

SEQ ID NO: 19113 - protein, 10 aa, synthetic construct
  REGION 1..10: note = Protocadherin gamma-A2 (171-180)
ALNPNDHFSL

SEQ ID NO: 19114 - protein, 11 aa, synthetic construct
  REGION 1..11: note = RELT-like protein 1 (5-15)
ALPGSAVLAAA

SEQ ID NO: 19115 - protein, 9 aa, synthetic construct
  REGION 1..9: note = Formin-1 (867-875)
ALPPPPASI

SEQ ID NO: 19116 - protein, 9 aa, synthetic construct
  REGION 1..9: note = E3 ubiquitin/ISG15 ligase TRIM25 (398-406)
ALPSKLPTF

SEQ ID NO: 19117 - protein, 11 aa, synthetic construct
  REGION 1..11: note = Epsin-2 (283-293)
ALPSSGPAAQK

SEQ ID NO: 19118 - protein, 10 aa, synthetic construct
  REGION 1..10: note = Transcription factor SOX-10 (341-350)
ALPTVSPPGV

SEQ ID NO: 19119 - protein, 9 aa, synthetic construct
  REGION 1..9: note = Nuclear receptor subfamily 1 group D member 2 (527-535)
ALQETLIRA

SEQ ID NO: 19120 - protein, 9 aa, synthetic construct
  REGION 1..9: note = Interleukin-17 receptor D (642-650)
ALQPLLHTV

SEQ ID NO: 19121 - protein, 9 aa, synthetic construct
  REGION 1..9: note = Golgin subfamily A member 3 (542-550)
ALQSQLQQV

SEQ ID NO: 19122 - protein, 9 aa, synthetic construct
  REGION 1..9: note = V-type proton ATPase subunit C 1 (264-272)
ALRVFVESV

SEQ ID NO: 19123 - protein, 9 aa, synthetic construct
  REGION 1..9: note = Rootletin (252-260)
ALSEDIRKV

SEQ ID NO: 19124 - protein, 11 aa, synthetic construct
  REGION 1..11: note = Catenin alpha-1 (773-783)
ALSEFKAMDSI

SEQ ID NO: 19125 - protein, 9 aa, synthetic construct
  REGION 1..9: note = Staphylococcal nuclease domain-containing protein 1 (626-634)
ALSKVHFTA

SEQ ID NO: 19126 - protein, 11 aa, synthetic construct
  REGION 1..11: note = Ubiquitin carboxyl-terminal hydrolase isozyme L5 (129-139)
ALSNSDVIRQV

SEQ ID NO: 19127 - protein, 9 aa, synthetic construct
  REGION 1..9: note = Serine incorporator 5 (278-286)
ALSSKPAEV

SEQ ID NO: 19128 - protein, 9 aa, synthetic construct
  REGION 1..9: note = NudC domain-containing protein 3 (153-161)
ALSSSSIRV

SEQ ID NO: 19129 - protein, 9 aa, synthetic construct
  REGION 1..9: note = Piezo-type mechanosensitive ion channel component 1 (218-226)
ALSSVYLLL

SEQ ID NO: 19130 - protein, 10 aa, synthetic construct
  REGION 1..10: note = Glutamate receptor ionotropic, kainate 3 (632-641)
ALSTRIIGGI

SEQ ID NO: 19131 - protein, 9 aa, synthetic construct
  REGION 1..9: note = A-kinase anchor protein 9 (1723-1731)
ALTDYITRL

SEQ ID NO: 19132 - protein, 9 aa, synthetic construct
  REGION 1..9: note = Transmembraneoprotein NMB (477-485)
ALTSTLISV

SEQ ID NO: 19133 - protein, 9 aa, synthetic construct
  REGION 1..9: note = Glutamine-tRNA ligase (715-723)
ALVDCSVAL

SEQ ID NO: 19134 - protein, 9 aa, synthetic construct
  REGION 1..9: note = (4658-4666)
ALVDWLYKV

SEQ ID NO: 19135 - protein, 11 aa, synthetic construct
  REGION 1..11: note = Ribosome biogenesis protein BRX1 homolog (228-238)
ALVEIGPRFVL

SEQ ID NO: 19136 - protein, 13 aa, synthetic construct
  REGION 1..13: note = Kinesin-like protein KIF1A (397-409)
ALVGMSPSSSLSA

SEQ ID NO: 19137 - protein, 10 aa, synthetic construct
  REGION 1..10: note = Plexin-A2 (475-484)
ALVGTTSGPV

SEQ ID NO: 19138 - protein, 10 aa, synthetic construct
  REGION 1..10: note = E3 ubiquitin-protein ligase TRIP12 (1669-1678)
ALVSQELQRA

SEQ ID NO: 19139 - protein, 9 aa, synthetic construct
  REGION 1..9: note = Diphthamide biosynthesis protein 1 (172-180)
ALVSTIQFV

SEQ ID NO: 19140 - protein, 10 aa, synthetic construct
  REGION 1..10: note = ER membrane protein complex subunit 7 (4-13)
ALWGFFPVLL

SEQ ID NO: 19141 - protein, 10 aa, synthetic construct
  REGION 1..10: note = Transmembrane protein 234 (16-25)
ALWGGTQPLL

SEQ ID NO: 19142 - protein, 10 aa, synthetic construct
  REGION 1..10: note = tRNA (uracil-5-)-methyltransferase homolog A (132-141)
ALWKGRPLSV

SEQ ID NO: 19143 - protein, 10 aa, synthetic construct
  REGION 1..10: note = WD repeat-containing protein 60 (1057-1066)
ALWPEGKLHK

SEQ ID NO: 19144 - protein, 9 aa, synthetic construct
  REGION 1..9: note = Beta-hexosaminidase subunit beta (43-51)
ALWPLPLSV

SEQ ID NO: 19145 - protein, 15 aa, synthetic construct
  REGION 1..15: note = Phosphatidate phosphatase LPIN1 (411-425)
ALYFPKNGDPSGLAK

SEQ ID NO: 19146 - protein, 9 aa, synthetic construct
  REGION 1..9: note = Caskin-2 (229-237)
ALYGKTEVV

SEQ ID NO: 19147 - protein, 9 aa, synthetic construct
  REGION 1..9: note = Ankyrin repeat and SAM domain-containing protein 1A (190-198)
ALYGRLEVV

SEQ ID NO: 19148 - protein, 10 aa, synthetic construct
  REGION 1..10: note = Hemicentin-1 (1594-1603)
ALYIDKGQYL

SEQ ID NO: 19149 - protein, 12 aa, synthetic construct
  REGION 1..12: note = Cytoplasmic dynein 1 heavy chain 1 (3101-3112)
ALYQVGKEFTSK

SEQ ID NO: 19150 - protein, 12 aa, synthetic construct
  REGION 1..12: note = Type II inositol 3,4-bisphosphate 4-phosphatase (472-483)
ALYTARPGGILK

SEQ ID NO: 19151 - protein, 13 aa, synthetic construct
  REGION 1..13: note = Type II inositol 3,4-bisphosphate 4-phosphatase (472-484)
ALYTARPGGILKK

SEQ ID NO: 19152 - protein, 9 aa, synthetic construct
  REGION 1..9: note = Dedicator of cytokinesis protein 7 (712-720)
AMASIINRL

SEQ ID NO: 19153 - protein, 9 aa, synthetic construct
  REGION 1..9: note = Protein transport protein Sec31A (697-705)
AMDTSTVGV

SEQ ID NO: 19154 - protein, 8 aa, synthetic construct
  REGION 1..8: note = Synemin (36-43)
AMFDKKVQ

SEQ ID NO: 19155 - protein, 11 aa, synthetic construct
  REGION 1..11: note = Exportin-4 (248-258)
AMFESSQNVLL

SEQ ID NO: 19156 - protein, 11 aa, synthetic construct
  REGION 1..11: note = NAD(P)H dehydrogenase (quinone) 1 (21-31)
AMKEAAAAALK

SEQ ID NO: 19157 - protein, 10 aa, synthetic construct
  REGION 1..10: note = Tryptophan-tRNA ligase, cytoplasmic (424-433)
AMLTGELKKA

SEQ ID NO: 19158 - protein, 9 aa, synthetic construct
  REGION 1..9: note = Nucleoporin p58/p45 (376-384)
AMQKIYQTF

SEQ ID NO: 19159 - protein, 9 aa, synthetic construct
  REGION 1..9: note = Tenascin (3-11)
AMTQLLAGV

SEQ ID NO: 19160 - protein, 9 aa, synthetic construct
  REGION 1..9: note = S-adenosylmethionine synthase isoform type-1 (75-83)
AMVDYQRVV

SEQ ID NO: 19161 - protein, 10 aa, synthetic construct
  REGION 1..10: note = Zinc finger protein 697 (233-242)
AMVGMMGVGV

SEQ ID NO: 19162 - protein, 11 aa, synthetic construct
  REGION 1..11: note = Leucine zipper putative tumor suppressor 1 (529-539)
AMYQRNQRLEK

SEQ ID NO: 19163 - protein, 8 aa, synthetic construct
  REGION 1..8: note = Eukaryotic translation initiation factor 2 subunit 3 (84-91)
ANAKIYKL

SEQ ID NO: 19164 - protein, 14 aa, synthetic construct
  REGION 1..14: note = Beta-secretase 2 (75-88)
ANFLAMVDNLQGDS

SEQ ID NO: 19165 - protein, 7 aa, synthetic construct
  REGION 1..7: note = EH domain-containing protein 1 (504-510)
ANHLIKV

SEQ ID NO: 19166 - protein, 8 aa, synthetic construct
  REGION 1..8: note = Galectin-3 (142-149)
ANRIALDF

SEQ ID NO: 19167 - protein, 9 aa, synthetic construct
  REGION 1..9: note = Spectrin alpha chain, non-erythrocytic 1 (94-102)
ANSGAIVKL

SEQ ID NO: 19168 - protein, 9 aa, synthetic construct
  REGION 1..9: note = AT-rich interactive domain-containing protein 2 (940-948)
APAIHQIVL

SEQ ID NO: 19169 - protein, 11 aa, synthetic construct
  REGION 1..11: note = E3 ubiquitin-protein ligase MIB2 (408-418)
APALGRVGKVV

SEQ ID NO: 19170 - protein, 10 aa, synthetic construct
  REGION 1..10: note = Biogenesis of lysosome-related organelles complex 1 subunit 3 (99-108)
APAPAPARSL

SEQ ID NO: 19171 - protein, 9 aa, synthetic construct
  REGION 1..9: note = Protein capicua homolog (1681-1689)
APAPPAVQF

SEQ ID NO: 19172 - protein, 10 aa, synthetic construct
  REGION 1..10: note = Cathepsin F (20-29)
APAQPRAASF

SEQ ID NO: 19173 - protein, 9 aa, synthetic construct
  REGION 1..9: note = Serum paraoxonase/arylesterase 2 (78-86)
APDKPGGIL

SEQ ID NO: 19174 - protein, 18 aa, synthetic construct
  REGION 1..18: note = Fructose-bisphosphate aldolase A (79-96)
APGKGILAADESTGSIAK

SEQ ID NO: 19175 - protein, 10 aa, synthetic construct
  REGION 1..10: note = Lysosome-associated membraneoprotein 1 (3-12)
APGSARRPLL

SEQ ID NO: 19176 - protein, 12 aa, synthetic construct
  REGION 1..12: note = Dynein heavy chain domain-containing protein 1 (4690-4701)
APGTSDLPAPAD

SEQ ID NO: 19177 - protein, 9 aa, synthetic construct
  REGION 1..9: note = Protein SEC13 homolog (98-106)
APHDYGLIL

SEQ ID NO: 19178 - protein, 9 aa, synthetic construct
  REGION 1..9: note = Chondroitin sulfate proteoglycan 4 (1875-1883)
APHNGFLSL

SEQ ID NO: 19179 - protein, 10 aa, synthetic construct
  REGION 1..10: note = Hypoxia-inducible factor 1-alpha (828-837)
APIQGSRNLL

SEQ ID NO: 19180 - protein, 8 aa, synthetic construct
  REGION 1..8: note = TRAF2 and NCK-interacting protein kinase (326-333)
APKPYHKF

SEQ ID NO: 19181 - protein, 10 aa, synthetic construct
  REGION 1..10: note = Ankyrin repeat and SOCS box protein 11 (248-257)
APKSSVEQAL

SEQ ID NO: 19182 - protein, 9 aa, synthetic construct
  REGION 1..9: note = Cancer/testis antigen 2 (114-122)
APLPRPGAV

SEQ ID NO: 19183 - protein, 16 aa, synthetic construct
  REGION 1..16: note = GTP-binding nuclear protein Ran (203-218)
APPEVVMDPALAAQYE

SEQ ID NO: 19184 - protein, 17 aa, synthetic construct
  REGION 1..17: note = GTP-binding nuclear protein Ran (203-219)
APPEVVMDPALAAQYEH

SEQ ID NO: 19185 - protein, 10 aa, synthetic construct
  REGION 1..10: note = DNA-binding protein inhibitor ID-4 (131-140)
APPRTPLTAL

SEQ ID NO: 19186 - protein, 13 aa, synthetic construct
  REGION 1..13: note = Heat shock cognate 71 kDa protein (630-642)
APPSGGASSGPTI

SEQ ID NO: 19187 - protein, 11 aa, synthetic construct
  REGION 1..11: note = Uncharacterized protein C17orf51 (66-76)
APPTRRAQAAL

SEQ ID NO: 19188 - protein, 12 aa, synthetic construct
  REGION 1..12: note = UPF0669 protein C6orf120 (3-14)
APRGRAAPWTTA

SEQ ID NO: 19189 - protein, 8 aa, synthetic construct
  REGION 1..8: note = Procollagen-lysine,2-oxoglutarate 5-dioxygenase 1 (691-698)
APRKGWTL

SEQ ID NO: 19190 - protein, 9 aa, synthetic construct
  REGION 1..9: note = La-related protein 7 (193-201)
APRKPGIFP

SEQ ID NO: 19191 - protein, 41 aa, synthetic construct
  REGION 1..41: note = DNA-binding protein RFX5 (352-392)
APRLSSGALKVATLPLSSRAGAPPAAVPIINMILPTVPALP

SEQ ID NO: 19192 - protein, 10 aa, synthetic construct
  REGION 1..10: note = RNA-binding protein 33 (702-711)
APRNSNLREL

SEQ ID NO: 19193 - protein, 9 aa, synthetic construct
  REGION 1..9: note = Alpha-2-macroglobulin receptor-associated protein (2-10)
APRRVRSFL

SEQ ID NO: 19194 - protein, 9 aa, synthetic construct
  REGION 1..9: note = Alpha-1-syntrophin (7-15)
APRTGLLEL

SEQ ID NO: 19195 - protein, 12 aa, synthetic construct
  REGION 1..12: note = Nance-Horan syndrome protein (1306-1317)
APSAGLEEVAQP

SEQ ID NO: 19196 - protein, 9 aa, synthetic construct
  REGION 1..9: note = Eukaryotic translation initiation factor 3 subunit C-like protein (203-211)
APSGESRKF

SEQ ID NO: 19197 - protein, 9 aa, synthetic construct
  REGION 1..9: note = Rho GTPase-activating protein 7 (241-249)
APSKLGLII

SEQ ID NO: 19198 - protein, 9 aa, synthetic construct
  REGION 1..9: note = Dickkopf-related protein 3 (30-38)
APVKPGPAL

SEQ ID NO: 19199 - protein, 9 aa, synthetic construct
  REGION 1..9: note = Hemicentin-1 (1702-1710)
AQEIDRGQY

SEQ ID NO: 19200 - protein, 11 aa, synthetic construct
  REGION 1..11: note = Coatomer subunit alpha (141-151)
AQFHPTEDLVV

SEQ ID NO: 19201 - protein, 10 aa, synthetic construct
  REGION 1..10: note = Voltage-dependent T-type calcium channel subunit alpha-1H (1841-1850)
AQFVLVNVVV

SEQ ID NO: 19202 - protein, 8 aa, synthetic construct
  REGION 1..8: note = Ran GTPase-activating protein 1 (175-182)
AQGKPLAL

SEQ ID NO: 19203 - protein, 12 aa, synthetic construct
  REGION 1..12: note = Heat shock 70 kDa protein 1B (623-634)
AQGPKGGSGSGP

SEQ ID NO: 19204 - protein, 13 aa, synthetic construct
  REGION 1..13: note = HLA class I histocompatibility antigen, A-69 alpha chain (234-246)
AQGSDVSLTACKV

SEQ ID NO: 19205 - protein, 17 aa, synthetic construct
  REGION 1..17: note = T-complex protein 1 subunit zeta (291-307)
AQLGVQAFADALLIIPK

SEQ ID NO: 19206 - protein, 9 aa, synthetic construct
  REGION 1..9: note = Retrotransposon-derived protein PEG10 (460-468)
AQNGIPLRI

SEQ ID NO: 19207 - protein, 11 aa, synthetic construct
  REGION 1..11: note = F-box/LRR-repeat protein 18 (437-447)
AQPAMHAVPRG

SEQ ID NO: 19208 - protein, 10 aa, synthetic construct
  REGION 1..10: note = Actin, aortic smooth muscle (60-69)
AQSKRGILTL

SEQ ID NO: 19209 - protein, 10 aa, synthetic construct
  REGION 1..10: note = Histone-lysine N-methyltransferase NSD3 (366-375)
AQWDIGIAHA

SEQ ID NO: 19210 - protein, 9 aa, synthetic construct
  REGION 1..9: note = Arrestin domain-containing protein 1 (236-244)
AQWHEQILV

SEQ ID NO: 19211 - protein, 9 aa, synthetic construct
  REGION 1..9: note = Glycogen phosphorylase, liver form (247-255)
ARAPNDFNL

SEQ ID NO: 19212 - protein, 9 aa, synthetic construct
  REGION 1..9: note = Myosin-10 (1639-1647)
ARDEVIKQL

SEQ ID NO: 19213 - protein, 9 aa, synthetic construct
  REGION 1..9: note = Apoptosis-inducing factor 1, mitochondrial (148-156)
ARDPGARVL

SEQ ID NO: 19214 - protein, 10 aa, synthetic construct
  REGION 1..10: note = HLA class II histocompatibility antigen, DQ beta 1 chain (33-42)
ARFDSDVGVY

SEQ ID NO: 19215 - protein, 11 aa, synthetic construct
  REGION 1..11: note = HLA class II histocompatibility antigen, DQ beta 1 chain (33-43)
ARFDSDVGVYR

SEQ ID NO: 19216 - protein, 10 aa, synthetic construct
  REGION 1..10: note = H/ACA ribonucleoprotein complex subunit 3 (33-42)
ARFSPDDKYS

SEQ ID NO: 19217 - protein, 8 aa, synthetic construct
  REGION 1..8: note = ATP-dependent RNA helicase DDX24 (411-418)
ARFTGIKT

SEQ ID NO: 19218 - protein, 9 aa, synthetic construct
  REGION 1..9: note = 60S ribosomal protein L7 (75-83)
ARKAGNFYV

SEQ ID NO: 19219 - protein, 9 aa, synthetic construct
  REGION 1..9: note = Phospholipid transfer protein (319-327)
ARLSAKMAL

SEQ ID NO: 19220 - protein, 9 aa, synthetic construct
  REGION 1..9: note = V-type proton ATPase subunit S1 (217-225)
ARLSLTYER

SEQ ID NO: 19221 - protein, 9 aa, synthetic construct
  REGION 1..9: note = Peroxisomal acyl-coenzyme A oxidase 1 (492-500)
ARLVEIAAK

SEQ ID NO: 19222 - protein, 11 aa, synthetic construct
  REGION 1..11: note = Membrane-associated guanylate kinase, WW and PDZ domain-containing protein 2 (849-859)
ARNGQVNLTVR

SEQ ID NO: 19223 - protein, 11 aa, synthetic construct
  REGION 1..11: note = Melanotransferrin (274-284)
ARVPAHAVVVR

SEQ ID NO: 19224 - protein, 12 aa, synthetic construct
  REGION 1..12: note = Syntenin-1 (35-46)
ASAPIPHDGNLY

SEQ ID NO: 19225 - protein, 13 aa, synthetic construct
  REGION 1..13: note = Receptor-type tyrosine-protein phosphatase mu (849-861)
ASDTSSLVQSHTY

SEQ ID NO: 19226 - protein, 9 aa, synthetic construct
  REGION 1..9: note = Heterogeneous nuclear ribonucleoprotein M (578-586)
ASFDRAIEM

SEQ ID NO: 19227 - protein, 8 aa, synthetic construct
  REGION 1..8: note = Cytochrome c oxidase subunit 7A2, mitochondrial (76-83)
ASFPKKQE

SEQ ID NO: 19228 - protein, 29 aa, synthetic construct
  REGION 1..29: note = Cytochrome c oxidase subunit 5B, mitochondrial (32-60)
ASGGGVPTDEEQATGLEREIMLAAKKGLD

SEQ ID NO: 19229 - protein, 8 aa, synthetic construct
  REGION 1..8: note = Chromodomain-helicase-DNA-binding protein 4 (1045-1052)
ASGKLLLL

SEQ ID NO: 19230 - protein, 8 aa, synthetic construct
  REGION 1..8: note = Thioredoxin domain-containing protein 12 (52-59)
ASGLPLMV

SEQ ID NO: 19231 - protein, 8 aa, synthetic construct
  REGION 1..8: note = Histone deacetylase 6 (38-45)
ASGSVLRL

SEQ ID NO: 19232 - protein, 9 aa, synthetic construct
  REGION 1..9: note = DNA damage-binding protein 1 (882-890)
ASINSTVRL

SEQ ID NO: 19233 - protein, 8 aa, synthetic construct
  REGION 1..8: note = Alpha-actinin-3 (115-122)
ASKGVKLV

SEQ ID NO: 19234 - protein, 9 aa, synthetic construct
  REGION 1..9: note = Adhesion G protein-coupled receptor A3 (756-764)
ASLLHPVVY

SEQ ID NO: 19235 - protein, 9 aa, synthetic construct
  REGION 1..9: note = Dynein light chain roadblock-type 1 (43-51)
ASLMHSFIL

SEQ ID NO: 19236 - protein, 9 aa, synthetic construct
  REGION 1..9: note = Proline synthase co-transcribed bacterial homolog protein (77-85)
ASNPKILSL

SEQ ID NO: 19237 - protein, 10 aa, synthetic construct
  REGION 1..10: note = Solute carrier family 52, riboflavin transporter, member 2 (127-136)
ASNVTFLPFL

SEQ ID NO: 19238 - protein, 9 aa, synthetic construct
  REGION 1..9: note = Alanine-tRNA ligase, cytoplasmic (341-349)
ASRGFFATL

SEQ ID NO: 19239 - protein, 7 aa, synthetic construct
  REGION 1..7: note = Histone H2B type 2-F (78-84)
ASRLAHY

SEQ ID NO: 19240 - protein, 18 aa, synthetic construct
  REGION 1..18: note = HLA class I histocompatibility antigen, A-23 alpha chain (348-365)
ASSDSAQGSDVSLTACKV

SEQ ID NO: 19241 - protein, 9 aa, synthetic construct
  REGION 1..9: note = OTU domain-containing protein 5 (237-245)
ASSPEHPEL

SEQ ID NO: 19242 - protein, 9 aa, synthetic construct
  REGION 1..9: note = 40S ribosomal protein S19 (58-66)
ASTARHLYL

SEQ ID NO: 19243 - protein, 10 aa, synthetic construct
  REGION 1..10: note = Cullin-1 (195-204)
ASTFQMAILL

SEQ ID NO: 19244 - protein, 9 aa, synthetic construct
  REGION 1..9: note Dolichyl-diphosphooligosaccharide-proteinosyltransferase subunit DAD1 (100-108)
ASTILHLVV

SEQ ID NO: 19245 - protein, 10 aa, synthetic construct
  REGION 1..10: note = Thyroid adenoma-associated protein (153-162)
ASVNNLLKNV

SEQ ID NO: 19246 - protein, 8 aa, synthetic construct
  REGION 1..8: note = Cystic fibrosis transmembrane conductance regulator (9-16)
ASVVSKLF

SEQ ID NO: 19247 - protein, 9 aa, synthetic construct
  REGION 1..9: note = ATP-citrate synthase (223-231)
ATADYICKV

SEQ ID NO: 19248 - protein, 9 aa, synthetic construct
  REGION 1..9: note = Leucine-rich repeat-containing protein 47 (393-401)
ATAPPHVTV

SEQ ID NO: 19249 - protein, 10 aa, synthetic construct
  REGION 1..10: note = Hermansky-Pudlak syndrome 1 protein (7-16)
ATEGAEVLFY

SEQ ID NO: 19250 - protein, 9 aa, synthetic construct
  REGION 1..9: note = Kinesin-like protein KIF3C (506-514)
ATELLAAKY

SEQ ID NO: 19251 - protein, 9 aa, synthetic construct
  REGION 1..9: note = EF-hand calcium-binding domain-containing protein 4B isoform a (677-685)
ATENNLIFY

SEQ ID NO: 19252 - protein, 9 aa, synthetic construct
  REGION 1..9: note = Bestrophin-1 (573-581)
ATFTGILGK

SEQ ID NO: 19253 - protein, 9 aa, synthetic construct
  REGION 1..9: note = Apoptosis inhibitor 5 (19-27)
ATGENLPRV

SEQ ID NO: 19254 - protein, 8 aa, synthetic construct
  REGION 1..8: note = Amyloid-like protein 2 (11-18)
ATGRLLLL

SEQ ID NO: 19255 - protein, 11 aa, synthetic construct
  REGION 1..11: note = 40S ribosomal protein S15 (135-145)
ATHSSRFIPLK

SEQ ID NO: 19256 - protein, 9 aa, synthetic construct
  REGION 1..9: note = Poly(rC)-binding protein 4 (135-143)
ATIPYHPSL

SEQ ID NO: 19257 - protein, 10 aa, synthetic construct
  REGION 1..10: note = Phosphatidylinositol 4-kinase alpha (169-178)
ATIRNVLREK

SEQ ID NO: 19258 - protein, 9 aa, synthetic construct
  REGION 1..9: note = Cathepsin D (182-190)
ATKQPGITF

SEQ ID NO: 19259 - protein, 12 aa, synthetic construct
  REGION 1..12: note = Protein FAM171B (413-424)
ATLPRKGQLVYG

SEQ ID NO: 19260 - protein, 9 aa, synthetic construct
  REGION 1..9: note = Nuclear fragile X mental retardation-interacting protein 2 (116-124)
ATNPISRVL

SEQ ID NO: 19261 - protein, 13 aa, synthetic construct
  REGION 1..13: note = UPF0606 protein KIAA1549L (947-959)
ATTLGSYTVQMVK

SEQ ID NO: 19262 - protein, 9 aa, synthetic construct
  REGION 1..9: note = PH domain leucine-rich repeat-containing protein phosphatase 1 (7-15)
ATVQRLPEL

SEQ ID NO: 19263 - protein, 9 aa, synthetic construct
  REGION 1..9: note = Myelin proteolipid protein (206-214)
ATYNFAVLK

SEQ ID NO: 19264 - protein, 10 aa, synthetic construct
  REGION 1..10: note = Eyes absent homolog 1 (124-133)
ATYPQPGQPY

SEQ ID NO: 19265 - protein, 9 aa, synthetic construct
  REGION 1..9: note = Sigma non-opioid intracellular receptor 1 (17-25)
AVAAVLTQV

SEQ ID NO: 19266 - protein, 9 aa, synthetic construct
  REGION 1..9: note = Unconventional myosin-Ic (83-91)
AVADTVYRA

SEQ ID NO: 19267 - protein, 9 aa, synthetic construct
  REGION 1..9: note = Membrane-associated guanylate kinase, WW and PDZ domain-containing protein 2 (1428-1436)
AVAPGPWKV

SEQ ID NO: 19268 - protein, 9 aa, synthetic construct
  REGION 1..9: note = Endothelin B receptor (291-299)
AVASWSRIK

SEQ ID NO: 19269 - protein, 9 aa, synthetic construct
  REGION 1..9: note = Sideroflexin-3 (161-169)
AVATALGLK

SEQ ID NO: 19270 - protein, 9 aa, synthetic construct
  REGION 1..9: note = Ubiquitin-like modifier-activating enzyme 1 (786-794)
AVATFLQSV

SEQ ID NO: 19271 - protein, 17 aa, synthetic construct
  REGION 1..17: note = Tubulin alpha-3E chain (374-390)
AVCMLSNTTAIAEAWAR

SEQ ID NO: 19272 - protein, 10 aa, synthetic construct
  REGION 1..10: note = SH3 domain-containing RING finger protein 3 (442-451)
AVDALLQGAV

SEQ ID NO: 19273 - protein, 9 aa, synthetic construct
  REGION 1..9: note = Ribosome biogenesis protein WDR12 (196-204)
AVDGSGTKF

SEQ ID NO: 19274 - protein, 9 aa, synthetic construct
  REGION 1..9: note = Protein fem-1 homolog A (542-550)
AVDKDTTNV

SEQ ID NO: 19275 - protein, 15 aa, synthetic construct
  REGION 1..15: note = Transmembraneoprotein NMB (550-564)
AVFFPGNQEKDPLLK

SEQ ID NO: 19276 - protein, 10 aa, synthetic construct
  REGION 1..10: note = GTP-binding protein Di-Ras2 (11-20)
AVFGAGGVGK

SEQ ID NO: 19277 - protein, 10 aa, synthetic construct
  REGION 1..10: note = Ankyrin-2 (1172-1181)
AVFPEGALTK

SEQ ID NO: 19278 - protein, 8 aa, synthetic construct
  REGION 1..8: note = Mitochondrial coenzyme A transporter SLC25A42 (298-305)
AVGISFTT

SEQ ID NO: 19279 - protein, 9 aa, synthetic construct
  REGION 1..9: note = Low-density lipoprotein receptor-related protein 2 (1967-1975)
AVHDSFLYY

SEQ ID NO: 19280 - protein, 9 aa, synthetic construct
  REGION 1..9: note = Exosome complex exonuclease RRP44 (286-294)
AVHEDIVAV

SEQ ID NO: 19281 - protein, 12 aa, synthetic construct
  REGION 1..12: note = Structural maintenance of chromosomes flexible hinge domain-containing protein 1 (181-192)
AVIDNGRGMTSK

SEQ ID NO: 19282 - protein, 11 aa, synthetic construct
  REGION 1..11: note = Pirin (150-160)
AVISGEALGIK

SEQ ID NO: 19283 - protein, 11 aa, synthetic construct
  REGION 1..11: note = Protein disulfide-isomerase (199-209)
AVKVHSFPTLK

SEQ ID NO: 19284 - protein, 9 aa, synthetic construct
  REGION 1..9: note = Influenza virus NS1A-binding protein (306-314)
AVLDGIFCV

SEQ ID NO: 19285 - protein, 9 aa, synthetic construct
  REGION 1..9: note = HLA class I histocompatibility antigen, Cw-5 alpha chain (322-330)
AVLGAVMAV

SEQ ID NO: 19286 - protein, 9 aa, synthetic construct
  REGION 1..9: note = HLA class I histocompatibility antigen, Cw-3 alpha chain (322-330)
AVLGAVVAV

SEQ ID NO: 19287 - protein, 9 aa, synthetic construct
  REGION 1..9: note = Kelch-like protein 21 (508-516)
AVLGGKLYV

SEQ ID NO: 19288 - protein, 9 aa, synthetic construct
  REGION 1..9: note = Transmembrane protein 147 (17-25)
AVLGHFLSH

SEQ ID NO: 19289 - protein, 8 aa, synthetic construct
  REGION 1..8: note = ER membrane protein complex subunit 1 (144-151)
AVLKKTTL

SEQ ID NO: 19290 - protein, 9 aa, synthetic construct
  REGION 1..9: note = Coronin-1B (42-50)
AVNPKFLAV

SEQ ID NO: 19291 - protein, 12 aa, synthetic construct
  REGION 1..12: note = Trinucleotide repeat-containing gene 6C protein (287-298)
AVQKEGSGGNAW

SEQ ID NO: 19292 - protein, 9 aa, synthetic construct
  REGION 1..9: note = Constitutive coactivator of peroxisome proliferator-activated receptor gamma (278-286)
AVSDHISKV

SEQ ID NO: 19293 - protein, 17 aa, synthetic construct
  REGION 1..17: note = Histone H2B type 2-F (111-127)
AVSEGTKAVTKYTSSKL

SEQ ID NO: 19294 - protein, 10 aa, synthetic construct
  REGION 1..10: note = Unconventional myosin-Ib (273-282)
AVVAAVLKLG

SEQ ID NO: 19295 - protein, 13 aa, synthetic construct
  REGION 1..13: note = HLA class I histocompatibility antigen, Cw-7 alpha chain (270-282)
AVVVPSGQEQRYT

SEQ ID NO: 19296 - protein, 18 aa, synthetic construct
  REGION 1..18: note = Transketolase (84-101)
AVWAEAGFLAEAELLNLR

SEQ ID NO: 19297 - protein, 9 aa, synthetic construct
  REGION 1..9: note = Fanconi anemia group B protein (310-318)
AVWKESFQV

SEQ ID NO: 19298 - protein, 9 aa, synthetic construct
  REGION 1..9: note = Glia-derived nexin (198-206)
AVYFKGLWK

SEQ ID NO: 19299 - protein, 10 aa, synthetic construct
  REGION 1..10: note = Ras GTPase-activating protein-binding protein 1 (54-63)
AVYGQKEIHR

SEQ ID NO: 19300 - protein, 9 aa, synthetic construct
  REGION 1..9: note = Probable helicase with zinc finger domain (533-541)
AVYLLPVPK

SEQ ID NO: 19301 - protein, 9 aa, synthetic construct
  REGION 1..9: note = Coagulation factor VIII (1262-1270)
AYAPVLQDF

SEQ ID NO: 19302 - protein, 10 aa, synthetic construct
  REGION 1..10: note = E3 ubiquitin-protein ligase TTC3 (578-587)
AYCGIGKVYL

SEQ ID NO: 19303 - protein, 9 aa, synthetic construct
  REGION 1..9: note = Serine/threonine-protein kinase SIK3 (371-379)
AYDHYSAIY

SEQ ID NO: 19304 - protein, 9 aa, synthetic construct
  REGION 1..9: note = E3 ubiquitin-protein ligase TRIM13 (217-225)
AYDPEINKL

SEQ ID NO: 19305 - protein, 9 aa, synthetic construct
  REGION 1..9: note = Lysophosphatidic acid receptor 1 (291-299)
AYEKFFLLL

SEQ ID NO: 19306 - protein, 8 aa, synthetic construct
  REGION 1..8: note = Annexin A5 (93-100)
AYELKHAL

SEQ ID NO: 19307 - protein, 8 aa, synthetic construct
  REGION 1..8: note = Collagen alpha-1(VI) chain (997-1004)
AYGESHLF

SEQ ID NO: 19308 - protein, 8 aa, synthetic construct
  REGION 1..8: note = Ribosomal protein S6 kinase alpha-4 (27-34)
AYGKVFLV

SEQ ID NO: 19309 - protein, 8 aa, synthetic construct
  REGION 1..8: note = Lipase maturation factor 2 (303-310)
AYGTVHYF

SEQ ID NO: 19310 - protein, 9 aa, synthetic construct
  REGION 1..9: note = Transportin-1 (520-528)
AYILDTLVF

SEQ ID NO: 19311 - protein, 9 aa, synthetic construct
  REGION 1..9: note = Poly(A)-specific ribonuclease PARN (337-345)
AYITGLCFI

SEQ ID NO: 19312 - protein, 9 aa, synthetic construct
  REGION 1..9: note = Collagen alpha-1(XXII) chain (141-149)
AYKQVAILL

SEQ ID NO: 19313 - protein, 9 aa, synthetic construct
  REGION 1..9: note = Nuclear receptor subfamily 2 group C member 2 (493-501)
AYLKAIVLF

SEQ ID NO: 19314 - protein, 9 aa, synthetic construct
  REGION 1..9: note = Low affinity sodium-glucose cotransporter (318-326)
AYLKLLPMF

SEQ ID NO: 19315 - protein, 9 aa, synthetic construct
  REGION 1..9: note = Phosphatidylinositide phosphatase SAC2 (390-398)
AYLKQVLLF

SEQ ID NO: 19316 - protein, 10 aa, synthetic construct
  REGION 1..10: note = TRPM8 channel-associated factor 1 (477-486)
AYLPEWKENI

SEQ ID NO: 19317 - protein, 9 aa, synthetic construct
  REGION 1..9: note = Catenin alpha-2 (811-819)
AYLQRIALY

SEQ ID NO: 19318 - protein, 9 aa, synthetic construct
  REGION 1..9: note = Signal recognition particle subunit SRP68 (191-199)
AYLSGMLRF

SEQ ID NO: 19319 - protein, 9 aa, synthetic construct
  REGION 1..9: note = Transmembraneoprotein NMB (36-44)
AYMREHNQL

SEQ ID NO: 19320 - protein, 10 aa, synthetic construct
  REGION 1..10: note = Serine/threonine-protein kinase mTOR (1308-1317)
AYNPMARDLF

SEQ ID NO: 19321 - protein, 9 aa, synthetic construct
  REGION 1..9: note = Eukaryotic translation initiation factor 2-alpha kinase 4 (919-927)
AYNQKVDLF

SEQ ID NO: 19322 - protein, 9 aa, synthetic construct
  REGION 1..9: note = Regulation of nuclear pre-mRNA domain-containing protein 2 (70-78)
AYPHRLNLF

SEQ ID NO: 19323 - protein, 9 aa, synthetic construct
  REGION 1..9: note = Alpha-mannosidase 2C1 (924-932)
AYSLNFPLL

SEQ ID NO: 19324 - protein, 9 aa, synthetic construct
  REGION 1..9: note = Glutamine-fructose-6-phosphate aminotransferase (isomerizing) 1 (477-485)
AYTSQFVSL

SEQ ID NO: 19325 - protein, 8 aa, synthetic construct
  REGION 1..8: note = Bax inhibitor 1 (91-98)
AYVHMVTH

SEQ ID NO: 19326 - protein, 49 aa, synthetic construct
  REGION 1..49: note = ATP synthase subunit epsilon, mitochondrial (3-51)
AYWRQAGLSYIRYSQICAKAVRDALKTEFKANAEKTSGSNVKIVKVKKE

SEQ ID NO: 19327 - protein, 9 aa, synthetic construct
  REGION 1..9: note = Serum albumin (500-508)
CCTESLVNR

SEQ ID NO: 19328 - protein, 9 aa, synthetic construct
  REGION 1..9: note = Phosphoglycerate kinase 1 (50-58)
CLDNGAKSV

SEQ ID NO: 19329 - protein, 9 aa, synthetic construct
  REGION 1..9: note = Sodium/potassium-transporting ATPase subunit alpha-3 (359-367)
CLVKNLEAV

SEQ ID NO: 19330 - protein, 8 aa, synthetic construct
  REGION 1..8: note = Unconventional myosin-Id (243-250)
DAAEFRVV

SEQ ID NO: 19331 - protein, 9 aa, synthetic construct
  REGION 1..9: note = Dual serine/threonine and tyrosine protein kinase (357-365)
DAAKALNLV

SEQ ID NO: 19332 - protein, 9 aa, synthetic construct
  REGION 1..9: note = Dynactin subunit 1 (411-419)
DAALGAEEM

SEQ ID NO: 19333 - protein, 9 aa, synthetic construct
  REGION 1..9: note = Cytoplasmic dynein 2 heavy chain 1 (311-319)
DAALQMITV

SEQ ID NO: 19334 - protein, 8 aa, synthetic construct
  REGION 1..8: note = Unconventional myosin-Ib (247-254)
DAANFRTV

SEQ ID NO: 19335 - protein, 8 aa, synthetic construct
  REGION 1..8: note = HLA class I histocompatibility antigen, alpha chain E (60-67)
DAASPRMV

SEQ ID NO: 19336 - protein, 10 aa, synthetic construct
  REGION 1..10: note = Density-regulated protein (69-78)
DADYPLRVLY

SEQ ID NO: 19337 - protein, 14 aa, synthetic construct
  REGION 1..14: note = Gamma-secretase C-terminal fragment 59 (562-575)
DAEFRHDSGYEVHH

SEQ ID NO: 19338 - protein, 9 aa, synthetic construct
  REGION 1..9: note = Uncharacterized protein C15orf52 (63-71)
DAELDRRIV

SEQ ID NO: 19339 - protein, 8 aa, synthetic construct
  REGION 1..8: note = Zinc finger SWIM domain-containing protein 6 (875-882)
DAFKIATL

SEQ ID NO: 19340 - protein, 9 aa, synthetic construct
  REGION 1..9: note = Fructosamine-3-kinase (34-42)
DAGPVFVKV

SEQ ID NO: 19341 - protein, 9 aa, synthetic construct
  REGION 1..9: note = WD repeat-containing protein 81 (428-436)
DAHFHFHQI

SEQ ID NO: 19342 - protein, 9 aa, synthetic construct
  REGION 1..9: note = Farnesyl pyrophosphate synthase (33-41)
DAIARLKEV

SEQ ID NO: 19343 - protein, 9 aa, synthetic construct
  REGION 1..9: note Dolichyl-diphosphooligosaccharide-proteinosyltransferase subunit 2 (67-75)
DAKKACTYI

SEQ ID NO: 19344 - protein, 9 aa, synthetic construct
  REGION 1..9: note = Heat shock 70 kDa protein 1B (323-331)
DAKLDKAQI

SEQ ID NO: 19345 - protein, 9 aa, synthetic construct
  REGION 1..9: note = FERM, RhoGEF and pleckstrin domain-containing protein 2 (711-719)
DALKAITEV

SEQ ID NO: 19346 - protein, 9 aa, synthetic construct
  REGION 1..9: note = Protocadherin gamma-A12 (636-644)
DALKQSLVV

SEQ ID NO: 19347 - protein, 9 aa, synthetic construct
  REGION 1..9: note = Short-chain dehydrogenase/reductase 3 (138-146)
DALLKSQHI

SEQ ID NO: 19348 - protein, 9 aa, synthetic construct
  REGION 1..9: note = Importin subunit alpha-3 (326-334)
DALSHFPAL

SEQ ID NO: 19349 - protein, 9 aa, synthetic construct
  REGION 1..9: note = Rab GDP dissociation inhibitor beta (233-241)
DANSCQIII

SEQ ID NO: 19350 - protein, 8 aa, synthetic construct
  REGION 1..8: note = Cubilin (2289-2296)
DAPILSKF

SEQ ID NO: 19351 - protein, 8 aa, synthetic construct
  REGION 1..8: note = Fibronectin isoform 11 (1163-1170)
DAPIVNKV

SEQ ID NO: 19352 - protein, 9 aa, synthetic construct
  REGION 1..9: note = Fibronectin isoform 11 (1163-1171)
DAPIVNKVV

SEQ ID NO: 19353 - protein, 8 aa, synthetic construct
  REGION 1..8: note = Transcription activator BRG1 (696-703)
DAPKAGQL

SEQ ID NO: 19354 - protein, 9 aa, synthetic construct
  REGION 1..9: note = Protein scribble homolog (439-447)
DAPPSRVSV

SEQ ID NO: 19355 - protein, 9 aa, synthetic construct
  REGION 1..9: note = Protocadherin gamma-C3 (256-264)
DAPSGTRVV

SEQ ID NO: 19356 - protein, 9 aa, synthetic construct
  REGION 1..9: note = Fc receptor-like A (54-62)
DAREAGFQV

SEQ ID NO: 19357 - protein, 8 aa, synthetic construct
  REGION 1..8: note = Polymerase delta-interacting protein 3 (116-123)
DAREKISL

SEQ ID NO: 19358 - protein, 8 aa, synthetic construct
  REGION 1..8: note = Forkhead-associated domain-containing protein 1 (180-187)
DARKPPVI

SEQ ID NO: 19359 - protein, 8 aa, synthetic construct
  REGION 1..8: note = Polymerase delta-interacting protein 3 (55-62)
DARQKIGL

SEQ ID NO: 19360 - protein, 13 aa, synthetic construct
  REGION 1..13: note = Filamin-A (1614-1626)
DASKCTVTGAGIG

SEQ ID NO: 19361 - protein, 8 aa, synthetic construct
  REGION 1..8: note = Ataxin-10 (382-389)
DASLLKKV

SEQ ID NO: 19362 - protein, 10 aa, synthetic construct
  REGION 1..10: note = Rootletin (478-487)
DASNGSLRGL

SEQ ID NO: 19363 - protein, 9 aa, synthetic construct
  REGION 1..9: note = Basement membrane-specific heparan sulfate proteoglycan core protein (2026-2034)
DASPPPVKI

SEQ ID NO: 19364 - protein, 9 aa, synthetic construct
  REGION 1..9: note = Poly(A)-specific ribonuclease PARN (220-228)
DAVGFSRVI

SEQ ID NO: 19365 - protein, 8 aa, synthetic construct
  REGION 1..8: note = Uncharacterized protein KIAA1522 (204-211)
DAVRIPTV

SEQ ID NO: 19366 - protein, 8 aa, synthetic construct
  REGION 1..8: note = Peptidylprolyl isomerase domain and WD repeat-containing protein 1 (214-221)
DAVRLINI

SEQ ID NO: 19367 - protein, 8 aa, synthetic construct
  REGION 1..8: note = GCN1 general control of amino-acid synthesis 1-like 1 (1074-1081)
DAVRQSVV

SEQ ID NO: 19368 - protein, 9 aa, synthetic construct
  REGION 1..9: note = Putative segment polarity protein dishevelled homolog DVL1P1 (316-324)
DAVRVLREI

SEQ ID NO: 19369 - protein, 8 aa, synthetic construct
  REGION 1..8: note = WD repeat-containing protein 60 (576-583)
DAVVMPKI

SEQ ID NO: 19370 - protein, 9 aa, synthetic construct
  REGION 1..9: note = Acyl-coenzyme A thioesterase 1 isoform X1 (280-288)
DAWKQLQTF

SEQ ID NO: 19371 - protein, 8 aa, synthetic construct
  REGION 1..8: note = Nuclear factor erythroid 2-related factor 3 (109-116)
DAWLVHSV

SEQ ID NO: 19372 - protein, 9 aa, synthetic construct
  REGION 1..9: note = Zinc finger protein 148 (493-501)
DAYLNSPSL

SEQ ID NO: 19373 - protein, 8 aa, synthetic construct
  REGION 1..8: note = Phosphatidylinositide phosphatase SAC2 (555-562)
DAYRQAVI

SEQ ID NO: 19374 - protein, 9 aa, synthetic construct
  REGION 1..9: note = Type II inositol 3,4-bisphosphate 4-phosphatase (589-597)
DCMGEVVNR

SEQ ID NO: 19375 - protein, 18 aa, synthetic construct
  REGION 1..18: note = Prolow-density lipoprotein receptor-related protein 1 (2270-2287)
DDGSRRITIVENVGSVEG

SEQ ID NO: 19376 - protein, 16 aa, synthetic construct
  REGION 1..16: note = HLA class I histocompatibility antigen, alpha chain E (50-65)
DDTQFVRFDNDAASPR

SEQ ID NO: 19377 - protein, 13 aa, synthetic construct
  REGION 1..13: note = HLA class I histocompatibility antigen, B-15 alpha chain (53-65)
DDTQFVRFDSDAA

SEQ ID NO: 19378 - protein, 8 aa, synthetic construct
  REGION 1..8: note = Serum paraoxonase/arylesterase 2 (123-130)
DDTVYLFV

SEQ ID NO: 19379 - protein, 10 aa, synthetic construct
  REGION 1..10: note = Prohibitin (166-175)
DDVSLTHLTF

SEQ ID NO: 19380 - protein, 11 aa, synthetic construct
  REGION 1..11: note = Eukaryotic initiation factor 4A-II (183-193)
DEADEMLSRGF

SEQ ID NO: 19381 - protein, 10 aa, synthetic construct
  REGION 1..10: note = Protein Red (199-208)
DEDPENKIEF

SEQ ID NO: 19382 - protein, 10 aa, synthetic construct
  REGION 1..10: note = Nuclear pore complex protein Nup98-Nup96 (633-642)
DEDSLVSHFY

SEQ ID NO: 19383 - protein, 8 aa, synthetic construct
  REGION 1..8: note = Caseinolytic peptidase B protein homolog (340-347)
DEEHPLVF

SEQ ID NO: 19384 - protein, 10 aa, synthetic construct
  REGION 1..10: note = Splicing factor, proline- and glutamine-rich (311-320)
DEFKRLFAKY

SEQ ID NO: 19385 - protein, 9 aa, synthetic construct
  REGION 1..9: note = ER membrane protein complex subunit 1 (527-535)
DEFNLQKMM

SEQ ID NO: 19386 - protein, 9 aa, synthetic construct
  REGION 1..9: note = Aggrecan core protein (225-233)
DEFPGVRTY

SEQ ID NO: 19387 - protein, 9 aa, synthetic construct
  REGION 1..9: note = Alpha-actinin-3 (248-256)
DEKAIMTYV

SEQ ID NO: 19388 - protein, 7 aa, synthetic construct
  REGION 1..7: note = Probable ATP-dependent RNA helicase DDX27 (87-93)
DEKIEKV

SEQ ID NO: 19389 - protein, 9 aa, synthetic construct
  REGION 1..9: note = Heterogeneous nuclear ribonucleoprotein U (281-289)
DENDVITCF

SEQ ID NO: 19390 - protein, 10 aa, synthetic construct
  REGION 1..10: note = SURP and G-patch domain-containing protein 2 (569-578)
DENSLEYKYY

SEQ ID NO: 19391 - protein, 9 aa, synthetic construct
  REGION 1..9: note = Serine/threonine-protein phosphatase 2A 65 kDa regulatory subunit A beta isoform (227-235)
DEQDSVRLL

SEQ ID NO: 19392 - protein, 13 aa, synthetic construct
  REGION 1..13: note = Cytochrome c oxidase subunit 6B1 (5-17)
DEQRAEGTFPGKI

SEQ ID NO: 19393 - protein, 9 aa, synthetic construct
  REGION 1..9: note = Glycine-tRNA ligase (545-553)
DEQRTFFSF

SEQ ID NO: 19394 - protein, 16 aa, synthetic construct
  REGION 1..16: note = Prohibitin-2 (246-261)
DESFTRGSDSLIKGKK

SEQ ID NO: 19395 - protein, 15 aa, synthetic construct
  REGION 1..15: note = Annexin A2 (52-66)
DEVTIVNILTNRSNA

SEQ ID NO: 19396 - protein, 24 aa, synthetic construct
  REGION 1..24: note = Beta-2-microglobulin (75-98)
DEYACRVNHVTLSQPKIVKWDRDM

SEQ ID NO: 19397 - protein, 9 aa, synthetic construct
  REGION 1..9: note = Rho GTPase-activating protein 33 (76-84)
DFGHIQLLL

SEQ ID NO: 19398 - protein, 7 aa, synthetic construct
  REGION 1..7: note = Exocyst complex component 1 (516-522)
DFISKFF

SEQ ID NO: 19399 - protein, 10 aa, synthetic construct
  REGION 1..10: note = Chromodomain-helicase-DNA-binding protein 4 (1081-1090)
DFLEHEGYKY

SEQ ID NO: 19400 - protein, 7 aa, synthetic construct
  REGION 1..7: note = Prelamin-A/C (56-62)
DFQKNIY

SEQ ID NO: 19401 - protein, 10 aa, synthetic construct
  REGION 1..10: note = Vacuolar protein sorting-associated protein 51 homolog (75-84)
DFSARISATL

SEQ ID NO: 19402 - protein, 18 aa, synthetic construct
  REGION 1..18: note = Prohibitin-2 (174-191)
DFSLILDDVAITELSFSR

SEQ ID NO: 19403 - protein, 25 aa, synthetic construct
  REGION 1..25: note = Cytochrome c oxidase subunit 6C (51-75)
DFYRNYDVMKDFEEMRKAGIFQSVK

SEQ ID NO: 19404 - protein, 8 aa, synthetic construct
  REGION 1..8: note = Histone-lysine N-methyltransferase 2C (1502-1509)
DGAILGKL

SEQ ID NO: 19405 - protein, 8 aa, synthetic construct
  REGION 1..8: note = Melanocyte protein PMEL (233-240)
DGGNKHFL

SEQ ID NO: 19406 - protein, 22 aa, synthetic construct
  REGION 1..22: note = Cytochrome c oxidase subunit 6A1, mitochondrial (65-86)
DGNHTLFHNPHVNPLPTGYEDE

SEQ ID NO: 19407 - protein, 9 aa, synthetic construct
  REGION 1..9: note = E3 ubiquitin-protein ligase UBR4 (503-511)
DGPPAALSI

SEQ ID NO: 19408 - protein, 8 aa, synthetic construct
  REGION 1..8: note = Signal transducer and activator of transcription 2 (570-577)
DGRIMGFV

SEQ ID NO: 19409 - protein, 9 aa, synthetic construct
  REGION 1..9: note = Protein transport protein Sec31A (325-333)
DGRISVYSI

SEQ ID NO: 19410 - protein, 16 aa, synthetic construct
  REGION 1..16: note = Roundabout homolog 1 (1436-1451)
DGRQVVDMRTNPGDPR

SEQ ID NO: 19411 - protein, 8 aa, synthetic construct
  REGION 1..8: note = Ubiquitin-60S ribosomal protein L40 (57-64)
DGRTLSDY

SEQ ID NO: 19412 - protein, 9 aa, synthetic construct
  REGION 1..9: note = Low-density lipoprotein receptor-related protein 2 (857-865)
DGSHLLPVI

SEQ ID NO: 19413 - protein, 15 aa, synthetic construct
  REGION 1..15: note = Annexin A2 (182-196)
DGSVIDYELIDQDAR

SEQ ID NO: 19414 - protein, 8 aa, synthetic construct
  REGION 1..8: note = Neuroblast differentiation-associated protein AHNAK (730-737)
DGVKVPGI

SEQ ID NO: 19415 - protein, 20 aa, synthetic construct
  REGION 1..20: note = Glia-derived nexin (187-206)
DGVLTRLVLVNAVYFKGLWK

SEQ ID NO: 19416 - protein, 9 aa, synthetic construct
  REGION 1..9: note = Myotubularin-related protein 3 (99-107)
DGWDRTPQI

SEQ ID NO: 19417 - protein, 9 aa, synthetic construct
  REGION 1..9: note = Phosphorylase b kinase regulatory subunit alpha, skeletal muscle isoform (591-599)
DGYFGGARV

SEQ ID NO: 19418 - protein, 8 aa, synthetic construct
  REGION 1..8: note = Molybdenum cofactor sulfurase (53-60)
DHAGATLF

SEQ ID NO: 19419 - protein, 12 aa, synthetic construct
  REGION 1..12: note = Trifunctional enzyme subunit alpha, mitochondrial (752-763)
DHANSPNKKFYQ

SEQ ID NO: 19420 - protein, 7 aa, synthetic construct
  REGION 1..7: note = tRNA-splicing ligase RtcB homolog (149-155)
DHIPVGV

SEQ ID NO: 19421 - protein, 8 aa, synthetic construct
  REGION 1..8: note = T-complex protein 1 subunit beta (336-343)
DHPELVKL

SEQ ID NO: 19422 - protein, 7 aa, synthetic construct
  REGION 1..7: note = Syntenin-1 (292-298)
DHTIPEV

SEQ ID NO: 19423 - protein, 7 aa, synthetic construct
  REGION 1..7: note = GPI transamidase component PIG-T (163-169)
DHYFLRY

SEQ ID NO: 19424 - protein, 7 aa, synthetic construct
  REGION 1..7: note = Probable helicase with zinc finger domain (343-349)
DHYVYKV

SEQ ID NO: 19425 - protein, 9 aa, synthetic construct
  REGION 1..9: note = Probable helicase with zinc finger domain (343-351)
DHYVYKVGI

SEQ ID NO: 19426 - protein, 9 aa, synthetic construct
  REGION 1..9: note = Putative Polycomb group protein ASXL1 (616-624)
DIKARALQV

SEQ ID NO: 19427 - protein, 9 aa, synthetic construct
  REGION 1..9: note = Protein zyg-11 homolog B (263-271)
DILPNLVSL

SEQ ID NO: 19428 - protein, 14 aa, synthetic construct
  REGION 1..14: note = Collagen alpha-1(XI) chain (219-232)
DIQQFLITGDPKAA

SEQ ID NO: 19429 - protein, 16 aa, synthetic construct
  REGION 1..16: note = Collagen alpha-1(XI) chain (219-234)
DIQQFLITGDPKAAYD

SEQ ID NO: 19430 - protein, 9 aa, synthetic construct
  REGION 1..9: note = Eukaryotic translation initiation factor 3 subunit C-like protein (636-644)
DIQSSGRAK

SEQ ID NO: 19431 - protein, 14 aa, synthetic construct
  REGION 1..14: note = Protocadherin Fat 1 (2630-2643)
DITYAIEADSESVK

SEQ ID NO: 19432 - protein, 15 aa, synthetic construct
  REGION 1..15: note = Glia-derived nexin (118-132)
DIVTVANAVFVKNAS

SEQ ID NO: 19433 - protein, 8 aa, synthetic construct
  REGION 1..8: note = SWI/SNF complex subunit SMARCC1 (603-610)
DIYSKKTL

SEQ ID NO: 19434 - protein, 12 aa, synthetic construct
  REGION 1..12: note = Spectrin alpha chain, non-erythrocytic 1 (662-673)
DKGDSLDSVEAL

SEQ ID NO: 19435 - protein, 7 aa, synthetic construct
  REGION 1..7: note = V-type proton ATPase catalytic subunit A (466-472)
DKHFTEF

SEQ ID NO: 19436 - protein, 7 aa, synthetic construct
  REGION 1..7: note = Heat shock protein HSP 90-beta (498-504)
DKKVEKV

SEQ ID NO: 19437 - protein, 7 aa, synthetic construct
  REGION 1..7: note = Protein O-GlcNAcase (831-837)
DKRILEF

SEQ ID NO: 19438 - protein, 14 aa, synthetic construct
  REGION 1..14: note = Beta-enolase (195-208)
DKVVIGMDVAASEF

SEQ ID NO: 19439 - protein, 15 aa, synthetic construct
  REGION 1..15: note = L-lactate dehydrogenase A chain (43-57)
DLADELALVDVIEDK

SEQ ID NO: 19440 - protein, 23 aa, synthetic construct
  REGION 1..23: note = Neutral alpha-glucosidase AB (213-235)
DLGIFWLNAAETWVDISSNTAGK

SEQ ID NO: 19441 - protein, 19 aa, synthetic construct
  REGION 1..19: note = Biotin-protein ligase (615-633)
DLITEYNKQHKAELKPLRA

SEQ ID NO: 19442 - protein, 8 aa, synthetic construct
  REGION 1..8: note = 1-phosphatidylinositol 4,5-bisphosphate phosphodiesterase beta-4 (280-287)
DLKKKGLI

SEQ ID NO: 19443 - protein, 9 aa, synthetic construct
  REGION 1..9: note = Protein AHNAK2 (2044-2052)
DLKVQTGQV

SEQ ID NO: 19444 - protein, 16 aa, synthetic construct
  REGION 1..16: note = Inosine triphosphate pyrophosphatase (41-56)
DLPEYQGEPDEISIQK

SEQ ID NO: 19445 - protein, 27 aa, synthetic construct
  REGION 1..27: note = Heat shock protein HSP 90-alpha (477-503)
DLVILLYETALLSSGFSLEDPQTHANR

SEQ ID NO: 19446 - protein, 8 aa, synthetic construct
  REGION 1..8: note = Melanocyte protein PMEL (9-16)
DLVLKRCL

SEQ ID NO: 19447 - protein, 27 aa, synthetic construct
  REGION 1..27: note = Heat shock protein HSP 90-beta (579-605)
DLVVLLFETALLSSGFSLEDPQTHSNR

SEQ ID NO: 19448 - protein, 11 aa, synthetic construct
  REGION 1..11: note = Fibronectin isoform 6 (1235-1245)
DNLSPGLEYNV

SEQ ID NO: 19449 - protein, 19 aa, synthetic construct
  REGION 1..19: note = Serine/threonine-protein phosphatase 2A 65 kDa regulatory subunit A alpha isoform (199-217)
DNVKSEIIPMFSNLASDEQ

SEQ ID NO: 19450 - protein, 8 aa, synthetic construct
  REGION 1..8: note = GPN-loop GTPase 2 (151-158)
DPAKFISV

SEQ ID NO: 19451 - protein, 16 aa, synthetic construct
  REGION 1..16: note = Cadherin-2 (380-395)
DPANWLKIDPVNGQIT

SEQ ID NO: 19452 - protein, 9 aa, synthetic construct
  REGION 1..9: note = DNA helicase MCM9 (298-306)
DPFAGRNVI

SEQ ID NO: 19453 - protein, 8 aa, synthetic construct
  REGION 1..8: note = Putative signal peptidase complex catalytic subunit SEC11B (62-69)
DPIRVGEI

SEQ ID NO: 19454 - protein, 10 aa, synthetic construct
  REGION 1..10: note = Maestro heat-like repeat-containing protein family member 6 (652-661)
DPKPAVAAAA

SEQ ID NO: 19455 - protein, 9 aa, synthetic construct
  REGION 1..9: note = Prolyl 4-hydroxylase subunit alpha-2 (368-376)
DPKTGVLTV

SEQ ID NO: 19456 - protein, 8 aa, synthetic construct
  REGION 1..8: note = Sulfate transporter (642-649)
DPLELHTI

SEQ ID NO: 19457 - protein, 8 aa, synthetic construct
  REGION 1..8: note = Signal recognition particle 9 kDa protein (21-28)
DPMKARVV

SEQ ID NO: 19458 - protein, 9 aa, synthetic construct
  REGION 1..9: note = Titin (17217-17225)
DPPGTPEPI

SEQ ID NO: 19459 - protein, 9 aa, synthetic construct
  REGION 1..9: note = Titin (16908-16916)
DPRSLAVPI

SEQ ID NO: 19460 - protein, 9 aa, synthetic construct
  REGION 1..9: note = Dedicator of cytokinesis protein 7 (1087-1095)
DPRYSDPQI

SEQ ID NO: 19461 - protein, 10 aa, synthetic construct
  REGION 1..10: note = Integral membrane protein DGCR2/IDD (52-61)
DPSHFHAVNV

SEQ ID NO: 19462 - protein, 15 aa, synthetic construct
  REGION 1..15: note = Cadherin-2 (267-281)
DPTGRFAIQTDPNSN

SEQ ID NO: 19463 - protein, 16 aa, synthetic construct
  REGION 1..16: note = Cadherin-2 (267-282)
DPTGRFAIQTDPNSND

SEQ ID NO: 19464 - protein, 17 aa, synthetic construct
  REGION 1..17: note = Cadherin-2 (267-283)
DPTGRFAIQTDPNSNDG

SEQ ID NO: 19465 - protein, 9 aa, synthetic construct
  REGION 1..9: note = Zinc finger protein 469 (3286-3294)
DPWAGGEPL

SEQ ID NO: 19466 - protein, 8 aa, synthetic construct
  REGION 1..8: note = Poly (ADP-ribose) polymerase 12 (148-155)
DPWLLPEI

SEQ ID NO: 19467 - protein, 26 aa, synthetic construct
  REGION 1..26: note = Protein S100-A6 (65-90)
DQEVNFQEYVTFLGALALIYNEALKG

SEQ ID NO: 19468 - protein, 24 aa, synthetic construct
  REGION 1..24: note = CREB-binding protein (539-562)
DQQPPNLISESALPTSLGATNPLM

SEQ ID NO: 19469 - protein, 7 aa, synthetic construct
  REGION 1..7: note = Paired amphipathic helix protein Sin3a (131-137)
DQVKLQF

SEQ ID NO: 19470 - protein, 7 aa, synthetic construct
  REGION 1..7: note = Cyclin-I (74-80)
DRFLATV

SEQ ID NO: 19471 - protein, 8 aa, synthetic construct
  REGION 1..8: note = SUN domain-containing protein 2 (41-48)
DRIGLADY

SEQ ID NO: 19472 - protein, 21 aa, synthetic construct
  REGION 1..21: note = Heterogeneous nuclear ribonucleoprotein U (184-204)
DRLSASSLTMESFAFLWAGGR

SEQ ID NO: 19473 - protein, 15 aa, synthetic construct
  REGION 1..15: note = HLA class I histocompatibility antigen, A-23 alpha chain (351-365)
DSAQGSDVSLTACKV

SEQ ID NO: 19474 - protein, 11 aa, synthetic construct
  REGION 1..11: note = HLA class I histocompatibility antigen, alpha chain E (338-348)
DSAQGSESHSL

SEQ ID NO: 19475 - protein, 11 aa, synthetic construct
  REGION 1..11: note = DNA-directed RNA polymerase I subunit RPA1 (1009-1019)
DSDGSVVQFLY

SEQ ID NO: 19476 - protein, 11 aa, synthetic construct
  REGION 1..11: note = ATP-dependent RNA helicase DHX29 (1132-1142)
DSDHLTIYNAY

SEQ ID NO: 19477 - protein, 9 aa, synthetic construct
  REGION 1..9: note = Sorbin and SH3 domain-containing protein 1 (255-263)
DSDLYSPRY

SEQ ID NO: 19478 - protein, 10 aa, synthetic construct
  REGION 1..10: note = Tyrosinase (454-463)
DSDPDSFQDY

SEQ ID NO: 19479 - protein, 7 aa, synthetic construct
  REGION 1..7: note = Cullin-4B (365-371)
DSFEQRF

SEQ ID NO: 19480 - protein, 16 aa, synthetic construct
  REGION 1..16: note = Alpha-endosulfine (66-81)
DSGDYNMAKAKMKNKQ

SEQ ID NO: 19481 - protein, 10 aa, synthetic construct
  REGION 1..10: note = Ral GTPase-activating protein subunit alpha-1 (921-930)
DSHSDSFSAF

SEQ ID NO: 19482 - protein, 14 aa, synthetic construct
  REGION 1..14: note = Acylamino-acid-releasing enzyme (442-455)
DSILSLPGNVGHQD

SEQ ID NO: 19483 - protein, 13 aa, synthetic construct
  REGION 1..13: note = Endoplasmin (205-217)
DSNEFSVIADPRG

SEQ ID NO: 19484 - protein, 14 aa, synthetic construct
  REGION 1..14: note = Endoplasmin (205-218)
DSNEFSVIADPRGN

SEQ ID NO: 19485 - protein, 15 aa, synthetic construct
  REGION 1..15: note = Endoplasmin (205-219)
DSNEFSVIADPRGNT

SEQ ID NO: 19486 - protein, 16 aa, synthetic construct
  REGION 1..16: note = Endoplasmin (205-220)
DSNEFSVIADPRGNTL

SEQ ID NO: 19487 - protein, 17 aa, synthetic construct
  REGION 1..17: note = Endoplasmin (205-221)
DSNEFSVIADPRGNTLG

SEQ ID NO: 19488 - protein, 8 aa, synthetic construct
  REGION 1..8: note = Serine/threonine-protein phosphatase 2A 65 kDa regulatory subunit A beta isoform isoform e (103-110)
DSVRLLAV

SEQ ID NO: 19489 - protein, 10 aa, synthetic construct
  REGION 1..10: note = Calpain-3 (40-49)
DTDGSGKLNL

SEQ ID NO: 19490 - protein, 19 aa, synthetic construct
  REGION 1..19: note = Beta-secretase 2 (110-128)
DTGSSNFAVAGTPHSYIDT

SEQ ID NO: 19491 - protein, 11 aa, synthetic construct
  REGION 1..11: note = Fibronectin isoform 6 (1261-1271)
DTIIPAVPPPT

SEQ ID NO: 19492 - protein, 12 aa, synthetic construct
  REGION 1..12: note = IST1 homolog (333-344)
DTLPTASAGAST

SEQ ID NO: 19493 - protein, 9 aa, synthetic construct
  REGION 1..9: note = Pre-mRNA-processing-splicing factor 8 (1782-1790)
DTNVYRVTI

SEQ ID NO: 19494 - protein, 16 aa, synthetic construct
  REGION 1..16: note = Glutamate receptor ionotropic, kainate 2 (79-94)
DTQKINLYDSFEASKK

SEQ ID NO: 19495 - protein, 7 aa, synthetic construct
  REGION 1..7: note = Zinc finger MYM-type protein 2 (612-618)
DTWRTEY

SEQ ID NO: 19496 - protein, 9 aa, synthetic construct
  REGION 1..9: note = V-type proton ATPase subunit S1 (142-150)
DVAVVAGGL

SEQ ID NO: 19497 - protein, 9 aa, synthetic construct
  REGION 1..9: note = Coatomer subunit epsilon (49-57)
DVERDVFLY

SEQ ID NO: 19498 - protein, 8 aa, synthetic construct
  REGION 1..8: note = Endothelial differentiation-related factor 1 (37-44)
DVETSKKW

SEQ ID NO: 19499 - protein, 10 aa, synthetic construct
  REGION 1..10: note = Inhibitor of nuclear factor kappa-B kinase subunit alpha (123-132)
DVGGKIIHKI

SEQ ID NO: 19500 - protein, 12 aa, synthetic construct
  REGION 1..12: note = Gamma-secretase C-terminal fragment 59 (584-595)
DVGSNKGAIIGL

SEQ ID NO: 19501 - protein, 18 aa, synthetic construct
  REGION 1..18: note = Gamma-secretase C-terminal fragment 59 (584-601)
DVGSNKGAIIGLMVGGVV

SEQ ID NO: 19502 - protein, 7 aa, synthetic construct
  REGION 1..7: note = 40S ribosomal protein S13 (21-27)
DVKEQIY

SEQ ID NO: 19503 - protein, 16 aa, synthetic construct
  REGION 1..16: note = Laminin subunit alpha-4 (1287-1302)
DVKGIKVQSVDKQYND

SEQ ID NO: 19504 - protein, 17 aa, synthetic construct
  REGION 1..17: note = Laminin subunit alpha-4 (1287-1303)
DVKGIKVQSVDKQYNDG

SEQ ID NO: 19505 - protein, 8 aa, synthetic construct
  REGION 1..8: note = N6-adenosine-methyltransferase 70 kDa subunit (382-389)
DVSILGKF

SEQ ID NO: 19506 - protein, 9 aa, synthetic construct
  REGION 1..9: note = HLA class I histocompatibility antigen, A-23 alpha chain (357-365)
DVSLTACKV

SEQ ID NO: 19507 - protein, 12 aa, synthetic construct
  REGION 1..12: note = Ubiquitin carboxyl-terminal hydrolase 36 (576-587)
DVVLSTSPKLLA

SEQ ID NO: 19508 - protein, 6 aa, synthetic construct
  REGION 1..6: note = U5 small nuclear ribonucleoprotein 200 kDa helicase (1392-1397)
DWYEKF

SEQ ID NO: 19509 - protein, 9 aa, synthetic construct
  REGION 1..9: note = Growth arrest-specific protein 7 (285-293)
DYAKNLAKL

SEQ ID NO: 19510 - protein, 9 aa, synthetic construct
  REGION 1..9: note = ER membrane protein complex subunit 1 (634-642)
DYAKVLLLI

SEQ ID NO: 19511 - protein, 9 aa, synthetic construct
  REGION 1..9: note = Multidrug resistance-associated protein 5 (776-784)
DYATIFNNL

SEQ ID NO: 19512 - protein, 9 aa, synthetic construct
  REGION 1..9: note = Protein Niban (485-493)
DYDSSTIRK

SEQ ID NO: 19513 - protein, 7 aa, synthetic construct
  REGION 1..7: note = Plastin-3 (34-40)
DYELHEL

SEQ ID NO: 19514 - protein, 9 aa, synthetic construct
  REGION 1..9: note = 14-3-3 protein epsilon (127-135)
DYHRYLAEF

SEQ ID NO: 19515 - protein, 9 aa, synthetic construct
  REGION 1..9: note = Cyclic AMP-dependent transcription factor ATF-4 (36-44)
DYLEVAKHF

SEQ ID NO: 19516 - protein, 9 aa, synthetic construct
  REGION 1..9: note = Lysosomal-trafficking regulator (2228-2236)
DYLKGLASF

SEQ ID NO: 19517 - protein, 9 aa, synthetic construct
  REGION 1..9: note = Importin-7 (93-101)
DYPSRWTAI

SEQ ID NO: 19518 - protein, 9 aa, synthetic construct
  REGION 1..9: note = L-dopachrome tautomerase (155-163)
DYVITTQHW

SEQ ID NO: 19519 - protein, 9 aa, synthetic construct
  REGION 1..9: note = Down syndrome critical region protein 3 (203-211)
EAAIRSVEL

SEQ ID NO: 19520 - protein, 10 aa, synthetic construct
  REGION 1..10: note = V-set and immunoglobulin domain-containing protein 10-like (447-456)
EAAVPAGSRL

SEQ ID NO: 19521 - protein, 8 aa, synthetic construct
  REGION 1..8: note = Laminin subunit gamma-1 (1193-1200)
EADDIVRV

SEQ ID NO: 19522 - protein, 8 aa, synthetic construct
  REGION 1..8: note = Poly (ADP-ribose) polymerase 1 (810-817)
EAEIIRKY

SEQ ID NO: 19523 - protein, 10 aa, synthetic construct
  REGION 1..10: note = Poly (ADP-ribose) polymerase 14 (805-814)
EAFAEAVKTV

SEQ ID NO: 19524 - protein, 8 aa, synthetic construct
  REGION 1..8: note = Alpha-mannosidase 2x (749-756)
EAFPLRVI

SEQ ID NO: 19525 - protein, 12 aa, synthetic construct
  REGION 1..12: note = Coronin-6 (123-134)
EAGGGGAFIVLP

SEQ ID NO: 19526 - protein, 8 aa, synthetic construct
  REGION 1..8: note = Leucine-tRNA ligase, cytoplasmic (462-469)
EAKEKIYL

SEQ ID NO: 19527 - protein, 9 aa, synthetic construct
  REGION 1..9: note = Guanine nucleotide-binding protein G(s) subunit alpha isoforms short (258-266)
EALNLFKSI

SEQ ID NO: 19528 - protein, 9 aa, synthetic construct
  REGION 1..9: note = 60 kDa heat shock protein, mitochondrial (165-173)
EALSTLVLN

SEQ ID NO: 19529 - protein, 8 aa, synthetic construct
  REGION 1..8: note = Sulfhydryl oxidase 1 (224-231)
EANVVRKF

SEQ ID NO: 19530 - protein, 10 aa, synthetic construct
  REGION 1..10: note = General transcription factor IIF subunit 1 (356-365)
EASSALFMAK

SEQ ID NO: 19531 - protein, 9 aa, synthetic construct
  REGION 1..9: note = Spectrin beta chain, non-erythrocytic 2 (1585-1593)
EDALRAQQF

SEQ ID NO: 19532 - protein, 8 aa, synthetic construct
  REGION 1..8: note = Tyrosine-protein kinase BAZ1B (275-282)
EDELVKKY

SEQ ID NO: 19533 - protein, 9 aa, synthetic construct
  REGION 1..9: note = ATP-dependent RNA helicase DDX50 (3-11)
EDNPQTLLF

SEQ ID NO: 19534 - protein, 9 aa, synthetic construct
  REGION 1..9: note = Kinesin-like protein KIF13B (775-783)
EDNPVIRSY

SEQ ID NO: 19535 - protein, 8 aa, synthetic construct
  REGION 1..8: note = F-box only protein 32 (101-108)
EDQQNIRL

SEQ ID NO: 19536 - protein, 9 aa, synthetic construct
  REGION 1..9: note = Peptidyl-prolyl cis-trans isomerase FKBP9 (198-206)
EDQVQIHTY

SEQ ID NO: 19537 - protein, 8 aa, synthetic construct
  REGION 1..8: note = Eukaryotic translation initiation factor 3 subunit A (755-762)
EDRDLFVM

SEQ ID NO: 19538 - protein, 9 aa, synthetic construct
  REGION 1..9: note = Cullin-4B (405-413)
EEADRLITY

SEQ ID NO: 19539 - protein, 10 aa, synthetic construct
  REGION 1..10: note = Proteasome activator complex subunit 3 (93-102)
EEAFQGTKVF

SEQ ID NO: 19540 - protein, 10 aa, synthetic construct
  REGION 1..10: note = Heterogeneous nuclear ribonucleoprotein U (540-549)
EEAQKLLEQY

SEQ ID NO: 19541 - protein, 10 aa, synthetic construct
  REGION 1..10: note = Staphylococcal nuclease domain-containing protein 1 (554-563)
EEATLFTKEL

SEQ ID NO: 19542 - protein, 9 aa, synthetic construct
  REGION 1..9: note = Tribbles homolog 2 (149-157)
EEEAARLFY

SEQ ID NO: 19543 - protein, 10 aa, synthetic construct
  REGION 1..10: note = Cullin-4B (404-413)
EEEADRLITY

SEQ ID NO: 19544 - protein, 9 aa, synthetic construct
  REGION 1..9: note = Negative elongation factor E (11-19)
EEEALQKKF

SEQ ID NO: 19545 - protein, 10 aa, synthetic construct
  REGION 1..10: note = Synemin (68-77)
EEEENDGHWF

SEQ ID NO: 19546 - protein, 11 aa, synthetic construct
  REGION 1..11: note = Nestin (503-513)
EEEGSALKTSW

SEQ ID NO: 19547 - protein, 10 aa, synthetic construct
  REGION 1..10: note = Angiomotin-like protein 1 (596-605)
EEELREKQAY

SEQ ID NO: 19548 - protein, 10 aa, synthetic construct
  REGION 1..10: note = Nestin (316-325)
EEENLGKGEY

SEQ ID NO: 19549 - protein, 9 aa, synthetic construct
  REGION 1..9: note = SHC-transforming protein 1 (341-349)
EEEPPDHQY

SEQ ID NO: 19550 - protein, 10 aa, synthetic construct
  REGION 1..10: note = Synemin (856-865)
EEESTIRYSW

SEQ ID NO: 19551 - protein, 9 aa, synthetic construct
  REGION 1..9: note = (1052-1060)
EEFETLKEF

SEQ ID NO: 19552 - protein, 13 aa, synthetic construct
  REGION 1..13: note = HLA class II histocompatibility antigen, DR alpha chain (41-53)
EEFGRFASFEAQG

SEQ ID NO: 19553 - protein, 7 aa, synthetic construct
  REGION 1..7: note = cAMP-dependent protein kinase type I-beta regulatory subunit (247-253)
EEFLSKV

SEQ ID NO: 19554 - protein, 9 aa, synthetic construct
  REGION 1..9: note = Erlin-2 (50-58)
EEGHIGVYY

SEQ ID NO: 19555 - protein, 9 aa, synthetic construct
  REGION 1..9: note = STAM-binding protein (50-58)
EEGNIEHAF

SEQ ID NO: 19556 - protein, 9 aa, synthetic construct
  REGION 1..9: note = Rho guanine nucleotide exchange factor 11 (801-809)
EEGPIIKEI

SEQ ID NO: 19557 - protein, 10 aa, synthetic construct
  REGION 1..10: note = Nestin (504-513)
EEGSALKTSW

SEQ ID NO: 19558 - protein, 8 aa, synthetic construct
  REGION 1..8: note = Cytochrome c oxidase subunit 6A1, mitochondrial (8-15)
EEGSARMW

SEQ ID NO: 19559 - protein, 9 aa, synthetic construct
  REGION 1..9: note = Phosphopantothenate-cysteine ligase (283-291)
EEIEKGVEI

SEQ ID NO: 19560 - protein, 10 aa, synthetic construct
  REGION 1..10: note = A-kinase anchor protein 9 (822-831)
EEIEKQRNTF

SEQ ID NO: 19561 - protein, 10 aa, synthetic construct
  REGION 1..10: note = Vimentin (240-249)
EEIQELQAQI

SEQ ID NO: 19562 - protein, 9 aa, synthetic construct
  REGION 1..9: note = Zinc finger E-box-binding homeobox 2 (457-465)
EEISKLKGY

SEQ ID NO: 19563 - protein, 9 aa, synthetic construct
  REGION 1..9: note = Nuclear pore complex protein Nup205 (77-85)
EEISTVLQY

SEQ ID NO: 19564 - protein, 9 aa, synthetic construct
  REGION 1..9: note = Cadherin-2 (138-146)
EEIVFPRQF

SEQ ID NO: 19565 - protein, 9 aa, synthetic construct
  REGION 1..9: note = Leucine zipper putative tumor suppressor 1 (511-519)
EEKEKVIQY

SEQ ID NO: 19566 - protein, 11 aa, synthetic construct
  REGION 1..11: note = Intraflagellar transport protein 81 homolog (450-460)
EEKKGISGYSY

SEQ ID NO: 19567 - protein, 9 aa, synthetic construct
  REGION 1..9: note = FERM domain-containing protein 5 (259-267)
EEKKIILTY

SEQ ID NO: 19568 - protein, 9 aa, synthetic construct
  REGION 1..9: note = Receptor-type tyrosine-protein phosphatase zeta (1495-1503)
EEKLIIQDF

SEQ ID NO: 19569 - protein, 11 aa, synthetic construct
  REGION 1..11: note = Cyclic AMP-responsive element-binding protein 3-like protein 2 (268-278)
EEKRTLIAEGY

SEQ ID NO: 19570 - protein, 11 aa, synthetic construct
  REGION 1..11: note = Nestin (176-186)
EELARRLGEAW

SEQ ID NO: 19571 - protein, 14 aa, synthetic construct
  REGION 1..14: note = L-dopachrome tautomerase (49-62)
EELFLTSDQLGYSY

SEQ ID NO: 19572 - protein, 12 aa, synthetic construct
  REGION 1..12: note = Glia-derived nexin (40-51)
EELGSNTGIQVF

SEQ ID NO: 19573 - protein, 10 aa, synthetic construct
  REGION 1..10: note = Myotubularin-related protein 6 (290-299)
EELKLKEKTY

SEQ ID NO: 19574 - protein, 9 aa, synthetic construct
  REGION 1..9: note = HEAT repeat-containing protein 1 (773-781)
EELNSTQRV

SEQ ID NO: 19575 - protein, 8 aa, synthetic construct
  REGION 1..8: note = E3 ubiquitin-protein ligase RNF213 (1762-1769)
EELPLMLL

SEQ ID NO: 19576 - protein, 10 aa, synthetic construct
  REGION 1..10: note = Protein KRI1 homolog (27-36)
EELQRLKDRY

SEQ ID NO: 19577 - protein, 9 aa, synthetic construct
  REGION 1..9: note = Angiomotin-like protein 1 (597-605)
EELREKQAY

SEQ ID NO: 19578 - protein, 10 aa, synthetic construct
  REGION 1..10: note = Serpin H1 (373-382)
EELRSPKLFY

SEQ ID NO: 19579 - protein, 10 aa, synthetic construct
  REGION 1..10: note = Vimentin (374-383)
EEMARHLREY

SEQ ID NO: 19580 - protein, 10 aa, synthetic construct
  REGION 1..10: note = RANBP2-like and GRIP domain-containing protein 1 (1180-1189)
EEMKSGLKDF

SEQ ID NO: 19581 - protein, 10 aa, synthetic construct
  REGION 1..10: note = Non-POU domain-containing octamer-binding protein (88-97)
EEMRKLFEKY

SEQ ID NO: 19582 - protein, 9 aa, synthetic construct
  REGION 1..9: note = NudC domain-containing protein 3 (165-173)
EENGERVLM

SEQ ID NO: 19583 - protein, 10 aa, synthetic construct
  REGION 1..10: note = cGMP-inhibited 3',5'-cyclic phosphodiesterase B (605-614)
EENIFSKESF

SEQ ID NO: 19584 - protein, 11 aa, synthetic construct
  REGION 1..11: note = Pituitary tumor-transforming gene 1 protein-interacting protein (169-179)
EENPYARFENN

SEQ ID NO: 19585 - protein, 10 aa, synthetic construct
  REGION 1..10: note = Nestin (283-292)
EENQESLRSL

SEQ ID NO: 19586 - protein, 9 aa, synthetic construct
  REGION 1..9: note = Tropomodulin-2 (273-281)
EENSRILKF

SEQ ID NO: 19587 - protein, 10 aa, synthetic construct
  REGION 1..10: note = Syndecan-3 (422-431)
EEPKQASVTY

SEQ ID NO: 19588 - protein, 9 aa, synthetic construct
  REGION 1..9: note = Lymphoid enhancer-binding factor 1 (247-255)
EEQAKYYEL

SEQ ID NO: 19589 - protein, 9 aa, synthetic construct
  REGION 1..9: note = Receptor-type tyrosine-protein phosphatase gamma (1261-1269)
EEQIIIHDF

SEQ ID NO: 19590 - protein, 9 aa, synthetic construct
  REGION 1..9: note = Eukaryotic translation initiation factor 4 gamma 2 (197-205)
EEQRAIAKI

SEQ ID NO: 19591 - protein, 10 aa, synthetic construct
  REGION 1..10: note = General receptor for phosphoinositides 1-associated scaffold protein (125-134)
EEQRVEMVTF

SEQ ID NO: 19592 - protein, 10 aa, synthetic construct
  REGION 1..10: note = 14-3-3 protein beta/alpha (41-50)
EERNLLSVAY

SEQ ID NO: 19593 - protein, 9 aa, synthetic construct
  REGION 1..9: note = Unconventional myosin-Va (255-263)
EERNYHIFY

SEQ ID NO: 19594 - protein, 9 aa, synthetic construct
  REGION 1..9: note = Protein RTF2 homolog (273-281)
EESEAYKSL

SEQ ID NO: 19595 - protein, 10 aa, synthetic construct
  REGION 1..10: note = Protein RTF2 homolog (273-282)
EESEAYKSLF

SEQ ID NO: 19596 - protein, 10 aa, synthetic construct
  REGION 1..10: note = Rho-associated protein kinase 2 (440-449)
EESQEIQKKL

SEQ ID NO: 19597 - protein, 11 aa, synthetic construct
  REGION 1..11: note = Rho-associated protein kinase 2 (440-450)
EESQEIQKKLY

SEQ ID NO: 19598 - protein, 9 aa, synthetic construct
  REGION 1..9: note = Spectrin beta chain, non-erythrocytic 1 (635-643)
EESRRLWKF

SEQ ID NO: 19599 - protein, 9 aa, synthetic construct
  REGION 1..9: note = Synemin (857-865)
EESTIRYSW

SEQ ID NO: 19600 - protein, 10 aa, synthetic construct
  REGION 1..10: note = Caldesmon (163-172)
EETETVTKSY

SEQ ID NO: 19601 - protein, 9 aa, synthetic construct
  REGION 1..9: note = Putative segment polarity protein dishevelled homolog DVL1P1 (13-21)
EETPYLVKL

SEQ ID NO: 19602 - protein, 9 aa, synthetic construct
  REGION 1..9: note = Trinucleotide repeat-containing gene 18 protein (2863-2871)
EETSPGKQF

SEQ ID NO: 19603 - protein, 8 aa, synthetic construct
  REGION 1..8: note = Dedicator of cytokinesis protein 10 (2044-2051)
EEVDMIRL

SEQ ID NO: 19604 - protein, 10 aa, synthetic construct
  REGION 1..10: note = ATR-interacting protein (133-142)
EEVLIKNGEI

SEQ ID NO: 19605 - protein, 9 aa, synthetic construct
  REGION 1..9: note = V-type proton ATPase subunit B, kidney isoform (273-281)
EEVPGRRGF

SEQ ID NO: 19606 - protein, 8 aa, synthetic construct
  REGION 1..8: note = Protein ITFG3 (235-242)
EEVSGHLY

SEQ ID NO: 19607 - protein, 9 aa, synthetic construct
  REGION 1..9: note = Tyrosinase (280-288)
EEYNSHQSL

SEQ ID NO: 19608 - protein, 10 aa, synthetic construct
  REGION 1..10: note = Hom s 1 (51-60)
EEYRGFTQDF

SEQ ID NO: 19609 - protein, 12 aa, synthetic construct
  REGION 1..12: note = Moesin (17-28)
EFAIQPNTTGKQ

SEQ ID NO: 19610 - protein, 13 aa, synthetic construct
  REGION 1..13: note = Moesin (17-29)
EFAIQPNTTGKQL

SEQ ID NO: 19611 - protein, 10 aa, synthetic construct
  REGION 1..10: note = Lamin-B receptor (208-217)
EFGGVPGVFL

SEQ ID NO: 19612 - protein, 9 aa, synthetic construct
  REGION 1..9: note = Nuclear factor erythroid 2-related factor 1 (312-320)
EFNELLSKY

SEQ ID NO: 19613 - protein, 10 aa, synthetic construct
  REGION 1..10: note = Maltase-glucoamylase (594-603)
EFNLFGIPMV

SEQ ID NO: 19614 - protein, 9 aa, synthetic construct
  REGION 1..9: note = Signal peptidase complex subunit 2 (188-196)
EFTKSIAKF

SEQ ID NO: 19615 - protein, 8 aa, synthetic construct
  REGION 1..8: note = Inositol 1,4,5-trisphosphate receptor type 3 (835-842)
EFVEDYLN

SEQ ID NO: 19616 - protein, 7 aa, synthetic construct
  REGION 1..7: note = Melanoma-associated antigen D1 (610-616)
EFVKQKY

SEQ ID NO: 19617 - protein, 9 aa, synthetic construct
  REGION 1..9: note = Vimentin (405-413)
EGEESRISL

SEQ ID NO: 19618 - protein, 12 aa, synthetic construct
  REGION 1..12: note = Disintegrin and metalloproteinase domain-containing protein 10 (17-28)
EGFIQTRGGTFY

SEQ ID NO: 19619 - protein, 8 aa, synthetic construct
  REGION 1..8: note = Coiled-coil-helix-coiled-coil-helix domain-containing protein 2 (135-142)
EGFNEVLK

SEQ ID NO: 19620 - protein, 7 aa, synthetic construct
  REGION 1..7: note = Dual specificity protein phosphatase 6 (133-139)
EGGFSKF

SEQ ID NO: 19621 - protein, 9 aa, synthetic construct
  REGION 1..9: note = Heat shock protein beta-8 (131-139)
EGGIVSKNF

SEQ ID NO: 19622 - protein, 9 aa, synthetic construct
  REGION 1..9: note = Chondroitin sulfate proteoglycan 4 (257-265)
EGHLRAVVE

SEQ ID NO: 19623 - protein, 8 aa, synthetic construct
  REGION 1..8: note = Zinc finger protein 106 (925-932)
EGHSKTIL

SEQ ID NO: 19624 - protein, 7 aa, synthetic construct
  REGION 1..7: note = Activator of 90 kDa heat shock protein ATPase homolog 1 (249-255)
EGIKQTF

SEQ ID NO: 19625 - protein, 7 aa, synthetic construct
  REGION 1..7: note = Kremen protein 2 (107-113)
EGIYWRY

SEQ ID NO: 19626 - protein, 9 aa, synthetic construct
  REGION 1..9: note = Secretory phospholipase A2 receptor (1283-1291)
EGSNLLTIK

SEQ ID NO: 19627 - protein, 6 aa, synthetic construct
  REGION 1..6: note = Leucine-tRNA ligase, cytoplasmic (177-182)
EHIWTL

SEQ ID NO: 19628 - protein, 10 aa, synthetic construct
  REGION 1..10: note = Protein DBF4 homolog A (541-550)
EHLTVQAKAP

SEQ ID NO: 19629 - protein, 8 aa, synthetic construct
  REGION 1..8: note = Bestrophin-1 (465-472)
EHPEVSQV

SEQ ID NO: 19630 - protein, 6 aa, synthetic construct
  REGION 1..6: note = Glycine-tRNA ligase (536-541)
EHTFHV

SEQ ID NO: 19631 - protein, 8 aa, synthetic construct
  REGION 1..8: note = Fibronectin 1 (1541-1548)
EIDKPSQM

SEQ ID NO: 19632 - protein, 13 aa, synthetic construct
  REGION 1..13: note = 39S ribosomal protein L37, mitochondrial (51-63)
EIPGLEPITFAGK

SEQ ID NO: 19633 - protein, 7 aa, synthetic construct
  REGION 1..7: note = ATP-dependent RNA helicase DDX24 (574-580)
EKDFYLY

SEQ ID NO: 19634 - protein, 8 aa, synthetic construct
  REGION 1..8: note = Tyrosinase (517-524)
EKEDYHSL

SEQ ID NO: 19635 - protein, 11 aa, synthetic construct
  REGION 1..11: note = Nuclear autoantigenic sperm protein (365-375)
EKPGQEAPVLP

SEQ ID NO: 19636 - protein, 9 aa, synthetic construct
  REGION 1..9: note = Exocyst complex component 3 (32-40)
ELAKQLWMV

SEQ ID NO: 19637 - protein, 9 aa, synthetic construct
  REGION 1..9: note = Eukaryotic initiation factor 4A-II (112-120)
ELAQQIQKV

SEQ ID NO: 19638 - protein, 9 aa, synthetic construct
  REGION 1..9: note = Probable ATP-dependent RNA helicase DDX5 (178-186)
ELAQQVQQV

SEQ ID NO: 19639 - protein, 9 aa, synthetic construct
  REGION 1..9: note = Splicing factor 3B subunit 3 (1196-1204)
ELDRTPPEV

SEQ ID NO: 19640 - protein, 9 aa, synthetic construct
  REGION 1..9: note = Microtubule cross-linking factor 1 (532-540)
ELEQELQKY

SEQ ID NO: 19641 - protein, 7 aa, synthetic construct
  REGION 1..7: note = Clathrin heavy chain 1 (362-368)
ELFARKF

SEQ ID NO: 19642 - protein, 22 aa, synthetic construct
  REGION 1..22: note = HEAT repeat-containing protein 5B (423-444)
ELGSLVQSLNATASPLIQEASI

SEQ ID NO: 19643 - protein, 8 aa, synthetic construct
  REGION 1..8: note = Leucine-rich repeat flightless-interacting protein 2 (198-205)
ELIEKHGL

SEQ ID NO: 19644 - protein, 9 aa, synthetic construct
  REGION 1..9: note = Golgin subfamily B member 1 (2901-2909)
ELKNLQQQY

SEQ ID NO: 19645 - protein, 7 aa, synthetic construct
  REGION 1..7: note = Eukaryotic translation initiation factor 3 subunit C-like protein (84-90)
ELLGKAY

SEQ ID NO: 19646 - protein, 9 aa, synthetic construct
  REGION 1..9: note = RHO/RAC effector protein (236-244)
ELNNQNFYL

SEQ ID NO: 19647 - protein, 8 aa, synthetic construct
  REGION 1..8: note = Presenilin-1 (3-10)
ELPAPLSY

SEQ ID NO: 19648 - protein, 6 aa, synthetic construct
  REGION 1..6: note = FERM domain-containing protein 4A (927-932)
ELRQWY

SEQ ID NO: 19649 - protein, 9 aa, synthetic construct
  REGION 1..9: note = Proteasome maturation protein (49-57)
ELSEKNFQL

SEQ ID NO: 19650 - protein, 8 aa, synthetic construct
  REGION 1..8: note = FACT complex subunit SSRP1 (312-319)
EMVSRVMK

SEQ ID NO: 19651 - protein, 10 aa, synthetic construct
  REGION 1..10: note = Ras GTPase-activating-like protein IQGAP2 (450-459)
ENDRVVAVGY

SEQ ID NO: 19652 - protein, 7 aa, synthetic construct
  REGION 1..7: note = Eukaryotic translation initiation factor 3 subunit L (295-301)
ENIELNK

SEQ ID NO: 19653 - protein, 34 aa, synthetic construct
  REGION 1..34: note = Glia-derived nexin (343-376)
ENLHVSHILQKAKIEVSEDGTKASAATTAILIAR

SEQ ID NO: 19654 - protein, 35 aa, synthetic construct
  REGION 1..35: note = Proteasome activator complex subunit 4 (1077-1111)
ENLNHDAIVVRKMAISAVAGILKQLKRTHKKLTIN

SEQ ID NO: 19655 - protein, 11 aa, synthetic construct
  REGION 1..11: note = FYVE, RhoGEF and PH domain-containing protein 6 (143-153)
ENSKIDETLTI

SEQ ID NO: 19656 - protein, 9 aa, synthetic construct
  REGION 1..9: note = Ankyrin repeat domain-containing protein SOWAHB (248-256)
EPAPVPAVA

SEQ ID NO: 19657 - protein, 11 aa, synthetic construct
  REGION 1..11: note = 39S ribosomal protein L3, mitochondrial (91-101)
EPGSFRVGLIA

SEQ ID NO: 19658 - protein, 9 aa, synthetic construct
  REGION 1..9: note = Nurim (116-124)
EPIPKGPVL

SEQ ID NO: 19659 - protein, 10 aa, synthetic construct
  REGION 1..10: note = Ryanodine receptor 1 (370-379)
EPPTPEGSPI

SEQ ID NO: 19660 - protein, 9 aa, synthetic construct
  REGION 1..9: note = WD repeat-containing protein 18 (350-358)
EPRHGGLTL

SEQ ID NO: 19661 - protein, 11 aa, synthetic construct
  REGION 1..11: note = Gamma-secretase C-terminal fragment 59 (473-483)
EPRISYGNDAL

SEQ ID NO: 19662 - protein, 18 aa, synthetic construct
  REGION 1..18: note = Integral membrane protein GPR137C (19-36)
EPSTPGGGSGGGGAVAAA

SEQ ID NO: 19663 - protein, 41 aa, synthetic construct
  REGION 1..41: note = Ubiquitin-associated protein 2-like (364-404)
EQFKTAQALAQLAAQHSQSGSTTTSSWDMGSTTQSPSLVQY

SEQ ID NO: 19664 - protein, 10 aa, synthetic construct
  REGION 1..10: note = Keratin, type II cytoskeletal 1b (186-195)
EQQNQVLQTK

SEQ ID NO: 19665 - protein, 10 aa, synthetic construct
  REGION 1..10: note = Histone-lysine N-methyltransferase 2D (2989-2998)
EQQSKIQKQL

SEQ ID NO: 19666 - protein, 8 aa, synthetic construct
  REGION 1..8: note = Hsp90 co-chaperone Cdc37 (207-214)
EQVAHQTI

SEQ ID NO: 19667 - protein, 8 aa, synthetic construct
  REGION 1..8: note = Mucin-16 (582-589)
EQVFLDKT

SEQ ID NO: 19668 - protein, 7 aa, synthetic construct
  REGION 1..7: note = Serine/arginine-rich splicing factor 3 (27-33)
ERAFGYY

SEQ ID NO: 19669 - protein, 9 aa, synthetic construct
  REGION 1..9: note = Kinectin (367-375)
ERSNVVITR

SEQ ID NO: 19670 - protein, 7 aa, synthetic construct
  REGION 1..7: note = RAB6A-GEF complex partner protein 2 (263-269)
ERVQPEY

SEQ ID NO: 19671 - protein, 6 aa, synthetic construct
  REGION 1..6: note = Vacuolar protein sorting-associated protein 18 homolog (309-314)
ERVWEY

SEQ ID NO: 19672 - protein, 11 aa, synthetic construct
  REGION 1..11: note = Pre-mRNA-splicing factor ATP-dependent RNA helicase PRP16 (1005-1015)
ESDHLTYLNVY

SEQ ID NO: 19673 - protein, 19 aa, synthetic construct
  REGION 1..19: note = Endoplasmin (203-221)
ESDSNEFSVIADPRGNTLG

SEQ ID NO: 19674 - protein, 10 aa, synthetic construct
  REGION 1..10: note = Netrin receptor UNC5A (438-447)
ESEAGVPALV

SEQ ID NO: 19675 - protein, 9 aa, synthetic construct
  REGION 1..9: note = DNA-directed RNA polymerase I subunit RPA1 (186-194)
ESKSKLIAL

SEQ ID NO: 19676 - protein, 8 aa, synthetic construct
  REGION 1..8: note = Four and a half LIM domains protein 2 (122-129)
ESLFGKKY

SEQ ID NO: 19677 - protein, 8 aa, synthetic construct
  REGION 1..8: note = T-complex protein 1 subunit beta (114-121)
ESLIAKKI

SEQ ID NO: 19678 - protein, 7 aa, synthetic construct
  REGION 1..7: note = Heterogeneous nuclear ribonucleoproteins A2/B1 (23-29)
ESLRNYY

SEQ ID NO: 19679 - protein, 17 aa, synthetic construct
  REGION 1..17: note = AT-rich interactive domain-containing protein 1A (78-94)
ESNGGGGGGGAGSGGGP

SEQ ID NO: 19680 - protein, 7 aa, synthetic construct
  REGION 1..7: note = DENN domain-containing protein 4B (1394-1400)
ESVLRHV

SEQ ID NO: 19681 - protein, 9 aa, synthetic construct
  REGION 1..9: note = Protein kinase C-binding protein 1 (695-703)
ETDSPTVHL

SEQ ID NO: 19682 - protein, 9 aa, synthetic construct
  REGION 1..9: note = HEAT repeat-containing protein 1 (1479-1487)
ETIPKAVSF

SEQ ID NO: 19683 - protein, 9 aa, synthetic construct
  REGION 1..9: note = Receptor-type tyrosine-protein phosphatase C (52-60)
ETKLFTAKL

SEQ ID NO: 19684 - protein, 10 aa, synthetic construct
  REGION 1..10: note = Uridine-cytidine kinase-like 1 (329-338)
ETSRDEFIFY

SEQ ID NO: 19685 - protein, 18 aa, synthetic construct
  REGION 1..18: note = UPF0606 protein KIAA1549 (278-295)
ETTLFLSSRSLMPQPLGD

SEQ ID NO: 19686 - protein, 22 aa, synthetic construct
  REGION 1..22: note = ATP synthase subunit alpha, mitochondrial (339-360)
EVAAFAQFGSDLDAATQQLLSR

SEQ ID NO: 19687 - protein, 9 aa, synthetic construct
  REGION 1..9: note = 40S ribosomal protein S21 (38-46)
EVDKVTGRF

SEQ ID NO: 19688 - protein, 9 aa, synthetic construct
  REGION 1..9: note = Melanoma-associated antigen 4 (169-177)
EVDPASNTY

SEQ ID NO: 19689 - protein, 10 aa, synthetic construct
  REGION 1..10: note = Dystrophin (1633-1642)
EVGEALKTVL

SEQ ID NO: 19690 - protein, 16 aa, synthetic construct
  REGION 1..16: note = Filamin-A (1150-1165)
EVGQFQVDCSSAGSAE

SEQ ID NO: 19691 - protein, 19 aa, synthetic construct
  REGION 1..19: note = Titin (5338-5356)
EVGSSSCETTFTVLDRDIA

SEQ ID NO: 19692 - protein, 9 aa, synthetic construct
  REGION 1..9: note = Nucleosome assembly protein 1-like 4 (87-95)
EVHDLERKY

SEQ ID NO: 19693 - protein, 8 aa, synthetic construct
  REGION 1..8: note = Pseudouridylate synthase 7 homolog-like protein (87-94)
EVHTLIKY

SEQ ID NO: 19694 - protein, 10 aa, synthetic construct
  REGION 1..10: note = Midasin (595-604)
EVIGSKLNIS

SEQ ID NO: 19695 - protein, 10 aa, synthetic construct
  REGION 1..10: note = Protein ZGRF1 (72-81)
EVKVAGAIGI

SEQ ID NO: 19696 - protein, 10 aa, synthetic construct
  REGION 1..10: note = RNA-binding protein Nova-1 (277-286)
EVLPTAAAAA

SEQ ID NO: 19697 - protein, 10 aa, synthetic construct
  REGION 1..10: note = Hemicentin-1 (2987-2996)
EVSGFPPPDL

SEQ ID NO: 19698 - protein, 7 aa, synthetic construct
  REGION 1..7: note = Basigin (49-55)
EVTGHRW

SEQ ID NO: 19699 - protein, 13 aa, synthetic construct
  REGION 1..13: note = Annexin A2 (53-65)
EVTIVNILTNRSN

SEQ ID NO: 19700 - protein, 15 aa, synthetic construct
  REGION 1..15: note = Annexin A2 (53-67)
EVTIVNILTNRSNAQ

SEQ ID NO: 19701 - protein, 9 aa, synthetic construct
  REGION 1..9: note = Myotubularin (410-418)
EWISFGHKF

SEQ ID NO: 19702 - protein, 9 aa, synthetic construct
  REGION 1..9: note = Zinc finger protein 317 (82-90)
EYAHLFEVF

SEQ ID NO: 19703 - protein, 9 aa, synthetic construct
  REGION 1..9: note = Lysophosphatidylcholine acyltransferase 2 (495-503)
EYAKIFTTY

SEQ ID NO: 19704 - protein, 10 aa, synthetic construct
  REGION 1..10: note = Meiosis arrest female protein 1 (1363-1372)
EYAKTFGYTF

SEQ ID NO: 19705 - protein, 9 aa, synthetic construct
  REGION 1..9: note = Tyrosine-protein kinase Fer (41-49)
EYASTLQNL

SEQ ID NO: 19706 - protein, 9 aa, synthetic construct
  REGION 1..9: note = Origin recognition complex subunit 3 (309-317)
EYASVLQLL

SEQ ID NO: 19707 - protein, 9 aa, synthetic construct
  REGION 1..9: note = Gamma-tubulin complex component 2 (312-320)
EYGQVNHAL

SEQ ID NO: 19708 - protein, 9 aa, synthetic construct
  REGION 1..9: note = Nuclear pore complex protein Nup214 (115-123)
EYGSIIAFF

SEQ ID NO: 19709 - protein, 9 aa, synthetic construct
  REGION 1..9: note = GDH/6PGL endoplasmic bifunctional protein (267-275)
EYGVIRDVL

SEQ ID NO: 19710 - protein, 9 aa, synthetic construct
  REGION 1..9: note = Probable ATP-dependent RNA helicase DDX52 (539-547)
EYIKGFQKL

SEQ ID NO: 19711 - protein, 9 aa, synthetic construct
  REGION 1..9: note = Myotubularin (566-574)
EYIKRLEEL

SEQ ID NO: 19712 - protein, 9 aa, synthetic construct
  REGION 1..9: note = Probable ATP-dependent RNA helicase DDX60-like (1185-1193)
EYINFLENL

SEQ ID NO: 19713 - protein, 11 aa, synthetic construct
  REGION 1..11: note = Aspartate aminotransferase, mitochondrial (95-105)
EYLPIGGLAEF

SEQ ID NO: 19714 - protein, 9 aa, synthetic construct
  REGION 1..9: note = Phosphatidylinositol-glycan biosynthesis class W protein (124-132)
EYNPAISCF

SEQ ID NO: 19715 - protein, 9 aa, synthetic construct
  REGION 1..9: note = Lysosomal protective protein (111-119)
EYNPYSWNL

SEQ ID NO: 19716 - protein, 9 aa, synthetic construct
  REGION 1..9: note Dolichyl-diphosphooligosaccharide-proteinosyltransferase 48 kDa subunit (332-340)
EYSIVIQQL

SEQ ID NO: 19717 - protein, 9 aa, synthetic construct
  REGION 1..9: note = MAU2 chromatid cohesion factor homolog (89-97)
EYTRALFLL

SEQ ID NO: 19718 - protein, 9 aa, synthetic construct
  REGION 1..9: note = FERM, RhoGEF and pleckstrin domain-containing protein 2 (134-142)
EYTRYLFAL

SEQ ID NO: 19719 - protein, 9 aa, synthetic construct
  REGION 1..9: note = Dual specificity protein kinase CLK3 (343-351)
EYYRGFTLF

SEQ ID NO: 19720 - protein, 8 aa, synthetic construct
  REGION 1..8: note = Nuclear receptor corepressor 2 (1025-1032)
FAAEAQKL

SEQ ID NO: 19721 - protein, 8 aa, synthetic construct
  REGION 1..8: note = UDP-N-acetylglucosamine-peptide N-acetylglucosaminyltransferase 110 kDa subunit (428-435)
FADAHSNL

SEQ ID NO: 19722 - protein, 9 aa, synthetic construct
  REGION 1..9: note = Catenin alpha-2 (110-118)
FADDPCSSV

SEQ ID NO: 19723 - protein, 9 aa, synthetic construct
  REGION 1..9: note = Zinc finger MYM-type protein 1 (482-490)
FADELSHLL

SEQ ID NO: 19724 - protein, 10 aa, synthetic construct
  REGION 1..10: note = E3 ubiquitin-protein ligase UBR4 (495-504)
FADKETLIQF

SEQ ID NO: 19725 - protein, 10 aa, synthetic construct
  REGION 1..10: note = Histone-lysine N-methyltransferase SETDB1 (995-1004)
FADSDSHSSF

SEQ ID NO: 19726 - protein, 10 aa, synthetic construct
  REGION 1..10: note = Staphylococcal nuclease domain-containing protein 1 (819-828)
FADSKGDVGL

SEQ ID NO: 19727 - protein, 9 aa, synthetic construct
  REGION 1..9: note = Frizzled-1 (386-394)
FAEDGARTV

SEQ ID NO: 19728 - protein, 13 aa, synthetic construct
  REGION 1..13: note = Amyloid beta A4 protein (18-30)
FAEDVGSNKGAII

SEQ ID NO: 19729 - protein, 14 aa, synthetic construct
  REGION 1..14: note = Amyloid beta A4 protein (20-33)
FAEDVGSNKGAIIG

SEQ ID NO: 19730 - protein, 9 aa, synthetic construct
  REGION 1..9: note = Centromere protein F (1090-1098)
FAEERNQNL

SEQ ID NO: 19731 - protein, 8 aa, synthetic construct
  REGION 1..8: note = Superkiller viralicidic activity 2-like 2 (1024-1031)
FAEGITKI

SEQ ID NO: 19732 - protein, 9 aa, synthetic construct
  REGION 1..9: note = ATP-binding cassette sub-family C member 11 (241-249)
FAFEKLIQF

SEQ ID NO: 19733 - protein, 9 aa, synthetic construct
  REGION 1..9: note = Arf-GAP with SH3 domain, ANK repeat and PH domain-containing protein 3 (673-681)
FAFPLHVDY

SEQ ID NO: 19734 - protein, 8 aa, synthetic construct
  REGION 1..8: note = Filamin-A (333-340)
FAGQHIAK

SEQ ID NO: 19735 - protein, 9 aa, synthetic construct
  REGION 1..9: note = Elongation factor 1-gamma (198-206)
FAHLPKSTF

SEQ ID NO: 19736 - protein, 9 aa, synthetic construct
  REGION 1..9: note = Nuclear pore complex protein Nup85 (365-373)
FAHPSLWQL

SEQ ID NO: 19737 - protein, 12 aa, synthetic construct
  REGION 1..12: note = Moesin (18-29)
FAIQPNTTGKQL

SEQ ID NO: 19738 - protein, 9 aa, synthetic construct
  REGION 1..9: note = Sodium-dependent phosphate transport protein 2C (387-395)
FALQSSSVF

SEQ ID NO: 19739 - protein, 15 aa, synthetic construct
  REGION 1..15: note = Cytochrome c oxidase subunit 7C, mitochondrial (49-63)
FATPFLVVRHQLLKT

SEQ ID NO: 19740 - protein, 12 aa, synthetic construct
  REGION 1..12: note = Beta-secretase 2 (116-127)
FAVAGTPHSYID

SEQ ID NO: 19741 - protein, 9 aa, synthetic construct
  REGION 1..9: note = Protein FAM179B (1301-1309)
FAVVQEVKN

SEQ ID NO: 19742 - protein, 8 aa, synthetic construct
  REGION 1..8: note = WD repeat-containing protein 35 (933-940)
FDAAKLMF

SEQ ID NO: 19743 - protein, 7 aa, synthetic construct
  REGION 1..7: note = Synemin (38-44)
FDKKVQL

SEQ ID NO: 19744 - protein, 8 aa, synthetic construct
  REGION 1..8: note = Protein SET (138-145)
FEDIKSGY

SEQ ID NO: 19745 - protein, 14 aa, synthetic construct
  REGION 1..14: note = ATP synthase-coupling factor 6, mitochondrial (95-108)
FEDPKFEVIEKPQA

SEQ ID NO: 19746 - protein, 14 aa, synthetic construct
  REGION 1..14: note = Cytochrome c oxidase subunit 6C (62-75)
FEEMRKAGIFQSVK

SEQ ID NO: 19747 - protein, 7 aa, synthetic construct
  REGION 1..7: note = Myotubularin-related protein 13 (1490-1496)
FEFNLYY

SEQ ID NO: 19748 - protein, 11 aa, synthetic construct
  REGION 1..11: note = FACT complex subunit SSRP1 (391-401)
FEIETKQGTQY

SEQ ID NO: 19749 - protein, 9 aa, synthetic construct
  REGION 1..9: note = Myosin-9 (456-464)
FEIFDLNSF

SEQ ID NO: 19750 - protein, 8 aa, synthetic construct
  REGION 1..8: note = F-box/LRR-repeat protein 5 (75-82)
FEKGLKNV

SEQ ID NO: 19751 - protein, 9 aa, synthetic construct
  REGION 1..9: note = Integrin beta-5 (536-544)
FESEFGKIY

SEQ ID NO: 19752 - protein, 7 aa, synthetic construct
  REGION 1..7: note = Small subunit processome component 20 homolog (1420-1426)
FESGLKY

SEQ ID NO: 19753 - protein, 9 aa, synthetic construct
  REGION 1..9: note = ATP synthase-coupling factor 6, mitochondrial (100-108)
FEVIEKPQA

SEQ ID NO: 19754 - protein, 10 aa, synthetic construct
  REGION 1..10: note = Nuclear pore membraneoprotein 210 (396-405)
FFEVLSSSQN

SEQ ID NO: 19755 - protein, 9 aa, synthetic construct
  REGION 1..9: note = Dynein heavy chain 10, axonemal (148-156)
FFFISDDEL

SEQ ID NO: 19756 - protein, 6 aa, synthetic construct
  REGION 1..6: note = FACT complex subunit SSRP1 (88-93)
FFKTHY

SEQ ID NO: 19757 - protein, 9 aa, synthetic construct
  REGION 1..9: note = Sterol regulatory element-binding protein 2 (769-777)
FFMERSWSV

SEQ ID NO: 19758 - protein, 9 aa, synthetic construct
  REGION 1..9: note = L-dopachrome tautomerase (339-347)
FFQNSTFSF

SEQ ID NO: 19759 - protein, 7 aa, synthetic construct
  REGION 1..7: note = Protein MCM10 homolog (335-341)
FGEVHKA

SEQ ID NO: 19760 - protein, 9 aa, synthetic construct
  REGION 1..9: note = Dynein light chain 4, axonemal (77-85)
FGFEITHEV

SEQ ID NO: 19761 - protein, 9 aa, synthetic construct
  REGION 1..9: note = Myelin basic protein (46-54)
FGGDRGAPK

SEQ ID NO: 19762 - protein, 29 aa, synthetic construct
  REGION 1..29: note = Keratin, type I cytoskeletal 9 (90-118)
FGGGSRGFGGASGGGYSSSGGFGGGFGGG

SEQ ID NO: 19763 - protein, 8 aa, synthetic construct
  REGION 1..8: note = Oxysterol-binding protein-related protein 1 (367-374)
FGKELHKV

SEQ ID NO: 19764 - protein, 9 aa, synthetic construct
  REGION 1..9: note = Cyclin-dependent kinase 3 (146-154)
FGLARAFGV

SEQ ID NO: 19765 - protein, 16 aa, synthetic construct
  REGION 1..16: note = Pyruvate kinase PKM (157-172)
FGVEQDVDMVFASFIR

SEQ ID NO: 19766 - protein, 11 aa, synthetic construct
  REGION 1..11: note = AP-2 complex subunit beta (776-786)
FGVIPSTPLAI

SEQ ID NO: 19767 - protein, 10 aa, synthetic construct
  REGION 1..10: note = Myelin basic protein (152-161)
FGYGGRASDY

SEQ ID NO: 19768 - protein, 16 aa, synthetic construct
  REGION 1..16: note = Cytochrome c oxidase subunit 6A1, mitochondrial (71-86)
FHNPHVNPLPTGYEDE

SEQ ID NO: 19769 - protein, 6 aa, synthetic construct
  REGION 1..6: note = Large proline-rich protein BAG6 (789-794)
FHQHYL

SEQ ID NO: 19770 - protein, 9 aa, synthetic construct
  REGION 1..9: note = Transformation/transcription domain-associated protein (280-288)
FIAAQIKTL

SEQ ID NO: 19771 - protein, 10 aa, synthetic construct
  REGION 1..10: note = Vitamin K-dependent gamma-carboxylase (474-483)
FIADFPGLHL

SEQ ID NO: 19772 - protein, 9 aa, synthetic construct
  REGION 1..9: note = Ubiquitin carboxyl-terminal hydrolase 7 (183-191)
FIDDDKVTF

SEQ ID NO: 19773 - protein, 9 aa, synthetic construct
  REGION 1..9: note = Histone-lysine N-methyltransferase SETDB1 (43-51)
FIDEELEKM

SEQ ID NO: 19774 - protein, 9 aa, synthetic construct
  REGION 1..9: note Dolichyl-diphosphooligosaccharide-proteinosyltransferase 48 kDa subunit (119-127)
FIDGGGSVL

SEQ ID NO: 19775 - protein, 10 aa, synthetic construct
  REGION 1..10: note Dolichyl-diphosphooligosaccharide-proteinosyltransferase 48 kDa subunit (119-128)
FIDGGGSVLV

SEQ ID NO: 19776 - protein, 9 aa, synthetic construct
  REGION 1..9: note = Nck-associated protein 1 (400-408)
FIDKHIAEL

SEQ ID NO: 19777 - protein, 9 aa, synthetic construct
  REGION 1..9: note = ATP-dependent RNA helicase DDX19B (230-238)
FIDPKKIKV

SEQ ID NO: 19778 - protein, 9 aa, synthetic construct
  REGION 1..9: note = BTB/POZ domain-containing protein KCTD15 (102-110)
FIDRDGEIF

SEQ ID NO: 19779 - protein, 26 aa, synthetic construct
  REGION 1..26: note = Tubulin beta chain (387-412)
FIGNSTAIQELFKRISEQFTAMFRRK

SEQ ID NO: 19780 - protein, 9 aa, synthetic construct
  REGION 1..9: note = Receptor-type protein tyrosine phosphatase beta (1317-1325)
FIHDTLVEA

SEQ ID NO: 19781 - protein, 9 aa, synthetic construct
  REGION 1..9: note = Kelch-like protein 7 (120-128)
FIHQHFTEV

SEQ ID NO: 19782 - protein, 9 aa, synthetic construct
  REGION 1..9: note = Kelch-like protein 18 (97-105)
FIHQHFVEV

SEQ ID NO: 19783 - protein, 9 aa, synthetic construct
  REGION 1..9: note = Myotubularin-related protein 13 (272-280)
FIIGVHSVF

SEQ ID NO: 19784 - protein, 9 aa, synthetic construct
  REGION 1..9: note = LisH domain-containing protein ARMC9 (551-559)
FIKEGNAEM

SEQ ID NO: 19785 - protein, 9 aa, synthetic construct
  REGION 1..9: note = Importin-5 (200-208)
FILANEHNV

SEQ ID NO: 19786 - protein, 9 aa, synthetic construct
  REGION 1..9: note = WD repeat and FYVE domain-containing protein 3 (419-427)
FILESQHTL

SEQ ID NO: 19787 - protein, 9 aa, synthetic construct
  REGION 1..9: note = Cyclin-related protein FAM58A (33-41)
FIMEAGVKL

SEQ ID NO: 19788 - protein, 9 aa, synthetic construct
  REGION 1..9: note = Protein EFR3 homolog A (468-476)
FIMGKVPVF

SEQ ID NO: 19789 - protein, 9 aa, synthetic construct
  REGION 1..9: note = Translocated to HRX in t(11,19) leukemia (81-89)
FIMPIEVHF

SEQ ID NO: 19790 - protein, 6 aa, synthetic construct
  REGION 1..6: note = Endoplasmic reticulum metallopeptidase 1 (110-115)
FINFIY

SEQ ID NO: 19791 - protein, 10 aa, synthetic construct
  REGION 1..10: note = Sacsin (114-123)
FINGNFPGTF

SEQ ID NO: 19792 - protein, 9 aa, synthetic construct
  REGION 1..9: note = Tripartite motif-containing protein 2 (185-193)
FISEIIHQL

SEQ ID NO: 19793 - protein, 9 aa, synthetic construct
  REGION 1..9: note = Protein TANC1 (603-611)
FITKIISKF

SEQ ID NO: 19794 - protein, 7 aa, synthetic construct
  REGION 1..7: note = Gelsolin (365-371)
FITKMDY

SEQ ID NO: 19795 - protein, 9 aa, synthetic construct
  REGION 1..9: note = Calcium/calmodulin-dependent 3',5'-cyclic nucleotide phosphodiesterase 1C (433-441)
FIVEPTFTV

SEQ ID NO: 19796 - protein, 10 aa, synthetic construct
  REGION 1..10: note = Dopamine D4 receptor (72-81)
FIVSLAAADL

SEQ ID NO: 19797 - protein, 9 aa, synthetic construct
  REGION 1..9: note = Regulatory-associated protein of mTOR (277-285)
FIWAKILAV

SEQ ID NO: 19798 - protein, 9 aa, synthetic construct
  REGION 1..9: note = Unconventional myosin-X (583-591)
FIYDLFEHV

SEQ ID NO: 19799 - protein, 10 aa, synthetic construct
  REGION 1..10: note = Cullin-4B (578-587)
FIYGKDVFEA

SEQ ID NO: 19800 - protein, 13 aa, synthetic construct
  REGION 1..13: note = Cytochrome c oxidase subunit 7A2, mitochondrial (24-36)
FKNKVPEKQKLFQ

SEQ ID NO: 19801 - protein, 28 aa, synthetic construct
  REGION 1..28: note = Cytochrome c oxidase subunit 7A2, mitochondrial (24-51)
FKNKVPEKQKLFQEDDEIPLYLKGGVAD

SEQ ID NO: 19802 - protein, 60 aa, synthetic construct
  REGION 1..60: note = Cytochrome c oxidase subunit 7A2, mitochondrial (24-83)
FKNKVPEKQKLFQEDDEIPLYLKGGVADALLYRATMILTVGGTAYAIYELAVASFPKKQE

SEQ ID NO: 19803 - protein, 7 aa, synthetic construct
  REGION 1..7: note = Histone deacetylase 1 (241-247)
FKPVMSK

SEQ ID NO: 19804 - protein, 7 aa, synthetic construct
  REGION 1..7: note = Protein kinase C-binding protein 1 (213-219)
FLADAKW

SEQ ID NO: 19805 - protein, 10 aa, synthetic construct
  REGION 1..10: note = Methionine-tRNA ligase, cytoplasmic (395-404)
FLADRFVEGV

SEQ ID NO: 19806 - protein, 10 aa, synthetic construct
  REGION 1..10: note = Ras GTPase-activating-like protein IQGAP3 (868-877)
FLAEAELLKL

SEQ ID NO: 19807 - protein, 10 aa, synthetic construct
  REGION 1..10: note = Protein sel-1 homolog 1 (366-375)
FLAEKGDVQA

SEQ ID NO: 19808 - protein, 9 aa, synthetic construct
  REGION 1..9: note = H(+)/Cl(-) exchange transporter 3 (206-214)
FLAVSLVKV

SEQ ID NO: 19809 - protein, 9 aa, synthetic construct
  REGION 1..9: note = Sodium/potassium-transporting ATPase subunit alpha-1 (28-36)
FLAYSIQAA

SEQ ID NO: 19810 - protein, 8 aa, synthetic construct
  REGION 1..8: note = B-cell receptor-associated protein 29 (63-70)
FLDAVREV

SEQ ID NO: 19811 - protein, 9 aa, synthetic construct
  REGION 1..9: note = Cytoplasmic dynein 2 heavy chain 1 (42-50)
FLDDGNQML

SEQ ID NO: 19812 - protein, 9 aa, synthetic construct
  REGION 1..9: note = Guanine nucleotide-binding protein G(I)/G(S)/G(T) subunit beta-2 (151-159)
FLDDNQIIT

SEQ ID NO: 19813 - protein, 9 aa, synthetic construct
  REGION 1..9: note = Polycystin-1 (3400-3408)
FLDDSKSLV

SEQ ID NO: 19814 - protein, 9 aa, synthetic construct
  REGION 1..9: note = Guanine nucleotide-binding protein subunit beta-4 (151-159)
FLDDSQIVT

SEQ ID NO: 19815 - protein, 9 aa, synthetic construct
  REGION 1..9: note = F-box only protein 32 (25-33)
FLDEKSGSF

SEQ ID NO: 19816 - protein, 10 aa, synthetic construct
  REGION 1..10: note = F-box only protein 32 (25-34)
FLDEKSGSFV

SEQ ID NO: 19817 - protein, 8 aa, synthetic construct
  REGION 1..8: note = Dipeptidyl peptidase 8 (72-79)
FLDENVHF

SEQ ID NO: 19818 - protein, 9 aa, synthetic construct
  REGION 1..9: note = Ubiquitin-like-conjugating enzyme ATG10 (117-125)
FLDGRPLTL

SEQ ID NO: 19819 - protein, 9 aa, synthetic construct
  REGION 1..9: note = Mediator of RNA polymerase II transcription subunit 18 (51-59)
FLDHEMVFL

SEQ ID NO: 19820 - protein, 8 aa, synthetic construct
  REGION 1..8: note = Protein SMG8 (484-491)
FLDIDTKF

SEQ ID NO: 19821 - protein, 9 aa, synthetic construct
  REGION 1..9: note = Unconventional myosin-Ic (523-531)
FLDKNNDLL

SEQ ID NO: 19822 - protein, 9 aa, synthetic construct
  REGION 1..9: note = Sterol regulatory element-binding protein cleavage-activating protein (641-649)
FLDKRIVAA

SEQ ID NO: 19823 - protein, 9 aa, synthetic construct
  REGION 1..9: note = Major facilitator superfamily domain-containing protein 12 (410-418)
FLDKVANGL

SEQ ID NO: 19824 - protein, 8 aa, synthetic construct
  REGION 1..8: note = Putative bifunctional UDP-N-acetylglucosamine transferase and deubiquitinase ALG13 (156-163)
FLDKVVGL

SEQ ID NO: 19825 - protein, 8 aa, synthetic construct
  REGION 1..8: note = Formin-1 (471-478)
FLDLPHKV

SEQ ID NO: 19826 - protein, 9 aa, synthetic construct
  REGION 1..9: note = Group XV phospholipase A2 (126-134)
FLDPSKSSV

SEQ ID NO: 19827 - protein, 8 aa, synthetic construct
  REGION 1..8: note = Glycogen phosphorylase, muscle form (144-151)
FLDSMATL

SEQ ID NO: 19828 - protein, 9 aa, synthetic construct
  REGION 1..9: note = Basic leucine zipper and W2 domain-containing protein 2 (51-59)
FLDSTGSRL

SEQ ID NO: 19829 - protein, 9 aa, synthetic construct
  REGION 1..9: note = Tuftelin-interacting protein 11 (507-515)
FLDSWVHII

SEQ ID NO: 19830 - protein, 10 aa, synthetic construct
  REGION 1..10: note = Sulfate transporter (658-667)
FLDTAGIHTL

SEQ ID NO: 19831 - protein, 9 aa, synthetic construct
  REGION 1..9: note = Protein naked cuticle homolog 1 (320-328)
FLDTPIAKV

SEQ ID NO: 19832 - protein, 9 aa, synthetic construct
  REGION 1..9: note = Protein S100-A1 (45-53)
FLDVKELML

SEQ ID NO: 19833 - protein, 9 aa, synthetic construct
  REGION 1..9: note = Electron transfer flavoprotein subunit beta (232-240)
FLDWPQGTF

SEQ ID NO: 19834 - protein, 9 aa, synthetic construct
  REGION 1..9: note = A-kinase anchor protein 9 (882-890)
FLEERSVLL

SEQ ID NO: 19835 - protein, 9 aa, synthetic construct
  REGION 1..9: note = Paraneoplastic antigen Ma2 (107-115)
FLEKEGQTV

SEQ ID NO: 19836 - protein, 9 aa, synthetic construct
  REGION 1..9: note = Nitric oxide synthase-interacting protein (114-122)
FLEKESAIV

SEQ ID NO: 19837 - protein, 10 aa, synthetic construct
  REGION 1..10: note = Cytochrome c oxidase subunit 2 (127-136)
FLEPGDLRLL

SEQ ID NO: 19838 - protein, 7 aa, synthetic construct
  REGION 1..7: note = Calnexin (139-145)
FLFDTKP

SEQ ID NO: 19839 - protein, 9 aa, synthetic construct
  REGION 1..9: note = Transmembrane protein 97 (118-126)
FLFEDFSKA

SEQ ID NO: 19840 - protein, 9 aa, synthetic construct
  REGION 1..9: note = Melanoma-associated antigen 11 (321-329)
FLFGEPKRL

SEQ ID NO: 19841 - protein, 9 aa, synthetic construct
  REGION 1..9: note = Transmembrane protein 106B (155-163)
FLFPRSIDV

SEQ ID NO: 19842 - protein, 9 aa, synthetic construct
  REGION 1..9: note = Hephaestin (680-688)
FLFSNLPRL

SEQ ID NO: 19843 - protein, 9 aa, synthetic construct
  REGION 1..9: note = Unconventional myosin-Ib (362-370)
FLFSSDHLI

SEQ ID NO: 19844 - protein, 8 aa, synthetic construct
  REGION 1..8: note = POU domain, class 2, transcription factor 1 (70-77)
FLGHLHQV

SEQ ID NO: 19845 - protein, 9 aa, synthetic construct
  REGION 1..9: note = Glutathione S-transferase Mu 4 (141-149)
FLGKRPWFV

SEQ ID NO: 19846 - protein, 9 aa, synthetic construct
  REGION 1..9: note = Maltase-glucoamylase, intestinal (1217-1225)
FLGPTPELV

SEQ ID NO: 19847 - protein, 9 aa, synthetic construct
  REGION 1..9: note = Asparagine synthetase (glutamine-hydrolyzing) (51-59)
FLGRDTYGV

SEQ ID NO: 19848 - protein, 9 aa, synthetic construct
  REGION 1..9: note = Ras GTPase-activating protein 1 (583-591)
FLHEKLESL

SEQ ID NO: 19849 - protein, 9 aa, synthetic construct
  REGION 1..9: note = Kelch domain-containing protein 8B (171-179)
FLHGNKIYV

SEQ ID NO: 19850 - protein, 10 aa, synthetic construct
  REGION 1..10: note = VWFA and cache domain-containing protein 1 (212-221)
FLIDDKGYTL

SEQ ID NO: 19851 - protein, 10 aa, synthetic construct
  REGION 1..10: note = Adenylate kinase isoenzyme 5 (224-233)
FLIDGYPREV

SEQ ID NO: 19852 - protein, 9 aa, synthetic construct
  REGION 1..9: note = BTB/POZ domain-containing protein KCTD9 (136-144)
FLIDRSPEY

SEQ ID NO: 19853 - protein, 10 aa, synthetic construct
  REGION 1..10: note = Tensin-2 (1202-1211)
FLIETGPKGV

SEQ ID NO: 19854 - protein, 9 aa, synthetic construct
  REGION 1..9: note = Protein phosphatase 1 regulatory subunit 12A (37-45)
FLIGQGAHV

SEQ ID NO: 19855 - protein, 9 aa, synthetic construct
  REGION 1..9: note = Proline-rich protein 12 (641-649)
FLIQHLLQA

SEQ ID NO: 19856 - protein, 11 aa, synthetic construct
  REGION 1..11: note = Protein FAM73A (567-577)
FLKDIFDFEKV

SEQ ID NO: 19857 - protein, 9 aa, synthetic construct
  REGION 1..9: note = Catenin alpha-1 (85-93)
FLKEELVAA

SEQ ID NO: 19858 - protein, 9 aa, synthetic construct
  REGION 1..9: note = Threonylcarbamoyladenosine tRNA methylthiotransferase (278-286)
FLKEKVPGI

SEQ ID NO: 19859 - protein, 9 aa, synthetic construct
  REGION 1..9: note = Ankyrin-3 (171-179)
FLLDHGASL

SEQ ID NO: 19860 - protein, 10 aa, synthetic construct
  REGION 1..10: note = DNA-binding protein RFX7 (684-693)
FLLDSDSKSV

SEQ ID NO: 19861 - protein, 10 aa, synthetic construct
  REGION 1..10: note = Protein TANC2 (96-105)
FLLGEKVTEV

SEQ ID NO: 19862 - protein, 9 aa, synthetic construct
  REGION 1..9: note = Transmembrane emp24 domain-containing protein 10 (22-30)
FLLGPRLVL

SEQ ID NO: 19863 - protein, 9 aa, synthetic construct
  REGION 1..9: note = TBC1 domain family member 8B (190-198)
FLLGSEIKL

SEQ ID NO: 19864 - protein, 9 aa, synthetic construct
  REGION 1..9: note = Intraflagellar transport protein 56 (385-393)
FLLIQSEKM

SEQ ID NO: 19865 - protein, 10 aa, synthetic construct
  REGION 1..10: note = Peptidyl-prolyl cis-trans isomerase B (15-24)
FLLLPGPSAA

SEQ ID NO: 19866 - protein, 9 aa, synthetic construct
  REGION 1..9: note = G-protein coupled receptor 56 (460-468)
FLLSEPVAL

SEQ ID NO: 19867 - protein, 9 aa, synthetic construct
  REGION 1..9: note = Huntingtin (694-702)
FLLTGGKNV

SEQ ID NO: 19868 - protein, 12 aa, synthetic construct
  REGION 1..12: note = Protocadherin Fat 3 (2442-2453)
FLMDSKSGVITL

SEQ ID NO: 19869 - protein, 9 aa, synthetic construct
  REGION 1..9: note = Cortactin-binding protein 2 (1244-1252)
FLMGTIAKA

SEQ ID NO: 19870 - protein, 11 aa, synthetic construct
  REGION 1..11: note = 5,6-dihydroxyindole-2-carboxylic acid oxidase (383-393)
FLNGTGGQTHL

SEQ ID NO: 19871 - protein, 9 aa, synthetic construct
  REGION 1..9: note = Multidrug and toxin extrusion protein 1 (134-142)
FLNTQHILL

SEQ ID NO: 19872 - protein, 9 aa, synthetic construct
  REGION 1..9: note = Peroxisome biogenesis factor 1 (613-621)
FLPASLRSV

SEQ ID NO: 19873 - protein, 9 aa, synthetic construct
  REGION 1..9: note = Paired amphipathic helix protein Sin3a (379-387)
FLPDANSSV

SEQ ID NO: 19874 - protein, 12 aa, synthetic construct
  REGION 1..12: note = Eukaryotic translation initiation factor 4 gamma 1 (1367-1378)
FLPEGQDIGAFV

SEQ ID NO: 19875 - protein, 9 aa, synthetic construct
  REGION 1..9: note = NADH dehydrogenase (ubiquinone) 1 alpha subcomplex subunit 9, mitochondrial (286-294)
FLPFPLPLF

SEQ ID NO: 19876 - protein, 9 aa, synthetic construct
  REGION 1..9: note = Mitochondrial dynamics protein MID51 (470-478)
FLPRQALLF

SEQ ID NO: 19877 - protein, 10 aa, synthetic construct
  REGION 1..10: note = Ubiquitin carboxyl-terminal hydrolase 19 (742-751)
FLPSHSLDTV

SEQ ID NO: 19878 - protein, 9 aa, synthetic construct
  REGION 1..9: note = Peroxisomal acyl-coenzyme A oxidase 1 (107-115)
FLPTLLHQA

SEQ ID NO: 19879 - protein, 10 aa, synthetic construct
  REGION 1..10: note = ATP-binding cassette sub-family C member 11 (455-464)
FLQESPVFYV

SEQ ID NO: 19880 - protein, 9 aa, synthetic construct
  REGION 1..9: note = Hemicentin-1 (2534-2542)
FLQITNVQV

SEQ ID NO: 19881 - protein, 9 aa, synthetic construct
  REGION 1..9: note = Protocadherin gamma-A12 (749-757)
FLQTYSHEV

SEQ ID NO: 19882 - protein, 9 aa, synthetic construct
  REGION 1..9: note = Melanocyte protein PMEL (239-247)
FLRNQPLTF

SEQ ID NO: 19883 - protein, 11 aa, synthetic construct
  REGION 1..11: note = Hemoglobin subunit alpha (5-15)
FLSFPTTKTYF

SEQ ID NO: 19884 - protein, 9 aa, synthetic construct
  REGION 1..9: note = Insulin receptor substrate 2 (1325-1333)
FLSHHLKEA

SEQ ID NO: 19885 - protein, 9 aa, synthetic construct
  REGION 1..9: note = Tensin-3 (1065-1073)
FLSHNFLTV

SEQ ID NO: 19886 - protein, 9 aa, synthetic construct
  REGION 1..9: note = Protein capicua homolog (1061-1069)
FLSIMSPEI

SEQ ID NO: 19887 - protein, 11 aa, synthetic construct
  REGION 1..11: note = Vitamin K-dependent protein S (26-36)
FLSKQQASQVL

SEQ ID NO: 19888 - protein, 12 aa, synthetic construct
  REGION 1..12: note = Vitamin K-dependent protein S (26-37)
FLSKQQASQVLV

SEQ ID NO: 19889 - protein, 8 aa, synthetic construct
  REGION 1..8: note = mRNA-decapping enzyme 1A (523-530)
FLSTLHEV

SEQ ID NO: 19890 - protein, 9 aa, synthetic construct
  REGION 1..9: note = Lysosomal-trafficking regulator (12-20)
FLTDVNRLC

SEQ ID NO: 19891 - protein, 10 aa, synthetic construct
  REGION 1..10: note = L-dopachrome tautomerase (52-61)
FLTSDQLGYS

SEQ ID NO: 19892 - protein, 11 aa, synthetic construct
  REGION 1..11: note = L-dopachrome tautomerase (52-62)
FLTSDQLGYSY

SEQ ID NO: 19893 - protein, 9 aa, synthetic construct
  REGION 1..9: note = Bifunctional glutamate/proline-tRNA ligase (1167-1175)
FLWQEGHSA

SEQ ID NO: 19894 - protein, 9 aa, synthetic construct
  REGION 1..9: note = Fatty acyl-CoA reductase 1 (362-370)
FLYDIYLRM

SEQ ID NO: 19895 - protein, 9 aa, synthetic construct
  REGION 1..9: note = Tetratricopeptide repeat protein 17 (740-748)
FLYNITSSV

SEQ ID NO: 19896 - protein, 9 aa, synthetic construct
  REGION 1..9: note = Chromodomain-helicase-DNA-binding protein 1-like (358-366)
FLYSGGHRV

SEQ ID NO: 19897 - protein, 9 aa, synthetic construct
  REGION 1..9: note = Ropporin-1A (163-171)
FLYTYIAKV

SEQ ID NO: 19898 - protein, 9 aa, synthetic construct
  REGION 1..9: note = Histone deacetylase 11 (141-149)
FMDDKRVYI

SEQ ID NO: 19899 - protein, 9 aa, synthetic construct
  REGION 1..9: note = Pre-mRNA-processing-splicing factor 8 (1561-1569)
FMHGKIPTL

SEQ ID NO: 19900 - protein, 9 aa, synthetic construct
  REGION 1..9: note = Maltase-glucoamylase (551-559)
FMNNRSFIL

SEQ ID NO: 19901 - protein, 9 aa, synthetic construct
  REGION 1..9: note = Adenosine 3'-phospho 5'-phosphosulfate transporter 1 (49-57)
FMVPGYLLV

SEQ ID NO: 19902 - protein, 9 aa, synthetic construct
  REGION 1..9: note = DNA-directed RNA polymerase II subunit RPB1 (1247-1255)
FNDDNAEKL

SEQ ID NO: 19903 - protein, 9 aa, synthetic construct
  REGION 1..9: note = Tumor susceptibility gene 101 protein (44-52)
FNDGSSREL

SEQ ID NO: 19904 - protein, 9 aa, synthetic construct
  REGION 1..9: note = Amyloid-like protein 2 (10-18)
FNGNGKINV

SEQ ID NO: 19905 - protein, 7 aa, synthetic construct
  REGION 1..7: note = Cytoplasmic FMR1-interacting protein 1 (472-478)
FNHAIRH

SEQ ID NO: 19906 - protein, 10 aa, synthetic construct
  REGION 1..10: note = WD repeat-containing protein 19 (187-196)
FPDPNGTRLV

SEQ ID NO: 19907 - protein, 8 aa, synthetic construct
  REGION 1..8: note = WD repeat-containing protein 6 (464-471)
FPGKVHSL

SEQ ID NO: 19908 - protein, 10 aa, synthetic construct
  REGION 1..10: note = Collagen alpha-1(VIII) chain (279-288)
FPGPQGPLGK

SEQ ID NO: 19909 - protein, 8 aa, synthetic construct
  REGION 1..8: note = Proline and serine-rich protein 1 (159-166)
FPGTPLKK

SEQ ID NO: 19910 - protein, 8 aa, synthetic construct
  REGION 1..8: note = Patatin-like phospholipase domain-containing protein 2 (454-461)
FPPEALRM

SEQ ID NO: 19911 - protein, 9 aa, synthetic construct
  REGION 1..9: note = Non-POU domain-containing octamer-binding protein (129-137)
FPRPVTVEP

SEQ ID NO: 19912 - protein, 9 aa, synthetic construct
  REGION 1..9: note = Alpha-mannosidase 2x (42-50)
FPRSQISVL

SEQ ID NO: 19913 - protein, 10 aa, synthetic construct
  REGION 1..10: note = Transformation/transcription domain-associated protein (2223-2232)
FPTEPSTSSV

SEQ ID NO: 19914 - protein, 9 aa, synthetic construct
  REGION 1..9: note = Protein 4.1 (223-231)
FPWPKVLKI

SEQ ID NO: 19915 - protein, 8 aa, synthetic construct
  REGION 1..8: note = DNA polymerase alpha catalytic subunit (594-601)
FPYAFKEV

SEQ ID NO: 19916 - protein, 9 aa, synthetic construct
  REGION 1..9: note = DnaJ homolog subfamily C member 11 (314-322)
FQDDDQTRV

SEQ ID NO: 19917 - protein, 8 aa, synthetic construct
  REGION 1..8: note = Structural maintenance of chromosomes flexible hinge domain-containing protein 1 (1128-1135)
FQDDHVSL

SEQ ID NO: 19918 - protein, 9 aa, synthetic construct
  REGION 1..9: note = Serine/threonine-protein kinase MRCK alpha (144-152)
FQDDNNLYL

SEQ ID NO: 19919 - protein, 9 aa, synthetic construct
  REGION 1..9: note = Zinc finger HIT domain-containing protein 1 (40-48)
FQDDPHAGL

SEQ ID NO: 19920 - protein, 9 aa, synthetic construct
  REGION 1..9: note = General transcription factor 3C polypeptide 1 (734-742)
FQDKDQVFI

SEQ ID NO: 19921 - protein, 9 aa, synthetic construct
  REGION 1..9: note = Citron Rho-interacting kinase (164-172)
FQDKNHLYL

SEQ ID NO: 19922 - protein, 9 aa, synthetic construct
  REGION 1..9: note = Protein PRR14L (1088-1096)
FQEDSRSTL

SEQ ID NO: 19923 - protein, 8 aa, synthetic construct
  REGION 1..8: note = Plectin (2903-2910)
FQGKTVTI

SEQ ID NO: 19924 - protein, 7 aa, synthetic construct
  REGION 1..7: note = Proteasome activator complex subunit 4 (789-795)
FQGSHKH

SEQ ID NO: 19925 - protein, 9 aa, synthetic construct
  REGION 1..9: note = Heat shock 70 kDa protein 1B (21-29)
FQHGKVEII

SEQ ID NO: 19926 - protein, 9 aa, synthetic construct
  REGION 1..9: note = Spatacsin (332-340)
FQIDRSWKA

SEQ ID NO: 19927 - protein, 8 aa, synthetic construct
  REGION 1..8: note = Sodium/potassium-transporting ATPase subunit alpha-3 (948-955)
FQQGMKNK

SEQ ID NO: 19928 - protein, 11 aa, synthetic construct
  REGION 1..11: note = Gamma-secretase C-terminal fragment 59 (565-575)
FRHDSGYEVHH

SEQ ID NO: 19929 - protein, 12 aa, synthetic construct
  REGION 1..12: note = Gamma-secretase C-terminal fragment 59 (565-576)
FRHDSGYEVHHQ

SEQ ID NO: 19930 - protein, 8 aa, synthetic construct
  REGION 1..8: note = 60S ribosomal protein L4 (257-264)
FRKLDELY

SEQ ID NO: 19931 - protein, 9 aa, synthetic construct
  REGION 1..9: note = Annexin A5 (288-296)
FRKNFATSL

SEQ ID NO: 19932 - protein, 9 aa, synthetic construct
  REGION 1..9: note = Glycogen phosphorylase, brain form (546-554)
FSAFLEKEY

SEQ ID NO: 19933 - protein, 7 aa, synthetic construct
  REGION 1..7: note = Erlin-2 (43-49)
FSAVHKI

SEQ ID NO: 19934 - protein, 9 aa, synthetic construct
  REGION 1..9: note = Myb-binding protein 1A (239-247)
FSDENVPRL

SEQ ID NO: 19935 - protein, 8 aa, synthetic construct
  REGION 1..8: note = Leucine zipper putative tumor suppressor 1 (232-239)
FSDGGSKL

SEQ ID NO: 19936 - protein, 9 aa, synthetic construct
  REGION 1..9: note = Basic leucine zipper and W2 domain-containing protein 2 (143-151)
FSETEQTKL

SEQ ID NO: 19937 - protein, 10 aa, synthetic construct
  REGION 1..10: note = Cytoplasmic dynein 2 heavy chain 1 (202-211)
FSETGGGEKY

SEQ ID NO: 19938 - protein, 9 aa, synthetic construct
  REGION 1..9: note = Dual specificity protein phosphatase 4 (366-374)
FSFPVSVGV

SEQ ID NO: 19939 - protein, 10 aa, synthetic construct
  REGION 1..10: note = Protein FAM135A (667-676)
FSGENITVKL

SEQ ID NO: 19940 - protein, 9 aa, synthetic construct
  REGION 1..9: note = Uncharacterized protein C20orf194 (1005-1013)
FSGNIYHIL

SEQ ID NO: 19941 - protein, 8 aa, synthetic construct
  REGION 1..8: note = RNA-binding protein FUS (355-362)
FSGNPIKV

SEQ ID NO: 19942 - protein, 8 aa, synthetic construct
  REGION 1..8: note = 5,6-dihydroxyindole-2-carboxylic acid oxidase (213-220)
FSHEGPAF

SEQ ID NO: 19943 - protein, 8 aa, synthetic construct
  REGION 1..8: note = L-dopachrome tautomerase (209-216)
FSHQGPAF

SEQ ID NO: 19944 - protein, 11 aa, synthetic construct
  REGION 1..11: note = Homeobox protein Hox-B7 (11-21)
FSKYPASSSVF

SEQ ID NO: 19945 - protein, 11 aa, synthetic construct
  REGION 1..11: note = Sodium/potassium/calcium exchanger 1 (352-362)
FSLINGLQPVP

SEQ ID NO: 19946 - protein, 9 aa, synthetic construct
  REGION 1..9: note = Small subunit processome component 20 homolog (925-933)
FSNPRALYL

SEQ ID NO: 19947 - protein, 14 aa, synthetic construct
  REGION 1..14: note = Paired box protein Pax-1 (59-72)
FSPSGSLLSGASAE

SEQ ID NO: 19948 - protein, 7 aa, synthetic construct
  REGION 1..7: note = ADP-ribosylation factor 4 (9-15)
FSRLFGK

SEQ ID NO: 19949 - protein, 10 aa, synthetic construct
  REGION 1..10: note = Synemin (764-773)
FSVPFKVEEV

SEQ ID NO: 19950 - protein, 10 aa, synthetic construct
  REGION 1..10: note = Elongation factor 1-gamma (335-344)
FSWEGAFQHV

SEQ ID NO: 19951 - protein, 9 aa, synthetic construct
  REGION 1..9: note = Eukaryotic translation initiation factor 3 subunit H (135-143)
FSYQHAIEE

SEQ ID NO: 19952 - protein, 8 aa, synthetic construct
  REGION 1..8: note = Bcl-2-associated transcription factor 1 (338-345)
FTDEESRV

SEQ ID NO: 19953 - protein, 9 aa, synthetic construct
  REGION 1..9: note = Nuclear pore complex protein Nup160 (151-159)
FTDIGKVDF

SEQ ID NO: 19954 - protein, 8 aa, synthetic construct
  REGION 1..8: note = Homeobox protein TGIF1 (222-229)
FTDTSLMY

SEQ ID NO: 19955 - protein, 9 aa, synthetic construct
  REGION 1..9: note = Transmembrane 9 superfamily member 4 (168-176)
FTDVNKIYL

SEQ ID NO: 19956 - protein, 9 aa, synthetic construct
  REGION 1..9: note = Fibronectin isoform 7 (286-294)
FTDVRAAVY

SEQ ID NO: 19957 - protein, 9 aa, synthetic construct
  REGION 1..9: note = Integrator complex subunit 1 (745-753)
FTEQPETYY

SEQ ID NO: 19958 - protein, 9 aa, synthetic construct
  REGION 1..9: note = CUB and sushi domain-containing protein 1 (3053-3061)
FTFNKTVSY

SEQ ID NO: 19959 - protein, 7 aa, synthetic construct
  REGION 1..7: note = Up-regulated during skeletal muscle growth protein 5 (12-18)
FTGIKKY

SEQ ID NO: 19960 - protein, 7 aa, synthetic construct
  REGION 1..7: note = Bestrophin-1 (575-581)
FTGILGK

SEQ ID NO: 19961 - protein, 9 aa, synthetic construct
  REGION 1..9: note = Ribosomal protein S6 kinase alpha-3 (519-527)
FTITKTVEY

SEQ ID NO: 19962 - protein, 9 aa, synthetic construct
  REGION 1..9: note = Nuclear factor erythroid 2-related factor 1 (300-308)
FTNDKIINL

SEQ ID NO: 19963 - protein, 9 aa, synthetic construct
  REGION 1..9: note = Serine-threonine kinase receptor-associated protein (108-116)
FTQDSNYLL

SEQ ID NO: 19964 - protein, 13 aa, synthetic construct
  REGION 1..13: note = FXYD domain-containing ion transport regulator 3 isoform 3 (28-40)
FTQSPLHGAAAAY

SEQ ID NO: 19965 - protein, 10 aa, synthetic construct
  REGION 1..10: note = FRAS1-related extracellular matrix protein 1 (471-480)
FTVADLQAGV

SEQ ID NO: 19966 - protein, 9 aa, synthetic construct
  REGION 1..9: note = CUB and sushi domain-containing protein 1 (2875-2883)
FTYGAVVHY

SEQ ID NO: 19967 - protein, 9 aa, synthetic construct
  REGION 1..9: note = Fibronectin (364-372)
FTYNGRTFY

SEQ ID NO: 19968 - protein, 9 aa, synthetic construct
  REGION 1..9: note = Leucine-rich repeat protein 1 (73-81)
FVDEGKATV

SEQ ID NO: 19969 - protein, 7 aa, synthetic construct
  REGION 1..7: note = Protein FAM127B (50-56)
FVDENTF

SEQ ID NO: 19970 - protein, 9 aa, synthetic construct
  REGION 1..9: note = Calsyntenin-1 (820-828)
FVDLSGHNL

SEQ ID NO: 19971 - protein, 9 aa, synthetic construct
  REGION 1..9: note = Ras-specific guanine nucleotide-releasing factor RalGPS2 (272-280)
FVEDDNYKL

SEQ ID NO: 19972 - protein, 9 aa, synthetic construct
  REGION 1..9: note = Smith-Magenis syndrome chromosomal region candidate gene 8 protein (117-125)
FVEDSKVVL

SEQ ID NO: 19973 - protein, 9 aa, synthetic construct
  REGION 1..9: note = Vacuolar protein sorting-associated protein 41 (267-275)
FVEETVYLL

SEQ ID NO: 19974 - protein, 13 aa, synthetic construct
  REGION 1..13: note = Tubulin beta chain (110-122)
FVFGQSGAGNNWA

SEQ ID NO: 19975 - protein, 9 aa, synthetic construct
  REGION 1..9: note = 2-hydroxyacylsphingosine 1-beta-galactosyltransferase (145-153)
FVIAHLLGV

SEQ ID NO: 19976 - protein, 9 aa, synthetic construct
  REGION 1..9: note = Glioma tumor suppressor candidate region gene 1 protein (784-792)
FVIQNQLGV

SEQ ID NO: 19977 - protein, 9 aa, synthetic construct
  REGION 1..9: note = 40S ribosomal protein S26 (39-47)
FVIRNIVEA

SEQ ID NO: 19978 - protein, 9 aa, synthetic construct
  REGION 1..9: note = Kelch-like protein 7 (430-438)
FVKDKIFAV

SEQ ID NO: 19979 - protein, 9 aa, synthetic construct
  REGION 1..9: note = Tectonic-1 (346-354)
FVLGTVSSV

SEQ ID NO: 19980 - protein, 9 aa, synthetic construct
  REGION 1..9: note = Zinc finger protein 618 (573-581)
FVMSEIRTV

SEQ ID NO: 19981 - protein, 10 aa, synthetic construct
  REGION 1..10: note = Integrin alpha-11 (525-534)
FVYNGTLKDS

SEQ ID NO: 19982 - protein, 11 aa, synthetic construct
  REGION 1..11: note = Protein disulfide-isomerase TMX3 (154-164)
FVYVGGESPLK

SEQ ID NO: 19983 - protein, 9 aa, synthetic construct
  REGION 1..9: note = Palmitoyl-protein thioesterase 1 (194-202)
FYAHIIPFL

SEQ ID NO: 19984 - protein, 9 aa, synthetic construct
  REGION 1..9: note = Serine/threonine-protein kinase 36 (200-208)
FYATSIFQL

SEQ ID NO: 19985 - protein, 9 aa, synthetic construct
  REGION 1..9: note = Tetratricopeptide repeat protein 31 (320-328)
FYHEAVVLF

SEQ ID NO: 19986 - protein, 10 aa, synthetic construct
  REGION 1..10: note = Ubinuclein-1 (160-169)
FYINSGTLQF

SEQ ID NO: 19987 - protein, 7 aa, synthetic construct
  REGION 1..7: note = HLA class I histocompatibility antigen, B-15 alpha chain (232-238)
FYPAEIT

SEQ ID NO: 19988 - protein, 9 aa, synthetic construct
  REGION 1..9: note = PX domain-containing protein kinase-like protein (233-241)
FYRSYFSQF

SEQ ID NO: 19989 - protein, 9 aa, synthetic construct
  REGION 1..9: note = HLA class II histocompatibility antigen, DO alpha chain (163-171)
FYSQPDHLF

SEQ ID NO: 19990 - protein, 11 aa, synthetic construct
  REGION 1..11: note = Hypoxia-inducible factor 1-alpha (545-555)
FYVDSDMVNEF

SEQ ID NO: 19991 - protein, 22 aa, synthetic construct
  REGION 1..22: note = Neurobeachin (23-44)
GAAGGGGGGSGGGGTGGSGMGE

SEQ ID NO: 19992 - protein, 9 aa, synthetic construct
  REGION 1..9: note = Myb-binding protein 1A (310-318)
GAALPLLTK

SEQ ID NO: 19993 - protein, 9 aa, synthetic construct
  REGION 1..9: note = Neutral amino acid transporter A (59-67)
GAALRGLSL

SEQ ID NO: 19994 - protein, 16 aa, synthetic construct
  REGION 1..16: note = Beta-secretase 2 (73-88)
GAANFLAMVDNLQGDS

SEQ ID NO: 19995 - protein, 13 aa, synthetic construct
  REGION 1..13: note = Transcription factor E2F3 (21-33)
GAAVVAAAAAASM

SEQ ID NO: 19996 - protein, 9 aa, synthetic construct
  REGION 1..9: note = U3 small nucleolar RNA-associated protein 15 homolog (121-129)
GADDYTVKL

SEQ ID NO: 19997 - protein, 9 aa, synthetic construct
  REGION 1..9: note = Pre-mRNA-processing factor 19 (241-249)
GADKNVVVF

SEQ ID NO: 19998 - protein, 19 aa, synthetic construct
  REGION 1..19: note = Myc-associated zinc finger protein (303-321)
GAGGGGGEAGAGGGAAAVA

SEQ ID NO: 19999 - protein, 12 aa, synthetic construct
  REGION 1..12: note = High affinity cationic amino acid transporter 1 (35-46)
GAGVYVLAGAVA

SEQ ID NO: 20000 - protein, 13 aa, synthetic construct
  REGION 1..13: note = Cytochrome c oxidase subunit 5B, mitochondrial (117-129)
GAHYKLVPQQLAH

SEQ ID NO: 20001 - protein, 15 aa, synthetic construct
  REGION 1..15: note = Adenosylhomocysteinase 3 (39-53)
GAMAPPAGGGDPEAP

SEQ ID NO: 20002 - protein, 13 aa, synthetic construct
  REGION 1..13: note = Sickle tail protein homolog (296-308)
GAPRPGSTAHPPH

SEQ ID NO: 20003 - protein, 11 aa, synthetic construct
  REGION 1..11: note = Fibrocystin (1261-1271)
GAPTVPAAVEV

SEQ ID NO: 20004 - protein, 19 aa, synthetic construct
  REGION 1..19: note = Collagen alpha-1(XVIII) chain (992-1010)
GARGESGLAGAPGPAGPPG

SEQ ID NO: 20005 - protein, 8 aa, synthetic construct
  REGION 1..8: note = Mastermind-like protein 2 (85-92)
GARKAGKH

SEQ ID NO: 20006 - protein, 33 aa, synthetic construct
  REGION 1..33: note = Frizzled-8 (634-666)
GATAAGGGGGPGGGGGGGPGGGGGPGGGGGSLY

SEQ ID NO: 20007 - protein, 20 aa, synthetic construct
  REGION 1..20: note = 26S protease regulatory subunit 6A (376-395)
GATELTHEDYMEGILEVQAK

SEQ ID NO: 20008 - protein, 12 aa, synthetic construct
  REGION 1..12: note = Vesicle transport protein SFT2C (154-165)
GATLFAALGLRS

SEQ ID NO: 20009 - protein, 15 aa, synthetic construct
  REGION 1..15: note = Chondroitin sulfate proteoglycan 4 (2058-2072)
GATLRLDPTVLDAGE

SEQ ID NO: 20010 - protein, 9 aa, synthetic construct
  REGION 1..9: note = Pecanex-like protein 3 (1088-1096)
GAVGFFTHY

SEQ ID NO: 20011 - protein, 9 aa, synthetic construct
  REGION 1..9: note = Pecanex-like protein 2 (267-275)
GAVGFVTHY

SEQ ID NO: 20012 - protein, 9 aa, synthetic construct
  REGION 1..9: note = Tensin-3 (1204-1212)
GAYGLAMKV

SEQ ID NO: 20013 - protein, 23 aa, synthetic construct
  REGION 1..23: note = Cytochrome c oxidase subunit 6A1, mitochondrial (64-86)
GDGNHTLFHNPHVNPLPTGYEDE

SEQ ID NO: 20014 - protein, 18 aa, synthetic construct
  REGION 1..18: note = Cadherin-2 (266-283)
GDPTGRFAIQTDPNSNDG

SEQ ID NO: 20015 - protein, 10 aa, synthetic construct
  REGION 1..10: note = E3 ubiquitin-protein ligase makorin-1 (147-156)
GEAESRNSNF

SEQ ID NO: 20016 - protein, 10 aa, synthetic construct
  REGION 1..10: note = Suppression of tumorigenicity 5 protein (770-779)
GEDGSRRFGY

SEQ ID NO: 20017 - protein, 11 aa, synthetic construct
  REGION 1..11: note = Melanotransferrin (422-432)
GEDIYTAGKTY

SEQ ID NO: 20018 - protein, 10 aa, synthetic construct
  REGION 1..10: note = Protein capicua homolog (1390-1399)
GEDPEGNKGF

SEQ ID NO: 20019 - protein, 21 aa, synthetic construct
  REGION 1..21: note = Eukaryotic translation initiation factor 5A-1 (130-150)
GEEILITVLSAMTEEAAVAIK

SEQ ID NO: 20020 - protein, 9 aa, synthetic construct
  REGION 1..9: note = Nucleosome-remodeling factor subunit BPTF (1023-1031)
GEEYRVTGY

SEQ ID NO: 20021 - protein, 16 aa, synthetic construct
  REGION 1..16: note = Gamma-interferon-inducible protein 16 (644-659)
GEFTYYEIQDNTGKME

SEQ ID NO: 20022 - protein, 9 aa, synthetic construct
  REGION 1..9: note = Cyclin-dependent kinase 6 (20-28)
GEGAYGKVF

SEQ ID NO: 20023 - protein, 8 aa, synthetic construct
  REGION 1..8: note = Nestin (495-502)
GEGEGQIW

SEQ ID NO: 20024 - protein, 9 aa, synthetic construct
  REGION 1..9: note = Zinc finger and BTB domain-containing protein 10 (226-234)
GEGETVQHF

SEQ ID NO: 20025 - protein, 10 aa, synthetic construct
  REGION 1..10: note = Matrix metalloproteinase-24 (185-194)
GEGGFLAHAY

SEQ ID NO: 20026 - protein, 9 aa, synthetic construct
  REGION 1..9: note = Filamin-B (1548-1556)
GEGLLAVQI

SEQ ID NO: 20027 - protein, 10 aa, synthetic construct
  REGION 1..10: note = Chondroitin sulfate proteoglycan 4 (1563-1572)
GEHTSPGHFF

SEQ ID NO: 20028 - protein, 9 aa, synthetic construct
  REGION 1..9: note = EKC/KEOPS complex subunit TPRKB (113-121)
GEKQINQEY

SEQ ID NO: 20029 - protein, 9 aa, synthetic construct
  REGION 1..9: note = Peroxisomal biogenesis factor 19 (180-188)
GEMPPGLNF

SEQ ID NO: 20030 - protein, 9 aa, synthetic construct
  REGION 1..9: note = TRAF2 and NCK-interacting protein kinase (434-442)
GEMPTSVAY

SEQ ID NO: 20031 - protein, 10 aa, synthetic construct
  REGION 1..10: note = Girdin (1244-1253)
GENDRLNHTY

SEQ ID NO: 20032 - protein, 10 aa, synthetic construct
  REGION 1..10: note = Plectin (1154-1163)
GERDVEVERW

SEQ ID NO: 20033 - protein, 9 aa, synthetic construct
  REGION 1..9: note = Fragile X mental retardation syndrome-related protein 1 (266-274)
GESADAVKK

SEQ ID NO: 20034 - protein, 9 aa, synthetic construct
  REGION 1..9: note = Nestin (482-490)
GESGGSRVF

SEQ ID NO: 20035 - protein, 9 aa, synthetic construct
  REGION 1..9: note = Protein MON2 homolog (918-926)
GESLIRTAF

SEQ ID NO: 20036 - protein, 10 aa, synthetic construct
  REGION 1..10: note = Synemin (317-326)
GESNPEIVIW

SEQ ID NO: 20037 - protein, 9 aa, synthetic construct
  REGION 1..9: note = Protein piccolo (255-263)
GESVKPSLP

SEQ ID NO: 20038 - protein, 10 aa, synthetic construct
  REGION 1..10: note = Vacuolar protein sorting-associated protein 18 homolog (657-666)
GETEQAIHNY

SEQ ID NO: 20039 - protein, 10 aa, synthetic construct
  REGION 1..10: note = Spectrin beta chain, non-erythrocytic 2 (1112-1121)
GEVERAQSEY

SEQ ID NO: 20040 - protein, 9 aa, synthetic construct
  REGION 1..9: note = ATP-citrate synthase (392-400)
GEVGKTTGI

SEQ ID NO: 20041 - protein, 9 aa, synthetic construct
  REGION 1..9: note = Hermansky-Pudlak syndrome 5 protein (252-260)
GEVISTHQF

SEQ ID NO: 20042 - protein, 12 aa, synthetic construct
  REGION 1..12: note = Serum albumin (423-434)
GEYKFQNALLVR

SEQ ID NO: 20043 - protein, 11 aa, synthetic construct
  REGION 1..11: note = HLA class I histocompatibility antigen, B-15 alpha chain (231-241)
GFYPAEITLTW

SEQ ID NO: 20044 - protein, 20 aa, synthetic construct
  REGION 1..20: note = Transcription factor Maf (211-230)
GGAGGAGGGGPASAGGGGGG

SEQ ID NO: 20045 - protein, 7 aa, synthetic construct
  REGION 1..7: note = Inhibitor of nuclear factor kappa-B kinase subunit beta (42-48)
GGDLRKY

SEQ ID NO: 20046 - protein, 19 aa, synthetic construct
  REGION 1..19: note = Cadherin-2 (265-283)
GGDPTGRFAIQTDPNSNDG

SEQ ID NO: 20047 - protein, 31 aa, synthetic construct
  REGION 1..31: note = Keratin, type I cytoskeletal 9 (593-623)
GGESGGSYGGGEEASGSGGGYGGGSGKSSHS

SEQ ID NO: 20048 - protein, 23 aa, synthetic construct
  REGION 1..23: note = Prostaglandin reductase 1 (141-163)
GGETVMVNAAAGAVGSVVGQIAK

SEQ ID NO: 20049 - protein, 17 aa, synthetic construct
  REGION 1..17: note = Hemicentin-1 (3579-3595)
GGGEVLRISTAQVEDTG

SEQ ID NO: 20050 - protein, 19 aa, synthetic construct
  REGION 1..19: note = Regulator of nonsense transcripts 1 (55-73)
GGGGAGGPGGAGAGAAAGQ

SEQ ID NO: 20051 - protein, 23 aa, synthetic construct
  REGION 1..23: note = Electrogenic sodium bicarbonate cotransporter 4 (440-462)
GGGGGAPGGGNGGGGGGGSGGGA

SEQ ID NO: 20052 - protein, 17 aa, synthetic construct
  REGION 1..17: note = AT-rich interactive domain-containing protein 1B (322-338)
GGGGGGGAGAGGAGAGA

SEQ ID NO: 20053 - protein, 15 aa, synthetic construct
  REGION 1..15: note = Neuronal PAS domain-containing protein 3 (734-748)
GGGGGGGAGGGGPSA

SEQ ID NO: 20054 - protein, 19 aa, synthetic construct
  REGION 1..19: note = Homeobox even-skipped homolog protein 2 (416-434)
GGGGGGGGGGGGGAGAGGG

SEQ ID NO: 20055 - protein, 22 aa, synthetic construct
  REGION 1..22: note = WD repeat-containing protein 26 (8-29)
GGGGGGGGGGGGGGGGGGQGQT

SEQ ID NO: 20056 - protein, 18 aa, synthetic construct
  REGION 1..18: note = Keratin, type I cytoskeletal 9 (15-32)
GGGGGGGLGSGGSIRSSY

SEQ ID NO: 20057 - protein, 15 aa, synthetic construct
  REGION 1..15: note = Zinc finger SWIM domain-containing protein 6 (150-164)
GGGGGSSSSPAATSA

SEQ ID NO: 20058 - protein, 13 aa, synthetic construct
  REGION 1..13: note = 40S ribosomal protein S16 (74-86)
GGGHVAQIYGESQ

SEQ ID NO: 20059 - protein, 10 aa, synthetic construct
  REGION 1..10: note = Serine/threonine-protein kinase TAO2 (869-878)
GGGLQAALLA

SEQ ID NO: 20060 - protein, 18 aa, synthetic construct
  REGION 1..18: note = Keratin, type II cytoskeletal 1 (595-612)
GGGSSGGRGSGGGSSGGS

SEQ ID NO: 20061 - protein, 13 aa, synthetic construct
  REGION 1..13: note = Keratin, type II cytoskeletal 3 (144-156)
GGGYGGGMGGGLG

SEQ ID NO: 20062 - protein, 20 aa, synthetic construct
  REGION 1..20: note = Protein scribble homolog (1289-1308)
GGKMAESPCSPSGQQPPSPP

SEQ ID NO: 20063 - protein, 13 aa, synthetic construct
  REGION 1..13: note = Protein TASOR (44-56)
GGLNIAEPSGGAG

SEQ ID NO: 20064 - protein, 26 aa, synthetic construct
  REGION 1..26: note = Keratin, type I cytoskeletal 18 (56-81)
GGMGSGGLATGIAGGLAGMGGIQNEK

SEQ ID NO: 20065 - protein, 18 aa, synthetic construct
  REGION 1..18: note = Inositol 1,4,5-trisphosphate receptor type 1 (1761-1778)
GGPGKPGGGGGGSGSSSM

SEQ ID NO: 20066 - protein, 10 aa, synthetic construct
  REGION 1..10: note = KN motif and ankyrin repeat domain-containing protein 2 (473-482)
GGPPAGVRSI

SEQ ID NO: 20067 - protein, 13 aa, synthetic construct
  REGION 1..13: note = AT-rich interactive domain-containing protein 1A (277-289)
GGPSAAGGGTPQP

SEQ ID NO: 20068 - protein, 16 aa, synthetic construct
  REGION 1..16: note = Protein transport protein Sec24C (725-740)
GGSVYKYASFQVENDQ

SEQ ID NO: 20069 - protein, 25 aa, synthetic construct
  REGION 1..25: note = HLA class I histocompatibility antigen, A-1 alpha chain (316-340)
GGSYTQAASSDSAQGSDVSLTACKV

SEQ ID NO: 20070 - protein, 9 aa, synthetic construct
  REGION 1..9: note = Abl interactor 2 (222-230)
GHPVQFYSM

SEQ ID NO: 20071 - protein, 28 aa, synthetic construct
  REGION 1..28: note = Guanine nucleotide-binding protein subunit beta-2-like 1 (61-88)
GHSHFVSDVVISSDGQFALSGSWDGTLR

SEQ ID NO: 20072 - protein, 9 aa, synthetic construct
  REGION 1..9: note = Spatacsin (1079-1087)
GHTLLALAT

SEQ ID NO: 20073 - protein, 9 aa, synthetic construct
  REGION 1..9: note = Protein Jumonji (51-59)
GIAGSLKTV

SEQ ID NO: 20074 - protein, 9 aa, synthetic construct
  REGION 1..9: note = Lipoprotein lipase (23-31)
GIAGSLTNK

SEQ ID NO: 20075 - protein, 13 aa, synthetic construct
  REGION 1..13: note = Protein transport protein Sec16A (84-96)
GIANPLLAVPAPS

SEQ ID NO: 20076 - protein, 10 aa, synthetic construct
  REGION 1..10: note = Interferon alpha-inducible protein 27, mitochondrial (57-66)
GIASSSIAAK

SEQ ID NO: 20077 - protein, 9 aa, synthetic construct
  REGION 1..9: note = HLA class II histocompatibility antigen, DQ beta 1 chain (233-241)
GIGGFVLGL

SEQ ID NO: 20078 - protein, 9 aa, synthetic construct
  REGION 1..9: note = Probable methyltransferase TARBP1 (1190-1198)
GIIDRIFQA

SEQ ID NO: 20079 - protein, 38 aa, synthetic construct
  REGION 1..38: note = Glyceraldehyde-3-phosphate dehydrogenase (272-309)
GILGYTEHQVVSSDFNSDTHSSTFDAGAGIALNDHFVK

SEQ ID NO: 20080 - protein, 9 aa, synthetic construct
  REGION 1..9: note = Zinc finger ZZ-type and EF-hand domain-containing protein 1 (2890-2898)
GILLPLHRA

SEQ ID NO: 20081 - protein, 8 aa, synthetic construct
  REGION 1..8: note = HEAT repeat-containing protein 5A (975-982)
GIRNGSCS

SEQ ID NO: 20082 - protein, 9 aa, synthetic construct
  REGION 1..9: note = NHP2-like protein 1 (49-57)
GISEFIVMA

SEQ ID NO: 20083 - protein, 9 aa, synthetic construct
  REGION 1..9: note = Putative segment polarity protein dishevelled homolog DVL1P1 (277-285)
GIYIGSIMK

SEQ ID NO: 20084 - protein, 9 aa, synthetic construct
  REGION 1..9: note = Afadin (1018-1026)
GIYVKSVVK

SEQ ID NO: 20085 - protein, 7 aa, synthetic construct
  REGION 1..7: note = Mesoderm induction early response protein 3 (303-309)
GKDFHLI

SEQ ID NO: 20086 - protein, 12 aa, synthetic construct
  REGION 1..12: note = Leucine-rich repeat serine/threonine-protein kinase 2 (780-791)
GKGDSQIISLLL

SEQ ID NO: 20087 - protein, 11 aa, synthetic construct
  REGION 1..11: note = E1A-binding protein p400 (281-291)
GKTITPAHFQL

SEQ ID NO: 20088 - protein, 10 aa, synthetic construct
  REGION 1..10: note = Probable E3 ubiquitin-protein ligase HERC1 (2585-2594)
GLADLERAQA

SEQ ID NO: 20089 - protein, 9 aa, synthetic construct
  REGION 1..9: note = Minor histocompatibility antigen H13 (189-197)
GLAFSLNGV

SEQ ID NO: 20090 - protein, 9 aa, synthetic construct
  REGION 1..9: note = Serpin H1 (48-56)
GLAFSLYQA

SEQ ID NO: 20091 - protein, 9 aa, synthetic construct
  REGION 1..9: note = Ral GTPase-activating protein subunit beta (790-798)
GLAKVKVMV

SEQ ID NO: 20092 - protein, 11 aa, synthetic construct
  REGION 1..11: note = Equilibrative nucleoside transporter 1 (483-493)
GLALGAVFSFL

SEQ ID NO: 20093 - protein, 11 aa, synthetic construct
  REGION 1..11: note = Prominin-2 (17-27)
GLALSQLAAGA

SEQ ID NO: 20094 - protein, 9 aa, synthetic construct
  REGION 1..9: note = Vacuolar protein sorting-associated protein 41 homolog (323-331)
GLAYINHLV

SEQ ID NO: 20095 - protein, 9 aa, synthetic construct
  REGION 1..9: note = Zinc finger and BTB domain-containing protein 39 (63-71)
GLDAARTYV

SEQ ID NO: 20096 - protein, 9 aa, synthetic construct
  REGION 1..9: note = C-type lectin domain family 11 member A (117-125)
GLDAGLHQL

SEQ ID NO: 20097 - protein, 10 aa, synthetic construct
  REGION 1..10: note = Protein PRR14L (130-139)
GLDELDGVKA

SEQ ID NO: 20098 - protein, 9 aa, synthetic construct
  REGION 1..9: note = Protein furry homolog-like (621-629)
GLDNETHFL

SEQ ID NO: 20099 - protein, 9 aa, synthetic construct
  REGION 1..9: note = Heat shock 70 kDa protein 12A (522-530)
GLDPAVIKV

SEQ ID NO: 20100 - protein, 9 aa, synthetic construct
  REGION 1..9: note = DNA polymerase alpha catalytic subunit (1240-1248)
GLDPTQFRV

SEQ ID NO: 20101 - protein, 9 aa, synthetic construct
  REGION 1..9: note = Sodium- and chloride-dependent creatine transporter 1 (299-307)
GLDSQFVGV

SEQ ID NO: 20102 - protein, 9 aa, synthetic construct
  REGION 1..9: note = ADP-ribosylation factor 5 (169-177)
GLDWLSHEL

SEQ ID NO: 20103 - protein, 10 aa, synthetic construct
  REGION 1..10: note = Trinucleotide repeat-containing gene 18 protein (737-746)
GLEESGLGLL

SEQ ID NO: 20104 - protein, 10 aa, synthetic construct
  REGION 1..10: note = Rho GTPase-activating protein 23 (525-534)
GLESTGIYRV

SEQ ID NO: 20105 - protein, 10 aa, synthetic construct
  REGION 1..10: note = Ciliary neurotrophic factor (150-159)
GLFEKKLWGL

SEQ ID NO: 20106 - protein, 10 aa, synthetic construct
  REGION 1..10: note = Oxysterol-binding protein-related protein 1 (365-374)
GLFGKELHKV

SEQ ID NO: 20107 - protein, 9 aa, synthetic construct
  REGION 1..9: note = Receptor-interacting serine/threonine-protein kinase 4 (180-188)
GLFGTIAYL

SEQ ID NO: 20108 - protein, 10 aa, synthetic construct
  REGION 1..10: note = Presenilin-2 (364-373)
GLGDFIFYSV

SEQ ID NO: 20109 - protein, 9 aa, synthetic construct
  REGION 1..9: note = Nurim (175-183)
GLGEPLALK

SEQ ID NO: 20110 - protein, 8 aa, synthetic construct
  REGION 1..8: note = Unconventional myosin-Va (1848-1855)
GLGFISRV

SEQ ID NO: 20111 - protein, 8 aa, synthetic construct
  REGION 1..8: note = Probable ATP-dependent RNA helicase YTHDC2 (1364-1371)
GLGGVFKV

SEQ ID NO: 20112 - protein, 8 aa, synthetic construct
  REGION 1..8: note = Sodium-dependent multivitamin transporter (227-234)
GLGRVWAV

SEQ ID NO: 20113 - protein, 11 aa, synthetic construct
  REGION 1..11: note = Vacuole membrane protein 1 (126-136)
GLGTGLHTFLL

SEQ ID NO: 20114 - protein, 12 aa, synthetic construct
  REGION 1..12: note = Elastin (104-115)
GLGVGAGVPGFG

SEQ ID NO: 20115 - protein, 9 aa, synthetic construct
  REGION 1..9: note = Bifunctional heparan sulfate N-deacetylase/N-sulfotransferase 3 (265-273)
GLHDGIQRV

SEQ ID NO: 20116 - protein, 9 aa, synthetic construct
  REGION 1..9: note = Vacuolar protein sorting-associated protein 13D (747-755)
GLHGLVVQA

SEQ ID NO: 20117 - protein, 9 aa, synthetic construct
  REGION 1..9: note = Ribosome-binding protein 1 (183-191)
GLHGQLQEA

SEQ ID NO: 20118 - protein, 11 aa, synthetic construct
  REGION 1..11: note = Dystonin (1614-1624)
GLIDEQILCQL

SEQ ID NO: 20119 - protein, 11 aa, synthetic construct
  REGION 1..11: note = 28 kDa heat- and acid-stable phosphoprotein (79-89)
GLIDIENPNRV

SEQ ID NO: 20120 - protein, 11 aa, synthetic construct
  REGION 1..11: note = Dystonin (1576-1586)
GLIDYDTGIRL

SEQ ID NO: 20121 - protein, 14 aa, synthetic construct
  REGION 1..14: note = ATP-citrate synthase (832-845)
GLIRKPASFMTSIC

SEQ ID NO: 20122 - protein, 7 aa, synthetic construct
  REGION 1..7: note = Rho-related BTB domain-containing protein 3 (23-29)
GLIRTYL

SEQ ID NO: 20123 - protein, 9 aa, synthetic construct
  REGION 1..9: note = Nucleolar protein 6 (323-331)
GLKDGVALL

SEQ ID NO: 20124 - protein, 10 aa, synthetic construct
  REGION 1..10: note = Matrin-3 (27-36)
GLLAAATQSL

SEQ ID NO: 20125 - protein, 9 aa, synthetic construct
  REGION 1..9: note = Transmembrane protein 223 (112-120)
GLLFSLRSV

SEQ ID NO: 20126 - protein, 9 aa, synthetic construct
  REGION 1..9: note = Receptor-type tyrosine-protein phosphatase T (1083-1091)
GLLGFVRQV

SEQ ID NO: 20127 - protein, 9 aa, synthetic construct
  REGION 1..9: note = LanC-like protein 1 (313-321)
GLLKKGYGL

SEQ ID NO: 20128 - protein, 10 aa, synthetic construct
  REGION 1..10: note = Protein ELYS (20-29)
GLLPFPEVTL

SEQ ID NO: 20129 - protein, 9 aa, synthetic construct
  REGION 1..9: note = Protein farnesyltransferase subunit beta (256-264)
GLLPLLHRA

SEQ ID NO: 20130 - protein, 9 aa, synthetic construct
  REGION 1..9: note = Angiomotin (797-805)
GLLSHSSTL

SEQ ID NO: 20131 - protein, 9 aa, synthetic construct
  REGION 1..9: note = Helicase SKI2W (380-388)
GLLTGDVQL

SEQ ID NO: 20132 - protein, 9 aa, synthetic construct
  REGION 1..9: note = Glycerol-3-phosphate acyltransferase 3 (87-95)
GLMGIIQRA

SEQ ID NO: 20133 - protein, 9 aa, synthetic construct
  REGION 1..9: note = Glycerol-3-phosphate acyltransferase 4 (150-158)
GLMGVIQRA

SEQ ID NO: 20134 - protein, 10 aa, synthetic construct
  REGION 1..10: note = Contactin-associated protein-like 3B (447-456)
GLNDGQWHSV

SEQ ID NO: 20135 - protein, 9 aa, synthetic construct
  REGION 1..9: note = Basement membrane-specific heparan sulfate proteoglycan core protein (280-288)
GLNLHTLLY

SEQ ID NO: 20136 - protein, 10 aa, synthetic construct
  REGION 1..10: note = Sorting nexin-18 (488-497)
GLNQAIAFTG

SEQ ID NO: 20137 - protein, 10 aa, synthetic construct
  REGION 1..10: note = Cell surfaceoprotein MUC18 (416-425)
GLNRTQLVNV

SEQ ID NO: 20138 - protein, 11 aa, synthetic construct
  REGION 1..11: note = DnaJ homolog subfamily B member 11 (305-315)
GLPNFDNNNIK

SEQ ID NO: 20139 - protein, 13 aa, synthetic construct
  REGION 1..13: note = Epidermal growth factor receptor substrate 15 (256-268)
GLPSTLLAHIWSL

SEQ ID NO: 20140 - protein, 9 aa, synthetic construct
  REGION 1..9: note = Uridine phosphorylase 1 (55-63)
GLQAAVVCV

SEQ ID NO: 20141 - protein, 12 aa, synthetic construct
  REGION 1..12: note = Nestin (434-445)
GLQDPEGQSQQV

SEQ ID NO: 20142 - protein, 15 aa, synthetic construct
  REGION 1..15: note = Ryanodine receptor 1 (135-149)
GLQEDATGEACWWTM

SEQ ID NO: 20143 - protein, 9 aa, synthetic construct
  REGION 1..9: note = Catenin beta-1 (278-286)
GLQKMVALL

SEQ ID NO: 20144 - protein, 9 aa, synthetic construct
  REGION 1..9: note = Serine hydroxymethyltransferase, mitochondrial (399-407)
GLRLGAPAL

SEQ ID NO: 20145 - protein, 17 aa, synthetic construct
  REGION 1..17: note = AP-5 complex subunit beta-1 (121-137)
GLRQRAALDGGPRALAT

SEQ ID NO: 20146 - protein, 10 aa, synthetic construct
  REGION 1..10: note = Actin-like protein 6B (313-322)
GLSGNTMLGV

SEQ ID NO: 20147 - protein, 9 aa, synthetic construct
  REGION 1..9: note = Melanoma antigen preferentially expressed in tumors (432-440)
GLSNLTHVL

SEQ ID NO: 20148 - protein, 9 aa, synthetic construct
  REGION 1..9: note = G-protein coupled receptor 143 (150-158)
GLSTILLYH

SEQ ID NO: 20149 - protein, 9 aa, synthetic construct
  REGION 1..9: note = Purine nucleoside phosphorylase (37-45)
GLTDKLTQA

SEQ ID NO: 20150 - protein, 10 aa, synthetic construct
  REGION 1..10: note = Beta-glucuronidase (23-32)
GLVNYQISVK

SEQ ID NO: 20151 - protein, 38 aa, synthetic construct
  REGION 1..38: note = Testis anion transporter 1 (103-140)
GLVQVPQGLTLSLLARQLIPPLNIAYAAFCSSVIYVIF

SEQ ID NO: 20152 - protein, 9 aa, synthetic construct
  REGION 1..9: note = Laminin subunit alpha-4 (1544-1552)
GLWHDVIFI

SEQ ID NO: 20153 - protein, 10 aa, synthetic construct
  REGION 1..10: note = Disco-interacting protein 2 homolog C (547-556)
GLWHGILTSV

SEQ ID NO: 20154 - protein, 10 aa, synthetic construct
  REGION 1..10: note = Disco-interacting protein 2 homolog B (156-165)
GLWHGMFANV

SEQ ID NO: 20155 - protein, 9 aa, synthetic construct
  REGION 1..9: note = Adhesion G protein-coupled receptor A3 (1170-1178)
GLWKHETTV

SEQ ID NO: 20156 - protein, 9 aa, synthetic construct
  REGION 1..9: note = Zinc transporter ZIP14 (20-28)
GLWRTTPEA

SEQ ID NO: 20157 - protein, 10 aa, synthetic construct
  REGION 1..10: note = RNA pseudouridylate synthase domain-containing protein 1 (32-41)
GLYAGDPVSK

SEQ ID NO: 20158 - protein, 9 aa, synthetic construct
  REGION 1..9: note = Lysosomal-trafficking regulator (2306-2314)
GLYELLSGV

SEQ ID NO: 20159 - protein, 9 aa, synthetic construct
  REGION 1..9: note = Zinc finger BED domain-containing protein 1 (137-145)
GLYPASIVD

SEQ ID NO: 20160 - protein, 9 aa, synthetic construct
  REGION 1..9: note = ATP-dependent RNA helicase DHX36 (824-832)
GLYPKVAKI

SEQ ID NO: 20161 - protein, 9 aa, synthetic construct
  REGION 1..9: note = E3 ubiquitin-protein ligase HERC2 (1628-1636)
GLYPQSPLL

SEQ ID NO: 20162 - protein, 9 aa, synthetic construct
  REGION 1..9: note = Unconventional myosin-XVIIIa (758-766)
GLYSELFTL

SEQ ID NO: 20163 - protein, 9 aa, synthetic construct
  REGION 1..9: note = Gamma-tubulin complex component 2 (879-887)
GMASVISRL

SEQ ID NO: 20164 - protein, 9 aa, synthetic construct
  REGION 1..9: note = Intraflagellar transport protein 27 homolog (41-49)
GMDLVVKTV

SEQ ID NO: 20165 - protein, 10 aa, synthetic construct
  REGION 1..10: note = Lysophosphatidic acid phosphatase type 6 (118-127)
GMFAGQLTKV

SEQ ID NO: 20166 - protein, 12 aa, synthetic construct
  REGION 1..12: note = AP-3 complex subunit beta-1 (317-328)
GMFEPYLKSFYV

SEQ ID NO: 20167 - protein, 10 aa, synthetic construct
  REGION 1..10: note = ATP-dependent RNA helicase DHX29 (113-122)
GMISGRLTAK

SEQ ID NO: 20168 - protein, 9 aa, synthetic construct
  REGION 1..9: note = Glucocorticoid modulatory element-binding protein 2 (289-297)
GMLDLVKKV

SEQ ID NO: 20169 - protein, 9 aa, synthetic construct
  REGION 1..9: note = E3 ubiquitin-protein ligase HUWE1 (407-415)
GMMEALLKV

SEQ ID NO: 20170 - protein, 9 aa, synthetic construct
  REGION 1..9: note = Complement receptor type 1 (563-571)
GMVHVITDI

SEQ ID NO: 20171 - protein, 11 aa, synthetic construct
  REGION 1..11: note = Chromodomain-helicase-DNA-binding protein 4 (1035-1045)
GMYDGSALIRA

SEQ ID NO: 20172 - protein, 10 aa, synthetic construct
  REGION 1..10: note = Peroxisomal acyl-coenzyme A oxidase 3 (111-120)
GMYDSSLAAK

SEQ ID NO: 20173 - protein, 26 aa, synthetic construct
  REGION 1..26: note = ATP synthase-coupling factor 6, mitochondrial (83-108)
GNADMNTFPTFKFEDPKFEVIEKPQA

SEQ ID NO: 20174 - protein, 7 aa, synthetic construct
  REGION 1..7: note = Sorbitol dehydrogenase (58-64)
GNFIVKK

SEQ ID NO: 20175 - protein, 21 aa, synthetic construct
  REGION 1..21: note = Fibrillin-2 (463-483)
GNGFSPGVGGAGVGAGGQGPI

SEQ ID NO: 20176 - protein, 21 aa, synthetic construct
  REGION 1..21: note = Cytochrome c oxidase subunit 6A1, mitochondrial (66-86)
GNHTLFHNPHVNPLPTGYEDE

SEQ ID NO: 20177 - protein, 9 aa, synthetic construct
  REGION 1..9: note = Tyrosine-protein phosphatase non-receptor type substrate 1 (5-13)
GPAPGRLGP

SEQ ID NO: 20178 - protein, 22 aa, synthetic construct
  REGION 1..22: note = Heat shock cognate 71 kDa protein (4-25)
GPAVGIDLGTTYSCVGVFQHGK

SEQ ID NO: 20179 - protein, 11 aa, synthetic construct
  REGION 1..11: note = Kinesin-like protein KIF13A (1193-1203)
GPHASGVNSIL

SEQ ID NO: 20180 - protein, 17 aa, synthetic construct
  REGION 1..17: note = Myosin-IIIb (1132-1148)
GPHSPVAAGTRGSAEVQ

SEQ ID NO: 20181 - protein, 10 aa, synthetic construct
  REGION 1..10: note = Obscurin (6240-6249)
GPKAPGPSTG

SEQ ID NO: 20182 - protein, 12 aa, synthetic construct
  REGION 1..12: note = Collagen alpha-2(XI) chain (739-750)
GPKGAKGATGPG

SEQ ID NO: 20183 - protein, 13 aa, synthetic construct
  REGION 1..13: note = Collagen alpha-1(III) chain (660-672)
GPKGDAGAPGAPG

SEQ ID NO: 20184 - protein, 9 aa, synthetic construct
  REGION 1..9: note = Synaptic vesicle membrane protein VAT-1 homolog (289-297)
GPKRNLMAL

SEQ ID NO: 20185 - protein, 16 aa, synthetic construct
  REGION 1..16: note = Fibronectin isoform 6 (1673-1688)
GPMKEINLAPDSSSVV

SEQ ID NO: 20186 - protein, 17 aa, synthetic construct
  REGION 1..17: note = Fibronectin isoform 6 (1673-1689)
GPMKEINLAPDSSSVVV

SEQ ID NO: 20187 - protein, 12 aa, synthetic construct
  REGION 1..12: note = Histone acetyltransferase p300 (672-683)
GPNMGQPQPGMT

SEQ ID NO: 20188 - protein, 17 aa, synthetic construct
  REGION 1..17: note = Collagen alpha-3(IV) chain (637-653)
GPPGEAGPRGELSVSTP

SEQ ID NO: 20189 - protein, 12 aa, synthetic construct
  REGION 1..12: note = Collagen alpha-1(III) chain (43-54)
GPPGPAGNTGAP

SEQ ID NO: 20190 - protein, 10 aa, synthetic construct
  REGION 1..10: note = ETS translocation variant 5 (359-368)
GPPYQRRGSL

SEQ ID NO: 20191 - protein, 15 aa, synthetic construct
  REGION 1..15: note = REST corepressor 2 (504-518)
GPQPPPTLIGTPLEP

SEQ ID NO: 20192 - protein, 9 aa, synthetic construct
  REGION 1..9: note = Cathepsin D (303-311)
GPVDEVREL

SEQ ID NO: 20193 - protein, 16 aa, synthetic construct
  REGION 1..16: note = Collagen alpha-1(V) chain (1225-1240)
GPVGLQGLPGPPGEKG

SEQ ID NO: 20194 - protein, 7 aa, synthetic construct
  REGION 1..7: note = Barrier-to-autointegration factor (47-53)
GQFLVLK

SEQ ID NO: 20195 - protein, 17 aa, synthetic construct
  REGION 1..17: note = Filamin-A (1240-1256)
GQGVFREATTEFSVDAR

SEQ ID NO: 20196 - protein, 10 aa, synthetic construct
  REGION 1..10: note = UHRF1-binding protein 1-like (784-793)
GQKPSSSDTF

SEQ ID NO: 20197 - protein, 10 aa, synthetic construct
  REGION 1..10: note = Pleckstrin homology-like domain family B member 1 (354-363)
GQLPVVAISL

SEQ ID NO: 20198 - protein, 9 aa, synthetic construct
  REGION 1..9: note = Transcription elongation factor SPT5 (995-1003)
GQTGVIRSV

SEQ ID NO: 20199 - protein, 9 aa, synthetic construct
  REGION 1..9: note = Protein prune homolog 2 (1236-1244)
GQVEIVTKV

SEQ ID NO: 20200 - protein, 9 aa, synthetic construct
  REGION 1..9: note = E3 SUMO-protein ligase RanBP2 (112-120)
GRAKYWLER

SEQ ID NO: 20201 - protein, 9 aa, synthetic construct
  REGION 1..9: note = Hemicentin-1 (3137-3145)
GRDDKNFHL

SEQ ID NO: 20202 - protein, 38 aa, synthetic construct
  REGION 1..38: note = DnaJ homolog subfamily B member 11 (23-60)
GRDFYKILGVPRSASIKDIKKAYRKLALQLHPDRNPDD

SEQ ID NO: 20203 - protein, 9 aa, synthetic construct
  REGION 1..9: note = Integrin alpha-X (519-527)
GRFGAALTV

SEQ ID NO: 20204 - protein, 9 aa, synthetic construct
  REGION 1..9: note = Phosphorylase b kinase regulatory subunit alpha, skeletal muscle isoform (1123-1131)
GRFGTMTYL

SEQ ID NO: 20205 - protein, 9 aa, synthetic construct
  REGION 1..9: note = Glycerol-3-phosphate acyltransferase 4 (81-89)
GRFKEFMSK

SEQ ID NO: 20206 - protein, 9 aa, synthetic construct
  REGION 1..9: note = Tyrosine-protein phosphatase non-receptor type 21 (1024-1032)
GRFKITTRF

SEQ ID NO: 20207 - protein, 9 aa, synthetic construct
  REGION 1..9: note = Hemicentin-1 (2532-2540)
GRFLQITNV

SEQ ID NO: 20208 - protein, 9 aa, synthetic construct
  REGION 1..9: note = 40S ribosomal protein S21 (44-52)
GRFNGQFKT

SEQ ID NO: 20209 - protein, 9 aa, synthetic construct
  REGION 1..9: note = Serine/threonine-protein kinase WNK1 (228-236)
GRGSFKTVY

SEQ ID NO: 20210 - protein, 10 aa, synthetic construct
  REGION 1..10: note = Homeodomain-interacting protein kinase 1 (197-206)
GRGTFGQVAK

SEQ ID NO: 20211 - protein, 9 aa, synthetic construct
  REGION 1..9: note = Exosome component 10 (399-407)
GRHSLDHLL

SEQ ID NO: 20212 - protein, 9 aa, synthetic construct
  REGION 1..9: note = Eukaryotic translation initiation factor 3 subunit L (261-269)
GRHSLYKML

SEQ ID NO: 20213 - protein, 10 aa, synthetic construct
  REGION 1..10: note = Hemicentin-1 (305-314)
GRHSVRITGL

SEQ ID NO: 20214 - protein, 9 aa, synthetic construct
  REGION 1..9: note = Sulfiredoxin-1 (29-37)
GRIAAVHNV

SEQ ID NO: 20215 - protein, 9 aa, synthetic construct
  REGION 1..9: note = FH2 domain-containing protein 1 (1122-1130)
GRILNPLRK

SEQ ID NO: 20216 - protein, 26 aa, synthetic construct
  REGION 1..26: note = 40S ribosomal protein S19 (120-145)
GRKLTPQGQRDLDRIAGQVAAANKKH

SEQ ID NO: 20217 - protein, 9 aa, synthetic construct
  REGION 1..9: note = Plectin (581-589)
GRLDLQYAK

SEQ ID NO: 20218 - protein, 9 aa, synthetic construct
  REGION 1..9: note = Chondroitin sulfate proteoglycan 4 (2121-2129)
GRLGLEVGR

SEQ ID NO: 20219 - protein, 9 aa, synthetic construct
  REGION 1..9: note = CDK-activating kinase assembly factor MAT1 (225-233)
GRLGYLNHV

SEQ ID NO: 20220 - protein, 9 aa, synthetic construct
  REGION 1..9: note = Coiled-coil domain-containing protein 85B (43-51)
GRLMQEVNR

SEQ ID NO: 20221 - protein, 10 aa, synthetic construct
  REGION 1..10: note = Up-regulator of cell proliferation (625-634)
GRLPAGQRRF

SEQ ID NO: 20222 - protein, 9 aa, synthetic construct
  REGION 1..9: note = Pleckstrin homology-like domain family B member 1 (536-544)
GRLSPAYSL

SEQ ID NO: 20223 - protein, 9 aa, synthetic construct
  REGION 1..9: note = Muscleblind-like protein 3 (34-42)
GRNNLIQQK

SEQ ID NO: 20224 - protein, 10 aa, synthetic construct
  REGION 1..10: note = L-dopachrome tautomerase (313-322)
GRNSMKLPTL

SEQ ID NO: 20225 - protein, 11 aa, synthetic construct
  REGION 1..11: note = Probable ATP-dependent RNA helicase DDX17 (123-133)
GRSSQSSSQQF

SEQ ID NO: 20226 - protein, 9 aa, synthetic construct
  REGION 1..9: note = DNA-dependent protein kinase catalytic subunit (2721-2729)
GRTDLLRLR

SEQ ID NO: 20227 - protein, 9 aa, synthetic construct
  REGION 1..9: note = Alpha-1,3-mannosyl-glycoprotein 4-beta-N-acetylglucosaminyltransferase B (36-44)
GRTGVSVVM

SEQ ID NO: 20228 - protein, 9 aa, synthetic construct
  REGION 1..9: note = Ubiquitin-associated protein 2-like (711-719)
GRTSTSTLL

SEQ ID NO: 20229 - protein, 9 aa, synthetic construct
  REGION 1..9: note = Multidrug resistance protein 1 (515-523)
GRTTIVIAH

SEQ ID NO: 20230 - protein, 10 aa, synthetic construct
  REGION 1..10: note = Transmembraneoprotein NMB (76-85)
GRVQAVLTSD

SEQ ID NO: 20231 - protein, 9 aa, synthetic construct
  REGION 1..9: note = DNA-directed RNA polymerase III subunit RPC4 (335-343)
GRVQLLLGK

SEQ ID NO: 20232 - protein, 9 aa, synthetic construct
  REGION 1..9: note = Retinoic acid-induced protein 1 (110-118)
GRYAGEESL

SEQ ID NO: 20233 - protein, 13 aa, synthetic construct
  REGION 1..13: note = CD44 antigen (40-52)
GRYSISRTEAADL

SEQ ID NO: 20234 - protein, 18 aa, synthetic construct
  REGION 1..18: note = Cytochrome c oxidase subunit 7C, mitochondrial (46-63)
GSAFATPFLVVRHQLLKT

SEQ ID NO: 20235 - protein, 13 aa, synthetic construct
  REGION 1..13: note = Vimentin (41-53)
GSALRPSTSRSLY

SEQ ID NO: 20236 - protein, 9 aa, synthetic construct
  REGION 1..9: note = WD repeat-containing protein 81 (728-736)
GSDNGVIRL

SEQ ID NO: 20237 - protein, 10 aa, synthetic construct
  REGION 1..10: note = Protein-methionine sulfoxide oxidase MICAL1 (594-603)
GSDPLGLIAY

SEQ ID NO: 20238 - protein, 12 aa, synthetic construct
  REGION 1..12: note = A-kinase anchor protein 8 (159-170)
GSDRNGSFGGQY

SEQ ID NO: 20239 - protein, 10 aa, synthetic construct
  REGION 1..10: note = Plasminogen activator inhibitor 1 RNA-binding protein (114-123)
GSDRSSFSHY

SEQ ID NO: 20240 - protein, 12 aa, synthetic construct
  REGION 1..12: note = Retinoic acid-induced protein 1 (520-531)
GSEDPLERSFLY

SEQ ID NO: 20241 - protein, 9 aa, synthetic construct
  REGION 1..9: note = Ribosomal protein S6 kinase alpha-6 (82-90)
GSFGKVFLV

SEQ ID NO: 20242 - protein, 11 aa, synthetic construct
  REGION 1..11: note = V-type proton ATPase subunit H (179-189)
GSGVAVETGTV

SEQ ID NO: 20243 - protein, 14 aa, synthetic construct
  REGION 1..14: note = HLA class I histocompatibility antigen, A-1 alpha chain (25-38)
GSHSMRYFFTSVSR

SEQ ID NO: 20244 - protein, 15 aa, synthetic construct
  REGION 1..15: note = HLA class I histocompatibility antigen, A-1 alpha chain (25-39)
GSHSMRYFFTSVSRP

SEQ ID NO: 20245 - protein, 17 aa, synthetic construct
  REGION 1..17: note = HLA class I histocompatibility antigen, A-1 alpha chain (25-41)
GSHSMRYFFTSVSRPGR

SEQ ID NO: 20246 - protein, 18 aa, synthetic construct
  REGION 1..18: note = HLA class I histocompatibility antigen, A-1 alpha chain (25-42)
GSHSMRYFFTSVSRPGRG

SEQ ID NO: 20247 - protein, 26 aa, synthetic construct
  REGION 1..26: note = HLA class I histocompatibility antigen, A-1 alpha chain (25-50)
GSHSMRYFFTSVSRPGRGEPRFIAVG

SEQ ID NO: 20248 - protein, 29 aa, synthetic construct
  REGION 1..29: note = HLA class I histocompatibility antigen, A-1 alpha chain (25-53)
GSHSMRYFFTSVSRPGRGEPRFIAVGYVD

SEQ ID NO: 20249 - protein, 37 aa, synthetic construct
  REGION 1..37: note = HLA class I histocompatibility antigen, A-1 alpha chain (25-61)
GSHSMRYFFTSVSRPGRGEPRFIAVGYVDDTQFVRFD

SEQ ID NO: 20250 - protein, 39 aa, synthetic construct
  REGION 1..39: note = HLA class I histocompatibility antigen, A-1 alpha chain (25-63)
GSHSMRYFFTSVSRPGRGEPRFIAVGYVDDTQFVRFDSD

SEQ ID NO: 20251 - protein, 16 aa, synthetic construct
  REGION 1..16: note = HLA class I histocompatibility antigen, A-23 alpha chain (25-40)
GSHSMRYFSTSVSRPG

SEQ ID NO: 20252 - protein, 18 aa, synthetic construct
  REGION 1..18: note = HLA class I histocompatibility antigen, A-23 alpha chain (25-42)
GSHSMRYFSTSVSRPGRG

SEQ ID NO: 20253 - protein, 19 aa, synthetic construct
  REGION 1..19: note = HLA class I histocompatibility antigen, A-23 alpha chain (25-43)
GSHSMRYFSTSVSRPGRGE

SEQ ID NO: 20254 - protein, 21 aa, synthetic construct
  REGION 1..21: note = HLA class I histocompatibility antigen, A-23 alpha chain (25-45)
GSHSMRYFSTSVSRPGRGEPR

SEQ ID NO: 20255 - protein, 26 aa, synthetic construct
  REGION 1..26: note = HLA class I histocompatibility antigen, A-23 alpha chain (25-50)
GSHSMRYFSTSVSRPGRGEPRFIAVG

SEQ ID NO: 20256 - protein, 29 aa, synthetic construct
  REGION 1..29: note = HLA class I histocompatibility antigen, A-23 alpha chain (25-53)
GSHSMRYFSTSVSRPGRGEPRFIAVGYVD

SEQ ID NO: 20257 - protein, 30 aa, synthetic construct
  REGION 1..30: note = HLA class I histocompatibility antigen, A-23 alpha chain (25-54)
GSHSMRYFSTSVSRPGRGEPRFIAVGYVDD

SEQ ID NO: 20258 - protein, 36 aa, synthetic construct
  REGION 1..36: note = HLA class I histocompatibility antigen, A-23 alpha chain (25-60)
GSHSMRYFSTSVSRPGRGEPRFIAVGYVDDTQFVRF

SEQ ID NO: 20259 - protein, 37 aa, synthetic construct
  REGION 1..37: note = HLA class I histocompatibility antigen, A-23 alpha chain (25-61)
GSHSMRYFSTSVSRPGRGEPRFIAVGYVDDTQFVRFD

SEQ ID NO: 20260 - protein, 39 aa, synthetic construct
  REGION 1..39: note = HLA class I histocompatibility antigen, A-23 alpha chain (25-63)
GSHSMRYFSTSVSRPGRGEPRFIAVGYVDDTQFVRFDSD

SEQ ID NO: 20261 - protein, 37 aa, synthetic construct
  REGION 1..37: note = HLA class I histocompatibility antigen, B-39 alpha chain (25-61)
GSHSMRYFYTSVSRPGRGEPRFISVGYVDDTQFVRFD

SEQ ID NO: 20262 - protein, 39 aa, synthetic construct
  REGION 1..39: note = HLA class I histocompatibility antigen, B-39 alpha chain (25-63)
GSHSMRYFYTSVSRPGRGEPRFISVGYVDDTQFVRFDSD

SEQ ID NO: 20263 - protein, 8 aa, synthetic construct
  REGION 1..8: note = Inosine-5'-monophosphate dehydrogenase 1 (142-149)
GSKLVGIV

SEQ ID NO: 20264 - protein, 14 aa, synthetic construct
  REGION 1..14: note = Leucine-tRNA ligase, cytoplasmic (286-299)
GSMPELKKYMKKVM

SEQ ID NO: 20265 - protein, 16 aa, synthetic construct
  REGION 1..16: note = Beta-secretase 2 (112-127)
GSSNFAVAGTPHSYID

SEQ ID NO: 20266 - protein, 17 aa, synthetic construct
  REGION 1..17: note = Beta-secretase 2 (112-128)
GSSNFAVAGTPHSYIDT

SEQ ID NO: 20267 - protein, 18 aa, synthetic construct
  REGION 1..18: note = Keratin, type II cytoskeletal 71 (27-44)
GSSSSFRAGSKGLSGGFG

SEQ ID NO: 20268 - protein, 9 aa, synthetic construct
  REGION 1..9: note = PH-interacting protein (339-347)
GSTDHIIRV

SEQ ID NO: 20269 - protein, 9 aa, synthetic construct
  REGION 1..9: note = WD repeat-containing protein 48 (104-112)
GSTEKVLRV

SEQ ID NO: 20270 - protein, 9 aa, synthetic construct
  REGION 1..9: note = Interferon-induced protein with tetratricopeptide repeats 1 (265-273)
GSVDKALEL

SEQ ID NO: 20271 - protein, 9 aa, synthetic construct
  REGION 1..9: note = Polyadenylate-binding protein 2 (223-231)
GSVNRVTIL

SEQ ID NO: 20272 - protein, 11 aa, synthetic construct
  REGION 1..11: note = Immunoglobulin superfamily member 8 (138-148)
GSYSGKVELRV

SEQ ID NO: 20273 - protein, 24 aa, synthetic construct
  REGION 1..24: note = HLA class I histocompatibility antigen, A-23 alpha chain (342-365)
GSYSQAASSDSAQGSDVSLTACKV

SEQ ID NO: 20274 - protein, 24 aa, synthetic construct
  REGION 1..24: note = HLA class I histocompatibility antigen, A-1 alpha chain (317-340)
GSYTQAASSDSAQGSDVSLTACKV

SEQ ID NO: 20275 - protein, 9 aa, synthetic construct
  REGION 1..9: note = Myelin proteolipid protein (19-27)
GTASFFFLY

SEQ ID NO: 20276 - protein, 11 aa, synthetic construct
  REGION 1..11: note = Hemicentin-1 (688-698)
GTDKQNSTLRY

SEQ ID NO: 20277 - protein, 9 aa, synthetic construct
  REGION 1..9: note = Chondroitin sulfate proteoglycan 4 (1612-1620)
GTDPQLLLY

SEQ ID NO: 20278 - protein, 8 aa, synthetic construct
  REGION 1..8: note = Cathepsin F (454-461)
GTDWGEKG

SEQ ID NO: 20279 - protein, 10 aa, synthetic construct
  REGION 1..10: note = Cathepsin F (454-463)
GTDWGEKGYY

SEQ ID NO: 20280 - protein, 11 aa, synthetic construct
  REGION 1..11: note = Cathepsin F (454-464)
GTDWGEKGYYY

SEQ ID NO: 20281 - protein, 9 aa, synthetic construct
  REGION 1..9: note = Cytoplasmic dynein 1 heavy chain 1 (2749-2757)
GTFNRAMLR

SEQ ID NO: 20282 - protein, 31 aa, synthetic construct
  REGION 1..31: note = Nucleoporin p58/p45 (64-94)
GTGLFGSKPATGFTLGGTNTGTPATTSAATT

SEQ ID NO: 20283 - protein, 9 aa, synthetic construct
  REGION 1..9: note = DNA damage-binding protein 1 (702-710)
GTIDEIQKL

SEQ ID NO: 20284 - protein, 10 aa, synthetic construct
  REGION 1..10: note = 60S ribosomal protein L6 (147-156)
GTILIILTGR

SEQ ID NO: 20285 - protein, 13 aa, synthetic construct
  REGION 1..13: note = D-3-phosphoglycerate dehydrogenase (49-61)
GTIQVITQGTSLK

SEQ ID NO: 20286 - protein, 9 aa, synthetic construct
  REGION 1..9: note = Hexokinase-1 (535-543)
GTNFRVLLV

SEQ ID NO: 20287 - protein, 9 aa, synthetic construct
  REGION 1..9: note = Calponin-3 (207-215)
GTNKVASQK

SEQ ID NO: 20288 - protein, 10 aa, synthetic construct
  REGION 1..10: note = Tripeptidyl-peptidase 1 (306-315)
GTPNFPALLK

SEQ ID NO: 20289 - protein, 9 aa, synthetic construct
  REGION 1..9: note = Histone-lysine N-methyltransferase ASH1L (311-319)
GTTAVFINK

SEQ ID NO: 20290 - protein, 9 aa, synthetic construct
  REGION 1..9: note = L-dopachrome tautomerase (301-309)
GTYEGLLRR

SEQ ID NO: 20291 - protein, 44 aa, synthetic construct
  REGION 1..44: note = Cytochrome c oxidase subunit 6C (32-75)
GVAALYKFRVADQRKKAYADFYRNYDVMKDFEEMRKAGIFQSVK

SEQ ID NO: 20292 - protein, 15 aa, synthetic construct
  REGION 1..15: note = Hemicentin-2 (666-680)
GVAPEDAGNYSCQAT

SEQ ID NO: 20293 - protein, 11 aa, synthetic construct
  REGION 1..11: note = Unconventional myosin-Ib (244-254)
GVDDAANFRTV

SEQ ID NO: 20294 - protein, 16 aa, synthetic construct
  REGION 1..16: note = Annexin A2 (50-65)
GVDEVTIVNILTNRSN

SEQ ID NO: 20295 - protein, 18 aa, synthetic construct
  REGION 1..18: note = Annexin A2 (50-67)
GVDEVTIVNILTNRSNAQ

SEQ ID NO: 20296 - protein, 9 aa, synthetic construct
  REGION 1..9: note = Complement C3 (1424-1432)
GVDRYISKY

SEQ ID NO: 20297 - protein, 9 aa, synthetic construct
  REGION 1..9: note = Biotinidase (443-451)
GVFDGLHTV

SEQ ID NO: 20298 - protein, 9 aa, synthetic construct
  REGION 1..9: note = T-cell immunomodulatory protein (25-33)
GVGPVPARA

SEQ ID NO: 20299 - protein, 9 aa, synthetic construct
  REGION 1..9: note = CD109 antigen (187-195)
GVISKTFQL

SEQ ID NO: 20300 - protein, 9 aa, synthetic construct
  REGION 1..9: note = Zinc finger CCCH domain-containing protein 14 (68-76)
GVLDKLRSV

SEQ ID NO: 20301 - protein, 11 aa, synthetic construct
  REGION 1..11: note = Probable E3 ubiquitin-protein ligase HERC1 (3840-3850)
GVLGLNMAPCM

SEQ ID NO: 20302 - protein, 19 aa, synthetic construct
  REGION 1..19: note = Glia-derived nexin (188-206)
GVLTRLVLVNAVYFKGLWK

SEQ ID NO: 20303 - protein, 8 aa, synthetic construct
  REGION 1..8: note = Nucleolar RNA helicase 2 (421-428)
GVLVATNV

SEQ ID NO: 20304 - protein, 13 aa, synthetic construct
  REGION 1..13: note = Neuronal cell adhesion molecule (398-410)
GVPIEIAPDDPSR

SEQ ID NO: 20305 - protein, 14 aa, synthetic construct
  REGION 1..14: note = Neuronal cell adhesion molecule (398-411)
GVPIEIAPDDPSRK

SEQ ID NO: 20306 - protein, 24 aa, synthetic construct
  REGION 1..24: note = Heat shock cognate 71 kDa protein (470-493)
GVPQIEVTFDIDANGILNVSAVDK

SEQ ID NO: 20307 - protein, 34 aa, synthetic construct
  REGION 1..34: note = Apolipoprotein L1 (146-179)
GVQKVHKGTTIANVVSGSLSISSGILTLVGMGLA

SEQ ID NO: 20308 - protein, 9 aa, synthetic construct
  REGION 1..9: note = Ropporin-1B (131-139)
GVTITKTLK

SEQ ID NO: 20309 - protein, 9 aa, synthetic construct
  REGION 1..9: note = Alpha-synuclein (47-55)
GVVHGVATV

SEQ ID NO: 20310 - protein, 10 aa, synthetic construct
  REGION 1..10: note = Melanoma-associated antigen C2 (257-266)
GVYAGREHFV

SEQ ID NO: 20311 - protein, 47 aa, synthetic construct
  REGION 1..47: note = Protein CDV3 homolog (167-213)
GVYRPPGARLTTTRKTPQGPPEIYSDTQFPSLQSTAKHVESRNRYLK

SEQ ID NO: 20312 - protein, 9 aa, synthetic construct
  REGION 1..9: note = Procollagen-lysine,2-oxoglutarate 5-dioxygenase 1 (159-167)
GYAPNLSKL

SEQ ID NO: 20313 - protein, 15 aa, synthetic construct
  REGION 1..15: note = Interferon alpha-inducible protein 6 (116-130)
GYATHKYLDSEEDEE

SEQ ID NO: 20314 - protein, 16 aa, synthetic construct
  REGION 1..16: note = HLA class I histocompatibility antigen, B-44 alpha chain (136-151)
GYDQDAYDGKDYIALN

SEQ ID NO: 20315 - protein, 9 aa, synthetic construct
  REGION 1..9: note = Alpha-parvin (305-313)
GYFVPLHSF

SEQ ID NO: 20316 - protein, 10 aa, synthetic construct
  REGION 1..10: note = Keratin, type II cytoskeletal 3 (100-109)
GYGGGFGGGF

SEQ ID NO: 20317 - protein, 16 aa, synthetic construct
  REGION 1..16: note = HLA class I histocompatibility antigen, A-2 alpha chain (111-126)
GYHQYAYDGKDYIALK

SEQ ID NO: 20318 - protein, 16 aa, synthetic construct
  REGION 1..16: note = Laminin subunit gamma-1 (666-681)
GYLDDVTLASARPGPG

SEQ ID NO: 20319 - protein, 11 aa, synthetic construct
  REGION 1..11: note = Unconventional myosin-XVIIIa (1111-1121)
GYPDHMVFSEF

SEQ ID NO: 20320 - protein, 9 aa, synthetic construct
  REGION 1..9: note = Heterogeneous nuclear ribonucleoprotein U-like protein 1 (231-239)
GYPLTIEGF

SEQ ID NO: 20321 - protein, 10 aa, synthetic construct
  REGION 1..10: note = Spectrin beta chain, non-erythrocytic 1 (189-198)
GYPNVNIHNF

SEQ ID NO: 20322 - protein, 9 aa, synthetic construct
  REGION 1..9: note = FERM domain-containing protein 5 (67-75)
GYSSKFQFF

SEQ ID NO: 20323 - protein, 20 aa, synthetic construct
  REGION 1..20: note = L-lactate dehydrogenase B chain (247-266)
GYTNWAIGLSVADLIESMLK

SEQ ID NO: 20324 - protein, 20 aa, synthetic construct
  REGION 1..20: note = L-lactate dehydrogenase A chain (275-294)
GYTSWAIGLSVADLAESIMK

SEQ ID NO: 20325 - protein, 9 aa, synthetic construct
  REGION 1..9: note = Beta-hexosaminidase subunit alpha (369-377)
GYVVWQEVF

SEQ ID NO: 20326 - protein, 9 aa, synthetic construct
  REGION 1..9: note = Nestin (55-63)
HADDELAAL

SEQ ID NO: 20327 - protein, 9 aa, synthetic construct
  REGION 1..9: note = Centrosomal protein C10orf90 (226-234)
HADDKETSF

SEQ ID NO: 20328 - protein, 9 aa, synthetic construct
  REGION 1..9: note = Sentrin-specific protease 6 (139-147)
HAHAQIPVV

SEQ ID NO: 20329 - protein, 9 aa, synthetic construct
  REGION 1..9: note = Sodium/potassium/calcium exchanger 1 (212-220)
HAITPRTTV

SEQ ID NO: 20330 - protein, 8 aa, synthetic construct
  REGION 1..8: note = Growth/differentiation factor 15 (241-248)
HAQIKTSL

SEQ ID NO: 20331 - protein, 9 aa, synthetic construct
  REGION 1..9: note = Beta-parvin (157-165)
HDLLRPRGW

SEQ ID NO: 20332 - protein, 12 aa, synthetic construct
  REGION 1..12: note = Kinase D-interacting substrate of 220 kDa (21-32)
HEGPPRAPSGYS

SEQ ID NO: 20333 - protein, 9 aa, synthetic construct
  REGION 1..9: note = Sex comb on midleg-like protein 2 (691-699)
HEIDGKALF

SEQ ID NO: 20334 - protein, 9 aa, synthetic construct
  REGION 1..9: note = Aldehyde dehydrogenase family 1 member A3 (41-49)
HESKSGKKF

SEQ ID NO: 20335 - protein, 9 aa, synthetic construct
  REGION 1..9: note = Echinoderm microtubule-associated protein-like 6 (1842-1850)
HEVPLGKQV

SEQ ID NO: 20336 - protein, 6 aa, synthetic construct
  REGION 1..6: note = Leucine-rich repeat-containing protein 42 (71-76)
HFIFTY

SEQ ID NO: 20337 - protein, 15 aa, synthetic construct
  REGION 1..15: note = Laminin subunit gamma-1 (101-115)
HGAAFLTDYNNQADT

SEQ ID NO: 20338 - protein, 16 aa, synthetic construct
  REGION 1..16: note = Laminin subunit gamma-1 (101-116)
HGAAFLTDYNNQADTT

SEQ ID NO: 20339 - protein, 9 aa, synthetic construct
  REGION 1..9: note = Fibrocystin-L (1809-1817)
HHSVSVVVG

SEQ ID NO: 20340 - protein, 9 aa, synthetic construct
  REGION 1..9: note = DIS3-like exonuclease 1 (421-429)
HIADVTHFV

SEQ ID NO: 20341 - protein, 9 aa, synthetic construct
  REGION 1..9: note = Protein arginine N-methyltransferase 3 (190-198)
HIFKDKVVL

SEQ ID NO: 20342 - protein, 9 aa, synthetic construct
  REGION 1..9: note = Carbonic anhydrase 14 (176-184)
HILSHLHEV

SEQ ID NO: 20343 - protein, 9 aa, synthetic construct
  REGION 1..9: note = Coatomer subunit gamma-2 (46-54)
HILTKILYL

SEQ ID NO: 20344 - protein, 9 aa, synthetic construct
  REGION 1..9: note = Chondroitin sulfate proteoglycan 4 (290-298)
HINAHRLEI

SEQ ID NO: 20345 - protein, 7 aa, synthetic construct
  REGION 1..7: note = Mediator of RNA polymerase II transcription subunit 23 (178-184)
HINQIGY

SEQ ID NO: 20346 - protein, 24 aa, synthetic construct
  REGION 1..24: note = Histidine triad nucleotide-binding protein 1 (59-82)
HISQISVAEDDDESLLGHLMIVGK

SEQ ID NO: 20347 - protein, 7 aa, synthetic construct
  REGION 1..7: note = Thymidylate synthase (256-262)
HIYLNHI

SEQ ID NO: 20348 - protein, 9 aa, synthetic construct
  REGION 1..9: note = Vesicle-trafficking protein SEC22c (208-216)
HLAEHSLQV

SEQ ID NO: 20349 - protein, 9 aa, synthetic construct
  REGION 1..9: note = Leucine-rich repeat-containing protein C10orf11 (68-76)
HLAEVTPAL

SEQ ID NO: 20350 - protein, 11 aa, synthetic construct
  REGION 1..11: note = Cytochrome c oxidase subunit 1 (151-161)
HLAGVSSILGA

SEQ ID NO: 20351 - protein, 9 aa, synthetic construct
  REGION 1..9: note = Beta-hexosaminidase subunit beta (59-67)
HLAPENFYI

SEQ ID NO: 20352 - protein, 9 aa, synthetic construct
  REGION 1..9: note = Zinc finger protein 638 (1613-1621)
HLAQALVTV

SEQ ID NO: 20353 - protein, 9 aa, synthetic construct
  REGION 1..9: note = Receptor-interacting serine/threonine-protein kinase 4 (730-738)
HLATVKLLV

SEQ ID NO: 20354 - protein, 9 aa, synthetic construct
  REGION 1..9: note = Unconventional myosin-Ic (1017-1025)
HLAVVAPRL

SEQ ID NO: 20355 - protein, 10 aa, synthetic construct
  REGION 1..10: note = Zinc finger protein 879 (30-39)
HLDSAQRALY

SEQ ID NO: 20356 - protein, 9 aa, synthetic construct
  REGION 1..9: note = Vacuolar protein sorting-associated protein 13C (1304-1312)
HLDSMNVSL

SEQ ID NO: 20357 - protein, 9 aa, synthetic construct
  REGION 1..9: note = Membrane-associated transporter protein (324-332)
HLIGWTAFL

SEQ ID NO: 20358 - protein, 8 aa, synthetic construct
  REGION 1..8: note = Neutral alpha-glucosidase AB (77-84)
HLIHEVTK

SEQ ID NO: 20359 - protein, 9 aa, synthetic construct
  REGION 1..9: note = Polypeptide N-acetylgalactosaminyltransferase 2 (166-174)
HLIKEIILV

SEQ ID NO: 20360 - protein, 11 aa, synthetic construct
  REGION 1..11: note = Myomegalin (201-211)
HLLEEPTSMEV

SEQ ID NO: 20361 - protein, 9 aa, synthetic construct
  REGION 1..9: note = Transmembrane and TPR repeat-containing protein 3 (93-101)
HLLNMIFHA

SEQ ID NO: 20362 - protein, 9 aa, synthetic construct
  REGION 1..9: note = Gamma-tubulin complex component 5 (435-443)
HLLNTLYKA

SEQ ID NO: 20363 - protein, 9 aa, synthetic construct
  REGION 1..9: note = RNA-binding protein EWS (499-507)
HLNGHIKQV

SEQ ID NO: 20364 - protein, 9 aa, synthetic construct
  REGION 1..9: note = Triple functional domain protein (852-860)
HLQAEVKQV

SEQ ID NO: 20365 - protein, 9 aa, synthetic construct
  REGION 1..9: note = Eukaryotic translation initiation factor 3 subunit C-like protein (594-602)
HLQDNIQHA

SEQ ID NO: 20366 - protein, 17 aa, synthetic construct
  REGION 1..17: note = Histone H2A.V (60-76)
HLQLAIRGDEELDSLIK

SEQ ID NO: 20367 - protein, 9 aa, synthetic construct
  REGION 1..9: note = Inhibitor of nuclear factor kappa-B kinase subunit alpha (688-696)
HLSTIIHEA

SEQ ID NO: 20368 - protein, 9 aa, synthetic construct
  REGION 1..9: note = Protein TANC1 (1149-1157)
HLSTVEFLL

SEQ ID NO: 20369 - protein, 9 aa, synthetic construct
  REGION 1..9: note = Pre-mRNA-splicing factor ATP-dependent RNA helicase PRP16 (1008-1016)
HLTYLNVYL

SEQ ID NO: 20370 - protein, 10 aa, synthetic construct
  REGION 1..10: note = ATPase family AAA domain-containing protein 1 (79-88)
HLVDPLNMHV

SEQ ID NO: 20371 - protein, 9 aa, synthetic construct
  REGION 1..9: note = Dedicator of cytokinesis protein 1 (422-430)
HLVDRTTAV

SEQ ID NO: 20372 - protein, 9 aa, synthetic construct
  REGION 1..9: note = Putative inactive carbonic anhydrase 5B-like protein (29-37)
HLVHWNAVK

SEQ ID NO: 20373 - protein, 9 aa, synthetic construct
  REGION 1..9: note = UDP-galactose translocator (109-117)
HLVLFLHEA

SEQ ID NO: 20374 - protein, 9 aa, synthetic construct
  REGION 1..9: note = Tonsoku-like protein (37-45)
HLYEDLFRA

SEQ ID NO: 20375 - protein, 9 aa, synthetic construct
  REGION 1..9: note = Alpha/beta hydrolase domain-containing protein 13 (38-46)
HLYGGIILL

SEQ ID NO: 20376 - protein, 9 aa, synthetic construct
  REGION 1..9: note = Interferon-related developmental regulator 1 (373-381)
HLYNSAAFK

SEQ ID NO: 20377 - protein, 6 aa, synthetic construct
  REGION 1..6: note = Bax inhibitor 1 (94-99)
HMVTHF

SEQ ID NO: 20378 - protein, 9 aa, synthetic construct
  REGION 1..9: note = Eukaryotic translation initiation factor 3 subunit C-like protein (433-441)
HNADQPLRV

SEQ ID NO: 20379 - protein, 15 aa, synthetic construct
  REGION 1..15: note = Tartrate-resistant acid phosphatase type 5 (240-254)
HNLQYLQDENGVGYV

SEQ ID NO: 20380 - protein, 9 aa, synthetic construct
  REGION 1..9: note = GMP synthase (glutamine-hydrolyzing) (555-563)
HNVNRVVYI

SEQ ID NO: 20381 - protein, 8 aa, synthetic construct
  REGION 1..8: note = 60S ribosomal protein L10 (92-99)
HPFHVIRI

SEQ ID NO: 20382 - protein, 9 aa, synthetic construct
  REGION 1..9: note = Protein EURL homolog (214-222)
HPHYSREEL

SEQ ID NO: 20383 - protein, 9 aa, synthetic construct
  REGION 1..9: note = Porphobilinogen deaminase (109-117)
HPKFVGKTL

SEQ ID NO: 20384 - protein, 10 aa, synthetic construct
  REGION 1..10: note = Transmembrane protein 209 (465-474)
HPKYPDGKTF

SEQ ID NO: 20385 - protein, 9 aa, synthetic construct
  REGION 1..9: note = WD repeat-containing protein 43 (361-369)
HPNSAVLMV

SEQ ID NO: 20386 - protein, 8 aa, synthetic construct
  REGION 1..8: note = Angio-associated migratory cell protein (51-58)
HPRAPVLL

SEQ ID NO: 20387 - protein, 8 aa, synthetic construct
  REGION 1..8: note = Microtubule-associated proteins 1A/1B light chain 3B (27-34)
HPTKIPVI

SEQ ID NO: 20388 - protein, 9 aa, synthetic construct
  REGION 1..9: note = Uncharacterized protein C18orf8 (244-252)
HPVLPARSI

SEQ ID NO: 20389 - protein, 9 aa, synthetic construct
  REGION 1..9: note = Melanoma-derived growth regulatory protein (65-73)
HRGQVVYVF

SEQ ID NO: 20390 - protein, 9 aa, synthetic construct
  REGION 1..9: note = Platelet-derived growth factor D (2-10)
HRLIFVYTL

SEQ ID NO: 20391 - protein, 8 aa, synthetic construct
  REGION 1..8: note = Serine protease HTRA1 (143-150)
HRPPVIVL

SEQ ID NO: 20392 - protein, 9 aa, synthetic construct
  REGION 1..9: note = Asparagine synthetase (glutamine-hydrolyzing) (86-94)
HSATPFLKV

SEQ ID NO: 20393 - protein, 8 aa, synthetic construct
  REGION 1..8: note = Histone deacetylase 1 (68-75)
HSDDYIKF

SEQ ID NO: 20394 - protein, 11 aa, synthetic construct
  REGION 1..11: note = Histone-lysine N-methyltransferase NSD3 (877-887)
HSDPMFSSYAY

SEQ ID NO: 20395 - protein, 9 aa, synthetic construct
  REGION 1..9: note = Histone deacetylase 9 (697-705)
HSEHHSLLY

SEQ ID NO: 20396 - protein, 14 aa, synthetic construct
  REGION 1..14: note = Tubulin alpha-1C chain (209-222)
HSFGGGTGSGFTSL

SEQ ID NO: 20397 - protein, 8 aa, synthetic construct
  REGION 1..8: note = Neuropilin-2 (415-422)
HSGIALRL

SEQ ID NO: 20398 - protein, 8 aa, synthetic construct
  REGION 1..8: note = Pre-mRNA-processing factor 19 (391-398)
HSGPITSI

SEQ ID NO: 20399 - protein, 9 aa, synthetic construct
  REGION 1..9: note = Centrosome-associated protein 350 (1116-1124)
HSISIPTKL

SEQ ID NO: 20400 - protein, 9 aa, synthetic construct
  REGION 1..9: note = Serine/threonine-protein kinase MRCK alpha (1363-1371)
HSNDHTLSF

SEQ ID NO: 20401 - protein, 9 aa, synthetic construct
  REGION 1..9: note = Heterogeneous nuclear ribonucleoprotein K (187-195)
HSTDRVVLI

SEQ ID NO: 20402 - protein, 8 aa, synthetic construct
  REGION 1..8: note = COP9 signalosome complex subunit 6 (130-137)
HTDLPVSV

SEQ ID NO: 20403 - protein, 14 aa, synthetic construct
  REGION 1..14: note = Sodium/potassium-transporting ATPase subunit alpha-3 (688-701)
HTEIVFARTSPQQK

SEQ ID NO: 20404 - protein, 15 aa, synthetic construct
  REGION 1..15: note = Sodium/potassium-transporting ATPase subunit alpha-3 (688-702)
HTEIVFARTSPQQKL

SEQ ID NO: 20405 - protein, 14 aa, synthetic construct
  REGION 1..14: note = Tyrosine-protein phosphatase non-receptor type substrate 1 (453-466)
HTEYASIQTSPQPA

SEQ ID NO: 20406 - protein, 9 aa, synthetic construct
  REGION 1..9: note = H(+)/Cl(-) exchange transporter 3 (72-80)
HTIDWVREK

SEQ ID NO: 20407 - protein, 11 aa, synthetic construct
  REGION 1..11: note = Tensin-3 (344-354)
HTQGPVDGSLY

SEQ ID NO: 20408 - protein, 9 aa, synthetic construct
  REGION 1..9: note = Bifunctional glutamate/proline-tRNA ligase (1093-1101)
HVADFAPEV

SEQ ID NO: 20409 - protein, 12 aa, synthetic construct
  REGION 1..12: note = Cytochrome c oxidase subunit 6A1, mitochondrial (75-86)
HVNPLPTGYEDE

SEQ ID NO: 20410 - protein, 16 aa, synthetic construct
  REGION 1..16: note = Beta-2-microglobulin (83-98)
HVTLSQPKIVKWDRDM

SEQ ID NO: 20411 - protein, 6 aa, synthetic construct
  REGION 1..6: note = GPI transamidase component PIG-T (164-169)
HYFLRY

SEQ ID NO: 20412 - protein, 8 aa, synthetic construct
  REGION 1..8: note = Vacuolar protein sorting-associated protein 41 homolog (13-20)
HYGKVYLL

SEQ ID NO: 20413 - protein, 8 aa, synthetic construct
  REGION 1..8: note = Interferon-induced protein with tetratricopeptide repeats 1 (383-390)
HYGRFQEF

SEQ ID NO: 20414 - protein, 9 aa, synthetic construct
  REGION 1..9: note = Transcription factor SOX-10 (387-395)
HYGSAFPSI

SEQ ID NO: 20415 - protein, 9 aa, synthetic construct
  REGION 1..9: note = AF4/FMR2 family member 4 (917-925)
HYLQEAKKL

SEQ ID NO: 20416 - protein, 9 aa, synthetic construct
  REGION 1..9: note = KN motif and ankyrin repeat domain-containing protein 1 (1167-1175)
HYSVSHSNF

SEQ ID NO: 20417 - protein, 9 aa, synthetic construct
  REGION 1..9: note = L-dopachrome tautomerase (189-197)
HYYSVRDTL

SEQ ID NO: 20418 - protein, 8 aa, synthetic construct
  REGION 1..8: note = Brefeldin A-inhibited guanine nucleotide-exchange protein 2 (340-347)
IADDRQSL

SEQ ID NO: 20419 - protein, 9 aa, synthetic construct
  REGION 1..9: note = Tripartite motif-containing protein 44 (270-278)
IADEEQKAL

SEQ ID NO: 20420 - protein, 10 aa, synthetic construct
  REGION 1..10: note = Serine hydroxymethyltransferase, cytosolic (79-88)
IADENGAYLM

SEQ ID NO: 20421 - protein, 9 aa, synthetic construct
  REGION 1..9: note = Vitamin K-dependent gamma-carboxylase (475-483)
IADFPGLHL

SEQ ID NO: 20422 - protein, 9 aa, synthetic construct
  REGION 1..9: note = Chromodomain-helicase-DNA-binding protein 3 (372-380)
IADGGFTEL

SEQ ID NO: 20423 - protein, 8 aa, synthetic construct
  REGION 1..8: note = Probable dimethyladenosine transferase (116-123)
IADKIQQI

SEQ ID NO: 20424 - protein, 8 aa, synthetic construct
  REGION 1..8: note = Mitotic checkpoint serine/threonine-protein kinase BUB1 beta (956-963)
IADLAHLL

SEQ ID NO: 20425 - protein, 9 aa, synthetic construct
  REGION 1..9: note = Gamma-interferon-inducible protein 16 (48-56)
IADLMEEKF

SEQ ID NO: 20426 - protein, 8 aa, synthetic construct
  REGION 1..8: note = Ras association domain-containing protein 5 (335-342)
IADRPLYL

SEQ ID NO: 20427 - protein, 8 aa, synthetic construct
  REGION 1..8: note Dolichyl-diphosphooligosaccharide-proteinosyltransferase subunit 2 (268-275)
IADSHQNF

SEQ ID NO: 20428 - protein, 9 aa, synthetic construct
  REGION 1..9: note = Consortin (202-210)
IAEDPKVFL

SEQ ID NO: 20429 - protein, 9 aa, synthetic construct
  REGION 1..9: note = Eukaryotic translation initiation factor 4 gamma 2 (5-13)
IAEGGASRF

SEQ ID NO: 20430 - protein, 9 aa, synthetic construct
  REGION 1..9: note = Tensin-3 (154-162)
IAFSRPVKY

SEQ ID NO: 20431 - protein, 30 aa, synthetic construct
  REGION 1..30: note = Flavin reductaseADPH) (6-35)
IAIFGATGQTGLTTLAQAVQAGYEVTVLVR

SEQ ID NO: 20432 - protein, 9 aa, synthetic construct
  REGION 1..9: note = Ras GTPase-activating-like protein IQGAP2 (219-227)
IAINEAVEK

SEQ ID NO: 20433 - protein, 9 aa, synthetic construct
  REGION 1..9: note = Ubiquitin carboxyl-terminal hydrolase 15 (259-267)
IAKSYAELI

SEQ ID NO: 20434 - protein, 9 aa, synthetic construct
  REGION 1..9: note = Prolow-density lipoprotein receptor-related protein 1 (1392-1400)
IALDPRDGI

SEQ ID NO: 20435 - protein, 12 aa, synthetic construct
  REGION 1..12: note = Transcription factor Sp1 (551-562)
IANAPGDHGAQL

SEQ ID NO: 20436 - protein, 9 aa, synthetic construct
  REGION 1..9: note Dolichyl-diphosphooligosaccharide-proteinosyltransferase subunit 2 (220-228)
IANTVELRV

SEQ ID NO: 20437 - protein, 14 aa, synthetic construct
  REGION 1..14: note = Solute carrier family 2, facilitated glucose transporter member 1 (21-34)
IAQVFGLDSIMGNK

SEQ ID NO: 20438 - protein, 16 aa, synthetic construct
  REGION 1..16: note = Solute carrier family 2, facilitated glucose transporter member 1 (21-36)
IAQVFGLDSIMGNKDL

SEQ ID NO: 20439 - protein, 8 aa, synthetic construct
  REGION 1..8: note = 60S ribosomal protein L35 (54-61)
IARVLTVI

SEQ ID NO: 20440 - protein, 9 aa, synthetic construct
  REGION 1..9: note = Alpha-actinin-3 (114-122)
IASKGVKLV

SEQ ID NO: 20441 - protein, 9 aa, synthetic construct
  REGION 1..9: note = Derlin-2 (50-58)
IAVGHIYFF

SEQ ID NO: 20442 - protein, 7 aa, synthetic construct
  REGION 1..7: note = Solute carrier family 25 member 35 (138-144)
IAVGHQY

SEQ ID NO: 20443 - protein, 9 aa, synthetic construct
  REGION 1..9: note = Ectonucleoside triphosphate diphosphohydrolase 4 (279-287)
IAYEVPKTV

SEQ ID NO: 20444 - protein, 9 aa, synthetic construct
  REGION 1..9: note = DNA topoisomerase 3-beta-1 (521-529)
ICQRNYVTV

SEQ ID NO: 20445 - protein, 10 aa, synthetic construct
  REGION 1..10: note = Zinc transporter ZIP14 (350-359)
IDGLAIGASF

SEQ ID NO: 20446 - protein, 9 aa, synthetic construct
  REGION 1..9: note = Nucleolin (454-462)
IDGRSISLY

SEQ ID NO: 20447 - protein, 10 aa, synthetic construct
  REGION 1..10: note = Nucleolin (454-463)
IDGRSISLYY

SEQ ID NO: 20448 - protein, 7 aa, synthetic construct
  REGION 1..7: note = Keratin, type II cytoskeletal 1b (179-185)
IDKVRFL

SEQ ID NO: 20449 - protein, 23 aa, synthetic construct
  REGION 1..23: note = Puromycin-sensitive aminopeptidase (305-327)
IDLIAIADFAAGAMENWGLVTYR

SEQ ID NO: 20450 - protein, 9 aa, synthetic construct
  REGION 1..9: note = Prelamin-A/C (80-88)
IDNGKQREF

SEQ ID NO: 20451 - protein, 10 aa, synthetic construct
  REGION 1..10: note = Structural maintenance of chromosomes flexible hinge domain-containing protein 1 (183-192)
IDNGRGMTSK

SEQ ID NO: 20452 - protein, 9 aa, synthetic construct
  REGION 1..9: note = DNA damage-binding protein 1 (794-802)
IDQHTFEVL

SEQ ID NO: 20453 - protein, 7 aa, synthetic construct
  REGION 1..7: note = Pre-mRNA-processing-splicing factor 8 (1380-1386)
IDSQRVW

SEQ ID NO: 20454 - protein, 14 aa, synthetic construct
  REGION 1..14: note = Clathrin heavy chain 1 (1125-1138)
IDSYIKADDPSSYM

SEQ ID NO: 20455 - protein, 15 aa, synthetic construct
  REGION 1..15: note = Clathrin heavy chain 1 (1125-1139)
IDSYIKADDPSSYME

SEQ ID NO: 20456 - protein, 7 aa, synthetic construct
  REGION 1..7: note = Talin-1 (292-298)
IEAKVRY

SEQ ID NO: 20457 - protein, 9 aa, synthetic construct
  REGION 1..9: note = Microtubule-associated protein 4 (17-25)
IEGEIKRDF

SEQ ID NO: 20458 - protein, 9 aa, synthetic construct
  REGION 1..9: note = Actin, cytoplasmic 2 (71-79)
IEHGIVTNW

SEQ ID NO: 20459 - protein, 6 aa, synthetic construct
  REGION 1..6: note = Fatty acid desaturase 2 (352-357)
IEHHLF

SEQ ID NO: 20460 - protein, 7 aa, synthetic construct
  REGION 1..7: note = Programmed cell death protein 5 (93-99)
IEILKKV

SEQ ID NO: 20461 - protein, 9 aa, synthetic construct
  REGION 1..9: note = DnaJ homolog subfamily C member 7 (216-224)
IEKAVQFFV

SEQ ID NO: 20462 - protein, 7 aa, synthetic construct
  REGION 1..7: note = Cysteine-rich protein 2-binding protein (156-162)
IEKHWTF

SEQ ID NO: 20463 - protein, 8 aa, synthetic construct
  REGION 1..8: note = rRNA-processing protein FCF1 homolog (110-117)
IEKLGQKY

SEQ ID NO: 20464 - protein, 10 aa, synthetic construct
  REGION 1..10: note = Lysosomal-trafficking regulator (3604-3613)
IEMETQIHLY

SEQ ID NO: 20465 - protein, 9 aa, synthetic construct
  REGION 1..9: note = Cholinesterase (384-392)
IFFPGVSEF

SEQ ID NO: 20466 - protein, 9 aa, synthetic construct
  REGION 1..9: note = Inositol 1,4,5-trisphosphate receptor type 2 (1770-1778)
IFSEGIFLG

SEQ ID NO: 20467 - protein, 10 aa, synthetic construct
  REGION 1..10: note = E3 ubiquitin-protein ligase UBR4 (2405-2414)
IGASVDPAGV

SEQ ID NO: 20468 - protein, 9 aa, synthetic construct
  REGION 1..9: note = Mannose-6-phosphate isomerase (121-129)
IGDEAATHL

SEQ ID NO: 20469 - protein, 9 aa, synthetic construct
  REGION 1..9: note = Beta-catenin-like protein 1 (430-438)
IGDGRSPEF

SEQ ID NO: 20470 - protein, 9 aa, synthetic construct
  REGION 1..9: note = Fructose-bisphosphate aldolase A (208-216)
IGEHTPSAL

SEQ ID NO: 20471 - protein, 7 aa, synthetic construct
  REGION 1..7: note = 40S ribosomal protein S29 (50-56)
IGFIKLD

SEQ ID NO: 20472 - protein, 8 aa, synthetic construct
  REGION 1..8: note = Transmembrane protein 263 (60-67)
IGGKSLEV

SEQ ID NO: 20473 - protein, 10 aa, synthetic construct
  REGION 1..10: note = RNA-binding Raly-like protein (25-34)
IGNLNTAIVK

SEQ ID NO: 20474 - protein, 10 aa, synthetic construct
  REGION 1..10: note = RNA-binding protein Raly (25-34)
IGNLNTALVK

SEQ ID NO: 20475 - protein, 15 aa, synthetic construct
  REGION 1..15: note = Protocadherin Fat 1 (1606-1620)
IGNSFMIDPVLGSIK

SEQ ID NO: 20476 - protein, 15 aa, synthetic construct
  REGION 1..15: note = Protocadherin Fat 1 (1682-1696)
IGSFVGMVTAHSQSS

SEQ ID NO: 20477 - protein, 8 aa, synthetic construct
  REGION 1..8: note = Cilia- and flagella-associated protein 20 (17-24)
IGSKPLQI

SEQ ID NO: 20478 - protein, 7 aa, synthetic construct
  REGION 1..7: note = Retinoblastoma-like protein 1 (197-203)
IGTPRKF

SEQ ID NO: 20479 - protein, 24 aa, synthetic construct
  REGION 1..24: note = Heterogeneous nuclear ribonucleoprotein U (241-264)
IGWSLTTSGMLLGEEEFSYGYSLK

SEQ ID NO: 20480 - protein, 8 aa, synthetic construct
  REGION 1..8: note = Zinc finger protein 148 (258-265)
IHPPKLVL

SEQ ID NO: 20481 - protein, 9 aa, synthetic construct
  REGION 1..9: note = Trifunctional purine biosynthetic protein adenosine-3 (206-214)
IHPSLLPSF

SEQ ID NO: 20482 - protein, 7 aa, synthetic construct
  REGION 1..7: note = Dedicator of cytokinesis protein 7 (741-747)
IHYVFRL

SEQ ID NO: 20483 - protein, 8 aa, synthetic construct
  REGION 1..8: note = MICOS complex subunit MIC27 (159-166)
IIAKVTAK

SEQ ID NO: 20484 - protein, 8 aa, synthetic construct
  REGION 1..8: note = Protein PRRC2C (1659-1666)
IIDDHPEV

SEQ ID NO: 20485 - protein, 9 aa, synthetic construct
  REGION 1..9: note = 26S protease regulatory subunit 4 (115-123)
IIDDNHAIV

SEQ ID NO: 20486 - protein, 8 aa, synthetic construct
  REGION 1..8: note = Lambda-crystallin homolog (90-97)
IIDDRVIL

SEQ ID NO: 20487 - protein, 9 aa, synthetic construct
  REGION 1..9: note = RANBP2-like and GRIP domain-containing protein 1 (712-720)
IIDDSDSNL

SEQ ID NO: 20488 - protein, 9 aa, synthetic construct
  REGION 1..9: note = Niemann-Pick C1 protein (1094-1102)
IIDDTIFNL

SEQ ID NO: 20489 - protein, 9 aa, synthetic construct
  REGION 1..9: note = Eukaryotic translation initiation factor 3 subunit L (186-194)
IIDEFIYQF

SEQ ID NO: 20490 - protein, 10 aa, synthetic construct
  REGION 1..10: note = UDP-N-acetylhexosamine pyrophosphorylase (491-500)
IIDENGVHEL

SEQ ID NO: 20491 - protein, 9 aa, synthetic construct
  REGION 1..9: note = Serine/threonine-protein kinase Kist (152-160)
IIDHIFASK

SEQ ID NO: 20492 - protein, 9 aa, synthetic construct
  REGION 1..9: note = AP-3 complex subunit mu-2 (190-198)
IIDKSGSTI

SEQ ID NO: 20493 - protein, 9 aa, synthetic construct
  REGION 1..9: note = Caspase recruitment domain-containing protein 19 (143-151)
IIDRHVSRY

SEQ ID NO: 20494 - protein, 8 aa, synthetic construct
  REGION 1..8: note = Double-strand-break repair protein rad21 homolog (444-451)
IIEEPSRL

SEQ ID NO: 20495 - protein, 21 aa, synthetic construct
  REGION 1..21: note = T-complex protein 1 subunit alpha (160-180)
IIGINGDFFANMVVDAVLAIK

SEQ ID NO: 20496 - protein, 9 aa, synthetic construct
  REGION 1..9: note = Ubiquitin-like modifier-activating enzyme 1 (91-99)
IILGGVKAV

SEQ ID NO: 20497 - protein, 9 aa, synthetic construct
  REGION 1..9: note = Transportin-1 (757-765)
IINRPNTPK

SEQ ID NO: 20498 - protein, 9 aa, synthetic construct
  REGION 1..9: note = Far upstream element-binding protein 1 (359-367)
IITDLLRSV

SEQ ID NO: 20499 - protein, 9 aa, synthetic construct
  REGION 1..9: note = Glycerol-3-phosphate acyltransferase 4 (30-38)
IIVPAIFGV

SEQ ID NO: 20500 - protein, 15 aa, synthetic construct
  REGION 1..15: note = Syntaxin-7 (70-84)
IKEFGSLPTTPSEQR

SEQ ID NO: 20501 - protein, 16 aa, synthetic construct
  REGION 1..16: note = Alpha-enolase (26-41)
IKEKYGKDATNVGDEG

SEQ ID NO: 20502 - protein, 7 aa, synthetic construct
  REGION 1..7: note = 26S proteasome non-ATPase regulatory subunit 8 (133-139)
IKHPVSL

SEQ ID NO: 20503 - protein, 11 aa, synthetic construct
  REGION 1..11: note = Keratin, type II cytoskeletal 1 (184-194)
IKSLNNQFASF

SEQ ID NO: 20504 - protein, 10 aa, synthetic construct
  REGION 1..10: note = Synaptojanin-1 (895-904)
IKSSLPENNF

SEQ ID NO: 20505 - protein, 23 aa, synthetic construct
  REGION 1..23: note = Vimentin (444-466)
IKTVETRDGQVINETSQHHDDLE

SEQ ID NO: 20506 - protein, 9 aa, synthetic construct
  REGION 1..9: note = Talin-1 (862-870)
ILADATAKM

SEQ ID NO: 20507 - protein, 10 aa, synthetic construct
  REGION 1..10: note = DNA-dependent protein kinase catalytic subunit (544-553)
ILADEAFFSV

SEQ ID NO: 20508 - protein, 10 aa, synthetic construct
  REGION 1..10: note = Exonuclease 3'-5' domain-containing protein 2 (30-39)
ILADGTILKV

SEQ ID NO: 20509 - protein, 12 aa, synthetic construct
  REGION 1..12: note = Globoside alpha-1,3-N-acetylgalactosaminyltransferase 1 (266-277)
ILADKANGIMAA

SEQ ID NO: 20510 - protein, 11 aa, synthetic construct
  REGION 1..11: note = Catenin alpha-1 (140-150)
ILADMADVYKL

SEQ ID NO: 20511 - protein, 9 aa, synthetic construct
  REGION 1..9: note = Dynactin subunit 3 (87-95)
ILAEEQFIL

SEQ ID NO: 20512 - protein, 9 aa, synthetic construct
  REGION 1..9: note = Transmembrane protein 87A (234-242)
ILAELLSAV

SEQ ID NO: 20513 - protein, 9 aa, synthetic construct
  REGION 1..9: note = Serum paraoxonase/arylesterase 2 (239-247)
ILAHEIHVL

SEQ ID NO: 20514 - protein, 9 aa, synthetic construct
  REGION 1..9: note = Centrosomal protein of 170 kDa protein B (1269-1277)
ILAQEIHDV

SEQ ID NO: 20515 - protein, 9 aa, synthetic construct
  REGION 1..9: note = Unconventional myosin-XV (2127-2135)
ILAQLANQV

SEQ ID NO: 20516 - protein, 9 aa, synthetic construct
  REGION 1..9: note = Multidrug resistance-associated protein 1 (560-568)
ILDAQTAFV

SEQ ID NO: 20517 - protein, 9 aa, synthetic construct
  REGION 1..9: note = Unconventional myosin-Id (455-463)
ILDDACMNV

SEQ ID NO: 20518 - protein, 9 aa, synthetic construct
  REGION 1..9: note = Acyl-CoA synthetase short-chain family member 3, mitochondrial (486-494)
ILDDNMQKL

SEQ ID NO: 20519 - protein, 9 aa, synthetic construct
  REGION 1..9: note = FRAS1-related extracellular matrix protein 1 (98-106)
ILDEDTVKL

SEQ ID NO: 20520 - protein, 9 aa, synthetic construct
  REGION 1..9: note = HEAT repeat-containing protein 1 (1277-1285)
ILDEEKFNV

SEQ ID NO: 20521 - protein, 8 aa, synthetic construct
  REGION 1..8: note = Hemicentin-1 (2341-2348)
ILDEGHIL

SEQ ID NO: 20522 - protein, 10 aa, synthetic construct
  REGION 1..10: note = Hemicentin-1 (2341-2350)
ILDEGHILQL

SEQ ID NO: 20523 - protein, 9 aa, synthetic construct
  REGION 1..9: note = Pleckstrin homology domain-containing family H member 1 (1314-1322)
ILDHNTMQV

SEQ ID NO: 20524 - protein, 9 aa, synthetic construct
  REGION 1..9: note = Mitochondrial tRNA-specific 2-thiouridylase 1 (63-71)
ILDIPFHQV

SEQ ID NO: 20525 - protein, 9 aa, synthetic construct
  REGION 1..9: note = Protein GPR107 (122-130)
ILDISRSEV

SEQ ID NO: 20526 - protein, 8 aa, synthetic construct
  REGION 1..8: note = Heat shock protein HSP 90-beta (496-503)
ILDKKVEK

SEQ ID NO: 20527 - protein, 9 aa, synthetic construct
  REGION 1..9: note = Anthrax toxin receptor 1 (48-56)
ILDKSGSVL

SEQ ID NO: 20528 - protein, 10 aa, synthetic construct
  REGION 1..10: note = UDP-glucose 4-epimerase (67-76)
ILDQGALQRL

SEQ ID NO: 20529 - protein, 11 aa, synthetic construct
  REGION 1..11: note = Pleckstrin homology-like domain family B member 1 (850-860)
ILDSQAGQIRA

SEQ ID NO: 20530 - protein, 9 aa, synthetic construct
  REGION 1..9: note = Chromobox protein homolog 6 (48-56)
ILDSRLIAA

SEQ ID NO: 20531 - protein, 10 aa, synthetic construct
  REGION 1..10: note = Voltage-dependent calcium channel subunit alpha-2/delta-2 (731-740)
ILDTGITQQL

SEQ ID NO: 20532 - protein, 9 aa, synthetic construct
  REGION 1..9: note = Kinesin-like protein KIF1B (1497-1505)
ILDTSVAYV

SEQ ID NO: 20533 - protein, 9 aa, synthetic construct
  REGION 1..9: note = CAP-Gly domain-containing linker protein 4 (12-20)
ILFDPKTSV

SEQ ID NO: 20534 - protein, 9 aa, synthetic construct
  REGION 1..9: note = ATP-binding cassette sub-family A member 13 (826-834)
ILFEINPKL

SEQ ID NO: 20535 - protein, 9 aa, synthetic construct
  REGION 1..9: note = Carbonic anhydrase-related protein (233-241)
ILFRYPLTI

SEQ ID NO: 20536 - protein, 9 aa, synthetic construct
  REGION 1..9: note = Tribbles homolog 1 (150-158)
ILGETKAYV

SEQ ID NO: 20537 - protein, 9 aa, synthetic construct
  REGION 1..9: note = KH domain-containing, RNA-binding, signal transduction-associated protein 1 (176-184)
ILGPQGNTI

SEQ ID NO: 20538 - protein, 8 aa, synthetic construct
  REGION 1..8: note = Epidermal growth factor receptor substrate 15 (164-171)
ILGRVWEL

SEQ ID NO: 20539 - protein, 8 aa, synthetic construct
  REGION 1..8: note = Lecithin retinol acyltransferase (98-105)
ILGVIVKV

SEQ ID NO: 20540 - protein, 37 aa, synthetic construct
  REGION 1..37: note = Glyceraldehyde-3-phosphate dehydrogenase (273-309)
ILGYTEHQVVSSDFNSDTHSSTFDAGAGIALNDHFVK

SEQ ID NO: 20541 - protein, 8 aa, synthetic construct
  REGION 1..8: note = Sperm-associated antigen 7 (80-87)
ILHDVVEV

SEQ ID NO: 20542 - protein, 12 aa, synthetic construct
  REGION 1..12: note = Lysosomal-trafficking regulator (1804-1815)
ILHEIGGTGIFV

SEQ ID NO: 20543 - protein, 9 aa, synthetic construct
  REGION 1..9: note = Coiled-coil domain-containing protein 93 (480-488)
ILHRKIDEV

SEQ ID NO: 20544 - protein, 9 aa, synthetic construct
  REGION 1..9: note = S1 RNA-binding domain-containing protein 1 (186-194)
ILHTDVVYL

SEQ ID NO: 20545 - protein, 9 aa, synthetic construct
  REGION 1..9: note = Prolow-density lipoprotein receptor-related protein 1 (408-416)
ILIEHLYGL

SEQ ID NO: 20546 - protein, 9 aa, synthetic construct
  REGION 1..9: note = Tissue-type plasminogen activator (243-251)
ILIGKVYTA

SEQ ID NO: 20547 - protein, 19 aa, synthetic construct
  REGION 1..19: note = ATP-citrate synthase (337-355)
ILIIGGSIANFTNVAATFK

SEQ ID NO: 20548 - protein, 9 aa, synthetic construct
  REGION 1..9: note = Laminin subunit beta-1 (612-620)
ILIRYEPQL

SEQ ID NO: 20549 - protein, 9 aa, synthetic construct
  REGION 1..9: note = Receptor-interacting serine/threonine-protein kinase 4 (149-157)
ILLDAHYHV

SEQ ID NO: 20550 - protein, 10 aa, synthetic construct
  REGION 1..10: note = CD109 antigen (864-873)
ILLDLTDNRL

SEQ ID NO: 20551 - protein, 9 aa, synthetic construct
  REGION 1..9: note = Lon protease homolog 2, peroxisomal (293-301)
ILLDNDHYA

SEQ ID NO: 20552 - protein, 9 aa, synthetic construct
  REGION 1..9: note = Zinc finger protein basonuclin-1 (109-117)
ILLDRLFSV

SEQ ID NO: 20553 - protein, 9 aa, synthetic construct
  REGION 1..9: note = COP9 signalosome complex subunit 3 (213-221)
ILLGKVQQL

SEQ ID NO: 20554 - protein, 10 aa, synthetic construct
  REGION 1..10: note = T-lymphoma invasion and metastasis-inducing protein 1 (425-434)
ILLTAAQGTV

SEQ ID NO: 20555 - protein, 9 aa, synthetic construct
  REGION 1..9: note = Transcription factor IIIB 90 kDa subunit (434-442)
ILNESEARV

SEQ ID NO: 20556 - protein, 10 aa, synthetic construct
  REGION 1..10: note = G-protein coupled receptor 143 (297-306)
ILNPAQGFLL

SEQ ID NO: 20557 - protein, 9 aa, synthetic construct
  REGION 1..9: note = Adipocyte enhancer-binding protein 1 (945-953)
ILNPGEYRV

SEQ ID NO: 20558 - protein, 9 aa, synthetic construct
  REGION 1..9: note = Kinesin-like protein KIF13B (36-44)
ILNPVNTNL

SEQ ID NO: 20559 - protein, 9 aa, synthetic construct
  REGION 1..9: note = Lysine-specific demethylase 5B (178-186)
ILNPYNLFL

SEQ ID NO: 20560 - protein, 9 aa, synthetic construct
  REGION 1..9: note = Importin-7 (833-841)
ILPAFILLF

SEQ ID NO: 20561 - protein, 11 aa, synthetic construct
  REGION 1..11: note = Lysosome-associated membraneoprotein 1 (248-258)
ILPDARDPAFK

SEQ ID NO: 20562 - protein, 11 aa, synthetic construct
  REGION 1..11: note = Peroxisome biogenesis factor 1 (908-918)
ILPDESKFNMY

SEQ ID NO: 20563 - protein, 9 aa, synthetic construct
  REGION 1..9: note = E3 ubiquitin-protein ligase CBL-B (77-85)
ILPDTYQHL

SEQ ID NO: 20564 - protein, 9 aa, synthetic construct
  REGION 1..9: note = Estradiol 17-beta-dehydrogenase 11 (272-280)
ILPERFLAV

SEQ ID NO: 20565 - protein, 9 aa, synthetic construct
  REGION 1..9: note = E1A-binding protein p400 (1032-1040)
ILPKGSARV

SEQ ID NO: 20566 - protein, 9 aa, synthetic construct
  REGION 1..9: note = LINE-1 retrotransposable element ORF2 protein (817-825)
ILPKVIYRF

SEQ ID NO: 20567 - protein, 9 aa, synthetic construct
  REGION 1..9: note = Aryl hydrocarbon receptor (23-31)
ILPPQLALF

SEQ ID NO: 20568 - protein, 9 aa, synthetic construct
  REGION 1..9: note = Zinc finger and SCAN domain-containing protein 25 (93-101)
ILPREFYAW

SEQ ID NO: 20569 - protein, 9 aa, synthetic construct
  REGION 1..9: note = DDB1- and CUL4-associated factor 4 (318-326)
ILQDEQYLM

SEQ ID NO: 20570 - protein, 9 aa, synthetic construct
  REGION 1..9: note = Zinc finger protein RFP (330-338)
ILSDNLRQV

SEQ ID NO: 20571 - protein, 9 aa, synthetic construct
  REGION 1..9: note = AP2-associated protein kinase 1 (635-643)
ILSDVTHSA

SEQ ID NO: 20572 - protein, 9 aa, synthetic construct
  REGION 1..9: note = Ras GTPase-activating protein 1 (674-682)
ILSELVEKI

SEQ ID NO: 20573 - protein, 9 aa, synthetic construct
  REGION 1..9: note = Mediator of RNA polymerase II transcription subunit 13 (1076-1084)
ILSESVMNL

SEQ ID NO: 20574 - protein, 9 aa, synthetic construct
  REGION 1..9: note = Endoplasmic reticulum metallopeptidase 1 (340-348)
ILTDSIQRA

SEQ ID NO: 20575 - protein, 9 aa, synthetic construct
  REGION 1..9: note = Ankyrin repeat domain-containing protein 17 (886-894)
ILTETQQGL

SEQ ID NO: 20576 - protein, 9 aa, synthetic construct
  REGION 1..9: note = Notchless protein homolog 1 (240-248)
ILTGHTQSV

SEQ ID NO: 20577 - protein, 8 aa, synthetic construct
  REGION 1..8: note = InaD-like protein (50-57)
ILTLQQSI

SEQ ID NO: 20578 - protein, 9 aa, synthetic construct
  REGION 1..9: note = Fibrous sheath-interacting protein 2 (3738-3746)
ILTNNLQLS

SEQ ID NO: 20579 - protein, 9 aa, synthetic construct
  REGION 1..9: note = Midasin (1057-1065)
ILTSSVKLN

SEQ ID NO: 20580 - protein, 9 aa, synthetic construct
  REGION 1..9: note = Spatacsin (642-650)
ILTSYINEL

SEQ ID NO: 20581 - protein, 9 aa, synthetic construct
  REGION 1..9: note = Eukaryotic translation initiation factor 2-alpha kinase 4 (377-385)
ILVEHISGV

SEQ ID NO: 20582 - protein, 9 aa, synthetic construct
  REGION 1..9: note = Plexin-B2 (432-440)
ILVEINKRV

SEQ ID NO: 20583 - protein, 9 aa, synthetic construct
  REGION 1..9: note = Heat shock factor protein 4 (167-175)
ILWREVVTL

SEQ ID NO: 20584 - protein, 9 aa, synthetic construct
  REGION 1..9: note = 1-phosphatidylinositol 4,5-bisphosphate phosphodiesterase gamma-1 (109-117)
ILYGMEFRL

SEQ ID NO: 20585 - protein, 10 aa, synthetic construct
  REGION 1..10: note = 116 kDa U5 small nuclear ribonucleoprotein component (202-211)
IMDTPGHVNF

SEQ ID NO: 20586 - protein, 9 aa, synthetic construct
  REGION 1..9: note = Eukaryotic translation initiation factor 4 gamma 3 (915-923)
IMHDCVVKL

SEQ ID NO: 20587 - protein, 10 aa, synthetic construct
  REGION 1..10: note = Syntenin-1 (269-278)
IMPAFIFEHI

SEQ ID NO: 20588 - protein, 9 aa, synthetic construct
  REGION 1..9: note = CLIP-associating protein 1 (410-418)
IMPTIFNLI

SEQ ID NO: 20589 - protein, 10 aa, synthetic construct
  REGION 1..10: note = Hexokinase-2 (118-127)
IMRGSGTQLF

SEQ ID NO: 20590 - protein, 12 aa, synthetic construct
  REGION 1..12: note = Protein ERGIC-53 (496-507)
IMYRSQQEAAAK

SEQ ID NO: 20591 - protein, 22 aa, synthetic construct
  REGION 1..22: note = T-complex protein 1 subunit eta (413-434)
INALTAASEAACLIVSVDETIK

SEQ ID NO: 20592 - protein, 12 aa, synthetic construct
  REGION 1..12: note = Vimentin (455-466)
INETSQHHDDLE

SEQ ID NO: 20593 - protein, 8 aa, synthetic construct
  REGION 1..8: note = DNA-dependent protein kinase catalytic subunit (866-873)
INKNLLTV

SEQ ID NO: 20594 - protein, 7 aa, synthetic construct
  REGION 1..7: note = Deoxynucleotidyltransferase terminal-interacting protein 2 (255-261)
INKPNFY

SEQ ID NO: 20595 - protein, 11 aa, synthetic construct
  REGION 1..11: note = Pleckstrin homology domain-containing family H member 1 (922-932)
INVPVEAASVD

SEQ ID NO: 20596 - protein, 8 aa, synthetic construct
  REGION 1..8: note = Sodium/potassium-transporting ATPase subunit alpha-1 (2-9)
IPADLRII

SEQ ID NO: 20597 - protein, 10 aa, synthetic construct
  REGION 1..10: note = Far upstream element-binding protein 1 (213-222)
IPASKAGLVI

SEQ ID NO: 20598 - protein, 10 aa, synthetic construct
  REGION 1..10: note = Collagen alpha-1(XV) chain (185-194)
IPFQRSSQAL

SEQ ID NO: 20599 - protein, 15 aa, synthetic construct
  REGION 1..15: note = Leucine-rich repeat-containing G-protein coupled receptor 6 (62-76)
IPGQAFSGLYSLKIL

SEQ ID NO: 20600 - protein, 9 aa, synthetic construct
  REGION 1..9: note = Low-density lipoprotein receptor-related protein 2 (601-609)
IPHPFGVSL

SEQ ID NO: 20601 - protein, 8 aa, synthetic construct
  REGION 1..8: note = BCL-6 corepressor (730-737)
IPHTPIEI

SEQ ID NO: 20602 - protein, 9 aa, synthetic construct
  REGION 1..9: note = Chondroitin sulfate proteoglycan 4 (108-116)
IPHTVVLTV

SEQ ID NO: 20603 - protein, 9 aa, synthetic construct
  REGION 1..9: note = C-syn protooncogene (266-274)
IPRESLQLI

SEQ ID NO: 20604 - protein, 9 aa, synthetic construct
  REGION 1..9: note = Interferon-induced transmembrane protein 10 (62-70)
IPRPPAGSP

SEQ ID NO: 20605 - protein, 9 aa, synthetic construct
  REGION 1..9: note = Basement membrane-specific heparan sulfate proteoglycan core protein (447-455)
IPSHPRVTV

SEQ ID NO: 20606 - protein, 15 aa, synthetic construct
  REGION 1..15: note = E3 ubiquitin-protein ligase RNF13 (145-159)
IPSVFIGESSANSLK

SEQ ID NO: 20607 - protein, 9 aa, synthetic construct
  REGION 1..9: note = Sorbin and SH3 domain-containing protein 2 (262-270)
IPTAIRTTV

SEQ ID NO: 20608 - protein, 9 aa, synthetic construct
  REGION 1..9: note = Procollagen-lysine,2-oxoglutarate 5-dioxygenase 2 (34-42)
IPTDKLLVI

SEQ ID NO: 20609 - protein, 9 aa, synthetic construct
  REGION 1..9: note = Rap1 GTPase-activating protein 1 (28-36)
IPYPSVHEV

SEQ ID NO: 20610 - protein, 9 aa, synthetic construct
  REGION 1..9: note = Spectrin beta chain, non-erythrocytic 1 (579-587)
IQAERVRGV

SEQ ID NO: 20611 - protein, 8 aa, synthetic construct
  REGION 1..8: note = N6-adenosine-methyltransferase 70 kDa subunit (8-15)
IQAHKKQL

SEQ ID NO: 20612 - protein, 10 aa, synthetic construct
  REGION 1..10: note = Potassium/sodium hyperpolarization-activated cyclic nucleotide-gated channel 4 (778-787)
IQAPLQAAAA

SEQ ID NO: 20613 - protein, 9 aa, synthetic construct
  REGION 1..9: note = CCAAT/enhancer-binding protein zeta (255-263)
IQDDAVHTL

SEQ ID NO: 20614 - protein, 14 aa, synthetic construct
  REGION 1..14: note = Beta-2-microglobulin (21-34)
IQRTPKIQVYSRHP

SEQ ID NO: 20615 - protein, 15 aa, synthetic construct
  REGION 1..15: note = Beta-2-microglobulin (21-35)
IQRTPKIQVYSRHPA

SEQ ID NO: 20616 - protein, 17 aa, synthetic construct
  REGION 1..17: note = Beta-2-microglobulin (21-37)
IQRTPKIQVYSRHPAEN

SEQ ID NO: 20617 - protein, 18 aa, synthetic construct
  REGION 1..18: note = Beta-2-microglobulin (21-38)
IQRTPKIQVYSRHPAENG

SEQ ID NO: 20618 - protein, 19 aa, synthetic construct
  REGION 1..19: note = Beta-2-microglobulin (21-39)
IQRTPKIQVYSRHPAENGK

SEQ ID NO: 20619 - protein, 20 aa, synthetic construct
  REGION 1..20: note = Beta-2-microglobulin (1-20)
IQRTPKIQVYSRHPAENGKS

SEQ ID NO: 20620 - protein, 21 aa, synthetic construct
  REGION 1..21: note = Beta-2-microglobulin (1-21)
IQRTPKIQVYSRHPAENGKSN

SEQ ID NO: 20621 - protein, 23 aa, synthetic construct
  REGION 1..23: note = Beta-2-microglobulin (21-43)
IQRTPKIQVYSRHPAENGKSNFL

SEQ ID NO: 20622 - protein, 24 aa, synthetic construct
  REGION 1..24: note = Beta-2-microglobulin (21-44)
IQRTPKIQVYSRHPAENGKSNFLN

SEQ ID NO: 20623 - protein, 9 aa, synthetic construct
  REGION 1..9: note = Hemicentin-1 (876-884)
IQSETTVTV

SEQ ID NO: 20624 - protein, 11 aa, synthetic construct
  REGION 1..11: note = Glia-derived nexin (392-402)
IRHNPTGAVLF

SEQ ID NO: 20625 - protein, 9 aa, synthetic construct
  REGION 1..9: note = Protein wntless homolog (302-310)
IRQGIFYAM

SEQ ID NO: 20626 - protein, 7 aa, synthetic construct
  REGION 1..7: note = Synembryn-B (156-162)
IRSQLRY

SEQ ID NO: 20627 - protein, 9 aa, synthetic construct
  REGION 1..9: note = Clathrin heavy chain 1 (170-178)
ISAQQNRVV

SEQ ID NO: 20628 - protein, 8 aa, synthetic construct
  REGION 1..8: note = HLA class I histocompatibility antigen, B-44 alpha chain (218-225)
ISDHEVTL

SEQ ID NO: 20629 - protein, 9 aa, synthetic construct
  REGION 1..9: note = Integrin-alpha FG-GAP repeat-containing protein 2 (132-140)
ISDIGGHAY

SEQ ID NO: 20630 - protein, 8 aa, synthetic construct
  REGION 1..8: note = Protein arginine N-methyltransferase 1 (112-119)
ISDYAVKI

SEQ ID NO: 20631 - protein, 9 aa, synthetic construct
  REGION 1..9: note = Membrane-associated transporter protein (237-245)
ISEAPLTEV

SEQ ID NO: 20632 - protein, 8 aa, synthetic construct
  REGION 1..8: note = 26S proteasome non-ATPase regulatory subunit 13 (64-71)
ISEFEHRV

SEQ ID NO: 20633 - protein, 7 aa, synthetic construct
  REGION 1..7: note = Cleft lip and palate transmembrane protein 1 (109-115)
ISEHEHF

SEQ ID NO: 20634 - protein, 9 aa, synthetic construct
  REGION 1..9: note = Zinc finger protein ZFPM2 (861-869)
ISFNKVENY

SEQ ID NO: 20635 - protein, 10 aa, synthetic construct
  REGION 1..10: note = Neprilysin (536-545)
ISGAAVVNAF

SEQ ID NO: 20636 - protein, 11 aa, synthetic construct
  REGION 1..11: note = Annexin A2 (214-224)
ISIMTERSVPH

SEQ ID NO: 20637 - protein, 9 aa, synthetic construct
  REGION 1..9: note = Integrin alpha-6 (516-524)
ISIVGTLEA

SEQ ID NO: 20638 - protein, 9 aa, synthetic construct
  REGION 1..9: note = Transcription factor SOX-10 (334-342)
ISKPPGVAL

SEQ ID NO: 20639 - protein, 8 aa, synthetic construct
  REGION 1..8: note = Serine-protein kinase ATM (1999-2006)
ISLQDLLL

SEQ ID NO: 20640 - protein, 15 aa, synthetic construct
  REGION 1..15: note = Glia-derived nexin (263-277)
ISMLIALPTESSTPL

SEQ ID NO: 20641 - protein, 9 aa, synthetic construct
  REGION 1..9: note = Unconventional myosin-XVIIIa (62-70)
ISNPIPIKV

SEQ ID NO: 20642 - protein, 9 aa, synthetic construct
  REGION 1..9: note = Interferon regulatory factor 3 (68-76)
ISNSHPLSL

SEQ ID NO: 20643 - protein, 9 aa, synthetic construct
  REGION 1..9: note = Poly (ADP-ribose) polymerase 14 (310-318)
ISPGRYFLL

SEQ ID NO: 20644 - protein, 16 aa, synthetic construct
  REGION 1..16: note = Disintegrin and metalloproteinase domain-containing protein 10 (189-204)
ISSHVKAIDTIYQTTD

SEQ ID NO: 20645 - protein, 10 aa, synthetic construct
  REGION 1..10: note Dolichyl-diphosphooligosaccharide-proteinosyltransferase subunit 2 (230-239)
ISTEVGITNV

SEQ ID NO: 20646 - protein, 9 aa, synthetic construct
  REGION 1..9: note = Peroxisome biogenesis factor 1 (593-601)
ISTREKLVL

SEQ ID NO: 20647 - protein, 9 aa, synthetic construct
  REGION 1..9: note = Hemicentin-1 (2-10)
ISWEVVHTV

SEQ ID NO: 20648 - protein, 9 aa, synthetic construct
  REGION 1..9: note = UDP-N-acetylhexosamine pyrophosphorylase (463-471)
ITADVNHNL

SEQ ID NO: 20649 - protein, 11 aa, synthetic construct
  REGION 1..11: note = Endoplasmin (418-428)
ITDDFHDMMPK

SEQ ID NO: 20650 - protein, 9 aa, synthetic construct
  REGION 1..9: note = Maltase-glucoamylase (141-149)
ITDFNNIRY

SEQ ID NO: 20651 - protein, 7 aa, synthetic construct
  REGION 1..7: note = Hemicentin-1 (2935-2941)
ITDIGRY

SEQ ID NO: 20652 - protein, 8 aa, synthetic construct
  REGION 1..8: note = Ral GTPase-activating protein subunit beta (1463-1470)
ITDIVNKY

SEQ ID NO: 20653 - protein, 8 aa, synthetic construct
  REGION 1..8: note = Myosin-9 (315-322)
ITDLEERL

SEQ ID NO: 20654 - protein, 9 aa, synthetic construct
  REGION 1..9: note = Protein piccolo (883-891)
ITDLQKEFY

SEQ ID NO: 20655 - protein, 10 aa, synthetic construct
  REGION 1..10: note = Titin (15513-15522)
ITGLTENQEY

SEQ ID NO: 20656 - protein, 9 aa, synthetic construct
  REGION 1..9: note = Leucine-rich repeat-containing protein 34 (306-314)
ITHDGMVYL

SEQ ID NO: 20657 - protein, 8 aa, synthetic construct
  REGION 1..8: note = Titin (14574-14581)
ITKDSVTL

SEQ ID NO: 20658 - protein, 7 aa, synthetic construct
  REGION 1..7: note = Elongation factor 2 (165-171)
ITKGVQY

SEQ ID NO: 20659 - protein, 9 aa, synthetic construct
  REGION 1..9: note = CLIP-associating protein 1 (390-398)
ITLGHLSSV

SEQ ID NO: 20660 - protein, 9 aa, synthetic construct
  REGION 1..9: note = Armadillo repeat-containing X-linked protein 2 (498-506)
ITNDYQHLL

SEQ ID NO: 20661 - protein, 10 aa, synthetic construct
  REGION 1..10: note = Titin (16885-16894)
ITNLTQGEEY

SEQ ID NO: 20662 - protein, 9 aa, synthetic construct
  REGION 1..9: note = Heat shock 70 kDa protein 1-like (299-307)
ITRARFEEL

SEQ ID NO: 20663 - protein, 20 aa, synthetic construct
  REGION 1..20: note = L-lactate dehydrogenase A chain (23-42)
ITVVGVGAVGMACAISILMK

SEQ ID NO: 20664 - protein, 20 aa, synthetic construct
  REGION 1..20: note = L-lactate dehydrogenase B chain (24-43)
ITVVGVGQVGMACAISILGK

SEQ ID NO: 20665 - protein, 9 aa, synthetic construct
  REGION 1..9: note = G protein-coupled receptor kinase 4 (6-14)
IVANSLLLK

SEQ ID NO: 20666 - protein, 9 aa, synthetic construct
  REGION 1..9: note = G protein-coupled receptor kinase 6 (6-14)
IVANTVLLK

SEQ ID NO: 20667 - protein, 9 aa, synthetic construct
  REGION 1..9: note = T-cell surfaceoprotein CD8 beta chain (211-219)
IVCLKISGF

SEQ ID NO: 20668 - protein, 9 aa, synthetic construct
  REGION 1..9: note = Sorting nexin-13 (161-169)
IVDDFGTHL

SEQ ID NO: 20669 - protein, 9 aa, synthetic construct
  REGION 1..9: note = Tripartite motif-containing protein 2 (200-208)
IVDDIHSTF

SEQ ID NO: 20670 - protein, 9 aa, synthetic construct
  REGION 1..9: note = Fibronectin isoform 7 (519-527)
IVDDITYNV

SEQ ID NO: 20671 - protein, 9 aa, synthetic construct
  REGION 1..9: note = U3 small nucleolar ribonucleoprotein protein MPP10 (190-198)
IVDDKFFKL

SEQ ID NO: 20672 - protein, 8 aa, synthetic construct
  REGION 1..8: note = Alpha-actinin-1 (115-122)
IVDGNVKM

SEQ ID NO: 20673 - protein, 10 aa, synthetic construct
  REGION 1..10: note = Methylcrotonoyl-CoA carboxylase beta chain, mitochondrial (300-309)
IVDGSRFTEF

SEQ ID NO: 20674 - protein, 9 aa, synthetic construct
  REGION 1..9: note = Proteasome inhibitor PI31 subunit (209-217)
IVDPLRSGF

SEQ ID NO: 20675 - protein, 9 aa, synthetic construct
  REGION 1..9: note = Neutral amino acid transporter A (156-164)
IVDRTTTVV

SEQ ID NO: 20676 - protein, 9 aa, synthetic construct
  REGION 1..9: note = HMG domain-containing protein 3 (1356-1364)
IVDSKPNGV

SEQ ID NO: 20677 - protein, 9 aa, synthetic construct
  REGION 1..9: note = Synemin (748-756)
IVEEPVSYV

SEQ ID NO: 20678 - protein, 11 aa, synthetic construct
  REGION 1..11: note = Glia-derived nexin (63-73)
IVISPHGIASV

SEQ ID NO: 20679 - protein, 12 aa, synthetic construct
  REGION 1..12: note = Sterol regulatory element-binding protein 2 (1129-1140)
IVKLGGGTAIAA

SEQ ID NO: 20680 - protein, 17 aa, synthetic construct
  REGION 1..17: note = Melanoma-associated antigen 4 (205-221)
IVLGTIAMEGDSASEEE

SEQ ID NO: 20681 - protein, 9 aa, synthetic construct
  REGION 1..9: note = Elongator complex protein 4 (107-115)
IVNGHTLLV

SEQ ID NO: 20682 - protein, 10 aa, synthetic construct
  REGION 1..10: note = Rho guanine nucleotide exchange factor 2 (500-509)
IVRDIANQEK

SEQ ID NO: 20683 - protein, 9 aa, synthetic construct
  REGION 1..9: note = Cytoplasmic dynein 1 heavy chain 1 (1043-1051)
IVSEVEQYV

SEQ ID NO: 20684 - protein, 14 aa, synthetic construct
  REGION 1..14: note = Glia-derived nexin (119-132)
IVTVANAVFVKNAS

SEQ ID NO: 20685 - protein, 10 aa, synthetic construct
  REGION 1..10: note = Neuropilin-2 (58-67)
IVYAPEPNQK

SEQ ID NO: 20686 - protein, 9 aa, synthetic construct
  REGION 1..9: note = Mitochondrial calcium uniporter regulator 1 (3-11)
IVYKDMVTK

SEQ ID NO: 20687 - protein, 9 aa, synthetic construct
  REGION 1..9: note = Transmembrane emp24 domain-containing protein 5 (5-13)
IWLPFPVLL

SEQ ID NO: 20688 - protein, 9 aa, synthetic construct
  REGION 1..9: note = Unconventional myosin-Va (407-415)
IYAKLFNWI

SEQ ID NO: 20689 - protein, 9 aa, synthetic construct
  REGION 1..9: note = Alpha-soluble NSF attachment protein (44-52)
IYARAANMF

SEQ ID NO: 20690 - protein, 9 aa, synthetic construct
  REGION 1..9: note = DNA polymerase delta subunit 2 (88-96)
IYATRLIQM

SEQ ID NO: 20691 - protein, 8 aa, synthetic construct
  REGION 1..8: note = 39S ribosomal protein L20, mitochondrial (107-114)
IYEPKTFK

SEQ ID NO: 20692 - protein, 9 aa, synthetic construct
  REGION 1..9: note = V-type proton ATPase 116 kDa subunit a isoform 1 (560-568)
IYFKKPLNI

SEQ ID NO: 20693 - protein, 11 aa, synthetic construct
  REGION 1..11: note = Antizyme inhibitor 1 (258-268)
IYFPEGSGVKI

SEQ ID NO: 20694 - protein, 10 aa, synthetic construct
  REGION 1..10: note = Protein disulfide-isomerase A3 (453-462)
IYFSPANKKL

SEQ ID NO: 20695 - protein, 8 aa, synthetic construct
  REGION 1..8: note = Zinc finger protein 382 (116-123)
IYGKTFTL

SEQ ID NO: 20696 - protein, 9 aa, synthetic construct
  REGION 1..9: note = Protein kinase C and casein kinase substrate in neurons protein 2 (266-274)
IYHDLEQSI

SEQ ID NO: 20697 - protein, 9 aa, synthetic construct
  REGION 1..9: note = Ubiquitin-conjugating enzyme E2 N (75-83)
IYHPNVDKL

SEQ ID NO: 20698 - protein, 9 aa, synthetic construct
  REGION 1..9: note = Diacylglycerol kinase zeta (748-756)
IYILDPELL

SEQ ID NO: 20699 - protein, 9 aa, synthetic construct
  REGION 1..9: note = Lysosomal protective protein (183-191)
IYIPTLAVL

SEQ ID NO: 20700 - protein, 9 aa, synthetic construct
  REGION 1..9: note = Protein unc-119 homolog A (83-91)
IYKIDFVRF

SEQ ID NO: 20701 - protein, 10 aa, synthetic construct
  REGION 1..10: note = Alpha-2-macroglobulin (162-171)
IYKPGQTVKF

SEQ ID NO: 20702 - protein, 9 aa, synthetic construct
  REGION 1..9: note = Tubby-related protein 4 (640-648)
IYLPEVRKI

SEQ ID NO: 20703 - protein, 9 aa, synthetic construct
  REGION 1..9: note = Alpha-adducin (165-173)
IYNHITTRV

SEQ ID NO: 20704 - protein, 9 aa, synthetic construct
  REGION 1..9: note = Sprouty-related, EVH1 domain-containing protein 1 (81-89)
IYNKVTPTF

SEQ ID NO: 20705 - protein, 9 aa, synthetic construct
  REGION 1..9: note = Serine-protein kinase ATM (1147-1155)
IYNRKSVLL

SEQ ID NO: 20706 - protein, 9 aa, synthetic construct
  REGION 1..9: note = Spermine synthase (46-54)
IYPHGLVLL

SEQ ID NO: 20707 - protein, 9 aa, synthetic construct
  REGION 1..9: note = E3 ubiquitin-protein ligase RNF213 (3834-3842)
IYPQVLHSL

SEQ ID NO: 20708 - protein, 10 aa, synthetic construct
  REGION 1..10: note = Nuclear fragile X mental retardation-interacting protein 2 (473-482)
IYPSNMQTML

SEQ ID NO: 20709 - protein, 9 aa, synthetic construct
  REGION 1..9: note = Zinc finger protein castor homolog 1 (463-471)
IYQKYIARF

SEQ ID NO: 20710 - protein, 9 aa, synthetic construct
  REGION 1..9: note = Renin receptor (327-335)
IYRMTNQKI

SEQ ID NO: 20711 - protein, 9 aa, synthetic construct
  REGION 1..9: note = Pericentriolar material 1 protein (1385-1393)
IYSEVATLI

SEQ ID NO: 20712 - protein, 11 aa, synthetic construct
  REGION 1..11: note = Perilipin-2 (353-363)
IYSVFRNAASF

SEQ ID NO: 20713 - protein, 9 aa, synthetic construct
  REGION 1..9: note = Poly (ADP-ribose) polymerase 14 (1584-1592)
IYTHGNHSL

SEQ ID NO: 20714 - protein, 9 aa, synthetic construct
  REGION 1..9: note = Transmembraneoprotein NMB (174-182)
IYVFHTLGW

SEQ ID NO: 20715 - protein, 9 aa, synthetic construct
  REGION 1..9: note = Protein-methionine sulfoxide oxidase MICAL3 (1990-1998)
IYVPHALAF

SEQ ID NO: 20716 - protein, 9 aa, synthetic construct
  REGION 1..9: note = Clathrin heavy chain 1 (1130-1138)
KADDPSSYM

SEQ ID NO: 20717 - protein, 11 aa, synthetic construct
  REGION 1..11: note = L-dopachrome tautomerase (356-366)
KADGTLDSQVM

SEQ ID NO: 20718 - protein, 9 aa, synthetic construct
  REGION 1..9: note = Activating signal cointegrator 1 complex subunit 2 (32-40)
KADRYFVLY

SEQ ID NO: 20719 - protein, 9 aa, synthetic construct
  REGION 1..9: note = Lupus La protein (148-156)
KAFKGSIFV

SEQ ID NO: 20720 - protein, 9 aa, synthetic construct
  REGION 1..9: note = Neuronal PAS domain-containing protein 3 (509-517)
KAGEDGFGA

SEQ ID NO: 20721 - protein, 9 aa, synthetic construct
  REGION 1..9: note = Filamin-A (2252-2260)
KAGNNMLLV

SEQ ID NO: 20722 - protein, 9 aa, synthetic construct
  REGION 1..9: note = Alpha-soluble NSF attachment protein (180-188)
KAIDIYEQV

SEQ ID NO: 20723 - protein, 9 aa, synthetic construct
  REGION 1..9: note = Phosphorylase b kinase regulatory subunit beta (81-89)
KAKIQDSLY

SEQ ID NO: 20724 - protein, 11 aa, synthetic construct
  REGION 1..11: note = Vacuolar protein sorting-associated protein 13A (1058-1068)
KALVGGAVGGL

SEQ ID NO: 20725 - protein, 11 aa, synthetic construct
  REGION 1..11: note = Zinc finger homeobox protein 3 (2172-2182)
KANEVLGLAAQ

SEQ ID NO: 20726 - protein, 18 aa, synthetic construct
  REGION 1..18: note = Bifunctional glutamate/proline-tRNA ligase (778-795)
KAPKEDVDAAVKQLLSLK

SEQ ID NO: 20727 - protein, 9 aa, synthetic construct
  REGION 1..9: note = Treacle protein (215-223)
KASEKILQV

SEQ ID NO: 20728 - protein, 10 aa, synthetic construct
  REGION 1..10: note = Cytoplasmic dynein 1 heavy chain 1 (1729-1738)
KATSIDPNTY

SEQ ID NO: 20729 - protein, 9 aa, synthetic construct
  REGION 1..9: note = Tubulin alpha-1A chain (171-179)
KAYHEQLSV

SEQ ID NO: 20730 - protein, 10 aa, synthetic construct
  REGION 1..10: note = UDP-N-acetylhexosamine pyrophosphorylase-like protein 1 (151-160)
KAYPEEPVGV

SEQ ID NO: 20731 - protein, 25 aa, synthetic construct
  REGION 1..25: note = Beta-2-microglobulin (74-98)
KDEYACRVNHVTLSQPKIVKWDRDM

SEQ ID NO: 20732 - protein, 15 aa, synthetic construct
  REGION 1..15: note = Glia-derived nexin (117-131)
KDIVTVANAVFVKNA

SEQ ID NO: 20733 - protein, 16 aa, synthetic construct
  REGION 1..16: note = Glia-derived nexin (117-132)
KDIVTVANAVFVKNAS

SEQ ID NO: 20734 - protein, 9 aa, synthetic construct
  REGION 1..9: note = Serine-protein kinase ATM (129-137)
KDSSNGAIY

SEQ ID NO: 20735 - protein, 9 aa, synthetic construct
  REGION 1..9: note = E3 ubiquitin-protein ligase RNF213 (4774-4782)
KEAELRLVK

SEQ ID NO: 20736 - protein, 9 aa, synthetic construct
  REGION 1..9: note = Neuron navigator 2 (1035-1043)
KEDSRPHLF

SEQ ID NO: 20737 - protein, 10 aa, synthetic construct
  REGION 1..10: note = Multidrug resistance-associated protein 7 (836-845)
KEGAVALHVY

SEQ ID NO: 20738 - protein, 10 aa, synthetic construct
  REGION 1..10: note = Hemicentin-1 (4939-4948)
KEIGEAVNGF

SEQ ID NO: 20739 - protein, 9 aa, synthetic construct
  REGION 1..9: note = Synemin (925-933)
KEIKIPHEF

SEQ ID NO: 20740 - protein, 10 aa, synthetic construct
  REGION 1..10: note = Annexin A1 (147-156)
KEIRDINRVY

SEQ ID NO: 20741 - protein, 9 aa, synthetic construct
  REGION 1..9: note = Probable global transcription activator SNF2L1 (774-782)
KEKLLTQGF

SEQ ID NO: 20742 - protein, 19 aa, synthetic construct
  REGION 1..19: note = Protein FAM208B (1764-1782)
KENLSKEPLASFVSESFDT

SEQ ID NO: 20743 - protein, 9 aa, synthetic construct
  REGION 1..9: note = Cullin-4B (885-893)
KENPNQYNY

SEQ ID NO: 20744 - protein, 23 aa, synthetic construct
  REGION 1..23: note = 60S ribosomal protein L18 (16-38)
KEPKSQDIYLRLLVKLYRFLARR

SEQ ID NO: 20745 - protein, 10 aa, synthetic construct
  REGION 1..10: note = Melanoma-associated antigen 10 (192-201)
KEVDPTGHSF

SEQ ID NO: 20746 - protein, 10 aa, synthetic construct
  REGION 1..10: note = Melanoma-associated antigen 11 (251-260)
KEVDPTSHSY

SEQ ID NO: 20747 - protein, 10 aa, synthetic construct
  REGION 1..10: note = Melanoma-associated antigen 4 (168-177)
KEVDPTSNTY

SEQ ID NO: 20748 - protein, 19 aa, synthetic construct
  REGION 1..19: note = ATP-dependent RNA helicase A (392-410)
KFESEILEAISQNSVVIIR

SEQ ID NO: 20749 - protein, 10 aa, synthetic construct
  REGION 1..10: note = ATP synthase-coupling factor 6, mitochondrial (99-108)
KFEVIEKPQA

SEQ ID NO: 20750 - protein, 14 aa, synthetic construct
  REGION 1..14: note = B-cell CLL/lymphoma 9 protein (45-58)
KFSNQGKQGGSASQ

SEQ ID NO: 20751 - protein, 9 aa, synthetic construct
  REGION 1..9: note = Collagen alpha-1(IV) chain (238-246)
KFSTMPFLF

SEQ ID NO: 20752 - protein, 9 aa, synthetic construct
  REGION 1..9: note = Protein diaphanous homolog 2 (949-957)
KFVEKMTSF

SEQ ID NO: 20753 - protein, 10 aa, synthetic construct
  REGION 1..10: note = V-type proton ATPase 116 kDa subunit a isoform 1 (813-822)
KFYSGTGFKF

SEQ ID NO: 20754 - protein, 20 aa, synthetic construct
  REGION 1..20: note = Collagen alpha-2(I) chain (441-460)
KGEPGVVGAVGTAGPSGPSG

SEQ ID NO: 20755 - protein, 16 aa, synthetic construct
  REGION 1..16: note = Calpain small subunit 1 (9-24)
KGGGGGGGGGGGLGGG

SEQ ID NO: 20756 - protein, 26 aa, synthetic construct
  REGION 1..26: note = HLA class I histocompatibility antigen, A-23 alpha chain (340-365)
KGGSYSQAASSDSAQGSDVSLTACKV

SEQ ID NO: 20757 - protein, 26 aa, synthetic construct
  REGION 1..26: note = HLA class I histocompatibility antigen, A-1 alpha chain (315-340)
KGGSYTQAASSDSAQGSDVSLTACKV

SEQ ID NO: 20758 - protein, 38 aa, synthetic construct
  REGION 1..38: note = Cytochrome c oxidase subunit 7A2, mitochondrial (46-83)
KGGVADALLYRATMILTVGGTAYAIYELAVASFPKKQE

SEQ ID NO: 20759 - protein, 10 aa, synthetic construct
  REGION 1..10: note = Nebulin (852-861)
KGKMIGALSI

SEQ ID NO: 20760 - protein, 10 aa, synthetic construct
  REGION 1..10: note = Fatty acid synthase (2391-2400)
KGLEERVAAA

SEQ ID NO: 20761 - protein, 9 aa, synthetic construct
  REGION 1..9: note = E3 ubiquitin-protein ligase HUWE1 (1718-1726)
KGNDTPLAL

SEQ ID NO: 20762 - protein, 9 aa, synthetic construct
  REGION 1..9: note = Vigilin (314-322)
KGNSLQEIL

SEQ ID NO: 20763 - protein, 8 aa, synthetic construct
  REGION 1..8: note = UDP-glucose:glycoprotein glucosyltransferase 1 (1055-1062)
KGPIAKFL

SEQ ID NO: 20764 - protein, 9 aa, synthetic construct
  REGION 1..9: note = Serine/arginine-rich splicing factor 4 (23-31)
KGYGKILEV

SEQ ID NO: 20765 - protein, 25 aa, synthetic construct
  REGION 1..25: note = Histidine triad nucleotide-binding protein 1 (58-82)
KHISQISVAEDDDESLLGHLMIVGK

SEQ ID NO: 20766 - protein, 8 aa, synthetic construct
  REGION 1..8: note = Trabeculin-alpha (4579-4586)
KHKEFQKT

SEQ ID NO: 20767 - protein, 9 aa, synthetic construct
  REGION 1..9: note = Unconventional myosin-VIIa (1948-1956)
KIADKVLSV

SEQ ID NO: 20768 - protein, 7 aa, synthetic construct
  REGION 1..7: note = LIM domain transcription factor LMO4 (29-35)
KIADRFL

SEQ ID NO: 20769 - protein, 10 aa, synthetic construct
  REGION 1..10: note = MICOS complex subunit MIC60 (45-54)
KIAGAGLLFV

SEQ ID NO: 20770 - protein, 12 aa, synthetic construct
  REGION 1..12: note = Calcium-binding mitochondrial carrier protein SCaMC-2 (252-263)
KIAPESAIKFMA

SEQ ID NO: 20771 - protein, 9 aa, synthetic construct
  REGION 1..9: note = Protein TASOR (673-681)
KIASNPLER

SEQ ID NO: 20772 - protein, 9 aa, synthetic construct
  REGION 1..9: note = UV excision repair protein RAD23 homolog B (42-50)
KIDEKNFVV

SEQ ID NO: 20773 - protein, 9 aa, synthetic construct
  REGION 1..9: note = RNA-binding protein 5 (302-310)
KIDGKTIGV

SEQ ID NO: 20774 - protein, 9 aa, synthetic construct
  REGION 1..9: note = 26S protease regulatory subunit 7 (156-164)
KIDPTVTMM

SEQ ID NO: 20775 - protein, 11 aa, synthetic construct
  REGION 1..11: note = 26S protease regulatory subunit 7 (156-166)
KIDPTVTMMQV

SEQ ID NO: 20776 - protein, 9 aa, synthetic construct
  REGION 1..9: note = Thioredoxin reductase 1, cytoplasmic (299-307)
KIGLETVGV

SEQ ID NO: 20777 - protein, 10 aa, synthetic construct
  REGION 1..10: note = 1-phosphatidylinositol 4,5-bisphosphate phosphodiesterase gamma-1 (969-978)
KIGTERACYR

SEQ ID NO: 20778 - protein, 8 aa, synthetic construct
  REGION 1..8: note = Heat shock protein 105 kDa (711-718)
KIGTPVKV

SEQ ID NO: 20779 - protein, 10 aa, synthetic construct
  REGION 1..10: note = Pleckstrin homology domain-containing family G member 3 (122-131)
KIIDTPGLLK

SEQ ID NO: 20780 - protein, 9 aa, synthetic construct
  REGION 1..9: note = Unconventional myosin-Id (269-277)
KILAAILHL

SEQ ID NO: 20781 - protein, 10 aa, synthetic construct
  REGION 1..10: note = Kinesin-like protein KIF1B (1496-1505)
KILDTSVAYV

SEQ ID NO: 20782 - protein, 9 aa, synthetic construct
  REGION 1..9: note = 28S ribosomal protein S2, mitochondrial (61-69)
KILNEPLKH

SEQ ID NO: 20783 - protein, 11 aa, synthetic construct
  REGION 1..11: note = D-3-phosphoglycerate dehydrogenase (21-31)
KILQDGGLQVV

SEQ ID NO: 20784 - protein, 9 aa, synthetic construct
  REGION 1..9: note = Endothelial differentiation-related factor 1 (98-106)
KINEKPQVI

SEQ ID NO: 20785 - protein, 9 aa, synthetic construct
  REGION 1..9: note = Upstream stimulatory factor 2 (138-146)
KINNWIVQL

SEQ ID NO: 20786 - protein, 9 aa, synthetic construct
  REGION 1..9: note = Sodium/potassium/calcium exchanger 5 (219-227)
KINQYIIKK

SEQ ID NO: 20787 - protein, 9 aa, synthetic construct
  REGION 1..9: note = Protein sidekick-1 (309-317)
KIQGLSSLT

SEQ ID NO: 20788 - protein, 9 aa, synthetic construct
  REGION 1..9: note = Keratinocyte-associated protein 2 (136-144)
KISSTLYQA

SEQ ID NO: 20789 - protein, 11 aa, synthetic construct
  REGION 1..11: note Dolichyl-diphosphooligosaccharide-proteinosyltransferase subunit 2 (368-378)
KISTEVGITNV

SEQ ID NO: 20790 - protein, 11 aa, synthetic construct
  REGION 1..11: note = Melanoma-associated antigen 6 (220-230)
KIWEELSVLEV

SEQ ID NO: 20791 - protein, 11 aa, synthetic construct
  REGION 1..11: note = Ras GTPase-activating-like protein IQGAP1 (94-104)
KIYDREQTRYK

SEQ ID NO: 20792 - protein, 9 aa, synthetic construct
  REGION 1..9: note = NADH dehydrogenase (ubiquinone) 1 beta subcomplex subunit 5, mitochondrial (79-87)
KIYERTMAV

SEQ ID NO: 20793 - protein, 8 aa, synthetic construct
  REGION 1..8: note = Lariat debranching enzyme (72-79)
KKAPVLTL

SEQ ID NO: 20794 - protein, 8 aa, synthetic construct
  REGION 1..8: note = Myc proto-oncogene protein (412-419)
KKATAYIL

SEQ ID NO: 20795 - protein, 9 aa, synthetic construct
  REGION 1..9: note = Zinc phosphodiesterase ELAC protein 2 (366-374)
KKEGPTLSV

SEQ ID NO: 20796 - protein, 16 aa, synthetic construct
  REGION 1..16: note = Serum albumin (437-452)
KKVPQVSTPTLVEVSR

SEQ ID NO: 20797 - protein, 9 aa, synthetic construct
  REGION 1..9: note = Nuclear mitotic apparatus protein 1 (1-9)
KLADDLSTL

SEQ ID NO: 20798 - protein, 9 aa, synthetic construct
  REGION 1..9: note = SNW domain-containing protein 1 (28-36)
KLAEALYIA

SEQ ID NO: 20799 - protein, 9 aa, synthetic construct
  REGION 1..9: note = Vesicle transport protein USE1 (171-179)
KLAEEMLGL

SEQ ID NO: 20800 - protein, 9 aa, synthetic construct
  REGION 1..9: note = SLIT-ROBO Rho GTPase-activating protein 2C (69-77)
KLAEHFLAK

SEQ ID NO: 20801 - protein, 9 aa, synthetic construct
  REGION 1..9: note = Plexin-A3 (55-63)
KLAPNLTEL

SEQ ID NO: 20802 - protein, 9 aa, synthetic construct
  REGION 1..9: note = Peroxisome biogenesis factor 1 (411-419)
KLDAHVERV

SEQ ID NO: 20803 - protein, 9 aa, synthetic construct
  REGION 1..9: note = Probable helicase with zinc finger domain (944-952)
KLDDGSIGV

SEQ ID NO: 20804 - protein, 9 aa, synthetic construct
  REGION 1..9: note = Afadin (391-399)
KLDDNSIQL

SEQ ID NO: 20805 - protein, 9 aa, synthetic construct
  REGION 1..9: note = E3 ubiquitin-protein ligase RNF139 (456-464)
KLDDYVYYV

SEQ ID NO: 20806 - protein, 9 aa, synthetic construct
  REGION 1..9: note = Transcriptional regulator ATRX (1499-1507)
KLDFSTALV

SEQ ID NO: 20807 - protein, 9 aa, synthetic construct
  REGION 1..9: note = Probable ATP-dependent RNA helicase DHX58 (177-185)
KLDGAINHV

SEQ ID NO: 20808 - protein, 9 aa, synthetic construct
  REGION 1..9: note = Serine/threonine-protein kinase Sgk3 (115-123)
KLDGKFYAV

SEQ ID NO: 20809 - protein, 9 aa, synthetic construct
  REGION 1..9: note = Inter-alpha-trypsin inhibitor heavy chain H5 (522-530)
KLDHLHVEV

SEQ ID NO: 20810 - protein, 9 aa, synthetic construct
  REGION 1..9: note = Kin of IRRE-like protein 1 (435-443)
KLDIKVETV

SEQ ID NO: 20811 - protein, 9 aa, synthetic construct
  REGION 1..9: note = Tectonic-1 (198-206)
KLDIPTAAK

SEQ ID NO: 20812 - protein, 10 aa, synthetic construct
  REGION 1..10: note = Lactoperoxidase (313-322)
KLDLSPWASV

SEQ ID NO: 20813 - protein, 9 aa, synthetic construct
  REGION 1..9: note = WD repeat-containing protein 26 (306-314)
KLDNNLDSV

SEQ ID NO: 20814 - protein, 9 aa, synthetic construct
  REGION 1..9: note = Cytoplasmic dynein 1 heavy chain 1 (828-836)
KLDPYVQRL

SEQ ID NO: 20815 - protein, 9 aa, synthetic construct
  REGION 1..9: note = cAMP-dependent protein kinase type I-beta regulatory subunit (349-357)
KLDRPRFER

SEQ ID NO: 20816 - protein, 11 aa, synthetic construct
  REGION 1..11: note = SH3 domain-binding protein 4 (249-259)
KLDSSGGAVQL

SEQ ID NO: 20817 - protein, 9 aa, synthetic construct
  REGION 1..9: note = Eukaryotic initiation factor 4A-II (260-268)
KLDTLCDLY

SEQ ID NO: 20818 - protein, 10 aa, synthetic construct
  REGION 1..10: note = Eukaryotic translation initiation factor 3 subunit I (213-222)
KLFDSTTLEH

SEQ ID NO: 20819 - protein, 9 aa, synthetic construct
  REGION 1..9: note = Centromere protein R (110-118)
KLFEKSTGL

SEQ ID NO: 20820 - protein, 9 aa, synthetic construct
  REGION 1..9: note = Protein kinase C delta type (581-589)
KLFEREPTK

SEQ ID NO: 20821 - protein, 9 aa, synthetic construct
  REGION 1..9: note = Nucleolar complex protein 2 homolog (168-176)
KLFHEVVQA

SEQ ID NO: 20822 - protein, 10 aa, synthetic construct
  REGION 1..10: note = Unconventional myosin-Va (410-419)
KLFNWIVDNV

SEQ ID NO: 20823 - protein, 9 aa, synthetic construct
  REGION 1..9: note = Constitutive coactivator of PPAR-gamma-like protein 1 (805-813)
KLFQSKLLK

SEQ ID NO: 20824 - protein, 10 aa, synthetic construct
  REGION 1..10: note = GTPase-activating protein and VPS9 domain-containing protein 1 (42-51)
KLFSEGLFSA

SEQ ID NO: 20825 - protein, 8 aa, synthetic construct
  REGION 1..8: note = Pleckstrin homology domain-containing family M member 2 (338-345)
KLGDISAV

SEQ ID NO: 20826 - protein, 9 aa, synthetic construct
  REGION 1..9: note = Atrial natriuretic peptide receptor 2 (148-156)
KLGEFVVTL

SEQ ID NO: 20827 - protein, 8 aa, synthetic construct
  REGION 1..8: note = Destrin (151-158)
KLGGSLIV

SEQ ID NO: 20828 - protein, 8 aa, synthetic construct
  REGION 1..8: note = Transformation/transcription domain-associated protein (1157-1164)
KLGGVVSI

SEQ ID NO: 20829 - protein, 8 aa, synthetic construct
  REGION 1..8: note = Laminin subunit beta-2 (55-62)
KLGIVQGI

SEQ ID NO: 20830 - protein, 9 aa, synthetic construct
  REGION 1..9: note = TRPM8 channel-associated factor 1 (281-289)
KLGPFLLNA

SEQ ID NO: 20831 - protein, 12 aa, synthetic construct
  REGION 1..12: note = Transcription and mRNA export factor ENY2 (19-30)
KLIETGERERLK

SEQ ID NO: 20832 - protein, 9 aa, synthetic construct
  REGION 1..9: note = Ral GTPase-activating protein subunit beta (194-202)
KLIGVLFEV

SEQ ID NO: 20833 - protein, 9 aa, synthetic construct
  REGION 1..9: note = Protein FAM179B (1545-1553)
KLITGLLNA

SEQ ID NO: 20834 - protein, 12 aa, synthetic construct
  REGION 1..12: note = L-lactate dehydrogenase B chain (308-319)
KLKDDEVAQLKK

SEQ ID NO: 20835 - protein, 10 aa, synthetic construct
  REGION 1..10: note = Formin-1 (1119-1128)
KLLDKPEQFL

SEQ ID NO: 20836 - protein, 11 aa, synthetic construct
  REGION 1..11: note = Formin-1 (1119-1129)
KLLDKPEQFLH

SEQ ID NO: 20837 - protein, 10 aa, synthetic construct
  REGION 1..10: note = Inositol 1,4,5-trisphosphate receptor type 2 (474-483)
KLLEDLIFFV

SEQ ID NO: 20838 - protein, 10 aa, synthetic construct
  REGION 1..10: note = AP-3 complex delta subunit (1019-1028)
KLLESGDLSM

SEQ ID NO: 20839 - protein, 11 aa, synthetic construct
  REGION 1..11: note = Catenin beta-1 (158-168)
KLLNDEDQVVV

SEQ ID NO: 20840 - protein, 9 aa, synthetic construct
  REGION 1..9: note = Laminin subunit gamma-1 (646-654)
KLLNNLTSI

SEQ ID NO: 20841 - protein, 10 aa, synthetic construct
  REGION 1..10: note = Laminin subunit gamma-1 (646-655)
KLLNNLTSIK

SEQ ID NO: 20842 - protein, 10 aa, synthetic construct
  REGION 1..10: note = Dedicator of cytokinesis protein 5 (404-413)
KLLPGDLTQV

SEQ ID NO: 20843 - protein, 10 aa, synthetic construct
  REGION 1..10: note = Myosin-10 (1002-1011)
KLMEDRIAEC

SEQ ID NO: 20844 - protein, 9 aa, synthetic construct
  REGION 1..9: note = Heat shock protein HSP 90-beta (491-499)
KLMKEILDK

SEQ ID NO: 20845 - protein, 9 aa, synthetic construct
  REGION 1..9: note = Nuclear envelope integral membrane protein 1 (123-131)
KLNDTYVNV

SEQ ID NO: 20846 - protein, 9 aa, synthetic construct
  REGION 1..9: note = Zinc finger protein ZIC 1 (48-56)
KLNPSSHEL

SEQ ID NO: 20847 - protein, 9 aa, synthetic construct
  REGION 1..9: note = Lysine-specific histone demethylase 1A (609-617)
KLNTAVRQV

SEQ ID NO: 20848 - protein, 8 aa, synthetic construct
  REGION 1..8: note = Probable ATP-dependent RNA helicase DDX60-like (1106-1113)
KLPAIFFL

SEQ ID NO: 20849 - protein, 9 aa, synthetic construct
  REGION 1..9: note = Probable ATP-dependent RNA helicase DDX60-like (1106-1114)
KLPAIFFLF

SEQ ID NO: 20850 - protein, 8 aa, synthetic construct
  REGION 1..8: note = Probable ATP-dependent RNA helicase DDX60 (1126-1133)
KLPALFFL

SEQ ID NO: 20851 - protein, 9 aa, synthetic construct
  REGION 1..9: note = Probable ATP-dependent RNA helicase DDX60 (1126-1134)
KLPALFFLF

SEQ ID NO: 20852 - protein, 10 aa, synthetic construct
  REGION 1..10: note = Nuclear receptor coactivator 7 (189-198)
KLPDADLARK

SEQ ID NO: 20853 - protein, 9 aa, synthetic construct
  REGION 1..9: note Dolichyl-diphosphooligosaccharide-proteinosyltransferase 48 kDa subunit (380-388)
KLPDVYGVF

SEQ ID NO: 20854 - protein, 9 aa, synthetic construct
  REGION 1..9: note = Neuropathy target esterase (713-721)
KLPEGTLGH

SEQ ID NO: 20855 - protein, 9 aa, synthetic construct
  REGION 1..9: note = von Willebrand factor A domain-containing protein 9 (368-376)
KLPEKTQTF

SEQ ID NO: 20856 - protein, 9 aa, synthetic construct
  REGION 1..9: note = Puratrophin-1 (608-616)
KLPPVGSTA

SEQ ID NO: 20857 - protein, 9 aa, synthetic construct
  REGION 1..9: note = MAU2 chromatid cohesion factor homolog (108-116)
KLQEVHPLL

SEQ ID NO: 20858 - protein, 9 aa, synthetic construct
  REGION 1..9: note = Myosin-10 (1284-1292)
KLQNELDNV

SEQ ID NO: 20859 - protein, 9 aa, synthetic construct
  REGION 1..9: note = Unconventional myosin-If (409-417)
KLQQIFIEL

SEQ ID NO: 20860 - protein, 11 aa, synthetic construct
  REGION 1..11: note = High affinity cAMP-specific and IBMX-insensitive 3',5'-cyclic phosphodiesterase 8B (264-274)
KLRACNSVFTA

SEQ ID NO: 20861 - protein, 9 aa, synthetic construct
  REGION 1..9: note = Laminin subunit beta-2 (210-218)
KLSAHTHTL

SEQ ID NO: 20862 - protein, 10 aa, synthetic construct
  REGION 1..10: note = Nischarin (1228-1237)
KLSDLQSVNV

SEQ ID NO: 20863 - protein, 9 aa, synthetic construct
  REGION 1..9: note = Threonine synthase-like 2 (359-367)
KLSEAVTSV

SEQ ID NO: 20864 - protein, 9 aa, synthetic construct
  REGION 1..9: note = Rho GTPase-activating protein 7 (720-728)
KLSETFLQI

SEQ ID NO: 20865 - protein, 8 aa, synthetic construct
  REGION 1..8: note = Myristoylated alanine-rich C-kinase substrate (165-172)
KLSGFSFK

SEQ ID NO: 20866 - protein, 9 aa, synthetic construct
  REGION 1..9: note = Kinesin-1 heavy chain (222-230)
KLSGKLYLV

SEQ ID NO: 20867 - protein, 10 aa, synthetic construct
  REGION 1..10: note = Cathepsin D (348-357)
KLSPEDYTLK

SEQ ID NO: 20868 - protein, 9 aa, synthetic construct
  REGION 1..9: note = 26S proteasome non-ATPase regulatory subunit 4 (83-91)
KLTAFVNTL

SEQ ID NO: 20869 - protein, 9 aa, synthetic construct
  REGION 1..9: note = Kinesin-like protein KIF13A (701-709)
KLTDYQVTL

SEQ ID NO: 20870 - protein, 9 aa, synthetic construct
  REGION 1..9: note = Cyclin-dependent kinase 2 (24-32)
KLTGEVVAL

SEQ ID NO: 20871 - protein, 9 aa, synthetic construct
  REGION 1..9: note = E3 ubiquitin-protein ligase UBR2 (543-551)
KLTHVISMM

SEQ ID NO: 20872 - protein, 9 aa, synthetic construct
  REGION 1..9: note = AP-1 complex subunit beta-1 (901-909)
KLTNGIWVL

SEQ ID NO: 20873 - protein, 9 aa, synthetic construct
  REGION 1..9: note = Copine-3 (110-118)
KLTRPLVMK

SEQ ID NO: 20874 - protein, 9 aa, synthetic construct
  REGION 1..9: note = Rab3 GTPase-activating protein non-catalytic subunit (337-345)
KLTSALFNA

SEQ ID NO: 20875 - protein, 9 aa, synthetic construct
  REGION 1..9: note = Endothelin B receptor (175-183)
KLVPFIQKA

SEQ ID NO: 20876 - protein, 9 aa, synthetic construct
  REGION 1..9: note = Platelet-activating factor acetylhydrolase IB subunit alpha (53-61)
KLWDFQGFE

SEQ ID NO: 20877 - protein, 9 aa, synthetic construct
  REGION 1..9: note = Interleukin-24 (68-76)
KLWEAFWAV

SEQ ID NO: 20878 - protein, 9 aa, synthetic construct
  REGION 1..9: note = Coatomer subunit beta' (771-779)
KLWRENLSK

SEQ ID NO: 20879 - protein, 9 aa, synthetic construct
  REGION 1..9: note = Cullin-9 (1503-1511)
KLYEHLQRA

SEQ ID NO: 20880 - protein, 9 aa, synthetic construct
  REGION 1..9: note = Phosphatidylinositol 4,5-bisphosphate 3-kinase catalytic subunit beta isoform (191-199)
KLYGGKLIV

SEQ ID NO: 20881 - protein, 11 aa, synthetic construct
  REGION 1..11: note = Protein FAM3C (30-40)
KMDASLGNLFA

SEQ ID NO: 20882 - protein, 10 aa, synthetic construct
  REGION 1..10: note = Dihydropyrimidinase-related protein 2 (338-347)
KMDENQFVAV

SEQ ID NO: 20883 - protein, 12 aa, synthetic construct
  REGION 1..12: note = Splicing factor, arginine/serine-rich 19 (1112-1123)
KMEEANLASRAK

SEQ ID NO: 20884 - protein, 12 aa, synthetic construct
  REGION 1..12: note = Leucine-tRNA ligase, cytoplasmic (497-508)
KMIDAGDALIYM

SEQ ID NO: 20885 - protein, 11 aa, synthetic construct
  REGION 1..11: note = LisH domain-containing protein ARMC9 (259-269)
KMITPEYLQSV

SEQ ID NO: 20886 - protein, 10 aa, synthetic construct
  REGION 1..10: note = Neuron navigator 1 (1349-1358)
KMLDEAVFQV

SEQ ID NO: 20887 - protein, 9 aa, synthetic construct
  REGION 1..9: note = Eukaryotic translation initiation factor 3 subunit L (267-275)
KMLGYFSLV

SEQ ID NO: 20888 - protein, 9 aa, synthetic construct
  REGION 1..9: note = KDEL motif-containing protein 1 (7-15)
KMPDVELFV

SEQ ID NO: 20889 - protein, 9 aa, synthetic construct
  REGION 1..9: note = Ceramide synthase 1 (98-106)
KMPESAWKF

SEQ ID NO: 20890 - protein, 13 aa, synthetic construct
  REGION 1..13: note = Amyloid-like protein 2 (688-700)
KMQNHGYENPTYK

SEQ ID NO: 20891 - protein, 13 aa, synthetic construct
  REGION 1..13: note = Gamma-secretase C-terminal fragment 59 (641-653)
KMQQNGYENPTYK

SEQ ID NO: 20892 - protein, 11 aa, synthetic construct
  REGION 1..11: note = E3 ubiquitin-protein ligase UBR4 (905-915)
KMVDGVGVCTV

SEQ ID NO: 20893 - protein, 9 aa, synthetic construct
  REGION 1..9: note = Polypyrimidine tract-binding protein 2 (415-423)
KMYGKIIRV

SEQ ID NO: 20894 - protein, 10 aa, synthetic construct
  REGION 1..10: note = Protein diaphanous homolog 2 (637-646)
KMYKPEVSMK

SEQ ID NO: 20895 - protein, 9 aa, synthetic construct
  REGION 1..9: note = Nuclear pore complex protein Nup93 (510-518)
KNADKVLEL

SEQ ID NO: 20896 - protein, 9 aa, synthetic construct
  REGION 1..9: note = 5'-nucleotidase domain-containing protein 1 (159-167)
KNAGKILLL

SEQ ID NO: 20897 - protein, 9 aa, synthetic construct
  REGION 1..9: note = 60S ribosomal protein L13 (174-182)
KNFKAFASL

SEQ ID NO: 20898 - protein, 9 aa, synthetic construct
  REGION 1..9: note = Centrosome-associated protein 350 (625-633)
KNKRLQELY

SEQ ID NO: 20899 - protein, 9 aa, synthetic construct
  REGION 1..9: note = Aldehyde dehydrogenase family 1 member A3 (446-454)
KNLDKALKL

SEQ ID NO: 20900 - protein, 9 aa, synthetic construct
  REGION 1..9: note = Junction plakoglobin (278-286)
KNNPKFLAI

SEQ ID NO: 20901 - protein, 9 aa, synthetic construct
  REGION 1..9: note = COX assembly mitochondrial protein homolog (43-51)
KNSGVLMVV

SEQ ID NO: 20902 - protein, 9 aa, synthetic construct
  REGION 1..9: note = Cytosolic acyl coenzyme A thioester hydrolase (126-134)
KNVDKVLEV

SEQ ID NO: 20903 - protein, 9 aa, synthetic construct
  REGION 1..9: note = Synaptic vesicle membrane protein VAT-1 homolog (374-382)
KNVGKVLLV

SEQ ID NO: 20904 - protein, 9 aa, synthetic construct
  REGION 1..9: note = DnaJ homolog subfamily A member 4 (79-87)
KNVVHQLSV

SEQ ID NO: 20905 - protein, 12 aa, synthetic construct
  REGION 1..12: note = Triosephosphate isomerase (156-167)
KPEFVDIINAKQ

SEQ ID NO: 20906 - protein, 9 aa, synthetic construct
  REGION 1..9: note = Rho GTPase-activating protein 7 (369-377)
KPGTFPKAL

SEQ ID NO: 20907 - protein, 9 aa, synthetic construct
  REGION 1..9: note = Anion exchange protein 3 (360-368)
KPHVASLSF

SEQ ID NO: 20908 - protein, 7 aa, synthetic construct
  REGION 1..7: note = Kelch repeat and BTB domain-containing protein 6 (284-290)
KPIVKKY

SEQ ID NO: 20909 - protein, 9 aa, synthetic construct
  REGION 1..9: note = Protein quaking (6-14)
KPKPTPDYL

SEQ ID NO: 20910 - protein, 9 aa, synthetic construct
  REGION 1..9: note = Sulfate transporter (548-556)
KPKSSLLGL

SEQ ID NO: 20911 - protein, 9 aa, synthetic construct
  REGION 1..9: note = Adenylate cyclase type 1 (422-430)
KPNSSLVVL

SEQ ID NO: 20912 - protein, 7 aa, synthetic construct
  REGION 1..7: note = Serine/threonine-protein kinase tousled-like 1 (483-489)
KPPIIHY

SEQ ID NO: 20913 - protein, 18 aa, synthetic construct
  REGION 1..18: note = NEDD4 family-interacting protein 1 (63-80)
KPPSYNVATTLPSYDEAE

SEQ ID NO: 20914 - protein, 9 aa, synthetic construct
  REGION 1..9: note = Plexin-D1 (92-100)
KPRNLNVSF

SEQ ID NO: 20915 - protein, 11 aa, synthetic construct
  REGION 1..11: note = Collagen alpha-1(XV) chain (98-108)
KPSSTRGGVLF

SEQ ID NO: 20916 - protein, 21 aa, synthetic construct
  REGION 1..21: note = Nuclear pore complex protein Nup214 (1252-1272)
KPSYEAIPESSPPSGITSASN

SEQ ID NO: 20917 - protein, 9 aa, synthetic construct
  REGION 1..9: note = Phosphatidylinositol-binding clathrin assembly protein (465-473)
KPTVASQNQ

SEQ ID NO: 20918 - protein, 9 aa, synthetic construct
  REGION 1..9: note = Lysyl oxidase homolog 3 (52-60)
KPYEGRVEI

SEQ ID NO: 20919 - protein, 9 aa, synthetic construct
  REGION 1..9: note = Nuclear factor of activated T-cells, cytoplasmic 2 (50-58)
KPYSPLASL

SEQ ID NO: 20920 - protein, 9 aa, synthetic construct
  REGION 1..9: note = Procollagen galactosyltransferase 1 (274-282)
KQAEVQMYV

SEQ ID NO: 20921 - protein, 10 aa, synthetic construct
  REGION 1..10: note = Syntaxin-binding protein 6 (78-87)
KQFEGSTSFV

SEQ ID NO: 20922 - protein, 10 aa, synthetic construct
  REGION 1..10: note = Dystonin (5209-5218)
KQKETIKAFL

SEQ ID NO: 20923 - protein, 9 aa, synthetic construct
  REGION 1..9: note = EAW49110.1 (48-56)
KQLEDGRSL

SEQ ID NO: 20924 - protein, 9 aa, synthetic construct
  REGION 1..9: note = E3 ubiquitin-protein ligase RNF130 (159-167)
KQNDVVRIL

SEQ ID NO: 20925 - protein, 9 aa, synthetic construct
  REGION 1..9: note = Putative signal peptidase complex catalytic subunit SEC11B (91-99)
KQNGHIKFL

SEQ ID NO: 20926 - protein, 9 aa, synthetic construct
  REGION 1..9: note = Unconventional myosin-IXa (65-73)
KQPEEYHYL

SEQ ID NO: 20927 - protein, 9 aa, synthetic construct
  REGION 1..9: note = Rho guanine nucleotide exchange factor 2 (208-216)
KQQDVIYEL

SEQ ID NO: 20928 - protein, 16 aa, synthetic construct
  REGION 1..16: note = Heat shock 70 kDa protein 4 (754-769)
KQSLTMDPVVKSKEIE

SEQ ID NO: 20929 - protein, 10 aa, synthetic construct
  REGION 1..10: note = Serum albumin (549-558)
KQTALVELVK

SEQ ID NO: 20930 - protein, 10 aa, synthetic construct
  REGION 1..10: note = Tyrosine-protein kinase Fer (613-622)
KQYDHPNIVK

SEQ ID NO: 20931 - protein, 9 aa, synthetic construct
  REGION 1..9: note = Transmembrane emp24 domain-containing protein 3 (83-91)
KQYDSFTYR

SEQ ID NO: 20932 - protein, 12 aa, synthetic construct
  REGION 1..12: note = Protein Niban (482-493)
KQYDYDSSTIRK

SEQ ID NO: 20933 - protein, 13 aa, synthetic construct
  REGION 1..13: note = Protein Niban (482-494)
KQYDYDSSTIRKK

SEQ ID NO: 20934 - protein, 9 aa, synthetic construct
  REGION 1..9: note = Phosphatidylinositol 3,4,5-trisphosphate-dependent Rac exchanger 1 protein (1094-1102)
KQYVTQINR

SEQ ID NO: 20935 - protein, 9 aa, synthetic construct
  REGION 1..9: note = Unconventional myosin-Ib (37-45)
KRFDHSEIY

SEQ ID NO: 20936 - protein, 9 aa, synthetic construct
  REGION 1..9: note = Serine/threonine-protein kinase 10 (596-604)
KRFEQEINA

SEQ ID NO: 20937 - protein, 8 aa, synthetic construct
  REGION 1..8: note = 60S ribosomal protein L10a (47-54)
KRFSGTVR

SEQ ID NO: 20938 - protein, 9 aa, synthetic construct
  REGION 1..9: note = Copine-1 (190-198)
KRFSVPVQH

SEQ ID NO: 20939 - protein, 10 aa, synthetic construct
  REGION 1..10: note = MAP/microtubule affinity-regulating kinase 3 (731-740)
KRISGTSIAF

SEQ ID NO: 20940 - protein, 9 aa, synthetic construct
  REGION 1..9: note = Intraflagellar transport protein 81 homolog (264-272)
KRLEEEIKF

SEQ ID NO: 20941 - protein, 10 aa, synthetic construct
  REGION 1..10: note = ATP-dependent RNA helicase A (30-39)
KRLGYIHRNF

SEQ ID NO: 20942 - protein, 9 aa, synthetic construct
  REGION 1..9: note = Maltase-glucoamylase (110-118)
KRLPSPSLF

SEQ ID NO: 20943 - protein, 9 aa, synthetic construct
  REGION 1..9: note = Serum albumin (468-476)
KRMPCAEDY

SEQ ID NO: 20944 - protein, 9 aa, synthetic construct
  REGION 1..9: note = Gamma-interferon-inducible protein 16 (202-210)
KRPVIVKVL

SEQ ID NO: 20945 - protein, 9 aa, synthetic construct
  REGION 1..9: note = Band 4.1-like protein 2 (451-459)
KRSNFYIKV

SEQ ID NO: 20946 - protein, 14 aa, synthetic construct
  REGION 1..14: note = Glyceraldehyde-3-phosphate dehydrogenase (117-130)
KRVIISAPSADAPM

SEQ ID NO: 20947 - protein, 9 aa, synthetic construct
  REGION 1..9: note = Glia-derived nexin (299-307)
KRVQVILPK

SEQ ID NO: 20948 - protein, 9 aa, synthetic construct
  REGION 1..9: note = Growth/differentiation factor 15 (45-53)
KRYEDLLTR

SEQ ID NO: 20949 - protein, 9 aa, synthetic construct
  REGION 1..9: note = Insulin-like growth factor 1 receptor (927-935)
KRYENFIHL

SEQ ID NO: 20950 - protein, 9 aa, synthetic construct
  REGION 1..9: note = Protein zyg-11 homolog B (68-76)
KRYSERAFF

SEQ ID NO: 20951 - protein, 10 aa, synthetic construct
  REGION 1..10: note = Glycerol-3-phosphate acyltransferase 4 (407-416)
KSAIARQGGL

SEQ ID NO: 20952 - protein, 9 aa, synthetic construct
  REGION 1..9: note = Centrosomal protein C10orf90 (33-41)
KSDFTKETL

SEQ ID NO: 20953 - protein, 10 aa, synthetic construct
  REGION 1..10: note = Transcriptional protein SWT1 (56-65)
KSDHTDVLYY

SEQ ID NO: 20954 - protein, 9 aa, synthetic construct
  REGION 1..9: note = 78 kDa glucose-regulated protein (335-343)
KSDIDEIVL

SEQ ID NO: 20955 - protein, 9 aa, synthetic construct
  REGION 1..9: note = Copine-9 (167-175)
KSDPFLVFY

SEQ ID NO: 20956 - protein, 9 aa, synthetic construct
  REGION 1..9: note = Pre-mRNA-processing factor 40 homolog A (164-172)
KSDSGKPYY

SEQ ID NO: 20957 - protein, 16 aa, synthetic construct
  REGION 1..16: note = Serine/threonine-protein phosphatase 2A 65 kDa regulatory subunit A alpha isoform (202-217)
KSEIIPMFSNLASDEQ

SEQ ID NO: 20958 - protein, 9 aa, synthetic construct
  REGION 1..9: note = Minor histocompatibility antigen H13 (234-242)
KSFEAPIKL

SEQ ID NO: 20959 - protein, 18 aa, synthetic construct
  REGION 1..18: note = Protein HEG homolog 1 (147-164)
KSGDFQMSPYAEYPKNPR

SEQ ID NO: 20960 - protein, 9 aa, synthetic construct
  REGION 1..9: note = Protein LAP2 (860-868)
KSGPVGSVV

SEQ ID NO: 20961 - protein, 8 aa, synthetic construct
  REGION 1..8: note = Vacuolar protein sorting-associated protein 16 homolog (82-89)
KSGPVVSL

SEQ ID NO: 20962 - protein, 9 aa, synthetic construct
  REGION 1..9: note = Alpha-catulin (373-381)
KSIAEELEL

SEQ ID NO: 20963 - protein, 9 aa, synthetic construct
  REGION 1..9: note = 60S ribosomal protein L35 (52-60)
KSIARVLTV

SEQ ID NO: 20964 - protein, 9 aa, synthetic construct
  REGION 1..9: note = Syntenin-1 (130-138)
KSIDNGIFV

SEQ ID NO: 20965 - protein, 9 aa, synthetic construct
  REGION 1..9: note = Protein disulfide-isomerase TMX3 (71-79)
KSIGSPVKV

SEQ ID NO: 20966 - protein, 9 aa, synthetic construct
  REGION 1..9: note = Protein RTF2 homolog (83-91)
KSIKNVTEL

SEQ ID NO: 20967 - protein, 9 aa, synthetic construct
  REGION 1..9: note = Adenylosuccinate synthetase isozyme 2 (203-211)
KSIYPTLEI

SEQ ID NO: 20968 - protein, 9 aa, synthetic construct
  REGION 1..9: note = Selenoprotein N (53-61)
KSKDGFLGV

SEQ ID NO: 20969 - protein, 10 aa, synthetic construct
  REGION 1..10: note = Nucleolar pre-ribosomal-associated protein 1 (429-438)
KSLTKLLIMK

SEQ ID NO: 20970 - protein, 9 aa, synthetic construct
  REGION 1..9: note = Astrotactin-2 (499-507)
KSMPFITYL

SEQ ID NO: 20971 - protein, 11 aa, synthetic construct
  REGION 1..11: note = Transmembrane protein 98 (144-154)
KSMYPPLDPKL

SEQ ID NO: 20972 - protein, 9 aa, synthetic construct
  REGION 1..9: note = CD44 antigen (303-311)
KSQEMVHLV

SEQ ID NO: 20973 - protein, 9 aa, synthetic construct
  REGION 1..9: note = Targeting protein for Xklp2 (686-694)
KSSDQPLTV

SEQ ID NO: 20974 - protein, 9 aa, synthetic construct
  REGION 1..9: note = Chromodomain-helicase-DNA-binding protein 1 (88-96)
KSSPSILAV

SEQ ID NO: 20975 - protein, 9 aa, synthetic construct
  REGION 1..9: note = Leucine-tRNA ligase, cytoplasmic (28-36)
KSTGNFLTL

SEQ ID NO: 20976 - protein, 9 aa, synthetic construct
  REGION 1..9: note = 116 kDa U5 small nuclear ribonucleoprotein component (182-190)
KSTPVTVVL

SEQ ID NO: 20977 - protein, 9 aa, synthetic construct
  REGION 1..9: note = Lysosome-associated membraneoprotein 2 (402-410)
KSYAGYQTL

SEQ ID NO: 20978 - protein, 9 aa, synthetic construct
  REGION 1..9: note = 2',3'-cyclic-nucleotide 3'-phosphodiesterase (256-264)
KSYSKAFTL

SEQ ID NO: 20979 - protein, 9 aa, synthetic construct
  REGION 1..9: note = Zinc finger protein ZIC 2 (401-409)
KSYTHPSSL

SEQ ID NO: 20980 - protein, 8 aa, synthetic construct
  REGION 1..8: note = Ubiquitin carboxyl-terminal hydrolase 8 (34-41)
KSYVHSAL

SEQ ID NO: 20981 - protein, 9 aa, synthetic construct
  REGION 1..9: note = Peptidyl-prolyl cis-trans isomerase A (31-39)
KTAENFRAL

SEQ ID NO: 20982 - protein, 9 aa, synthetic construct
  REGION 1..9: note = Endothelin B receptor (359-367)
KTAKDWWLF

SEQ ID NO: 20983 - protein, 9 aa, synthetic construct
  REGION 1..9: note = V-type proton ATPase 116 kDa subunit a isoform 4 (360-368)
KTAPPTFNR

SEQ ID NO: 20984 - protein, 9 aa, synthetic construct
  REGION 1..9: note = RAC-gamma serine/threonine-protein kinase (32-40)
KTDGSFIGY

SEQ ID NO: 20985 - protein, 11 aa, synthetic construct
  REGION 1..11: note = Growth/differentiation factor 15 (274-284)
KTDTGVSLQTY

SEQ ID NO: 20986 - protein, 17 aa, synthetic construct
  REGION 1..17: note = Myeloid-derived growth factor (132-148)
KTEEFEVTKTAVAHRPG

SEQ ID NO: 20987 - protein, 9 aa, synthetic construct
  REGION 1..9: note = Myosin-IIIb (442-450)
KTESAHLIV

SEQ ID NO: 20988 - protein, 9 aa, synthetic construct
  REGION 1..9: note = Cullin-4B (327-335)
KTIDGILLL

SEQ ID NO: 20989 - protein, 9 aa, synthetic construct
  REGION 1..9: note = UPF0769 protein C21orf59 (114-122)
KTIEEAKAI

SEQ ID NO: 20990 - protein, 10 aa, synthetic construct
  REGION 1..10: note = Protein FAM184A (180-189)
KTIGKLKTEL

SEQ ID NO: 20991 - protein, 9 aa, synthetic construct
  REGION 1..9: note = Probable C-mannosyltransferase DPY19L4 (129-137)
KTINAVQQM

SEQ ID NO: 20992 - protein, 9 aa, synthetic construct
  REGION 1..9: note = Transcription factor SOX-8 (16-24)
KTLGKLWRL

SEQ ID NO: 20993 - protein, 8 aa, synthetic construct
  REGION 1..8: note = Transcription factor Dp-2 (49-56)
KTLGPINV

SEQ ID NO: 20994 - protein, 20 aa, synthetic construct
  REGION 1..20: note = Uncharacterized protein KIAA1109 (4603-4622)
KTMTSNLEKSSQEQLLDAAH

SEQ ID NO: 20995 - protein, 9 aa, synthetic construct
  REGION 1..9: note = Catenin beta-1 (288-296)
KTNVKFLAI

SEQ ID NO: 20996 - protein, 8 aa, synthetic construct
  REGION 1..8: note = RNA-binding protein Raly (143-150)
KTNVPVKL

SEQ ID NO: 20997 - protein, 9 aa, synthetic construct
  REGION 1..9: note = THO complex subunit 2 (892-900)
KTPNFSTLL

SEQ ID NO: 20998 - protein, 9 aa, synthetic construct
  REGION 1..9: note = HEAT repeat-containing protein 2 (446-454)
KTPSASGLL

SEQ ID NO: 20999 - protein, 9 aa, synthetic construct
  REGION 1..9: note = Eukaryotic translation initiation factor 4 gamma 1 (717-725)
KTQDLFRRV

SEQ ID NO: 21000 - protein, 9 aa, synthetic construct
  REGION 1..9: note = Angiomotin-like protein 1 (332-340)
KTQEHGLFY

SEQ ID NO: 21001 - protein, 9 aa, synthetic construct
  REGION 1..9: note = Cohesin subunit SA-2 (965-973)
KTREAIAML

SEQ ID NO: 21002 - protein, 8 aa, synthetic construct
  REGION 1..8: note = Golgin subfamily B member 1 (382-389)
KTSHILSL

SEQ ID NO: 21003 - protein, 8 aa, synthetic construct
  REGION 1..8: note = ATP-binding cassette sub-family F member 3 (144-151)
KTSNPLVL

SEQ ID NO: 21004 - protein, 9 aa, synthetic construct
  REGION 1..9: note = Hemicentin-1 (971-979)
KTTSVVVHV

SEQ ID NO: 21005 - protein, 9 aa, synthetic construct
  REGION 1..9: note = Vigilin (294-302)
KTTTIAVEV

SEQ ID NO: 21006 - protein, 8 aa, synthetic construct
  REGION 1..8: note = Rab3 GTPase-activating protein non-catalytic subunit (1174-1181)
KTVKPLSL

SEQ ID NO: 21007 - protein, 9 aa, synthetic construct
  REGION 1..9: note = 40S ribosomal protein S11 (136-144)
KTVRFNVLK

SEQ ID NO: 21008 - protein, 10 aa, synthetic construct
  REGION 1..10: note = Melanocyte protein PMEL (154-163)
KTWDQVPFSV

SEQ ID NO: 21009 - protein, 9 aa, synthetic construct
  REGION 1..9: note = Spermidine synthase (57-65)
KTYGNVLVL

SEQ ID NO: 21010 - protein, 13 aa, synthetic construct
  REGION 1..13: note = 26S protease regulatory subunit 7 (34-46)
KTYGQSTYSRQIK

SEQ ID NO: 21011 - protein, 9 aa, synthetic construct
  REGION 1..9: note = Cyclin-dependent kinase 16 (470-478)
KTYNYPKYR

SEQ ID NO: 21012 - protein, 9 aa, synthetic construct
  REGION 1..9: note = Non-receptor tyrosine-protein kinase TNK1 (260-268)
KVADFGLVR

SEQ ID NO: 21013 - protein, 9 aa, synthetic construct
  REGION 1..9: note = GMP synthase (glutamine-hydrolyzing) (292-300)
KVADGFKVV

SEQ ID NO: 21014 - protein, 9 aa, synthetic construct
  REGION 1..9: note = Dynactin subunit 3 (32-40)
KVADGLVKV

SEQ ID NO: 21015 - protein, 9 aa, synthetic construct
  REGION 1..9: note = Phosphoglycerate kinase 1 (216-224)
KVADKIQLI

SEQ ID NO: 21016 - protein, 9 aa, synthetic construct
  REGION 1..9: note = Disks large homolog 1 (368-376)
KVAKPTSMY

SEQ ID NO: 21017 - protein, 10 aa, synthetic construct
  REGION 1..10: note = GPI mannosyltransferase 1 (15-24)
KVAPAGVFGV

SEQ ID NO: 21018 - protein, 12 aa, synthetic construct
  REGION 1..12: note = Coatomer subunit delta (123-134)
KVAPAPARPSGP

SEQ ID NO: 21019 - protein, 9 aa, synthetic construct
  REGION 1..9: note = Asparagine synthetase (glutamine-hydrolyzing) (112-120)
KVASVEMVK

SEQ ID NO: 21020 - protein, 23 aa, synthetic construct
  REGION 1..23: note = Pyridoxal kinase (152-174)
KVDAVFVGTGDLFAAMLLAWTHK

SEQ ID NO: 21021 - protein, 9 aa, synthetic construct
  REGION 1..9: note = Melanoma-associated antigen 4 (113-121)
KVDELAHFL

SEQ ID NO: 21022 - protein, 9 aa, synthetic construct
  REGION 1..9: note = Centromere protein F (738-746)
KVDELTTEI

SEQ ID NO: 21023 - protein, 9 aa, synthetic construct
  REGION 1..9: note = Beta-secretase 2 (314-322)
KVFDAVVEA

SEQ ID NO: 21024 - protein, 9 aa, synthetic construct
  REGION 1..9: note = Transcription factor HES-1 (214-222)
KVFGGFQVV

SEQ ID NO: 21025 - protein, 8 aa, synthetic construct
  REGION 1..8: note = Myelin expression factor 2 (123-130)
KVGEVTYV

SEQ ID NO: 21026 - protein, 8 aa, synthetic construct
  REGION 1..8: note = Uridine phosphorylase 1 (99-106)
KVGPVLSV

SEQ ID NO: 21027 - protein, 11 aa, synthetic construct
  REGION 1..11: note = Nucleosome-remodeling factor subunit BPTF (2095-2105)
KVGSPATVTFQ

SEQ ID NO: 21028 - protein, 6 aa, synthetic construct
  REGION 1..6: note = E3 ubiquitin/ISG15 ligase TRIM25 (596-601)
KVHLMY

SEQ ID NO: 21029 - protein, 10 aa, synthetic construct
  REGION 1..10: note = Unconventional myosin-Id (255-264)
KVIGFKPEEI

SEQ ID NO: 21030 - protein, 13 aa, synthetic construct
  REGION 1..13: note = Titin (15654-15666)
KVKEVTKTSVTLT

SEQ ID NO: 21031 - protein, 9 aa, synthetic construct
  REGION 1..9: note = Fructose-bisphosphate aldolase A (262-270)
KVLAAVYKA

SEQ ID NO: 21032 - protein, 51 aa, synthetic construct
  REGION 1..51: note = Titin (21056-21106)
KVLDTPAACQKLQVKHVSRGTVTLLWDPPLIDGGSPIINYVIEKRDATKRT

SEQ ID NO: 21033 - protein, 11 aa, synthetic construct
  REGION 1..11: note = F-box only protein 32 (98-108)
KVLEDQQNIRL

SEQ ID NO: 21034 - protein, 9 aa, synthetic construct
  REGION 1..9: note = Melanoma-associated antigen 4 (286-294)
KVLEHVVRV

SEQ ID NO: 21035 - protein, 9 aa, synthetic construct
  REGION 1..9: note = Chloride transport protein 6 (183-191)
KVLGVLFSV

SEQ ID NO: 21036 - protein, 9 aa, synthetic construct
  REGION 1..9: note = SLIT-ROBO Rho GTPase-activating protein 2 (155-163)
KVLNELYSV

SEQ ID NO: 21037 - protein, 9 aa, synthetic construct
  REGION 1..9: note = Signal recognition particle receptor subunit alpha (345-353)
KVMGTFSTV

SEQ ID NO: 21038 - protein, 9 aa, synthetic construct
  REGION 1..9: note = 40S ribosomal protein S16 (32-40)
KVNGRPLEM

SEQ ID NO: 21039 - protein, 8 aa, synthetic construct
  REGION 1..8: note = E3 ubiquitin-protein ligase RING1 (361-368)
KVSRPLEL

SEQ ID NO: 21040 - protein, 9 aa, synthetic construct
  REGION 1..9: note = Solute carrier family 41 member 2 (192-200)
KVTEVFILV

SEQ ID NO: 21041 - protein, 9 aa, synthetic construct
  REGION 1..9: note = Hom s 1 (524-532)
KVVEIVKKL

SEQ ID NO: 21042 - protein, 6 aa, synthetic construct
  REGION 1..6: note = Poly (ADP-ribose) polymerase 12 (512-517)
KVWNLF

SEQ ID NO: 21043 - protein, 10 aa, synthetic construct
  REGION 1..10: note = Unconventional myosin-Id (707-716)
KVWRGTLARM

SEQ ID NO: 21044 - protein, 10 aa, synthetic construct
  REGION 1..10: note = Hemicentin-1 (2662-2671)
KVYIPPIINK

SEQ ID NO: 21045 - protein, 9 aa, synthetic construct
  REGION 1..9: note = Probable helicase with zinc finger domain (500-508)
KYAQNGQLF

SEQ ID NO: 21046 - protein, 9 aa, synthetic construct
  REGION 1..9: note = DNA cross-link repair 1A protein (370-378)
KYDEGLYRF

SEQ ID NO: 21047 - protein, 9 aa, synthetic construct
  REGION 1..9: note = EH domain-containing protein 2 (452-460)
KYDEIFYNL

SEQ ID NO: 21048 - protein, 9 aa, synthetic construct
  REGION 1..9: note = E3 ubiquitin-protein ligase SIAH1 (198-206)
KYDGHQQFF

SEQ ID NO: 21049 - protein, 9 aa, synthetic construct
  REGION 1..9: note = Dedicator of cytokinesis protein 4 (92-100)
KYGDMRVTM

SEQ ID NO: 21050 - protein, 8 aa, synthetic construct
  REGION 1..8: note = Serine/threonine-protein kinase PLK2 (513-520)
KYGFGYQL

SEQ ID NO: 21051 - protein, 9 aa, synthetic construct
  REGION 1..9: note = Protein SOGA1 (415-423)
KYGIVQEFF

SEQ ID NO: 21052 - protein, 8 aa, synthetic construct
  REGION 1..8: note = Glycerol-3-phosphate acyltransferase 4 (365-372)
KYGMVTYL

SEQ ID NO: 21053 - protein, 9 aa, synthetic construct
  REGION 1..9: note = RNA-binding motif protein, X chromosome (30-38)
KYGRIVEVL

SEQ ID NO: 21054 - protein, 9 aa, synthetic construct
  REGION 1..9: note = Non-specific lipid-transfer protein (92-100)
KYGTKIEHF

SEQ ID NO: 21055 - protein, 10 aa, synthetic construct
  REGION 1..10: note = Paired amphipathic helix protein Sin3b (300-309)
KYGTLQEFSF

SEQ ID NO: 21056 - protein, 9 aa, synthetic construct
  REGION 1..9: note = Kinase D-interacting substrate of 220 kDa (126-134)
KYGTTPLVW

SEQ ID NO: 21057 - protein, 9 aa, synthetic construct
  REGION 1..9: note = Peroxisome proliferator-activated receptor delta isoform 4 (185-193)
KYGVHEAIF

SEQ ID NO: 21058 - protein, 9 aa, synthetic construct
  REGION 1..9: note = Tubulin-tyrosine ligase-like protein 12 (451-459)
KYIESPVLF

SEQ ID NO: 21059 - protein, 9 aa, synthetic construct
  REGION 1..9: note = Protein yippee-like 3 (104-112)
KYIIELNHM

SEQ ID NO: 21060 - protein, 9 aa, synthetic construct
  REGION 1..9: note = 3-hydroxy-3-methylglutaryl-coenzyme A reductase (89-97)
KYILGIAGL

SEQ ID NO: 21061 - protein, 9 aa, synthetic construct
  REGION 1..9: note = Alpha-fetoprotein (403-411)
KYIQESQAL

SEQ ID NO: 21062 - protein, 9 aa, synthetic construct
  REGION 1..9: note = Membrane progestin receptor alpha (193-201)
KYIQKPGLL

SEQ ID NO: 21063 - protein, 9 aa, synthetic construct
  REGION 1..9: note = Centrosomal protein of 135 kDa (857-865)
KYITEVSRW

SEQ ID NO: 21064 - protein, 9 aa, synthetic construct
  REGION 1..9: note = Transmembrane emp24 domain-containing protein 5 (84-92)
KYITGTDIL

SEQ ID NO: 21065 - protein, 9 aa, synthetic construct
  REGION 1..9: note = Kinesin light chain 1 (266-274)
KYKDAANLL

SEQ ID NO: 21066 - protein, 9 aa, synthetic construct
  REGION 1..9: note = Melanoma-associated antigen B1 (141-149)
KYKDHFTEI

SEQ ID NO: 21067 - protein, 9 aa, synthetic construct
  REGION 1..9: note = Melanoma-associated antigen C2 (173-181)
KYKDYFPVI

SEQ ID NO: 21068 - protein, 9 aa, synthetic construct
  REGION 1..9: note = Kinesin light chain 4 (191-199)
KYKEAAHLL

SEQ ID NO: 21069 - protein, 9 aa, synthetic construct
  REGION 1..9: note = Antizyme inhibitor 1 (341-349)
KYKEDEPLF

SEQ ID NO: 21070 - protein, 9 aa, synthetic construct
  REGION 1..9: note = Protein disulfide-isomerase (91-99)
KYKPESEEL

SEQ ID NO: 21071 - protein, 9 aa, synthetic construct
  REGION 1..9: note = Peroxisomal acyl-coenzyme A oxidase 3 (120-128)
KYLLHSLVF

SEQ ID NO: 21072 - protein, 9 aa, synthetic construct
  REGION 1..9: note = Gem-associated protein 4 (188-196)
KYLPALDEF

SEQ ID NO: 21073 - protein, 11 aa, synthetic construct
  REGION 1..11: note = Phosphatidylinositol-glycan biosynthesis class W protein (189-199)
KYMEGSKLHYF

SEQ ID NO: 21074 - protein, 10 aa, synthetic construct
  REGION 1..10: note = Histone acetyltransferase type B catalytic subunit (207-216)
KYNKDGATLF

SEQ ID NO: 21075 - protein, 9 aa, synthetic construct
  REGION 1..9: note = Formin-like protein 3 (158-166)
KYPDLANFW

SEQ ID NO: 21076 - protein, 9 aa, synthetic construct
  REGION 1..9: note = Rho guanine nucleotide exchange factor 12 (939-947)
KYPLLLDNI

SEQ ID NO: 21077 - protein, 9 aa, synthetic construct
  REGION 1..9: note = Rho guanine nucleotide exchange factor 11 (884-892)
KYPLLLESI

SEQ ID NO: 21078 - protein, 9 aa, synthetic construct
  REGION 1..9: note = Protein lifeguard 4 (139-147)
KYPLNLYLL

SEQ ID NO: 21079 - protein, 9 aa, synthetic construct
  REGION 1..9: note = Ceramide glucosyltransferase (104-112)
KYPNVDARL

SEQ ID NO: 21080 - protein, 7 aa, synthetic construct
  REGION 1..7: note = ATP-dependent RNA helicase A (169-175)
KYPSPFF

SEQ ID NO: 21081 - protein, 9 aa, synthetic construct
  REGION 1..9: note = Early endosome antigen 1 (387-395)
KYQHLKAEF

SEQ ID NO: 21082 - protein, 9 aa, synthetic construct
  REGION 1..9: note = Tetratricopeptide repeat protein 9C (156-164)
KYRDAVSRY

SEQ ID NO: 21083 - protein, 9 aa, synthetic construct
  REGION 1..9: note = Zinc finger protein ZFAT (350-358)
KYSDVKNLI

SEQ ID NO: 21084 - protein, 9 aa, synthetic construct
  REGION 1..9: note = Host cell factor 1 (105-113)
KYSNDLYEL

SEQ ID NO: 21085 - protein, 9 aa, synthetic construct
  REGION 1..9: note = Serine-protein kinase ATM (331-339)
KYSSGFRNI

SEQ ID NO: 21086 - protein, 9 aa, synthetic construct
  REGION 1..9: note = Zinc finger MYM-type protein 4 (1301-1309)
KYSTKMTYL

SEQ ID NO: 21087 - protein, 24 aa, synthetic construct
  REGION 1..24: note = Actin, gamma-enteric smooth muscle (294-317)
KYSVWIGGSILASLSTFQQMWISK

SEQ ID NO: 21088 - protein, 9 aa, synthetic construct
  REGION 1..9: note = DNA/RNA-binding protein KIN17 (311-319)
KYTAVVKMI

SEQ ID NO: 21089 - protein, 9 aa, synthetic construct
  REGION 1..9: note = Signal peptidase complex subunit 2 (73-81)
KYVENFGLI

SEQ ID NO: 21090 - protein, 9 aa, synthetic construct
  REGION 1..9: note = Sorting nexin-29 (103-111)
KYVGAVQML

SEQ ID NO: 21091 - protein, 8 aa, synthetic construct
  REGION 1..8: note = Zinc finger protein 195 (148-155)
KYVKIFDN

SEQ ID NO: 21092 - protein, 9 aa, synthetic construct
  REGION 1..9: note = Zinc finger protein 92 (117-125)
KYVKVFHKF

SEQ ID NO: 21093 - protein, 9 aa, synthetic construct
  REGION 1..9: note = Zinc finger protein 708 (80-88)
KYVKVFHKY

SEQ ID NO: 21094 - protein, 9 aa, synthetic construct
  REGION 1..9: note = Tubulin beta chain (78-86)
KYVPRAILV

SEQ ID NO: 21095 - protein, 9 aa, synthetic construct
  REGION 1..9: note = Centromere/kinetochore protein zw10 homolog (130-138)
KYVTGAQRL

SEQ ID NO: 21096 - protein, 9 aa, synthetic construct
  REGION 1..9: note = Ubiquitin carboxyl-terminal hydrolase 8 (65-73)
KYVTVYNLI

SEQ ID NO: 21097 - protein, 9 aa, synthetic construct
  REGION 1..9: note = Digestive organ expansion factor homolog (526-534)
KYYRQTLLF

SEQ ID NO: 21098 - protein, 10 aa, synthetic construct
  REGION 1..10: note = Probable E3 ubiquitin-protein ligase HERC1 (3206-3215)
LAAGLESLGL

SEQ ID NO: 21099 - protein, 11 aa, synthetic construct
  REGION 1..11: note = Glutamate receptor ionotropic, kainate 2 (827-837)
LAAGLVLSVFV

SEQ ID NO: 21100 - protein, 9 aa, synthetic construct
  REGION 1..9: note = Ankyrin repeat domain-containing protein 17 (848-856)
LAAGPLPPG

SEQ ID NO: 21101 - protein, 8 aa, synthetic construct
  REGION 1..8: note = Spectrin beta chain, non-erythrocytic 4 (1779-1786)
LAAVNQMV

SEQ ID NO: 21102 - protein, 9 aa, synthetic construct
  REGION 1..9: note = Vimentin (88-96)
LADAINTEF

SEQ ID NO: 21103 - protein, 9 aa, synthetic construct
  REGION 1..9: note = Exonuclease 3'-5' domain-containing protein 2 (31-39)
LADGTILKV

SEQ ID NO: 21104 - protein, 9 aa, synthetic construct
  REGION 1..9: note = Kinesin-associated protein 3 (289-297)
LAEDTRTEL

SEQ ID NO: 21105 - protein, 8 aa, synthetic construct
  REGION 1..8: note = Kinectin (601-608)
LAEELHKV

SEQ ID NO: 21106 - protein, 8 aa, synthetic construct
  REGION 1..8: note = CREB-binding protein (654-661)
LAEKIYKI

SEQ ID NO: 21107 - protein, 8 aa, synthetic construct
  REGION 1..8: note = Protein shisa-4 (79-86)
LAFSPKTI

SEQ ID NO: 21108 - protein, 8 aa, synthetic construct
  REGION 1..8: note = DNA-dependent protein kinase catalytic subunit (29-36)
LAGHQLIR

SEQ ID NO: 21109 - protein, 10 aa, synthetic construct
  REGION 1..10: note = Signal transducer and activator of transcription 3 (221-230)
LAGLLSAMEY

SEQ ID NO: 21110 - protein, 9 aa, synthetic construct
  REGION 1..9: note = Phosphoacetylglucosamine mutase (519-527)
LAHEVSLAV

SEQ ID NO: 21111 - protein, 11 aa, synthetic construct
  REGION 1..11: note = Ancient ubiquitous protein 1 (320-330)
LAKTGCVDLTI

SEQ ID NO: 21112 - protein, 9 aa, synthetic construct
  REGION 1..9: note = Splicing factor 3B subunit 3 (765-773)
LALEKLGAV

SEQ ID NO: 21113 - protein, 8 aa, synthetic construct
  REGION 1..8: note = EH domain-containing protein 1 (503-510)
LANHLIKV

SEQ ID NO: 21114 - protein, 8 aa, synthetic construct
  REGION 1..8: note = Alpha-2-macroglobulin-like protein 1 (37-44)
LAPDPSLV

SEQ ID NO: 21115 - protein, 8 aa, synthetic construct
  REGION 1..8: note = COP9 signalosome complex subunit 1 (358-365)
LAPHVRTL

SEQ ID NO: 21116 - protein, 9 aa, synthetic construct
  REGION 1..9: note = WAS/WASL-interacting protein family member 2 (294-302)
LAPPPPTSA

SEQ ID NO: 21117 - protein, 8 aa, synthetic construct
  REGION 1..8: note = Ancient ubiquitous protein 1 (300-307)
LAQRVKEV

SEQ ID NO: 21118 - protein, 9 aa, synthetic construct
  REGION 1..9: note = Fatty acid synthase (899-907)
LARALGLGV

SEQ ID NO: 21119 - protein, 10 aa, synthetic construct
  REGION 1..10: note = Molybdate-anion transporter (181-190)
LAVVAGVAAE

SEQ ID NO: 21120 - protein, 18 aa, synthetic construct
  REGION 1..18: note = Epidermal growth factor receptor (5-22)
LAVVSLNITSLGLRSLKE

SEQ ID NO: 21121 - protein, 7 aa, synthetic construct
  REGION 1..7: note = Serum albumin (484-490)
LCVLHEK

SEQ ID NO: 21122 - protein, 23 aa, synthetic construct
  REGION 1..23: note = Actin, cytoplasmic 2 (73-95)
LCYVALDFEQEMATAASSSSLEK

SEQ ID NO: 21123 - protein, 8 aa, synthetic construct
  REGION 1..8: note = Coiled-coil domain-containing protein 93 (525-532)
LDDKKVYL

SEQ ID NO: 21124 - protein, 10 aa, synthetic construct
  REGION 1..10: note = Melanoma inhibitory activity protein 3 (157-166)
LDDTAKNLRV

SEQ ID NO: 21125 - protein, 8 aa, synthetic construct
  REGION 1..8: note = Axin-1 (509-516)
LDEHVQRV

SEQ ID NO: 21126 - protein, 8 aa, synthetic construct
  REGION 1..8: note = Probable ATP-dependent RNA helicase DDX27 (86-93)
LDEKIEKV

SEQ ID NO: 21127 - protein, 8 aa, synthetic construct
  REGION 1..8: note = U6 snRNA-associated Sm-like protein LSm8 (17-24)
LDESHERV

SEQ ID NO: 21128 - protein, 37 aa, synthetic construct
  REGION 1..37: note = Collagen alpha-1(XX) chain (189-225)
LDFLQLGALAGLLSRLICQRLQGGSPRQGPAAAPALD

SEQ ID NO: 21129 - protein, 8 aa, synthetic construct
  REGION 1..8: note = Prelamin-A/C (55-62)
LDFQKNIY

SEQ ID NO: 21130 - protein, 10 aa, synthetic construct
  REGION 1..10: note = ATP-binding cassette sub-family A member 13 (447-456)
LDGALRNAIA

SEQ ID NO: 21131 - protein, 7 aa, synthetic construct
  REGION 1..7: note = Mitochondrial dicarboxylate carrier (145-151)
LDGLYRV

SEQ ID NO: 21132 - protein, 7 aa, synthetic construct
  REGION 1..7: note = Heat shock protein HSP 90-beta (497-503)
LDKKVEK

SEQ ID NO: 21133 - protein, 8 aa, synthetic construct
  REGION 1..8: note = RHO/RAC effector protein (1024-1031)
LDKNDHSL

SEQ ID NO: 21134 - protein, 7 aa, synthetic construct
  REGION 1..7: note = Small subunit processome component 20 homolog (301-307)
LDLHTKV

SEQ ID NO: 21135 - protein, 8 aa, synthetic construct
  REGION 1..8: note = Exportin-1 (715-722)
LDMLNVYK

SEQ ID NO: 21136 - protein, 9 aa, synthetic construct
  REGION 1..9: note = Mediator of RNA polymerase II transcription subunit 12 (1430-1438)
LDMLSVLIN

SEQ ID NO: 21137 - protein, 8 aa, synthetic construct
  REGION 1..8: note = Serine/threonine-protein kinase N1 (459-466)
LDNERHEV

SEQ ID NO: 21138 - protein, 9 aa, synthetic construct
  REGION 1..9: note = SWI/SNF-related matrix-associated actin-dependent regulator of chromatin subfamily A member 5 (921-929)
LDTKIGRYK

SEQ ID NO: 21139 - protein, 9 aa, synthetic construct
  REGION 1..9: note = Serine-protein kinase ATM (1050-1058)
LEADPYSKW

SEQ ID NO: 21140 - protein, 13 aa, synthetic construct
  REGION 1..13: note = Erlin-2 (327-339)
LEDEPLETATKEN

SEQ ID NO: 21141 - protein, 10 aa, synthetic construct
  REGION 1..10: note = Spectrin beta chain, non-erythrocytic 1 (740-749)
LEEASLLHQF

SEQ ID NO: 21142 - protein, 9 aa, synthetic construct
  REGION 1..9: note = Structural maintenance of chromosomes protein 1A (367-375)
LEENQVKKY

SEQ ID NO: 21143 - protein, 13 aa, synthetic construct
  REGION 1..13: note = Moesin (16-28)
LEFAIQPNTTGKQ

SEQ ID NO: 21144 - protein, 14 aa, synthetic construct
  REGION 1..14: note = Moesin (16-29)
LEFAIQPNTTGKQL

SEQ ID NO: 21145 - protein, 10 aa, synthetic construct
  REGION 1..10: note = Synemin (898-907)
LEGDLGSTHW

SEQ ID NO: 21146 - protein, 7 aa, synthetic construct
  REGION 1..7: note = Melanoma-associated antigen 4 (288-294)
LEHVVRV

SEQ ID NO: 21147 - protein, 9 aa, synthetic construct
  REGION 1..9: note = Keratin, type II cytoskeletal 1 (477-485)
LEIATYRTL

SEQ ID NO: 21148 - protein, 9 aa, synthetic construct
  REGION 1..9: note = Integrator complex subunit 11 (341-349)
LEMEGRQVL

SEQ ID NO: 21149 - protein, 9 aa, synthetic construct
  REGION 1..9: note = Voltage-dependent calcium channel subunit alpha-2/delta-1 (566-574)
LENDIKVEI

SEQ ID NO: 21150 - protein, 9 aa, synthetic construct
  REGION 1..9: note = Histone acetyltransferase type B catalytic subunit (44-52)
LENDIRTFF

SEQ ID NO: 21151 - protein, 17 aa, synthetic construct
  REGION 1..17: note = Thioredoxin domain-containing protein 15 (185-201)
LENFTLKILNMSQDLMD

SEQ ID NO: 21152 - protein, 12 aa, synthetic construct
  REGION 1..12: note = HLA class I histocompatibility antigen, A-2 alpha chain (171-182)
LENGKETLQRTD

SEQ ID NO: 21153 - protein, 9 aa, synthetic construct
  REGION 1..9: note = V-type proton ATPase subunit H (318-326)
LENLEQQKY

SEQ ID NO: 21154 - protein, 15 aa, synthetic construct
  REGION 1..15: note = Tubulin beta-6 chain (68-82)
LEPGTMDSVRSGPFG

SEQ ID NO: 21155 - protein, 9 aa, synthetic construct
  REGION 1..9: note = DNA repair protein RAD51 homolog 3 (91-99)
LEQEHTQGF

SEQ ID NO: 21156 - protein, 9 aa, synthetic construct
  REGION 1..9: note = Laminin subunit gamma-1 (1296-1304)
LEQLIDQKL

SEQ ID NO: 21157 - protein, 8 aa, synthetic construct
  REGION 1..8: note = Serine/arginine-rich splicing factor 3 (26-33)
LERAFGYY

SEQ ID NO: 21158 - protein, 8 aa, synthetic construct
  REGION 1..8: note = Melanoma-associated antigen 4 (137-144)
LERVIKNY

SEQ ID NO: 21159 - protein, 14 aa, synthetic construct
  REGION 1..14: note = Kin of IRRE-like protein 1 (338-351)
LERYTVERTNSGSG

SEQ ID NO: 21160 - protein, 7 aa, synthetic construct
  REGION 1..7: note = Cyclic AMP-dependent transcription factor ATF-4 (38-44)
LEVAKHF

SEQ ID NO: 21161 - protein, 22 aa, synthetic construct
  REGION 1..22: note = Calpain-2 catalytic subunit (459-480)
LFAQLAGEDAEISAFELQTILR

SEQ ID NO: 21162 - protein, 9 aa, synthetic construct
  REGION 1..9: note = Vacuolar protein sorting-associated protein 8 homolog (853-861)
LFDQVLEFL

SEQ ID NO: 21163 - protein, 10 aa, synthetic construct
  REGION 1..10: note = Titin (9698-9707)
LFFVSEPQSI

SEQ ID NO: 21164 - protein, 8 aa, synthetic construct
  REGION 1..8: note = Protein MCM10 homolog (334-341)
LFGEVHKA

SEQ ID NO: 21165 - protein, 8 aa, synthetic construct
  REGION 1..8: note = Guanine nucleotide-binding protein subunit beta-5 (321-328)
LFGHENRV

SEQ ID NO: 21166 - protein, 10 aa, synthetic construct
  REGION 1..10: note = Cullin-7 (1270-1279)
LFGPRAAFLL

SEQ ID NO: 21167 - protein, 10 aa, synthetic construct
  REGION 1..10: note = HLA class II histocompatibility antigen, DP alpha 1 chain (167-176)
LFLPRTDYSF

SEQ ID NO: 21168 - protein, 11 aa, synthetic construct
  REGION 1..11: note = ER membrane protein complex subunit 1 (430-440)
LFLQQLAGKVV

SEQ ID NO: 21169 - protein, 8 aa, synthetic construct
  REGION 1..8: note = Asparagine synthetase (glutamine-hydrolyzing) (155-162)
LFNNAVKK

SEQ ID NO: 21170 - protein, 9 aa, synthetic construct
  REGION 1..9: note = Chloride transport protein 6 (104-112)
LFTQLKFGV

SEQ ID NO: 21171 - protein, 10 aa, synthetic construct
  REGION 1..10: note = Cytochrome c oxidase subunit 1 (347-356)
LFTVGGLTGI

SEQ ID NO: 21172 - protein, 10 aa, synthetic construct
  REGION 1..10: note = Protein-glutamine gamma-glutamyltransferase 5 (627-636)
LGAAVVNQPL

SEQ ID NO: 21173 - protein, 11 aa, synthetic construct
  REGION 1..11: note = Elastin (48-58)
LGALGGGALGP

SEQ ID NO: 21174 - protein, 7 aa, synthetic construct
  REGION 1..7: note = Proteasome subunit beta type-4 (122-128)
LGDGHSY

SEQ ID NO: 21175 - protein, 9 aa, synthetic construct
  REGION 1..9: note = Mitogen-activated protein kinase 4 (26-34)
LGFGVNGLV

SEQ ID NO: 21176 - protein, 7 aa, synthetic construct
  REGION 1..7: note = Lipopolysaccharide-responsive and beige-like anchor protein (138-144)
LGKIEKV

SEQ ID NO: 21177 - protein, 7 aa, synthetic construct
  REGION 1..7: note = EH domain-containing protein 4 (484-490)
LGKIWKL

SEQ ID NO: 21178 - protein, 9 aa, synthetic construct
  REGION 1..9: note = Probable E3 ubiquitin-protein ligase HECTD4 (712-720)
LGKYAESIL

SEQ ID NO: 21179 - protein, 20 aa, synthetic construct
  REGION 1..20: note = 14-3-3 protein beta/alpha (170-189)
LGLALNFSVFYYEILNSPEK

SEQ ID NO: 21180 - protein, 34 aa, synthetic construct
  REGION 1..34: note = Heat shock protein HSP 90-alpha (510-543)
LGLGIDEDDPTADDTSAAVTEEMPPLEGDDDTSR

SEQ ID NO: 21181 - protein, 10 aa, synthetic construct
  REGION 1..10: note = HLA class II histocompatibility antigen, DQ alpha 1 chain (223-232)
LGLSVGLVGI

SEQ ID NO: 21182 - protein, 9 aa, synthetic construct
  REGION 1..9: note = Splicing factor 3B subunit 2 (104-112)
LGPPPPLRV

SEQ ID NO: 21183 - protein, 10 aa, synthetic construct
  REGION 1..10: note = Ankyrin repeat domain-containing protein 17 (882-891)
LGQGILTETQ

SEQ ID NO: 21184 - protein, 11 aa, synthetic construct
  REGION 1..11: note = Transketolase (38-48)
LGQGLGAACGM

SEQ ID NO: 21185 - protein, 8 aa, synthetic construct
  REGION 1..8: note = 60S ribosomal protein L13a (138-145)
LGRLAHEV

SEQ ID NO: 21186 - protein, 24 aa, synthetic construct
  REGION 1..24: note = Filamin-B (1896-1919)
LGSAADFLLDISETDLSSLTASIK

SEQ ID NO: 21187 - protein, 7 aa, synthetic construct
  REGION 1..7: note = YY1-associated protein 1 (323-329)
LGSETRY

SEQ ID NO: 21188 - protein, 10 aa, synthetic construct
  REGION 1..10: note = Cadherin-2 (351-360)
LHAGTMLTTF

SEQ ID NO: 21189 - protein, 8 aa, synthetic construct
  REGION 1..8: note = Mortality factor 4-like protein 1 (291-298)
LHDFLKYL

SEQ ID NO: 21190 - protein, 10 aa, synthetic construct
  REGION 1..10: note = Cyclin-G-associated kinase (18-27)
LHSEVGAGPA

SEQ ID NO: 21191 - protein, 32 aa, synthetic construct
  REGION 1..32: note = Glia-derived nexin (345-376)
LHVSHILQKAKIEVSEDGTKASAATTAILIAR

SEQ ID NO: 21192 - protein, 34 aa, synthetic construct
  REGION 1..34: note = Glia-derived nexin (345-378)
LHVSHILQKAKIEVSEDGTKASAATTAILIARSS

SEQ ID NO: 21193 - protein, 10 aa, synthetic construct
  REGION 1..10: note = Cyclin-dependent kinase 1 (135-144)
LIDDKGTIKL

SEQ ID NO: 21194 - protein, 9 aa, synthetic construct
  REGION 1..9: note = CCR4-NOT transcription complex subunit 3 (77-85)
LIDNRKLIE

SEQ ID NO: 21195 - protein, 9 aa, synthetic construct
  REGION 1..9: note = Eukaryotic translation initiation factor 3 subunit L (66-74)
LIDQKVYEL

SEQ ID NO: 21196 - protein, 8 aa, synthetic construct
  REGION 1..8: note = Dystonin (1766-1773)
LIDRETMF

SEQ ID NO: 21197 - protein, 10 aa, synthetic construct
  REGION 1..10: note = Elongation factor 2 (102-111)
LIDSPGHVDF

SEQ ID NO: 21198 - protein, 9 aa, synthetic construct
  REGION 1..9: note = Ubiquitin-like domain-containing CTD phosphatase 1 (226-234)
LIDVKPLGV

SEQ ID NO: 21199 - protein, 8 aa, synthetic construct
  REGION 1..8: note = Programmed cell death protein 5 (92-99)
LIEILKKV

SEQ ID NO: 21200 - protein, 8 aa, synthetic construct
  REGION 1..8: note = Nuclear pore complex protein Nup205 (249-256)
LIGHLERV

SEQ ID NO: 21201 - protein, 24 aa, synthetic construct
  REGION 1..24: note = Vimentin (443-466)
LIKTVETRDGQVINETSQHHDDLE

SEQ ID NO: 21202 - protein, 10 aa, synthetic construct
  REGION 1..10: note = Syndetin (107-116)
LILEKQPAYV

SEQ ID NO: 21203 - protein, 9 aa, synthetic construct
  REGION 1..9: note = Small subunit processome component 20 homolog (1298-1306)
LILPHVPAI

SEQ ID NO: 21204 - protein, 9 aa, synthetic construct
  REGION 1..9: note = Patatin-like phospholipase domain-containing protein 2 (154-162)
LIPPSLQGV

SEQ ID NO: 21205 - protein, 9 aa, synthetic construct
  REGION 1..9: note = Histone deacetylase 6 (119-127)
LIQEGLLDR

SEQ ID NO: 21206 - protein, 9 aa, synthetic construct
  REGION 1..9: note = Membrane-bound transcription factor site-2 protease (165-173)
LISGVVHEI

SEQ ID NO: 21207 - protein, 8 aa, synthetic construct
  REGION 1..8: note = Asparagine synthetase (glutamine-hydrolyzing) (264-271)
LISKYIRK

SEQ ID NO: 21208 - protein, 11 aa, synthetic construct
  REGION 1..11: note = Histone H4 (19-29)
LIYEETRGVLK

SEQ ID NO: 21209 - protein, 11 aa, synthetic construct
  REGION 1..11: note = Endoplasmic reticulum-Golgi intermediate compartment protein 3 (328-338)
LIYHSARAIQK

SEQ ID NO: 21210 - protein, 10 aa, synthetic construct
  REGION 1..10: note = Zinc finger protein 638 (6-15)
LKALNSNSIY

SEQ ID NO: 21211 - protein, 8 aa, synthetic construct
  REGION 1..8: note = Protein FAM171B (21-28)
LKARLVPA

SEQ ID NO: 21212 - protein, 11 aa, synthetic construct
  REGION 1..11: note = E3 ubiquitin-protein ligase UHRF1 (701-711)
LKDRPASGSPF

SEQ ID NO: 21213 - protein, 7 aa, synthetic construct
  REGION 1..7: note = Putative RNA exonuclease NEF-sp (343-349)
LKFLAKV

SEQ ID NO: 21214 - protein, 13 aa, synthetic construct
  REGION 1..13: note = Triosephosphate isomerase (155-167)
LKPEFVDIINAKQ

SEQ ID NO: 21215 - protein, 14 aa, synthetic construct
  REGION 1..14: note = Transmembrane protein 181 (194-207)
LKPIQILSNPLSTY

SEQ ID NO: 21216 - protein, 8 aa, synthetic construct
  REGION 1..8: note = Clathrin light chain A (223-230)
LKQAPLVH

SEQ ID NO: 21217 - protein, 8 aa, synthetic construct
  REGION 1..8: note = Eukaryotic translation initiation factor 4 gamma 1 (786-793)
LKVPTTEK

SEQ ID NO: 21218 - protein, 10 aa, synthetic construct
  REGION 1..10: note = T-complex protein 1 subunit eta (12-21)
LLAAEFLKQV

SEQ ID NO: 21219 - protein, 11 aa, synthetic construct
  REGION 1..11: note = E3 ubiquitin-protein ligase UBR4 (195-205)
LLAAGSQLDTV

SEQ ID NO: 21220 - protein, 9 aa, synthetic construct
  REGION 1..9: note = Torsin-1B (16-24)
LLAARVVAA

SEQ ID NO: 21221 - protein, 9 aa, synthetic construct
  REGION 1..9: note = Vacuolar protein sorting-associated protein 18 homolog (338-346)
LLADRVEAV

SEQ ID NO: 21222 - protein, 9 aa, synthetic construct
  REGION 1..9: note = Protein zyg-11 homolog B (139-147)
LLADVTHLL

SEQ ID NO: 21223 - protein, 9 aa, synthetic construct
  REGION 1..9: note = Tumor suppressor candidate 3 (48-56)
LLAEKVEQL

SEQ ID NO: 21224 - protein, 12 aa, synthetic construct
  REGION 1..12: note = Sulfhydryl oxidase 1 (651-662)
LLAESRAEKNRL

SEQ ID NO: 21225 - protein, 11 aa, synthetic construct
  REGION 1..11: note = Poly (ADP-ribose) polymerase 10 (465-475)
LLAGLGDVALL

SEQ ID NO: 21226 - protein, 9 aa, synthetic construct
  REGION 1..9: note = General transcription factor IIH subunit 3 (91-99)
LLAGSLAKA

SEQ ID NO: 21227 - protein, 9 aa, synthetic construct
  REGION 1..9: note = E3 ubiquitin-protein ligase MARCH6 (678-686)
LLAGVVPLL

SEQ ID NO: 21228 - protein, 10 aa, synthetic construct
  REGION 1..10: note = DNA-directed RNA polymerases I, II, and III subunit RPABC5 (49-58)
LLAHVDLIEK

SEQ ID NO: 21229 - protein, 25 aa, synthetic construct
  REGION 1..25: note = RWD domain-containing protein 1 (86-110)
LLALQAEENLGMVMIFTLVTAVQEK

SEQ ID NO: 21230 - protein, 9 aa, synthetic construct
  REGION 1..9: note = N-terminal kinase-like protein (58-66)
LLAPKLNEA

SEQ ID NO: 21231 - protein, 9 aa, synthetic construct
  REGION 1..9: note = Actin-binding protein anillin (610-618)
LLAPLAQTV

SEQ ID NO: 21232 - protein, 9 aa, synthetic construct
  REGION 1..9: note = Transmembrane and coiled-coil domain-containing protein 3 (411-419)
LLAPVLWRA

SEQ ID NO: 21233 - protein, 8 aa, synthetic construct
  REGION 1..8: note = Receptor-interacting serine/threonine-protein kinase 4 (150-157)
LLDAHYHV

SEQ ID NO: 21234 - protein, 9 aa, synthetic construct
  REGION 1..9: note = Brefeldin A-inhibited guanine nucleotide-exchange protein 1 (1477-1485)
LLDDIFAQL

SEQ ID NO: 21235 - protein, 11 aa, synthetic construct
  REGION 1..11: note = ETS translocation variant 1 (241-251)
LLDDPSNSHFI

SEQ ID NO: 21236 - protein, 10 aa, synthetic construct
  REGION 1..10: note = Contactin-associated protein-like 4 (266-275)
LLDDQHWHSV

SEQ ID NO: 21237 - protein, 9 aa, synthetic construct
  REGION 1..9: note = Protein FAM179B (402-410)
LLDDSNFKV

SEQ ID NO: 21238 - protein, 8 aa, synthetic construct
  REGION 1..8: note = von Willebrand factor A domain-containing protein 8 (512-519)
LLDGIHRV

SEQ ID NO: 21239 - protein, 9 aa, synthetic construct
  REGION 1..9: note = Leucine-rich repeat-containing protein 40 (571-579)
LLDGNPFRV

SEQ ID NO: 21240 - protein, 8 aa, synthetic construct
  REGION 1..8: note = Uridine-cytidine kinase-like 1 (454-461)
LLDHDVPE

SEQ ID NO: 21241 - protein, 9 aa, synthetic construct
  REGION 1..9: note = Armadillo repeat protein deleted in velo-cardio-facial syndrome (408-416)
LLDHPRAEV

SEQ ID NO: 21242 - protein, 9 aa, synthetic construct
  REGION 1..9: note = Integrator complex subunit 8 (617-625)
LLDIHTHEA

SEQ ID NO: 21243 - protein, 9 aa, synthetic construct
  REGION 1..9: note = RNA-binding protein 20 (68-76)
LLDKNPFSV

SEQ ID NO: 21244 - protein, 8 aa, synthetic construct
  REGION 1..8: note = Small subunit processome component 20 homolog (300-307)
LLDLHTKV

SEQ ID NO: 21245 - protein, 9 aa, synthetic construct
  REGION 1..9: note = AP-1 complex subunit beta-1 (395-403)
LLDLIQTKV

SEQ ID NO: 21246 - protein, 9 aa, synthetic construct
  REGION 1..9: note = ERI1 exoribonuclease 3 (155-163)
LLDPNVKSI

SEQ ID NO: 21247 - protein, 10 aa, synthetic construct
  REGION 1..10: note = DDB1- and CUL4-associated factor 16 (80-89)
LLDPSTPVHI

SEQ ID NO: 21248 - protein, 8 aa, synthetic construct
  REGION 1..8: note = Coiled-coil domain-containing protein 180 (707-714)
LLDQLRQQ

SEQ ID NO: 21249 - protein, 7 aa, synthetic construct
  REGION 1..7: note = Protein Bop (113-119)
LLDRFLA

SEQ ID NO: 21250 - protein, 8 aa, synthetic construct
  REGION 1..8: note = Nuclear pore complex protein Nup205 (319-326)
LLDRIVSV

SEQ ID NO: 21251 - protein, 10 aa, synthetic construct
  REGION 1..10: note = Plexin-B3 (450-459)
LLDSSGSHLY

SEQ ID NO: 21252 - protein, 9 aa, synthetic construct
  REGION 1..9: note = Protein PML (195-203)
LLDSSHSEL

SEQ ID NO: 21253 - protein, 11 aa, synthetic construct
  REGION 1..11: note = Asparagine synthetase (glutamine-hydrolyzing) (42-52)
LLDTANKKVFL

SEQ ID NO: 21254 - protein, 8 aa, synthetic construct
  REGION 1..8: note = Myosin-10 (265-272)
LLEKSRAV

SEQ ID NO: 21255 - protein, 10 aa, synthetic construct
  REGION 1..10: note = Serine/threonine-protein kinase Kist (127-136)
LLEMFSGMKL

SEQ ID NO: 21256 - protein, 10 aa, synthetic construct
  REGION 1..10: note = Serine/threonine-protein kinase MRCK gamma (979-988)
LLFDAPDLRL

SEQ ID NO: 21257 - protein, 9 aa, synthetic construct
  REGION 1..9: note = Cartilage-associated protein (322-330)
LLFDQNDKV

SEQ ID NO: 21258 - protein, 13 aa, synthetic construct
  REGION 1..13: note = Protein wntless homolog (297-309)
LLFGDIRQGIFYA

SEQ ID NO: 21259 - protein, 9 aa, synthetic construct
  REGION 1..9: note = Cytoplasmic dynein 2 heavy chain 1 (138-146)
LLFGDLLRV

SEQ ID NO: 21260 - protein, 10 aa, synthetic construct
  REGION 1..10: note = Protein YIF1B (224-233)
LLFGKIGYYL

SEQ ID NO: 21261 - protein, 9 aa, synthetic construct
  REGION 1..9: note = Probable palmitoyltransferase ZDHHC24 (214-222)
LLFHGMLLL

SEQ ID NO: 21262 - protein, 9 aa, synthetic construct
  REGION 1..9: note = Kelch-like protein 5 (518-526)
LLGDKLYAV

SEQ ID NO: 21263 - protein, 9 aa, synthetic construct
  REGION 1..9: note = E3 ubiquitin-protein ligase RNF213 (957-965)
LLGDMEWRL

SEQ ID NO: 21264 - protein, 8 aa, synthetic construct
  REGION 1..8: note = Receptor-type tyrosine-protein phosphatase T (1084-1091)
LLGFVRQV

SEQ ID NO: 21265 - protein, 11 aa, synthetic construct
  REGION 1..11: note = Neurosecretory protein VGF (286-296)
LLGGSEAGERL

SEQ ID NO: 21266 - protein, 8 aa, synthetic construct
  REGION 1..8: note = MAU2 chromatid cohesion factor homolog (357-364)
LLGHIFYV

SEQ ID NO: 21267 - protein, 8 aa, synthetic construct
  REGION 1..8: note = Polypeptide N-acetylgalactosaminyltransferase 2 (186-193)
LLGKIEKV

SEQ ID NO: 21268 - protein, 8 aa, synthetic construct
  REGION 1..8: note = Spectrin alpha chain, non-erythrocytic 1 (418-425)
LLGSAHEV

SEQ ID NO: 21269 - protein, 10 aa, synthetic construct
  REGION 1..10: note = Zinc finger X-linked protein ZXDA (257-266)
LLGSGPGVVL

SEQ ID NO: 21270 - protein, 10 aa, synthetic construct
  REGION 1..10: note = CUB and sushi domain-containing protein 1 (2833-2842)
LLGSSALTCM

SEQ ID NO: 21271 - protein, 9 aa, synthetic construct
  REGION 1..9: note = Protein virilizer homolog (786-794)
LLGTLHNLY

SEQ ID NO: 21272 - protein, 9 aa, synthetic construct
  REGION 1..9: note = Zinc transporter ZIP1 (215-223)
LLHKGILAV

SEQ ID NO: 21273 - protein, 11 aa, synthetic construct
  REGION 1..11: note = Catenin beta-1 (263-273)
LLHQEGAKMAV

SEQ ID NO: 21274 - protein, 9 aa, synthetic construct
  REGION 1..9: note = Actin-binding protein anillin (773-781)
LLIDELNKL

SEQ ID NO: 21275 - protein, 16 aa, synthetic construct
  REGION 1..16: note = Tastin (465-480)
LLIGLAVGGGGGEDST

SEQ ID NO: 21276 - protein, 9 aa, synthetic construct
  REGION 1..9: note = Mitochondrial dynamics protein MID49 (418-426)
LLIGSLEQA

SEQ ID NO: 21277 - protein, 25 aa, synthetic construct
  REGION 1..25: note = Vimentin (276-300)
LLIKTVETRDGQVINETSQHHDDLE

SEQ ID NO: 21278 - protein, 9 aa, synthetic construct
  REGION 1..9: note = Histone deacetylase 9 (93-101)
LLIQQQQQI

SEQ ID NO: 21279 - protein, 10 aa, synthetic construct
  REGION 1..10: note Dolichyl-diphosphooligosaccharide-proteinosyltransferase 48 kDa subunit (180-189)
LLKAPTIVGK

SEQ ID NO: 21280 - protein, 9 aa, synthetic construct
  REGION 1..9: note = Protein FAM171B (20-28)
LLKARLVPA

SEQ ID NO: 21281 - protein, 8 aa, synthetic construct
  REGION 1..8: note = Melanoma-associated antigen 10 (311-318)
LLKFLAKV

SEQ ID NO: 21282 - protein, 9 aa, synthetic construct
  REGION 1..9: note = Protein TANC1 (360-368)
LLKPLLFEV

SEQ ID NO: 21283 - protein, 8 aa, synthetic construct
  REGION 1..8: note = Asparagine synthetase (glutamine-hydrolyzing) (187-194)
LLKQLKEA

SEQ ID NO: 21284 - protein, 11 aa, synthetic construct
  REGION 1..11: note = Transmembrane protein 132B (372-382)
LLKSGGPDAFT

SEQ ID NO: 21285 - protein, 13 aa, synthetic construct
  REGION 1..13: note = BAH and coiled-coil domain-containing protein 1 (636-648)
LLKYSSQALVVGQ

SEQ ID NO: 21286 - protein, 10 aa, synthetic construct
  REGION 1..10: note = Procollagen-lysine,2-oxoglutarate 5-dioxygenase 3 (319-328)
LLLDYPPDRV

SEQ ID NO: 21287 - protein, 12 aa, synthetic construct
  REGION 1..12: note = Procollagen-lysine,2-oxoglutarate 5-dioxygenase 3 (319-330)
LLLDYPPDRVTL

SEQ ID NO: 21288 - protein, 8 aa, synthetic construct
  REGION 1..8: note = Mediator of RNA polymerase II transcription subunit 12 (988-995)
LLLEDLIR

SEQ ID NO: 21289 - protein, 9 aa, synthetic construct
  REGION 1..9: note = Mediator of RNA polymerase II transcription subunit 12 (988-996)
LLLEDLIRC

SEQ ID NO: 21290 - protein, 9 aa, synthetic construct
  REGION 1..9: note = Myosin phosphatase Rho-interacting protein (997-1005)
LLLEKTQEL

SEQ ID NO: 21291 - protein, 21 aa, synthetic construct
  REGION 1..21: note = Fatty acid synthase (81-101)
LLLEVTYEAIVDGGINPDSLR

SEQ ID NO: 21292 - protein, 15 aa, synthetic construct
  REGION 1..15: note = Ephrin type-B receptor 3 (28-42)
LLLLPAGCRALEETL

SEQ ID NO: 21293 - protein, 9 aa, synthetic construct
  REGION 1..9: note = TBC1 domain family member 9 (215-223)
LLLPDVIKV

SEQ ID NO: 21294 - protein, 9 aa, synthetic construct
  REGION 1..9: note = Lysosomal thioesterase PPT2 (16-24)
LLLPFLPLL

SEQ ID NO: 21295 - protein, 9 aa, synthetic construct
  REGION 1..9: note = Tartrate-resistant acid phosphatase type 5 (13-21)
LLLPSLADG

SEQ ID NO: 21296 - protein, 9 aa, synthetic construct
  REGION 1..9: note = Cathepsin K (7-15)
LLLPVVSFA

SEQ ID NO: 21297 - protein, 9 aa, synthetic construct
  REGION 1..9: note = 4F2 cell-surface antigen heavy chain (521-529)
LLLRFPYAA

SEQ ID NO: 21298 - protein, 11 aa, synthetic construct
  REGION 1..11: note = Glypican-6 (15-25)
LLLSLPAGADV

SEQ ID NO: 21299 - protein, 11 aa, synthetic construct
  REGION 1..11: note = Tyrosinase (514-524)
LLMEKEDYHSL

SEQ ID NO: 21300 - protein, 9 aa, synthetic construct
  REGION 1..9: note = Glutamine-tRNA ligase (137-145)
LLMGEARAV

SEQ ID NO: 21301 - protein, 9 aa, synthetic construct
  REGION 1..9: note = Nucleolar protein 11 (405-413)
LLNAILHSA

SEQ ID NO: 21302 - protein, 11 aa, synthetic construct
  REGION 1..11: note = Eukaryotic translation initiation factor 4 gamma 1 (363-373)
LLNGAPSPPAV

SEQ ID NO: 21303 - protein, 9 aa, synthetic construct
  REGION 1..9: note = Plexin-B3 (1376-1384)
LLNSKLFLL

SEQ ID NO: 21304 - protein, 9 aa, synthetic construct
  REGION 1..9: note = E3 ubiquitin-protein ligase CBL (87-95)
LLPDTYQHL

SEQ ID NO: 21305 - protein, 9 aa, synthetic construct
  REGION 1..9: note = F-box only protein 46 (301-309)
LLPEHVLVK

SEQ ID NO: 21306 - protein, 11 aa, synthetic construct
  REGION 1..11: note = Fibronectin isoform 6 (1328-1338)
LLPGTEYVVSV

SEQ ID NO: 21307 - protein, 9 aa, synthetic construct
  REGION 1..9: note = Fibronectin type III domain-containing protein 3B (282-290)
LLPGTVYRF

SEQ ID NO: 21308 - protein, 9 aa, synthetic construct
  REGION 1..9: note = Transportin-2 (391-399)
LLPHLLPLL

SEQ ID NO: 21309 - protein, 9 aa, synthetic construct
  REGION 1..9: note = Atlastin-3 (264-272)
LLPHPGLQV

SEQ ID NO: 21310 - protein, 9 aa, synthetic construct
  REGION 1..9: note = Probable E3 SUMO-protein ligase RNF212 (145-153)
LLPPHSSAP

SEQ ID NO: 21311 - protein, 9 aa, synthetic construct
  REGION 1..9: note = Matrix metalloproteinase-17 (588-596)
LLPPLSPGA

SEQ ID NO: 21312 - protein, 9 aa, synthetic construct
  REGION 1..9: note = Astrotactin-2 (41-49)
LLPPPPLLA

SEQ ID NO: 21313 - protein, 9 aa, synthetic construct
  REGION 1..9: note = Serine/threonine-protein kinase 32A (347-355)
LLQEHLDSV

SEQ ID NO: 21314 - protein, 14 aa, synthetic construct
  REGION 1..14: note = Adhesion G-protein coupled receptor F3 (210-223)
LLQPGTQVSVTSSH

SEQ ID NO: 21315 - protein, 10 aa, synthetic construct
  REGION 1..10: note = Interleukin-24 (91-100)
LLQQEVLQNV

SEQ ID NO: 21316 - protein, 9 aa, synthetic construct
  REGION 1..9: note = Oxysterol-binding protein-related protein 10 (231-239)
LLQQSVHQA

SEQ ID NO: 21317 - protein, 9 aa, synthetic construct
  REGION 1..9: note = Nodal modulator 3 (688-696)
LLRDGENYV

SEQ ID NO: 21318 - protein, 7 aa, synthetic construct
  REGION 1..7: note = Serine/threonine-protein phosphatase PP1-beta catalytic subunit (71-77)
LLRLFEY

SEQ ID NO: 21319 - protein, 9 aa, synthetic construct
  REGION 1..9: note = Sorting nexin-10 (27-35)
LLSDSSLHL

SEQ ID NO: 21320 - protein, 9 aa, synthetic construct
  REGION 1..9: note = Brefeldin A-inhibited guanine nucleotide-exchange protein 2 (1424-1432)
LLSDVFAQL

SEQ ID NO: 21321 - protein, 9 aa, synthetic construct
  REGION 1..9: note = BTB/POZ domain-containing protein 1 (67-75)
LLSDVRFVL

SEQ ID NO: 21322 - protein, 9 aa, synthetic construct
  REGION 1..9: note = Spermatogenesis-associated protein 20 (129-137)
LLSEDFVSV

SEQ ID NO: 21323 - protein, 9 aa, synthetic construct
  REGION 1..9: note = Mediator of RNA polymerase II transcription subunit 13 (188-196)
LLSEEHITL

SEQ ID NO: 21324 - protein, 9 aa, synthetic construct
  REGION 1..9: note = Synemin (707-715)
LLSKDIKEV

SEQ ID NO: 21325 - protein, 12 aa, synthetic construct
  REGION 1..12: note = Plexin-B3 (33-44)
LLSPPPLPLTGA

SEQ ID NO: 21326 - protein, 9 aa, synthetic construct
  REGION 1..9: note = Nuclear pore complex protein Nup88 (115-123)
LLSPTQHHV

SEQ ID NO: 21327 - protein, 9 aa, synthetic construct
  REGION 1..9: note = Fanconi anemia group D2 protein (1110-1118)
LLSQSVHYL

SEQ ID NO: 21328 - protein, 8 aa, synthetic construct
  REGION 1..8: note = Regulatory-associated protein of mTOR (224-231)
LLSQVHRL

SEQ ID NO: 21329 - protein, 10 aa, synthetic construct
  REGION 1..10: note = Muskelin (78-87)
LLSSGLKNDY

SEQ ID NO: 21330 - protein, 8 aa, synthetic construct
  REGION 1..8: note = Ras GTPase-activating-like protein IQGAP2 (416-423)
LLSVKLEV

SEQ ID NO: 21331 - protein, 9 aa, synthetic construct
  REGION 1..9: note = Mediator of RNA polymerase II transcription subunit 13 (1410-1418)
LLTDGIMRV

SEQ ID NO: 21332 - protein, 9 aa, synthetic construct
  REGION 1..9: note = T-complex protein 1 subunit zeta-2 (471-479)
LLVDEIMRA

SEQ ID NO: 21333 - protein, 11 aa, synthetic construct
  REGION 1..11: note = Nuclear factor of activated T-cells, cytoplasmic 2 (115-125)
LLVEQPPLAGV

SEQ ID NO: 21334 - protein, 11 aa, synthetic construct
  REGION 1..11: note = Ankyrin repeat and KH domain-containing protein 1 (1008-1018)
LLVQEPDGLMV

SEQ ID NO: 21335 - protein, 9 aa, synthetic construct
  REGION 1..9: note = Structure-specific endonuclease subunit SLX1 (242-250)
LLWGDLIWL

SEQ ID NO: 21336 - protein, 9 aa, synthetic construct
  REGION 1..9: note = Interleukin-24 (41-49)
LLWSQVSGA

SEQ ID NO: 21337 - protein, 11 aa, synthetic construct
  REGION 1..11: note = Interleukin-24 (41-51)
LLWSQVSGAQG

SEQ ID NO: 21338 - protein, 9 aa, synthetic construct
  REGION 1..9: note = Glutamate receptor ionotropic, kainate 3 (325-333)
LLYDAVHIV

SEQ ID NO: 21339 - protein, 11 aa, synthetic construct
  REGION 1..11: note = AT-rich interactive domain-containing protein 1A (1336-1346)
LLYDDNSIMTF

SEQ ID NO: 21340 - protein, 10 aa, synthetic construct
  REGION 1..10: note = Intron-binding protein aquarius (152-161)
LLYDFQLINV

SEQ ID NO: 21341 - protein, 9 aa, synthetic construct
  REGION 1..9: note = Nicastrin (501-509)
LLYGFLIKA

SEQ ID NO: 21342 - protein, 10 aa, synthetic construct
  REGION 1..10: note = Adenosine 3'-phospho 5'-phosphosulfate transporter 1 (251-260)
LLYGHTVTVV

SEQ ID NO: 21343 - protein, 10 aa, synthetic construct
  REGION 1..10: note = DNA-dependent protein kinase catalytic subunit (421-430)
LLYLDTVPEV

SEQ ID NO: 21344 - protein, 9 aa, synthetic construct
  REGION 1..9: note = Unconventional myosin-Ib (533-541)
LLYRDLSQA

SEQ ID NO: 21345 - protein, 9 aa, synthetic construct
  REGION 1..9: note = Nuclear pore complex protein Nup85 (266-274)
LLYSNPTVK

SEQ ID NO: 21346 - protein, 10 aa, synthetic construct
  REGION 1..10: note = Microtubule-actin cross-linking factor 1, isoforms 1/2/3/5 (794-803)
LMDEKLLHNV

SEQ ID NO: 21347 - protein, 10 aa, synthetic construct
  REGION 1..10: note = Tyrosinase (515-524)
LMEKEDYHSL

SEQ ID NO: 21348 - protein, 11 aa, synthetic construct
  REGION 1..11: note = Tyrosinase (515-525)
LMEKEDYHSLY

SEQ ID NO: 21349 - protein, 8 aa, synthetic construct
  REGION 1..8: note = Leucine-tRNA ligase, cytoplasmic (211-218)
LMEVTHDL

SEQ ID NO: 21350 - protein, 8 aa, synthetic construct
  REGION 1..8: note = Dynein light chain roadblock-type 1 (52-59)
LMHSFILK

SEQ ID NO: 21351 - protein, 10 aa, synthetic construct
  REGION 1..10: note = T-complex protein 1 subunit beta (159-168)
LMNIAGTTLS

SEQ ID NO: 21352 - protein, 8 aa, synthetic construct
  REGION 1..8: note = Phosphatidylinositol 5-phosphate 4-kinase type-2 beta (66-73)
LMPDDFKA

SEQ ID NO: 21353 - protein, 9 aa, synthetic construct
  REGION 1..9: note = Folliculin-interacting protein 1 (804-812)
LMSDLSHAV

SEQ ID NO: 21354 - protein, 9 aa, synthetic construct
  REGION 1..9: note = Constitutive coactivator of PPAR-gamma-like protein 2 (619-627)
LMYPYIYHV

SEQ ID NO: 21355 - protein, 9 aa, synthetic construct
  REGION 1..9: note = Sodium channel protein type 5 subunit alpha (1513-1521)
LNKYQGFIF

SEQ ID NO: 21356 - protein, 6 aa, synthetic construct
  REGION 1..6: note = Heterogeneous nuclear ribonucleoprotein K (133-138)
LNYQHY

SEQ ID NO: 21357 - protein, 8 aa, synthetic construct
  REGION 1..8: note = Tropomodulin-2 (46-53)
LPAGFRQK

SEQ ID NO: 21358 - protein, 7 aa, synthetic construct
  REGION 1..7: note = Probable ATP-dependent RNA helicase DDX5 (150-156)
LPAIVHI

SEQ ID NO: 21359 - protein, 11 aa, synthetic construct
  REGION 1..11: note = Basement membrane-specific heparan sulfate proteoglycan core protein (1907-1917)
LPAKAQIHGGI

SEQ ID NO: 21360 - protein, 8 aa, synthetic construct
  REGION 1..8: note = UV excision repair protein RAD23 homolog B (278-285)
LPALLQQI

SEQ ID NO: 21361 - protein, 9 aa, synthetic construct
  REGION 1..9: note = Potassium/sodium hyperpolarization-activated cyclic nucleotide-gated channel 3 (671-679)
LPAPPARTL

SEQ ID NO: 21362 - protein, 10 aa, synthetic construct
  REGION 1..10: note = AT-hook-containing transcription factor (393-402)
LPAPSGQAPM

SEQ ID NO: 21363 - protein, 10 aa, synthetic construct
  REGION 1..10: note = Lysosome-associated membraneoprotein 1 (249-258)
LPDARDPAFK

SEQ ID NO: 21364 - protein, 16 aa, synthetic construct
  REGION 1..16: note = Legumain (198-213)
LPDNINVYATTAANPR

SEQ ID NO: 21365 - protein, 8 aa, synthetic construct
  REGION 1..8: note = Serine/threonine-protein kinase ULK3 (109-116)
LPEKVARV

SEQ ID NO: 21366 - protein, 8 aa, synthetic construct
  REGION 1..8: note = Solute carrier family 23 member 2 (603-610)
LPFGMNII

SEQ ID NO: 21367 - protein, 12 aa, synthetic construct
  REGION 1..12: note = Retinoic acid receptor RXR-beta (168-179)
LPGGGSGPPEDV

SEQ ID NO: 21368 - protein, 15 aa, synthetic construct
  REGION 1..15: note = Mucin-19 (5182-5196)
LPGVSAGLTGTIGSP

SEQ ID NO: 21369 - protein, 9 aa, synthetic construct
  REGION 1..9: note = (Pyruvate dehydrogenase (acetyl-transferring))-phosphatase 1, mitochondrial (168-176)
LPHETLLEI

SEQ ID NO: 21370 - protein, 8 aa, synthetic construct
  REGION 1..8: note = Transportin-1 (395-402)
LPHILPLL

SEQ ID NO: 21371 - protein, 9 aa, synthetic construct
  REGION 1..9: note = Phosphatidylcholine translocator ABCB4 (1167-1175)
LPHKYETRV

SEQ ID NO: 21372 - protein, 9 aa, synthetic construct
  REGION 1..9: note = HMG domain-containing protein 3 (213-221)
LPHLPQSEI

SEQ ID NO: 21373 - protein, 9 aa, synthetic construct
  REGION 1..9: note = Low-density lipoprotein receptor-related protein 2 (704-712)
LPHPFAITI

SEQ ID NO: 21374 - protein, 8 aa, synthetic construct
  REGION 1..8: note = Melanophilin (392-399)
LPIFLPRV

SEQ ID NO: 21375 - protein, 15 aa, synthetic construct
  REGION 1..15: note = Collagen alpha-1(I) chain (1013-1027)
LPIIDVAPLDVGAPD

SEQ ID NO: 21376 - protein, 9 aa, synthetic construct
  REGION 1..9: note = Coatomer subunit gamma-1 (712-720)
LPKEDPTAV

SEQ ID NO: 21377 - protein, 9 aa, synthetic construct
  REGION 1..9: note = Tight junction protein ZO-1 (478-486)
LPKGEEVTI

SEQ ID NO: 21378 - protein, 8 aa, synthetic construct
  REGION 1..8: note = 40S ribosomal protein S26 (64-71)
LPKLYVKL

SEQ ID NO: 21379 - protein, 9 aa, synthetic construct
  REGION 1..9: note = Interferon alpha-inducible protein 27, mitochondrial (28-36)
LPLARIATV

SEQ ID NO: 21380 - protein, 9 aa, synthetic construct
  REGION 1..9: note = Receptor tyrosine-protein kinase erbB-3 (97-105)
LPLPNLRVV

SEQ ID NO: 21381 - protein, 9 aa, synthetic construct
  REGION 1..9: note = Ubiquitin domain-containing protein UBFD1 (251-259)
LPMGSIKNV

SEQ ID NO: 21382 - protein, 9 aa, synthetic construct
  REGION 1..9: note = Ras-related protein Rab-38 (114-122)
LPNGKPVSV

SEQ ID NO: 21383 - protein, 9 aa, synthetic construct
  REGION 1..9: note = Transcriptional regulator Kaiso (298-306)
LPNHMPSSI

SEQ ID NO: 21384 - protein, 9 aa, synthetic construct
  REGION 1..9: note = Bromodomain-containing protein 4 (958-966)
LPPPPHPSV

SEQ ID NO: 21385 - protein, 9 aa, synthetic construct
  REGION 1..9: note = Shootin-1 (302-310)
LPPPPPNPI

SEQ ID NO: 21386 - protein, 8 aa, synthetic construct
  REGION 1..8: note = Nicotinamide phosphoribosyltransferase (344-351)
LPPYLRVI

SEQ ID NO: 21387 - protein, 9 aa, synthetic construct
  REGION 1..9: note = Kinase D-interacting substrate of 220 kDa (104-112)
LPRDQNNGL

SEQ ID NO: 21388 - protein, 9 aa, synthetic construct
  REGION 1..9: note = Cap-specific mRNAucleoside-2'-O-)-methyltransferase 1 (631-639)
LPRDTLLSV

SEQ ID NO: 21389 - protein, 10 aa, synthetic construct
  REGION 1..10: note = Serine/threonine-protein kinase 32A (171-180)
LPRETQITTM

SEQ ID NO: 21390 - protein, 10 aa, synthetic construct
  REGION 1..10: note = Ubiquitin-associated protein 1 (236-245)
LPRGGSGSVL

SEQ ID NO: 21391 - protein, 9 aa, synthetic construct
  REGION 1..9: note = Intercellular adhesion molecule 1 (16-24)
LPRGGSVLV

SEQ ID NO: 21392 - protein, 9 aa, synthetic construct
  REGION 1..9: note = Ropporin-1B (153-161)
LPRIPFSTF

SEQ ID NO: 21393 - protein, 9 aa, synthetic construct
  REGION 1..9: note = LIM domain and actin-binding protein 1 (161-169)
LPRLSETSI

SEQ ID NO: 21394 - protein, 9 aa, synthetic construct
  REGION 1..9: note = Apolipoprotein L1 (85-93)
LPRNEADEL

SEQ ID NO: 21395 - protein, 9 aa, synthetic construct
  REGION 1..9: note = E3 ubiquitin-protein ligase TRIP12 (518-526)
LPRSSAVVV

SEQ ID NO: 21396 - protein, 9 aa, synthetic construct
  REGION 1..9: note = Periaxin (1315-1323)
LPRVGLAAP

SEQ ID NO: 21397 - protein, 8 aa, synthetic construct
  REGION 1..8: note = SET domain-containing protein 5 (1382-1389)
LPSDLRTI

SEQ ID NO: 21398 - protein, 16 aa, synthetic construct
  REGION 1..16: note = Cathepsin F (337-352)
LPSNAYSAIKNLGGLE

SEQ ID NO: 21399 - protein, 9 aa, synthetic construct
  REGION 1..9: note = Ropporin-1B (99-107)
LPTDLFNSV

SEQ ID NO: 21400 - protein, 8 aa, synthetic construct
  REGION 1..8: note = AP-5 complex subunit zeta-1 (154-161)
LPVMAKVV

SEQ ID NO: 21401 - protein, 8 aa, synthetic construct
  REGION 1..8: note = Rho guanine nucleotide exchange factor 2 (884-891)
LPVTTRSV

SEQ ID NO: 21402 - protein, 8 aa, synthetic construct
  REGION 1..8: note = Protein O-mannosyl-transferase 1 (538-545)
LPVVLQHI

SEQ ID NO: 21403 - protein, 9 aa, synthetic construct
  REGION 1..9: note = Histone-lysine N-methyltransferase 2A (1096-1104)
LPWEEREKI

SEQ ID NO: 21404 - protein, 9 aa, synthetic construct
  REGION 1..9: note = Lathosterol oxidase (84-92)
LPWISILTV

SEQ ID NO: 21405 - protein, 9 aa, synthetic construct
  REGION 1..9: note = Metallophosphoesterase MPPED2 (106-114)
LPYEYKIVI

SEQ ID NO: 21406 - protein, 8 aa, synthetic construct
  REGION 1..8: note = Glia-derived nexin (256-263)
LPYHGESI

SEQ ID NO: 21407 - protein, 10 aa, synthetic construct
  REGION 1..10: note = Glia-derived nexin (256-265)
LPYHGESISM

SEQ ID NO: 21408 - protein, 8 aa, synthetic construct
  REGION 1..8: note = Neurofibromin (488-495)
LPYLFHVV

SEQ ID NO: 21409 - protein, 10 aa, synthetic construct
  REGION 1..10: note = NAD-dependent protein deacetylase sirtuin-2 (95-104)
LPYPEAIFEI

SEQ ID NO: 21410 - protein, 10 aa, synthetic construct
  REGION 1..10: note = NAD-dependent protein deacetylase sirtuin-3, mitochondrial (173-182)
LPYPEAIFEL

SEQ ID NO: 21411 - protein, 9 aa, synthetic construct
  REGION 1..9: note = CDK5 and ABL1 enzyme substrate 1 (27-35)
LPYRDSTQV

SEQ ID NO: 21412 - protein, 8 aa, synthetic construct
  REGION 1..8: note = Serpin B6 (104-111)
LPYVGKEL

SEQ ID NO: 21413 - protein, 11 aa, synthetic construct
  REGION 1..11: note = Guanine nucleotide exchange factor VAV3 (680-690)
LQAETELINRV

SEQ ID NO: 21414 - protein, 9 aa, synthetic construct
  REGION 1..9: note = Peroxisome proliferator-activated receptor gamma coactivator-related protein 1 (1097-1105)
LQAPELANV

SEQ ID NO: 21415 - protein, 12 aa, synthetic construct
  REGION 1..12: note = Zinc finger homeobox protein 2 (544-555)
LQGFQAGPGGQG

SEQ ID NO: 21416 - protein, 16 aa, synthetic construct
  REGION 1..16: note = Proline-rich transmembrane protein 3 (172-187)
LQHEGQEGQWPPRDEG

SEQ ID NO: 21417 - protein, 24 aa, synthetic construct
  REGION 1..24: note = Plectin (387-410)
LQMEAGLCEEQLNQADALLQSDVR

SEQ ID NO: 21418 - protein, 11 aa, synthetic construct
  REGION 1..11: note = T-complex protein 1 subunit gamma (268-278)
LQMEEEYIQQL

SEQ ID NO: 21419 - protein, 14 aa, synthetic construct
  REGION 1..14: note = Glyceraldehyde-3-phosphate dehydrogenase (203-216)
LQNIIPASTGAAKA

SEQ ID NO: 21420 - protein, 9 aa, synthetic construct
  REGION 1..9: note = Ubiquitin carboxyl-terminal hydrolase 22 (305-313)
LQSDVTCQV

SEQ ID NO: 21421 - protein, 8 aa, synthetic construct
  REGION 1..8: note = Titin (123-130)
LQVRVTGI

SEQ ID NO: 21422 - protein, 18 aa, synthetic construct
  REGION 1..18: note = Collagen alpha-1(VI) chain (694-711)
LQWMAGGTFTGEALQYTR

SEQ ID NO: 21423 - protein, 8 aa, synthetic construct
  REGION 1..8: note = Interferon regulatory factor 2-binding protein 1 (301-308)
LREPGKAL

SEQ ID NO: 21424 - protein, 11 aa, synthetic construct
  REGION 1..11: note = Disintegrin and metalloproteinase domain-containing protein 10 (60-70)
LRLDFHAHGRH

SEQ ID NO: 21425 - protein, 10 aa, synthetic construct
  REGION 1..10: note = Keratin, type I cytoskeletal 10 (294-303)
LRNVSTGDVN

SEQ ID NO: 21426 - protein, 11 aa, synthetic construct
  REGION 1..11: note = Casein kinase II subunit alpha (305-315)
LRYDHQSRLTA

SEQ ID NO: 21427 - protein, 13 aa, synthetic construct
  REGION 1..13: note = SKI family transcriptional corepressor 2 (329-341)
LSAAAASLSVAAA

SEQ ID NO: 21428 - protein, 9 aa, synthetic construct
  REGION 1..9: note = DNA-binding protein RFX7 (64-72)
LSAADFGKI

SEQ ID NO: 21429 - protein, 19 aa, synthetic construct
  REGION 1..19: note = Heterogeneous nuclear ribonucleoprotein U (186-204)
LSASSLTMESFAFLWAGGR

SEQ ID NO: 21430 - protein, 9 aa, synthetic construct
  REGION 1..9: note = Unconventional myosin-Ib (87-95)
LSDEAYRSL

SEQ ID NO: 21431 - protein, 9 aa, synthetic construct
  REGION 1..9: note = Leucine-tRNA ligase, cytoplasmic (166-174)
LSDEEIVKF

SEQ ID NO: 21432 - protein, 9 aa, synthetic construct
  REGION 1..9: note = 1-phosphatidylinositol 4,5-bisphosphate phosphodiesterase beta-4 (725-733)
LSDKKIGTY

SEQ ID NO: 21433 - protein, 9 aa, synthetic construct
  REGION 1..9: note = CCAAT/enhancer-binding protein beta (118-126)
LSDLFSDDY

SEQ ID NO: 21434 - protein, 9 aa, synthetic construct
  REGION 1..9: note = Ras association domain-containing protein 3 (88-96)
LSDREHPLY

SEQ ID NO: 21435 - protein, 9 aa, synthetic construct
  REGION 1..9: note = Plexin-D1 (920-928)
LSDVAHGVW

SEQ ID NO: 21436 - protein, 9 aa, synthetic construct
  REGION 1..9: note = Melanoma antigen preferentially expressed in tumors (334-342)
LSEGDVMHL

SEQ ID NO: 21437 - protein, 9 aa, synthetic construct
  REGION 1..9: note = Putative pre-mRNA-splicing factor ATP-dependent RNA helicase DHX16 (506-514)
LSEPDLASY

SEQ ID NO: 21438 - protein, 7 aa, synthetic construct
  REGION 1..7: note = Hemoglobin subunit alpha (6-12)
LSFPTTK

SEQ ID NO: 21439 - protein, 9 aa, synthetic construct
  REGION 1..9: note = Hemoglobin subunit alpha (6-14)
LSFPTTKTY

SEQ ID NO: 21440 - protein, 9 aa, synthetic construct
  REGION 1..9: note = Sister chromatid cohesion protein PDS5 homolog B (656-664)
LSFTHPISF

SEQ ID NO: 21441 - protein, 10 aa, synthetic construct
  REGION 1..10: note = Zinc transporter ZIP12 (31-40)
LSGDALLHLI

SEQ ID NO: 21442 - protein, 10 aa, synthetic construct
  REGION 1..10: note = Asparagine synthetase (glutamine-hydrolyzing) (174-183)
LSGGLDSSLV

SEQ ID NO: 21443 - protein, 9 aa, synthetic construct
  REGION 1..9: note = Phosphorylase b kinase regulatory subunit alpha, liver isoform (46-54)
LSGQHGVTV

SEQ ID NO: 21444 - protein, 11 aa, synthetic construct
  REGION 1..11: note = PCNA-interacting partner (149-159)
LSIPTSPTSKY

SEQ ID NO: 21445 - protein, 8 aa, synthetic construct
  REGION 1..8: note = Synemin (708-715)
LSKDIKEV

SEQ ID NO: 21446 - protein, 8 aa, synthetic construct
  REGION 1..8: note = Ryanodine receptor 1 (442-449)
LSLQDLII

SEQ ID NO: 21447 - protein, 11 aa, synthetic construct
  REGION 1..11: note = Codanin-1 (382-392)
LSNLDKGTLKL

SEQ ID NO: 21448 - protein, 10 aa, synthetic construct
  REGION 1..10: note = Caprin-2 (108-117)
LSSAASPSQA

SEQ ID NO: 21449 - protein, 19 aa, synthetic construct
  REGION 1..19: note = Protein unc-13 homolog D (375-393)
LSSGQKDQGQAANMLCVVV

SEQ ID NO: 21450 - protein, 10 aa, synthetic construct
  REGION 1..10: note = Melanocyte-stimulating hormone receptor (129-138)
LSSLCFLGAI

SEQ ID NO: 21451 - protein, 9 aa, synthetic construct
  REGION 1..9: note = Protein prune homolog 2 (1282-1290)
LSSPETGKY

SEQ ID NO: 21452 - protein, 9 aa, synthetic construct
  REGION 1..9: note = Kelch-like protein 12 (386-394)
LSSVEAYNI

SEQ ID NO: 21453 - protein, 12 aa, synthetic construct
  REGION 1..12: note = AP-2 complex subunit beta (710-721)
LSTGIGMAPGGY

SEQ ID NO: 21454 - protein, 10 aa, synthetic construct
  REGION 1..10: note = Peroxisome assembly protein 12 (247-256)
LSTGLSVGVF

SEQ ID NO: 21455 - protein, 9 aa, synthetic construct
  REGION 1..9: note = Amyloid protein-binding protein 2 (472-480)
LSVGHLASL

SEQ ID NO: 21456 - protein, 7 aa, synthetic construct
  REGION 1..7: note = Serine/threonine-protein kinase mTOR (1960-1966)
LTDIGRY

SEQ ID NO: 21457 - protein, 8 aa, synthetic construct
  REGION 1..8: note = Tyrosine-protein kinase BAZ1B (894-901)
LTDMKQVF

SEQ ID NO: 21458 - protein, 10 aa, synthetic construct
  REGION 1..10: note = CDC2L5 protein kinase (1231-1240)
LTDPHAGVKA

SEQ ID NO: 21459 - protein, 9 aa, synthetic construct
  REGION 1..9: note = Zinc finger with UFM1-specific peptidase domain protein (139-147)
LTEIKGSVY

SEQ ID NO: 21460 - protein, 8 aa, synthetic construct
  REGION 1..8: note = Protocadherin-15 (1267-1274)
LTEILDRY

SEQ ID NO: 21461 - protein, 9 aa, synthetic construct
  REGION 1..9: note = Beta-1-syntrophin (254-262)
LTEKDLLIY

SEQ ID NO: 21462 - protein, 9 aa, synthetic construct
  REGION 1..9: note = Alpha-1-syntrophin (122-130)
LTEKELLLY

SEQ ID NO: 21463 - protein, 9 aa, synthetic construct
  REGION 1..9: note = Nucleoprotein TPR (587-595)
LTELEQLRK

SEQ ID NO: 21464 - protein, 9 aa, synthetic construct
  REGION 1..9: note = Zinc finger MIZ domain-containing protein 1 (470-478)
LTFPVRDGV

SEQ ID NO: 21465 - protein, 16 aa, synthetic construct
  REGION 1..16: note = Basement membrane-specific heparan sulfate proteoglycan core protein (350-365)
LTGEFTVEPVPEGAQL

SEQ ID NO: 21466 - protein, 8 aa, synthetic construct
  REGION 1..8: note = Erythrocyte band 7 integral membrane protein (109-116)
LTKDSVTI

SEQ ID NO: 21467 - protein, 9 aa, synthetic construct
  REGION 1..9: note = CCR4-NOT transcription complex subunit 1 (247-255)
LTKPMQILY

SEQ ID NO: 21468 - protein, 9 aa, synthetic construct
  REGION 1..9: note = Phenylalanine-tRNA ligase alpha subunit (381-389)
LTLGHLMGV

SEQ ID NO: 21469 - protein, 9 aa, synthetic construct
  REGION 1..9: note = Plectin (1055-1063)
LTLGKLEQV

SEQ ID NO: 21470 - protein, 27 aa, synthetic construct
  REGION 1..27: note = POU domain, class 6, transcription factor 2 (131-157)
LTLPTANLTNIQGLVAAAAAGGIMTLP

SEQ ID NO: 21471 - protein, 9 aa, synthetic construct
  REGION 1..9: note = Cytoplasmic dynein 1 heavy chain 1 (469-477)
LTMEINPKV

SEQ ID NO: 21472 - protein, 10 aa, synthetic construct
  REGION 1..10: note = Plasma membrane calcium-transporting ATPase 1 (480-489)
LTMNRMTVVQ

SEQ ID NO: 21473 - protein, 12 aa, synthetic construct
  REGION 1..12: note = Insulin-like growth factor-binding protein complex acid labile subunit (399-410)
LTNVAVMNLSGN

SEQ ID NO: 21474 - protein, 9 aa, synthetic construct
  REGION 1..9: note = Peroxisomal acyl-coenzyme A oxidase 1 (273-281)
LTYGTMVFV

SEQ ID NO: 21475 - protein, 12 aa, synthetic construct
  REGION 1..12: note = Potassium/sodium hyperpolarization-activated cyclic nucleotide-gated channel 4 (1006-1017)
LVAGASGGASPV

SEQ ID NO: 21476 - protein, 10 aa, synthetic construct
  REGION 1..10: note = ER membrane protein complex subunit 7 (68-77)
LVDGEEHVGF

SEQ ID NO: 21477 - protein, 8 aa, synthetic construct
  REGION 1..8: note = Manganese-transporting ATPase 13A1 (282-289)
LVDIPVEF

SEQ ID NO: 21478 - protein, 9 aa, synthetic construct
  REGION 1..9: note = Supervillin (1622-1630)
LVDNHHEVY

SEQ ID NO: 21479 - protein, 9 aa, synthetic construct
  REGION 1..9: note = Aldehyde dehydrogenase family 1 member A3 (106-114)
LVERDRATL

SEQ ID NO: 21480 - protein, 9 aa, synthetic construct
  REGION 1..9: note = A-kinase anchor protein 11 (654-662)
LVFEGIMEV

SEQ ID NO: 21481 - protein, 10 aa, synthetic construct
  REGION 1..10: note = Serum albumin (66-75)
LVNEVTEFAK

SEQ ID NO: 21482 - protein, 8 aa, synthetic construct
  REGION 1..8: note = Cytochrome c oxidase subunit 5B, mitochondrial (122-129)
LVPQQLAH

SEQ ID NO: 21483 - protein, 10 aa, synthetic construct
  REGION 1..10: note = Stabilin-2 (1032-1041)
LVPSQQATED

SEQ ID NO: 21484 - protein, 8 aa, synthetic construct
  REGION 1..8: note = Adenomatous polyposis coli protein 2 (11-18)
LVRQVEAL

SEQ ID NO: 21485 - protein, 16 aa, synthetic construct
  REGION 1..16: note = 60S ribosomal protein L9 (153-168)
LVSNSAALIQQATTVK

SEQ ID NO: 21486 - protein, 11 aa, synthetic construct
  REGION 1..11: note = Thioredoxin reductase 2, mitochondrial (4-14)
LVVGGGSGGLA

SEQ ID NO: 21487 - protein, 9 aa, synthetic construct
  REGION 1..9: note = Midasin (3107-3115)
LVVSDGRGL

SEQ ID NO: 21488 - protein, 10 aa, synthetic construct
  REGION 1..10: note = Kelch-like protein 29 (511-520)
LVYDGKIYTL

SEQ ID NO: 21489 - protein, 9 aa, synthetic construct
  REGION 1..9: note = Pre-mRNA-processing-splicing factor 8 (405-413)
LWAPRPFNL

SEQ ID NO: 21490 - protein, 9 aa, synthetic construct
  REGION 1..9: note = Plexin-B3 (1462-1470)
LYAFLREVA

SEQ ID NO: 21491 - protein, 10 aa, synthetic construct
  REGION 1..10: note = Aldehyde dehydrogenase family 1 member A3 (471-480)
LYAQAPFGGF

SEQ ID NO: 21492 - protein, 9 aa, synthetic construct
  REGION 1..9: note = DNA-binding protein RFXANK (131-139)
LYAVRGNHV

SEQ ID NO: 21493 - protein, 9 aa, synthetic construct
  REGION 1..9: note = Asparagine synthetase (glutamine-hydrolyzing) (132-140)
LYDNVEKLF

SEQ ID NO: 21494 - protein, 8 aa, synthetic construct
  REGION 1..8: note = Mediator of RNA polymerase II transcription subunit 12 (572-579)
LYDQPRHV

SEQ ID NO: 21495 - protein, 8 aa, synthetic construct
  REGION 1..8: note = Signal recognition particle subunit SRP68 (454-461)
LYDRVLKY

SEQ ID NO: 21496 - protein, 9 aa, synthetic construct
  REGION 1..9: note = GPI mannosyltransferase 2 (80-88)
LYEHNFAFF

SEQ ID NO: 21497 - protein, 9 aa, synthetic construct
  REGION 1..9: note = Hemicentin-1 (1595-1603)
LYIDKGQYL

SEQ ID NO: 21498 - protein, 9 aa, synthetic construct
  REGION 1..9: note = Cleavage and polyadenylation specificity factor subunit 6 (83-91)
LYIGNLTWW

SEQ ID NO: 21499 - protein, 9 aa, synthetic construct
  REGION 1..9: note = Myotubularin-related protein 12 (484-492)
LYIPIFSTF

SEQ ID NO: 21500 - protein, 9 aa, synthetic construct
  REGION 1..9: note = Disintegrin and metalloproteinase domain-containing protein 10 (167-175)
LYIQTDHLF

SEQ ID NO: 21501 - protein, 9 aa, synthetic construct
  REGION 1..9: note = SUN domain-containing ossification factor (723-731)
LYIVEPLKF

SEQ ID NO: 21502 - protein, 10 aa, synthetic construct
  REGION 1..10: note = Solute carrier family 25 member 34 (267-276)
LYKGLGPAYL

SEQ ID NO: 21503 - protein, 9 aa, synthetic construct
  REGION 1..9: note = ER membrane protein complex subunit 1 (731-739)
LYKSLNPNL

SEQ ID NO: 21504 - protein, 9 aa, synthetic construct
  REGION 1..9: note = NTF2-related export protein 2 (39-47)
LYLDKATLI

SEQ ID NO: 21505 - protein, 10 aa, synthetic construct
  REGION 1..10: note = NTF2-related export protein 2 (39-48)
LYLDKATLIW

SEQ ID NO: 21506 - protein, 9 aa, synthetic construct
  REGION 1..9: note = SWI/SNF-related matrix-associated actin-dependent regulator of chromatin subfamily A containing DEAD/H box 1 (320-328)
LYLGLFNRL

SEQ ID NO: 21507 - protein, 9 aa, synthetic construct
  REGION 1..9: note = Protein CLN8 (226-234)
LYLPHLTLF

SEQ ID NO: 21508 - protein, 7 aa, synthetic construct
  REGION 1..7: note = Mitochondrial carrier homolog 1 (63-69)
LYLPSFF

SEQ ID NO: 21509 - protein, 9 aa, synthetic construct
  REGION 1..9: note = DnaJ homolog subfamily A member 2 (129-137)
LYNGKTTKL

SEQ ID NO: 21510 - protein, 11 aa, synthetic construct
  REGION 1..11: note = Melanocyte protein PMEL (55-65)
LYPEWTEAQRL

SEQ ID NO: 21511 - protein, 9 aa, synthetic construct
  REGION 1..9: note = Protein transport protein Sec23B (560-568)
LYPQFMFHL

SEQ ID NO: 21512 - protein, 9 aa, synthetic construct
  REGION 1..9: note = Vacuolar protein sorting-associated protein 4A (31-39)
LYQHAVEYF

SEQ ID NO: 21513 - protein, 9 aa, synthetic construct
  REGION 1..9: note = CCAAT/enhancer-binding protein zeta (212-220)
LYQHEINLF

SEQ ID NO: 21514 - protein, 9 aa, synthetic construct
  REGION 1..9: note = Engulfment and cell motility protein 2 (207-215)
LYQKIAEEI

SEQ ID NO: 21515 - protein, 8 aa, synthetic construct
  REGION 1..8: note = E3 ubiquitin-protein ligase UBR5 (1255-1262)
LYRLLTAT

SEQ ID NO: 21516 - protein, 9 aa, synthetic construct
  REGION 1..9: note = Unconventional myosin-Ib (356-364)
LYSRLFSWL

SEQ ID NO: 21517 - protein, 9 aa, synthetic construct
  REGION 1..9: note = Ubiquitin-like modifier-activating enzyme 7 (14-22)
LYSRQLYVL

SEQ ID NO: 21518 - protein, 8 aa, synthetic construct
  REGION 1..8: note = Mitochondrial ubiquitin ligase activator of NFKB 1 (25-32)
LYSVYRQK

SEQ ID NO: 21519 - protein, 9 aa, synthetic construct
  REGION 1..9: note = Melanoma antigen preferentially expressed in tumors (301-309)
LYVDSLFFL

SEQ ID NO: 21520 - protein, 9 aa, synthetic construct
  REGION 1..9: note = Beta-galactosidase-1-like protein (586-594)
LYVPRFLLF

SEQ ID NO: 21521 - protein, 8 aa, synthetic construct
  REGION 1..8: note = 40S ribosomal protein S29 (6-13)
LYWSHPRK

SEQ ID NO: 21522 - protein, 13 aa, synthetic construct
  REGION 1..13: note = Mitogen-activated protein kinase 1 (1-13)
MAAAAAAGAGPEM

SEQ ID NO: 21523 - protein, 9 aa, synthetic construct
  REGION 1..9: note = B-cell CLL/lymphoma 9-like protein (186-194)
MAAPQLGPG

SEQ ID NO: 21524 - protein, 10 aa, synthetic construct
  REGION 1..10: note = Glucosylceramidase (21-30)
MAGSLTGLLL

SEQ ID NO: 21525 - protein, 8 aa, synthetic construct
  REGION 1..8: note = Dystonin (1657-1664)
MAIKVLEI

SEQ ID NO: 21526 - protein, 8 aa, synthetic construct
  REGION 1..8: note = BRAF (48-55)
MAPEVIRM

SEQ ID NO: 21527 - protein, 8 aa, synthetic construct
  REGION 1..8: note = HLA class I histocompatibility antigen, alpha chain F (1-8)
MAPRSLLL

SEQ ID NO: 21528 - protein, 8 aa, synthetic construct
  REGION 1..8: note = HLA class I histocompatibility antigen, B-39 alpha chain (4-11)
MAPRTVLL

SEQ ID NO: 21529 - protein, 16 aa, synthetic construct
  REGION 1..16: note = Gamma-secretase C-terminal fragment 59 (561-576)
MDAEFRHDSGYEVHHQ

SEQ ID NO: 21530 - protein, 16 aa, synthetic construct
  REGION 1..16: note = Dihydropyrimidinase-related protein 2 (339-354)
MDENQFVAVTSTNAAK

SEQ ID NO: 21531 - protein, 7 aa, synthetic construct
  REGION 1..7: note = Insulin receptor substrate 2 (545-551)
MDRPLSH

SEQ ID NO: 21532 - protein, 9 aa, synthetic construct
  REGION 1..9: note = Receptor-type tyrosine-protein phosphatase gamma (796-804)
MEAIPVKQF

SEQ ID NO: 21533 - protein, 10 aa, synthetic construct
  REGION 1..10: note = Protein wntless homolog (185-194)
MEIGSVAHKF

SEQ ID NO: 21534 - protein, 9 aa, synthetic construct
  REGION 1..9: note = Tyrosinase (516-524)
MEKEDYHSL

SEQ ID NO: 21535 - protein, 10 aa, synthetic construct
  REGION 1..10: note = PRELI domain containing protein 3B (91-100)
MELKSTNISF

SEQ ID NO: 21536 - protein, 10 aa, synthetic construct
  REGION 1..10: note = Fructose-bisphosphate aldolase A (219-228)
MENANVLARY

SEQ ID NO: 21537 - protein, 10 aa, synthetic construct
  REGION 1..10: note = Poly(U)-binding-splicing factor PUF60 (74-83)
MEQSIKSVLV

SEQ ID NO: 21538 - protein, 10 aa, synthetic construct
  REGION 1..10: note = Melanoma-associated antigen 3 (167-176)
MEVDPIGHLY

SEQ ID NO: 21539 - protein, 8 aa, synthetic construct
  REGION 1..8: note = Synemin (37-44)
MFDKKVQL

SEQ ID NO: 21540 - protein, 6 aa, synthetic construct
  REGION 1..6: note = Proliferating cell nuclear antigen (244-249)
MGHLKY

SEQ ID NO: 21541 - protein, 20 aa, synthetic construct
  REGION 1..20: note = Actin, aortic smooth muscle (49-68)
MGQKDSYVGDEAQSKRGILT

SEQ ID NO: 21542 - protein, 8 aa, synthetic construct
  REGION 1..8: note = Ankyrin-1 (733-740)
MGYTPLHV

SEQ ID NO: 21543 - protein, 7 aa, synthetic construct
  REGION 1..7: note = Dynein light chain roadblock-type 1 (53-59)
MHSFILK

SEQ ID NO: 21544 - protein, 9 aa, synthetic construct
  REGION 1..9: note = Glycogen phosphorylase, liver form (619-627)
MIIKLITSV

SEQ ID NO: 21545 - protein, 9 aa, synthetic construct
  REGION 1..9: note = Phenylalanine-tRNA ligase alpha subunit (465-473)
MIKYGINNI

SEQ ID NO: 21546 - protein, 10 aa, synthetic construct
  REGION 1..10: note = Malate dehydrogenase, mitochondrial (273-282)
MISDAIPELK

SEQ ID NO: 21547 - protein, 9 aa, synthetic construct
  REGION 1..9: note = ER membrane protein complex subunit 1 (976-984)
MITKRLAQV

SEQ ID NO: 21548 - protein, 9 aa, synthetic construct
  REGION 1..9: note = Huntingtin (537-545)
MITTHPALV

SEQ ID NO: 21549 - protein, 9 aa, synthetic construct
  REGION 1..9: note = EH domain-containing protein 3 (385-393)
MLAHDIAQL

SEQ ID NO: 21550 - protein, 8 aa, synthetic construct
  REGION 1..8: note = Chondroitin sulfate proteoglycan 4 (22-29)
MLARLASA

SEQ ID NO: 21551 - protein, 11 aa, synthetic construct
  REGION 1..11: note = COP9 signalosome complex subunit 1 (344-354)
MLDEMKDNLLL

SEQ ID NO: 21552 - protein, 11 aa, synthetic construct
  REGION 1..11: note = Baculoviral IAP repeat-containing protein 6 (1752-1762)
MLEDEKVTMFL

SEQ ID NO: 21553 - protein, 7 aa, synthetic construct
  REGION 1..7: note = Spectrin beta chain, non-erythrocytic 4 (2042-2048)
MLEVHQF

SEQ ID NO: 21554 - protein, 9 aa, synthetic construct
  REGION 1..9: note = Mitotic checkpoint serine/threonine-protein kinase BUB1 (998-1006)
MLFGTYMKV

SEQ ID NO: 21555 - protein, 8 aa, synthetic construct
  REGION 1..8: note = Collagen alpha-1(XVIII) chain (1454-1461)
MLGQVHEV

SEQ ID NO: 21556 - protein, 9 aa, synthetic construct
  REGION 1..9: note = Tetratricopeptide repeat protein 28 (1354-1362)
MLIGSDVKL

SEQ ID NO: 21557 - protein, 9 aa, synthetic construct
  REGION 1..9: note = Phosphatidylinositol 5-phosphate 4-kinase type-2 beta (65-73)
MLMPDDFKA

SEQ ID NO: 21558 - protein, 22 aa, synthetic construct
  REGION 1..22: note = T-complex protein 1 subunit beta (445-466)
MLPTIIADNAGYDSADLVAQLR

SEQ ID NO: 21559 - protein, 9 aa, synthetic construct
  REGION 1..9: note = DNA-binding protein SATB2 (142-150)
MLQDVYHVV

SEQ ID NO: 21560 - protein, 58 aa, synthetic construct
  REGION 1..58: note = 6.8 kDa mitochondrial proteolipid (1-58)
MLQSIIKNIWIPMKPYYTKVYQEIWIGMGLMGFIVYKIRAADKRSKALKASAPAPGHH

SEQ ID NO: 21561 - protein, 10 aa, synthetic construct
  REGION 1..10: note = BTB/POZ domain-containing protein KCTD3 (428-437)
MLSEKHLVSV

SEQ ID NO: 21562 - protein, 9 aa, synthetic construct
  REGION 1..9: note = Death-associated protein kinase 1 (763-771)
MMFEPGLTK

SEQ ID NO: 21563 - protein, 9 aa, synthetic construct
  REGION 1..9: note = RB1-inducible coiled-coil protein 1 (107-115)
MMPAVFHTV

SEQ ID NO: 21564 - protein, 16 aa, synthetic construct
  REGION 1..16: note = Exostosin-like 1 (589-604)
MNFIVAAVTKLPPIKV

SEQ ID NO: 21565 - protein, 9 aa, synthetic construct
  REGION 1..9: note = Sodium/potassium/calcium exchanger 5 (298-306)
MPEADLKRI

SEQ ID NO: 21566 - protein, 8 aa, synthetic construct
  REGION 1..8: note = Filamin-B (1129-1136)
MPFDPSKV

SEQ ID NO: 21567 - protein, 23 aa, synthetic construct
  REGION 1..23: note = Heat shock cognate 71 kDa protein (621-643)
MPGGFPGGGAPPSGGASSGPTIE

SEQ ID NO: 21568 - protein, 9 aa, synthetic construct
  REGION 1..9: note = Protein polybromo-1 (1078-1086)
MPISSVRFV

SEQ ID NO: 21569 - protein, 9 aa, synthetic construct
  REGION 1..9: note = Malignant T-cell-amplified sequence 1 (45-53)
MPKKDPVKI

SEQ ID NO: 21570 - protein, 9 aa, synthetic construct
  REGION 1..9: note = Melanoma antigen preferentially expressed in tumors (218-226)
MPMQDIKMI

SEQ ID NO: 21571 - protein, 9 aa, synthetic construct
  REGION 1..9: note = Nuclear factor related to kappa-B-binding protein (810-818)
MPPKAGQTI

SEQ ID NO: 21572 - protein, 9 aa, synthetic construct
  REGION 1..9: note = E3 ubiquitin-protein ligase Itchy homolog (380-388)
MPQHIKITV

SEQ ID NO: 21573 - protein, 13 aa, synthetic construct
  REGION 1..13: note = Myotubularin-related protein 5 (315-327)
MPRYADASGRNTL

SEQ ID NO: 21574 - protein, 10 aa, synthetic construct
  REGION 1..10: note = Splicing factor 3B subunit 2 (596-605)
MPVGPNAHKV

SEQ ID NO: 21575 - protein, 9 aa, synthetic construct
  REGION 1..9: note = Zinc finger protein 512B (211-219)
MPVTKPITV

SEQ ID NO: 21576 - protein, 9 aa, synthetic construct
  REGION 1..9: note = Dihydropyrimidinase-related protein 3 (192-200)
MPYKGMTTV

SEQ ID NO: 21577 - protein, 7 aa, synthetic construct
  REGION 1..7: note = Transmembraneoprotein NMB (38-44)
MREHNQL

SEQ ID NO: 21578 - protein, 9 aa, synthetic construct
  REGION 1..9: note = WD repeat-containing protein 81 (60-68)
MSEEHTAVY

SEQ ID NO: 21579 - protein, 9 aa, synthetic construct
  REGION 1..9: note = Bombesin receptor-activated protein C6orf89 (44-52)
MSEKAIEKF

SEQ ID NO: 21580 - protein, 9 aa, synthetic construct
  REGION 1..9: note = Inactive ubiquitin carboxyl-terminal hydrolase 53 (1045-1053)
MTDTYRLKY

SEQ ID NO: 21581 - protein, 6 aa, synthetic construct
  REGION 1..6: note = Neuronal membraneoprotein M6-a (202-207)
MTFHLF

SEQ ID NO: 21582 - protein, 29 aa, synthetic construct
  REGION 1..29: note = POTE ankyrin domain family member I (36-64)
MTQIMFETFNTPAMYVAIQAVLSLYASGR

SEQ ID NO: 21583 - protein, 12 aa, synthetic construct
  REGION 1..12: note = Protein disulfide-isomerase A3 (285-296)
MVAKKFLDAGHK

SEQ ID NO: 21584 - protein, 8 aa, synthetic construct
  REGION 1..8: note = Unconventional myosin-Id (310-317)
MVEKALLY

SEQ ID NO: 21585 - protein, 9 aa, synthetic construct
  REGION 1..9: note = Putative eukaryotic translation initiation factor 2 subunit 3-like protein (353-361)
MVGQILGAV

SEQ ID NO: 21586 - protein, 14 aa, synthetic construct
  REGION 1..14: note = MICOS complex subunit MIC60 (88-101)
MVLGPAAYNVPLPK

SEQ ID NO: 21587 - protein, 9 aa, synthetic construct
  REGION 1..9: note = ER membrane protein complex subunit 7 (169-177)
MVLPLLIFV

SEQ ID NO: 21588 - protein, 23 aa, synthetic construct
  REGION 1..23: note = X-ray repair cross-complementing protein 5 (210-232)
MVMISLEGEDGLDEIYSFSESLR

SEQ ID NO: 21589 - protein, 10 aa, synthetic construct
  REGION 1..10: note = Threonine-tRNA ligase, cytoplasmic (655-664)
MVVPVGPTCD

SEQ ID NO: 21590 - protein, 10 aa, synthetic construct
  REGION 1..10: note = NAD(P)H dehydrogenase (quinone) 1 (129-138)
MYDKGPFRSK

SEQ ID NO: 21591 - protein, 10 aa, synthetic construct
  REGION 1..10: note = Exportin-1 (545-554)
MYIVGQYPRF

SEQ ID NO: 21592 - protein, 9 aa, synthetic construct
  REGION 1..9: note = MICOS complex subunit MIC25 (169-177)
MYKLSSEQF

SEQ ID NO: 21593 - protein, 9 aa, synthetic construct
  REGION 1..9: note = F-box only protein 21 (417-425)
MYPDQVQLL

SEQ ID NO: 21594 - protein, 10 aa, synthetic construct
  REGION 1..10: note = Sodium/potassium-transporting ATPase subunit alpha-1 (980-989)
MYPLKPTWWF

SEQ ID NO: 21595 - protein, 9 aa, synthetic construct
  REGION 1..9: note = Sphingomyelin phosphodiesterase 4 (377-385)
MYTKLFVGF

SEQ ID NO: 21596 - protein, 11 aa, synthetic construct
  REGION 1..11: note = DNA-binding protein SATB1 (453-463)
NAASAMGPAPL

SEQ ID NO: 21597 - protein, 10 aa, synthetic construct
  REGION 1..10: note = Eukaryotic translation initiation factor 3 subunit L (169-178)
NADGPAPLEL

SEQ ID NO: 21598 - protein, 9 aa, synthetic construct
  REGION 1..9: note = Far upstream element-binding protein 1 (418-426)
NADPNMKLF

SEQ ID NO: 21599 - protein, 9 aa, synthetic construct
  REGION 1..9: note = Erythrocyte band 7 integral membrane protein (138-146)
NADSATRLL

SEQ ID NO: 21600 - protein, 9 aa, synthetic construct
  REGION 1..9: note = AP-2 complex subunit beta (874-882)
NADTVSSKL

SEQ ID NO: 21601 - protein, 9 aa, synthetic construct
  REGION 1..9: note = CD44 antigen (137-145)
NAFDGPITI

SEQ ID NO: 21602 - protein, 12 aa, synthetic construct
  REGION 1..12: note = Catenin alpha-1 (43-54)
NAGNEQDLGIQY

SEQ ID NO: 21603 - protein, 8 aa, synthetic construct
  REGION 1..8: note = Helicase-like transcription factor (96-103)
NAIKVNNV

SEQ ID NO: 21604 - protein, 8 aa, synthetic construct
  REGION 1..8: note = Similar to 60S ribosomal protein L7 (171-178)
NALIARSL

SEQ ID NO: 21605 - protein, 11 aa, synthetic construct
  REGION 1..11: note = Forkhead box protein C1 (212-222)
NAPGPQPPPVR

SEQ ID NO: 21606 - protein, 8 aa, synthetic construct
  REGION 1..8: note = Serine/threonine-protein phosphatase 2A regulatory subunit B'' subunit alpha (81-88)
NAPLSINI

SEQ ID NO: 21607 - protein, 7 aa, synthetic construct
  REGION 1..7: note = Protein FAM208B (1664-1670)
NATLTHY

SEQ ID NO: 21608 - protein, 8 aa, synthetic construct
  REGION 1..8: note = Rho guanine nucleotide exchange factor 11 (1029-1036)
NAVLIRSV

SEQ ID NO: 21609 - protein, 10 aa, synthetic construct
  REGION 1..10: note = T-complex protein 1 subunit theta (48-57)
NDAATILREL

SEQ ID NO: 21610 - protein, 9 aa, synthetic construct
  REGION 1..9: note = Pumilio homolog 2 (927-935)
NDGPHSALY

SEQ ID NO: 21611 - protein, 8 aa, synthetic construct
  REGION 1..8: note = Ribonuclease P protein subunit p21 (126-133)
NDPGHLLW

SEQ ID NO: 21612 - protein, 10 aa, synthetic construct
  REGION 1..10: note = Protein TANC1 (587-596)
NEAEFHKPDY

SEQ ID NO: 21613 - protein, 10 aa, synthetic construct
  REGION 1..10: note = Hemicentin-1 (2650-2659)
NEAGEMIKHY

SEQ ID NO: 21614 - protein, 10 aa, synthetic construct
  REGION 1..10: note = Hemicentin-1 (3510-3519)
NEAGEVSKHF

SEQ ID NO: 21615 - protein, 10 aa, synthetic construct
  REGION 1..10: note = E3 ubiquitin-protein ligase MYCBP2 (2115-2124)
NEALFSLETA

SEQ ID NO: 21616 - protein, 9 aa, synthetic construct
  REGION 1..9: note = Insulin-like growth factor 1 receptor (1048-1056)
NEASVMKEF

SEQ ID NO: 21617 - protein, 10 aa, synthetic construct
  REGION 1..10: note = Neutral amino acid transporter B(0) (61-70)
NEATMVLVSW

SEQ ID NO: 21618 - protein, 9 aa, synthetic construct
  REGION 1..9: note = Kinesin-like protein KIF13B (360-368)
NEDPNARII

SEQ ID NO: 21619 - protein, 9 aa, synthetic construct
  REGION 1..9: note = Smith-Magenis syndrome chromosomal region candidate gene 8 protein (896-904)
NEDVRVVQY

SEQ ID NO: 21620 - protein, 9 aa, synthetic construct
  REGION 1..9: note = RNA-binding motif, single-stranded-interacting protein 3 (399-407)
NEHAPAYSY

SEQ ID NO: 21621 - protein, 10 aa, synthetic construct
  REGION 1..10: note = 2-hydroxyacylsphingosine 1-beta-galactosyltransferase (284-293)
NEHGFVLVSF

SEQ ID NO: 21622 - protein, 10 aa, synthetic construct
  REGION 1..10: note = Protocadherin gamma-A9 (143-152)
NEIAVPGARY

SEQ ID NO: 21623 - protein, 11 aa, synthetic construct
  REGION 1..11: note = Protein transport protein Sec23A (436-446)
NEIGTGGTCQW

SEQ ID NO: 21624 - protein, 10 aa, synthetic construct
  REGION 1..10: note = Serine incorporator 3 (396-405)
NEKEGVQYSY

SEQ ID NO: 21625 - protein, 9 aa, synthetic construct
  REGION 1..9: note = Pre-rRNA-processing protein TSR1 homolog (69-77)
NELGNTQNF

SEQ ID NO: 21626 - protein, 9 aa, synthetic construct
  REGION 1..9: note = T-box transcription factor TBX2 (676-684)
NELQSIQRL

SEQ ID NO: 21627 - protein, 9 aa, synthetic construct
  REGION 1..9: note = Spectrin beta chain, non-erythrocytic 1 (32-40)
NENSSARLF

SEQ ID NO: 21628 - protein, 9 aa, synthetic construct
  REGION 1..9: note = Cytoplasmic FMR1-interacting protein 2 (99-107)
NEQPNRVEI

SEQ ID NO: 21629 - protein, 10 aa, synthetic construct
  REGION 1..10: note = Serine incorporator 1 (377-386)
NERDGVTYSY

SEQ ID NO: 21630 - protein, 9 aa, synthetic construct
  REGION 1..9: note = Transcription factor SOX-10 (146-154)
NESDKRPFI

SEQ ID NO: 21631 - protein, 9 aa, synthetic construct
  REGION 1..9: note = Laminin subunit beta-1 (541-549)
NEVEPGYYF

SEQ ID NO: 21632 - protein, 7 aa, synthetic construct
  REGION 1..7: note = AP-1 complex subunit sigma-1A (105-111)
NFEKAYF

SEQ ID NO: 21633 - protein, 6 aa, synthetic construct
  REGION 1..6: note = Serine/threonine-protein phosphatase 2A 55 kDa regulatory subunit B alpha isoform (364-369)
NFFRMF

SEQ ID NO: 21634 - protein, 9 aa, synthetic construct
  REGION 1..9: note = Astrotactin-2 (354-362)
NFIKDFPQL

SEQ ID NO: 21635 - protein, 7 aa, synthetic construct
  REGION 1..7: note = Absent in melanoma 1 protein (1462-1468)
NFTGNQY

SEQ ID NO: 21636 - protein, 8 aa, synthetic construct
  REGION 1..8: note = RNA-binding protein 12B (194-201)
NGDAIVKF

SEQ ID NO: 21637 - protein, 9 aa, synthetic construct
  REGION 1..9: note = Receptor-interacting serine/threonine-protein kinase 4 (562-570)
NGDESSTRL

SEQ ID NO: 21638 - protein, 8 aa, synthetic construct
  REGION 1..8: note = Ankyrin-1 (403-410)
NGFTPLHI

SEQ ID NO: 21639 - protein, 11 aa, synthetic construct
  REGION 1..11: note = Insulin-like growth factor-binding protein complex acid labile subunit (458-468)
NGLVGIEEQSL

SEQ ID NO: 21640 - protein, 26 aa, synthetic construct
  REGION 1..26: note = RNA-binding protein Nova-2 (369-394)
NGYLGAGAGGGAGGGGGPLVAAAAAA

SEQ ID NO: 21641 - protein, 8 aa, synthetic construct
  REGION 1..8: note = Ankyrin-1 (634-641)
NGYTPLHI

SEQ ID NO: 21642 - protein, 10 aa, synthetic construct
  REGION 1..10: note = Hemicentin-1 (4034-4043)
NHAVLPSGGL

SEQ ID NO: 21643 - protein, 15 aa, synthetic construct
  REGION 1..15: note = Tyrosine-protein phosphatase non-receptor type substrate 1 (452-466)
NHTEYASIQTSPQPA

SEQ ID NO: 21644 - protein, 17 aa, synthetic construct
  REGION 1..17: note = Tyrosine-protein phosphatase non-receptor type substrate 1 (452-468)
NHTEYASIQTSPQPASE

SEQ ID NO: 21645 - protein, 18 aa, synthetic construct
  REGION 1..18: note = Tyrosine-protein phosphatase non-receptor type substrate 1 (452-469)
NHTEYASIQTSPQPASED

SEQ ID NO: 21646 - protein, 20 aa, synthetic construct
  REGION 1..20: note = Cytochrome c oxidase subunit 6A1, mitochondrial (67-86)
NHTLFHNPHVNPLPTGYEDE

SEQ ID NO: 21647 - protein, 17 aa, synthetic construct
  REGION 1..17: note = Beta-2-microglobulin (82-98)
NHVTLSQPKIVKWDRDM

SEQ ID NO: 21648 - protein, 6 aa, synthetic construct
  REGION 1..6: note = Ketosamine-3-kinase (149-154)
NHWNHF

SEQ ID NO: 21649 - protein, 9 aa, synthetic construct
  REGION 1..9: note = Probable ATP-dependent RNA helicase YTHDC2 (689-697)
NIAETSITV

SEQ ID NO: 21650 - protein, 10 aa, synthetic construct
  REGION 1..10: note = Retinoic acid receptor RXR-gamma (268-277)
NICHAADKQL

SEQ ID NO: 21651 - protein, 9 aa, synthetic construct
  REGION 1..9: note = ATP-dependent RNA helicase A (346-354)
NIDEGPLAF

SEQ ID NO: 21652 - protein, 9 aa, synthetic construct
  REGION 1..9: note = P2X purinoceptor 7 (195-203)
NIDFPGHNY

SEQ ID NO: 21653 - protein, 15 aa, synthetic construct
  REGION 1..15: note = Tyrosinase (122-136)
NIFDLSAPEKDKFFA

SEQ ID NO: 21654 - protein, 12 aa, synthetic construct
  REGION 1..12: note = Glyceraldehyde-3-phosphate dehydrogenase, testis-specific (277-288)
NIIPASTGAAKA

SEQ ID NO: 21655 - protein, 9 aa, synthetic construct
  REGION 1..9: note = SLIT-ROBO Rho GTPase-activating protein 2 (123-131)
NIIPRFVQV

SEQ ID NO: 21656 - protein, 9 aa, synthetic construct
  REGION 1..9: note = Heterogeneous nuclear ribonucleoprotein U-like protein 1 (451-459)
NILGTNAIM

SEQ ID NO: 21657 - protein, 26 aa, synthetic construct
  REGION 1..26: note = ATP synthase-coupling factor 6, mitochondrial (33-58)
NKELDPIQKLFVDKIREYKSKRQTSG

SEQ ID NO: 21658 - protein, 30 aa, synthetic construct
  REGION 1..30: note = ATP synthase-coupling factor 6, mitochondrial (33-62)
NKELDPIQKLFVDKIREYKSKRQTSGGPVD

SEQ ID NO: 21659 - protein, 11 aa, synthetic construct
  REGION 1..11: note = Eukaryotic translation initiation factor 3 subunit C-like protein (131-141)
NKNNAKALSTL

SEQ ID NO: 21660 - protein, 17 aa, synthetic construct
  REGION 1..17: note = Heat shock 70 kDa protein 4 (753-769)
NKQSLTMDPVVKSKEIE

SEQ ID NO: 21661 - protein, 9 aa, synthetic construct
  REGION 1..9: note = Bifunctional glutamate/proline-tRNA ligase (1023-1031)
NLADWYSQV

SEQ ID NO: 21662 - protein, 8 aa, synthetic construct
  REGION 1..8: note = Vimentin (177-184)
NLAEDIMR

SEQ ID NO: 21663 - protein, 11 aa, synthetic construct
  REGION 1..11: note = Dystonin (208-218)
NLANLEHAFYV

SEQ ID NO: 21664 - protein, 9 aa, synthetic construct
  REGION 1..9: note = CMP-sialic acid transporter (111-119)
NLDAAVYQV

SEQ ID NO: 21665 - protein, 9 aa, synthetic construct
  REGION 1..9: note = Cysteine andine-rich protein 1 (43-51)
NLDSTTVAV

SEQ ID NO: 21666 - protein, 10 aa, synthetic construct
  REGION 1..10: note = Phospholipase A1 member A (42-51)
NLFEGTDLKV

SEQ ID NO: 21667 - protein, 9 aa, synthetic construct
  REGION 1..9: note = Eukaryotic translation initiation factor 3 subunit L (162-170)
NLFNYILNA

SEQ ID NO: 21668 - protein, 8 aa, synthetic construct
  REGION 1..8: note = Eukaryotic translation initiation factor 2-alpha kinase 4 (1314-1321)
NLGLVYKV

SEQ ID NO: 21669 - protein, 9 aa, synthetic construct
  REGION 1..9: note = F-box/LRR-repeat protein 18 (261-269)
NLHAFLISV

SEQ ID NO: 21670 - protein, 33 aa, synthetic construct
  REGION 1..33: note = Glia-derived nexin (344-376)
NLHVSHILQKAKIEVSEDGTKASAATTAILIAR

SEQ ID NO: 21671 - protein, 34 aa, synthetic construct
  REGION 1..34: note = Glia-derived nexin (344-377)
NLHVSHILQKAKIEVSEDGTKASAATTAILIARS

SEQ ID NO: 21672 - protein, 9 aa, synthetic construct
  REGION 1..9: note = GPI ethanolamine phosphate transferase 3 (51-59)
NLIKQLTSA

SEQ ID NO: 21673 - protein, 9 aa, synthetic construct
  REGION 1..9: note = Protein EFR3 homolog B (453-461)
NLISQLTTV

SEQ ID NO: 21674 - protein, 10 aa, synthetic construct
  REGION 1..10: note = Protein FAM179B (401-410)
NLLDDSNFKV

SEQ ID NO: 21675 - protein, 10 aa, synthetic construct
  REGION 1..10: note = FERM domain-containing protein 5 (46-55)
NLLEKDYFGI

SEQ ID NO: 21676 - protein, 9 aa, synthetic construct
  REGION 1..9: note = Plexin-B3 (1375-1383)
NLLNSKLFL

SEQ ID NO: 21677 - protein, 9 aa, synthetic construct
  REGION 1..9: note = Vacuolar protein sorting-associated protein 53 homolog (176-184)
NLLQGVMNV

SEQ ID NO: 21678 - protein, 9 aa, synthetic construct
  REGION 1..9: note = Transcription factor SOX-6 (265-273)
NLLQQQIQV

SEQ ID NO: 21679 - protein, 11 aa, synthetic construct
  REGION 1..11: note = Putative segment polarity protein dishevelled homolog DVL1P1 (257-267)
NLNSGSSGTSD

SEQ ID NO: 21680 - protein, 9 aa, synthetic construct
  REGION 1..9: note = Melanophilin (391-399)
NLPIFLPRV

SEQ ID NO: 21681 - protein, 8 aa, synthetic construct
  REGION 1..8: note = CUB and sushi domain-containing protein 3 (2038-2045)
NLPIGFGV

SEQ ID NO: 21682 - protein, 9 aa, synthetic construct
  REGION 1..9: note = Krueppel-like factor 15 (273-281)
NLPSKFVRI

SEQ ID NO: 21683 - protein, 10 aa, synthetic construct
  REGION 1..10: note = Clathrin heavy chain 1 (795-804)
NLQKYIEIYV

SEQ ID NO: 21684 - protein, 11 aa, synthetic construct
  REGION 1..11: note = Histone-lysine N-methyltransferase, H3 lysine-79 specific (241-251)
NLSDIGTIMRV

SEQ ID NO: 21685 - protein, 9 aa, synthetic construct
  REGION 1..9: note = Talin-1 (583-591)
NLTEMSRGV

SEQ ID NO: 21686 - protein, 9 aa, synthetic construct
  REGION 1..9: note = Cytoplasmic dynein 2 heavy chain 1 (271-279)
NLWEDPYYL

SEQ ID NO: 21687 - protein, 9 aa, synthetic construct
  REGION 1..9: note = Receptor-type tyrosine-protein phosphatase kappa (420-428)
NLWNSTHHV

SEQ ID NO: 21688 - protein, 10 aa, synthetic construct
  REGION 1..10: note = Contactin-associated protein-like 3B (1097-1106)
NMADGQLHQV

SEQ ID NO: 21689 - protein, 9 aa, synthetic construct
  REGION 1..9: note = Nucleolar pre-ribosomal-associated protein 1 (1538-1546)
NMDKVPGFY

SEQ ID NO: 21690 - protein, 12 aa, synthetic construct
  REGION 1..12: note = Unconventional myosin-Va (131-142)
NMGDMDPHIFAV

SEQ ID NO: 21691 - protein, 9 aa, synthetic construct
  REGION 1..9: note = Sodium-dependent proline transporter (134-142)
NMIIAYVLF

SEQ ID NO: 21692 - protein, 9 aa, synthetic construct
  REGION 1..9: note = Striatin-interacting protein 2 (728-736)
NMKTMSAIY

SEQ ID NO: 21693 - protein, 9 aa, synthetic construct
  REGION 1..9: note = Laminin subunit gamma-1 (71-79)
NMLKQLQEA

SEQ ID NO: 21694 - protein, 9 aa, synthetic construct
  REGION 1..9: note = UDP-glucose:glycoprotein glucosyltransferase 2 (920-928)
NMSDFIMKV

SEQ ID NO: 21695 - protein, 9 aa, synthetic construct
  REGION 1..9: note = Lysine-tRNA ligase (423-431)
NMVEELEKA

SEQ ID NO: 21696 - protein, 9 aa, synthetic construct
  REGION 1..9: note = Tetratricopeptide repeat protein 28 (1500-1508)
NMVGMLHQV

SEQ ID NO: 21697 - protein, 10 aa, synthetic construct
  REGION 1..10: note = Sodium/potassium-transporting ATPase subunit alpha-3 (166-175)
NMVPQQALVI

SEQ ID NO: 21698 - protein, 9 aa, synthetic construct
  REGION 1..9: note = Inositol 1,4,5-trisphosphate receptor type 1 (2083-2091)
NNASKLLLA

SEQ ID NO: 21699 - protein, 7 aa, synthetic construct
  REGION 1..7: note = F-box only protein 25 (151-157)
NNILYRF

SEQ ID NO: 21700 - protein, 8 aa, synthetic construct
  REGION 1..8: note = Keratin, type II cytoskeletal 1b (325-332)
NNRSLDLD

SEQ ID NO: 21701 - protein, 16 aa, synthetic construct
  REGION 1..16: note = Filamin-A (2114-2129)
NPAEFVVNTSNAGAGA

SEQ ID NO: 21702 - protein, 17 aa, synthetic construct
  REGION 1..17: note = Filamin-A (2114-2130)
NPAEFVVNTSNAGAGAL

SEQ ID NO: 21703 - protein, 10 aa, synthetic construct
  REGION 1..10: note = Ras GTPase-activating-like protein IQGAP1 (1197-1206)
NPAIVAPDAF

SEQ ID NO: 21704 - protein, 9 aa, synthetic construct
  REGION 1..9: note = Leucine-rich repeat serine/threonine-protein kinase 2 (1842-1850)
NPDQPRLTI

SEQ ID NO: 21705 - protein, 15 aa, synthetic construct
  REGION 1..15: note = Calreticulin (296-310)
NPEYSPDPSIYAYDN

SEQ ID NO: 21706 - protein, 14 aa, synthetic construct
  REGION 1..14: note = Cytochrome c oxidase subunit 6A1, mitochondrial (73-86)
NPHVNPLPTGYEDE

SEQ ID NO: 21707 - protein, 9 aa, synthetic construct
  REGION 1..9: note = Pre-mRNA-splicing factor ATP-dependent RNA helicase PRP16 (832-840)
NPRIGMDAL

SEQ ID NO: 21708 - protein, 18 aa, synthetic construct
  REGION 1..18: note = E3 ubiquitin-protein ligase UBR4 (202-219)
NPRTVASQPISTQTLVEG

SEQ ID NO: 21709 - protein, 9 aa, synthetic construct
  REGION 1..9: note = Angiomotin (27-35)
NPSENRSLL

SEQ ID NO: 21710 - protein, 10 aa, synthetic construct
  REGION 1..10: note = E3 ubiquitin-protein ligase HERC2 (1771-1780)
NPSGPSLGTI

SEQ ID NO: 21711 - protein, 9 aa, synthetic construct
  REGION 1..9: note = Poly (ADP-ribose) polymerase 14 (87-95)
NPYNGGGRV

SEQ ID NO: 21712 - protein, 8 aa, synthetic construct
  REGION 1..8: note = Ceramide synthase 2 (123-130)
NQDRPSLL

SEQ ID NO: 21713 - protein, 9 aa, synthetic construct
  REGION 1..9: note = Exosome complex exonuclease RRP44 (115-123)
NQEKHFYTF

SEQ ID NO: 21714 - protein, 20 aa, synthetic construct
  REGION 1..20: note = Heterogeneous nuclear ribonucleoprotein A1-like 2 (148-167)
NQGGYGGSSSSSSYGSGRRF

SEQ ID NO: 21715 - protein, 7 aa, synthetic construct
  REGION 1..7: note = Mid1-interacting protein 1 (8-14)
NQKHSLF

SEQ ID NO: 21716 - protein, 9 aa, synthetic construct
  REGION 1..9: note = Splicing factor U2AF 65 kDa subunit (348-356)
NQTPVTLQV

SEQ ID NO: 21717 - protein, 7 aa, synthetic construct
  REGION 1..7: note = DNA polymerase epsilon catalytic subunit A (1795-1801)
NQVMHFY

SEQ ID NO: 21718 - protein, 10 aa, synthetic construct
  REGION 1..10: note = Ankyrin repeat domain-containing protein 26 (77-86)
NRKLIPRENL

SEQ ID NO: 21719 - protein, 8 aa, synthetic construct
  REGION 1..8: note = Myosin-9 (710-717)
NRVVFQEF

SEQ ID NO: 21720 - protein, 14 aa, synthetic construct
  REGION 1..14: note = Hemicentin-1 (685-698)
NSAGTDKQNSTLRY

SEQ ID NO: 21721 - protein, 8 aa, synthetic construct
  REGION 1..8: note = Mitochondrial import inner membrane translocase subunit TIM50 (276-283)
NSDDRVLL

SEQ ID NO: 21722 - protein, 12 aa, synthetic construct
  REGION 1..12: note = Cell adhesion molecule-related/down-regulated by oncogenes (944-955)
NSLGSGGNVGPA

SEQ ID NO: 21723 - protein, 10 aa, synthetic construct
  REGION 1..10: note = Protein phosphatase 1 regulatory subunit 12A (714-723)
NSLVGITSAY

SEQ ID NO: 21724 - protein, 14 aa, synthetic construct
  REGION 1..14: note = Synaptotagmin-like protein 2 (277-290)
NSSSSSTDSETLRY

SEQ ID NO: 21725 - protein, 11 aa, synthetic construct
  REGION 1..11: note = ATP synthase subunit epsilon-like protein, mitochondrial (41-51)
NSVKIVKVKKE

SEQ ID NO: 21726 - protein, 13 aa, synthetic construct
  REGION 1..13: note = Ankyrin-2 (1558-1570)
NTEPLQERISHSY

SEQ ID NO: 21727 - protein, 9 aa, synthetic construct
  REGION 1..9: note = GRB2-associated-binding protein 1 (88-96)
NTIDRIFYL

SEQ ID NO: 21728 - protein, 11 aa, synthetic construct
  REGION 1..11: note = Microphthalmia-associated transcription factor (237-247)
NTLPVSGNLID

SEQ ID NO: 21729 - protein, 12 aa, synthetic construct
  REGION 1..12: note = Microphthalmia-associated transcription factor (90-101)
NTLPVSGNLIDL

SEQ ID NO: 21730 - protein, 9 aa, synthetic construct
  REGION 1..9: note = Multidrug and toxin extrusion protein 1 (136-144)
NTQHILLLF

SEQ ID NO: 21731 - protein, 10 aa, synthetic construct
  REGION 1..10: note = Hemicentin-1 (2932-2941)
NTQITDIGRY

SEQ ID NO: 21732 - protein, 11 aa, synthetic construct
  REGION 1..11: note = Titin (6557-6567)
NVAGDDACSGI

SEQ ID NO: 21733 - protein, 9 aa, synthetic construct
  REGION 1..9: note = Rho guanine nucleotide exchange factor 2 (401-409)
NVDEGIYQL

SEQ ID NO: 21734 - protein, 9 aa, synthetic construct
  REGION 1..9: note = Hemicentin-1 (3845-3853)
NVDQNQNSY

SEQ ID NO: 21735 - protein, 9 aa, synthetic construct
  REGION 1..9: note = Serine/threonine-protein phosphatase PP1-beta catalytic subunit (7-15)
NVDSLITRL

SEQ ID NO: 21736 - protein, 16 aa, synthetic construct
  REGION 1..16: note = Alpha-enolase (36-51)
NVGDEGGFAPNILENK

SEQ ID NO: 21737 - protein, 7 aa, synthetic construct
  REGION 1..7: note = tRNA (adenine(58)-N(1))-methyltransferase non-catalytic subunit TRM6 (56-62)
NVIGHSY

SEQ ID NO: 21738 - protein, 27 aa, synthetic construct
  REGION 1..27: note = Heat shock-related 70 kDa protein 2 (197-223)
NVLIFDLGGGTFDVSILTIEDGIFEVK

SEQ ID NO: 21739 - protein, 16 aa, synthetic construct
  REGION 1..16: note = Heat shock 70 kDa protein 1-like (170-185)
NVLRIINEPTAAAIAY

SEQ ID NO: 21740 - protein, 17 aa, synthetic construct
  REGION 1..17: note = 78 kDa glucose-regulated protein (176-192)
NVMRIINEPTAAAIAYG

SEQ ID NO: 21741 - protein, 15 aa, synthetic construct
  REGION 1..15: note = Guanine nucleotide-binding protein G(i) subunit alpha-1 (331-345)
NVQFVFDAVTDVIIK

SEQ ID NO: 21742 - protein, 8 aa, synthetic construct
  REGION 1..8: note = Nuclease-sensitive element-binding protein 1 (67-74)
NVRNGYGF

SEQ ID NO: 21743 - protein, 9 aa, synthetic construct
  REGION 1..9: note = Receptor-type tyrosine-protein phosphatase kappa (1423-1431)
NVVDVFHAV

SEQ ID NO: 21744 - protein, 9 aa, synthetic construct
  REGION 1..9: note = Fidgetin-like protein 1 (81-89)
NYAENILTL

SEQ ID NO: 21745 - protein, 7 aa, synthetic construct
  REGION 1..7: note = DNA-directed RNA polymerases I, II, and III subunit RPABC5 (61-67)
NYAPLEK

SEQ ID NO: 21746 - protein, 9 aa, synthetic construct
  REGION 1..9: note = Melanoma-associated antigen 10 (167-175)
NYEDHFPLL

SEQ ID NO: 21747 - protein, 11 aa, synthetic construct
  REGION 1..11: note = Protein phosphatase Slingshot homolog 1 (196-206)
NYFPGGVALIW

SEQ ID NO: 21748 - protein, 9 aa, synthetic construct
  REGION 1..9: note = Transformation/transcription domain-associated protein (1707-1715)
NYGDIELLF

SEQ ID NO: 21749 - protein, 9 aa, synthetic construct
  REGION 1..9: note = Isocitrate dehydrogenase (NAD) subunit gamma, mitochondrial (298-306)
NYGHVYAVF

SEQ ID NO: 21750 - protein, 9 aa, synthetic construct
  REGION 1..9: note = Lathosterol oxidase (239-247)
NYGQYFTLW

SEQ ID NO: 21751 - protein, 9 aa, synthetic construct
  REGION 1..9: note = Beta-Ala-His dipeptidase (489-497)
NYIEGTKLF

SEQ ID NO: 21752 - protein, 9 aa, synthetic construct
  REGION 1..9: note = Procollagen-lysine,2-oxoglutarate 5-dioxygenase 1 (255-263)
NYIPRFWTF

SEQ ID NO: 21753 - protein, 9 aa, synthetic construct
  REGION 1..9: note = Probable E3 ubiquitin-protein ligase HERC3 (467-475)
NYITAALKL

SEQ ID NO: 21754 - protein, 7 aa, synthetic construct
  REGION 1..7: note = Heat shock protein HSP 90-beta (351-357)
NYKKFYE

SEQ ID NO: 21755 - protein, 9 aa, synthetic construct
  REGION 1..9: note = Heat shock protein HSP 90-beta (351-359)
NYKKFYEAF

SEQ ID NO: 21756 - protein, 11 aa, synthetic construct
  REGION 1..11: note = Muskelin (29-39)
NYPPQYLILKL

SEQ ID NO: 21757 - protein, 9 aa, synthetic construct
  REGION 1..9: note = Pleckstrin homology domain-containing family G member 2 (150-158)
NYPSSLALL

SEQ ID NO: 21758 - protein, 11 aa, synthetic construct
  REGION 1..11: note = DNA polymerase zeta catalytic subunit (1024-1034)
NYSDVMSKLGF

SEQ ID NO: 21759 - protein, 9 aa, synthetic construct
  REGION 1..9: note = Transmembraneoprotein NMB (275-283)
NYSTINYKW

SEQ ID NO: 21760 - protein, 9 aa, synthetic construct
  REGION 1..9: note = 1,2-dihydroxy-3-keto-5-methylthiopentene dioxygenase (141-149)
NYTKAMRLF

SEQ ID NO: 21761 - protein, 10 aa, synthetic construct
  REGION 1..10: note = HLA class II histocompatibility antigen, DR alpha chain (103-112)
NYTPITNDKF

SEQ ID NO: 21762 - protein, 9 aa, synthetic construct
  REGION 1..9: note = DNA-dependent protein kinase catalytic subunit (289-297)
NYVSLFEVL

SEQ ID NO: 21763 - protein, 9 aa, synthetic construct
  REGION 1..9: note = Polycystin-1 (3-11)
PAAPARLAL

SEQ ID NO: 21764 - protein, 8 aa, synthetic construct
  REGION 1..8: note = Exportin-T (609-616)
PAERKQAL

SEQ ID NO: 21765 - protein, 12 aa, synthetic construct
  REGION 1..12: note = Collagen alpha-1(V) chain (1145-1156)
PAGPVGPPGEDG

SEQ ID NO: 21766 - protein, 8 aa, synthetic construct
  REGION 1..8: note = tRNA pseudouridine synthase-like 1 (273-280)
PAHGLFLK

SEQ ID NO: 21767 - protein, 8 aa, synthetic construct
  REGION 1..8: note = Sushi repeat-containing protein SRPX (4-11)
PAHRPALL

SEQ ID NO: 21768 - protein, 13 aa, synthetic construct
  REGION 1..13: note = Syntenin-1 (29-41)
PAILSEASAPIPH

SEQ ID NO: 21769 - protein, 8 aa, synthetic construct
  REGION 1..8: note = Acetolactate synthase-like protein (225-232)
PAKPPKGL

SEQ ID NO: 21770 - protein, 9 aa, synthetic construct
  REGION 1..9: note = Calmodulin-regulated spectrin-associated protein 3 (958-966)
PAPAARAPA

SEQ ID NO: 21771 - protein, 9 aa, synthetic construct
  REGION 1..9: note = Tissue factor pathway inhibitor 2 (3-11)
PARPLGLSI

SEQ ID NO: 21772 - protein, 7 aa, synthetic construct
  REGION 1..7: note = Phosphoinositide 3-kinase regulatory subunit 5 (495-501)
PASRPQR

SEQ ID NO: 21773 - protein, 9 aa, synthetic construct
  REGION 1..9: note = m7GpppX diphosphatase (134-142)
PATEKHLQK

SEQ ID NO: 21774 - protein, 12 aa, synthetic construct
  REGION 1..12: note = Nardilysin (738-749)
PAYEADVAQLEY

SEQ ID NO: 21775 - protein, 9 aa, synthetic construct
  REGION 1..9: note = Lysosome-associated membraneoprotein 1 (250-258)
PDARDPAFK

SEQ ID NO: 21776 - protein, 7 aa, synthetic construct
  REGION 1..7: note = Uncharacterized protein C14orf119 (123-129)
PDFVAKF

SEQ ID NO: 21777 - protein, 8 aa, synthetic construct
  REGION 1..8: note = RNA-binding protein 12B (29-36)
PDGGVHII

SEQ ID NO: 21778 - protein, 7 aa, synthetic construct
  REGION 1..7: note = Thyroid transcription factor 1-associated protein 26 (90-96)
PDNLKHL

SEQ ID NO: 21779 - protein, 8 aa, synthetic construct
  REGION 1..8: note = Tubulin beta-6 chain (95-102)
PDRIMNTF

SEQ ID NO: 21780 - protein, 12 aa, synthetic construct
  REGION 1..12: note = SH3 and multiple ankyrin repeat domains protein 1 (980-991)
PDTPAPATPLPP

SEQ ID NO: 21781 - protein, 10 aa, synthetic construct
  REGION 1..10: note = Copper-transporting ATPase 1 (1234-1243)
PEAELAIHIL

SEQ ID NO: 21782 - protein, 15 aa, synthetic construct
  REGION 1..15: note = Putative endoplasmin-like protein (220-234)
PEFDGKRFQNVAKEG

SEQ ID NO: 21783 - protein, 11 aa, synthetic construct
  REGION 1..11: note = Fatty acid synthase (753-763)
PEHAVVLEIAP

SEQ ID NO: 21784 - protein, 8 aa, synthetic construct
  REGION 1..8: note = Proteasome-associated protein ECM29 homolog (684-691)
PEKLATKF

SEQ ID NO: 21785 - protein, 7 aa, synthetic construct
  REGION 1..7: note = Serine/threonine-protein kinase ULK3 (110-116)
PEKVARV

SEQ ID NO: 21786 - protein, 11 aa, synthetic construct
  REGION 1..11: note = Alsin (1431-1441)
PELPEEGSTIP

SEQ ID NO: 21787 - protein, 10 aa, synthetic construct
  REGION 1..10: note = Serine/arginine repetitive matrix protein 2 (361-370)
PEPPAPTPLL

SEQ ID NO: 21788 - protein, 12 aa, synthetic construct
  REGION 1..12: note = Homeobox protein SIX5 (88-99)
PEQVACVCEALL

SEQ ID NO: 21789 - protein, 10 aa, synthetic construct
  REGION 1..10: note = Putative exonuclease GOR (33-42)
PERPGGAVLF

SEQ ID NO: 21790 - protein, 24 aa, synthetic construct
  REGION 1..24: note = Neutral alpha-glucosidase AB (824-847)
PETSVLVLRKPGINVASDWSIHLR

SEQ ID NO: 21791 - protein, 7 aa, synthetic construct
  REGION 1..7: note = Coatomer subunit alpha (635-641)
PEVALHF

SEQ ID NO: 21792 - protein, 9 aa, synthetic construct
  REGION 1..9: note = Melanocyte protein PMEL (57-65)
PEWTEAQRL

SEQ ID NO: 21793 - protein, 14 aa, synthetic construct
  REGION 1..14: note = Calreticulin (297-310)
PEYSPDPSIYAYDN

SEQ ID NO: 21794 - protein, 8 aa, synthetic construct
  REGION 1..8: note = Tyrosine-protein phosphatase non-receptor type 11 (284-291)
PFDHTRVV

SEQ ID NO: 21795 - protein, 8 aa, synthetic construct
  REGION 1..8: note = Polypyrimidine tract-binding protein 2 (92-99)
PFGKVTNI

SEQ ID NO: 21796 - protein, 8 aa, synthetic construct
  REGION 1..8: note = Polypyrimidine tract-binding protein 3 (124-131)
PFGKVTNL

SEQ ID NO: 21797 - protein, 10 aa, synthetic construct
  REGION 1..10: note = Uncharacterized protein KIAA0556 (546-555)
PFHPPLQLFF

SEQ ID NO: 21798 - protein, 10 aa, synthetic construct
  REGION 1..10: note = Transmembrane and TPR repeat-containing protein 1 (393-402)
PFIPASNLFF

SEQ ID NO: 21799 - protein, 9 aa, synthetic construct
  REGION 1..9: note = Glycine dehydrogenase (decarboxylating), mitochondrial (778-786)
PFLPNHPVI

SEQ ID NO: 21800 - protein, 12 aa, synthetic construct
  REGION 1..12: note = Cytochrome c oxidase subunit 7C, mitochondrial (52-63)
PFLVVRHQLLKT

SEQ ID NO: 21801 - protein, 7 aa, synthetic construct
  REGION 1..7: note = Interferon-induced 35 kDa protein (53-59)
PFSVPKI

SEQ ID NO: 21802 - protein, 9 aa, synthetic construct
  REGION 1..9: note = U2 small nuclear ribonucleoprotein B'' (73-81)
PFYGKPMRI

SEQ ID NO: 21803 - protein, 13 aa, synthetic construct
  REGION 1..13: note = SH2 domain-containing protein 3A (404-416)
PGAAGDLPGLAAV

SEQ ID NO: 21804 - protein, 10 aa, synthetic construct
  REGION 1..10: note = NADH dehydrogenase (ubiquinone) 1 beta subcomplex subunit 7 (126-135)
PGEVDPKVAL

SEQ ID NO: 21805 - protein, 16 aa, synthetic construct
  REGION 1..16: note = Heat shock cognate 71 kDa protein (622-637)
PGGFPGGGAPPSGGAS

SEQ ID NO: 21806 - protein, 13 aa, synthetic construct
  REGION 1..13: note = Shadow of prion protein (108-120)
PGGNGTGPGIYSY

SEQ ID NO: 21807 - protein, 8 aa, synthetic construct
  REGION 1..8: note = HLA class II histocompatibility antigen, DR beta 5 chain (7-14)
PGGSYMAK

SEQ ID NO: 21808 - protein, 8 aa, synthetic construct
  REGION 1..8: note = BAG family molecular chaperone regulator 3 (334-341)
PGHIPIQV

SEQ ID NO: 21809 - protein, 18 aa, synthetic construct
  REGION 1..18: note = Collagen alpha-5(IV) chain (1035-1052)
PGPQGVEGPPGPSGVPGQ

SEQ ID NO: 21810 - protein, 8 aa, synthetic construct
  REGION 1..8: note = Adenomatous polyposis coli protein 2 (1191-1198)
PGPRATPR

SEQ ID NO: 21811 - protein, 9 aa, synthetic construct
  REGION 1..9: note = Mucin-5B (364-372)
PGTAPPPKV

SEQ ID NO: 21812 - protein, 20 aa, synthetic construct
  REGION 1..20: note = Elastin (116-135)
PGVGGLGVSAGAVVPQPGAG

SEQ ID NO: 21813 - protein, 7 aa, synthetic construct
  REGION 1..7: note = Mitochondrial import inner membrane translocase subunit TIM50 (216-222)
PHGFISY

SEQ ID NO: 21814 - protein, 6 aa, synthetic construct
  REGION 1..6: note = BolA-like protein 2 (65-70)
PHIHAF

SEQ ID NO: 21815 - protein, 8 aa, synthetic construct
  REGION 1..8: note = ATP synthase subunit d, mitochondrial (130-137)
PHQPIENL

SEQ ID NO: 21816 - protein, 8 aa, synthetic construct
  REGION 1..8: note Dolichyl-diphosphooligosaccharide-proteinosyltransferase subunit 2 (292-299)
PHQTFVRL

SEQ ID NO: 21817 - protein, 20 aa, synthetic construct
  REGION 1..20: note = Syndecan-3 (6-25)
PHRAGAAHGAGAGAGAAAGP

SEQ ID NO: 21818 - protein, 13 aa, synthetic construct
  REGION 1..13: note = Cytochrome c oxidase subunit 6A1, mitochondrial (74-86)
PHVNPLPTGYEDE

SEQ ID NO: 21819 - protein, 7 aa, synthetic construct
  REGION 1..7: note = BAG family molecular chaperone regulator 3 (292-298)
PIRVHTV

SEQ ID NO: 21820 - protein, 8 aa, synthetic construct
  REGION 1..8: note = Major facilitator superfamily domain-containing protein 12 (309-316)
PKKFIATI

SEQ ID NO: 21821 - protein, 21 aa, synthetic construct
  REGION 1..21: note = MICOS complex subunit MIC27 (248-268)
PKLMDHGQSHPEDIDMYSTRS

SEQ ID NO: 21822 - protein, 7 aa, synthetic construct
  REGION 1..7: note = 40S ribosomal protein S26 (65-71)
PKLYVKL

SEQ ID NO: 21823 - protein, 8 aa, synthetic construct
  REGION 1..8: note = 26S proteasome non-ATPase regulatory subunit 6 (12-19)
PKNPDLRI

SEQ ID NO: 21824 - protein, 8 aa, synthetic construct
  REGION 1..8: note = Ran-binding protein 9 (351-358)
PKQPPLAL

SEQ ID NO: 21825 - protein, 8 aa, synthetic construct
  REGION 1..8: note = High mobility group protein B1 (95-102)
PKRPPSAF

SEQ ID NO: 21826 - protein, 12 aa, synthetic construct
  REGION 1..12: note = Ras-associated and pleckstrin homology domains-containing protein 1 (1085-1096)
PKVAVVNPQPQQ

SEQ ID NO: 21827 - protein, 14 aa, synthetic construct
  REGION 1..14: note = Annexin A2 (211-224)
PKWISIMTERSVPH

SEQ ID NO: 21828 - protein, 8 aa, synthetic construct
  REGION 1..8: note = Guanine nucleotide-binding protein-like 3 (296-303)
PLDKQITI

SEQ ID NO: 21829 - protein, 10 aa, synthetic construct
  REGION 1..10: note = MAX gene-associated protein (2401-2410)
PLFSGPVVAV

SEQ ID NO: 21830 - protein, 7 aa, synthetic construct
  REGION 1..7: note = A-kinase anchor protein 6 (596-602)
PLLSKHK

SEQ ID NO: 21831 - protein, 7 aa, synthetic construct
  REGION 1..7: note = Ubiquitin carboxyl-terminal hydrolase 11 (444-450)
PLPISHK

SEQ ID NO: 21832 - protein, 10 aa, synthetic construct
  REGION 1..10: note = Protein transport protein Sec23B (244-253)
PLRSTGVALS

SEQ ID NO: 21833 - protein, 7 aa, synthetic construct
  REGION 1..7: note = Muskelin (629-635)
PLSALKY

SEQ ID NO: 21834 - protein, 8 aa, synthetic construct
  REGION 1..8: note = X-ray repair cross-complementing protein 5 (529-536)
PLSKIKTL

SEQ ID NO: 21835 - protein, 9 aa, synthetic construct
  REGION 1..9: note = HLA class I histocompatibility antigen, B-15 alpha chain (293-301)
PLTLRWEPS

SEQ ID NO: 21836 - protein, 21 aa, synthetic construct
  REGION 1..21: note = 60 kDa heat shock protein, mitochondrial (154-174)
PLVIIAEDVDGEALSTLVLNR

SEQ ID NO: 21837 - protein, 9 aa, synthetic construct
  REGION 1..9: note = Protein DBF4 homolog A (45-53)
PLWGKVFYL

SEQ ID NO: 21838 - protein, 9 aa, synthetic construct
  REGION 1..9: note = Extracellular matrix protein FRAS1 (1653-1661)
PMATGDTFT

SEQ ID NO: 21839 - protein, 8 aa, synthetic construct
  REGION 1..8: note = Alpha/beta hydrolase domain-containing protein 14B (204-211)
PNHRVLIM

SEQ ID NO: 21840 - protein, 8 aa, synthetic construct
  REGION 1..8: note = Ubiquitin-associated protein 2-like (269-276)
PPAPFMHI

SEQ ID NO: 21841 - protein, 9 aa, synthetic construct
  REGION 1..9: note = Transforming acidic coiled-coil-containing protein 2 (1969-1977)
PPAPPPPPP

SEQ ID NO: 21842 - protein, 10 aa, synthetic construct
  REGION 1..10: note = Rho GTPase-activating protein 33 (668-677)
PPAVLELLGA

SEQ ID NO: 21843 - protein, 16 aa, synthetic construct
  REGION 1..16: note = Transmembrane protein 238 (14-29)
PPGAPSAPAAAPAPAA

SEQ ID NO: 21844 - protein, 12 aa, synthetic construct
  REGION 1..12: note = Homeobox protein SIX5 (441-452)
PPGPVPAVAAPQ

SEQ ID NO: 21845 - protein, 12 aa, synthetic construct
  REGION 1..12: note = Collagen alpha-1(VII) chain (2384-2395)
PPGVKGDLGLPG

SEQ ID NO: 21846 - protein, 9 aa, synthetic construct
  REGION 1..9: note = Mitochondrial fission regulator 1 (151-159)
PPHPPPPPP

SEQ ID NO: 21847 - protein, 7 aa, synthetic construct
  REGION 1..7: note = Sentrin-specific protease 6 (157-163)
PPHVQKV

SEQ ID NO: 21848 - protein, 10 aa, synthetic construct
  REGION 1..10: note = CCR4-NOT transcription complex subunit 1 (574-583)
PPITTTTTST

SEQ ID NO: 21849 - protein, 7 aa, synthetic construct
  REGION 1..7: note = Cyclin E variant ex7del (21-27)
PPKLHQF

SEQ ID NO: 21850 - protein, 9 aa, synthetic construct
  REGION 1..9: note = Drebrin (365-373)
PPLPPPPPP

SEQ ID NO: 21851 - protein, 14 aa, synthetic construct
  REGION 1..14: note = Tuberin (1264-1277)
PPLPRSNTVASFSS

SEQ ID NO: 21852 - protein, 9 aa, synthetic construct
  REGION 1..9: note = Multiple epidermal growth factor-like domains protein 8 (2528-2536)
PPPAPPPPP

SEQ ID NO: 21853 - protein, 9 aa, synthetic construct
  REGION 1..9: note = Shootin-1 (299-307)
PPPLPPPPP

SEQ ID NO: 21854 - protein, 13 aa, synthetic construct
  REGION 1..13: note = Serine/threonine-protein kinase WNK2 (136-148)
PPPSDMGTVGGQA

SEQ ID NO: 21855 - protein, 14 aa, synthetic construct
  REGION 1..14: note = Retinoic acid-induced protein 1 (1033-1046)
PPQGQMEGAGAPGR

SEQ ID NO: 21856 - protein, 9 aa, synthetic construct
  REGION 1..9: note = Retrotransposon-derived protein PEG10 (765-773)
PPQPPPPPP

SEQ ID NO: 21857 - protein, 9 aa, synthetic construct
  REGION 1..9: note = Acrosin (110-118)
PPSPPPPPP

SEQ ID NO: 21858 - protein, 9 aa, synthetic construct
  REGION 1..9: note = Transcription factor SOX-9 (356-364)
PQAPPQPQA

SEQ ID NO: 21859 - protein, 7 aa, synthetic construct
  REGION 1..7: note = Protein transport protein Sec23B (562-568)
PQFMFHL

SEQ ID NO: 21860 - protein, 9 aa, synthetic construct
  REGION 1..9: note = Squalene monooxygenase (366-374)
PQIPDHLKE

SEQ ID NO: 21861 - protein, 11 aa, synthetic construct
  REGION 1..11: note = Histone-lysine N-methyltransferase 2C (2512-2522)
PQLRRSVSVDM

SEQ ID NO: 21862 - protein, 9 aa, synthetic construct
  REGION 1..9: note = Disintegrin and metalloproteinase domain-containing protein 18 (67-75)
PQNFLVYTY

SEQ ID NO: 21863 - protein, 9 aa, synthetic construct
  REGION 1..9: note = Retrotransposon-derived protein PEG10 (766-774)
PQPPPPPPP

SEQ ID NO: 21864 - protein, 13 aa, synthetic construct
  REGION 1..13: note = Serum albumin (440-452)
PQVSTPTLVEVSR

SEQ ID NO: 21865 - protein, 8 aa, synthetic construct
  REGION 1..8: note = Neural Wiskott-Aldrich syndrome protein (83-90)
PRGYFHTF

SEQ ID NO: 21866 - protein, 10 aa, synthetic construct
  REGION 1..10: note = 60S ribosomal protein L13 (48-57)
PRPASGPIRP

SEQ ID NO: 21867 - protein, 8 aa, synthetic construct
  REGION 1..8: note = Histone H2A deubiquitinase MYSM1 (447-454)
PRPTKSSF

SEQ ID NO: 21868 - protein, 8 aa, synthetic construct
  REGION 1..8: note = ATP-dependent RNA helicase DDX24 (200-207)
PRPVLRAL

SEQ ID NO: 21869 - protein, 8 aa, synthetic construct
  REGION 1..8: note = Splicing factor 3B subunit 3 (431-438)
PRSSLRVL

SEQ ID NO: 21870 - protein, 8 aa, synthetic construct
  REGION 1..8: note = Ankyrin repeat and KH domain-containing protein 1 (749-756)
PRVPTHTL

SEQ ID NO: 21871 - protein, 14 aa, synthetic construct
  REGION 1..14: note = AT-rich interactive domain-containing protein 1A (279-292)
PSAAGGGTPQPTAT

SEQ ID NO: 21872 - protein, 9 aa, synthetic construct
  REGION 1..9: note = Large proline-rich protein BAG6 (53-61)
PSEKQRLIY

SEQ ID NO: 21873 - protein, 11 aa, synthetic construct
  REGION 1..11: note = Ankyrin-2 (1035-1045)
PSGAQFLGPVI

SEQ ID NO: 21874 - protein, 8 aa, synthetic construct
  REGION 1..8: note = Eukaryotic translation initiation factor 3 subunit C-like protein (204-211)
PSGESRKF

SEQ ID NO: 21875 - protein, 9 aa, synthetic construct
  REGION 1..9: note = BAI1-associated protein 3 (124-132)
PSLGLRALA

SEQ ID NO: 21876 - protein, 28 aa, synthetic construct
  REGION 1..28: note = Attractin (1008-1035)
PSNTGKGKCIEGSYKGPVKMPSQAPTGN

SEQ ID NO: 21877 - protein, 18 aa, synthetic construct
  REGION 1..18: note = Zinc finger protein 469 (879-896)
PSSGHPLKSKAGVTPESK

SEQ ID NO: 21878 - protein, 24 aa, synthetic construct
  REGION 1..24: note = Serine/threonine-protein kinase WNK1 (1547-1570)
PSSSSSPGAGVSSYISQPGGLHPL

SEQ ID NO: 21879 - protein, 12 aa, synthetic construct
  REGION 1..12: note = Fibronectin isoform 6 (769-780)
PSTATSVNIPDL

SEQ ID NO: 21880 - protein, 7 aa, synthetic construct
  REGION 1..7: note = Transcription factor HES-1 (104-110)
PSVLGKY

SEQ ID NO: 21881 - protein, 8 aa, synthetic construct
  REGION 1..8: note = Basement membrane-specific heparan sulfate proteoglycan core protein (2626-2633)
PSVSPPIR

SEQ ID NO: 21882 - protein, 9 aa, synthetic construct
  REGION 1..9: note = Serine/threonine-protein kinase ICK (273-281)
PTASQALRY

SEQ ID NO: 21883 - protein, 9 aa, synthetic construct
  REGION 1..9: note = Myotubularin-related protein 14 (360-368)
PTEILYLTV

SEQ ID NO: 21884 - protein, 10 aa, synthetic construct
  REGION 1..10: note = Nicastrin (540-549)
PTNTTYVVQY

SEQ ID NO: 21885 - protein, 7 aa, synthetic construct
  REGION 1..7: note = Sorting nexin-5 (259-265)
PTVIKKY

SEQ ID NO: 21886 - protein, 10 aa, synthetic construct
  REGION 1..10: note = Doublesex- and mab-3-related transcription factor A2 (25-34)
PVASVASVAA

SEQ ID NO: 21887 - protein, 9 aa, synthetic construct
  REGION 1..9: note = UPF0609 protein C4orf27 (230-238)
PVDKNDVGY

SEQ ID NO: 21888 - protein, 9 aa, synthetic construct
  REGION 1..9: note = Hephaestin (425-433)
PVDLLTGKV

SEQ ID NO: 21889 - protein, 11 aa, synthetic construct
  REGION 1..11: note = Single-stranded DNA-binding protein 3 (128-138)
PVPPGGSRSNF

SEQ ID NO: 21890 - protein, 9 aa, synthetic construct
  REGION 1..9: note = Enolase-like protein ENO4 (194-202)
PVPPPPPPP

SEQ ID NO: 21891 - protein, 9 aa, synthetic construct
  REGION 1..9: note = Obscurin (6294-6302)
PVVPTLYVT

SEQ ID NO: 21892 - protein, 8 aa, synthetic construct
  REGION 1..8: note = Matrin-3 (231-238)
PYGKIKNY

SEQ ID NO: 21893 - protein, 10 aa, synthetic construct
  REGION 1..10: note = Alpha-actinin-4 (178-187)
PYKNVNVQNF

SEQ ID NO: 21894 - protein, 9 aa, synthetic construct
  REGION 1..9: note = Dedicator of cytokinesis protein 7 (627-635)
PYLDKFFAL

SEQ ID NO: 21895 - protein, 9 aa, synthetic construct
  REGION 1..9: note = Dedicator of cytokinesis protein 6 (722-730)
PYLDKFFTL

SEQ ID NO: 21896 - protein, 9 aa, synthetic construct
  REGION 1..9: note = Eukaryotic peptide chain release factor GTP-binding subunit ERF3A (285-293)
PYLDNLPNF

SEQ ID NO: 21897 - protein, 9 aa, synthetic construct
  REGION 1..9: note = Melanoma antigen preferentially expressed in tumors (254-262)
PYLGQMINL

SEQ ID NO: 21898 - protein, 9 aa, synthetic construct
  REGION 1..9: note = Elongation of very long chain fatty acids protein 5 (194-202)
PYLWWKKYI

SEQ ID NO: 21899 - protein, 11 aa, synthetic construct
  REGION 1..11: note = Tubulin beta-6 chain (117-127)
PYNATLSVHQL

SEQ ID NO: 21900 - protein, 8 aa, synthetic construct
  REGION 1..8: note = LYR motif-containing protein 1 (80-87)
PYPRPIHL

SEQ ID NO: 21901 - protein, 9 aa, synthetic construct
  REGION 1..9: note = Cubilin (2661-2669)
PYSQVWIHF

SEQ ID NO: 21902 - protein, 12 aa, synthetic construct
  REGION 1..12: note = Pumilio homolog 1 (440-451)
PYTAGLAAAATL

SEQ ID NO: 21903 - protein, 9 aa, synthetic construct
  REGION 1..9: note = Serine/threonine-protein kinase Nek6 (236-244)
PYYMSPERI

SEQ ID NO: 21904 - protein, 8 aa, synthetic construct
  REGION 1..8: note = Progestin and adipoQ receptor family member 4 (113-120)
QAAARLLV

SEQ ID NO: 21905 - protein, 16 aa, synthetic construct
  REGION 1..16: note = HLA class I histocompatibility antigen, B-15 alpha chain (346-361)
QAASSDSAQGSDVSLT

SEQ ID NO: 21906 - protein, 20 aa, synthetic construct
  REGION 1..20: note = HLA class I histocompatibility antigen, A-23 alpha chain (346-365)
QAASSDSAQGSDVSLTACKV

SEQ ID NO: 21907 - protein, 9 aa, synthetic construct
  REGION 1..9: note = Nuclear distribution protein nudE-like 1 (66-74)
QADNQRLKY

SEQ ID NO: 21908 - protein, 14 aa, synthetic construct
  REGION 1..14: note = Glycogenin-1 (2-15)
QAFVTLTTNDAYAK

SEQ ID NO: 21909 - protein, 13 aa, synthetic construct
  REGION 1..13: note = CREB-binding protein (405-417)
QAILGSPASGIQN

SEQ ID NO: 21910 - protein, 10 aa, synthetic construct
  REGION 1..10: note = Scavenger receptor cysteine-rich type 1 protein M160 (412-421)
QALVVCKQLG

SEQ ID NO: 21911 - protein, 9 aa, synthetic construct
  REGION 1..9: note = Myelin basic protein (108-116)
QDENPVVHF

SEQ ID NO: 21912 - protein, 7 aa, synthetic construct
  REGION 1..7: note = Clathrin heavy chain 1 (723-729)
QDPDVHF

SEQ ID NO: 21913 - protein, 9 aa, synthetic construct
  REGION 1..9: note = Fatty acid synthase (1595-1603)
QDSLLGMEF

SEQ ID NO: 21914 - protein, 9 aa, synthetic construct
  REGION 1..9: note = Stathmin-3 (88-96)
QEAQVLKQL

SEQ ID NO: 21915 - protein, 11 aa, synthetic construct
  REGION 1..11: note = Formin-1 (1099-1109)
QEDELVKIRKY

SEQ ID NO: 21916 - protein, 9 aa, synthetic construct
  REGION 1..9: note = WD repeat-containing protein 26 (508-516)
QEDHPIMSF

SEQ ID NO: 21917 - protein, 11 aa, synthetic construct
  REGION 1..11: note = Large proline-rich protein BAG6 (1111-1121)
QEDPNYSPQRF

SEQ ID NO: 21918 - protein, 9 aa, synthetic construct
  REGION 1..9: note = Vigilin (1012-1020)
QEDRALRSF

SEQ ID NO: 21919 - protein, 12 aa, synthetic construct
  REGION 1..12: note = Nestin (502-513)
QEEEGSALKTSW

SEQ ID NO: 21920 - protein, 9 aa, synthetic construct
  REGION 1..9: note = DNA (cytosine-5)-methyltransferase 3A (426-434)
QEFDPPKVY

SEQ ID NO: 21921 - protein, 10 aa, synthetic construct
  REGION 1..10: note = AT-rich interactive domain-containing protein 1B (1797-1806)
QEFNSGLLHW

SEQ ID NO: 21922 - protein, 9 aa, synthetic construct
  REGION 1..9: note = Hemicentin-1 (1703-1711)
QEIDRGQYI

SEQ ID NO: 21923 - protein, 7 aa, synthetic construct
  REGION 1..7: note = Annexin A2 (141-147)
QEINRVY

SEQ ID NO: 21924 - protein, 10 aa, synthetic construct
  REGION 1..10: note = Mitogen-activated protein kinase kinase kinase kinase 5 (802-811)
QEISDETRVF

SEQ ID NO: 21925 - protein, 9 aa, synthetic construct
  REGION 1..9: note = Serine-protein kinase ATM (95-103)
QEISSLVKY

SEQ ID NO: 21926 - protein, 13 aa, synthetic construct
  REGION 1..13: note = Desmoglein-2 (903-915)
QEIVTERSVSSRQ

SEQ ID NO: 21927 - protein, 10 aa, synthetic construct
  REGION 1..10: note = Synemin (16-25)
QELNARLYDY

SEQ ID NO: 21928 - protein, 12 aa, synthetic construct
  REGION 1..12: note = Nestin (337-348)
QELPQSADVQRW

SEQ ID NO: 21929 - protein, 9 aa, synthetic construct
  REGION 1..9: note = Receptor-interacting serine/threonine-protein kinase 4 (597-605)
QENIVRILL

SEQ ID NO: 21930 - protein, 9 aa, synthetic construct
  REGION 1..9: note = TSC22 domain family protein 1 (93-101)
QENNLLKTL

SEQ ID NO: 21931 - protein, 10 aa, synthetic construct
  REGION 1..10: note = Protein flightless-1 homolog (1024-1033)
QENPKFLSHF

SEQ ID NO: 21932 - protein, 10 aa, synthetic construct
  REGION 1..10: note = RNA-binding motif, single-stranded-interacting protein 3 (126-135)
QEQDPTNLYI

SEQ ID NO: 21933 - protein, 11 aa, synthetic construct
  REGION 1..11: note = T-complex protein 1 subunit theta (20-30)
QEQEVGDGTNF

SEQ ID NO: 21934 - protein, 9 aa, synthetic construct
  REGION 1..9: note = ETS translocation variant 1 (65-73)
QEQPFKFSY

SEQ ID NO: 21935 - protein, 9 aa, synthetic construct
  REGION 1..9: note = Nucleolar complex protein 2 homolog (188-196)
QESAEANKF

SEQ ID NO: 21936 - protein, 10 aa, synthetic construct
  REGION 1..10: note = Protein transport protein Sec24D (86-95)
QESQSVIHNL

SEQ ID NO: 21937 - protein, 10 aa, synthetic construct
  REGION 1..10: note = Ankycorbin (839-848)
QEVNELLQKF

SEQ ID NO: 21938 - protein, 8 aa, synthetic construct
  REGION 1..8: note = Up-regulated during skeletal muscle growth protein 5 (11-18)
QFTGIKKY

SEQ ID NO: 21939 - protein, 10 aa, synthetic construct
  REGION 1..10: note = Proprotein convertase subtilisin/kexin type 7 (93-102)
QGHYLFVQPA

SEQ ID NO: 21940 - protein, 6 aa, synthetic construct
  REGION 1..6: note = All-trans-retinol 13,14-reductase (57-62)
QGIHYI

SEQ ID NO: 21941 - protein, 11 aa, synthetic construct
  REGION 1..11: note = Serine/threonine-protein phosphatase 1 regulatory subunit 10 (572-582)
QGPGGGGINVQ

SEQ ID NO: 21942 - protein, 12 aa, synthetic construct
  REGION 1..12: note = HLA class I histocompatibility antigen, A-23 alpha chain (354-365)
QGSDVSLTACKV

SEQ ID NO: 21943 - protein, 10 aa, synthetic construct
  REGION 1..10: note = Fibronectin isoform 6 (1715-1724)
QGVVTTLENV

SEQ ID NO: 21944 - protein, 19 aa, synthetic construct
  REGION 1..19: note = Heterogeneous nuclear ribonucleoprotein L (52-70)
QHGGGGGGGGGAGAAGGGG

SEQ ID NO: 21945 - protein, 22 aa, synthetic construct
  REGION 1..22: note = Splicing factor, proline- and glutamine-rich (246-267)
QHHPPYHQQHHQGPPPGGPGGR

SEQ ID NO: 21946 - protein, 13 aa, synthetic construct
  REGION 1..13: note = Dynein heavy chain 8, axonemal (2665-2677)
QHKAVLLTGEQGT

SEQ ID NO: 21947 - protein, 11 aa, synthetic construct
  REGION 1..11: note = Synaptic vesicle membrane protein VAT-1 homolog (26-36)
QHPAASEGAAA

SEQ ID NO: 21948 - protein, 13 aa, synthetic construct
  REGION 1..13: note = Band 4.1-like protein 2 (54-66)
QIDGGAGGDSGTL

SEQ ID NO: 21949 - protein, 8 aa, synthetic construct
  REGION 1..8: note = 60S ribosomal protein L26 (66-73)
QIGKVVQV

SEQ ID NO: 21950 - protein, 9 aa, synthetic construct
  REGION 1..9: note = Cytoskeleton-associated protein 5 (1667-1675)
QILDHLTMI

SEQ ID NO: 21951 - protein, 9 aa, synthetic construct
  REGION 1..9: note = DNA-dependent protein kinase catalytic subunit (865-873)
QINKNLLTV

SEQ ID NO: 21952 - protein, 17 aa, synthetic construct
  REGION 1..17: note = Transmembraneoprotein NMB (370-386)
QINRYGHFQATITIVEG

SEQ ID NO: 21953 - protein, 9 aa, synthetic construct
  REGION 1..9: note = Dehydrogenase/reductase SDR family member 2, mitochondrial (127-135)
QIWDKILSV

SEQ ID NO: 21954 - protein, 12 aa, synthetic construct
  REGION 1..12: note = Nodal modulator 2 (399-410)
QLADIVATGFSV

SEQ ID NO: 21955 - protein, 9 aa, synthetic construct
  REGION 1..9: note = Laminin subunit alpha-4 (470-478)
QLDDYNAKL

SEQ ID NO: 21956 - protein, 9 aa, synthetic construct
  REGION 1..9: note = Myotubularin-related protein 6 (229-237)
QLDGDPKEV

SEQ ID NO: 21957 - protein, 9 aa, synthetic construct
  REGION 1..9: note = Circadian clock protein PASD1 (383-391)
QLEERTWLL

SEQ ID NO: 21958 - protein, 7 aa, synthetic construct
  REGION 1..7: note = ATP-dependent RNA helicase DHX8 (283-289)
QLEGLRK

SEQ ID NO: 21959 - protein, 9 aa, synthetic construct
  REGION 1..9: note = Erlin-2 (26-34)
QLGAVVAVA

SEQ ID NO: 21960 - protein, 9 aa, synthetic construct
  REGION 1..9: note = Probable histidine-tRNA ligase, mitochondrial (60-68)
QLGDFLIKV

SEQ ID NO: 21961 - protein, 9 aa, synthetic construct
  REGION 1..9: note = Complement factor I (347-355)
QLGDLPWQV

SEQ ID NO: 21962 - protein, 9 aa, synthetic construct
  REGION 1..9: note = E3 ubiquitin-protein ligase TRIM63 (281-289)
QLIKSIVEA

SEQ ID NO: 21963 - protein, 9 aa, synthetic construct
  REGION 1..9: note = Class E basic helix-loop-helix protein 41 (161-169)
QLINHLHAV

SEQ ID NO: 21964 - protein, 9 aa, synthetic construct
  REGION 1..9: note = E3 ubiquitin-protein ligase listerin (245-253)
QLIPFIDAV

SEQ ID NO: 21965 - protein, 9 aa, synthetic construct
  REGION 1..9: note = Intron-binding protein aquarius (224-232)
QLIQKFISV

SEQ ID NO: 21966 - protein, 11 aa, synthetic construct
  REGION 1..11: note = Pleckstrin homology domain-containing family H member 1 (700-710)
QLISEKKTYYL

SEQ ID NO: 21967 - protein, 10 aa, synthetic construct
  REGION 1..10: note = WASH complex subunit 7 (254-263)
QLLDGMIFQA

SEQ ID NO: 21968 - protein, 11 aa, synthetic construct
  REGION 1..11: note = Transmembrane protein 209 (327-337)
QLLDHMDSWTA

SEQ ID NO: 21969 - protein, 9 aa, synthetic construct
  REGION 1..9: note = StAR-related lipid transfer protein 13 (922-930)
QLLGGVRAV

SEQ ID NO: 21970 - protein, 9 aa, synthetic construct
  REGION 1..9: note = Small subunit processome component 20 homolog (1596-1604)
QLMEGKVVL

SEQ ID NO: 21971 - protein, 9 aa, synthetic construct
  REGION 1..9: note = Serine/threonine-protein kinase mTOR (66-74)
QLNHHIFEL

SEQ ID NO: 21972 - protein, 11 aa, synthetic construct
  REGION 1..11: note = Liprin-alpha-2 (76-86)
QLNSALPQDIE

SEQ ID NO: 21973 - protein, 9 aa, synthetic construct
  REGION 1..9: note = Protein Shroom4 (1452-1460)
QLQDYQHFV

SEQ ID NO: 21974 - protein, 13 aa, synthetic construct
  REGION 1..13: note = Plectin (3123-3135)
QLSTGGIVDPSKS

SEQ ID NO: 21975 - protein, 9 aa, synthetic construct
  REGION 1..9: note = Protein wntless homolog (517-525)
QLTTTITHV

SEQ ID NO: 21976 - protein, 9 aa, synthetic construct
  REGION 1..9: note = Chondroitin sulfate proteoglycan 4 (77-85)
QLYSGRLQV

SEQ ID NO: 21977 - protein, 10 aa, synthetic construct
  REGION 1..10: note = Solute carrier family 12 member 6 (45-54)
QMGTFMGVYL

SEQ ID NO: 21978 - protein, 9 aa, synthetic construct
  REGION 1..9: note = Synemin (724-732)
QMIGDIINL

SEQ ID NO: 21979 - protein, 12 aa, synthetic construct
  REGION 1..12: note = DNA-dependent protein kinase catalytic subunit (947-958)
QMPEGGQGAPPM

SEQ ID NO: 21980 - protein, 9 aa, synthetic construct
  REGION 1..9: note = Actin-like protein 6A (239-247)
QMPTVHYEF

SEQ ID NO: 21981 - protein, 9 aa, synthetic construct
  REGION 1..9: note = Talin-1 (288-296)
QMSEIEAKV

SEQ ID NO: 21982 - protein, 12 aa, synthetic construct
  REGION 1..12: note = L-lactate dehydrogenase A chain (20-31)
QNKITVVGVGAV

SEQ ID NO: 21983 - protein, 9 aa, synthetic construct
  REGION 1..9: note = POU domain, class 2, transcription factor 1 (208-216)
QPATPTRTI

SEQ ID NO: 21984 - protein, 9 aa, synthetic construct
  REGION 1..9: note = Integrin alpha-6 (55-63)
QPEDKRLLL

SEQ ID NO: 21985 - protein, 11 aa, synthetic construct
  REGION 1..11: note = Beta-2-microglobulin (88-98)
QPKIVKWDRDM

SEQ ID NO: 21986 - protein, 8 aa, synthetic construct
  REGION 1..8: note = Potassium voltage-gated channel subfamily H member 2 (335-342)
QPLAVVDL

SEQ ID NO: 21987 - protein, 11 aa, synthetic construct
  REGION 1..11: note = Histone-lysine N-methyltransferase 2A (3086-3096)
QPLYVLQTLPN

SEQ ID NO: 21988 - protein, 9 aa, synthetic construct
  REGION 1..9: note = Rho GTPase-activating protein 31 (988-996)
QPQAPRREI

SEQ ID NO: 21989 - protein, 9 aa, synthetic construct
  REGION 1..9: note = Tribbles homolog 1 (15-23)
QPRGPALLF

SEQ ID NO: 21990 - protein, 10 aa, synthetic construct
  REGION 1..10: note = Transcription intermediary factor 1-alpha (611-620)
QPRPPSNRTV

SEQ ID NO: 21991 - protein, 9 aa, synthetic construct
  REGION 1..9: note = DNA-directed RNA polymerase II subunit RPB3 (6-14)
QPTVRITEL

SEQ ID NO: 21992 - protein, 12 aa, synthetic construct
  REGION 1..12: note = Guanine nucleotide exchange factor VAV3 (393-404)
QPVLLFGRPQGD

SEQ ID NO: 21993 - protein, 8 aa, synthetic construct
  REGION 1..8: note = Dual specificity protein kinase CLK3 (230-237)
QPYPLPHV

SEQ ID NO: 21994 - protein, 20 aa, synthetic construct
  REGION 1..20: note = CCR4-NOT transcription complex subunit 1 (48-67)
QQGILKTDDLITRFFRLCTE

SEQ ID NO: 21995 - protein, 9 aa, synthetic construct
  REGION 1..9: note = Tetratricopeptide repeat protein 37 (642-650)
QQILGKYKE

SEQ ID NO: 21996 - protein, 8 aa, synthetic construct
  REGION 1..8: note = Eukaryotic initiation factor 4A-I (114-121)
QQIQKVVM

SEQ ID NO: 21997 - protein, 9 aa, synthetic construct
  REGION 1..9: note = Pyridoxal kinase (30-38)
QQNPRLVYV

SEQ ID NO: 21998 - protein, 8 aa, synthetic construct
  REGION 1..8: note = Titin (12085-12092)
QRAEVVPV

SEQ ID NO: 21999 - protein, 9 aa, synthetic construct
  REGION 1..9: note = Caprin-1 (666-674)
QRDGYQQNF

SEQ ID NO: 22000 - protein, 7 aa, synthetic construct
  REGION 1..7: note = Signal transducer and activator of transcription 6 (89-95)
QRDPLKL

SEQ ID NO: 22001 - protein, 9 aa, synthetic construct
  REGION 1..9: note = Interleukin-24 (5-13)
QRLQSLWTL

SEQ ID NO: 22002 - protein, 9 aa, synthetic construct
  REGION 1..9: note = Tight junction protein ZO-1 (750-758)
QRSSGIIRL

SEQ ID NO: 22003 - protein, 9 aa, synthetic construct
  REGION 1..9: note = Mastermind-like protein 2 (349-357)
QRSTPRPSL

SEQ ID NO: 22004 - protein, 9 aa, synthetic construct
  REGION 1..9: note = Polypyrimidine tract-binding protein 1 (384-392)
QRVKILFNK

SEQ ID NO: 22005 - protein, 9 aa, synthetic construct
  REGION 1..9: note = KN motif and ankyrin repeat domain-containing protein 2 (79-87)
QSEIASMLY

SEQ ID NO: 22006 - protein, 10 aa, synthetic construct
  REGION 1..10: note = Nuclear factor erythroid 2-related factor 2 (93-102)
QSETSGSANY

SEQ ID NO: 22007 - protein, 7 aa, synthetic construct
  REGION 1..7: note = Golgin subfamily A member 4 (541-547)
QSEYLKI

SEQ ID NO: 22008 - protein, 10 aa, synthetic construct
  REGION 1..10: note = RNA-binding protein 27 (597-606)
QSGGAGEDCQ

SEQ ID NO: 22009 - protein, 11 aa, synthetic construct
  REGION 1..11: note = Heterogeneous nuclear ribonucleoprotein K (153-163)
QSLAGGIIGVK

SEQ ID NO: 22010 - protein, 10 aa, synthetic construct
  REGION 1..10: note = Interphotoreceptor matrix proteoglycan 1 (289-298)
QSLDVGTIQF

SEQ ID NO: 22011 - protein, 9 aa, synthetic construct
  REGION 1..9: note = Hsc70-interacting protein (339-347)
QSNPKVMNL

SEQ ID NO: 22012 - protein, 9 aa, synthetic construct
  REGION 1..9: note = Hemicentin-1 (1877-1885)
QSSGRVLQI

SEQ ID NO: 22013 - protein, 9 aa, synthetic construct
  REGION 1..9: note = CUB and sushi domain-containing protein 3 (16-24)
QTASGFIYT

SEQ ID NO: 22014 - protein, 9 aa, synthetic construct
  REGION 1..9: note = Nodal modulator 1 (450-458)
QTFPLTVTN

SEQ ID NO: 22015 - protein, 12 aa, synthetic construct
  REGION 1..12: note = Receptor-type tyrosine-protein phosphatase delta (33-44)
QTGVSGGVASFI

SEQ ID NO: 22016 - protein, 9 aa, synthetic construct
  REGION 1..9: note = Ribosome maturation protein SBDS (52-60)
QTHSVFVNV

SEQ ID NO: 22017 - protein, 10 aa, synthetic construct
  REGION 1..10: note = Histone-lysine N-methyltransferase EHMT1 (170-179)
QTPAAPPATL

SEQ ID NO: 22018 - protein, 7 aa, synthetic construct
  REGION 1..7: note = rRNA 2'-O-methyltransferase fibrillarin (239-245)
QTRIVAL

SEQ ID NO: 22019 - protein, 11 aa, synthetic construct
  REGION 1..11: note = Protein FAM135A (647-657)
QTTPSLGVRTI

SEQ ID NO: 22020 - protein, 10 aa, synthetic construct
  REGION 1..10: note = Catenin beta-1 (78-87)
QVADIDGQYA

SEQ ID NO: 22021 - protein, 41 aa, synthetic construct
  REGION 1..41: note = E1A-binding protein p400 (51-91)
QVASLRAERIAKEKKALADQQKAQQPAVAQPPPPQPQPPPP

SEQ ID NO: 22022 - protein, 10 aa, synthetic construct
  REGION 1..10: note = Integrator complex subunit 1 (125-134)
QVASRVLAMK

SEQ ID NO: 22023 - protein, 9 aa, synthetic construct
  REGION 1..9: note = ATP-binding cassette sub-family A member 2 (2330-2338)
QVFSKMEQV

SEQ ID NO: 22024 - protein, 14 aa, synthetic construct
  REGION 1..14: note = Zinc finger protein 423 (1103-1116)
QVGGLAPPEPADRP

SEQ ID NO: 22025 - protein, 10 aa, synthetic construct
  REGION 1..10: note = Transcription factor SOX-5 (88-97)
QVLDGKVAVV

SEQ ID NO: 22026 - protein, 15 aa, synthetic construct
  REGION 1..15: note = T-complex protein 1 subunit beta (502-516)
QVLLSAAEAAEVILR

SEQ ID NO: 22027 - protein, 7 aa, synthetic construct
  REGION 1..7: note = Peptidyl-prolyl cis-trans isomerase FKBP9 (200-206)
QVQIHTY

SEQ ID NO: 22028 - protein, 21 aa, synthetic construct
  REGION 1..21: note = Poly(rC)-binding protein 2 (304-324)
QVTITGSAASISLAQYLINVR

SEQ ID NO: 22029 - protein, 9 aa, synthetic construct
  REGION 1..9: note = Transcriptional regulator ATRX (1486-1494)
QVVSFLHTV

SEQ ID NO: 22030 - protein, 9 aa, synthetic construct
  REGION 1..9: note = 14-3-3 protein eta (46-54)
QYESKVFYL

SEQ ID NO: 22031 - protein, 9 aa, synthetic construct
  REGION 1..9: note = TELO2-interacting protein 1 homolog (50-58)
QYILFPLRF

SEQ ID NO: 22032 - protein, 9 aa, synthetic construct
  REGION 1..9: note = Vam6/Vps39-like protein (296-304)
QYPNPLPVL

SEQ ID NO: 22033 - protein, 15 aa, synthetic construct
  REGION 1..15: note = Forkhead box protein D3 (302-316)
QYPYALPPVAPVLPP

SEQ ID NO: 22034 - protein, 9 aa, synthetic construct
  REGION 1..9: note = Spectrin beta chain, non-erythrocytic 1 (17-25)
QYSDVNNRW

SEQ ID NO: 22035 - protein, 10 aa, synthetic construct
  REGION 1..10: note = Ubiquitin-like modifier-activating enzyme 1 (717-726)
QYSNNIRQLL

SEQ ID NO: 22036 - protein, 10 aa, synthetic construct
  REGION 1..10: note = Golgin subfamily A member 4 (432-441)
RAAFEELEKA

SEQ ID NO: 22037 - protein, 9 aa, synthetic construct
  REGION 1..9: note = HDAC2 (27-35)
RAFPAPPPL

SEQ ID NO: 22038 - protein, 9 aa, synthetic construct
  REGION 1..9: note = Formin-like protein 2 (15-23)
RAHNVPLKL

SEQ ID NO: 22039 - protein, 9 aa, synthetic construct
  REGION 1..9: note = Catenin beta-1 (151-159)
RAIPELTKL

SEQ ID NO: 22040 - protein, 11 aa, synthetic construct
  REGION 1..11: note = Fatty acid synthase (2352-2362)
RAKLTPGCEAE

SEQ ID NO: 22041 - protein, 9 aa, synthetic construct
  REGION 1..9: note = Junction plakoglobin (142-150)
RALPELTKL

SEQ ID NO: 22042 - protein, 8 aa, synthetic construct
  REGION 1..8: note = Astrotactin-2 (360-367)
RANTPIEI

SEQ ID NO: 22043 - protein, 9 aa, synthetic construct
  REGION 1..9: note = Microtubule-associated protein 4 (356-364)
RASPIKMDL

SEQ ID NO: 22044 - protein, 9 aa, synthetic construct
  REGION 1..9: note = Protein scribble homolog (473-481)
RATPHPSEL

SEQ ID NO: 22045 - protein, 11 aa, synthetic construct
  REGION 1..11: note = Perilipin-2 (230-240)
RAYQQALSRVK

SEQ ID NO: 22046 - protein, 9 aa, synthetic construct
  REGION 1..9: note = Probable E3 ubiquitin-protein ligase HERC1 (2112-2120)
RAYSGNLYH

SEQ ID NO: 22047 - protein, 9 aa, synthetic construct
  REGION 1..9: note = Fibronectin isoform 6 (1162-1170)
RDAPIVNKV

SEQ ID NO: 22048 - protein, 17 aa, synthetic construct
  REGION 1..17: note = Vimentin (450-466)
RDGQVINETSQHHDDLE

SEQ ID NO: 22049 - protein, 15 aa, synthetic construct
  REGION 1..15: note = Protein NipSnap homolog 2 (40-54)
REDSWLKSLFVRKVD

SEQ ID NO: 22050 - protein, 11 aa, synthetic construct
  REGION 1..11: note = Vimentin (196-206)
REEAENTLQSF

SEQ ID NO: 22051 - protein, 9 aa, synthetic construct
  REGION 1..9: note = Transcription elongation factor SPT5 (606-614)
REGEIRHLF

SEQ ID NO: 22052 - protein, 43 aa, synthetic construct
  REGION 1..43: note = Vimentin (258-300)
RETNLDSLPLVDTHSKRTLLIKTVETRDGQVINETSQHHDDLE

SEQ ID NO: 22053 - protein, 8 aa, synthetic construct
  REGION 1..8: note = Myosin-7 (243-250)
RFGKFIRI

SEQ ID NO: 22054 - protein, 12 aa, synthetic construct
  REGION 1..12: note = Protein YIF1B (85-96)
RFIPITKLKYYF

SEQ ID NO: 22055 - protein, 11 aa, synthetic construct
  REGION 1..11: note = Filamin-A (2059-2069)
RFIPRENGVYL

SEQ ID NO: 22056 - protein, 9 aa, synthetic construct
  REGION 1..9: note = Uncharacterized protein C11orf96 (157-165)
RFKTQPVTF

SEQ ID NO: 22057 - protein, 9 aa, synthetic construct
  REGION 1..9: note = Serine/threonine-protein phosphatase 2A 56 kDa regulatory subunit epsilon isoform (227-235)
RFVYETEHF

SEQ ID NO: 22058 - protein, 13 aa, synthetic construct
  REGION 1..13: note = NADH dehydrogenase (ubiquinone) 1 beta subcomplex subunit 5, mitochondrial (61-73)
RFYDRRFLKLLRF

SEQ ID NO: 22059 - protein, 11 aa, synthetic construct
  REGION 1..11: note = Collagen alpha-2(I) chain (495-505)
RGAPGAVGAPG

SEQ ID NO: 22060 - protein, 10 aa, synthetic construct
  REGION 1..10: note = Nuclear receptor corepressor 2 (1514-1523)
RGAPVIVPEL

SEQ ID NO: 22061 - protein, 9 aa, synthetic construct
  REGION 1..9: note = Pre-mRNA-processing-splicing factor 8 (763-771)
RGATVDKTV

SEQ ID NO: 22062 - protein, 10 aa, synthetic construct
  REGION 1..10: note = Inositol 1,4,5-trisphosphate receptor type 2 (1365-1374)
RGDESGPLAY

SEQ ID NO: 22063 - protein, 9 aa, synthetic construct
  REGION 1..9: note = Collagen alpha-2(V) chain (785-793)
RGFTGLQGL

SEQ ID NO: 22064 - protein, 10 aa, synthetic construct
  REGION 1..10: note = Inactive phospholipase C-like protein 2 (6-15)
RGGAAGGALP

SEQ ID NO: 22065 - protein, 8 aa, synthetic construct
  REGION 1..8: note = Eukaryotic translation initiation factor 4 gamma 1 (993-1000)
RGGPPGPP

SEQ ID NO: 22066 - protein, 11 aa, synthetic construct
  REGION 1..11: note = Plexin-B3 (190-200)
RGLAGKLSAGV

SEQ ID NO: 22067 - protein, 14 aa, synthetic construct
  REGION 1..14: note = Collagen alpha-1(III) chain (761-774)
RGPTGPIGPPGPAG

SEQ ID NO: 22068 - protein, 9 aa, synthetic construct
  REGION 1..9: note = Heat shock protein HSP 90-beta (103-111)
RGTKVILHL

SEQ ID NO: 22069 - protein, 9 aa, synthetic construct
  REGION 1..9: note = UDP-N-acetylhexosamine pyrophosphorylase-like protein 1 (111-119)
RGVEFVHVY

SEQ ID NO: 22070 - protein, 6 aa, synthetic construct
  REGION 1..6: note = Msx2-interacting protein (535-540)
RHFCRY

SEQ ID NO: 22071 - protein, 10 aa, synthetic construct
  REGION 1..10: note = Krueppel-like factor 15 (280-289)
RIAPVPIAAK

SEQ ID NO: 22072 - protein, 10 aa, synthetic construct
  REGION 1..10: note = Phosphoglycerate kinase 1 (39-48)
RIKAAVPSIK

SEQ ID NO: 22073 - protein, 8 aa, synthetic construct
  REGION 1..8: note = General transcription factor II-I (492-499)
RIKFVIKR

SEQ ID NO: 22074 - protein, 11 aa, synthetic construct
  REGION 1..11: note = Alpha-globin transcription factor CP2 (148-158)
RILDIDIPMSV

SEQ ID NO: 22075 - protein, 9 aa, synthetic construct
  REGION 1..9: note = Asparagine synthetase (glutamine-hydrolyzing) (153-161)
RILFNNAVK

SEQ ID NO: 22076 - protein, 9 aa, synthetic construct
  REGION 1..9: note = Nuclear factor of activated T-cells, cytoplasmic 2 (247-255)
RILKPHAFY

SEQ ID NO: 22077 - protein, 10 aa, synthetic construct
  REGION 1..10: note = cAMP-dependent protein kinase type I-beta regulatory subunit (233-242)
RILMGSTLRK

SEQ ID NO: 22078 - protein, 11 aa, synthetic construct
  REGION 1..11: note = CCR4-NOT transcription complex subunit 1 (238-248)
RILPDSGGVAK

SEQ ID NO: 22079 - protein, 9 aa, synthetic construct
  REGION 1..9: note = Centrin-2 (164-172)
RIMKKTSLY

SEQ ID NO: 22080 - protein, 10 aa, synthetic construct
  REGION 1..10: note = Transcription factor HES-1 (49-58)
RINESLSQLK

SEQ ID NO: 22081 - protein, 9 aa, synthetic construct
  REGION 1..9: note = Vigilin (291-299)
RINIPPPSV

SEQ ID NO: 22082 - protein, 9 aa, synthetic construct
  REGION 1..9: note = Pumilio homolog 1 (920-928)
RIRGHVLSL

SEQ ID NO: 22083 - protein, 9 aa, synthetic construct
  REGION 1..9: note = Proteasome subunit beta type-5 (76-84)
RISGATFSV

SEQ ID NO: 22084 - protein, 11 aa, synthetic construct
  REGION 1..11: note = Cubilin (1911-1921)
RIYDGPSIHAR

SEQ ID NO: 22085 - protein, 9 aa, synthetic construct
  REGION 1..9: note = Centrosomal protein C10orf90 (654-662)
RIYDNLPEV

SEQ ID NO: 22086 - protein, 13 aa, synthetic construct
  REGION 1..13: note = Probable phospholipid-transporting ATPase VB (153-165)
RIYERKEQTYVQK

SEQ ID NO: 22087 - protein, 27 aa, synthetic construct
  REGION 1..27: note = HLA class I histocompatibility antigen, A-23 alpha chain (339-365)
RKGGSYSQAASSDSAQGSDVSLTACKV

SEQ ID NO: 22088 - protein, 27 aa, synthetic construct
  REGION 1..27: note = HLA class I histocompatibility antigen, A-1 alpha chain (314-340)
RKGGSYTQAASSDSAQGSDVSLTACKV

SEQ ID NO: 22089 - protein, 9 aa, synthetic construct
  REGION 1..9: note = Ellis-van Creveld syndrome protein (396-404)
RLAAISHGL

SEQ ID NO: 22090 - protein, 9 aa, synthetic construct
  REGION 1..9: note = Interferon-induced protein with tetratricopeptide repeats 1 (110-118)
RLAEAQTYL

SEQ ID NO: 22091 - protein, 9 aa, synthetic construct
  REGION 1..9: note = EMILIN-1 (205-213)
RLAEDVQRA

SEQ ID NO: 22092 - protein, 9 aa, synthetic construct
  REGION 1..9: note = Periodic tryptophan protein 2 homolog (276-284)
RLAKYFFNK

SEQ ID NO: 22093 - protein, 9 aa, synthetic construct
  REGION 1..9: note = Keratin, type I cytoskeletal 24 (150-158)
RLANYLDKV

SEQ ID NO: 22094 - protein, 9 aa, synthetic construct
  REGION 1..9: note = Histone-lysine N-methyltransferase 2D (2762-2770)
RLAPSMAMV

SEQ ID NO: 22095 - protein, 9 aa, synthetic construct
  REGION 1..9: note = Ankyrin-2 (1004-1012)
RLATMPPMV

SEQ ID NO: 22096 - protein, 10 aa, synthetic construct
  REGION 1..10: note = Coatomer subunit gamma-1 (208-217)
RLAVNKMISK

SEQ ID NO: 22097 - protein, 9 aa, synthetic construct
  REGION 1..9: note = Apolipoprotein E (246-254)
RLDEVKEQV

SEQ ID NO: 22098 - protein, 8 aa, synthetic construct
  REGION 1..8: note = Vimentin (217-224)
RLDLERKV

SEQ ID NO: 22099 - protein, 10 aa, synthetic construct
  REGION 1..10: note = Protein kinase C and casein kinase substrate in neurons protein 2 (468-477)
RLDNGQVGLY

SEQ ID NO: 22100 - protein, 9 aa, synthetic construct
  REGION 1..9: note = Sestrin-3 (71-79)
RLDNITQVM

SEQ ID NO: 22101 - protein, 9 aa, synthetic construct
  REGION 1..9: note = Glutamine and serine-rich protein 1 (616-624)
RLEDQVIGV

SEQ ID NO: 22102 - protein, 9 aa, synthetic construct
  REGION 1..9: note = Myosin-10 (1407-1415)
RLEEKALAY

SEQ ID NO: 22103 - protein, 11 aa, synthetic construct
  REGION 1..11: note = 40S ribosomal protein S9 (9-19)
RLFEGNALLRR

SEQ ID NO: 22104 - protein, 9 aa, synthetic construct
  REGION 1..9: note = Spectrin beta chain, erythrocytic (38-46)
RLFERSRIK

SEQ ID NO: 22105 - protein, 9 aa, synthetic construct
  REGION 1..9: note = Unconventional myosin-XVIIIa (821-829)
RLFHERTFV

SEQ ID NO: 22106 - protein, 10 aa, synthetic construct
  REGION 1..10: note = Cytochrome P450 4V2 (390-399)
RLFPSVPLFA

SEQ ID NO: 22107 - protein, 9 aa, synthetic construct
  REGION 1..9: note = Mitogen-activated protein kinase-binding protein 1 (328-336)
RLFSGVANA

SEQ ID NO: 22108 - protein, 9 aa, synthetic construct
  REGION 1..9: note = Cysteine andine-rich protein 2 (87-95)
RLGIKPESV

SEQ ID NO: 22109 - protein, 8 aa, synthetic construct
  REGION 1..8: note = E3 ubiquitin-protein ligase HECTD1 (175-182)
RLGVISKV

SEQ ID NO: 22110 - protein, 9 aa, synthetic construct
  REGION 1..9: note = Protein fantom (56-64)
RLHDENILL

SEQ ID NO: 22111 - protein, 10 aa, synthetic construct
  REGION 1..10: note = General transcription factor 3C polypeptide 1 (377-386)
RLIESLFTIQ

SEQ ID NO: 22112 - protein, 9 aa, synthetic construct
  REGION 1..9: note = Heterogeneous nuclear ribonucleoprotein U-like protein 1 (490-498)
RLIQIAARK

SEQ ID NO: 22113 - protein, 9 aa, synthetic construct
  REGION 1..9: note = Cytochrome c oxidase subunit 2 (134-142)
RLLDVDNRV

SEQ ID NO: 22114 - protein, 11 aa, synthetic construct
  REGION 1..11: note = Keratin, type I cytoskeletal 18 (324-334)
RLLEDGEDFNL

SEQ ID NO: 22115 - protein, 10 aa, synthetic construct
  REGION 1..10: note = Cytoplasmic FMR1-interacting protein 1 (113-122)
RLLGYQGIAV

SEQ ID NO: 22116 - protein, 10 aa, synthetic construct
  REGION 1..10: note = Histone-lysine N-methyltransferase 2D (4468-4477)
RLLNLDLDLW

SEQ ID NO: 22117 - protein, 11 aa, synthetic construct
  REGION 1..11: note = Homeobox protein Hox-B9 (220-230)
RLLNLSERQVK

SEQ ID NO: 22118 - protein, 9 aa, synthetic construct
  REGION 1..9: note = Apolipoprotein C-II (4-12)
RLLPALFLV

SEQ ID NO: 22119 - protein, 10 aa, synthetic construct
  REGION 1..10: note = Syndecan-3 (138-147)
RLLPLPLTTV

SEQ ID NO: 22120 - protein, 13 aa, synthetic construct
  REGION 1..13: note = Long-chain fatty acid transport protein 1 (273-285)
RLLPQVDTTGTFK

SEQ ID NO: 22121 - protein, 9 aa, synthetic construct
  REGION 1..9: note = Muskelin (14-22)
RLLPYALHK

SEQ ID NO: 22122 - protein, 9 aa, synthetic construct
  REGION 1..9: note = Regulator of G-protein signaling 12 (718-726)
RLLQDPVGV

SEQ ID NO: 22123 - protein, 11 aa, synthetic construct
  REGION 1..11: note = G2/mitotic-specific cyclin-B1 (217-227)
RLLQETMYMTV

SEQ ID NO: 22124 - protein, 11 aa, synthetic construct
  REGION 1..11: note = Interleukin-24 (90-100)
RLLQQEVLQNV

SEQ ID NO: 22125 - protein, 9 aa, synthetic construct
  REGION 1..9: note = Unconventional myosin-Ic (138-146)
RLLQSNPVL

SEQ ID NO: 22126 - protein, 10 aa, synthetic construct
  REGION 1..10: note = AP-1 complex subunit beta-1 (528-537)
RLLSTDPVAA

SEQ ID NO: 22127 - protein, 9 aa, synthetic construct
  REGION 1..9: note = Neurochondrin (561-569)
RLLSTSPAL

SEQ ID NO: 22128 - protein, 10 aa, synthetic construct
  REGION 1..10: note = Bombesin receptor-activated protein C6orf89 (119-128)
RLMSLPIAKK

SEQ ID NO: 22129 - protein, 9 aa, synthetic construct
  REGION 1..9: note = Cytochrome c oxidase subunit 2 (178-186)
RLNQTTFTA

SEQ ID NO: 22130 - protein, 9 aa, synthetic construct
  REGION 1..9: note = Lysosome-associated membraneoprotein 2 (273-281)
RLNSSTIKY

SEQ ID NO: 22131 - protein, 9 aa, synthetic construct
  REGION 1..9: note = Lysosomal thioesterase PPT2 (8-16)
RLPAAWVLL

SEQ ID NO: 22132 - protein, 10 aa, synthetic construct
  REGION 1..10: note = Protein scribble homolog (257-266)
RLPDGIGQLK

SEQ ID NO: 22133 - protein, 9 aa, synthetic construct
  REGION 1..9: note = Neuron navigator 2 (921-929)
RLPDGMAVV

SEQ ID NO: 22134 - protein, 10 aa, synthetic construct
  REGION 1..10: note = Lysine-specific demethylase 5B (1280-1289)
RLPEGDALRY

SEQ ID NO: 22135 - protein, 11 aa, synthetic construct
  REGION 1..11: note = Transformation/transcription domain-associated protein (696-706)
RLPEMGSNVEL

SEQ ID NO: 22136 - protein, 9 aa, synthetic construct
  REGION 1..9: note = Probable E3 ubiquitin-protein ligase HERC6 (578-586)
RLPENTFNI

SEQ ID NO: 22137 - protein, 9 aa, synthetic construct
  REGION 1..9: note = WD repeat-containing protein 90 (1359-1367)
RLPEPVHGV

SEQ ID NO: 22138 - protein, 11 aa, synthetic construct
  REGION 1..11: note = YrdC domain-containing protein, mitochondrial (48-58)
RLPGSGAVQAA

SEQ ID NO: 22139 - protein, 11 aa, synthetic construct
  REGION 1..11: note = Insulin receptor substrate 2 (1043-1053)
RLPPASAVATA

SEQ ID NO: 22140 - protein, 9 aa, synthetic construct
  REGION 1..9: note = Zinc finger BED domain-containing protein 6 (445-453)
RLPSETYFF

SEQ ID NO: 22141 - protein, 9 aa, synthetic construct
  REGION 1..9: note = DNA-dependent protein kinase catalytic subunit (2530-2538)
RLPSNTLDR

SEQ ID NO: 22142 - protein, 9 aa, synthetic construct
  REGION 1..9: note = T-cell immunomodulatory protein (6-14)
RLPSSWALF

SEQ ID NO: 22143 - protein, 10 aa, synthetic construct
  REGION 1..10: note = Peroxisome proliferator-activated receptor gamma coactivator-related protein 1 (1096-1105)
RLQAPELANV

SEQ ID NO: 22144 - protein, 9 aa, synthetic construct
  REGION 1..9: note = DNA-dependent protein kinase catalytic subunit (14-22)
RLQETLSAA

SEQ ID NO: 22145 - protein, 9 aa, synthetic construct
  REGION 1..9: note = DNA ligase 3 (740-748)
RLQNELDMV

SEQ ID NO: 22146 - protein, 11 aa, synthetic construct
  REGION 1..11: note = 2'-5'-oligoadenylate synthase 3 (18-28)
RLQPRKEFVEK

SEQ ID NO: 22147 - protein, 9 aa, synthetic construct
  REGION 1..9: note = Plectin (2433-2441)
RLREAIAEL

SEQ ID NO: 22148 - protein, 9 aa, synthetic construct
  REGION 1..9: note = Tripeptidyl-peptidase 1 (60-68)
RLSELVQAV

SEQ ID NO: 22149 - protein, 9 aa, synthetic construct
  REGION 1..9: note = Desumoylating isopeptidase 1 (23-31)
RLSPIMLGK

SEQ ID NO: 22150 - protein, 9 aa, synthetic construct
  REGION 1..9: note = GCN1 general control of amino-acid synthesis 1-like 1 (2013-2021)
RLTSADALR

SEQ ID NO: 22151 - protein, 12 aa, synthetic construct
  REGION 1..12: note = Melanoma antigen preferentially expressed in tumors (25-36)
RLVELAGQSLLK

SEQ ID NO: 22152 - protein, 8 aa, synthetic construct
  REGION 1..8: note = Lysophosphatidic acid phosphatase type 6 (9-16)
RLWTPVGV

SEQ ID NO: 22153 - protein, 11 aa, synthetic construct
  REGION 1..11: note = Tubulin-specific chaperone C (217-227)
RLYGNPNTLRL

SEQ ID NO: 22154 - protein, 10 aa, synthetic construct
  REGION 1..10: note = Tetratricopeptide repeat protein 30A (82-91)
RLYQAQALYK

SEQ ID NO: 22155 - protein, 9 aa, synthetic construct
  REGION 1..9: note = Protein asteroid homolog 1 (274-282)
RLYSGSLVH

SEQ ID NO: 22156 - protein, 9 aa, synthetic construct
  REGION 1..9: note = Filamin-A (2280-2288)
RLYSVSYLL

SEQ ID NO: 22157 - protein, 10 aa, synthetic construct
  REGION 1..10: note = Unconventional myosin-X (1476-1485)
RLYTKLLNEA

SEQ ID NO: 22158 - protein, 10 aa, synthetic construct
  REGION 1..10: note = Vimentin (13-22)
RMFGGPGTAS

SEQ ID NO: 22159 - protein, 15 aa, synthetic construct
  REGION 1..15: note = Vimentin (13-27)
RMFGGPGTASRPSSS

SEQ ID NO: 22160 - protein, 16 aa, synthetic construct
  REGION 1..16: note = Vimentin (13-28)
RMFGGPGTASRPSSSR

SEQ ID NO: 22161 - protein, 17 aa, synthetic construct
  REGION 1..17: note = Vimentin (13-29)
RMFGGPGTASRPSSSRS

SEQ ID NO: 22162 - protein, 10 aa, synthetic construct
  REGION 1..10: note = Mitochondrial 2-oxoglutarate/malate carrier protein (240-249)
RMIDGKPEYK

SEQ ID NO: 22163 - protein, 14 aa, synthetic construct
  REGION 1..14: note = Spermine synthase (79-92)
RMKELSQDSTGRVK

SEQ ID NO: 22164 - protein, 9 aa, synthetic construct
  REGION 1..9: note = Eukaryotic translation initiation factor 2 subunit 3 (352-360)
RMVGQVLGA

SEQ ID NO: 22165 - protein, 10 aa, synthetic construct
  REGION 1..10: note = tRNA (adenine(58)-N(1))-methyltransferase non-catalytic subunit TRM6 (197-206)
RNADGLIVAS

SEQ ID NO: 22166 - protein, 9 aa, synthetic construct
  REGION 1..9: note = Probable global transcription activator SNF2L1 (166-174)
RNIPGPHMV

SEQ ID NO: 22167 - protein, 9 aa, synthetic construct
  REGION 1..9: note = Melanocyte protein PMEL (241-249)
RNQPLTFAL

SEQ ID NO: 22168 - protein, 32 aa, synthetic construct
  REGION 1..32: note = HLA class I histocompatibility antigen, A-23 alpha chain (334-365)
RNSSDRKGGSYSQAASSDSAQGSDVSLTACKV

SEQ ID NO: 22169 - protein, 9 aa, synthetic construct
  REGION 1..9: note = Heterogeneous nuclear ribonucleoprotein K (37-45)
RNTDEMVEL

SEQ ID NO: 22170 - protein, 9 aa, synthetic construct
  REGION 1..9: note = V-type proton ATPase subunit D (136-144)
RNYAKAVEL

SEQ ID NO: 22171 - protein, 10 aa, synthetic construct
  REGION 1..10: note = Fibronectin isoform 6 (1712-1721)
RPAQGVVTTL

SEQ ID NO: 22172 - protein, 9 aa, synthetic construct
  REGION 1..9: note = Putative inactive carbonic anhydrase 5B-like protein (84-92)
RPAQKHWVL

SEQ ID NO: 22173 - protein, 9 aa, synthetic construct
  REGION 1..9: note = Glycosylated lysosomal membrane protein (121-129)
RPAQPPRLL

SEQ ID NO: 22174 - protein, 9 aa, synthetic construct
  REGION 1..9: note = Chondroitin sulfate synthase 2 (384-392)
RPASRFEVL

SEQ ID NO: 22175 - protein, 8 aa, synthetic construct
  REGION 1..8: note = L-dopachrome tautomerase (266-273)
RPDDPTLI

SEQ ID NO: 22176 - protein, 9 aa, synthetic construct
  REGION 1..9: note = Cancer/testis antigen 2 (82-90)
RPDSRLLQL

SEQ ID NO: 22177 - protein, 15 aa, synthetic construct
  REGION 1..15: note = Titin (9911-9925)
RPGPPVGPIKFESVS

SEQ ID NO: 22178 - protein, 21 aa, synthetic construct
  REGION 1..21: note = Glia-derived nexin (58-78)
RPHDNIVISPHGIASVLGMLQ

SEQ ID NO: 22179 - protein, 17 aa, synthetic construct
  REGION 1..17: note = Collagen alpha-2(I) chain (949-965)
RPKDYEVDATLKSLNNQ

SEQ ID NO: 22180 - protein, 9 aa, synthetic construct
  REGION 1..9: note = 6-phosphofructo-2-kinase/fructose-2,6-bisphosphatase 2 (486-494)
RPLKPLSPL

SEQ ID NO: 22181 - protein, 10 aa, synthetic construct
  REGION 1..10: note = Protein transport protein Sec23A (259-268)
RPLRSSGVAL

SEQ ID NO: 22182 - protein, 9 aa, synthetic construct
  REGION 1..9: note = VPS10 domain-containing receptor SorCS1 (1153-1161)
RPNVPQTEL

SEQ ID NO: 22183 - protein, 7 aa, synthetic construct
  REGION 1..7: note = 40S ribosomal protein S26 (109-115)
RPPPKPM

SEQ ID NO: 22184 - protein, 10 aa, synthetic construct
  REGION 1..10: note = Dystonin (1741-1750)
RPQEGGRITL

SEQ ID NO: 22185 - protein, 8 aa, synthetic construct
  REGION 1..8: note = Kelch-like protein 20 (247-254)
RPQLPQVL

SEQ ID NO: 22186 - protein, 8 aa, synthetic construct
  REGION 1..8: note = Renin receptor (59-66)
RPRATVMV

SEQ ID NO: 22187 - protein, 9 aa, synthetic construct
  REGION 1..9: note = UPF0524 protein C3orf70 (87-95)
RPREPTNTI

SEQ ID NO: 22188 - protein, 9 aa, synthetic construct
  REGION 1..9: note = Thiosulfate sulfurtransferase/rhodanese-like domain-containing protein 2 (485-493)
RPRIPRELL

SEQ ID NO: 22189 - protein, 9 aa, synthetic construct
  REGION 1..9: note = Homocysteine-responsive endoplasmic reticulum-resident ubiquitin-like domain member 1 protein (48-56)
RPRPEDQRL

SEQ ID NO: 22190 - protein, 9 aa, synthetic construct
  REGION 1..9: note = Transmembraneoprotein NMB (331-339)
RPSKPTPSL

SEQ ID NO: 22191 - protein, 9 aa, synthetic construct
  REGION 1..9: note = Rho GTPase-activating protein 7 (565-573)
RPSLNSVSL

SEQ ID NO: 22192 - protein, 9 aa, synthetic construct
  REGION 1..9: note = Vimentin (45-53)
RPSTSRSLY

SEQ ID NO: 22193 - protein, 10 aa, synthetic construct
  REGION 1..10: note = Vimentin (45-54)
RPSTSRSLYA

SEQ ID NO: 22194 - protein, 8 aa, synthetic construct
  REGION 1..8: note = Kinase D-interacting substrate of 220 kDa (97-104)
RPSVKTSL

SEQ ID NO: 22195 - protein, 9 aa, synthetic construct
  REGION 1..9: note = Integrin beta-5 (445-453)
RPVGFRDSL

SEQ ID NO: 22196 - protein, 9 aa, synthetic construct
  REGION 1..9: note = Dual specificity protein phosphatase 6 (6-14)
RPVPFASEM

SEQ ID NO: 22197 - protein, 9 aa, synthetic construct
  REGION 1..9: note = L-dopachrome tautomerase (69-77)
RPWSGPYIL

SEQ ID NO: 22198 - protein, 9 aa, synthetic construct
  REGION 1..9: note = Mannosyl-oligosaccharide 1,2-alpha-mannosidase IB (132-140)
RQAEKYYIL

SEQ ID NO: 22199 - protein, 9 aa, synthetic construct
  REGION 1..9: note = V-type proton ATPase subunit H (132-140)
RQDPFTVHM

SEQ ID NO: 22200 - protein, 9 aa, synthetic construct
  REGION 1..9: note = Dol-P-Man:Man(5)GlcNAc(2)-PP-Dol alpha-1,3-mannosyltransferase (218-226)
RQFLFHWTV

SEQ ID NO: 22201 - protein, 13 aa, synthetic construct
  REGION 1..13: note = Cohesin subunit SA-1 (249-261)
RQYEAERNKMIGK

SEQ ID NO: 22202 - protein, 9 aa, synthetic construct
  REGION 1..9: note = X-ray repair cross-complementing protein 5 (431-439)
RQYMFSSLK

SEQ ID NO: 22203 - protein, 7 aa, synthetic construct
  REGION 1..7: note = HLA class II histocompatibility antigen, DQ alpha 1 chain (55-61)
RRFDPQF

SEQ ID NO: 22204 - protein, 9 aa, synthetic construct
  REGION 1..9: note = HLA class II histocompatibility antigen, DQ alpha 1 chain (55-63)
RRFDPQFAL

SEQ ID NO: 22205 - protein, 10 aa, synthetic construct
  REGION 1..10: note = HLA class II histocompatibility antigen, DQ alpha 1 chain (55-64)
RRFDPQFALT

SEQ ID NO: 22206 - protein, 9 aa, synthetic construct
  REGION 1..9: note = Inosine-5'-monophosphate dehydrogenase 2 (355-363)
RRFGVPVIA

SEQ ID NO: 22207 - protein, 9 aa, synthetic construct
  REGION 1..9: note = Basement membrane-specific heparan sulfate proteoglycan core protein (587-595)
RRFLVHDSF

SEQ ID NO: 22208 - protein, 10 aa, synthetic construct
  REGION 1..10: note = C-1-tetrahydrofolate synthase, cytoplasmic (487-496)
RRFSDIQIRR

SEQ ID NO: 22209 - protein, 7 aa, synthetic construct
  REGION 1..7: note = PDZ domain-containing protein 2 (308-314)
RRFSKGG

SEQ ID NO: 22210 - protein, 9 aa, synthetic construct
  REGION 1..9: note = Casein kinase I isoform alpha (106-114)
RRFTMKTVL

SEQ ID NO: 22211 - protein, 8 aa, synthetic construct
  REGION 1..8: note = Cytochrome c oxidase subunit 7C, mitochondrial (7-14)
RRFTTSVV

SEQ ID NO: 22212 - protein, 8 aa, synthetic construct
  REGION 1..8: note = Acyl-CoA desaturase (174-181)
RRGFFFSH

SEQ ID NO: 22213 - protein, 37 aa, synthetic construct
  REGION 1..37: note = Growth arrest-specific protein 6 (314-350)
RRGPRPWQDILPCVPFSVAKSVKSLYLGRMFSGTPVI

SEQ ID NO: 22214 - protein, 9 aa, synthetic construct
  REGION 1..9: note = Homeobox protein Hox-A4 (244-252)
RRIEIAHTL

SEQ ID NO: 22215 - protein, 9 aa, synthetic construct
  REGION 1..9: note = WD repeat-containing protein 6 (233-241)
RRISGHVGI

SEQ ID NO: 22216 - protein, 9 aa, synthetic construct
  REGION 1..9: note = Protein kinase C-binding protein 1 (354-362)
RRKFGVFNY

SEQ ID NO: 22217 - protein, 9 aa, synthetic construct
  REGION 1..9: note = Hemicentin-1 (827-835)
RRLDNMPIF

SEQ ID NO: 22218 - protein, 10 aa, synthetic construct
  REGION 1..10: note = Hemicentin-1 (827-836)
RRLDNMPIFS

SEQ ID NO: 22219 - protein, 11 aa, synthetic construct
  REGION 1..11: note = Hemicentin-1 (827-837)
RRLDNMPIFSR

SEQ ID NO: 22220 - protein, 9 aa, synthetic construct
  REGION 1..9: note = Golgi resident protein GCP60 (73-81)
RRLEQRWGF

SEQ ID NO: 22221 - protein, 9 aa, synthetic construct
  REGION 1..9: note = N-alpha-acetyltransferase 10 (82-90)
RRLGLAQKL

SEQ ID NO: 22222 - protein, 9 aa, synthetic construct
  REGION 1..9: note = Caldesmon (347-355)
RRLKEEIER

SEQ ID NO: 22223 - protein, 10 aa, synthetic construct
  REGION 1..10: note = Glyoxylate reductase/hydroxypyruvate reductase (170-179)
RRLKPFGVQR

SEQ ID NO: 22224 - protein, 9 aa, synthetic construct
  REGION 1..9: note = Ubiquitin-conjugating enzyme E2 variant 3 (9-17)
RRLLGKYKF

SEQ ID NO: 22225 - protein, 10 aa, synthetic construct
  REGION 1..10: note = L-dopachrome tautomerase (529-538)
RRLRKGYTPL

SEQ ID NO: 22226 - protein, 13 aa, synthetic construct
  REGION 1..13: note = Vimentin (12-24)
RRMFGGPGTASRP

SEQ ID NO: 22227 - protein, 16 aa, synthetic construct
  REGION 1..16: note = Vimentin (12-27)
RRMFGGPGTASRPSSS

SEQ ID NO: 22228 - protein, 18 aa, synthetic construct
  REGION 1..18: note = Vimentin (12-29)
RRMFGGPGTASRPSSSRS

SEQ ID NO: 22229 - protein, 9 aa, synthetic construct
  REGION 1..9: note = G-protein coupled receptor 143 (256-264)
RRMGAVIKI

SEQ ID NO: 22230 - protein, 9 aa, synthetic construct
  REGION 1..9: note = Polymerase I and transcript release factor (148-156)
RRNFKVMIY

SEQ ID NO: 22231 - protein, 33 aa, synthetic construct
  REGION 1..33: note = HLA class I histocompatibility antigen, A-23 alpha chain (333-365)
RRNSSDRKGGSYSQAASSDSAQGSDVSLTACKV

SEQ ID NO: 22232 - protein, 10 aa, synthetic construct
  REGION 1..10: note = Sodium/potassium-transporting ATPase subunit alpha-3 (943-952)
RRNSVFQQGM

SEQ ID NO: 22233 - protein, 9 aa, synthetic construct
  REGION 1..9: note = NADH dehydrogenase (ubiquinone) 1 alpha subcomplex subunit 13 (48-56)
RRRLQIEDF

SEQ ID NO: 22234 - protein, 9 aa, synthetic construct
  REGION 1..9: note = Dual specificity protein phosphatase 4 (313-321)
RRSIISPNF

SEQ ID NO: 22235 - protein, 9 aa, synthetic construct
  REGION 1..9: note = Hsp90 co-chaperone Cdc37 (166-174)
RRWDDSQKY

SEQ ID NO: 22236 - protein, 9 aa, synthetic construct
  REGION 1..9: note = Transmembraneoprotein NMB (169-177)
RRWNFIYVF

SEQ ID NO: 22237 - protein, 10 aa, synthetic construct
  REGION 1..10: note = Transmembraneoprotein NMB (169-178)
RRWNFIYVFH

SEQ ID NO: 22238 - protein, 9 aa, synthetic construct
  REGION 1..9: note = Eukaryotic translation initiation factor 3 subunit L (537-545)
RRYGDFFIR

SEQ ID NO: 22239 - protein, 8 aa, synthetic construct
  REGION 1..8: note = Eukaryotic initiation factor 4A-I (168-175)
RRYLSPKY

SEQ ID NO: 22240 - protein, 9 aa, synthetic construct
  REGION 1..9: note = Chondroitin sulfate glucuronyltransferase (416-424)
RRYQPRLRF

SEQ ID NO: 22241 - protein, 12 aa, synthetic construct
  REGION 1..12: note = 60S ribosomal protein L6 (59-70)
RSAMYSRKAMYK

SEQ ID NO: 22242 - protein, 9 aa, synthetic construct
  REGION 1..9: note = Krueppel-like factor 6 (250-258)
RSDELTRHF

SEQ ID NO: 22243 - protein, 9 aa, synthetic construct
  REGION 1..9: note = Synaptotagmin-like protein 2 (665-673)
RSDPYVKAY

SEQ ID NO: 22244 - protein, 8 aa, synthetic construct
  REGION 1..8: note = Isoleucine-tRNA ligase, cytoplasmic (402-409)
RSDTPLIY

SEQ ID NO: 22245 - protein, 9 aa, synthetic construct
  REGION 1..9: note = ETS homologous factor (209-217)
RSEGVFRFL

SEQ ID NO: 22246 - protein, 9 aa, synthetic construct
  REGION 1..9: note = Phosphatidylinositide phosphatase SAC2 (349-357)
RSEKETVAY

SEQ ID NO: 22247 - protein, 20 aa, synthetic construct
  REGION 1..20: note = Keratin, type I cytoskeletal 9 (13-32)
RSGGGGGGGLGSGGSIRSSY

SEQ ID NO: 22248 - protein, 10 aa, synthetic construct
  REGION 1..10: note = Son of sevenless homolog 2 (593-602)
RSGIPIIKGG

SEQ ID NO: 22249 - protein, 9 aa, synthetic construct
  REGION 1..9: note = Manganese-transporting ATPase 13A1 (667-675)
RSIDGSIVL

SEQ ID NO: 22250 - protein, 9 aa, synthetic construct
  REGION 1..9: note = Basement membrane-specific heparan sulfate proteoglycan core protein (92-100)
RSIEYSPQL

SEQ ID NO: 22251 - protein, 9 aa, synthetic construct
  REGION 1..9: note = Fragile X mental retardation syndrome-related protein 1 (190-198)
RSIRTKLML

SEQ ID NO: 22252 - protein, 9 aa, synthetic construct
  REGION 1..9: note = LIM domain kinase 2 (381-389)
RSLDHPNVL

SEQ ID NO: 22253 - protein, 16 aa, synthetic construct
  REGION 1..16: note = rRNA-processing protein UTP23 homolog (234-249)
RSNPKVLSEKQNAEGE

SEQ ID NO: 22254 - protein, 13 aa, synthetic construct
  REGION 1..13: note = Histone H2B type 2-F (32-44)
RSRKESYSVYVYK

SEQ ID NO: 22255 - protein, 9 aa, synthetic construct
  REGION 1..9: note = Deoxynucleotidyltransferase terminal-interacting protein 2 (272-280)
RSSENILTV

SEQ ID NO: 22256 - protein, 8 aa, synthetic construct
  REGION 1..8: note = DNA replication licensing factor MCM5 (603-610)
RSSIPITV

SEQ ID NO: 22257 - protein, 10 aa, synthetic construct
  REGION 1..10: note = DBIRD complex subunit ZNF326 (80-89)
RSSLGGRDLY

SEQ ID NO: 22258 - protein, 9 aa, synthetic construct
  REGION 1..9: note = HMG box-containing protein 1 (133-141)
RSSPVHIIA

SEQ ID NO: 22259 - protein, 9 aa, synthetic construct
  REGION 1..9: note = Helicase with zinc finger domain 2 (147-155)
RSSSEVLVL

SEQ ID NO: 22260 - protein, 9 aa, synthetic construct
  REGION 1..9: note = Cytoplasmic dynein 1 heavy chain 1 (3474-3482)
RSTALLKSL

SEQ ID NO: 22261 - protein, 9 aa, synthetic construct
  REGION 1..9: note = Cyclin-dependent kinase 5 activator 1 (179-187)
RSVDRSLLL

SEQ ID NO: 22262 - protein, 9 aa, synthetic construct
  REGION 1..9: note = Annexin A2 (220-228)
RSVPHLQKV

SEQ ID NO: 22263 - protein, 9 aa, synthetic construct
  REGION 1..9: note = Proline and serine-rich protein 2 (7-15)
RSVPTPLVM

SEQ ID NO: 22264 - protein, 9 aa, synthetic construct
  REGION 1..9: note = Signal peptidase complex subunit 3 (35-43)
RSVPVRLHV

SEQ ID NO: 22265 - protein, 11 aa, synthetic construct
  REGION 1..11: note = Zinc finger protein 770 (328-338)
RSYNYKTIVKK

SEQ ID NO: 22266 - protein, 13 aa, synthetic construct
  REGION 1..13: note = Protein Hook homolog 3 (706-718)
RSYPGHVQPATAR

SEQ ID NO: 22267 - protein, 9 aa, synthetic construct
  REGION 1..9: note = Annexin A1 (228-236)
RSYPQLRRV

SEQ ID NO: 22268 - protein, 9 aa, synthetic construct
  REGION 1..9: note = Coatomer subunit alpha (1106-1114)
RTALNLFFK

SEQ ID NO: 22269 - protein, 9 aa, synthetic construct
  REGION 1..9: note = Neuron navigator 2 (898-906)
RTDDITSGY

SEQ ID NO: 22270 - protein, 9 aa, synthetic construct
  REGION 1..9: note = Glycine-tRNA ligase (606-614)
RTDEIGVAF

SEQ ID NO: 22271 - protein, 9 aa, synthetic construct
  REGION 1..9: note = Cirhin (46-54)
RTDGTVEIY

SEQ ID NO: 22272 - protein, 9 aa, synthetic construct
  REGION 1..9: note = Origin recognition complex subunit 5 (322-330)
RTDKRFFLK

SEQ ID NO: 22273 - protein, 10 aa, synthetic construct
  REGION 1..10: note = 1-phosphatidylinositol 4,5-bisphosphate phosphodiesterase beta-1 (39-48)
RTDPQGFFFY

SEQ ID NO: 22274 - protein, 9 aa, synthetic construct
  REGION 1..9: note = Dedicator of cytokinesis protein 9 (1494-1502)
RTEASQLLY

SEQ ID NO: 22275 - protein, 9 aa, synthetic construct
  REGION 1..9: note = DDB1- and CUL4-associated factor 16 (191-199)
RTEPINTTY

SEQ ID NO: 22276 - protein, 9 aa, synthetic construct
  REGION 1..9: note = Rho guanine nucleotide exchange factor 2 (679-687)
RTFNGSIEL

SEQ ID NO: 22277 - protein, 11 aa, synthetic construct
  REGION 1..11: note = Insulin receptor substrate 2 (718-728)
RTFPASGGGYK

SEQ ID NO: 22278 - protein, 8 aa, synthetic construct
  REGION 1..8: note = Vigilin (146-153)
RTGAHLEL

SEQ ID NO: 22279 - protein, 8 aa, synthetic construct
  REGION 1..8: note = E3 ubiquitin-protein ligase HERC2 (17-24)
RTGSPLSL

SEQ ID NO: 22280 - protein, 13 aa, synthetic construct
  REGION 1..13: note = Prelamin-A/C (16-28)
RTGTLLAQHPAWG

SEQ ID NO: 22281 - protein, 9 aa, synthetic construct
  REGION 1..9: note = TGF-beta receptor type-1 (199-207)
RTIARTIVL

SEQ ID NO: 22282 - protein, 9 aa, synthetic construct
  REGION 1..9: note = Nuclear pore complex protein Nup155 (332-340)
RTIDRSVFK

SEQ ID NO: 22283 - protein, 9 aa, synthetic construct
  REGION 1..9: note = Protein CASP (616-624)
RTIGFFYTL

SEQ ID NO: 22284 - protein, 9 aa, synthetic construct
  REGION 1..9: note = Bifunctional glutamate/proline-tRNA ligase (1278-1286)
RTIGVMTMV

SEQ ID NO: 22285 - protein, 9 aa, synthetic construct
  REGION 1..9: note = Helicase-like transcription factor (616-624)
RTIQRPVTM

SEQ ID NO: 22286 - protein, 9 aa, synthetic construct
  REGION 1..9: note = AF4/FMR2 family member 4 (46-54)
RTISQSSSL

SEQ ID NO: 22287 - protein, 9 aa, synthetic construct
  REGION 1..9: note = Ankyrin repeat domain-containing protein 17 (1031-1039)
RTKDTPLSL

SEQ ID NO: 22288 - protein, 9 aa, synthetic construct
  REGION 1..9: note = Inositol 1,4,5-trisphosphate receptor type 3 (1667-1675)
RTLQQMLLK

SEQ ID NO: 22289 - protein, 11 aa, synthetic construct
  REGION 1..11: note = Phosphatidylserine synthase 1 (8-18)
RTLSKDDVNYK

SEQ ID NO: 22290 - protein, 28 aa, synthetic construct
  REGION 1..28: note = Heat shock cognate 71 kDa protein (272-299)
RTLSSSTQASIEIDSLYEGIDFYTSITR

SEQ ID NO: 22291 - protein, 9 aa, synthetic construct
  REGION 1..9: note = 60S ribosomal protein L18 (55-63)
RTNRPPLSL

SEQ ID NO: 22292 - protein, 9 aa, synthetic construct
  REGION 1..9: note = 60S ribosomal protein L18 (38-46)
RTNSTFNQV

SEQ ID NO: 22293 - protein, 9 aa, synthetic construct
  REGION 1..9: note = HLA class II histocompatibility antigen, DM beta chain (111-119)
RTRPPSVQV

SEQ ID NO: 22294 - protein, 9 aa, synthetic construct
  REGION 1..9: note = Solute carrier family 22 member 6 (423-431)
RTSLAVLGK

SEQ ID NO: 22295 - protein, 9 aa, synthetic construct
  REGION 1..9: note = Actin-related protein 3 (290-298)
RTVDARLKL

SEQ ID NO: 22296 - protein, 9 aa, synthetic construct
  REGION 1..9: note Dolichyl-diphosphooligosaccharide-proteinosyltransferase subunit 1 (38-46)
RTVDLSSHL

SEQ ID NO: 22297 - protein, 9 aa, synthetic construct
  REGION 1..9: note = Host cell factor 1 (1385-1393)
RTVESGLEV

SEQ ID NO: 22298 - protein, 13 aa, synthetic construct
  REGION 1..13: note = Myosin-9 (644-656)
RTVGQLYKEQLAK

SEQ ID NO: 22299 - protein, 8 aa, synthetic construct
  REGION 1..8: note = Probable C-mannosyltransferase DPY19L4 (518-525)
RTVHPILL

SEQ ID NO: 22300 - protein, 31 aa, synthetic construct
  REGION 1..31: note = Fructose-bisphosphate aldolase A (313-343)
RTVPPAVTGITFLSGGQSEEEASINLNAINK

SEQ ID NO: 22301 - protein, 13 aa, synthetic construct
  REGION 1..13: note = Programmed cell death protein 6 (100-112)
RTYDRDNSGMIDK

SEQ ID NO: 22302 - protein, 9 aa, synthetic construct
  REGION 1..9: note = Chondroitin sulfate synthase 2 (347-355)
RTYQEIQEL

SEQ ID NO: 22303 - protein, 9 aa, synthetic construct
  REGION 1..9: note = Vimentin (36-44)
RTYSLGSAL

SEQ ID NO: 22304 - protein, 9 aa, synthetic construct
  REGION 1..9: note = Mucolipin-1 (420-428)
RVALPSVMR

SEQ ID NO: 22305 - protein, 11 aa, synthetic construct
  REGION 1..11: note = Multiple epidermal growth factor-like domains protein 8 (2514-2524)
RVAPDTGVHTV

SEQ ID NO: 22306 - protein, 9 aa, synthetic construct
  REGION 1..9: note = Rab11 family-interacting protein 5 (210-218)
RVAPPRALL

SEQ ID NO: 22307 - protein, 13 aa, synthetic construct
  REGION 1..13: note = FUN14 domain-containing protein 1 (35-47)
RVFGHSSGPMVEK

SEQ ID NO: 22308 - protein, 12 aa, synthetic construct
  REGION 1..12: note = Putative ATP-dependent RNA helicase DHX33 (247-258)
RVFQGAPKGYRK

SEQ ID NO: 22309 - protein, 11 aa, synthetic construct
  REGION 1..11: note = Annexin A1 (235-245)
RVFQKYTKYSK

SEQ ID NO: 22310 - protein, 9 aa, synthetic construct
  REGION 1..9: note = Centrosomal protein C10orf90 (146-154)
RVGPPARAL

SEQ ID NO: 22311 - protein, 9 aa, synthetic construct
  REGION 1..9: note = E3 ubiquitin-protein ligase MIB2 (385-393)
RVIGDLDTV

SEQ ID NO: 22312 - protein, 13 aa, synthetic construct
  REGION 1..13: note = Protein FAM177A1 (56-68)
RVIHFVSGETMEE

SEQ ID NO: 22313 - protein, 13 aa, synthetic construct
  REGION 1..13: note = Glyceraldehyde-3-phosphate dehydrogenase (118-130)
RVIISAPSADAPM

SEQ ID NO: 22314 - protein, 10 aa, synthetic construct
  REGION 1..10: note = Nuclear valosin-containing protein-like (16-25)
RVIQYLTSNK

SEQ ID NO: 22315 - protein, 10 aa, synthetic construct
  REGION 1..10: note = Translation initiation factor eIF-2B subunit alpha (136-145)
RVLEAAVAAK

SEQ ID NO: 22316 - protein, 10 aa, synthetic construct
  REGION 1..10: note = Ribosomal RNA-processing protein 8 (380-389)
RVLKPGGLLK

SEQ ID NO: 22317 - protein, 9 aa, synthetic construct
  REGION 1..9: note = Nidogen-2 (738-746)
RVLRFAVTN

SEQ ID NO: 22318 - protein, 9 aa, synthetic construct
  REGION 1..9: note = HLA class I histocompatibility antigen, Cw-3 alpha chain (2-10)
RVMAPRTLI

SEQ ID NO: 22319 - protein, 9 aa, synthetic construct
  REGION 1..9: note = HLA class I histocompatibility antigen, Cw-2 alpha chain (2-10)
RVMAPRTLL

SEQ ID NO: 22320 - protein, 9 aa, synthetic construct
  REGION 1..9: note = Carbohydrate sulfotransferase 14 (126-134)
RVMKVLAGV

SEQ ID NO: 22321 - protein, 9 aa, synthetic construct
  REGION 1..9: note = Polycomb group RING finger protein 1 (90-98)
RVMQDIVYK

SEQ ID NO: 22322 - protein, 11 aa, synthetic construct
  REGION 1..11: note = Spectrin alpha chain, non-erythrocytic 1 (204-214)
RVNEVNQFAAK

SEQ ID NO: 22323 - protein, 19 aa, synthetic construct
  REGION 1..19: note = Beta-2-microglobulin (80-98)
RVNHVTLSQPKIVKWDRDM

SEQ ID NO: 22324 - protein, 9 aa, synthetic construct
  REGION 1..9: note = Ribonuclease inhibitor (53-61)
RVNPALAEL

SEQ ID NO: 22325 - protein, 9 aa, synthetic construct
  REGION 1..9: note = Major centromere autoantigen B (26-34)
RVQSHILHL

SEQ ID NO: 22326 - protein, 9 aa, synthetic construct
  REGION 1..9: note = Mannose-1-phosphate guanyltransferase alpha (390-398)
RVRIPAEVL

SEQ ID NO: 22327 - protein, 9 aa, synthetic construct
  REGION 1..9: note = Probable cation-transporting ATPase 13A2 (897-905)
RVRPPGALL

SEQ ID NO: 22328 - protein, 9 aa, synthetic construct
  REGION 1..9: note = Transmembrane protein 121 (244-252)
RVSAIFVGK

SEQ ID NO: 22329 - protein, 9 aa, synthetic construct
  REGION 1..9: note = Protein kinase C and casein kinase substrate in neurons protein 2 (92-100)
RVSELHLEV

SEQ ID NO: 22330 - protein, 9 aa, synthetic construct
  REGION 1..9: note = Ectonucleoside triphosphate diphosphohydrolase 6 (359-367)
RVSEVLQNR

SEQ ID NO: 22331 - protein, 9 aa, synthetic construct
  REGION 1..9: note = HLA class I histocompatibility antigen, B-15 alpha chain (2-10)
RVTAPRTVL

SEQ ID NO: 22332 - protein, 10 aa, synthetic construct
  REGION 1..10: note = F-box/LRR-repeat protein 7 (354-363)
RVTDVGIRYV

SEQ ID NO: 22333 - protein, 11 aa, synthetic construct
  REGION 1..11: note = Titin (16492-16502)
RVTGLIENHDY

SEQ ID NO: 22334 - protein, 9 aa, synthetic construct
  REGION 1..9: note = Phospholipid transfer protein (25-33)
RVTSKALEL

SEQ ID NO: 22335 - protein, 9 aa, synthetic construct
  REGION 1..9: note = UPF0769 protein C21orf59 (33-41)
RVYNGRLKV

SEQ ID NO: 22336 - protein, 18 aa, synthetic construct
  REGION 1..18: note = HLA class I histocompatibility antigen, A-2 alpha chain (272-289)
RWEPSSQPTIPIVGIIAG

SEQ ID NO: 22337 - protein, 17 aa, synthetic construct
  REGION 1..17: note = HLA class I histocompatibility antigen, Cw-17 alpha chain (297-313)
RWGGKGGSCSQAASSNS

SEQ ID NO: 22338 - protein, 9 aa, synthetic construct
  REGION 1..9: note = Calpain-3 (104-112)
RYADKHMNI

SEQ ID NO: 22339 - protein, 9 aa, synthetic construct
  REGION 1..9: note = Tetratricopeptide repeat protein 30A (26-34)
RYAEAVQLL

SEQ ID NO: 22340 - protein, 8 aa, synthetic construct
  REGION 1..8: note = Sodium/potassium-transporting ATPase subunit alpha-1 (276-283)
RYAKIVEI

SEQ ID NO: 22341 - protein, 10 aa, synthetic construct
  REGION 1..10: note = Sodium/potassium-transporting ATPase subunit alpha-1 (276-285)
RYAKIVEIPF

SEQ ID NO: 22342 - protein, 9 aa, synthetic construct
  REGION 1..9: note = Zinc finger and BTB domain-containing protein 11 (581-589)
RYALIMHKL

SEQ ID NO: 22343 - protein, 10 aa, synthetic construct
  REGION 1..10: note = Bestrophin-1 (70-79)
RYANLGNVLI

SEQ ID NO: 22344 - protein, 9 aa, synthetic construct
  REGION 1..9: note = Probable helicase with zinc finger domain (214-222)
RYASRLIKL

SEQ ID NO: 22345 - protein, 9 aa, synthetic construct
  REGION 1..9: note = (Pyruvate dehydrogenase (acetyl-transferring))-phosphatase 1, mitochondrial (106-114)
RYASTPQKF

SEQ ID NO: 22346 - protein, 9 aa, synthetic construct
  REGION 1..9: note = Kelch-like protein 20 (384-392)
RYDPKTNQW

SEQ ID NO: 22347 - protein, 9 aa, synthetic construct
  REGION 1..9: note = Kelch-like protein 20 (337-345)
RYDPQTNEW

SEQ ID NO: 22348 - protein, 9 aa, synthetic construct
  REGION 1..9: note = Protein FAM91A1 (437-445)
RYFDHALTL

SEQ ID NO: 22349 - protein, 9 aa, synthetic construct
  REGION 1..9: note = Heterogeneous nuclear ribonucleoprotein H2 (275-283)
RYGDGGSSF

SEQ ID NO: 22350 - protein, 9 aa, synthetic construct
  REGION 1..9: note = Transmembraneoprotein NMB (373-381)
RYGHFQATI

SEQ ID NO: 22351 - protein, 8 aa, synthetic construct
  REGION 1..8: note = Protocadherin gamma-A11 (881-888)
RYGPQFTL

SEQ ID NO: 22352 - protein, 9 aa, synthetic construct
  REGION 1..9: note = Melanocyte protein PMEL (486-494)
RYGSFSVTL

SEQ ID NO: 22353 - protein, 9 aa, synthetic construct
  REGION 1..9: note = FTS and Hook-interacting protein (249-257)
RYIADHSYF

SEQ ID NO: 22354 - protein, 9 aa, synthetic construct
  REGION 1..9: note = Hemicentin-1 (697-705)
RYIEAPKLM

SEQ ID NO: 22355 - protein, 11 aa, synthetic construct
  REGION 1..11: note = Leucine-rich repeat LGI family member 3 (441-451)
RYIGDSKILRW

SEQ ID NO: 22356 - protein, 9 aa, synthetic construct
  REGION 1..9: note = DNA repair protein RAD50 (184-192)
RYIKALETL

SEQ ID NO: 22357 - protein, 10 aa, synthetic construct
  REGION 1..10: note = 1,2-dihydroxy-3-keto-5-methylthiopentene dioxygenase (96-105)
RYILDGSGYF

SEQ ID NO: 22358 - protein, 9 aa, synthetic construct
  REGION 1..9: note = Serine/threonine-protein phosphatase 4 regulatory subunit 3B (575-583)
RYITKGNLF

SEQ ID NO: 22359 - protein, 9 aa, synthetic construct
  REGION 1..9: note = HLA class II histocompatibility antigen, DP beta 1 chain (22-30)
RYIYNREEF

SEQ ID NO: 22360 - protein, 9 aa, synthetic construct
  REGION 1..9: note = Unconventional myosin-XVIIIa (834-842)
RYKEENIEL

SEQ ID NO: 22361 - protein, 9 aa, synthetic construct
  REGION 1..9: note = Tubulin polyglutamylase TTLL4 (750-758)
RYLHKPYLI

SEQ ID NO: 22362 - protein, 9 aa, synthetic construct
  REGION 1..9: note = Zinc finger protein 45 (95-103)
RYLPHEELF

SEQ ID NO: 22363 - protein, 9 aa, synthetic construct
  REGION 1..9: note = Leucine-rich repeat flightless-interacting protein 2 (360-368)
RYMQGLKEL

SEQ ID NO: 22364 - protein, 8 aa, synthetic construct
  REGION 1..8: note = 60S ribosomal protein L28 (39-46)
RYNGLIHR

SEQ ID NO: 22365 - protein, 9 aa, synthetic construct
  REGION 1..9: note = Leucine-rich repeat transmembrane neuronal protein 3 (444-452)
RYPASMKQL

SEQ ID NO: 22366 - protein, 9 aa, synthetic construct
  REGION 1..9: note = Serine/threonine-protein phosphatase 2A catalytic subunit beta isoform (106-114)
RYPERITIL

SEQ ID NO: 22367 - protein, 9 aa, synthetic construct
  REGION 1..9: note = SPRY domain-containing protein 3 (41-49)
RYQERFKHI

SEQ ID NO: 22368 - protein, 9 aa, synthetic construct
  REGION 1..9: note = Cation-independent mannose-6-phosphate receptor (1386-1394)
RYSDNWEAI

SEQ ID NO: 22369 - protein, 9 aa, synthetic construct
  REGION 1..9: note = Phosphatidylcholine translocator ABCB4 (47-55)
RYSDWQDKL

SEQ ID NO: 22370 - protein, 10 aa, synthetic construct
  REGION 1..10: note = Phosphatidylinositol 3-kinase catalytic subunit type 3 (811-820)
RYSNLILNLF

SEQ ID NO: 22371 - protein, 10 aa, synthetic construct
  REGION 1..10: note = E3 ubiquitin-protein ligase UBR2 (462-471)
RYTALQAFKF

SEQ ID NO: 22372 - protein, 9 aa, synthetic construct
  REGION 1..9: note = DnaJ homolog subfamily C member 3 (283-291)
RYTDATSKY

SEQ ID NO: 22373 - protein, 12 aa, synthetic construct
  REGION 1..12: note = E3 ubiquitin-protein ligase HUWE1 (156-167)
RYTDMESEDYHF

SEQ ID NO: 22374 - protein, 9 aa, synthetic construct
  REGION 1..9: note = Ubiquitin carboxyl-terminal hydrolase 13 (490-498)
RYTERVDYL

SEQ ID NO: 22375 - protein, 9 aa, synthetic construct
  REGION 1..9: note = Cullin-1 (190-198)
RYTLQASTF

SEQ ID NO: 22376 - protein, 9 aa, synthetic construct
  REGION 1..9: note = Serine/threonine-protein kinase SMG1 (1394-1402)
RYTMYQNQL

SEQ ID NO: 22377 - protein, 8 aa, synthetic construct
  REGION 1..8: note = Rho guanine nucleotide exchange factor 2 (8-15)
RYTNGHLF

SEQ ID NO: 22378 - protein, 11 aa, synthetic construct
  REGION 1..11: note = Rho guanine nucleotide exchange factor 2 (8-18)
RYTNGHLFTTI

SEQ ID NO: 22379 - protein, 9 aa, synthetic construct
  REGION 1..9: note = Cyclin-dependent kinase 9 (184-192)
RYTNRVVTL

SEQ ID NO: 22380 - protein, 9 aa, synthetic construct
  REGION 1..9: note = Chloride channel protein 2 (25-33)
RYTQDLGAF

SEQ ID NO: 22381 - protein, 9 aa, synthetic construct
  REGION 1..9: note = CDK5 regulatory subunit-associated protein 3 (428-436)
RYVDRVTEF

SEQ ID NO: 22382 - protein, 9 aa, synthetic construct
  REGION 1..9: note = Protein orai-3 (145-153)
RYVELAWGF

SEQ ID NO: 22383 - protein, 9 aa, synthetic construct
  REGION 1..9: note = Eukaryotic translation initiation factor 2 subunit 1 (234-242)
RYVMTTTTL

SEQ ID NO: 22384 - protein, 13 aa, synthetic construct
  REGION 1..13: note = HLA class I histocompatibility antigen, B-51 alpha chain (82-94)
RYYNQSEAGSHTW

SEQ ID NO: 22385 - protein, 9 aa, synthetic construct
  REGION 1..9: note = Homeodomain-interacting protein kinase 2 (365-373)
RYYRAPEII

SEQ ID NO: 22386 - protein, 9 aa, synthetic construct
  REGION 1..9: note = Glycogen synthase kinase-3 beta (220-228)
RYYRAPELI

SEQ ID NO: 22387 - protein, 14 aa, synthetic construct
  REGION 1..14: note = Motor neuron and pancreas homeobox protein 1 (169-182)
SAAAAAAALAGQHP

SEQ ID NO: 22388 - protein, 11 aa, synthetic construct
  REGION 1..11: note = AT-rich interactive domain-containing protein 1B (270-280)
SAAAAGAPGSM

SEQ ID NO: 22389 - protein, 9 aa, synthetic construct
  REGION 1..9: note = Beta-2-syntrophin (491-499)
SADDGIRNL

SEQ ID NO: 22390 - protein, 10 aa, synthetic construct
  REGION 1..10: note = Eukaryotic translation initiation factor 3 subunit K (79-88)
SADESGQIFI

SEQ ID NO: 22391 - protein, 27 aa, synthetic construct
  REGION 1..27: note = Filamin-B (567-593)
SADFVVESIGSEVGSLGFAIEGPSQAK

SEQ ID NO: 22392 - protein, 8 aa, synthetic construct
  REGION 1..8: note = COMM domain-containing protein 4 (177-184)
SADKFQVL

SEQ ID NO: 22393 - protein, 9 aa, synthetic construct
  REGION 1..9: note = COMM domain-containing protein 4 (177-185)
SADKFQVLL

SEQ ID NO: 22394 - protein, 8 aa, synthetic construct
  REGION 1..8: note = Transcription factor MafF (16-23)
SAEEVTRL

SEQ ID NO: 22395 - protein, 9 aa, synthetic construct
  REGION 1..9: note = E3 SUMO-protein ligase RanBP2 (993-1001)
SAESKTIEF

SEQ ID NO: 22396 - protein, 9 aa, synthetic construct
  REGION 1..9: note = Mucin-19 (2343-2351)
SAEVSGRIE

SEQ ID NO: 22397 - protein, 17 aa, synthetic construct
  REGION 1..17: note = Cytochrome c oxidase subunit 7C, mitochondrial (47-63)
SAFATPFLVVRHQLLKT

SEQ ID NO: 22398 - protein, 9 aa, synthetic construct
  REGION 1..9: note = Ankyrin repeat and KH domain-containing protein 1 (2266-2274)
SAFLGNSVL

SEQ ID NO: 22399 - protein, 9 aa, synthetic construct
  REGION 1..9: note = AP-5 complex subunit mu-1 (88-96)
SAFSGPYKF

SEQ ID NO: 22400 - protein, 31 aa, synthetic construct
  REGION 1..31: note = PR domain zinc finger protein 8 (458-488)
SAFTSVPQLGSAGSTSGGGGTGAGAAGGAGG

SEQ ID NO: 22401 - protein, 7 aa, synthetic construct
  REGION 1..7: note = Transmembrane emp24 domain-containing protein 10 (79-85)
SAGHILY

SEQ ID NO: 22402 - protein, 16 aa, synthetic construct
  REGION 1..16: note = Laminin subunit gamma-1 (664-679)
SAGYLDDVTLASARPG

SEQ ID NO: 22403 - protein, 17 aa, synthetic construct
  REGION 1..17: note = Laminin subunit gamma-1 (664-680)
SAGYLDDVTLASARPGP

SEQ ID NO: 22404 - protein, 18 aa, synthetic construct
  REGION 1..18: note = Laminin subunit gamma-1 (664-681)
SAGYLDDVTLASARPGPG

SEQ ID NO: 22405 - protein, 8 aa, synthetic construct
  REGION 1..8: note = Nuclear factor of activated T-cells, cytoplasmic 2 (354-361)
SAHELPMV

SEQ ID NO: 22406 - protein, 9 aa, synthetic construct
  REGION 1..9: note = Armadillo repeat-containing protein 1 (96-104)
SAIASTKVM

SEQ ID NO: 22407 - protein, 9 aa, synthetic construct
  REGION 1..9: note = Tripeptidyl-peptidase 1 (315-323)
SALPHVHTV

SEQ ID NO: 22408 - protein, 14 aa, synthetic construct
  REGION 1..14: note = 3-hydroxy-3-methylglutaryl-coenzyme A reductase (687-700)
SAMAGSIGGYNAHA

SEQ ID NO: 22409 - protein, 9 aa, synthetic construct
  REGION 1..9: note = Phosphoglucomutase-1 (263-271)
SANDKVYTV

SEQ ID NO: 22410 - protein, 10 aa, synthetic construct
  REGION 1..10: note = WD repeat and FYVE domain-containing protein 3 (1236-1245)
SANPPVVSTV

SEQ ID NO: 22411 - protein, 8 aa, synthetic construct
  REGION 1..8: note = Serine/threonine-protein phosphatase 2A regulatory subunit B'' subunit gamma (114-121)
SAPSALRV

SEQ ID NO: 22412 - protein, 9 aa, synthetic construct
  REGION 1..9: note = Microtubule-associated protein 9 (372-380)
SARLMTSEF

SEQ ID NO: 22413 - protein, 9 aa, synthetic construct
  REGION 1..9: note = Importin-5 (974-982)
SAVGKIMKF

SEQ ID NO: 22414 - protein, 10 aa, synthetic construct
  REGION 1..10: note = Transcription factor SOX-10 (331-340)
SAWISKPPGV

SEQ ID NO: 22415 - protein, 9 aa, synthetic construct
  REGION 1..9: note = Nuclear export mediator factor NEMF (468-476)
SAYANAKKY

SEQ ID NO: 22416 - protein, 8 aa, synthetic construct
  REGION 1..8: note = Zinc finger MYM-type protein 4 (449-456)
SAYRVKMV

SEQ ID NO: 22417 - protein, 9 aa, synthetic construct
  REGION 1..9: note = Small subunit processome component 20 homolog (1418-1426)
SDFESGLKY

SEQ ID NO: 22418 - protein, 7 aa, synthetic construct
  REGION 1..7: note = Fas apoptotic inhibitory molecule 1 (47-53)
SDGVHKI

SEQ ID NO: 22419 - protein, 7 aa, synthetic construct
  REGION 1..7: note = Fructose-bisphosphate aldolase A (272-278)
SDHHIYL

SEQ ID NO: 22420 - protein, 17 aa, synthetic construct
  REGION 1..17: note = Galectin-3-binding protein (311-327)
SDLAVPSELALLKAVDT

SEQ ID NO: 22421 - protein, 29 aa, synthetic construct
  REGION 1..29: note = HLA class I histocompatibility antigen, A-23 alpha chain (337-365)
SDRKGGSYSQAASSDSAQGSDVSLTACKV

SEQ ID NO: 22422 - protein, 16 aa, synthetic construct
  REGION 1..16: note = HLA class I histocompatibility antigen, A-23 alpha chain (350-365)
SDSAQGSDVSLTACKV

SEQ ID NO: 22423 - protein, 9 aa, synthetic construct
  REGION 1..9: note = Immunoglobulin superfamily member 3 (355-363)
SDSVFVLKI

SEQ ID NO: 22424 - protein, 10 aa, synthetic construct
  REGION 1..10: note = HLA class I histocompatibility antigen, A-23 alpha chain (356-365)
SDVSLTACKV

SEQ ID NO: 22425 - protein, 10 aa, synthetic construct
  REGION 1..10: note = Kelch repeat and BTB domain-containing protein 6 (137-146)
SEANVERLYA

SEQ ID NO: 22426 - protein, 9 aa, synthetic construct
  REGION 1..9: note = YTH domain-containing family protein 1 (301-309)
SEDDIHRSI

SEQ ID NO: 22427 - protein, 9 aa, synthetic construct
  REGION 1..9: note = RNA-binding protein 28 (126-134)
SEDDLKTVF

SEQ ID NO: 22428 - protein, 9 aa, synthetic construct
  REGION 1..9: note = Sister chromatid cohesion protein PDS5 homolog A (59-67)
SEDEKQQYL

SEQ ID NO: 22429 - protein, 9 aa, synthetic construct
  REGION 1..9: note = Hermansky-Pudlak syndrome 5 protein (476-484)
SEDERFKEF

SEQ ID NO: 22430 - protein, 9 aa, synthetic construct
  REGION 1..9: note = Ras-specific guanine nucleotide-releasing factor RalGPS2 (420-428)
SEDLAVHLY

SEQ ID NO: 22431 - protein, 10 aa, synthetic construct
  REGION 1..10: note = Peptidyl-prolyl cis-trans isomerase FKBP9 (197-206)
SEDQVQIHTY

SEQ ID NO: 22432 - protein, 9 aa, synthetic construct
  REGION 1..9: note = WD repeat-containing protein 6 (258-266)
SEDRSVRIW

SEQ ID NO: 22433 - protein, 9 aa, synthetic construct
  REGION 1..9: note = Thioredoxin-like protein 4A (20-28)
SEEDRVVVI

SEQ ID NO: 22434 - protein, 9 aa, synthetic construct
  REGION 1..9: note = Vacuolar protein sorting-associated protein 41 homolog (24-32)
SEEEPKLKY

SEQ ID NO: 22435 - protein, 10 aa, synthetic construct
  REGION 1..10: note = Protocadherin Fat 1 (2947-2956)
SEEINRQVTY

SEQ ID NO: 22436 - protein, 9 aa, synthetic construct
  REGION 1..9: note = Thioredoxin-related transmembrane protein 2 (247-255)
SEENVIREF

SEQ ID NO: 22437 - protein, 7 aa, synthetic construct
  REGION 1..7: note = 26S proteasome non-ATPase regulatory subunit 13 (65-71)
SEFEHRV

SEQ ID NO: 22438 - protein, 9 aa, synthetic construct
  REGION 1..9: note = Protein PRR14L (1206-1214)
SEFGKESTF

SEQ ID NO: 22439 - protein, 10 aa, synthetic construct
  REGION 1..10: note = Aldehyde dehydrogenase family 1 member A3 (328-337)
SEFVRRSVEY

SEQ ID NO: 22440 - protein, 9 aa, synthetic construct
  REGION 1..9: note = Alpha-parvin (149-157)
SEIAQKQKL

SEQ ID NO: 22441 - protein, 10 aa, synthetic construct
  REGION 1..10: note = Microtubule cross-linking factor 1 (653-662)
SEIEDHNRQL

SEQ ID NO: 22442 - protein, 9 aa, synthetic construct
  REGION 1..9: note = Protein AHNAK2 (1652-1660)
SEIEGNVTF

SEQ ID NO: 22443 - protein, 10 aa, synthetic construct
  REGION 1..10: note = Manganese-transporting ATPase 13A1 (95-104)
SEIRAAEKKF

SEQ ID NO: 22444 - protein, 9 aa, synthetic construct
  REGION 1..9: note = Vesicle transport protein USE1 (81-89)
SEKALANQF

SEQ ID NO: 22445 - protein, 10 aa, synthetic construct
  REGION 1..10: note = Centromere protein F (130-139)
SELDKLLSSF

SEQ ID NO: 22446 - protein, 12 aa, synthetic construct
  REGION 1..12: note = Proline-rich protein 12 (622-633)
SELLAGPGGPPA

SEQ ID NO: 22447 - protein, 10 aa, synthetic construct
  REGION 1..10: note = LisH domain-containing protein ARMC9 (9-18)
SELLGLVKEY

SEQ ID NO: 22448 - protein, 9 aa, synthetic construct
  REGION 1..9: note = T-box transcription factor TBX3 (698-706)
SELQSIQRL

SEQ ID NO: 22449 - protein, 9 aa, synthetic construct
  REGION 1..9: note = Sal-like protein 1 (1206-1214)
SENGTNFRF

SEQ ID NO: 22450 - protein, 35 aa, synthetic construct
  REGION 1..35: note = Glia-derived nexin (342-376)
SENLHVSHILQKAKIEVSEDGTKASAATTAILIAR

SEQ ID NO: 22451 - protein, 9 aa, synthetic construct
  REGION 1..9: note = H/ACA ribonucleoprotein complex subunit 1 (130-138)
SENMKASSF

SEQ ID NO: 22452 - protein, 9 aa, synthetic construct
  REGION 1..9: note = Plectin (3824-3832)
SEPSEVRSY

SEQ ID NO: 22453 - protein, 9 aa, synthetic construct
  REGION 1..9: note = Integrin alpha-3 (534-542)
SESAVFHGF

SEQ ID NO: 22454 - protein, 10 aa, synthetic construct
  REGION 1..10: note = Arfaptin-1 (44-53)
SETQITSHGF

SEQ ID NO: 22455 - protein, 9 aa, synthetic construct
  REGION 1..9: note = Laminin subunit gamma-1 (617-625)
SETTVKYVF

SEQ ID NO: 22456 - protein, 9 aa, synthetic construct
  REGION 1..9: note = Plexin-B2 (30-38)
SETVVERML

SEQ ID NO: 22457 - protein, 10 aa, synthetic construct
  REGION 1..10: note = U5 small nuclear ribonucleoprotein 200 kDa helicase (1230-1239)
SEVILHHEYF

SEQ ID NO: 22458 - protein, 8 aa, synthetic construct
  REGION 1..8: note = Eukaryotic translation initiation factor 3 subunit D (444-451)
SEYLKLGY

SEQ ID NO: 22459 - protein, 9 aa, synthetic construct
  REGION 1..9: note = Homeobox protein Hox-D9 (57-65)
SFAPRSAVF

SEQ ID NO: 22460 - protein, 9 aa, synthetic construct
  REGION 1..9: note = Renin receptor (256-264)
SFDTSLIRK

SEQ ID NO: 22461 - protein, 8 aa, synthetic construct
  REGION 1..8: note = Liprin-beta-1 (507-514)
SFGRGFFK

SEQ ID NO: 22462 - protein, 9 aa, synthetic construct
  REGION 1..9: note = Zinc finger protein 697 (92-100)
SFIQSSHLI

SEQ ID NO: 22463 - protein, 10 aa, synthetic construct
  REGION 1..10: note = High affinity cationic amino acid transporter 1 (57-66)
SFLIAALASV

SEQ ID NO: 22464 - protein, 8 aa, synthetic construct
  REGION 1..8: note = Immediate early response gene 5 protein (276-283)
SFSGLLRK

SEQ ID NO: 22465 - protein, 9 aa, synthetic construct
  REGION 1..9: note = Zinc finger protein 175 (287-295)
SFTQKSHLF

SEQ ID NO: 22466 - protein, 23 aa, synthetic construct
  REGION 1..23: note = Eukaryotic peptide chain release factor GTP-binding subunit ERF3A (163-185)
SFVPNMIGGASQADLAVLVISAR

SEQ ID NO: 22467 - protein, 14 aa, synthetic construct
  REGION 1..14: note = Protein HEG homolog 1 (148-161)
SGDFQMSPYAEYPK

SEQ ID NO: 22468 - protein, 17 aa, synthetic construct
  REGION 1..17: note = Protein HEG homolog 1 (148-164)
SGDFQMSPYAEYPKNPR

SEQ ID NO: 22469 - protein, 9 aa, synthetic construct
  REGION 1..9: note = Trabeculin-alpha (4239-4247)
SGDPKVIEV

SEQ ID NO: 22470 - protein, 9 aa, synthetic construct
  REGION 1..9: note = Nicastrin (47-55)
SGDTGVIHV

SEQ ID NO: 22471 - protein, 9 aa, synthetic construct
  REGION 1..9: note = Bifunctional apoptosis regulator (310-318)
SGEDIVTKL

SEQ ID NO: 22472 - protein, 22 aa, synthetic construct
  REGION 1..22: note = Beta-enolase (330-351)
SGETEDTFIADLVVGLCTGQIK

SEQ ID NO: 22473 - protein, 18 aa, synthetic construct
  REGION 1..18: note = Putative ATP-dependent RNA helicase DHX57 (36-53)
SGGGGGGGGGGGGGNRKA

SEQ ID NO: 22474 - protein, 13 aa, synthetic construct
  REGION 1..13: note = Signal recognition particle subunit SRP68 (27-39)
SGGGRGAGGEENK

SEQ ID NO: 22475 - protein, 9 aa, synthetic construct
  REGION 1..9: note = Elongation factor 2 (418-426)
SGLVSTGLK

SEQ ID NO: 22476 - protein, 9 aa, synthetic construct
  REGION 1..9: note = ATP-dependent RNA helicase DDX39A (90-98)
SGMGKTAVF

SEQ ID NO: 22477 - protein, 15 aa, synthetic construct
  REGION 1..15: note = Collagen alpha-1(III) chain (60-74)
SGPKGDAGQPGEKGS

SEQ ID NO: 22478 - protein, 16 aa, synthetic construct
  REGION 1..16: note = Phosphatidylethanolamine-binding protein 1 (9-24)
SGPLSLQEVDEQPQHP

SEQ ID NO: 22479 - protein, 14 aa, synthetic construct
  REGION 1..14: note = Laminin subunit alpha-4 (576-589)
SHDLVQEAIDHAQD

SEQ ID NO: 22480 - protein, 10 aa, synthetic construct
  REGION 1..10: note = Protein phosphatase 1J (227-236)
SHESLVVGAV

SEQ ID NO: 22481 - protein, 10 aa, synthetic construct
  REGION 1..10: note = Protein unc-93 homolog B1 (264-273)
SHGILSGFNK

SEQ ID NO: 22482 - protein, 9 aa, synthetic construct
  REGION 1..9: note = Plasma protease C1 inhibitor (350-358)
SHNLSLVIL

SEQ ID NO: 22483 - protein, 7 aa, synthetic construct
  REGION 1..7: note = Protein phosphatase 1 regulatory subunit 3F (177-183)
SHPLGIL

SEQ ID NO: 22484 - protein, 18 aa, synthetic construct
  REGION 1..18: note = Cytochrome c oxidase subunit 7C, mitochondrial (17-34)
SHYEEGPGKNLPFSVENK

SEQ ID NO: 22485 - protein, 23 aa, synthetic construct
  REGION 1..23: note = Cytochrome c oxidase subunit 7C, mitochondrial (17-39)
SHYEEGPGKNLPFSVENKWSLLA

SEQ ID NO: 22486 - protein, 47 aa, synthetic construct
  REGION 1..47: note = Cytochrome c oxidase subunit 7C, mitochondrial (17-63)
SHYEEGPGKNLPFSVENKWSLLAKMCLYFGSAFATPFLVVRHQLLKT

SEQ ID NO: 22487 - protein, 9 aa, synthetic construct
  REGION 1..9: note = Clustered mitochondria protein homolog (225-233)
SIDFGKTVV

SEQ ID NO: 22488 - protein, 9 aa, synthetic construct
  REGION 1..9: note = Charged multivesicular body protein 5 (30-38)
SIDKKISRL

SEQ ID NO: 22489 - protein, 9 aa, synthetic construct
  REGION 1..9: note = Nodal modulator 3 (272-280)
SIDSEPALV

SEQ ID NO: 22490 - protein, 9 aa, synthetic construct
  REGION 1..9: note = Eukaryotic translation initiation factor 4 gamma 1 (1038-1046)
SIDSNNQLF

SEQ ID NO: 22491 - protein, 10 aa, synthetic construct
  REGION 1..10: note = Vacuolar protein sorting-associated protein 13B (1953-1962)
SIFDAVLKGV

SEQ ID NO: 22492 - protein, 9 aa, synthetic construct
  REGION 1..9: note = Transmembrane channel-like protein 4 (391-399)
SIFIAGVNF

SEQ ID NO: 22493 - protein, 9 aa, synthetic construct
  REGION 1..9: note = Nischarin (214-222)
SIFKSLHQV

SEQ ID NO: 22494 - protein, 9 aa, synthetic construct
  REGION 1..9: note = Adenylate kinase 9 (1441-1449)
SIGGALRYV

SEQ ID NO: 22495 - protein, 9 aa, synthetic construct
  REGION 1..9: note = Protein ELYS (1701-1709)
SIHETIPLV

SEQ ID NO: 22496 - protein, 9 aa, synthetic construct
  REGION 1..9: note = Hom s 5 (332-340)
SIIAEVKAQ

SEQ ID NO: 22497 - protein, 10 aa, synthetic construct
  REGION 1..10: note = Zinc finger E-box-binding homeobox 2 (500-509)
SIIDYTLEKV

SEQ ID NO: 22498 - protein, 10 aa, synthetic construct
  REGION 1..10: note = Poly(rC)-binding protein 2 (27-36)
SIIGKKGESV

SEQ ID NO: 22499 - protein, 55 aa, synthetic construct
  REGION 1..55: note = 6.8 kDa mitochondrial proteolipid (4-58)
SIIKNIWIPMKPYYTKVYQEIWIGMGLMGFIVYKIRAADKRSKALKASAPAPGHH

SEQ ID NO: 22500 - protein, 9 aa, synthetic construct
  REGION 1..9: note = Neuron navigator 2 (1370-1378)
SIIPYLLEA

SEQ ID NO: 22501 - protein, 9 aa, synthetic construct
  REGION 1..9: note = Protein transport protein Sec23B (625-633)
SILADRILL

SEQ ID NO: 22502 - protein, 9 aa, synthetic construct
  REGION 1..9: note = Raftlin-2 (58-66)
SILDIVTKV

SEQ ID NO: 22503 - protein, 9 aa, synthetic construct
  REGION 1..9: note = Tripartite motif-containing protein 2 (120-128)
SILETVTAV

SEQ ID NO: 22504 - protein, 9 aa, synthetic construct
  REGION 1..9: note = N6-adenosine-methyltransferase 70 kDa subunit (384-392)
SILGKFAVV

SEQ ID NO: 22505 - protein, 23 aa, synthetic construct
  REGION 1..23: note = Heat shock cognate 71 kDa protein (362-384)
SINPDEAVAYGAAVQAAILSGDK

SEQ ID NO: 22506 - protein, 9 aa, synthetic construct
  REGION 1..9: note = Eukaryotic translation initiation factor 4 gamma 1 (244-252)
SIPGDTMTT

SEQ ID NO: 22507 - protein, 9 aa, synthetic construct
  REGION 1..9: note = Cyclic AMP-dependent transcription factor ATF-6 alpha (178-186)
SIQPKPLLL

SEQ ID NO: 22508 - protein, 9 aa, synthetic construct
  REGION 1..9: note = E3 ubiquitin-protein ligase UBR5 (550-558)
SISAGIPKV

SEQ ID NO: 22509 - protein, 9 aa, synthetic construct
  REGION 1..9: note = Tuberin (341-349)
SITRLIKKY

SEQ ID NO: 22510 - protein, 9 aa, synthetic construct
  REGION 1..9: note = ATP-dependent DNA helicase Q1 (13-21)
SITSELHAV

SEQ ID NO: 22511 - protein, 10 aa, synthetic construct
  REGION 1..10: note = Alpha-2-macroglobulin (161-170)
SIYKPGQTVK

SEQ ID NO: 22512 - protein, 21 aa, synthetic construct
  REGION 1..21: note = Heat shock protein HSP 90-beta (408-428)
SIYYITGESKEQVANSAFVER

SEQ ID NO: 22513 - protein, 9 aa, synthetic construct
  REGION 1..9: note = Pre-mRNA-processing-splicing factor 8 (1179-1187)
SKDNPNLLF

SEQ ID NO: 22514 - protein, 8 aa, synthetic construct
  REGION 1..8: note = Histone-lysine N-methyltransferase SETDB1 (427-434)
SKGPVVQY

SEQ ID NO: 22515 - protein, 7 aa, synthetic construct
  REGION 1..7: note = Histone deacetylase 1 (88-94)
SKQMQRF

SEQ ID NO: 22516 - protein, 9 aa, synthetic construct
  REGION 1..9: note = AT-rich interactive domain-containing protein 1A (1821-1829)
SLAARAIAV

SEQ ID NO: 22517 - protein, 13 aa, synthetic construct
  REGION 1..13: note = Tenascin (1578-1590)
SLADLSPSTHYTA

SEQ ID NO: 22518 - protein, 11 aa, synthetic construct
  REGION 1..11: note = Integrin alpha-7 (461-471)
SLADTAVLFRA

SEQ ID NO: 22519 - protein, 11 aa, synthetic construct
  REGION 1..11: note = Melanocyte protein PMEL (577-587)
SLADTNSLAVV

SEQ ID NO: 22520 - protein, 9 aa, synthetic construct
  REGION 1..9: note = Sestrin-2 (190-198)
SLAELIQAL

SEQ ID NO: 22521 - protein, 9 aa, synthetic construct
  REGION 1..9: note = Fatty acid synthase (2500-2508)
SLAEPRVSV

SEQ ID NO: 22522 - protein, 11 aa, synthetic construct
  REGION 1..11: note = Ankyrin-2 (84-94)
SLAGQAEVVKV

SEQ ID NO: 22523 - protein, 9 aa, synthetic construct
  REGION 1..9: note = Putative WAS protein family homolog 3 (9-17)
SLAGQTYAV

SEQ ID NO: 22524 - protein, 9 aa, synthetic construct
  REGION 1..9: note = Transmembrane protein 25 isoform 5 (201-209)
SLAHNLSVV

SEQ ID NO: 22525 - protein, 10 aa, synthetic construct
  REGION 1..10: note = T-complex protein 1 subunit beta (5-14)
SLAPVNIFKA

SEQ ID NO: 22526 - protein, 10 aa, synthetic construct
  REGION 1..10: note = Hermansky-Pudlak syndrome 4 protein (570-579)
SLASLNGLEV

SEQ ID NO: 22527 - protein, 9 aa, synthetic construct
  REGION 1..9: note = Inversin (13-21)
SLASQVHAA

SEQ ID NO: 22528 - protein, 10 aa, synthetic construct
  REGION 1..10: note = Serine/threonine-protein kinase SMG1 (1090-1099)
SLASVIISAL

SEQ ID NO: 22529 - protein, 9 aa, synthetic construct
  REGION 1..9: note = Unconventional myosin-Ic (701-709)
SLATKIQAA

SEQ ID NO: 22530 - protein, 9 aa, synthetic construct
  REGION 1..9: note = Growth factor receptor-bound protein 10 (498-506)
SLDDGNTKF

SEQ ID NO: 22531 - protein, 11 aa, synthetic construct
  REGION 1..11: note = L-dopachrome tautomerase (288-298)
SLDDYNHLVTL

SEQ ID NO: 22532 - protein, 10 aa, synthetic construct
  REGION 1..10: note = Proline-rich protein 12 (709-718)
SLDEGATAAL

SEQ ID NO: 22533 - protein, 9 aa, synthetic construct
  REGION 1..9: note = Heat shock protein 105 kDa (204-212)
SLDEKPRIV

SEQ ID NO: 22534 - protein, 9 aa, synthetic construct
  REGION 1..9: note = Adenomatous polyposis coli protein (1410-1418)
SLDEPFIQK

SEQ ID NO: 22535 - protein, 10 aa, synthetic construct
  REGION 1..10: note = Sister chromatid cohesion protein PDS5 homolog A (493-502)
SLDPNAVKAL

SEQ ID NO: 22536 - protein, 9 aa, synthetic construct
  REGION 1..9: note = Regulator of G-protein signaling 20 (174-182)
SLDSRVREV

SEQ ID NO: 22537 - protein, 9 aa, synthetic construct
  REGION 1..9: note = Protein AHNAK2 (497-505)
SLDVSAPKV

SEQ ID NO: 22538 - protein, 11 aa, synthetic construct
  REGION 1..11: note = Importin subunit alpha-4 (6-16)
SLENHRIKSFK

SEQ ID NO: 22539 - protein, 9 aa, synthetic construct
  REGION 1..9: note = mRNA cap guanine-N7 methyltransferase (14-22)
SLEQAKASV

SEQ ID NO: 22540 - protein, 10 aa, synthetic construct
  REGION 1..10: note = Cytokine receptor common subunit beta (667-676)
SLESGGGPAP

SEQ ID NO: 22541 - protein, 9 aa, synthetic construct
  REGION 1..9: note = G-protein coupled receptor 56 (216-224)
SLESKLTSV

SEQ ID NO: 22542 - protein, 12 aa, synthetic construct
  REGION 1..12: note = Tetratricopeptide repeat protein 28 (808-819)
SLFDLQTSSYQA

SEQ ID NO: 22543 - protein, 10 aa, synthetic construct
  REGION 1..10: note = WD repeat-containing protein 27 (376-385)
SLFGGKIAVL

SEQ ID NO: 22544 - protein, 7 aa, synthetic construct
  REGION 1..7: note = Four and a half LIM domains protein 2 (123-129)
SLFGKKY

SEQ ID NO: 22545 - protein, 9 aa, synthetic construct
  REGION 1..9: note = Four and a half LIM domains protein 2 (123-131)
SLFGKKYIL

SEQ ID NO: 22546 - protein, 9 aa, synthetic construct
  REGION 1..9: note = Mannosyl-oligosaccharide 1,2-alpha-mannosidase IA (231-239)
SLFGNIKGA

SEQ ID NO: 22547 - protein, 9 aa, synthetic construct
  REGION 1..9: note = Plectin (6-14)
SLFPSLVVV

SEQ ID NO: 22548 - protein, 13 aa, synthetic construct
  REGION 1..13: note = GPI transamidase component PIG-T (490-502)
SLFPVSDGSNYFV

SEQ ID NO: 22549 - protein, 9 aa, synthetic construct
  REGION 1..9: note = Hsp90 co-chaperone Cdc37 (27-35)
SLFRWRHQA

SEQ ID NO: 22550 - protein, 9 aa, synthetic construct
  REGION 1..9: note = Zinc finger MYM-type protein 3 (596-604)
SLFSGKPEV

SEQ ID NO: 22551 - protein, 9 aa, synthetic construct
  REGION 1..9: note = Uracil phosphoribosyltransferase homolog (268-276)
SLFSTPHGA

SEQ ID NO: 22552 - protein, 10 aa, synthetic construct
  REGION 1..10: note = Formin-like protein 2 (880-889)
SLFYNELHYV

SEQ ID NO: 22553 - protein, 9 aa, synthetic construct
  REGION 1..9: note = Cation-independent mannose-6-phosphate receptor (2149-2157)
SLGDIYFKL

SEQ ID NO: 22554 - protein, 9 aa, synthetic construct
  REGION 1..9: note = Dynein heavy chain domain-containing protein 1 (1476-1484)
SLGEALKQL

SEQ ID NO: 22555 - protein, 9 aa, synthetic construct
  REGION 1..9: note = Neuroblast differentiation-associated protein AHNAK (969-977)
SLGEGHLSV

SEQ ID NO: 22556 - protein, 8 aa, synthetic construct
  REGION 1..8: note = TBC1 domain family member 4 (1089-1096)
SLGFVARV

SEQ ID NO: 22557 - protein, 10 aa, synthetic construct
  REGION 1..10: note = Caspase-4 (16-25)
SLGKDFLTGV

SEQ ID NO: 22558 - protein, 8 aa, synthetic construct
  REGION 1..8: note = Solute carrier family 26 member 6 (325-332)
SLGKIFAL

SEQ ID NO: 22559 - protein, 8 aa, synthetic construct
  REGION 1..8: note = Circadian clock protein PASD1 (699-706)
SLGPVVQV

SEQ ID NO: 22560 - protein, 8 aa, synthetic construct
  REGION 1..8: note = Vesicular glutamate transporter 2 (23-30)
SLGQIYRV

SEQ ID NO: 22561 - protein, 9 aa, synthetic construct
  REGION 1..9: note = Cathepsin K (65-73)
SLGVHTYEL

SEQ ID NO: 22562 - protein, 9 aa, synthetic construct
  REGION 1..9: note = Vacuolar protein sorting-associated protein 16 homolog (139-147)
SLHDTVTTL

SEQ ID NO: 22563 - protein, 9 aa, synthetic construct
  REGION 1..9: note = Probable phospholipid-transporting ATPase IH (690-698)
SLHDVLFEL

SEQ ID NO: 22564 - protein, 9 aa, synthetic construct
  REGION 1..9: note = Sarcoplasmic/endoplasmic reticulum calcium ATPase 1 (817-825)
SLHFLILYV

SEQ ID NO: 22565 - protein, 9 aa, synthetic construct
  REGION 1..9: note = Coatomer subunit alpha (27-35)
SLHNGVIQL

SEQ ID NO: 22566 - protein, 9 aa, synthetic construct
  REGION 1..9: note = Forkhead box protein O1 (252-260)
SLHSKFIRV

SEQ ID NO: 22567 - protein, 12 aa, synthetic construct
  REGION 1..12: note = Serum albumin (89-100)
SLHTLFGDKLCT

SEQ ID NO: 22568 - protein, 9 aa, synthetic construct
  REGION 1..9: note = Adenosylhomocysteinase (198-206)
SLIDGIKRA

SEQ ID NO: 22569 - protein, 9 aa, synthetic construct
  REGION 1..9: note = AP-1 complex subunit beta-1 (665-673)
SLIGGTNFV

SEQ ID NO: 22570 - protein, 7 aa, synthetic construct
  REGION 1..7: note = Myoferlin (1042-1048)
SLIGWKF

SEQ ID NO: 22571 - protein, 9 aa, synthetic construct
  REGION 1..9: note = Protein LMBR1L (107-115)
SLIHGLWNL

SEQ ID NO: 22572 - protein, 9 aa, synthetic construct
  REGION 1..9: note = Abelson tyrosine-protein kinase 2 (153-161)
SLINGSFLV

SEQ ID NO: 22573 - protein, 11 aa, synthetic construct
  REGION 1..11: note = RNA-binding protein 34 (218-228)
SLIPAEGTLSK

SEQ ID NO: 22574 - protein, 9 aa, synthetic construct
  REGION 1..9: note = DENN domain-containing protein 5B (1249-1257)
SLIRILQTI

SEQ ID NO: 22575 - protein, 9 aa, synthetic construct
  REGION 1..9: note = Putative bifunctional UDP-N-acetylglucosamine transferase and deubiquitinase ALG13 (66-74)
SLKEDIQKA

SEQ ID NO: 22576 - protein, 9 aa, synthetic construct
  REGION 1..9: note = Manganese-transporting ATPase 13A1 (594-602)
SLKFVGFIV

SEQ ID NO: 22577 - protein, 9 aa, synthetic construct
  REGION 1..9: note = Protocadherin gamma-C3 (402-410)
SLKNYFTLK

SEQ ID NO: 22578 - protein, 9 aa, synthetic construct
  REGION 1..9: note = AP-3 complex delta subunit (882-890)
SLLAENSYV

SEQ ID NO: 22579 - protein, 10 aa, synthetic construct
  REGION 1..10: note = Exocyst complex component 1 (476-485)
SLLDMGNMSA

SEQ ID NO: 22580 - protein, 9 aa, synthetic construct
  REGION 1..9: note = Rotatin (1619-1627)
SLLDNLLTI

SEQ ID NO: 22581 - protein, 12 aa, synthetic construct
  REGION 1..12: note = Eukaryotic translation initiation factor 3 subunit L (282-293)
SLLGDYYQAIKV

SEQ ID NO: 22582 - protein, 9 aa, synthetic construct
  REGION 1..9: note = Long-chain-fatty-acid-CoA ligase 3 (439-447)
SLLGGNIRL

SEQ ID NO: 22583 - protein, 10 aa, synthetic construct
  REGION 1..10: note = Solute carrier family 22 member 18 (168-177)
SLLGGTLVSA

SEQ ID NO: 22584 - protein, 9 aa, synthetic construct
  REGION 1..9: note = Neurochondrin (337-345)
SLLKEPQKV

SEQ ID NO: 22585 - protein, 8 aa, synthetic construct
  REGION 1..8: note = Melanoma-associated antigen 10 (310-317)
SLLKFLAK

SEQ ID NO: 22586 - protein, 9 aa, synthetic construct
  REGION 1..9: note = Melanoma-associated antigen 10 (310-318)
SLLKFLAKV

SEQ ID NO: 22587 - protein, 9 aa, synthetic construct
  REGION 1..9: note = Zinc finger protein 644 (1297-1305)
SLLKKPASI

SEQ ID NO: 22588 - protein, 9 aa, synthetic construct
  REGION 1..9: note = Metallophosphoesterase 1 (21-29)
SLLLKLIAV

SEQ ID NO: 22589 - protein, 9 aa, synthetic construct
  REGION 1..9: note = Chromodomain-helicase-DNA-binding protein 4 (1004-1012)
SLLNVVMDL

SEQ ID NO: 22590 - protein, 9 aa, synthetic construct
  REGION 1..9: note = Importin-4 (220-228)
SLLPYFPAI

SEQ ID NO: 22591 - protein, 9 aa, synthetic construct
  REGION 1..9: note = G-protein coupled receptor 56 (5-13)
SLLQTTLFL

SEQ ID NO: 22592 - protein, 9 aa, synthetic construct
  REGION 1..9: note = Pericentrin (2516-2524)
SLLSEIQAL

SEQ ID NO: 22593 - protein, 9 aa, synthetic construct
  REGION 1..9: note = Bromodomain adjacent to zinc finger domain protein 2A (217-225)
SLLSSSVLT

SEQ ID NO: 22594 - protein, 9 aa, synthetic construct
  REGION 1..9: note = Zinc finger ZZ-type and EF-hand domain-containing protein 1 (401-409)
SLLTSLVTA

SEQ ID NO: 22595 - protein, 12 aa, synthetic construct
  REGION 1..12: note = Delphilin (264-275)
SLLVGGLAGPGG

SEQ ID NO: 22596 - protein, 9 aa, synthetic construct
  REGION 1..9: note = Band 4.1-like protein 2 (562-570)
SLMKDFPGA

SEQ ID NO: 22597 - protein, 8 aa, synthetic construct
  REGION 1..8: note = Oxysterol-binding protein-related protein 5 (301-308)
SLMWTLLK

SEQ ID NO: 22598 - protein, 9 aa, synthetic construct
  REGION 1..9: note = EMILIN-1 (224-232)
SLNELQTTV

SEQ ID NO: 22599 - protein, 9 aa, synthetic construct
  REGION 1..9: note = Glutamine and serine-rich protein 1 (920-928)
SLNGNQVTV

SEQ ID NO: 22600 - protein, 9 aa, synthetic construct
  REGION 1..9: note = Neurofibromin (545-553)
SLPKFYLLF

SEQ ID NO: 22601 - protein, 10 aa, synthetic construct
  REGION 1..10: note = Ras-related protein Rab-38 (113-122)
SLPNGKPVSV

SEQ ID NO: 22602 - protein, 24 aa, synthetic construct
  REGION 1..24: note = Talin-1 (1227-1250)
SLPPSTGTFQEAQSRLNEAAAGLN

SEQ ID NO: 22603 - protein, 9 aa, synthetic construct
  REGION 1..9: note = Disabled homolog 2 (264-272)
SLPRPTPQA

SEQ ID NO: 22604 - protein, 10 aa, synthetic construct
  REGION 1..10: note = P2X purinoceptor 7 (420-429)
SLQDVKGQEV

SEQ ID NO: 22605 - protein, 9 aa, synthetic construct
  REGION 1..9: note = Unconventional myosin-Va (987-995)
SLQEEIAKL

SEQ ID NO: 22606 - protein, 10 aa, synthetic construct
  REGION 1..10: note = Hyccin (485-494)
SLQEEKLIYV

SEQ ID NO: 22607 - protein, 9 aa, synthetic construct
  REGION 1..9: note = A-kinase anchor protein 9 (576-584)
SLQKDLSQV

SEQ ID NO: 22608 - protein, 9 aa, synthetic construct
  REGION 1..9: note = Sulfate transporter (477-485)
SLQKSVLGV

SEQ ID NO: 22609 - protein, 11 aa, synthetic construct
  REGION 1..11: note = Matrix metalloproteinase-14 (60-70)
SLSAAIAAMQK

SEQ ID NO: 22610 - protein, 9 aa, synthetic construct
  REGION 1..9: note = Ethanolamine kinase 2 (36-44)
SLSADVPKV

SEQ ID NO: 22611 - protein, 9 aa, synthetic construct
  REGION 1..9: note = Unconventional myosin-Ic (936-944)
SLSDSLFVL

SEQ ID NO: 22612 - protein, 13 aa, synthetic construct
  REGION 1..13: note = Mucin-16 (10281-10293)
SLSEAMTSFATTG

SEQ ID NO: 22613 - protein, 9 aa, synthetic construct
  REGION 1..9: note = CD109 antigen (1332-1340)
SLSETVKKV

SEQ ID NO: 22614 - protein, 10 aa, synthetic construct
  REGION 1..10: note = Melanoma antigen preferentially expressed in tumors (355-364)
SLSGVMLTDV

SEQ ID NO: 22615 - protein, 9 aa, synthetic construct
  REGION 1..9: note = WD repeat-containing protein 1 (156-164)
SLSGYINYL

SEQ ID NO: 22616 - protein, 9 aa, synthetic construct
  REGION 1..9: note = Protein phosphatase 1 regulatory subunit 21 (218-226)
SLSIINEKV

SEQ ID NO: 22617 - protein, 10 aa, synthetic construct
  REGION 1..10: note = DNA dC-dU-editing enzyme APOBEC-3B (446-455)
SLSPGHLPVP

SEQ ID NO: 22618 - protein, 10 aa, synthetic construct
  REGION 1..10: note = Alpha-ketoglutarate-dependent dioxygenase alkB homolog 3 (81-90)
SLSPTGVSRV

SEQ ID NO: 22619 - protein, 9 aa, synthetic construct
  REGION 1..9: note = E3 ubiquitin-protein ligase TRIM56 (586-594)
SLSQASHAV

SEQ ID NO: 22620 - protein, 9 aa, synthetic construct
  REGION 1..9: note = Coiled-coil domain-containing protein 91 (414-422)
SLSSLELFL

SEQ ID NO: 22621 - protein, 9 aa, synthetic construct
  REGION 1..9: note = Centrosomal protein of 290 kDa (11-19)
SLSSLLVKL

SEQ ID NO: 22622 - protein, 11 aa, synthetic construct
  REGION 1..11: note = Transcription factor HIVEP3 (1019-1029)
SLTGPSAPAPV

SEQ ID NO: 22623 - protein, 9 aa, synthetic construct
  REGION 1..9: note = CDK5 regulatory subunit-associated protein 2 (1447-1455)
SLTSEIHFL

SEQ ID NO: 22624 - protein, 9 aa, synthetic construct
  REGION 1..9: note = Epsilon-sarcoglycan (250-258)
SLVDKTKQV

SEQ ID NO: 22625 - protein, 11 aa, synthetic construct
  REGION 1..11: note = Transcription factor AP-2-epsilon (290-300)
SLVEGEAVHLA

SEQ ID NO: 22626 - protein, 9 aa, synthetic construct
  REGION 1..9: note = Tumor suppressor candidate 3 (209-217)
SLVGGLLYL

SEQ ID NO: 22627 - protein, 9 aa, synthetic construct
  REGION 1..9: note = U5 small nuclear ribonucleoprotein 200 kDa helicase (42-50)
SLVGKLEGT

SEQ ID NO: 22628 - protein, 9 aa, synthetic construct
  REGION 1..9: note = Niban-like protein 1 (77-85)
SLVPHNYGL

SEQ ID NO: 22629 - protein, 7 aa, synthetic construct
  REGION 1..7: note = DNA mismatch repair protein Msh6 (342-348)
SLVQKGY

SEQ ID NO: 22630 - protein, 9 aa, synthetic construct
  REGION 1..9: note = Piezo-type mechanosensitive ion channel component 1 (1709-1717)
SLVRSVVGV

SEQ ID NO: 22631 - protein, 10 aa, synthetic construct
  REGION 1..10: note = Arylsulfatase B (320-329)
SLWEGGVRGV

SEQ ID NO: 22632 - protein, 11 aa, synthetic construct
  REGION 1..11: note = Cohesin subunit SA-1 (487-497)
SLWESSQELLK

SEQ ID NO: 22633 - protein, 9 aa, synthetic construct
  REGION 1..9: note = Membrane magnesium transporter 1 (4-12)
SLWKGLVGI

SEQ ID NO: 22634 - protein, 9 aa, synthetic construct
  REGION 1..9: note = Rho guanine nucleotide exchange factor 5 (1151-1159)
SLWQEIPVV

SEQ ID NO: 22635 - protein, 9 aa, synthetic construct
  REGION 1..9: note = Lysosomal-trafficking regulator (2437-2445)
SLYDNILLH

SEQ ID NO: 22636 - protein, 11 aa, synthetic construct
  REGION 1..11: note = Lysosomal-trafficking regulator (2437-2447)
SLYDNILLHNA

SEQ ID NO: 22637 - protein, 9 aa, synthetic construct
  REGION 1..9: note = Chloride channel protein 2 (551-559)
SLYDSIIRI

SEQ ID NO: 22638 - protein, 10 aa, synthetic construct
  REGION 1..10: note = WD repeat-containing protein 3 (586-595)
SLYGHKLPVI

SEQ ID NO: 22639 - protein, 9 aa, synthetic construct
  REGION 1..9: note = Protein YIPF4 (129-137)
SLYGQFRVV

SEQ ID NO: 22640 - protein, 11 aa, synthetic construct
  REGION 1..11: note = Glutaminyl-peptide cyclotransferase (212-222)
SLYGSRHLAAK

SEQ ID NO: 22641 - protein, 10 aa, synthetic construct
  REGION 1..10: note = Clathrin heavy chain 1 (1532-1541)
SLYKDAMQYA

SEQ ID NO: 22642 - protein, 9 aa, synthetic construct
  REGION 1..9: note = Laminin subunit alpha-4 (855-863)
SLYMKPPVK

SEQ ID NO: 22643 - protein, 9 aa, synthetic construct
  REGION 1..9: note = Membrane-associated transporter protein (382-390)
SLYSYFQKV

SEQ ID NO: 22644 - protein, 9 aa, synthetic construct
  REGION 1..9: note = Cytoplasmic dynein 1 heavy chain 1 (3309-3317)
SMANPPAAV

SEQ ID NO: 22645 - protein, 9 aa, synthetic construct
  REGION 1..9: note = Charged multivesicular body protein 2a (98-106)
SMAQAMKGV

SEQ ID NO: 22646 - protein, 9 aa, synthetic construct
  REGION 1..9: note = Probable ATP-dependent RNA helicase DDX59 (525-533)
SMDEYVHQL

SEQ ID NO: 22647 - protein, 12 aa, synthetic construct
  REGION 1..12: note = Zinc finger protein 160 (58-69)
SMLEEGKEPWTV

SEQ ID NO: 22648 - protein, 10 aa, synthetic construct
  REGION 1..10: note = Serine palmitoyltransferase 3 (235-244)
SMNIPALVGK

SEQ ID NO: 22649 - protein, 9 aa, synthetic construct
  REGION 1..9: note = Neuroblast differentiation-associated protein AHNAK (3672-3680)
SMPDFDLNL

SEQ ID NO: 22650 - protein, 9 aa, synthetic construct
  REGION 1..9: note = Eukaryotic translation initiation factor 3 subunit L (303-311)
SMYSRVPEC

SEQ ID NO: 22651 - protein, 12 aa, synthetic construct
  REGION 1..12: note = Histone-lysine N-methyltransferase 2C (3371-3382)
SNANPQSGPPPR

SEQ ID NO: 22652 - protein, 12 aa, synthetic construct
  REGION 1..12: note = ATP-dependent RNA helicase A (233-244)
SNKKLAAQSCAL

SEQ ID NO: 22653 - protein, 8 aa, synthetic construct
  REGION 1..8: note = Voltage-dependent L-type calcium channel subunit alpha-1C (157-164)
SNLERVEY

SEQ ID NO: 22654 - protein, 8 aa, synthetic construct
  REGION 1..8: note = Aldehyde dehydrogenase, mitochondrial (130-137)
SNLKRVTL

SEQ ID NO: 22655 - protein, 9 aa, synthetic construct
  REGION 1..9: note = Protocadherin gamma-A12 (544-552)
SNVSLSLFV

SEQ ID NO: 22656 - protein, 9 aa, synthetic construct
  REGION 1..9: note = Neuropilin-2 (579-587)
SPAGIGMRL

SEQ ID NO: 22657 - protein, 9 aa, synthetic construct
  REGION 1..9: note = Sushi repeat-containing protein SRPX (3-11)
SPAHRPALL

SEQ ID NO: 22658 - protein, 10 aa, synthetic construct
  REGION 1..10: note = Sushi repeat-containing protein SRPX (3-12)
SPAHRPALLL

SEQ ID NO: 22659 - protein, 8 aa, synthetic construct
  REGION 1..8: note = Staphylococcal nuclease domain-containing protein 1 (730-737)
SPAKIHVF

SEQ ID NO: 22660 - protein, 9 aa, synthetic construct
  REGION 1..9: note = Plectin (1284-1292)
SPAKKPKVQ

SEQ ID NO: 22661 - protein, 9 aa, synthetic construct
  REGION 1..9: note = Integrin beta-5 (81-89)
SPASSFHVL

SEQ ID NO: 22662 - protein, 9 aa, synthetic construct
  REGION 1..9: note = Nesprin-1 (72-80)
SPEVGRLSL

SEQ ID NO: 22663 - protein, 9 aa, synthetic construct
  REGION 1..9: note = Tetratricopeptide repeat protein 28 (1765-1773)
SPFQKVGKL

SEQ ID NO: 22664 - protein, 12 aa, synthetic construct
  REGION 1..12: note = Carcinoembryonic antigen-related cell adhesion molecule 1 isoform 3 (361-372)
SPGAIAGIVIGV

SEQ ID NO: 22665 - protein, 12 aa, synthetic construct
  REGION 1..12: note = Transport and Golgi organization protein 6 homolog (29-40)
SPGGSGSSSLQV

SEQ ID NO: 22666 - protein, 12 aa, synthetic construct
  REGION 1..12: note = Vimentin (56-67)
SPGGVYATRSSA

SEQ ID NO: 22667 - protein, 9 aa, synthetic construct
  REGION 1..9: note = HEAT repeat-containing protein 5B (63-71)
SPGPPTRKL

SEQ ID NO: 22668 - protein, 9 aa, synthetic construct
  REGION 1..9: note = Rho guanine nucleotide exchange factor 26 (304-312)
SPGSLRRGL

SEQ ID NO: 22669 - protein, 9 aa, synthetic construct
  REGION 1..9: note = Glia-derived nexin (66-74)
SPHGIASVL

SEQ ID NO: 22670 - protein, 10 aa, synthetic construct
  REGION 1..10: note = Tensin-3 (1123-1132)
SPHSGSTISI

SEQ ID NO: 22671 - protein, 9 aa, synthetic construct
  REGION 1..9: note = Ankyrin repeat and BTB/POZ domain-containing protein 2 (632-640)
SPIPSIPEI

SEQ ID NO: 22672 - protein, 9 aa, synthetic construct
  REGION 1..9: note = F-box only protein 7 (406-414)
SPKGRFVML

SEQ ID NO: 22673 - protein, 9 aa, synthetic construct
  REGION 1..9: note = Synaptic vesicle membrane protein VAT-1 homolog (249-257)
SPKGVDIVM

SEQ ID NO: 22674 - protein, 9 aa, synthetic construct
  REGION 1..9: note = Sodium-dependent neutral amino acid transporter B(0)AT2 (30-38)
SPKLGGIGF

SEQ ID NO: 22675 - protein, 10 aa, synthetic construct
  REGION 1..10: note = Collagen alpha-1(XV) chain (314-323)
SPKQGSGEIL

SEQ ID NO: 22676 - protein, 9 aa, synthetic construct
  REGION 1..9: note = E3 ubiquitin-protein ligase RLIM (89-97)
SPLHPMSEI

SEQ ID NO: 22677 - protein, 10 aa, synthetic construct
  REGION 1..10: note = Cleavage stimulation factor subunit 2 (154-163)
SPQEARNMLL

SEQ ID NO: 22678 - protein, 9 aa, synthetic construct
  REGION 1..9: note = L-dopachrome tautomerase (134-142)
SPQEREQFL

SEQ ID NO: 22679 - protein, 9 aa, synthetic construct
  REGION 1..9: note = Immunoglobulin superfamily member 11 (234-242)
SPQPRNIGL

SEQ ID NO: 22680 - protein, 9 aa, synthetic construct
  REGION 1..9: note = Collagen triple helix repeat-containing protein 1 (9-17)
SPQRLRGLL

SEQ ID NO: 22681 - protein, 9 aa, synthetic construct
  REGION 1..9: note = Ropporin-1A (153-161)
SPRIPFSTF

SEQ ID NO: 22682 - protein, 8 aa, synthetic construct
  REGION 1..8: note = Procollagen-lysine,2-oxoglutarate 5-dioxygenase 3 (702-709)
SPRKGWAL

SEQ ID NO: 22683 - protein, 8 aa, synthetic construct
  REGION 1..8: note = Procollagen-lysine,2-oxoglutarate 5-dioxygenase 2 (174-181)
SPRKGWSF

SEQ ID NO: 22684 - protein, 8 aa, synthetic construct
  REGION 1..8: note = Delta-like protein 3 (3-10)
SPRMSGLL

SEQ ID NO: 22685 - protein, 11 aa, synthetic construct
  REGION 1..11: note = Delta-like protein 3 (3-13)
SPRMSGLLSQT

SEQ ID NO: 22686 - protein, 9 aa, synthetic construct
  REGION 1..9: note = Integrin alpha-7 (803-811)
SPRPNILHL

SEQ ID NO: 22687 - protein, 9 aa, synthetic construct
  REGION 1..9: note = Protocadherin gamma-C3 (65-73)
SPRQTLTVL

SEQ ID NO: 22688 - protein, 9 aa, synthetic construct
  REGION 1..9: note = RPA-interacting protein (7-15)
SPRRSLYKL

SEQ ID NO: 22689 - protein, 9 aa, synthetic construct
  REGION 1..9: note = E3 ubiquitin-protein ligase RING1 (9-17)
SPRSLHSEL

SEQ ID NO: 22690 - protein, 9 aa, synthetic construct
  REGION 1..9: note = AP-1 complex subunit sigma-1A (146-154)
SPRSVLEEM

SEQ ID NO: 22691 - protein, 18 aa, synthetic construct
  REGION 1..18: note = Fatty acid synthase (856-873)
SPSAAIYNIDTSSESPDH

SEQ ID NO: 22692 - protein, 9 aa, synthetic construct
  REGION 1..9: note = Rho GTPase-activating protein 32 (243-251)
SPSTKLLTL

SEQ ID NO: 22693 - protein, 10 aa, synthetic construct
  REGION 1..10: note = Melanoma antigen preferentially expressed in tumors (345-354)
SPSVSQLSVL

SEQ ID NO: 22694 - protein, 9 aa, synthetic construct
  REGION 1..9: note = SAM and SH3 domain-containing protein 1 (442-450)
SPTASRISL

SEQ ID NO: 22695 - protein, 9 aa, synthetic construct
  REGION 1..9: note = Transcription factor Dp-2 (24-32)
SPTKGNISF

SEQ ID NO: 22696 - protein, 9 aa, synthetic construct
  REGION 1..9: note = Bestrophin-1 (499-507)
SPTNIHTTL

SEQ ID NO: 22697 - protein, 9 aa, synthetic construct
  REGION 1..9: note = Nuclear factor 1 X-type (373-381)
SPYFTHPTI

SEQ ID NO: 22698 - protein, 9 aa, synthetic construct
  REGION 1..9: note = Zinc finger CCHC domain-containing protein 24 (93-101)
SPYGSLNNI

SEQ ID NO: 22699 - protein, 9 aa, synthetic construct
  REGION 1..9: note = Zinc finger protein 503 (341-349)
SPYKPGQTV

SEQ ID NO: 22700 - protein, 10 aa, synthetic construct
  REGION 1..10: note = Retinoic acid receptor RXR-gamma (68-77)
SPYRVITSAM

SEQ ID NO: 22701 - protein, 8 aa, synthetic construct
  REGION 1..8: note = Filamin-A (1603-1610)
SPYRVRAV

SEQ ID NO: 22702 - protein, 21 aa, synthetic construct
  REGION 1..21: note = HLA class I histocompatibility antigen, A-23 alpha chain (345-365)
SQAASSDSAQGSDVSLTACKV

SEQ ID NO: 22703 - protein, 24 aa, synthetic construct
  REGION 1..24: note = AT-rich interactive domain-containing protein 1A (334-357)
SQCWGAAAAAAAAAAASGGAQQRS

SEQ ID NO: 22704 - protein, 8 aa, synthetic construct
  REGION 1..8: note = Hemicentin-1 (1082-1089)
SQDKPVEI

SEQ ID NO: 22705 - protein, 9 aa, synthetic construct
  REGION 1..9: note = Very large A-kinase anchor protein (777-785)
SQDPNRVEL

SEQ ID NO: 22706 - protein, 9 aa, synthetic construct
  REGION 1..9: note = Transmembrane protein 131 (324-332)
SQFSGKITV

SEQ ID NO: 22707 - protein, 21 aa, synthetic construct
  REGION 1..21: note = Hsp70-binding protein 1 (65-85)
SQGCSSGGGGGGSSAGGSGNS

SEQ ID NO: 22708 - protein, 10 aa, synthetic construct
  REGION 1..10: note = Histone acetyltransferase p300 (1897-1906)
SQGKAAGQVT

SEQ ID NO: 22709 - protein, 12 aa, synthetic construct
  REGION 1..12: note = Beta-2-microglobulin (87-98)
SQPKIVKWDRDM

SEQ ID NO: 22710 - protein, 13 aa, synthetic construct
  REGION 1..13: note = Ras-associating and dilute domain-containing protein (258-270)
SQQHDSLVYVLNR

SEQ ID NO: 22711 - protein, 10 aa, synthetic construct
  REGION 1..10: note = Oxysterol-binding protein-related protein 10 (232-241)
SQYSGQLHEV

SEQ ID NO: 22712 - protein, 9 aa, synthetic construct
  REGION 1..9: note = Transmembrane and TPR repeat-containing protein 2 (541-549)
SRFAEALHY

SEQ ID NO: 22713 - protein, 9 aa, synthetic construct
  REGION 1..9: note = Pre-mRNA-processing-splicing factor 8 (979-987)
SRFEKMYEK

SEQ ID NO: 22714 - protein, 9 aa, synthetic construct
  REGION 1..9: note = Glia-derived nexin (207-215)
SRFQPENTK

SEQ ID NO: 22715 - protein, 6 aa, synthetic construct
  REGION 1..6: note = ER membrane protein complex subunit 1 (7-12)
SRFWLW

SEQ ID NO: 22716 - protein, 8 aa, synthetic construct
  REGION 1..8: note = Splicing factor 3B subunit 3 (33-40)
SRGKILEL

SEQ ID NO: 22717 - protein, 9 aa, synthetic construct
  REGION 1..9: note = Maltase-glucoamylase (658-666)
SRHYLNIRY

SEQ ID NO: 22718 - protein, 9 aa, synthetic construct
  REGION 1..9: note = B-cell lymphoma 6 protein (444-452)
SRLNNIVNR

SEQ ID NO: 22719 - protein, 9 aa, synthetic construct
  REGION 1..9: note = Centrosomal protein C10orf90 (199-207)
SRNSSVVRL

SEQ ID NO: 22720 - protein, 9 aa, synthetic construct
  REGION 1..9: note = Maltase-glucoamylase, intestinal (1482-1490)
SRNVLQTRY

SEQ ID NO: 22721 - protein, 22 aa, synthetic construct
  REGION 1..22: note = Glia-derived nexin (57-78)
SRPHDNIVISPHGIASVLGMLQ

SEQ ID NO: 22722 - protein, 8 aa, synthetic construct
  REGION 1..8: note = Arylsulfatase B (42-49)
SRPPHLVF

SEQ ID NO: 22723 - protein, 9 aa, synthetic construct
  REGION 1..9: note = Fatty acid synthase (1916-1924)
SRSGIRTGY

SEQ ID NO: 22724 - protein, 9 aa, synthetic construct
  REGION 1..9: note = Vasorin (3-11)
SRVPLLLPL

SEQ ID NO: 22725 - protein, 8 aa, synthetic construct
  REGION 1..8: note = Semaphorin-3A (543-550)
SRYFPTAK

SEQ ID NO: 22726 - protein, 16 aa, synthetic construct
  REGION 1..16: note = Alpha-1D adrenergic receptor (23-38)
SSAGGGGGSAGGAAPS

SEQ ID NO: 22727 - protein, 9 aa, synthetic construct
  REGION 1..9: note = Insulin receptor substrate 2 (311-319)
SSATHPISV

SEQ ID NO: 22728 - protein, 9 aa, synthetic construct
  REGION 1..9: note = Protein CMSS1 (145-153)
SSAVRALEL

SEQ ID NO: 22729 - protein, 9 aa, synthetic construct
  REGION 1..9: note = Protein FAM127A (59-67)
SSDALKVTF

SEQ ID NO: 22730 - protein, 10 aa, synthetic construct
  REGION 1..10: note = Beta-1-syntrophin (489-498)
SSDDGIRMLY

SEQ ID NO: 22731 - protein, 9 aa, synthetic construct
  REGION 1..9: note = Transcription elongation factor B polypeptide 1 (7-15)
SSDGHEFIV

SEQ ID NO: 22732 - protein, 9 aa, synthetic construct
  REGION 1..9: note = Cyclin-dependent kinase-like 3 (88-96)
SSDLLHHEY

SEQ ID NO: 22733 - protein, 9 aa, synthetic construct
  REGION 1..9: note = Neutrophil collagenase (228-236)
SSDPGALMY

SEQ ID NO: 22734 - protein, 17 aa, synthetic construct
  REGION 1..17: note = HLA class I histocompatibility antigen, A-23 alpha chain (349-365)
SSDSAQGSDVSLTACKV

SEQ ID NO: 22735 - protein, 28 aa, synthetic construct
  REGION 1..28: note = NADH dehydrogenase (ubiquinone) 1 beta subcomplex subunit 11, mitochondrial (31-58)
SSFSRTVVAPSAVAGKRPPEPTTPWQED

SEQ ID NO: 22736 - protein, 13 aa, synthetic construct
  REGION 1..13: note = Keratin, type I cytoskeletal 10 (570-582)
SSGSVGESSSKGP

SEQ ID NO: 22737 - protein, 7 aa, synthetic construct
  REGION 1..7: note = Zinc finger protein 697 (329-335)
SSHLLSH

SEQ ID NO: 22738 - protein, 7 aa, synthetic construct
  REGION 1..7: note = BTB/POZ domain-containing protein KCTD20 (144-150)
SSKLYRF

SEQ ID NO: 22739 - protein, 13 aa, synthetic construct
  REGION 1..13: note = Voltage-dependent anion-selective channel protein 1 (240-252)
SSLIGLGYTQTLK

SEQ ID NO: 22740 - protein, 9 aa, synthetic construct
  REGION 1..9: note = Phosphatidylinositol 4-phosphate 3-kinase C2 domain-containing subunit alpha (1113-1121)
SSNAVPLKV

SEQ ID NO: 22741 - protein, 9 aa, synthetic construct
  REGION 1..9: note = Niemann-Pick C1 protein (167-175)
SSNDKALGL

SEQ ID NO: 22742 - protein, 9 aa, synthetic construct
  REGION 1..9: note = Ligand of Numb protein X 2 (382-390)
SSNDRVLAI

SEQ ID NO: 22743 - protein, 14 aa, synthetic construct
  REGION 1..14: note = Beta-secretase 2 (113-126)
SSNFAVAGTPHSYI

SEQ ID NO: 22744 - protein, 15 aa, synthetic construct
  REGION 1..15: note = Beta-secretase 2 (113-127)
SSNFAVAGTPHSYID

SEQ ID NO: 22745 - protein, 16 aa, synthetic construct
  REGION 1..16: note = Beta-secretase 2 (113-128)
SSNFAVAGTPHSYIDT

SEQ ID NO: 22746 - protein, 9 aa, synthetic construct
  REGION 1..9: note = Alpha-taxilin (438-446)
SSNKALLEM

SEQ ID NO: 22747 - protein, 9 aa, synthetic construct
  REGION 1..9: note = Plakophilin-4 (457-465)
SSQRSTLTY

SEQ ID NO: 22748 - protein, 9 aa, synthetic construct
  REGION 1..9: note = Golgin subfamily B member 1 (3000-3008)
SSQTQPLKV

SEQ ID NO: 22749 - protein, 11 aa, synthetic construct
  REGION 1..11: note = Transducin-like enhancer protein 3 (167-177)
SSSGLLALGAL

SEQ ID NO: 22750 - protein, 14 aa, synthetic construct
  REGION 1..14: note = Keratin, type I cytoskeletal 10 (37-50)
SSSKGSLGGGFSSG

SEQ ID NO: 22751 - protein, 15 aa, synthetic construct
  REGION 1..15: note = Keratin, type I cytoskeletal 10 (37-51)
SSSKGSLGGGFSSGG

SEQ ID NO: 22752 - protein, 16 aa, synthetic construct
  REGION 1..16: note = Keratin, type I cytoskeletal 10 (37-52)
SSSKGSLGGGFSSGGF

SEQ ID NO: 22753 - protein, 18 aa, synthetic construct
  REGION 1..18: note = Keratin, type I cytoskeletal 10 (37-54)
SSSKGSLGGGFSSGGFSG

SEQ ID NO: 22754 - protein, 19 aa, synthetic construct
  REGION 1..19: note = Keratin, type I cytoskeletal 10 (37-55)
SSSKGSLGGGFSSGGFSGG

SEQ ID NO: 22755 - protein, 9 aa, synthetic construct
  REGION 1..9: note = Actin, gamma-enteric smooth muscle (190-198)
SSSSLEKSY

SEQ ID NO: 22756 - protein, 13 aa, synthetic construct
  REGION 1..13: note = Synaptotagmin-like protein 2 (277-289)
SSSSSTDSETLRY

SEQ ID NO: 22757 - protein, 12 aa, synthetic construct
  REGION 1..12: note = Synaptotagmin-like protein 2 (279-290)
SSSSTDSETLRY

SEQ ID NO: 22758 - protein, 10 aa, synthetic construct
  REGION 1..10: note = Synaptotagmin-like protein 2 (281-290)
SSTDSETLRY

SEQ ID NO: 22759 - protein, 9 aa, synthetic construct
  REGION 1..9: note = F-actin-capping protein subunit beta (41-49)
SSVDQPLKI

SEQ ID NO: 22760 - protein, 7 aa, synthetic construct
  REGION 1..7: note = TATA-binding protein-associated factor 2N (44-50)
SSYGQNY

SEQ ID NO: 22761 - protein, 9 aa, synthetic construct
  REGION 1..9: note = Poly(rC)-binding protein 4 (68-76)
STAAVFHAV

SEQ ID NO: 22762 - protein, 8 aa, synthetic construct
  REGION 1..8: note = 40S ribosomal protein S19 (59-66)
STARHLYL

SEQ ID NO: 22763 - protein, 11 aa, synthetic construct
  REGION 1..11: note = Regulator of G-protein signaling 12 (284-294)
STDKAGVVAEY

SEQ ID NO: 22764 - protein, 10 aa, synthetic construct
  REGION 1..10: note = Neuropilin-2 (829-838)
STDKEKSWLY

SEQ ID NO: 22765 - protein, 10 aa, synthetic construct
  REGION 1..10: note = Protein LZIC (168-177)
STDLGRPPSY

SEQ ID NO: 22766 - protein, 9 aa, synthetic construct
  REGION 1..9: note = Transcription factor HES-1 (101-109)
STDPSVLGK

SEQ ID NO: 22767 - protein, 8 aa, synthetic construct
  REGION 1..8: note = Heterogeneous nuclear ribonucleoprotein K (188-195)
STDRVVLI

SEQ ID NO: 22768 - protein, 10 aa, synthetic construct
  REGION 1..10: note = CUB and sushi domain-containing protein 1 (1359-1368)
STFNSLTLQF

SEQ ID NO: 22769 - protein, 8 aa, synthetic construct
  REGION 1..8: note = Transcription termination factor 2 (827-834)
STGRPLVI

SEQ ID NO: 22770 - protein, 8 aa, synthetic construct
  REGION 1..8: note = Basic leucine zipper and W2 domain-containing protein 2 (54-61)
STGSRLDY

SEQ ID NO: 22771 - protein, 7 aa, synthetic construct
  REGION 1..7: note = Synemin (859-865)
STIRYSW

SEQ ID NO: 22772 - protein, 18 aa, synthetic construct
  REGION 1..18: note = Transformation/transcription domain-associated protein (377-394)
STLADLVHHVRQHLPLSD

SEQ ID NO: 22773 - protein, 7 aa, synthetic construct
  REGION 1..7: note = Nicalin (264-270)
STLEHHL

SEQ ID NO: 22774 - protein, 31 aa, synthetic construct
  REGION 1..31: note = CXXC-type zinc finger protein 5 (18-48)
STNGSGGSGSSGPKAGAADKSAVVAAAAPAS

SEQ ID NO: 22775 - protein, 10 aa, synthetic construct
  REGION 1..10: note = Transmembraneoprotein NMB (294-303)
STNHTVNHTY

SEQ ID NO: 22776 - protein, 9 aa, synthetic construct
  REGION 1..9: note = Patatin-like phospholipase domain-containing protein 2 (199-207)
STNIHELRV

SEQ ID NO: 22777 - protein, 9 aa, synthetic construct
  REGION 1..9: note = Sodium/potassium-transporting ATPase subunit alpha-3 (487-495)
STNKYQLSI

SEQ ID NO: 22778 - protein, 9 aa, synthetic construct
  REGION 1..9: note = Transmembrane emp24 domain-containing protein 10 (181-189)
STNTRVLYF

SEQ ID NO: 22779 - protein, 9 aa, synthetic construct
  REGION 1..9: note = DNA-directed RNA polymerase I subunit RPA2 (156-164)
STQKQVLNY

SEQ ID NO: 22780 - protein, 8 aa, synthetic construct
  REGION 1..8: note = Protein-methionine sulfoxide oxidase MICAL3 (646-653)
STRSPISF

SEQ ID NO: 22781 - protein, 15 aa, synthetic construct
  REGION 1..15: note = Vimentin (2-16)
STRSVSSSSYRRMFG

SEQ ID NO: 22782 - protein, 15 aa, synthetic construct
  REGION 1..15: note = Vimentin (47-61)
STSRSLYASSPGGVY

SEQ ID NO: 22783 - protein, 7 aa, synthetic construct
  REGION 1..7: note = WD repeat-containing protein 36 (352-358)
STVHEKF

SEQ ID NO: 22784 - protein, 9 aa, synthetic construct
  REGION 1..9: note = Zinc finger CCHC domain-containing protein 3 (228-236)
SVAAQLTGV

SEQ ID NO: 22785 - protein, 9 aa, synthetic construct
  REGION 1..9: note = Zinc finger protein 518B (424-432)
SVALKGHSL

SEQ ID NO: 22786 - protein, 11 aa, synthetic construct
  REGION 1..11: note = Latent-transforming growth factor beta-binding protein 3 (178-188)
SVASKHAIYAV

SEQ ID NO: 22787 - protein, 9 aa, synthetic construct
  REGION 1..9: note = 3-hydroxybutyrate dehydrogenase type 2 (133-141)
SVASSVKGV

SEQ ID NO: 22788 - protein, 20 aa, synthetic construct
  REGION 1..20: note = Chondroitin sulfate proteoglycan 4 (124-143)
SVDGFLNASSAVPGAPLEVP

SEQ ID NO: 22789 - protein, 9 aa, synthetic construct
  REGION 1..9: note = GDNF-inducible zinc finger protein 1 (69-77)
SVDGTRTNV

SEQ ID NO: 22790 - protein, 9 aa, synthetic construct
  REGION 1..9: note = Protein AHNAK2 (2175-2183)
SVDVSPPKV

SEQ ID NO: 22791 - protein, 9 aa, synthetic construct
  REGION 1..9: note = Phospholipase B-like 1 (304-312)
SVFNKTLLK

SEQ ID NO: 22792 - protein, 7 aa, synthetic construct
  REGION 1..7: note = Clathrin interactor 1 (166-172)
SVGGFRY

SEQ ID NO: 22793 - protein, 19 aa, synthetic construct
  REGION 1..19: note = Prelamin-A/C (479-497)
SVGGSGGGSFGDNLVTRSY

SEQ ID NO: 22794 - protein, 9 aa, synthetic construct
  REGION 1..9: note = Heterogeneous nuclear ribonucleoprotein C-like 1 (47-55)
SVHKGFAFV

SEQ ID NO: 22795 - protein, 9 aa, synthetic construct
  REGION 1..9: note = COUP transcription factor 2 (223-231)
SVIEQLFFV

SEQ ID NO: 22796 - protein, 9 aa, synthetic construct
  REGION 1..9: note = Serine/threonine-protein kinase ICK (533-541)
SVISKVNSV

SEQ ID NO: 22797 - protein, 23 aa, synthetic construct
  REGION 1..23: note = Glutathione reductase, mitochondrial (234-256)
SVIVGAGYIAVEMAGILSALGSK

SEQ ID NO: 22798 - protein, 9 aa, synthetic construct
  REGION 1..9: note = Kelch-like protein 21 (378-386)
SVLDGLLYV

SEQ ID NO: 22799 - protein, 10 aa, synthetic construct
  REGION 1..10: note = Protein transport protein Sec61 subunit alpha isoform 1 (353-362)
SVLEDPVHAV

SEQ ID NO: 22800 - protein, 7 aa, synthetic construct
  REGION 1..7: note = Tetratricopeptide repeat protein 27 (74-80)
SVLFQQF

SEQ ID NO: 22801 - protein, 9 aa, synthetic construct
  REGION 1..9: note = Histone-lysine N-methyltransferase SETD1B (168-176)
SVMGNIIHV

SEQ ID NO: 22802 - protein, 9 aa, synthetic construct
  REGION 1..9: note = E3 ubiquitin-protein ligase UBR4 (884-892)
SVNRYILQL

SEQ ID NO: 22803 - protein, 12 aa, synthetic construct
  REGION 1..12: note = Integral membrane protein GPR137C (4-15)
SVPGPAAAAAPA

SEQ ID NO: 22804 - protein, 26 aa, synthetic construct
  REGION 1..26: note = CCR4-NOT transcription complex subunit 3 (392-417)
SVQPSGGGGGGSGGGGSSSSSNSSAG

SEQ ID NO: 22805 - protein, 10 aa, synthetic construct
  REGION 1..10: note = Transmembrane protein 98 (124-133)
SVSDIIVVAK

SEQ ID NO: 22806 - protein, 9 aa, synthetic construct
  REGION 1..9: note = Adipocyte enhancer-binding protein 1 (926-934)
SVSGINHGV

SEQ ID NO: 22807 - protein, 9 aa, synthetic construct
  REGION 1..9: note = Dimethyladenosine transferase 1, mitochondrial (145-153)
SVSTPLIIK

SEQ ID NO: 22808 - protein, 9 aa, synthetic construct
  REGION 1..9: note Dolichyl-diphosphooligosaccharide-proteinosyltransferase subunit 2 (121-129)
SVTQIYHAV

SEQ ID NO: 22809 - protein, 9 aa, synthetic construct
  REGION 1..9: note = Lysine-specific demethylase 4B (1000-1008)
SVTSHIYQV

SEQ ID NO: 22810 - protein, 9 aa, synthetic construct
  REGION 1..9: note = PR domain zinc finger protein 2 (684-692)
SVYLSSKLK

SEQ ID NO: 22811 - protein, 8 aa, synthetic construct
  REGION 1..8: note = Suppressor of tumorigenicity 7 protein (439-446)
SVYPKKEL

SEQ ID NO: 22812 - protein, 12 aa, synthetic construct
  REGION 1..12: note = Semaphorin-3D (430-441)
SVYPVAGGPTFK

SEQ ID NO: 22813 - protein, 10 aa, synthetic construct
  REGION 1..10: note = Melanophilin (449-458)
SVYRGSLTQR

SEQ ID NO: 22814 - protein, 10 aa, synthetic construct
  REGION 1..10: note = Cathepsin B (254-263)
SVYSDFLLYK

SEQ ID NO: 22815 - protein, 12 aa, synthetic construct
  REGION 1..12: note = Synaptotagmin-like protein 2 (618-629)
SVYSGDFGNLEV

SEQ ID NO: 22816 - protein, 9 aa, synthetic construct
  REGION 1..9: note = Retrotransposon gag domain-containing protein 4 (253-261)
SYADAFQFL

SEQ ID NO: 22817 - protein, 9 aa, synthetic construct
  REGION 1..9: note = WD repeat-containing protein 11 (156-164)
SYADNILSF

SEQ ID NO: 22818 - protein, 9 aa, synthetic construct
  REGION 1..9: note = SH3 domain-binding protein 1 (158-166)
SYANYFIRL

SEQ ID NO: 22819 - protein, 20 aa, synthetic construct
  REGION 1..20: note = Thioredoxin reductase 1, cytoplasmic (10-29)
SYDYDLIIIGGGSGGLAAAK

SEQ ID NO: 22820 - protein, 9 aa, synthetic construct
  REGION 1..9: note = Dedicator of cytokinesis protein 7 (739-747)
SYIHYVFRL

SEQ ID NO: 22821 - protein, 9 aa, synthetic construct
  REGION 1..9: note = Transportin-2 (516-524)
SYILDTLVF

SEQ ID NO: 22822 - protein, 9 aa, synthetic construct
  REGION 1..9: note = E3 ubiquitin-protein ligase TRIM58 (431-439)
SYIYTFNQL

SEQ ID NO: 22823 - protein, 9 aa, synthetic construct
  REGION 1..9: note = SMC5-SMC6 complex localization factor protein 2 (901-909)
SYKPIFSTL

SEQ ID NO: 22824 - protein, 7 aa, synthetic construct
  REGION 1..7: note = Nicotinamide phosphoribosyltransferase (17-23)
SYKVTHY

SEQ ID NO: 22825 - protein, 9 aa, synthetic construct
  REGION 1..9: note = Zinc finger CCHC domain-containing protein 24 (70-78)
SYLNSFFQL

SEQ ID NO: 22826 - protein, 9 aa, synthetic construct
  REGION 1..9: note = Glycogenin-1 (194-202)
SYLPAFKVF

SEQ ID NO: 22827 - protein, 9 aa, synthetic construct
  REGION 1..9: note = DNA-directed RNA polymerase III subunit RPC2 (532-540)
SYPNVFLVF

SEQ ID NO: 22828 - protein, 9 aa, synthetic construct
  REGION 1..9: note = Helicase-like transcription factor (29-37)
SYPTFFPRF

SEQ ID NO: 22829 - protein, 9 aa, synthetic construct
  REGION 1..9: note = Nesprin-1 (3393-3401)
SYQDGVRQF

SEQ ID NO: 22830 - protein, 9 aa, synthetic construct
  REGION 1..9: note = RB1-inducible coiled-coil protein 1 (163-171)
SYQKLLFKF

SEQ ID NO: 22831 - protein, 9 aa, synthetic construct
  REGION 1..9: note = Farnesyl pyrophosphate synthase (314-322)
SYSHIMALI

SEQ ID NO: 22832 - protein, 8 aa, synthetic construct
  REGION 1..8: note = 2',3'-cyclic-nucleotide 3'-phosphodiesterase (257-264)
SYSKAFTL

SEQ ID NO: 22833 - protein, 23 aa, synthetic construct
  REGION 1..23: note = HLA class I histocompatibility antigen, A-23 alpha chain (343-365)
SYSQAASSDSAQGSDVSLTACKV

SEQ ID NO: 22834 - protein, 23 aa, synthetic construct
  REGION 1..23: note = HLA class I histocompatibility antigen, A-1 alpha chain (318-340)
SYTQAASSDSAQGSDVSLTACKV

SEQ ID NO: 22835 - protein, 9 aa, synthetic construct
  REGION 1..9: note = Mediator of RNA polymerase II transcription subunit 13-like (933-941)
SYVHKVPSF

SEQ ID NO: 22836 - protein, 6 aa, synthetic construct
  REGION 1..6: note = Amyloid protein-binding protein 2 (340-345)
SYVHQY

SEQ ID NO: 22837 - protein, 9 aa, synthetic construct
  REGION 1..9: note = Melanoma-associated antigen 12 (282-290)
SYVKVLHHL

SEQ ID NO: 22838 - protein, 9 aa, synthetic construct
  REGION 1..9: note Dolichyl-diphosphooligosaccharide-proteinosyltransferase 48 kDa subunit (22-30)
TAARAWALF

SEQ ID NO: 22839 - protein, 9 aa, synthetic construct
  REGION 1..9: note = Protein AATF (30-38)
TAARVIDRF

SEQ ID NO: 22840 - protein, 10 aa, synthetic construct
  REGION 1..10: note Dolichyl-diphosphooligosaccharide-proteinosyltransferase 48 kDa subunit (78-87)
TADDPSLSLI

SEQ ID NO: 22841 - protein, 8 aa, synthetic construct
  REGION 1..8: note = Triokinase/FMN cyclase (233-240)
TADEIVKL

SEQ ID NO: 22842 - protein, 9 aa, synthetic construct
  REGION 1..9: note = Calcium homeostasis endoplasmic reticulum protein (170-178)
TADGAHFEL

SEQ ID NO: 22843 - protein, 9 aa, synthetic construct
  REGION 1..9: note = Transducin beta-like protein 3 (197-205)
TADHNLLLY

SEQ ID NO: 22844 - protein, 9 aa, synthetic construct
  REGION 1..9: note = Late secretory pathway protein AVL9 homolog (340-348)
TADVSHTNL

SEQ ID NO: 22845 - protein, 10 aa, synthetic construct
  REGION 1..10: note = Histone acetyltransferase type B catalytic subunit (274-283)
TAEDPSKSYV

SEQ ID NO: 22846 - protein, 21 aa, synthetic construct
  REGION 1..21: note = 3-hydroxyacyl-CoA dehydrogenase type-2 (26-46)
TAERLVGQGASAVLLDLPNSG

SEQ ID NO: 22847 - protein, 8 aa, synthetic construct
  REGION 1..8: note = H(+)/Cl(-) exchange transporter 7 (101-108)
TAFRTVEI

SEQ ID NO: 22848 - protein, 28 aa, synthetic construct
  REGION 1..28: note = Alpha-1,6-mannosylglycoprotein 6-beta-N-acetylglucosaminyltransferase A (288-315)
TAFSGGPLGELVQWSDLITSLYLLGHDI

SEQ ID NO: 22849 - protein, 8 aa, synthetic construct
  REGION 1..8: note = Cleavage and polyadenylation specificity factor subunit 2 (239-246)
TAGRVLEL

SEQ ID NO: 22850 - protein, 9 aa, synthetic construct
  REGION 1..9: note = Biorientation of chromosomes in cell division protein 1-like 1 (1268-1276)
TAKDPSVSI

SEQ ID NO: 22851 - protein, 8 aa, synthetic construct
  REGION 1..8: note = Guanine nucleotide exchange factor for Rab-3A (87-94)
TALKTLVI

SEQ ID NO: 22852 - protein, 25 aa, synthetic construct
  REGION 1..25: note = 60 kDa heat shock protein, mitochondrial (527-551)
TALLDAAGVASLLTTAEVVVTEIPK

SEQ ID NO: 22853 - protein, 28 aa, synthetic construct
  REGION 1..28: note = 60 kDa heat shock protein, mitochondrial (527-554)
TALLDAAGVASLLTTAEVVVTEIPKEEK

SEQ ID NO: 22854 - protein, 14 aa, synthetic construct
  REGION 1..14: note = Plexin-B2 (1522-1535)
TAQILSDLDLTSQR

SEQ ID NO: 22855 - protein, 7 aa, synthetic construct
  REGION 1..7: note = 40S ribosomal protein S19 (60-66)
TARHLYL

SEQ ID NO: 22856 - protein, 16 aa, synthetic construct
  REGION 1..16: note = Zinc finger SWIM domain-containing protein 8 (1087-1102)
TASQRSPSKHGGPSAP

SEQ ID NO: 22857 - protein, 17 aa, synthetic construct
  REGION 1..17: note = Eukaryotic initiation factor 4A-I (83-99)
TATFAISILQQIELDLK

SEQ ID NO: 22858 - protein, 14 aa, synthetic construct
  REGION 1..14: note = Tubulin alpha-1C chain (249-262)
TAVVEPYNSILTTH

SEQ ID NO: 22859 - protein, 10 aa, synthetic construct
  REGION 1..10: note = Endoplasmin (419-428)
TDDFHDMMPK

SEQ ID NO: 22860 - protein, 8 aa, synthetic construct
  REGION 1..8: note = GPI transamidase component PIG-T (162-169)
TDHYFLRY

SEQ ID NO: 22861 - protein, 14 aa, synthetic construct
  REGION 1..14: note = Alpha-enolase (67-80)
TDKVVIGMDVAASE

SEQ ID NO: 22862 - protein, 16 aa, synthetic construct
  REGION 1..16: note = Alpha-enolase (67-82)
TDKVVIGMDVAASEFF

SEQ ID NO: 22863 - protein, 14 aa, synthetic construct
  REGION 1..14: note = 4F2 cell-surface antigen heavy chain (174-187)
TDLLQIDPNFGSKE

SEQ ID NO: 22864 - protein, 15 aa, synthetic construct
  REGION 1..15: note = 4F2 cell-surface antigen heavy chain (174-188)
TDLLQIDPNFGSKED

SEQ ID NO: 22865 - protein, 8 aa, synthetic construct
  REGION 1..8: note = Synaptotagmin-like protein 2 (283-290)
TDSETLRY

SEQ ID NO: 22866 - protein, 7 aa, synthetic construct
  REGION 1..7: note = 40S ribosomal protein SA (150-156)
TDSPLRY

SEQ ID NO: 22867 - protein, 16 aa, synthetic construct
  REGION 1..16: note = Carbonic anhydrase 14 (52-67)
TDSVTFDPDLPALQPH

SEQ ID NO: 22868 - protein, 10 aa, synthetic construct
  REGION 1..10: note = CD44 antigen (47-56)
TEAADLCKAF

SEQ ID NO: 22869 - protein, 9 aa, synthetic construct
  REGION 1..9: note = Rho GTPase-activating protein 5 (467-475)
TEADSKEVY

SEQ ID NO: 22870 - protein, 10 aa, synthetic construct
  REGION 1..10: note = Protein kinase C-binding protein 1 (210-219)
TEAFLADAKW

SEQ ID NO: 22871 - protein, 9 aa, synthetic construct
  REGION 1..9: note = Inosine-5'-monophosphate dehydrogenase 1 isoform f (446-454)
TEAPGEYFF

SEQ ID NO: 22872 - protein, 11 aa, synthetic construct
  REGION 1..11: note = Glycogen phosphorylase, muscle form (672-682)
TEASGTGNMKF

SEQ ID NO: 22873 - protein, 10 aa, synthetic construct
  REGION 1..10: note = Zinc finger BED domain-containing protein 4 (394-403)
TEDLQSHLNP

SEQ ID NO: 22874 - protein, 14 aa, synthetic construct
  REGION 1..14: note = Large neutral amino acids transporter small subunit 1 (264-277)
TEEMINPYRNLPLA

SEQ ID NO: 22875 - protein, 7 aa, synthetic construct
  REGION 1..7: note = Nuclear factor erythroid 2-related factor 1 (9-15)
TEGLLQF

SEQ ID NO: 22876 - protein, 9 aa, synthetic construct
  REGION 1..9: note = G-protein coupled receptor 98 (3712-3720)
TEGQVLSTI

SEQ ID NO: 22877 - protein, 10 aa, synthetic construct
  REGION 1..10: note = Fibronectin isoform 7 (376-385)
TEGRQDGHLW

SEQ ID NO: 22878 - protein, 11 aa, synthetic construct
  REGION 1..11: note = Tribbles homolog 2 (117-127)
TEIILGETKAY

SEQ ID NO: 22879 - protein, 8 aa, synthetic construct
  REGION 1..8: note = Flotillin-2 (60-67)
TEKELLAV

SEQ ID NO: 22880 - protein, 11 aa, synthetic construct
  REGION 1..11: note = Centrosomal protein of 41 kDa (40-50)
TEKLEEIKKNY

SEQ ID NO: 22881 - protein, 11 aa, synthetic construct
  REGION 1..11: note = Integrin alpha-6 (905-915)
TEKQIDDNRKF

SEQ ID NO: 22882 - protein, 9 aa, synthetic construct
  REGION 1..9: note = Programmed cell death protein 5 (103-111)
TEKTTTVKF

SEQ ID NO: 22883 - protein, 10 aa, synthetic construct
  REGION 1..10: note = SH3 domain-binding protein 5 (34-43)
TELEDARQKF

SEQ ID NO: 22884 - protein, 9 aa, synthetic construct
  REGION 1..9: note = Vesicle-trafficking protein SEC22b (140-148)
TELQDVQRI

SEQ ID NO: 22885 - protein, 9 aa, synthetic construct
  REGION 1..9: note = NHL repeat-containing protein 2 (296-304)
TENHLIRKI

SEQ ID NO: 22886 - protein, 7 aa, synthetic construct
  REGION 1..7: note = Zinc finger CCCH domain-containing protein 18 (68-74)
TEPYHNY

SEQ ID NO: 22887 - protein, 10 aa, synthetic construct
  REGION 1..10: note = Baculoviral IAP repeat-containing protein 6 (1992-2001)
TEQLRTIIRY

SEQ ID NO: 22888 - protein, 9 aa, synthetic construct
  REGION 1..9: note = Vacuolar protein sorting-associated protein 13C (969-977)
TEQTVKVAF

SEQ ID NO: 22889 - protein, 9 aa, synthetic construct
  REGION 1..9: note = Centrosomal protein C10orf90 isoform X1 (20-28)
TETAVHRTF

SEQ ID NO: 22890 - protein, 9 aa, synthetic construct
  REGION 1..9: note = Lysosomal-trafficking regulator (2635-2643)
TETELAQRL

SEQ ID NO: 22891 - protein, 11 aa, synthetic construct
  REGION 1..11: note = Receptor-type protein tyrosine phosphatase beta (1331-1341)
TEVLDSHIHAY

SEQ ID NO: 22892 - protein, 9 aa, synthetic construct
  REGION 1..9: note = Apolipoprotein E (36-44)
TEWQSGQRW

SEQ ID NO: 22893 - protein, 9 aa, synthetic construct
  REGION 1..9: note = Calmodulin-regulated spectrin-associated protein 2 (1318-1326)
TEYTGPKLY

SEQ ID NO: 22894 - protein, 9 aa, synthetic construct
  REGION 1..9: note = Telomeric repeat-binding factor 1 (223-231)
TFHSFFQHF

SEQ ID NO: 22895 - protein, 10 aa, synthetic construct
  REGION 1..10: note Dolichyl-diphosphooligosaccharide-proteinosyltransferase subunit 2 (266-275)
TFIADSHQNF

SEQ ID NO: 22896 - protein, 9 aa, synthetic construct
  REGION 1..9: note = Phospholipid transfer protein (118-126)
TFITSGMRF

SEQ ID NO: 22897 - protein, 6 aa, synthetic construct
  REGION 1..6: note = Ras GTPase-activating-like protein IQGAP1 (1614-1619)
TFMLHY

SEQ ID NO: 22898 - protein, 20 aa, synthetic construct
  REGION 1..20: note = ATP synthase-coupling factor 6, mitochondrial (89-108)
TFPTFKFEDPKFEVIEKPQA

SEQ ID NO: 22899 - protein, 9 aa, synthetic construct
  REGION 1..9: note = Zinc finger protein 480 (28-36)
TFRDVAIEF

SEQ ID NO: 22900 - protein, 9 aa, synthetic construct
  REGION 1..9: note = Zinc finger protein 98 (14-22)
TFRDVALEF

SEQ ID NO: 22901 - protein, 9 aa, synthetic construct
  REGION 1..9: note = Zinc finger protein 697 (8-16)
TFSVSSHLF

SEQ ID NO: 22902 - protein, 8 aa, synthetic construct
  REGION 1..8: note = Bestrophin-1 (574-581)
TFTGILGK

SEQ ID NO: 22903 - protein, 10 aa, synthetic construct
  REGION 1..10: note = Glyceraldehyde-3-phosphate dehydrogenase (211-220)
TGAAKAVGKV

SEQ ID NO: 22904 - protein, 15 aa, synthetic construct
  REGION 1..15: note = 4F2 cell-surface antigen heavy chain (120-134)
TGALYRIGDLQAFQG

SEQ ID NO: 22905 - protein, 7 aa, synthetic construct
  REGION 1..7: note = Glia-derived nexin (397-403)
TGAVLFM

SEQ ID NO: 22906 - protein, 9 aa, synthetic construct
  REGION 1..9: note = DNA-dependent protein kinase catalytic subunit (402-410)
TGDDRVYQM

SEQ ID NO: 22907 - protein, 9 aa, synthetic construct
  REGION 1..9: note = Hsp90 co-chaperone Cdc37 (370-378)
TGDEKDVSV

SEQ ID NO: 22908 - protein, 9 aa, synthetic construct
  REGION 1..9: note = Ubiquitin carboxyl-terminal hydrolase 8 (508-516)
TGDVPHTSV

SEQ ID NO: 22909 - protein, 14 aa, synthetic construct
  REGION 1..14: note = Basement membrane-specific heparan sulfate proteoglycan core protein (351-364)
TGEFTVEPVPEGAQ

SEQ ID NO: 22910 - protein, 11 aa, synthetic construct
  REGION 1..11: note = Titin (7053-7063)
TGGVLGASCIL

SEQ ID NO: 22911 - protein, 14 aa, synthetic construct
  REGION 1..14: note = Transferrin receptor protein 1 (518-531)
TGQFLYQDSNWASK

SEQ ID NO: 22912 - protein, 18 aa, synthetic construct
  REGION 1..18: note = Beta-secretase 2 (111-128)
TGSSNFAVAGTPHSYIDT

SEQ ID NO: 22913 - protein, 33 aa, synthetic construct
  REGION 1..33: note = Histone-lysine N-methyltransferase, H3 lysine-36 and H4 lysine-20 specific (2131-2163)
THLAEQSTGMAAQAPKMSDKPPADTNQMLSLSK

SEQ ID NO: 22914 - protein, 9 aa, synthetic construct
  REGION 1..9: note = Ras GTPase-activating-like protein IQGAP1 (446-454)
THPELSVAV

SEQ ID NO: 22915 - protein, 9 aa, synthetic construct
  REGION 1..9: note = Phosphatidylinositol 4-kinase alpha (399-407)
TIDADAPEL

SEQ ID NO: 22916 - protein, 8 aa, synthetic construct
  REGION 1..8: note = Protein prune homolog 2 (1960-1967)
TIDDMSKL

SEQ ID NO: 22917 - protein, 8 aa, synthetic construct
  REGION 1..8: note = DNA damage-binding protein 1 (703-710)
TIDEIQKL

SEQ ID NO: 22918 - protein, 8 aa, synthetic construct
  REGION 1..8: note = Calmodulin (66-73)
TIDFPEFL

SEQ ID NO: 22919 - protein, 8 aa, synthetic construct
  REGION 1..8: note = Filamin-A (2133-2140)
TIDGPSKV

SEQ ID NO: 22920 - protein, 9 aa, synthetic construct
  REGION 1..9: note = Coatomer subunit alpha (591-599)
TIDPTEFKF

SEQ ID NO: 22921 - protein, 9 aa, synthetic construct
  REGION 1..9: note = Alpha-actinin-1 (506-514)
TIDQLYLEY

SEQ ID NO: 22922 - protein, 8 aa, synthetic construct
  REGION 1..8: note = HEAT repeat-containing protein 1 (38-45)
TIDRDTAF

SEQ ID NO: 22923 - protein, 11 aa, synthetic construct
  REGION 1..11: note = Melanoma-associated antigen C2 (347-357)
TIDTADDATVM

SEQ ID NO: 22924 - protein, 9 aa, synthetic construct
  REGION 1..9: note = Vascular endothelial growth factor receptor 2 (1076-1084)
TIFDRVYTI

SEQ ID NO: 22925 - protein, 9 aa, synthetic construct
  REGION 1..9: note = Tripartite motif-containing protein 2 (338-346)
TIIGQPMSV

SEQ ID NO: 22926 - protein, 9 aa, synthetic construct
  REGION 1..9: note = Obscurin-like protein 1 (641-649)
TIIQGTWFL

SEQ ID NO: 22927 - protein, 12 aa, synthetic construct
  REGION 1..12: note = Lysosome-associated membraneoprotein 1 (247-258)
TILPDARDPAFK

SEQ ID NO: 22928 - protein, 9 aa, synthetic construct
  REGION 1..9: note = Eukaryotic translation initiation factor 3 subunit A (435-443)
TILRLLQQV

SEQ ID NO: 22929 - protein, 9 aa, synthetic construct
  REGION 1..9: note = Putative ATP-dependent RNA helicase DHX30 (700-708)
TINDIVHVV

SEQ ID NO: 22930 - protein, 9 aa, synthetic construct
  REGION 1..9: note = Chloride intracellular channel protein 1 (198-206)
TIPEAFRGV

SEQ ID NO: 22931 - protein, 9 aa, synthetic construct
  REGION 1..9: note = Lysosomal-trafficking regulator (1800-1808)
TIQGILHEI

SEQ ID NO: 22932 - protein, 9 aa, synthetic construct
  REGION 1..9: note = Plexin-B3 (1547-1555)
TITQVKEKV

SEQ ID NO: 22933 - protein, 10 aa, synthetic construct
  REGION 1..10: note = Serine/threonine-protein kinase DCLK1 (231-240)
TIVDGPLYTV

SEQ ID NO: 22934 - protein, 9 aa, synthetic construct
  REGION 1..9: note = Phosphopantothenoylcysteine decarboxylase (109-117)
TIVDKVKEV

SEQ ID NO: 22935 - protein, 11 aa, synthetic construct
  REGION 1..11: note = Heat shock protein HSP 90-alpha (90-100)
TIVDTGIGMTK

SEQ ID NO: 22936 - protein, 9 aa, synthetic construct
  REGION 1..9: note = Mitotic checkpoint serine/threonine-protein kinase BUB1 beta (868-876)
TIVEMLHKA

SEQ ID NO: 22937 - protein, 11 aa, synthetic construct
  REGION 1..11: note = Heat shock 70 kDa protein 13 (95-105)
TIYDAKRFIGK

SEQ ID NO: 22938 - protein, 9 aa, synthetic construct
  REGION 1..9: note = Probable dolichyl pyrophosphate Glc1Man9GlcNAc2 alpha-1,3-glucosyltransferase (438-446)
TIYSISSLK

SEQ ID NO: 22939 - protein, 27 aa, synthetic construct
  REGION 1..27: note = Activating signal cointegrator 1 complex subunit 3 (112-138)
TKAIKQMFGPFPSSSATAACNATNRII

SEQ ID NO: 22940 - protein, 27 aa, synthetic construct
  REGION 1..27: note = Transmembrane protease serine 9 (436-462)
TKASMPLAPTMAPAPAAPSTAWPTSPE

SEQ ID NO: 22941 - protein, 9 aa, synthetic construct
  REGION 1..9: note = Protein kinase C delta type (402-410)
TLAAENPFL

SEQ ID NO: 22942 - protein, 9 aa, synthetic construct
  REGION 1..9: note = Hexokinase-2 (389-397)
TLAAVLQRI

SEQ ID NO: 22943 - protein, 9 aa, synthetic construct
  REGION 1..9: note = Protein SOGA1 (670-678)
TLADMKVTL

SEQ ID NO: 22944 - protein, 9 aa, synthetic construct
  REGION 1..9: note = Ethanolaminephosphotransferase 1 (355-363)
TLAHIHYGV

SEQ ID NO: 22945 - protein, 10 aa, synthetic construct
  REGION 1..10: note = WD repeat-containing protein 73 (144-153)
TLAPGVLHGA

SEQ ID NO: 22946 - protein, 9 aa, synthetic construct
  REGION 1..9: note = Protein kinase C delta-binding protein (77-85)
TLAQLLAKA

SEQ ID NO: 22947 - protein, 11 aa, synthetic construct
  REGION 1..11: note = E3 ubiquitin-protein ligase UBR4 (345-355)
TLDAAISKVQV

SEQ ID NO: 22948 - protein, 9 aa, synthetic construct
  REGION 1..9: note = Melanoma-associated antigen C2 (140-148)
TLDEKVAEL

SEQ ID NO: 22949 - protein, 9 aa, synthetic construct
  REGION 1..9: note = Lysine-specific demethylase 5C (1342-1350)
TLDENHSIP

SEQ ID NO: 22950 - protein, 10 aa, synthetic construct
  REGION 1..10: note = Calcium-dependent secretion activator 2 (651-660)
TLDHRLNDSY

SEQ ID NO: 22951 - protein, 8 aa, synthetic construct
  REGION 1..8: note = Rho guanine nucleotide exchange factor 2 (487-494)
TLDKPSVV

SEQ ID NO: 22952 - protein, 9 aa, synthetic construct
  REGION 1..9: note = Alpha-mannosidase 2C1 (688-696)
TLDNGIIRV

SEQ ID NO: 22953 - protein, 9 aa, synthetic construct
  REGION 1..9: note = RING finger protein 150 (368-376)
TLDPAVRTV

SEQ ID NO: 22954 - protein, 9 aa, synthetic construct
  REGION 1..9: note = Proteinase-activated receptor 1 (37-45)
TLDPRSFLL

SEQ ID NO: 22955 - protein, 8 aa, synthetic construct
  REGION 1..8: note = Eukaryotic initiation factor 4A-I (242-249)
TLEGIRQF

SEQ ID NO: 22956 - protein, 15 aa, synthetic construct
  REGION 1..15: note = Kin of IRRE-like protein 1 (337-351)
TLERYTVERTNSGSG

SEQ ID NO: 22957 - protein, 9 aa, synthetic construct
  REGION 1..9: note = TBC1 domain family member 4 (1082-1090)
TLFASQFSL

SEQ ID NO: 22958 - protein, 9 aa, synthetic construct
  REGION 1..9: note = Centrosomal protein C10orf90 (172-180)
TLFQAPPAL

SEQ ID NO: 22959 - protein, 11 aa, synthetic construct
  REGION 1..11: note = Ubiquitin carboxyl-terminal hydrolase 11 (92-102)
TLFQDEINWRL

SEQ ID NO: 22960 - protein, 9 aa, synthetic construct
  REGION 1..9: note = Transmembraneoprotein NMB (202-210)
TLGPQLMEV

SEQ ID NO: 22961 - protein, 10 aa, synthetic construct
  REGION 1..10: note = Transmembrane channel-like protein 4 (331-340)
TLGQQARVWL

SEQ ID NO: 22962 - protein, 8 aa, synthetic construct
  REGION 1..8: note = E3 ubiquitin-protein ligase TRIP12 (804-811)
TLGRVYTI

SEQ ID NO: 22963 - protein, 8 aa, synthetic construct
  REGION 1..8: note = Ubiquitin-60S ribosomal protein L40 (71-78)
TLHLVLRL

SEQ ID NO: 22964 - protein, 9 aa, synthetic construct
  REGION 1..9: note = Alpha-adducin (222-230)
TLHSAIYAA

SEQ ID NO: 22965 - protein, 9 aa, synthetic construct
  REGION 1..9: note = Peptidyl-tRNA hydrolase 2, mitochondrial (125-133)
TLIALLAHA

SEQ ID NO: 22966 - protein, 9 aa, synthetic construct
  REGION 1..9: note = Nebulin (5609-5617)
TLIESDLKY

SEQ ID NO: 22967 - protein, 11 aa, synthetic construct
  REGION 1..11: note = Ethanolamine-phosphate phospho-lyase (355-365)
TLIGDIRGIGL

SEQ ID NO: 22968 - protein, 9 aa, synthetic construct
  REGION 1..9: note = COP9 signalosome complex subunit 7a (29-37)
TLIHQVLEA

SEQ ID NO: 22969 - protein, 9 aa, synthetic construct
  REGION 1..9: note = Translocating chain-associated membrane protein 1 (264-272)
TLILSVLTV

SEQ ID NO: 22970 - protein, 9 aa, synthetic construct
  REGION 1..9: note = Essential MCU regulator, mitochondrial (82-90)
TLISKNFAA

SEQ ID NO: 22971 - protein, 14 aa, synthetic construct
  REGION 1..14: note = Ryanodine receptor 1 (3790-3803)
TLKLGISILNGGNA

SEQ ID NO: 22972 - protein, 10 aa, synthetic construct
  REGION 1..10: note = General transcription factor IIH subunit 3 (90-99)
TLLAGSLAKA

SEQ ID NO: 22973 - protein, 12 aa, synthetic construct
  REGION 1..12: note = ETS translocation variant 5 (376-387)
TLLDDPANAHFI

SEQ ID NO: 22974 - protein, 9 aa, synthetic construct
  REGION 1..9: note = Protein kinase C delta-binding protein (27-35)
TLLEKLASM

SEQ ID NO: 22975 - protein, 9 aa, synthetic construct
  REGION 1..9: note = Spermatogenesis-associated protein 20 (211-219)
TLLENSQRV

SEQ ID NO: 22976 - protein, 9 aa, synthetic construct
  REGION 1..9: note = E3 ubiquitin-protein ligase HERC2 (204-212)
TLLESIQHV

SEQ ID NO: 22977 - protein, 9 aa, synthetic construct
  REGION 1..9: note = Putative WAS protein family homolog 3 (362-370)
TLLESIRQA

SEQ ID NO: 22978 - protein, 9 aa, synthetic construct
  REGION 1..9: note = WD repeat-containing protein 26 (56-64)
TLLGIIVRM

SEQ ID NO: 22979 - protein, 26 aa, synthetic construct
  REGION 1..26: note = Vimentin (275-300)
TLLIKTVETRDGQVINETSQHHDDLE

SEQ ID NO: 22980 - protein, 9 aa, synthetic construct
  REGION 1..9: note = Maltase-glucoamylase (871-879)
TLLPYLYTL

SEQ ID NO: 22981 - protein, 9 aa, synthetic construct
  REGION 1..9: note = Vacuolar protein-sorting-associated protein 25 (148-156)
TLLRALQAL

SEQ ID NO: 22982 - protein, 9 aa, synthetic construct
  REGION 1..9: note = Histone acetyltransferase KAT2B (310-318)
TLLRSVFTV

SEQ ID NO: 22983 - protein, 11 aa, synthetic construct
  REGION 1..11: note = Importin-7 (679-689)
TLLSDTKYLEM

SEQ ID NO: 22984 - protein, 9 aa, synthetic construct
  REGION 1..9: note = Integrator complex subunit 2 (1086-1094)
TLLTVLTQA

SEQ ID NO: 22985 - protein, 11 aa, synthetic construct
  REGION 1..11: note = Rho GTPase-activating protein 7 (136-146)
TLMDLSERQEV

SEQ ID NO: 22986 - protein, 7 aa, synthetic construct
  REGION 1..7: note = Glutamine-fructose-6-phosphate aminotransferase (isomerizing) 1 (429-435)
TLMGLRY

SEQ ID NO: 22987 - protein, 9 aa, synthetic construct
  REGION 1..9: note = Ubiquitin conjugation factor E4 B (1239-1247)
TLMTDPVRL

SEQ ID NO: 22988 - protein, 9 aa, synthetic construct
  REGION 1..9: note = Nuclear factor related to kappa-B-binding protein (308-316)
TLNDIMTRV

SEQ ID NO: 22989 - protein, 9 aa, synthetic construct
  REGION 1..9: note = EMILIN-1 (236-244)
TLNEIQHQL

SEQ ID NO: 22990 - protein, 9 aa, synthetic construct
  REGION 1..9: note = Kelch-like protein 21 (467-475)
TLNGLMYFV

SEQ ID NO: 22991 - protein, 11 aa, synthetic construct
  REGION 1..11: note = Nuclear pore complex protein Nup214 (188-198)
TLPSTVAVTSV

SEQ ID NO: 22992 - protein, 9 aa, synthetic construct
  REGION 1..9: note = Nuclear mitotic apparatus protein 1 (151-159)
TLQEALAHA

SEQ ID NO: 22993 - protein, 9 aa, synthetic construct
  REGION 1..9: note = DENN domain-containing protein 5A (930-938)
TLQEFNITL

SEQ ID NO: 22994 - protein, 9 aa, synthetic construct
  REGION 1..9: note = Uveal autoantigen with coiled-coil domains and ankyrin repeats (714-722)
TLQKEIEKV

SEQ ID NO: 22995 - protein, 9 aa, synthetic construct
  REGION 1..9: note = Glycogen phosphorylase, liver form (95-103)
TLQNTMINL

SEQ ID NO: 22996 - protein, 10 aa, synthetic construct
  REGION 1..10: note = Hemicentin-1 (4435-4444)
TLQSPPIITL

SEQ ID NO: 22997 - protein, 9 aa, synthetic construct
  REGION 1..9: note = Interleukin-6 receptor subunit beta (3-11)
TLQTWLVQA

SEQ ID NO: 22998 - protein, 9 aa, synthetic construct
  REGION 1..9: note = Alpha-actinin-4 (226-234)
TLSDIKALI

SEQ ID NO: 22999 - protein, 9 aa, synthetic construct
  REGION 1..9: note = Nucleolar pre-ribosomal-associated protein 1 (546-554)
TLSEDMILL

SEQ ID NO: 23000 - protein, 9 aa, synthetic construct
  REGION 1..9: note = Serine/threonine-protein kinase ULK2 (102-110)
TLSEDTIRV

SEQ ID NO: 23001 - protein, 9 aa, synthetic construct
  REGION 1..9: note = Alpha-actinin-1 (426-434)
TLSEIKALL

SEQ ID NO: 23002 - protein, 11 aa, synthetic construct
  REGION 1..11: note = Ribosomal protein S6 kinase beta-1 (376-386)
TLSESANQVFL

SEQ ID NO: 23003 - protein, 11 aa, synthetic construct
  REGION 1..11: note = TRPM8 channel-associated factor 1 (309-319)
TLSGLLAVGGI

SEQ ID NO: 23004 - protein, 9 aa, synthetic construct
  REGION 1..9: note = RRP12-like protein (274-282)
TLSHVLVTA

SEQ ID NO: 23005 - protein, 9 aa, synthetic construct
  REGION 1..9: note = CLIP-associating protein 1 (164-172)
TLSKIVPHI

SEQ ID NO: 23006 - protein, 10 aa, synthetic construct
  REGION 1..10: note = Biorientation of chromosomes in cell division protein 1-like 1 (282-291)
TLSPVKAGPA

SEQ ID NO: 23007 - protein, 14 aa, synthetic construct
  REGION 1..14: note = Beta-2-microglobulin (85-98)
TLSQPKIVKWDRDM

SEQ ID NO: 23008 - protein, 9 aa, synthetic construct
  REGION 1..9: note = Laminin subunit gamma-1 (1109-1117)
TLSSQISRL

SEQ ID NO: 23009 - protein, 27 aa, synthetic construct
  REGION 1..27: note = Heat shock cognate 71 kDa protein (273-299)
TLSSSTQASIEIDSLYEGIDFYTSITR

SEQ ID NO: 23010 - protein, 27 aa, synthetic construct
  REGION 1..27: note = Heat shock 70 kDa protein 1B (273-299)
TLSSSTQASLEIDSLFEGIDFYTSITR

SEQ ID NO: 23011 - protein, 9 aa, synthetic construct
  REGION 1..9: note = MAX gene-associated protein (1410-1418)
TLSTVISKV

SEQ ID NO: 23012 - protein, 11 aa, synthetic construct
  REGION 1..11: note = Semaphorin-4C (57-67)
TLTEPTGLLYV

SEQ ID NO: 23013 - protein, 9 aa, synthetic construct
  REGION 1..9: note = Ras GTPase-activating protein 3 (509-517)
TLTLISKTV

SEQ ID NO: 23014 - protein, 10 aa, synthetic construct
  REGION 1..10: note = 26S proteasome non-ATPase regulatory subunit 12 (319-328)
TLVEDYGMEL

SEQ ID NO: 23015 - protein, 9 aa, synthetic construct
  REGION 1..9: note = Aggrecan core protein (1921-1929)
TLVESVTQA

SEQ ID NO: 23016 - protein, 9 aa, synthetic construct
  REGION 1..9: note = WD repeat-containing protein 5B (36-44)
TLVGHTEAV

SEQ ID NO: 23017 - protein, 9 aa, synthetic construct
  REGION 1..9: note = Transcription factor SOX-9 (87-95)
TLVPMPVRV

SEQ ID NO: 23018 - protein, 9 aa, synthetic construct
  REGION 1..9: note = Eukaryotic translation initiation factor 4 gamma 1 (1438-1446)
TLVRALMTA

SEQ ID NO: 23019 - protein, 9 aa, synthetic construct
  REGION 1..9: note = Cyclin-dependent kinase 3 (165-173)
TLWYRAPEI

SEQ ID NO: 23020 - protein, 9 aa, synthetic construct
  REGION 1..9: note = Cyclin-dependent kinase 11B (347-355)
TLWYRAPEL

SEQ ID NO: 23021 - protein, 9 aa, synthetic construct
  REGION 1..9: note = Cyclin-dependent kinase 4 (103-111)
TLWYRAPEV

SEQ ID NO: 23022 - protein, 11 aa, synthetic construct
  REGION 1..11: note = Cyclin-dependent kinase 4 (103-113)
TLWYRAPEVLL

SEQ ID NO: 23023 - protein, 9 aa, synthetic construct
  REGION 1..9: note = Cyclin-dependent kinase 9 (191-199)
TLWYRPPEL

SEQ ID NO: 23024 - protein, 9 aa, synthetic construct
  REGION 1..9: note = Bifunctional lysine-specific demethylase and histidyl-hydroxylase NO66 (625-633)
TLYDKGLLL

SEQ ID NO: 23025 - protein, 9 aa, synthetic construct
  REGION 1..9: note = Ubiquitin-conjugating enzyme E2 G1 (48-56)
TLYEGGVFK

SEQ ID NO: 23026 - protein, 9 aa, synthetic construct
  REGION 1..9: note = Vacuolar protein sorting-associated protein 13B (1255-1263)
TMAGPVPTS

SEQ ID NO: 23027 - protein, 8 aa, synthetic construct
  REGION 1..8: note = Insulin receptor substrate 2 (544-551)
TMDRPLSH

SEQ ID NO: 23028 - protein, 9 aa, synthetic construct
  REGION 1..9: note = Polyadenylate-binding protein 1 (489-497)
TMGPRPAAA

SEQ ID NO: 23029 - protein, 10 aa, synthetic construct
  REGION 1..10: note = ER membrane protein complex subunit 1 (975-984)
TMITKRLAQV

SEQ ID NO: 23030 - protein, 8 aa, synthetic construct
  REGION 1..8: note = Chondroitin sulfate proteoglycan 4 (21-28)
TMLARLAS

SEQ ID NO: 23031 - protein, 9 aa, synthetic construct
  REGION 1..9: note = Protein wntless homolog (257-265)
TMMSRPPVL

SEQ ID NO: 23032 - protein, 16 aa, synthetic construct
  REGION 1..16: note = Cytoplasmic polyadenylation element-binding protein 2 (92-107)
TMQDELLLGLTQQPAR

SEQ ID NO: 23033 - protein, 9 aa, synthetic construct
  REGION 1..9: note = Gamma-aminobutyric acid receptor subunit beta-2 (6-14)
TMTTINTHL

SEQ ID NO: 23034 - protein, 9 aa, synthetic construct
  REGION 1..9: note = Eukaryotic translation initiation factor 4 gamma 1 (249-257)
TMTTIQMSV

SEQ ID NO: 23035 - protein, 7 aa, synthetic construct
  REGION 1..7: note = Cyclin-dependent kinase 13 (257-263)
TNKVITL

SEQ ID NO: 23036 - protein, 11 aa, synthetic construct
  REGION 1..11: note = Ankyrin-3 (871-881)
TNVSARFWLAD

SEQ ID NO: 23037 - protein, 9 aa, synthetic construct
  REGION 1..9: note = Guanine nucleotide exchange factor for Rab-3A (97-105)
TPASPNREL

SEQ ID NO: 23038 - protein, 13 aa, synthetic construct
  REGION 1..13: note = Sterol regulatory element-binding protein 1 (959-971)
TPASSSIDKAVQL

SEQ ID NO: 23039 - protein, 16 aa, synthetic construct
  REGION 1..16: note = Clathrin heavy chain 1 (394-409)
TPDTIRRFQSVPAQPG

SEQ ID NO: 23040 - protein, 7 aa, synthetic construct
  REGION 1..7: note = TRAF2 and NCK-interacting protein kinase (190-196)
TPEIRKY

SEQ ID NO: 23041 - protein, 8 aa, synthetic construct
  REGION 1..8: note = Importin-7 (508-515)
TPFIRPVM

SEQ ID NO: 23042 - protein, 9 aa, synthetic construct
  REGION 1..9: note = (Pyruvate dehydrogenase (acetyl-transferring))-phosphatase 1, mitochondrial (83-91)
TPHPAYATF

SEQ ID NO: 23043 - protein, 13 aa, synthetic construct
  REGION 1..13: note = Zinc finger protein 354B (90-102)
TPKMTKSTQTQDS

SEQ ID NO: 23044 - protein, 8 aa, synthetic construct
  REGION 1..8: note = ATP-dependent RNA helicase DDX51 (308-315)
TPLRVSLV

SEQ ID NO: 23045 - protein, 10 aa, synthetic construct
  REGION 1..10: note = Homeobox protein TGIF1 (249-258)
TPPPTPPDLN

SEQ ID NO: 23046 - protein, 21 aa, synthetic construct
  REGION 1..21: note = Annexin A2 (19-39)
TPPSAYGSVKAYTNFDAERDA

SEQ ID NO: 23047 - protein, 11 aa, synthetic construct
  REGION 1..11: note = Nodal modulator 1 (365-375)
TPQLADIIATG

SEQ ID NO: 23048 - protein, 9 aa, synthetic construct
  REGION 1..9: note = Glycogen phosphorylase, brain form (48-56)
TPRDYFFAL

SEQ ID NO: 23049 - protein, 9 aa, synthetic construct
  REGION 1..9: note = Sialidase-1 (85-93)
TPRGTLLAF

SEQ ID NO: 23050 - protein, 9 aa, synthetic construct
  REGION 1..9: note = DNA-directed RNA polymerase III subunit RPC1 (167-175)
TPRNGEPLI

SEQ ID NO: 23051 - protein, 9 aa, synthetic construct
  REGION 1..9: note = E3 ubiquitin-protein ligase RNF169 (410-418)
TPRNLNRSL

SEQ ID NO: 23052 - protein, 9 aa, synthetic construct
  REGION 1..9: note = Galactose-3-O-sulfotransferase 4 (2-10)
TPRSPTSAF

SEQ ID NO: 23053 - protein, 10 aa, synthetic construct
  REGION 1..10: note = Rho GTPase-activating protein 7 (170-179)
TPRTNSVISV

SEQ ID NO: 23054 - protein, 29 aa, synthetic construct
  REGION 1..29: note = Beta-2-microglobulin (70-98)
TPTEKDEYACRVNHVTLSQPKIVKWDRDM

SEQ ID NO: 23055 - protein, 21 aa, synthetic construct
  REGION 1..21: note = HLA class I histocompatibility antigen, A-1 alpha chain (320-340)
TQAASSDSAQGSDVSLTACKV

SEQ ID NO: 23056 - protein, 11 aa, synthetic construct
  REGION 1..11: note = NADH dehydrogenase (ubiquinone) iron-sulfur protein 2, mitochondrial (453-463)
TQDIVFGEVDR

SEQ ID NO: 23057 - protein, 10 aa, synthetic construct
  REGION 1..10: note = Myosin-IIIa (288-297)
TQIEGKDVML

SEQ ID NO: 23058 - protein, 14 aa, synthetic construct
  REGION 1..14: note = Basement membrane-specific heparan sulfate proteoglycan core protein (2340-2353)
TQPIRIEPSSSQVA

SEQ ID NO: 23059 - protein, 15 aa, synthetic construct
  REGION 1..15: note = Basement membrane-specific heparan sulfate proteoglycan core protein (2340-2354)
TQPIRIEPSSSQVAE

SEQ ID NO: 23060 - protein, 11 aa, synthetic construct
  REGION 1..11: note = Regulator of nonsense transcripts 1 (44-54)
TQTPPGGPGGP

SEQ ID NO: 23061 - protein, 9 aa, synthetic construct
  REGION 1..9: note = Cytoplasmic FMR1-interacting protein 1 (680-688)
TRFNKQFLY

SEQ ID NO: 23062 - protein, 10 aa, synthetic construct
  REGION 1..10: note = Alpha-1-syntrophin (178-187)
TRHGVDTHLF

SEQ ID NO: 23063 - protein, 10 aa, synthetic construct
  REGION 1..10: note = Peroxisomal membrane protein PMP34 (90-99)
TRLKLQGAKF

SEQ ID NO: 23064 - protein, 9 aa, synthetic construct
  REGION 1..9: note = Maltase-glucoamylase (1080-1088)
TRLPSQYIY

SEQ ID NO: 23065 - protein, 9 aa, synthetic construct
  REGION 1..9: note = Protein disulfide-isomerase A5 (45-53)
TRNNVLVLY

SEQ ID NO: 23066 - protein, 10 aa, synthetic construct
  REGION 1..10: note = HLA class I histocompatibility antigen, Cw-7 alpha chain (257-266)
TRPAGDGTFQ

SEQ ID NO: 23067 - protein, 10 aa, synthetic construct
  REGION 1..10: note = L-dopachrome tautomerase (68-77)
TRPWSGPYIL

SEQ ID NO: 23068 - protein, 9 aa, synthetic construct
  REGION 1..9: note = Glycerol-3-phosphate acyltransferase 3 (128-136)
TRTNVNFQY

SEQ ID NO: 23069 - protein, 9 aa, synthetic construct
  REGION 1..9: note = Multiple PDZ domain protein (66-74)
TSATSNIEY

SEQ ID NO: 23070 - protein, 10 aa, synthetic construct
  REGION 1..10: note = Protein prune homolog 2 (1091-1100)
TSDGMNFTKY

SEQ ID NO: 23071 - protein, 9 aa, synthetic construct
  REGION 1..9: note = Bifunctional glutamate/proline-tRNA ligase (269-277)
TSDHFETIM

SEQ ID NO: 23072 - protein, 9 aa, synthetic construct
  REGION 1..9: note = ATP-dependent RNA helicase DDX50 (268-276)
TSDKGFVTM

SEQ ID NO: 23073 - protein, 8 aa, synthetic construct
  REGION 1..8: note = Ubinuclein-2 (527-534)
TSDKPLMY

SEQ ID NO: 23074 - protein, 10 aa, synthetic construct
  REGION 1..10: note = Beta-1-syntrophin (132-141)
TSDPPSSQSF

SEQ ID NO: 23075 - protein, 8 aa, synthetic construct
  REGION 1..8: note = Polymerase delta-interacting protein 3 (356-363)
TSDQPILL

SEQ ID NO: 23076 - protein, 9 aa, synthetic construct
  REGION 1..9: note = HEAT repeat-containing protein 5A (1033-1041)
TSENAKLHY

SEQ ID NO: 23077 - protein, 10 aa, synthetic construct
  REGION 1..10: note = HEAT repeat-containing protein 5A (1033-1042)
TSENAKLHYY

SEQ ID NO: 23078 - protein, 8 aa, synthetic construct
  REGION 1..8: note = Nuclear pore complex protein Nup205 (1076-1083)
TSGPTMRY

SEQ ID NO: 23079 - protein, 10 aa, synthetic construct
  REGION 1..10: note = GREB1-like protein (1129-1138)
TSGSIMENGV

SEQ ID NO: 23080 - protein, 9 aa, synthetic construct
  REGION 1..9: note = E3 ubiquitin-protein ligase UBR4 (516-524)
TSIQRIQRL

SEQ ID NO: 23081 - protein, 9 aa, synthetic construct
  REGION 1..9: note Dolichyl-diphosphooligosaccharide-proteinosyltransferase subunit 1 (228-236)
TSMTRVIEV

SEQ ID NO: 23082 - protein, 13 aa, synthetic construct
  REGION 1..13: note = Treacle protein (596-608)
TSPAGSSPAVAGG

SEQ ID NO: 23083 - protein, 8 aa, synthetic construct
  REGION 1..8: note = Chromodomain Y-like protein (94-101)
TSPKALVI

SEQ ID NO: 23084 - protein, 9 aa, synthetic construct
  REGION 1..9: note = Mitogen-activated protein kinase kinase kinase 14 (448-456)
TSPRIVPLY

SEQ ID NO: 23085 - protein, 9 aa, synthetic construct
  REGION 1..9: note = Interferon alpha-inducible protein 27, mitochondrial (12-20)
TSVAKVVRV

SEQ ID NO: 23086 - protein, 11 aa, synthetic construct
  REGION 1..11: note = RNA binding protein fox-1 homolog 2 (243-253)
TTAAAFRGAHL

SEQ ID NO: 23087 - protein, 10 aa, synthetic construct
  REGION 1..10: note = Transcriptional regulator ATRX (461-470)
TTAKVTKELY

SEQ ID NO: 23088 - protein, 16 aa, synthetic construct
  REGION 1..16: note = ATP-citrate synthase (677-692)
TTDGVYEGVAIGGDRY

SEQ ID NO: 23089 - protein, 9 aa, synthetic construct
  REGION 1..9: note = Hemicentin-1 (97-105)
TTDPKKFQY

SEQ ID NO: 23090 - protein, 7 aa, synthetic construct
  REGION 1..7: note = Elongation factor 1-alpha 1 (23-29)
TTGHLIY

SEQ ID NO: 23091 - protein, 9 aa, synthetic construct
  REGION 1..9: note = Signal-induced proliferation-associated 1-like protein 3 (1102-1110)
TTPGHAQSL

SEQ ID NO: 23092 - protein, 9 aa, synthetic construct
  REGION 1..9: note = Disabled homolog 2-interacting protein (945-953)
TTQKLVLEY

SEQ ID NO: 23093 - protein, 9 aa, synthetic construct
  REGION 1..9: note = Basement membrane-specific heparan sulfate proteoglycan core protein (3563-3571)
TTQSHVLLL

SEQ ID NO: 23094 - protein, 9 aa, synthetic construct
  REGION 1..9: note = Importin-4 (577-585)
TVAEKSFAV

SEQ ID NO: 23095 - protein, 9 aa, synthetic construct
  REGION 1..9: note = Nicotinamide phosphoribosyltransferase (220-228)
TVAGLALIK

SEQ ID NO: 23096 - protein, 9 aa, synthetic construct
  REGION 1..9: note = Keratin, type I cytoskeletal 18 (86-94)
TVDNARIVL

SEQ ID NO: 23097 - protein, 8 aa, synthetic construct
  REGION 1..8: note = Signal-induced proliferation-associated 1-like protein 2 (821-828)
TVDTSVKF

SEQ ID NO: 23098 - protein, 21 aa, synthetic construct
  REGION 1..21: note = Vimentin (446-466)
TVETRDGQVINETSQHHDDLE

SEQ ID NO: 23099 - protein, 9 aa, synthetic construct
  REGION 1..9: note = Runt-related transcription factor 1 (36-44)
TVFTNPPQV

SEQ ID NO: 23100 - protein, 9 aa, synthetic construct
  REGION 1..9: note = Proto-oncogene tyrosine-protein kinase receptor Ret (350-358)
TVHDYRLVL

SEQ ID NO: 23101 - protein, 16 aa, synthetic construct
  REGION 1..16: note = Endoplasmin (688-703)
TVLDLAVVLFETATLR

SEQ ID NO: 23102 - protein, 9 aa, synthetic construct
  REGION 1..9: note = Transmembrane protein 9 (177-185)
TVLERVEGA

SEQ ID NO: 23103 - protein, 10 aa, synthetic construct
  REGION 1..10: note = Cytoskeleton-associated protein 5 (947-956)
TVLGDSKNNV

SEQ ID NO: 23104 - protein, 10 aa, synthetic construct
  REGION 1..10: note = DNA annealing helicase and endonuclease ZRANB3 (73-82)
TVLGYGLLTA

SEQ ID NO: 23105 - protein, 9 aa, synthetic construct
  REGION 1..9: note = HEAT repeat-containing protein 1 (1553-1561)
TVLGYISAV

SEQ ID NO: 23106 - protein, 15 aa, synthetic construct
  REGION 1..15: note = Actin, cytoplasmic 2 (36-50)
TVLSGGTTMYPGIAD

SEQ ID NO: 23107 - protein, 9 aa, synthetic construct
  REGION 1..9: note = Neuron navigator 2 (1903-1911)
TVMQLRNEL

SEQ ID NO: 23108 - protein, 9 aa, synthetic construct
  REGION 1..9: note = Ryanodine receptor 2 (3867-3875)
TVNIIISTV

SEQ ID NO: 23109 - protein, 30 aa, synthetic construct
  REGION 1..30: note = Fructose-bisphosphate aldolase A (314-343)
TVPPAVTGITFLSGGQSEEEASINLNAINK

SEQ ID NO: 23110 - protein, 9 aa, synthetic construct
  REGION 1..9: note = Mucin-16 (11203-11211)
TVQGLVTSL

SEQ ID NO: 23111 - protein, 28 aa, synthetic construct
  REGION 1..28: note = Nucleophosmin (46-73)
TVSLGAGAKDELHIVEAEAMNYEGSPIK

SEQ ID NO: 23112 - protein, 11 aa, synthetic construct
  REGION 1..11: note = Complement C4-A (408-418)
TVSSPGSVPEV

SEQ ID NO: 23113 - protein, 9 aa, synthetic construct
  REGION 1..9: note = Exportin-6 (585-593)
TVVERLVKV

SEQ ID NO: 23114 - protein, 11 aa, synthetic construct
  REGION 1..11: note = U4/U6 small nuclear ribonucleoprotein Prp3 (29-39)
TVVTAALNCVG

SEQ ID NO: 23115 - protein, 10 aa, synthetic construct
  REGION 1..10: note = Multidrug resistance-associated protein 7 (941-950)
TVYATIAGVN

SEQ ID NO: 23116 - protein, 10 aa, synthetic construct
  REGION 1..10: note = MMS19 nucleotide excision repair protein homolog (150-159)
TVYNIITNFM

SEQ ID NO: 23117 - protein, 9 aa, synthetic construct
  REGION 1..9: note = RNA-binding protein 26 (673-681)
TVYNPAALK

SEQ ID NO: 23118 - protein, 14 aa, synthetic construct
  REGION 1..14: note = Protein SZT2 (605-618)
TWGLPHAPPSPGPL

SEQ ID NO: 23119 - protein, 10 aa, synthetic construct
  REGION 1..10: note = Tyrosine-protein phosphatase non-receptor type substrate 1 (472-481)
TYADLDMVHL

SEQ ID NO: 23120 - protein, 11 aa, synthetic construct
  REGION 1..11: note = Serine/threonine-protein kinase SMG1 (743-753)
TYAPLFSLPSF

SEQ ID NO: 23121 - protein, 9 aa, synthetic construct
  REGION 1..9: note = Muskelin (680-688)
TYAQRTQLF

SEQ ID NO: 23122 - protein, 8 aa, synthetic construct
  REGION 1..8: note = Low-density lipoprotein receptor-related protein 2 (585-592)
TYDGIQRK

SEQ ID NO: 23123 - protein, 9 aa, synthetic construct
  REGION 1..9: note = Diamine acetyltransferase 1 (80-88)
TYDPWIGKL

SEQ ID NO: 23124 - protein, 8 aa, synthetic construct
  REGION 1..8: note = L-dopachrome tautomerase (302-309)
TYEGLLRR

SEQ ID NO: 23125 - protein, 9 aa, synthetic construct
  REGION 1..9: note = GPI-anchor transamidase (386-394)
TYGIKHMKF

SEQ ID NO: 23126 - protein, 9 aa, synthetic construct
  REGION 1..9: note = Ral GTPase-activating protein subunit beta (252-260)
TYGPSFPAF

SEQ ID NO: 23127 - protein, 9 aa, synthetic construct
  REGION 1..9: note = Talin-1 (307-315)
TYGVSFFLV

SEQ ID NO: 23128 - protein, 8 aa, synthetic construct
  REGION 1..8: note = Parafibromin (314-321)
TYHGMTLK

SEQ ID NO: 23129 - protein, 9 aa, synthetic construct
  REGION 1..9: note = Down syndrome critical region protein 3 (108-116)
TYHGVFVNI

SEQ ID NO: 23130 - protein, 9 aa, synthetic construct
  REGION 1..9: note = AP-2 complex subunit alpha-1 (544-552)
TYIKFINLF

SEQ ID NO: 23131 - protein, 10 aa, synthetic construct
  REGION 1..10: note = Transmembrane protein 231 (34-43)
TYIPPLLVAF

SEQ ID NO: 23132 - protein, 9 aa, synthetic construct
  REGION 1..9: note = Phosphatidylinositol 4-phosphate 3-kinase C2 domain-containing subunit alpha (731-739)
TYKNFFYLI

SEQ ID NO: 23133 - protein, 9 aa, synthetic construct
  REGION 1..9: note = Serine-protein kinase ATM (2359-2367)
TYLEKAVEV

SEQ ID NO: 23134 - protein, 9 aa, synthetic construct
  REGION 1..9: note = T-complex protein 1 subunit theta (427-435)
TYLGKYWAI

SEQ ID NO: 23135 - protein, 9 aa, synthetic construct
  REGION 1..9: note = G1/S-specific cyclin-E1 (111-119)
TYLRDQHFL

SEQ ID NO: 23136 - protein, 9 aa, synthetic construct
  REGION 1..9: note = Digestive organ expansion factor homolog (692-700)
TYPHFYSEI

SEQ ID NO: 23137 - protein, 9 aa, synthetic construct
  REGION 1..9: note = Sorbin and SH3 domain-containing protein 2 (215-223)
TYPQHAQSL

SEQ ID NO: 23138 - protein, 9 aa, synthetic construct
  REGION 1..9: note = Exportin-T (46-54)
TYSDDHVKF

SEQ ID NO: 23139 - protein, 9 aa, synthetic construct
  REGION 1..9: note = Nuclear receptor subfamily 2 group C member 2 (532-540)
TYSEDTYRL

SEQ ID NO: 23140 - protein, 9 aa, synthetic construct
  REGION 1..9: note = SRSF protein kinase 2 (426-434)
TYSSSYEQF

SEQ ID NO: 23141 - protein, 9 aa, synthetic construct
  REGION 1..9: note = Cartilage acidic protein 1 (144-152)
TYTDKLFKF

SEQ ID NO: 23142 - protein, 9 aa, synthetic construct
  REGION 1..9: note = Cation-independent mannose-6-phosphate receptor (884-892)
TYTTRIHLV

SEQ ID NO: 23143 - protein, 9 aa, synthetic construct
  REGION 1..9: note = Cathepsin D (130-138)
TYVKNGTSF

SEQ ID NO: 23144 - protein, 12 aa, synthetic construct
  REGION 1..12: note = Protein YIF1B (149-160)
TYVLVAGLALGT

SEQ ID NO: 23145 - protein, 9 aa, synthetic construct
  REGION 1..9: note = Histone-binding protein RBBP4 (186-194)
VADDQKLMI

SEQ ID NO: 23146 - protein, 9 aa, synthetic construct
  REGION 1..9: note = E3 ubiquitin-protein ligase TRIM56 (523-531)
VADEQNRAL

SEQ ID NO: 23147 - protein, 8 aa, synthetic construct
  REGION 1..8: note = Coatomer subunit gamma-1 (760-767)
VADHIQKV

SEQ ID NO: 23148 - protein, 9 aa, synthetic construct
  REGION 1..9: note = HMG domain-containing protein 4 (317-325)
VADHPGIDF

SEQ ID NO: 23149 - protein, 8 aa, synthetic construct
  REGION 1..8: note = Laminin subunit gamma-1 (1042-1049)
VADHRVKL

SEQ ID NO: 23150 - protein, 10 aa, synthetic construct
  REGION 1..10: note = Catenin beta-1 (79-88)
VADIDGQYAM

SEQ ID NO: 23151 - protein, 8 aa, synthetic construct
  REGION 1..8: note = Dual specificity protein phosphatase 14 (93-100)
VADKIHSV

SEQ ID NO: 23152 - protein, 9 aa, synthetic construct
  REGION 1..9: note = Translin-associated protein X (191-199)
VADLTGELM

SEQ ID NO: 23153 - protein, 9 aa, synthetic construct
  REGION 1..9: note = Neutral alpha-glucosidase AB (23-31)
VADPPIARL

SEQ ID NO: 23154 - protein, 9 aa, synthetic construct
  REGION 1..9: note = Polypeptide N-acetylgalactosaminyltransferase 2 (241-249)
VAEDRTRVV

SEQ ID NO: 23155 - protein, 9 aa, synthetic construct
  REGION 1..9: note = Protein PRR14L (111-119)
VAESAVSKL

SEQ ID NO: 23156 - protein, 9 aa, synthetic construct
  REGION 1..9: note = UPF0415 protein C7orf25 (292-300)
VAFPTEIKV

SEQ ID NO: 23157 - protein, 10 aa, synthetic construct
  REGION 1..10: note = Cytoskeleton-associated protein 5 (883-892)
VAGIINDAKF

SEQ ID NO: 23158 - protein, 11 aa, synthetic construct
  REGION 1..11: note = HLA class I histocompatibility antigen, alpha chain F (305-315)
VAGLVVLGAVV

SEQ ID NO: 23159 - protein, 8 aa, synthetic construct
  REGION 1..8: note = Phosphofurin acidic cluster sorting protein 1 (109-116)
VAGRVMQY

SEQ ID NO: 23160 - protein, 13 aa, synthetic construct
  REGION 1..13: note = CLIP-associating protein 2 (347-359)
VAGRVSAGSSKAS

SEQ ID NO: 23161 - protein, 10 aa, synthetic construct
  REGION 1..10: note = CAD protein (1548-1557)
VAGSAAGLKL

SEQ ID NO: 23162 - protein, 9 aa, synthetic construct
  REGION 1..9: note = CLOCK-interacting pacemaker (251-259)
VAKAPSLTF

SEQ ID NO: 23163 - protein, 15 aa, synthetic construct
  REGION 1..15: note = Glucose-6-phosphate isomerase (250-264)
VAKHFVALSTNTTKV

SEQ ID NO: 23164 - protein, 16 aa, synthetic construct
  REGION 1..16: note = Glucose-6-phosphate isomerase (250-265)
VAKHFVALSTNTTKVK

SEQ ID NO: 23165 - protein, 9 aa, synthetic construct
  REGION 1..9: note = Proline and serine-rich protein 1 (85-93)
VALELLASN

SEQ ID NO: 23166 - protein, 11 aa, synthetic construct
  REGION 1..11: note = Phosphatidylcholine translocator ABCB4 (985-995)
VALGHASSFAP

SEQ ID NO: 23167 - protein, 10 aa, synthetic construct
  REGION 1..10: note = ATP-binding cassette sub-family A member 13 (1236-1245)
VALGNALVSV

SEQ ID NO: 23168 - protein, 9 aa, synthetic construct
  REGION 1..9: note = Neural cell adhesion molecule L1 (3-11)
VALRYVWPL

SEQ ID NO: 23169 - protein, 8 aa, synthetic construct
  REGION 1..8: note = Constitutive coactivator of PPAR-gamma-like protein 1 (551-558)
VAPEVLRV

SEQ ID NO: 23170 - protein, 9 aa, synthetic construct
  REGION 1..9: note = Glutamate receptor ionotropic, kainate 3 (516-524)
VAPLTITHV

SEQ ID NO: 23171 - protein, 9 aa, synthetic construct
  REGION 1..9: note = Transcription factor p65 (404-412)
VAPPAPKPT

SEQ ID NO: 23172 - protein, 11 aa, synthetic construct
  REGION 1..11: note = Protein NLRC3 (955-965)
VASIGASGAQV

SEQ ID NO: 23173 - protein, 8 aa, synthetic construct
  REGION 1..8: note = Endothelin B receptor (292-299)
VASWSRIK

SEQ ID NO: 23174 - protein, 9 aa, synthetic construct
  REGION 1..9: note = Zinc finger MYM-type protein 4 (1069-1077)
VAVEPRSLI

SEQ ID NO: 23175 - protein, 9 aa, synthetic construct
  REGION 1..9: note = Transient receptor potential cation channel subfamily V member 2 (408-416)
VAYHQPTLK

SEQ ID NO: 23176 - protein, 50 aa, synthetic construct
  REGION 1..50: note = ATP synthase subunit epsilon, mitochondrial (2-51)
VAYWRQAGLSYIRYSQICAKAVRDALKTEFKANAEKTSGSNVKIVKVKKE

SEQ ID NO: 23177 - protein, 22 aa, synthetic construct
  REGION 1..22: note = Pyridoxal kinase (153-174)
VDAVFVGTGDLFAAMLLAWTHK

SEQ ID NO: 23178 - protein, 10 aa, synthetic construct
  REGION 1..10: note = Titin (5174-5183)
VDDLIALGGQ

SEQ ID NO: 23179 - protein, 18 aa, synthetic construct
  REGION 1..18: note = HLA class I histocompatibility antigen, B-51 alpha chain (27-44)
VDDTQFVRFDSDAASPRT

SEQ ID NO: 23180 - protein, 20 aa, synthetic construct
  REGION 1..20: note = HLA class I histocompatibility antigen, B-51 alpha chain (27-46)
VDDTQFVRFDSDAASPRTEP

SEQ ID NO: 23181 - protein, 22 aa, synthetic construct
  REGION 1..22: note = Transducin-like enhancer protein 2 (117-138)
VDEDQPSEPPSPATTPCGKVPI

SEQ ID NO: 23182 - protein, 15 aa, synthetic construct
  REGION 1..15: note = Annexin A2 (51-65)
VDEVTIVNILTNRSN

SEQ ID NO: 23183 - protein, 17 aa, synthetic construct
  REGION 1..17: note = Annexin A2 (51-67)
VDEVTIVNILTNRSNAQ

SEQ ID NO: 23184 - protein, 12 aa, synthetic construct
  REGION 1..12: note = Glyceraldehyde-3-phosphate dehydrogenase (28-39)
VDIVAINDPFID

SEQ ID NO: 23185 - protein, 9 aa, synthetic construct
  REGION 1..9: note = Eukaryotic translation initiation factor 2A (267-275)
VDKTGASYY

SEQ ID NO: 23186 - protein, 8 aa, synthetic construct
  REGION 1..8: note = 40S ribosomal protein S21 (39-46)
VDKVTGRF

SEQ ID NO: 23187 - protein, 20 aa, synthetic construct
  REGION 1..20: note = Collagen alpha-4(IV) chain (1284-1303)
VDLLRGEPGDCGLPGPPGPP

SEQ ID NO: 23188 - protein, 11 aa, synthetic construct
  REGION 1..11: note = Immunoglobulin superfamily DCC subclass member 4 (828-838)
VDMDGPFGSVV

SEQ ID NO: 23189 - protein, 15 aa, synthetic construct
  REGION 1..15: note = Multidrug resistance-associated protein 6 (610-624)
VDPGVVDSSSSGSAA

SEQ ID NO: 23190 - protein, 8 aa, synthetic construct
  REGION 1..8: note = Histone deacetylase 9 (79-86)
VDPVVREK

SEQ ID NO: 23191 - protein, 17 aa, synthetic construct
  REGION 1..17: note = Neuron navigator 1 (1420-1436)
VDSLVFETLIPKPMMQH

SEQ ID NO: 23192 - protein, 8 aa, synthetic construct
  REGION 1..8: note = Microtubule-actin cross-linking factor 1, isoforms 1/2/3/5 (329-336)
VDSRWQEY

SEQ ID NO: 23193 - protein, 20 aa, synthetic construct
  REGION 1..20: note = Beta-secretase 2 (109-128)
VDTGSSNFAVAGTPHSYIDT

SEQ ID NO: 23194 - protein, 11 aa, synthetic construct
  REGION 1..11: note = Probable C-mannosyltransferase DPY19L1 (75-85)
VEAPSFLNGVW

SEQ ID NO: 23195 - protein, 12 aa, synthetic construct
  REGION 1..12: note = Dynein heavy chain 17, axonemal (1541-1552)
VEATSKPGLYNK

SEQ ID NO: 23196 - protein, 9 aa, synthetic construct
  REGION 1..9: note = Putative RNA-binding protein 15 (166-174)
VEDGLFHEF

SEQ ID NO: 23197 - protein, 9 aa, synthetic construct
  REGION 1..9: note = Protein phosphatase 1 regulatory subunit 12B (100-108)
VEEDSNRDY

SEQ ID NO: 23198 - protein, 10 aa, synthetic construct
  REGION 1..10: note = Protrudin (99-108)
VEFFRVVSEY

SEQ ID NO: 23199 - protein, 10 aa, synthetic construct
  REGION 1..10: note = Glycogen phosphorylase, brain form (207-216)
VEHTPDGVKW

SEQ ID NO: 23200 - protein, 7 aa, synthetic construct
  REGION 1..7: note = CDK5 regulatory subunit-associated protein 1 (383-389)
VELVHHI

SEQ ID NO: 23201 - protein, 9 aa, synthetic construct
  REGION 1..9: note = Chondroitin sulfate glucuronyltransferase (720-728)
VEPGLVQKF

SEQ ID NO: 23202 - protein, 13 aa, synthetic construct
  REGION 1..13: note = Beta-hexosaminidase subunit alpha (437-449)
VEPLAFEGTPEQK

SEQ ID NO: 23203 - protein, 14 aa, synthetic construct
  REGION 1..14: note = 40S ribosomal protein S18 (64-77)
VERVITIMQNPRQY

SEQ ID NO: 23204 - protein, 15 aa, synthetic construct
  REGION 1..15: note = 40S ribosomal protein S18 (64-78)
VERVITIMQNPRQYK

SEQ ID NO: 23205 - protein, 9 aa, synthetic construct
  REGION 1..9: note = Myoferlin (1325-1333)
VESVVIKNL

SEQ ID NO: 23206 - protein, 20 aa, synthetic construct
  REGION 1..20: note = Vimentin (447-466)
VETRDGQVINETSQHHDDLE

SEQ ID NO: 23207 - protein, 16 aa, synthetic construct
  REGION 1..16: note = HLA class I histocompatibility antigen, Cw-7 alpha chain (255-270)
VETRPAGDGTFQKWAA

SEQ ID NO: 23208 - protein, 9 aa, synthetic construct
  REGION 1..9: note = Integrin beta-5 (441-449)
VFALRPVGF

SEQ ID NO: 23209 - protein, 9 aa, synthetic construct
  REGION 1..9: note = Ribosomal protein S6 kinase alpha-5 (487-495)
VFHDQLHTF

SEQ ID NO: 23210 - protein, 9 aa, synthetic construct
  REGION 1..9: note = Nuclear factor erythroid 2-related factor 3 (266-274)
VFHNHTYHL

SEQ ID NO: 23211 - protein, 9 aa, synthetic construct
  REGION 1..9: note = Integrin alpha-7 (708-716)
VFIELPLSI

SEQ ID NO: 23212 - protein, 9 aa, synthetic construct
  REGION 1..9: note = Leucine-rich repeat serine/threonine-protein kinase 2 (619-627)
VFIGTGHLL

SEQ ID NO: 23213 - protein, 10 aa, synthetic construct
  REGION 1..10: note = Putative pre-mRNA-splicing factor ATP-dependent RNA helicase DHX16 (968-977)
VFIHPNSSLF

SEQ ID NO: 23214 - protein, 9 aa, synthetic construct
  REGION 1..9: note = E3 ubiquitin-protein ligase RNF213 (400-408)
VFIRGGEEF

SEQ ID NO: 23215 - protein, 9 aa, synthetic construct
  REGION 1..9: note = Receptor-type tyrosine-protein phosphatase zeta (120-128)
VFKASKITF

SEQ ID NO: 23216 - protein, 9 aa, synthetic construct
  REGION 1..9: note = Baculoviral IAP repeat-containing protein 6 (448-456)
VFKPISSTW

SEQ ID NO: 23217 - protein, 8 aa, synthetic construct
  REGION 1..8: note = Farnesyl pyrophosphate synthase (333-340)
VFLGLARK

SEQ ID NO: 23218 - protein, 11 aa, synthetic construct
  REGION 1..11: note = Transmembraneoprotein NMB (543-553)
VFLNRAKAVFF

SEQ ID NO: 23219 - protein, 10 aa, synthetic construct
  REGION 1..10: note = HLA class II histocompatibility antigen, DQ alpha 1 chain (162-171)
VFLPREDHLF

SEQ ID NO: 23220 - protein, 11 aa, synthetic construct
  REGION 1..11: note = Extracellular matrix protein FRAS1 (2887-2897)
VFLSSAQGAEL

SEQ ID NO: 23221 - protein, 9 aa, synthetic construct
  REGION 1..9: note = Beta-hexosaminidase subunit alpha (311-319)
VFPDFYLHL

SEQ ID NO: 23222 - protein, 9 aa, synthetic construct
  REGION 1..9: note = Sal-like protein 1 (304-312)
VFPSPLPNI

SEQ ID NO: 23223 - protein, 9 aa, synthetic construct
  REGION 1..9: note = Lysosomal-trafficking regulator (976-984)
VFQKQFYRL

SEQ ID NO: 23224 - protein, 9 aa, synthetic construct
  REGION 1..9: note = Filamin-A (1243-1251)
VFREATTEF

SEQ ID NO: 23225 - protein, 9 aa, synthetic construct
  REGION 1..9: note = Tubulin beta chain (336-344)
VFRGRMSMK

SEQ ID NO: 23226 - protein, 10 aa, synthetic construct
  REGION 1..10: note = Transformation/transcription domain-associated protein (638-647)
VFTMMNPLTF

SEQ ID NO: 23227 - protein, 9 aa, synthetic construct
  REGION 1..9: note = Cell division cycle protein 23 homolog (185-193)
VFVEATHVL

SEQ ID NO: 23228 - protein, 11 aa, synthetic construct
  REGION 1..11: note = Delphilin (267-277)
VGGLAGPGGAR

SEQ ID NO: 23229 - protein, 7 aa, synthetic construct
  REGION 1..7: note = Peroxisomal membrane protein 2 (69-75)
VGGPLRY

SEQ ID NO: 23230 - protein, 9 aa, synthetic construct
  REGION 1..9: note = Eukaryotic translation initiation factor 6 (64-72)
VGNRHGLLV

SEQ ID NO: 23231 - protein, 9 aa, synthetic construct
  REGION 1..9: note = Nuclear factor of activated T-cells, cytoplasmic 2 (274-282)
VGNTKVLEI

SEQ ID NO: 23232 - protein, 15 aa, synthetic construct
  REGION 1..15: note = Filamin-A (1151-1165)
VGQFQVDCSSAGSAE

SEQ ID NO: 23233 - protein, 11 aa, synthetic construct
  REGION 1..11: note = Cullin-4A (15-25)
VGRTNGLTKPA

SEQ ID NO: 23234 - protein, 8 aa, synthetic construct
  REGION 1..8: note = F-box only protein 3 (82-89)
VGRYIDHY

SEQ ID NO: 23235 - protein, 13 aa, synthetic construct
  REGION 1..13: note = HLA class I histocompatibility antigen, B-13 alpha chain (24-36)
VGYVDDTQFVRFD

SEQ ID NO: 23236 - protein, 9 aa, synthetic construct
  REGION 1..9: note = Lysosomal-trafficking regulator (893-901)
VHINTINLF

SEQ ID NO: 23237 - protein, 7 aa, synthetic construct
  REGION 1..7: note = Bax inhibitor 1 (93-99)
VHMVTHF

SEQ ID NO: 23238 - protein, 9 aa, synthetic construct
  REGION 1..9: note = Sterol 26-hydroxylase, mitochondrial (181-189)
VIDDFMTRL

SEQ ID NO: 23239 - protein, 10 aa, synthetic construct
  REGION 1..10: note = Keratin, type I cytoskeletal 18 (130-139)
VIDDTNITRL

SEQ ID NO: 23240 - protein, 9 aa, synthetic construct
  REGION 1..9: note = Laminin subunit alpha-4 (1790-1798)
VIDGHPVSF

SEQ ID NO: 23241 - protein, 8 aa, synthetic construct
  REGION 1..8: note = Prefoldin subunit 1 (20-27)
VIDTQQKV

SEQ ID NO: 23242 - protein, 9 aa, synthetic construct
  REGION 1..9: note = Protein PRRC2C (1668-1676)
VIEDPQSNL

SEQ ID NO: 23243 - protein, 9 aa, synthetic construct
  REGION 1..9: note = Helicase SKI2W (419-427)
VIFDEVHYI

SEQ ID NO: 23244 - protein, 21 aa, synthetic construct
  REGION 1..21: note Dolichyl-diphosphooligosaccharide-proteinosyltransferase 48 kDa subunit (255-275)
VIFSGSLDFFSDSFFNSAVQK

SEQ ID NO: 23245 - protein, 9 aa, synthetic construct
  REGION 1..9: note = CLIP-associating protein 1 (218-226)
VIFTKFDEV

SEQ ID NO: 23246 - protein, 8 aa, synthetic construct
  REGION 1..8: note = Tyrosine-protein phosphatase non-receptor type 13 (1869-1876)
VIGRVLEL

SEQ ID NO: 23247 - protein, 24 aa, synthetic construct
  REGION 1..24: note = Glyceraldehyde-3-phosphate dehydrogenase (163-186)
VIHDNFGIVEGLMTTVHAITATQK

SEQ ID NO: 23248 - protein, 8 aa, synthetic construct
  REGION 1..8: note = ELAV-like protein 1 (102-109)
VIKDANLY

SEQ ID NO: 23249 - protein, 7 aa, synthetic construct
  REGION 1..7: note = U5 small nuclear ribonucleoprotein 200 kDa helicase (1232-1238)
VILHHEY

SEQ ID NO: 23250 - protein, 16 aa, synthetic construct
  REGION 1..16: note = Heat shock protein HSP 90-beta (107-122)
VILHLKEDQTEYLEER

SEQ ID NO: 23251 - protein, 9 aa, synthetic construct
  REGION 1..9: note = Zinc finger BED domain-containing protein 1 (183-191)
VILKELAEA

SEQ ID NO: 23252 - protein, 9 aa, synthetic construct
  REGION 1..9: note = Natural resistance-associated macrophage protein 2 (259-267)
VIMPHNMYL

SEQ ID NO: 23253 - protein, 13 aa, synthetic construct
  REGION 1..13: note = Vimentin (454-466)
VINETSQHHDDLE

SEQ ID NO: 23254 - protein, 9 aa, synthetic construct
  REGION 1..9: note = NEDD8 ultimate buster 1 (130-138)
VINKKQLQL

SEQ ID NO: 23255 - protein, 9 aa, synthetic construct
  REGION 1..9: note = Spectrin beta chain, non-erythrocytic 1 (2228-2236)
VINNQEMGF

SEQ ID NO: 23256 - protein, 10 aa, synthetic construct
  REGION 1..10: note = Glia-derived nexin (64-73)
VISPHGIASV

SEQ ID NO: 23257 - protein, 9 aa, synthetic construct
  REGION 1..9: note = Serine-protein kinase ATM (120-128)
VIYTLIHYI

SEQ ID NO: 23258 - protein, 9 aa, synthetic construct
  REGION 1..9: note = Protein-L-isoaspartate(D-aspartate) O-methyltransferase (92-100)
VIYVPLTDK

SEQ ID NO: 23259 - protein, 10 aa, synthetic construct
  REGION 1..10: note = Collagen alpha-1(XII) chain (423-432)
VKGAPRNLKV

SEQ ID NO: 23260 - protein, 9 aa, synthetic construct
  REGION 1..9: note = Transferrin receptor protein 1 (188-196)
VKIQVKDSA

SEQ ID NO: 23261 - protein, 17 aa, synthetic construct
  REGION 1..17: note = Protocadherin Fat 3 (438-454)
VKKEVYKLEVTNKEGDL

SEQ ID NO: 23262 - protein, 16 aa, synthetic construct
  REGION 1..16: note = Gamma-secretase C-terminal fragment 59 (559-574)
VKMDAEFRHDSGYEVH

SEQ ID NO: 23263 - protein, 17 aa, synthetic construct
  REGION 1..17: note = Gamma-secretase C-terminal fragment 59 (559-575)
VKMDAEFRHDSGYEVHH

SEQ ID NO: 23264 - protein, 18 aa, synthetic construct
  REGION 1..18: note = Gamma-secretase C-terminal fragment 59 (559-576)
VKMDAEFRHDSGYEVHHQ

SEQ ID NO: 23265 - protein, 10 aa, synthetic construct
  REGION 1..10: note = Small conductance calcium-activated potassium channel protein 2 (419-428)
VKNAAANVLR

SEQ ID NO: 23266 - protein, 11 aa, synthetic construct
  REGION 1..11: note = Intraflagellar transport protein 81 homolog (41-51)
VLAEIDPKQLV

SEQ ID NO: 23267 - protein, 9 aa, synthetic construct
  REGION 1..9: note = Rootletin (677-685)
VLAKELVEV

SEQ ID NO: 23268 - protein, 9 aa, synthetic construct
  REGION 1..9: note = Protein FAM13B (15-23)
VLANKIFGI

SEQ ID NO: 23269 - protein, 9 aa, synthetic construct
  REGION 1..9: note = A-kinase anchor protein 1, mitochondrial (363-371)
VLATTVGKV

SEQ ID NO: 23270 - protein, 11 aa, synthetic construct
  REGION 1..11: note = Laminin subunit gamma-1 (20-30)
VLAVLAAAAAA

SEQ ID NO: 23271 - protein, 10 aa, synthetic construct
  REGION 1..10: note = U5 small nuclear ribonucleoprotein 200 kDa helicase (139-148)
VLAVLKNEKL

SEQ ID NO: 23272 - protein, 9 aa, synthetic construct
  REGION 1..9: note = Microtubule-actin cross-linking factor 1 (1174-1182)
VLDEEIAKA

SEQ ID NO: 23273 - protein, 9 aa, synthetic construct
  REGION 1..9: note = E3 ubiquitin-protein ligase RNF123 (218-226)
VLDGAVMMY

SEQ ID NO: 23274 - protein, 9 aa, synthetic construct
  REGION 1..9: note = Homologous-pairing protein 2 homolog (88-97)
VLDGKIVAL

SEQ ID NO: 23275 - protein, 9 aa, synthetic construct
  REGION 1..9: note = Transcription factor SOX-5 (89-97)
VLDGKVAVV

SEQ ID NO: 23276 - protein, 9 aa, synthetic construct
  REGION 1..9: note = Serine/arginine-rich splicing factor 2 (79-87)
VLDGRELRV

SEQ ID NO: 23277 - protein, 9 aa, synthetic construct
  REGION 1..9: note = 60S ribosomal protein L13a (8-16)
VLDGRGHLL

SEQ ID NO: 23278 - protein, 8 aa, synthetic construct
  REGION 1..8: note = Clustered mitochondria protein homolog (97-104)
VLDHFSEL

SEQ ID NO: 23279 - protein, 9 aa, synthetic construct
  REGION 1..9: note = Microtubule-associated proteins 1A/1B light chain 3B (46-54)
VLDKTKFLV

SEQ ID NO: 23280 - protein, 9 aa, synthetic construct
  REGION 1..9: note = Coilin (145-153)
VLDLEPKAV

SEQ ID NO: 23281 - protein, 9 aa, synthetic construct
  REGION 1..9: note = Protein flightless-1 homolog (107-115)
VLDLSHNQL

SEQ ID NO: 23282 - protein, 9 aa, synthetic construct
  REGION 1..9: note = Cadherin-2 (399-407)
VLDRESPNV

SEQ ID NO: 23283 - protein, 9 aa, synthetic construct
  REGION 1..9: note = Receptor-type protein tyrosine phosphatase beta (1333-1341)
VLDSHIHAY

SEQ ID NO: 23284 - protein, 9 aa, synthetic construct
  REGION 1..9: note = Ubiquitin carboxyl-terminal hydrolase 19 (713-721)
VLDSLSQSV

SEQ ID NO: 23285 - protein, 9 aa, synthetic construct
  REGION 1..9: note = Biorientation of chromosomes in cell division protein 1-like 1 (1543-1551)
VLDSRIETA

SEQ ID NO: 23286 - protein, 10 aa, synthetic construct
  REGION 1..10: note = Probable tRNA methyltransferase 9-like protein (350-359)
VLDSTAFMRY

SEQ ID NO: 23287 - protein, 9 aa, synthetic construct
  REGION 1..9: note = Tubulin-specific chaperone A (71-79)
VLDSVKLEA

SEQ ID NO: 23288 - protein, 9 aa, synthetic construct
  REGION 1..9: note = COP9 signalosome complex subunit 7b (34-42)
VLEAPGVYV

SEQ ID NO: 23289 - protein, 9 aa, synthetic construct
  REGION 1..9: note = Ras GTPase-activating-like protein IQGAP3 (1063-1071)
VLEDKVLSV

SEQ ID NO: 23290 - protein, 8 aa, synthetic construct
  REGION 1..8: note = Melanoma-associated antigen 4 (287-294)
VLEHVVRV

SEQ ID NO: 23291 - protein, 9 aa, synthetic construct
  REGION 1..9: note = Leucine-tRNA ligase, cytoplasmic (271-279)
VLEPYPSKL

SEQ ID NO: 23292 - protein, 9 aa, synthetic construct
  REGION 1..9: note = E3 ubiquitin-protein ligase RNF123 (425-433)
VLFDVLRSV

SEQ ID NO: 23293 - protein, 10 aa, synthetic construct
  REGION 1..10: note = Nucleolar protein 56 (6-15)
VLFEHAVGYA

SEQ ID NO: 23294 - protein, 9 aa, synthetic construct
  REGION 1..9: note = NADH dehydrogenase (ubiquinone) iron-sulfur protein 2, mitochondrial (172-180)
VLFGEITRL

SEQ ID NO: 23295 - protein, 12 aa, synthetic construct
  REGION 1..12: note = Heat shock 70 kDa protein 12A (519-530)
VLFGLDPAVIKV

SEQ ID NO: 23296 - protein, 6 aa, synthetic construct
  REGION 1..6: note = Maestro heat-like repeat-containing protein family member 1 (158-163)
VLFHQW

SEQ ID NO: 23297 - protein, 9 aa, synthetic construct
  REGION 1..9: note = Exostosin-like 1 (657-665)
VLFKDPVSV

SEQ ID NO: 23298 - protein, 10 aa, synthetic construct
  REGION 1..10: note = Histone-lysine N-methyltransferase 2D (4817-4826)
VLFPESPARA

SEQ ID NO: 23299 - protein, 9 aa, synthetic construct
  REGION 1..9: note = Ribosomal protein S6 kinase alpha-3 (517-525)
VLFTITKTV

SEQ ID NO: 23300 - protein, 10 aa, synthetic construct
  REGION 1..10: note = TAF6-like RNA polymerase II p300/CBP-associated factor-associated factor 65 kDa subunit 6L (168-177)
VLGDDPQLMK

SEQ ID NO: 23301 - protein, 11 aa, synthetic construct
  REGION 1..11: note = TAF6-like RNA polymerase II p300/CBP-associated factor-associated factor 65 kDa subunit 6L (168-178)
VLGDDPQLMKV

SEQ ID NO: 23302 - protein, 8 aa, synthetic construct
  REGION 1..8: note = Kelch-like protein 21 (509-516)
VLGGKLYV

SEQ ID NO: 23303 - protein, 8 aa, synthetic construct
  REGION 1..8: note = Lipopolysaccharide-responsive and beige-like anchor protein (137-144)
VLGKIEKV

SEQ ID NO: 23304 - protein, 8 aa, synthetic construct
  REGION 1..8: note = EH domain-containing protein 4 (483-490)
VLGKIWKL

SEQ ID NO: 23305 - protein, 8 aa, synthetic construct
  REGION 1..8: note = Dynactin subunit 2 (288-295)
VLGKVNEI

SEQ ID NO: 23306 - protein, 9 aa, synthetic construct
  REGION 1..9: note = Nuclear autoantigenic sperm protein (105-113)
VLGNALEGV

SEQ ID NO: 23307 - protein, 9 aa, synthetic construct
  REGION 1..9: note = Hepatoma-derived growth factor-related protein 2 (550-558)
VLGPKIEAV

SEQ ID NO: 23308 - protein, 9 aa, synthetic construct
  REGION 1..9: note = Zinc finger protein 518A (419-427)
VLGPTLKNV

SEQ ID NO: 23309 - protein, 9 aa, synthetic construct
  REGION 1..9: note = EAW51983.1 (1173-1181)
VLGPTPELV

SEQ ID NO: 23310 - protein, 9 aa, synthetic construct
  REGION 1..9: note = Transferrin receptor protein 1 (488-496)
VLGTSNFKV

SEQ ID NO: 23311 - protein, 8 aa, synthetic construct
  REGION 1..8: note = HEAT repeat-containing protein 1 (1554-1561)
VLGYISAV

SEQ ID NO: 23312 - protein, 10 aa, synthetic construct
  REGION 1..10: note = Integrin-linked protein kinase (219-228)
VLHEGTNFVV

SEQ ID NO: 23313 - protein, 9 aa, synthetic construct
  REGION 1..9: note Dolichyl-diphosphooligosaccharide-proteinosyltransferase subunit 1 (138-146)
VLHPYPTQI

SEQ ID NO: 23314 - protein, 9 aa, synthetic construct
  REGION 1..9: note = Ral GTPase-activating protein subunit beta (21-29)
VLHSYPESV

SEQ ID NO: 23315 - protein, 9 aa, synthetic construct
  REGION 1..9: note = Alpha-parvin (100-108)
VLIDWINDV

SEQ ID NO: 23316 - protein, 9 aa, synthetic construct
  REGION 1..9: note = Leucine-tRNA ligase, cytoplasmic (203-211)
VLIHSSQYL

SEQ ID NO: 23317 - protein, 9 aa, synthetic construct
  REGION 1..9: note = Hemicentin-1 (1559-1567)
VLINSLIKL

SEQ ID NO: 23318 - protein, 9 aa, synthetic construct
  REGION 1..9: note = Neuron navigator 2 (119-127)
VLLAQIIQV

SEQ ID NO: 23319 - protein, 9 aa, synthetic construct
  REGION 1..9: note = Protein MON2 homolog (1145-1153)
VLLDHIQSA

SEQ ID NO: 23320 - protein, 11 aa, synthetic construct
  REGION 1..11: note = Ankyrin-2 (527-537)
VLLEAGAAHSL

SEQ ID NO: 23321 - protein, 9 aa, synthetic construct
  REGION 1..9: note = Protein wntless homolog (264-272)
VLLEKVIFA

SEQ ID NO: 23322 - protein, 12 aa, synthetic construct
  REGION 1..12: note = Tumor necrosis factor receptor superfamily member 19 (5-16)
VLLEQEKTFFTL

SEQ ID NO: 23323 - protein, 9 aa, synthetic construct
  REGION 1..9: note = Hemicentin-1 (3258-3266)
VLLGENVEL

SEQ ID NO: 23324 - protein, 10 aa, synthetic construct
  REGION 1..10: note = Nucleolar protein 56 (91-100)
VLLGVGDPKI

SEQ ID NO: 23325 - protein, 9 aa, synthetic construct
  REGION 1..9: note = Receptor tyrosine-protein kinase erbB-3 (840-848)
VLLKSPSQV

SEQ ID NO: 23326 - protein, 11 aa, synthetic construct
  REGION 1..11: note = A-kinase anchor protein 6 (1028-1038)
VLLPNDLLEKV

SEQ ID NO: 23327 - protein, 9 aa, synthetic construct
  REGION 1..9: note = Lysosomal-trafficking regulator (260-268)
VLLSLLEKV

SEQ ID NO: 23328 - protein, 9 aa, synthetic construct
  REGION 1..9: note = Cyclic AMP-dependent transcription factor ATF-6 alpha (233-241)
VLLSQPTVV

SEQ ID NO: 23329 - protein, 9 aa, synthetic construct
  REGION 1..9: note = Regulatory-associated protein of mTOR (223-231)
VLLSQVHRL

SEQ ID NO: 23330 - protein, 11 aa, synthetic construct
  REGION 1..11: note = Synaptic vesicle membrane protein VAT-1 homolog (379-389)
VLLVPGPEKEN

SEQ ID NO: 23331 - protein, 11 aa, synthetic construct
  REGION 1..11: note = Serine/threonine-protein phosphatase 6 regulatory ankyrin repeat subunit A (378-388)
VLMETSGTDML

SEQ ID NO: 23332 - protein, 9 aa, synthetic construct
  REGION 1..9: note = HEAT repeat-containing protein 1 (847-855)
VLMKLFIKV

SEQ ID NO: 23333 - protein, 9 aa, synthetic construct
  REGION 1..9: note = Urocortin-2 (11-19)
VLMLGRVLV

SEQ ID NO: 23334 - protein, 9 aa, synthetic construct
  REGION 1..9: note = Structural maintenance of chromosomes protein 2 (153-161)
VLNMKPPEI

SEQ ID NO: 23335 - protein, 9 aa, synthetic construct
  REGION 1..9: note = Bifunctional 3'-phosphoadenosine 5'-phosphosulfate synthase 1 (479-487)
VLNPETTVV

SEQ ID NO: 23336 - protein, 9 aa, synthetic construct
  REGION 1..9: note = Receptor activity-modifying protein 2 (34-42)
VLNPHEALA

SEQ ID NO: 23337 - protein, 9 aa, synthetic construct
  REGION 1..9: note = Probable cytosolic iron-sulfur protein assembly protein CIAO1 (145-153)
VLNSHTQDV

SEQ ID NO: 23338 - protein, 9 aa, synthetic construct
  REGION 1..9: note = Nucleosome-remodeling factor subunit BPTF (2314-2322)
VLPGPGQQL

SEQ ID NO: 23339 - protein, 9 aa, synthetic construct
  REGION 1..9: note = Transmembrane protein 94 (322-330)
VLPILPLLF

SEQ ID NO: 23340 - protein, 7 aa, synthetic construct
  REGION 1..7: note = 40S ribosomal protein S26 (63-69)
VLPKLYV

SEQ ID NO: 23341 - protein, 11 aa, synthetic construct
  REGION 1..11: note = Protocadherin Fat 3 (2698-2708)
VLPPETFLPSF

SEQ ID NO: 23342 - protein, 9 aa, synthetic construct
  REGION 1..9: note = Oxysterol-binding protein-related protein 10 (353-361)
VLPTFILEK

SEQ ID NO: 23343 - protein, 9 aa, synthetic construct
  REGION 1..9: note = Oxysterol-binding protein-related protein 9 (402-410)
VLPTFILER

SEQ ID NO: 23344 - protein, 10 aa, synthetic construct
  REGION 1..10: note = Protein-associating with the carboxyl-terminal domain of ezrin (30-39)
VLQDGKFASV

SEQ ID NO: 23345 - protein, 9 aa, synthetic construct
  REGION 1..9: note = Zinc finger MYM-type protein 4 (793-801)
VLQGAVPTV

SEQ ID NO: 23346 - protein, 10 aa, synthetic construct
  REGION 1..10: note = Serum paraoxonase/arylesterase 2 (326-335)
VLQGSSVASV

SEQ ID NO: 23347 - protein, 10 aa, synthetic construct
  REGION 1..10: note = Microspherule protein 1 (219-228)
VLQTNDLTSV

SEQ ID NO: 23348 - protein, 14 aa, synthetic construct
  REGION 1..14: note = Heat shock 70 kDa protein 1-like (171-184)
VLRIINEPTAAAIA

SEQ ID NO: 23349 - protein, 9 aa, synthetic construct
  REGION 1..9: note = Probable helicase with zinc finger domain (252-260)
VLSECIEGV

SEQ ID NO: 23350 - protein, 9 aa, synthetic construct
  REGION 1..9: note = Magnesium transporter protein 1 (68-76)
VLSEKVSQL

SEQ ID NO: 23351 - protein, 10 aa, synthetic construct
  REGION 1..10: note = Protein misato homolog 1 (109-118)
VLSSDGVWRV

SEQ ID NO: 23352 - protein, 8 aa, synthetic construct
  REGION 1..8: note = Small integral membrane protein 15 (39-46)
VLSWKLAK

SEQ ID NO: 23353 - protein, 9 aa, synthetic construct
  REGION 1..9: note = Autophagy-related protein 16-1 (517-525)
VLTGKVEKV

SEQ ID NO: 23354 - protein, 9 aa, synthetic construct
  REGION 1..9: note = Transmembraneoprotein NMB (81-89)
VLTSDSPAL

SEQ ID NO: 23355 - protein, 9 aa, synthetic construct
  REGION 1..9: note = E3 ubiquitin-protein ligase XIAP (409-417)
VLVADLVNA

SEQ ID NO: 23356 - protein, 9 aa, synthetic construct
  REGION 1..9: note = Eukaryotic translation initiation factor 3 subunit E (318-326)
VLVNDFFLV

SEQ ID NO: 23357 - protein, 9 aa, synthetic construct
  REGION 1..9: note = Hemicentin-1 (2884-2892)
VLVNKSALI

SEQ ID NO: 23358 - protein, 10 aa, synthetic construct
  REGION 1..10: note = Cadherin EGF LAG seven-pass G-type receptor 2 (1100-1109)
VLVSDGVHSV

SEQ ID NO: 23359 - protein, 10 aa, synthetic construct
  REGION 1..10: note = Protocadherin beta-8 (440-449)
VLVSDVNDNA

SEQ ID NO: 23360 - protein, 9 aa, synthetic construct
  REGION 1..9: note = Elongator complex protein 2 (41-49)
VLYDPLKRV

SEQ ID NO: 23361 - protein, 11 aa, synthetic construct
  REGION 1..11: note = Maltase-glucoamylase (708-718)
VLYEGVDEVKA

SEQ ID NO: 23362 - protein, 10 aa, synthetic construct
  REGION 1..10: note = Slit homolog 3 protein (361-370)
VLYGNKITEI

SEQ ID NO: 23363 - protein, 10 aa, synthetic construct
  REGION 1..10: note = Slit homolog 2 protein (354-363)
VLYGNKITEL

SEQ ID NO: 23364 - protein, 9 aa, synthetic construct
  REGION 1..9: note = Protein nepro homolog (10-18)
VLYKGVLKR

SEQ ID NO: 23365 - protein, 12 aa, synthetic construct
  REGION 1..12: note = Melanocyte protein PMEL (483-494)
VLYRYGSFSVTL

SEQ ID NO: 23366 - protein, 9 aa, synthetic construct
  REGION 1..9: note = Putative eukaryotic translation initiation factor 2 subunit 3-like protein (151-159)
VMDAALLLI

SEQ ID NO: 23367 - protein, 10 aa, synthetic construct
  REGION 1..10: note = Putative eukaryotic translation initiation factor 2 subunit 3-like protein (151-160)
VMDAALLLIA

SEQ ID NO: 23368 - protein, 9 aa, synthetic construct
  REGION 1..9: note = Carboxypeptidase Q (442-450)
VMDPKQMNV

SEQ ID NO: 23369 - protein, 11 aa, synthetic construct
  REGION 1..11: note = Lipopolysaccharide-responsive and beige-like anchor protein (1389-1399)
VMFNFPDPATV

SEQ ID NO: 23370 - protein, 18 aa, synthetic construct
  REGION 1..18: note = Cytochrome c oxidase subunit 6C (58-75)
VMKDFEEMRKAGIFQSVK

SEQ ID NO: 23371 - protein, 10 aa, synthetic construct
  REGION 1..10: note = Scavenger receptor class B member 1 (146-155)
VMMENKPMTL

SEQ ID NO: 23372 - protein, 9 aa, synthetic construct
  REGION 1..9: note = Xylosyltransferase 1 (587-595)
VMPKKVFKI

SEQ ID NO: 23373 - protein, 14 aa, synthetic construct
  REGION 1..14: note = 78 kDa glucose-regulated protein (177-190)
VMRIINEPTAAAIA

SEQ ID NO: 23374 - protein, 15 aa, synthetic construct
  REGION 1..15: note = 78 kDa glucose-regulated protein (177-191)
VMRIINEPTAAAIAY

SEQ ID NO: 23375 - protein, 9 aa, synthetic construct
  REGION 1..9: note = Non-structural maintenance of chromosomes element 1 homolog (4-12)
VMTDVHRRF

SEQ ID NO: 23376 - protein, 11 aa, synthetic construct
  REGION 1..11: note = DNA (cytosine-5)-methyltransferase 3A (139-149)
VMWFGDGKFSV

SEQ ID NO: 23377 - protein, 7 aa, synthetic construct
  REGION 1..7: note = Interferon-induced protein with tetratricopeptide repeats 1 (396-402)
VNAIIHY

SEQ ID NO: 23378 - protein, 18 aa, synthetic construct
  REGION 1..18: note = Beta-2-microglobulin (81-98)
VNHVTLSQPKIVKWDRDM

SEQ ID NO: 23379 - protein, 14 aa, synthetic construct
  REGION 1..14: note = Protocadherin gamma-C3 (553-566)
VNIFVTDRNDNAPQ

SEQ ID NO: 23380 - protein, 9 aa, synthetic construct
  REGION 1..9: note = T-complex protein 1 subunit eta (46-54)
VNKIKEIAV

SEQ ID NO: 23381 - protein, 11 aa, synthetic construct
  REGION 1..11: note = Cytochrome c oxidase subunit 6A1, mitochondrial (76-86)
VNPLPTGYEDE

SEQ ID NO: 23382 - protein, 11 aa, synthetic construct
  REGION 1..11: note = Pumilio homolog 1 (533-543)
VNSALAFGQGL

SEQ ID NO: 23383 - protein, 7 aa, synthetic construct
  REGION 1..7: note = T-complex protein 1 subunit zeta-2 (199-205)
VNSGFFY

SEQ ID NO: 23384 - protein, 7 aa, synthetic construct
  REGION 1..7: note = Bifunctional glutamate/proline-tRNA ligase (51-57)
VNSILRY

SEQ ID NO: 23385 - protein, 24 aa, synthetic construct
  REGION 1..24: note = Ras GTPase-activating-like protein IQGAP1 (303-326)
VNTFSALANIDLALEQGDALALFR

SEQ ID NO: 23386 - protein, 9 aa, synthetic construct
  REGION 1..9: note = 40S ribosomal protein S30 (117-125)
VNVVPTFGK

SEQ ID NO: 23387 - protein, 10 aa, synthetic construct
  REGION 1..10: note = Transmembraneoprotein NMB (485-494)
VPDRDPASPL

SEQ ID NO: 23388 - protein, 9 aa, synthetic construct
  REGION 1..9: note = Endothelin B receptor (266-274)
VPFIQKASV

SEQ ID NO: 23389 - protein, 9 aa, synthetic construct
  REGION 1..9: note = Nectin-3 (335-343)
VPFKQTSSI

SEQ ID NO: 23390 - protein, 8 aa, synthetic construct
  REGION 1..8: note = Heat shock protein 105 kDa (412-419)
VPFPISLI

SEQ ID NO: 23391 - protein, 11 aa, synthetic construct
  REGION 1..11: note = Elastin (436-446)
VPGAPGAVPGV

SEQ ID NO: 23392 - protein, 17 aa, synthetic construct
  REGION 1..17: note = Carboxypeptidase D (836-852)
VPGTYKITASARGYNPV

SEQ ID NO: 23393 - protein, 15 aa, synthetic construct
  REGION 1..15: note = Transmembraneoprotein NMB (221-235)
VPIAQVKDVYVVTDQ

SEQ ID NO: 23394 - protein, 26 aa, synthetic construct
  REGION 1..26: note = Transmembraneoprotein NMB (221-246)
VPIAQVKDVYVVTDQIPVFVTMFQKN

SEQ ID NO: 23395 - protein, 12 aa, synthetic construct
  REGION 1..12: note = Neuronal cell adhesion molecule (399-410)
VPIEIAPDDPSR

SEQ ID NO: 23396 - protein, 13 aa, synthetic construct
  REGION 1..13: note = Neuronal cell adhesion molecule (399-411)
VPIEIAPDDPSRK

SEQ ID NO: 23397 - protein, 16 aa, synthetic construct
  REGION 1..16: note = Neuronal cell adhesion molecule (399-414)
VPIEIAPDDPSRKIDG

SEQ ID NO: 23398 - protein, 9 aa, synthetic construct
  REGION 1..9: note = pre-rRNA processing protein FTSJ3 (78-86)
VPIKPLPNV

SEQ ID NO: 23399 - protein, 14 aa, synthetic construct
  REGION 1..14: note = Thioredoxin reductase 1, cytoplasmic (252-265)
VPIKVEQIEAGTPG

SEQ ID NO: 23400 - protein, 9 aa, synthetic construct
  REGION 1..9: note = Endoglin (526-534)
VPIPKTGTL

SEQ ID NO: 23401 - protein, 9 aa, synthetic construct
  REGION 1..9: note = Interferon-induced 35 kDa protein (73-81)
VPKSLVSNL

SEQ ID NO: 23402 - protein, 14 aa, synthetic construct
  REGION 1..14: note = Solute carrier family 2, facilitated glucose transporter member 14 (177-190)
VPMYIGEISPTALR

SEQ ID NO: 23403 - protein, 15 aa, synthetic construct
  REGION 1..15: note = Solute carrier family 2, facilitated glucose transporter member 1 (140-154)
VPMYVGEVSPTALRG

SEQ ID NO: 23404 - protein, 9 aa, synthetic construct
  REGION 1..9: note = Nucleosome-remodeling factor subunit BPTF (238-246)
VPNEHIMNV

SEQ ID NO: 23405 - protein, 10 aa, synthetic construct
  REGION 1..10: note = COMM domain-containing protein 7 (78-87)
VPNGALKKSL

SEQ ID NO: 23406 - protein, 9 aa, synthetic construct
  REGION 1..9: note = Diacylglycerol O-acyltransferase 1 (328-336)
VPNHLIWLI

SEQ ID NO: 23407 - protein, 9 aa, synthetic construct
  REGION 1..9: note = Selenoprotein N (214-222)
VPNHRSLNV

SEQ ID NO: 23408 - protein, 8 aa, synthetic construct
  REGION 1..8: note = Polymerase I and transcript release factor (228-235)
VPPFTFHV

SEQ ID NO: 23409 - protein, 8 aa, synthetic construct
  REGION 1..8: note = Sodium/potassium-transporting ATPase subunit alpha-3 (168-175)
VPQQALVI

SEQ ID NO: 23410 - protein, 9 aa, synthetic construct
  REGION 1..9: note = Neurofibromin (199-207)
VPQSHMPEI

SEQ ID NO: 23411 - protein, 9 aa, synthetic construct
  REGION 1..9: note = Krueppel-like factor 15 (133-141)
VPRPFQPTL

SEQ ID NO: 23412 - protein, 8 aa, synthetic construct
  REGION 1..8: note = Transmembrane emp24 domain-containing protein 7 (5-12)
VPRSASVL

SEQ ID NO: 23413 - protein, 9 aa, synthetic construct
  REGION 1..9: note = Transmembrane emp24 domain-containing protein 7 (5-13)
VPRSASVLL

SEQ ID NO: 23414 - protein, 10 aa, synthetic construct
  REGION 1..10: note = Transmembrane emp24 domain-containing protein 7 (5-14)
VPRSASVLLL

SEQ ID NO: 23415 - protein, 9 aa, synthetic construct
  REGION 1..9: note = F-box/WD repeat-containing protein 9 (435-443)
VPTDPPRTI

SEQ ID NO: 23416 - protein, 8 aa, synthetic construct
  REGION 1..8: note = Protein Smaug homolog 1 (103-110)
VPTTINTI

SEQ ID NO: 23417 - protein, 9 aa, synthetic construct
  REGION 1..9: note = Major facilitator superfamily domain-containing protein 12 (214-222)
VPVFRNLSL

SEQ ID NO: 23418 - protein, 9 aa, synthetic construct
  REGION 1..9: note = Mitogen-activated protein kinase 7 (125-133)
VPYGEFKSV

SEQ ID NO: 23419 - protein, 8 aa, synthetic construct
  REGION 1..8: note = Solute carrier family 22 member 18 (47-54)
VPYLSRKL

SEQ ID NO: 23420 - protein, 8 aa, synthetic construct
  REGION 1..8: note = Glycogen debranching enzyme (1050-1057)
VPYRLNEI

SEQ ID NO: 23421 - protein, 9 aa, synthetic construct
  REGION 1..9: note = Phosphatidylinositol 3-kinase catalytic subunit type 3 (400-408)
VQALKYENF

SEQ ID NO: 23422 - protein, 9 aa, synthetic construct
  REGION 1..9: note = Adipocyte enhancer-binding protein 1 (657-665)
VQDTRIHLV

SEQ ID NO: 23423 - protein, 9 aa, synthetic construct
  REGION 1..9: note = Spectrin beta chain, non-erythrocytic 5 (994-1002)
VQLAHSVEV

SEQ ID NO: 23424 - protein, 9 aa, synthetic construct
  REGION 1..9: note = Mitochondrial pyruvate carrier 1 (19-27)
VQPRNWLLF

SEQ ID NO: 23425 - protein, 9 aa, synthetic construct
  REGION 1..9: note = Mitogen-activated protein kinase kinase kinase 6 (125-133)
VQPSLFYHL

SEQ ID NO: 23426 - protein, 8 aa, synthetic construct
  REGION 1..8: note = CD99 antigen (178-185)
VQRTLLEK

SEQ ID NO: 23427 - protein, 9 aa, synthetic construct
  REGION 1..9: note = eIF-2-alpha kinase activator GCN1 (1752-1760)
VRDGYIMMF

SEQ ID NO: 23428 - protein, 9 aa, synthetic construct
  REGION 1..9: note = Lysosomal-trafficking regulator (3248-3256)
VRMPPFTKM

SEQ ID NO: 23429 - protein, 9 aa, synthetic construct
  REGION 1..9: note = Tripeptidyl-peptidase 1 (151-159)
VRSPHPYQL

SEQ ID NO: 23430 - protein, 8 aa, synthetic construct
  REGION 1..8: note = Anion exchange protein (986-993)
VSAAAVVF

SEQ ID NO: 23431 - protein, 8 aa, synthetic construct
  REGION 1..8: note = V-type proton ATPase subunit H (400-407)
VSDDPQVL

SEQ ID NO: 23432 - protein, 8 aa, synthetic construct
  REGION 1..8: note = Cofilin-1 (7-14)
VSDGVIKV

SEQ ID NO: 23433 - protein, 9 aa, synthetic construct
  REGION 1..9: note = Cofilin-1 (7-15)
VSDGVIKVF

SEQ ID NO: 23434 - protein, 8 aa, synthetic construct
  REGION 1..8: note = HLA class I histocompatibility antigen, Cw-3 alpha chain (218-225)
VSDHEATL

SEQ ID NO: 23435 - protein, 8 aa, synthetic construct
  REGION 1..8: note = Proteasome subunit beta type-8 (264-271)
VSDLLHQY

SEQ ID NO: 23436 - protein, 9 aa, synthetic construct
  REGION 1..9: note = Baculoviral IAP repeat-containing protein 6 (689-697)
VSDPNLIHV

SEQ ID NO: 23437 - protein, 13 aa, synthetic construct
  REGION 1..13: note = Microtubule-associated protein (1369-1381)
VSEENKTDAANRY

SEQ ID NO: 23438 - protein, 8 aa, synthetic construct
  REGION 1..8: note = Neuroblast differentiation-associated protein AHNAK (3336-3343)
VSGPKLNI

SEQ ID NO: 23439 - protein, 14 aa, synthetic construct
  REGION 1..14: note = PR domain zinc finger protein 10 (909-922)
VSGQPLSPSAQQAQ

SEQ ID NO: 23440 - protein, 10 aa, synthetic construct
  REGION 1..10: note = Melanocyte protein PMEL (412-421)
VSIVVLSGTT

SEQ ID NO: 23441 - protein, 9 aa, synthetic construct
  REGION 1..9: note = Kinesin-like protein KIF27 (522-530)
VSLKEAQKV

SEQ ID NO: 23442 - protein, 8 aa, synthetic construct
  REGION 1..8: note = HLA class I histocompatibility antigen, A-23 alpha chain (358-365)
VSLTACKV

SEQ ID NO: 23443 - protein, 9 aa, synthetic construct
  REGION 1..9: note = Potassium-transporting ATPase alpha chain 1 (600-608)
VSMIDPPRA

SEQ ID NO: 23444 - protein, 9 aa, synthetic construct
  REGION 1..9: note = Cyclic AMP-dependent transcription factor ATF-6 alpha (445-453)
VSNDKALMV

SEQ ID NO: 23445 - protein, 9 aa, synthetic construct
  REGION 1..9: note = Vacuolar protein sorting-associated protein 13D (2458-2466)
VSNERHLEV

SEQ ID NO: 23446 - protein, 9 aa, synthetic construct
  REGION 1..9: note = Transcription initiation factor TFIID subunit 1 (307-315)
VSQKSLWNY

SEQ ID NO: 23447 - protein, 9 aa, synthetic construct
  REGION 1..9: note = Neuron navigator 3 (198-206)
VSSKTTLQY

SEQ ID NO: 23448 - protein, 9 aa, synthetic construct
  REGION 1..9: note Dolichyl-diphosphooligosaccharide-proteinosyltransferase subunit 1 (300-308)
VSTSHLLIL

SEQ ID NO: 23449 - protein, 9 aa, synthetic construct
  REGION 1..9: note = DNA damage-binding protein 1 (7-15)
VTAQKPTAV

SEQ ID NO: 23450 - protein, 9 aa, synthetic construct
  REGION 1..9: note = General transcription factor II-I (201-209)
VTDADRSIL

SEQ ID NO: 23451 - protein, 23 aa, synthetic construct
  REGION 1..23: note = Nebulin (5596-5618)
VTDDKNTVLALRNTLIESDLKYK

SEQ ID NO: 23452 - protein, 9 aa, synthetic construct
  REGION 1..9: note = HLA class II histocompatibility antigen, DQ beta 1 chain (114-122)
VTDFYPAQI

SEQ ID NO: 23453 - protein, 9 aa, synthetic construct
  REGION 1..9: note = Protein dopey-2 (2274-2282)
VTDSPRILK

SEQ ID NO: 23454 - protein, 9 aa, synthetic construct
  REGION 1..9: note = Williams-Beuren syndrome chromosomal region 16 protein (318-326)
VTDSTQVNV

SEQ ID NO: 23455 - protein, 10 aa, synthetic construct
  REGION 1..10: note = Nebulin (5327-5336)
VTDTVSDVKY

SEQ ID NO: 23456 - protein, 17 aa, synthetic construct
  REGION 1..17: note = Cytochrome c oxidase subunit 6B1 (1-17)
VTDWDEQRAEGTFPGKI

SEQ ID NO: 23457 - protein, 9 aa, synthetic construct
  REGION 1..9: note = Insulin-like growth factor 1 receptor (683-691)
VTENPKTEV

SEQ ID NO: 23458 - protein, 9 aa, synthetic construct
  REGION 1..9: note = Ras association domain-containing protein 3 (64-72)
VTESPAKFA

SEQ ID NO: 23459 - protein, 10 aa, synthetic construct
  REGION 1..10: note = Large neutral amino acids transporter small subunit 2 (80-89)
VTFGEKLLGV

SEQ ID NO: 23460 - protein, 9 aa, synthetic construct
  REGION 1..9: note = Cadherin EGF LAG seven-pass G-type receptor 1 (634-642)
VTFSALLPG

SEQ ID NO: 23461 - protein, 21 aa, synthetic construct
  REGION 1..21: note = Heterogeneous nuclear ribonucleoprotein F (327-347)
VTGEADVEFATHEEAVAAMSK

SEQ ID NO: 23462 - protein, 12 aa, synthetic construct
  REGION 1..12: note = Mucin-19 (3971-3982)
VTGITGPSAGIT

SEQ ID NO: 23463 - protein, 24 aa, synthetic construct
  REGION 1..24: note = Splicing factor 3B subunit 4 (49-72)
VTGQHQGYGFVEFLSEEDADYAIK

SEQ ID NO: 23464 - protein, 9 aa, synthetic construct
  REGION 1..9: note = Melanotransferrin (119-127)
VTIDTLKGV

SEQ ID NO: 23465 - protein, 10 aa, synthetic construct
  REGION 1..10: note = Adhesion G protein-coupled receptor F5 (269-278)
VTINESNFFV

SEQ ID NO: 23466 - protein, 9 aa, synthetic construct
  REGION 1..9: note = Maltase-glucoamylase (886-894)
VTITDLQGL

SEQ ID NO: 23467 - protein, 12 aa, synthetic construct
  REGION 1..12: note = Annexin A2 (54-65)
VTIVNILTNRSN

SEQ ID NO: 23468 - protein, 14 aa, synthetic construct
  REGION 1..14: note = Annexin A2 (54-67)
VTIVNILTNRSNAQ

SEQ ID NO: 23469 - protein, 19 aa, synthetic construct
  REGION 1..19: note = Prelamin-A/C (346-364)
VTIWAAGAGATHSPPTDLV

SEQ ID NO: 23470 - protein, 13 aa, synthetic construct
  REGION 1..13: note = Laminin subunit gamma-1 (671-683)
VTLASARPGPGVP

SEQ ID NO: 23471 - protein, 11 aa, synthetic construct
  REGION 1..11: note = Heat shock transcription factor, X-linked (369-379)
VTLVAAGAAQP

SEQ ID NO: 23472 - protein, 9 aa, synthetic construct
  REGION 1..9: note = Trafficking protein particle complex subunit 2-like protein (73-81)
VTNSKVKFV

SEQ ID NO: 23473 - protein, 9 aa, synthetic construct
  REGION 1..9: note = Solute carrier family 26 member 10 (164-172)
VTPDQLFVS

SEQ ID NO: 23474 - protein, 10 aa, synthetic construct
  REGION 1..10: note = Treacle protein (248-257)
VTPQVKGGAL

SEQ ID NO: 23475 - protein, 15 aa, synthetic construct
  REGION 1..15: note = Desmoglein-2 (901-915)
VTQEIVTERSVSSRQ

SEQ ID NO: 23476 - protein, 16 aa, synthetic construct
  REGION 1..16: note = Desmoglein-2 (901-916)
VTQEIVTERSVSSRQA

SEQ ID NO: 23477 - protein, 16 aa, synthetic construct
  REGION 1..16: note = Voltage-dependent anion-selective channel protein 1 (164-179)
VTQSNFAVGYKTDEFQ

SEQ ID NO: 23478 - protein, 9 aa, synthetic construct
  REGION 1..9: note = Bifunctional glutamate/proline-tRNA ligase (1104-1112)
VTRSGKTEL

SEQ ID NO: 23479 - protein, 11 aa, synthetic construct
  REGION 1..11: note = HMG domain-containing protein 4 (358-368)
VTSGPPPSIPY

SEQ ID NO: 23480 - protein, 13 aa, synthetic construct
  REGION 1..13: note = Vimentin (31-43)
VTTSTRTYSLGSA

SEQ ID NO: 23481 - protein, 9 aa, synthetic construct
  REGION 1..9: note = Low-density lipoprotein receptor-related protein 2 (584-592)
VTYDGIQRK

SEQ ID NO: 23482 - protein, 9 aa, synthetic construct
  REGION 1..9: note = Unconventional myosin-Ic (1036-1044)
VVAPRLNSR

SEQ ID NO: 23483 - protein, 10 aa, synthetic construct
  REGION 1..10: note = Echinoderm microtubule-associated protein-like 3 (378-387)
VVDDSNEHML

SEQ ID NO: 23484 - protein, 9 aa, synthetic construct
  REGION 1..9: note = Helicase with zinc finger domain 2 (2588-2596)
VVDPNQVNV

SEQ ID NO: 23485 - protein, 9 aa, synthetic construct
  REGION 1..9: note = Catenin alpha-1 (33-41)
VVEDGILKL

SEQ ID NO: 23486 - protein, 14 aa, synthetic construct
  REGION 1..14: note = Beta-hexosaminidase subunit alpha (397-410)
VVEPLAFEGTPEQK

SEQ ID NO: 23487 - protein, 13 aa, synthetic construct
  REGION 1..13: note = Glyceraldehyde-3-phosphate dehydrogenase (95-107)
VVESTGVFTTMEK

SEQ ID NO: 23488 - protein, 15 aa, synthetic construct
  REGION 1..15: note = Glyceraldehyde-3-phosphate dehydrogenase (95-109)
VVESTGVFTTMEKAG

SEQ ID NO: 23489 - protein, 16 aa, synthetic construct
  REGION 1..16: note = Glyceraldehyde-3-phosphate dehydrogenase (95-110)
VVESTGVFTTMEKAGA

SEQ ID NO: 23490 - protein, 9 aa, synthetic construct
  REGION 1..9: note = Thioredoxin-interacting protein (12-20)
VVFNDPEKV

SEQ ID NO: 23491 - protein, 9 aa, synthetic construct
  REGION 1..9: note = Ribosomal RNA-processing protein 7 homolog A (119-127)
VVFQKPSGV

SEQ ID NO: 23492 - protein, 9 aa, synthetic construct
  REGION 1..9: note = F-box only protein 7 (293-301)
VVLPLELKL

SEQ ID NO: 23493 - protein, 9 aa, synthetic construct
  REGION 1..9: note = ABCB9 protein (422-430)
VVQVSILYY

SEQ ID NO: 23494 - protein, 8 aa, synthetic construct
  REGION 1..8: note = Unconventional myosin-Ic (251-258)
VVRKALTV

SEQ ID NO: 23495 - protein, 9 aa, synthetic construct
  REGION 1..9: note = Cancer/testis antigen 55 (63-71)
VVTGNVPLK

SEQ ID NO: 23496 - protein, 8 aa, synthetic construct
  REGION 1..8: note = Protein FAM65B (860-867)
VVTVFQYY

SEQ ID NO: 23497 - protein, 9 aa, synthetic construct
  REGION 1..9: note = Leucine-rich repeat LGI family member 4 (16-24)
VVVAWRPPK

SEQ ID NO: 23498 - protein, 12 aa, synthetic construct
  REGION 1..12: note = Glutamate receptor ionotropic, kainate 2 (174-185)
VVYDDSTGLIRL

SEQ ID NO: 23499 - protein, 15 aa, synthetic construct
  REGION 1..15: note = Calcium-binding mitochondrial carrier protein SCaMC-1 (444-458)
VVYENMKQTLGVTQK

SEQ ID NO: 23500 - protein, 11 aa, synthetic construct
  REGION 1..11: note = N-acetyllactosaminide beta-1,6-N-acetylglucosaminyl-transferase, isoform A (159-169)
VVYGGISRLQA

SEQ ID NO: 23501 - protein, 12 aa, synthetic construct
  REGION 1..12: note = m7GpppX diphosphatase (131-142)
VVYPATEKHLQK

SEQ ID NO: 23502 - protein, 9 aa, synthetic construct
  REGION 1..9: note = Melanoma-derived growth regulatory protein (69-77)
VVYVFSKLK

SEQ ID NO: 23503 - protein, 10 aa, synthetic construct
  REGION 1..10: note = 2-hydroxyacylsphingosine 1-beta-galactosyltransferase (258-267)
VVYVGGILTK

SEQ ID NO: 23504 - protein, 9 aa, synthetic construct
  REGION 1..9: note = N-acylglucosamine 2-epimerase (48-56)
VYDDLKYVW

SEQ ID NO: 23505 - protein, 10 aa, synthetic construct
  REGION 1..10: note = Cleft lip and palate transmembrane protein 1 (470-479)
VYDDMAFRYL

SEQ ID NO: 23506 - protein, 12 aa, synthetic construct
  REGION 1..12: note = Protein phosphatase 1A (58-69)
VYDGHAGSQVAK

SEQ ID NO: 23507 - protein, 9 aa, synthetic construct
  REGION 1..9: note = Melanoma-associated antigen 4 (231-239)
VYDGREHTV

SEQ ID NO: 23508 - protein, 10 aa, synthetic construct
  REGION 1..10: note = Nuclear pore complex protein Nup160 (1114-1123)
VYDRPGASPK

SEQ ID NO: 23509 - protein, 8 aa, synthetic construct
  REGION 1..8: note = Retinoic acid receptor alpha (49-56)
VYETDVFV

SEQ ID NO: 23510 - protein, 9 aa, synthetic construct
  REGION 1..9: note = Origin recognition complex subunit 3 (436-444)
VYFSAAHAL

SEQ ID NO: 23511 - protein, 9 aa, synthetic construct
  REGION 1..9: note = Melanoma-associated antigen C2 (266-274)
VYGEPRELL

SEQ ID NO: 23512 - protein, 9 aa, synthetic construct
  REGION 1..9: note = UBX domain-containing protein 6 (214-222)
VYGFVREAL

SEQ ID NO: 23513 - protein, 9 aa, synthetic construct
  REGION 1..9: note = Tripartite motif-containing protein 55 (92-100)
VYGLQRNLL

SEQ ID NO: 23514 - protein, 9 aa, synthetic construct
  REGION 1..9: note = Sulfate transporter (138-146)
VYGLYTSFF

SEQ ID NO: 23515 - protein, 8 aa, synthetic construct
  REGION 1..8: note = Filamin-A (747-754)
VYGPGVAK

SEQ ID NO: 23516 - protein, 8 aa, synthetic construct
  REGION 1..8: note = Serine palmitoyltransferase 2 (238-245)
VYGQPRTR

SEQ ID NO: 23517 - protein, 9 aa, synthetic construct
  REGION 1..9: note = Rho-related BTB domain-containing protein 3 (463-471)
VYGVSKETF

SEQ ID NO: 23518 - protein, 9 aa, synthetic construct
  REGION 1..9: note = Beta-galactoside alpha-2,6-sialyltransferase 1 (260-268)
VYHSDIPKW

SEQ ID NO: 23519 - protein, 9 aa, synthetic construct
  REGION 1..9: note = Heterogeneous nuclear ribonucleoprotein L-like (131-139)
VYIAGQQAF

SEQ ID NO: 23520 - protein, 9 aa, synthetic construct
  REGION 1..9: note = Kinesin-like protein KIF3C (175-183)
VYIKDLSSF

SEQ ID NO: 23521 - protein, 9 aa, synthetic construct
  REGION 1..9: note = Ubiquitin carboxyl-terminal hydrolase 40 (308-316)
VYIKDVDHL

SEQ ID NO: 23522 - protein, 8 aa, synthetic construct
  REGION 1..8: note = 26S proteasome non-ATPase regulatory subunit 8 (131-138)
VYIKHPVS

SEQ ID NO: 23523 - protein, 10 aa, synthetic construct
  REGION 1..10: note = Protocadherin gamma-A11 (898-907)
VYIPGSNATL

SEQ ID NO: 23524 - protein, 10 aa, synthetic construct
  REGION 1..10: note = Myotubularin (63-72)
VYITNYRLYL

SEQ ID NO: 23525 - protein, 9 aa, synthetic construct
  REGION 1..9: note = Polycystic kidney disease 2-like 1 protein (265-273)
VYNANINLF

SEQ ID NO: 23526 - protein, 9 aa, synthetic construct
  REGION 1..9: note = Intron-binding protein aquarius (344-352)
VYNMYMHLI

SEQ ID NO: 23527 - protein, 9 aa, synthetic construct
  REGION 1..9: note = Unconventional myosin-X (213-221)
VYNNNSSRF

SEQ ID NO: 23528 - protein, 9 aa, synthetic construct
  REGION 1..9: note = Exocyst complex component 6B (535-543)
VYNQIKEFI

SEQ ID NO: 23529 - protein, 9 aa, synthetic construct
  REGION 1..9: note = HLA class II histocompatibility antigen, DR beta 5 chain (96-104)
VYPARTQTL

SEQ ID NO: 23530 - protein, 9 aa, synthetic construct
  REGION 1..9: note = HLA class II histocompatibility antigen, DO beta chain (127-135)
VYPERTPLL

SEQ ID NO: 23531 - protein, 9 aa, synthetic construct
  REGION 1..9: note = tRNA-splicing endonuclease subunit Sen34 (246-254)
VYPGDPLRF

SEQ ID NO: 23532 - protein, 9 aa, synthetic construct
  REGION 1..9: note = Cullin-associated NEDD8-dissociated protein 1 (651-659)
VYPSSLSKI

SEQ ID NO: 23533 - protein, 10 aa, synthetic construct
  REGION 1..10: note = Zinc finger protein 529 (226-235)
VYQKIHNEKF

SEQ ID NO: 23534 - protein, 9 aa, synthetic construct
  REGION 1..9: note = DNA-directed RNA polymerase I subunit RPA1 (1314-1322)
VYQLRFQFL

SEQ ID NO: 23535 - protein, 9 aa, synthetic construct
  REGION 1..9: note = Protein CDV3 homolog (66-74)
VYRPPGARL

SEQ ID NO: 23536 - protein, 9 aa, synthetic construct
  REGION 1..9: note = Polynucleotide 5'-hydroxyl-kinase NOL9 (499-507)
VYTDFAFRI

SEQ ID NO: 23537 - protein, 9 aa, synthetic construct
  REGION 1..9: note = HEAT repeat-containing protein 5A (1098-1106)
VYTDRFHLI

SEQ ID NO: 23538 - protein, 9 aa, synthetic construct
  REGION 1..9: note = Ral GTPase-activating protein subunit beta (89-97)
VYTDWIMAL

SEQ ID NO: 23539 - protein, 9 aa, synthetic construct
  REGION 1..9: note = Kidney mitochondrial carrier protein 1 (125-133)
VYTHFLSSF

SEQ ID NO: 23540 - protein, 9 aa, synthetic construct
  REGION 1..9: note = Uncharacterized protein C18orf8 (400-408)
VYTHVLSAF

SEQ ID NO: 23541 - protein, 9 aa, synthetic construct
  REGION 1..9: note = Sprouty-related, EVH1 domain-containing protein 2 (80-88)
VYTKANPTF

SEQ ID NO: 23542 - protein, 9 aa, synthetic construct
  REGION 1..9: note = 2'-5'-oligoadenylate synthase 3 (909-917)
VYVDLIHSY

SEQ ID NO: 23543 - protein, 8 aa, synthetic construct
  REGION 1..8: note = Melanoma-derived growth regulatory protein (70-77)
VYVFSKLK

SEQ ID NO: 23544 - protein, 10 aa, synthetic construct
  REGION 1..10: note = Long-chain fatty acid transport protein 1 (34-43)
VYVGSGGWRF

SEQ ID NO: 23545 - protein, 9 aa, synthetic construct
  REGION 1..9: note = Hemicentin-1 (4343-4351)
VYVKEPPVF

SEQ ID NO: 23546 - protein, 9 aa, synthetic construct
  REGION 1..9: note = AP-3 complex subunit mu-2 (274-282)
VYVKHNISF

SEQ ID NO: 23547 - protein, 10 aa, synthetic construct
  REGION 1..10: note = Large neutral amino acids transporter small subunit 1 (22-31)
VYVLTNLAYF

SEQ ID NO: 23548 - protein, 8 aa, synthetic construct
  REGION 1..8: note = Histone H2B type 2-F (40-47)
VYVYKVLK

SEQ ID NO: 23549 - protein, 9 aa, synthetic construct
  REGION 1..9: note = Leptin receptor gene-related protein (27-35)
VYWPLFVLI

SEQ ID NO: 23550 - protein, 9 aa, synthetic construct
  REGION 1..9: note = GDP-fucose protein O-fucosyltransferase 1 (6-14)
WARPLSVSF

SEQ ID NO: 23551 - protein, 22 aa, synthetic construct
  REGION 1..22: note = Modulator of apoptosis 1 (9-30)
WCRGMDMNPRKALLIAGISQSC

SEQ ID NO: 23552 - protein, 12 aa, synthetic construct
  REGION 1..12: note = Puromycin-sensitive aminopeptidase (479-490)
WESLENASGKPI

SEQ ID NO: 23553 - protein, 14 aa, synthetic construct
  REGION 1..14: note = Protein CREG1 (68-81)
WGALATISTLEAVR

SEQ ID NO: 23554 - protein, 15 aa, synthetic construct
  REGION 1..15: note = Protein CREG1 (68-82)
WGALATISTLEAVRG

SEQ ID NO: 23555 - protein, 6 aa, synthetic construct
  REGION 1..6: note = Dedicator of cytokinesis protein 9 (121-126)
WHLVNY

SEQ ID NO: 23556 - protein, 6 aa, synthetic construct
  REGION 1..6: note = Dedicator of cytokinesis protein 10 (114-119)
WHVVNY

SEQ ID NO: 23557 - protein, 6 aa, synthetic construct
  REGION 1..6: note = Forkhead box protein N2 (51-56)
WILDHF

SEQ ID NO: 23558 - protein, 9 aa, synthetic construct
  REGION 1..9: note = Neutral amino acid transporter A (155-163)
WIVDRTTTV

SEQ ID NO: 23559 - protein, 9 aa, synthetic construct
  REGION 1..9: note = Bifunctional glutamate/proline-tRNA ligase (616-624)
WLAETTHAL

SEQ ID NO: 23560 - protein, 10 aa, synthetic construct
  REGION 1..10: note = 60S ribosomal protein L19 (4-13)
WLDPNETNEI

SEQ ID NO: 23561 - protein, 10 aa, synthetic construct
  REGION 1..10: note = Solute carrier family 12 member 2 (1012-1021)
WLFDDGGLTL

SEQ ID NO: 23562 - protein, 6 aa, synthetic construct
  REGION 1..6: note = Serine/arginine-rich splicing factor 6 (107-112)
WLFHTL

SEQ ID NO: 23563 - protein, 9 aa, synthetic construct
  REGION 1..9: note = Nuclear migration protein nudC (184-192)
WLIEDGKVV

SEQ ID NO: 23564 - protein, 6 aa, synthetic construct
  REGION 1..6: note = ATP-dependent RNA helicase DHX36 (885-890)
WLIYHL

SEQ ID NO: 23565 - protein, 11 aa, synthetic construct
  REGION 1..11: note = Liprin-beta-1 (649-659)
WLMEQGLGSYL

SEQ ID NO: 23566 - protein, 10 aa, synthetic construct
  REGION 1..10: note = Tuberin (56-65)
WLVGNKLVTV

SEQ ID NO: 23567 - protein, 9 aa, synthetic construct
  REGION 1..9: note = Vacuole membrane protein 1 (366-374)
WMFEKLVVV

SEQ ID NO: 23568 - protein, 9 aa, synthetic construct
  REGION 1..9: note = Hemicentin-1 (236-244)
WRIPFDPSL

SEQ ID NO: 23569 - protein, 9 aa, synthetic construct
  REGION 1..9: note = Hemicentin-2 (233-241)
WRLPFDPSL

SEQ ID NO: 23570 - protein, 47 aa, synthetic construct
  REGION 1..47: note = ATP synthase subunit epsilon, mitochondrial (5-51)
WRQAGLSYIRYSQICAKAVRDALKTEFKANAEKTSGSNVKIVKVKKE

SEQ ID NO: 23571 - protein, 9 aa, synthetic construct
  REGION 1..9: note = Pleckstrin homology domain-containing family B member 2 (27-35)
WSDGHLIYY

SEQ ID NO: 23572 - protein, 8 aa, synthetic construct
  REGION 1..8: note = Low-density lipoprotein receptor-related protein 2 (440-447)
WTDTVQNK

SEQ ID NO: 23573 - protein, 6 aa, synthetic construct
  REGION 1..6: note = Importin-7 (450-455)
WVLHYF

SEQ ID NO: 23574 - protein, 9 aa, synthetic construct
  REGION 1..9: note = Vimentin (290-298)
WYKSKFADL

SEQ ID NO: 23575 - protein, 8 aa, synthetic construct
  REGION 1..8: note = Suppressor of SWI4 1 homolog (25-32)
YAANPHSF

SEQ ID NO: 23576 - protein, 10 aa, synthetic construct
  REGION 1..10: note = Putative eukaryotic translation initiation factor 2 subunit 3-like protein (330-339)
YAAPGGLIGV

SEQ ID NO: 23577 - protein, 8 aa, synthetic construct
  REGION 1..8: note = A-kinase anchor protein 9 (284-291)
YADEKTLF

SEQ ID NO: 23578 - protein, 8 aa, synthetic construct
  REGION 1..8: note = E3 SUMO-protein ligase RanBP2 (3010-3017)
YADGEAKV

SEQ ID NO: 23579 - protein, 8 aa, synthetic construct
  REGION 1..8: note = Proteasome subunit beta type-4 (160-167)
YADGESFL

SEQ ID NO: 23580 - protein, 9 aa, synthetic construct
  REGION 1..9: note = ATP-binding cassette sub-family A member 2 (14-22)
YADKPAGTY

SEQ ID NO: 23581 - protein, 9 aa, synthetic construct
  REGION 1..9: note = Ankyrin repeat domain-containing protein 17 (1180-1188)
YAEVGRVLL

SEQ ID NO: 23582 - protein, 9 aa, synthetic construct
  REGION 1..9: note = Protein FAM208B (753-761)
YAFSLDSKY

SEQ ID NO: 23583 - protein, 10 aa, synthetic construct
  REGION 1..10: note = Heterogeneous nuclear ribonucleoprotein L (250-259)
YAKPTRLNVF

SEQ ID NO: 23584 - protein, 10 aa, synthetic construct
  REGION 1..10: note = Rho GTPase-activating protein 5 (623-632)
YALDGKIYEL

SEQ ID NO: 23585 - protein, 23 aa, synthetic construct
  REGION 1..23: note = Keratin, type I cytoskeletal 18 (273-295)
YALQMEQLNGILLHLESELAQTR

SEQ ID NO: 23586 - protein, 11 aa, synthetic construct
  REGION 1..11: note = NAD(P)H dehydrogenase (quinone) 1 (43-53)
YAMNFNPIISR

SEQ ID NO: 23587 - protein, 10 aa, synthetic construct
  REGION 1..10: note = Protein FAM73A (152-161)
YANGGLFSKY

SEQ ID NO: 23588 - protein, 9 aa, synthetic construct
  REGION 1..9: note = Coiled-coil domain-containing protein 34 (296-304)
YANGKLTGF

SEQ ID NO: 23589 - protein, 8 aa, synthetic construct
  REGION 1..8: note = Tubulin alpha-1C chain (173-180)
YARGHYTI

SEQ ID NO: 23590 - protein, 11 aa, synthetic construct
  REGION 1..11: note = Synaptojanin-2 (4-14)
YASGPAPPAGT

SEQ ID NO: 23591 - protein, 10 aa, synthetic construct
  REGION 1..10: note = Destrin (117-126)
YASSKDAIKK

SEQ ID NO: 23592 - protein, 9 aa, synthetic construct
  REGION 1..9: note = Tetratricopeptide repeat protein 14 (351-359)
YATKGSLNK

SEQ ID NO: 23593 - protein, 7 aa, synthetic construct
  REGION 1..7: note = Serine/threonine-protein kinase LATS1 (731-737)
YATKTLR

SEQ ID NO: 23594 - protein, 8 aa, synthetic construct
  REGION 1..8: note = MAGUK p55 subfamily member 5 (117-124)
YAVKILEI

SEQ ID NO: 23595 - protein, 9 aa, synthetic construct
  REGION 1..9: note = 60S ribosomal protein L4 (52-60)
YAVSELAGH

SEQ ID NO: 23596 - protein, 8 aa, synthetic construct
  REGION 1..8: note = Melanoma-associated antigen 4 (232-239)
YDGREHTV

SEQ ID NO: 23597 - protein, 9 aa, synthetic construct
  REGION 1..9: note = Neurobeachin-like protein 1 (2364-2372)
YDRNISNYF

SEQ ID NO: 23598 - protein, 7 aa, synthetic construct
  REGION 1..7: note = Signal recognition particle subunit SRP68 (455-461)
YDRVLKY

SEQ ID NO: 23599 - protein, 9 aa, synthetic construct
  REGION 1..9: note = DNA topoisomerase 2-alpha (1082-1090)
YDSDPVKAW

SEQ ID NO: 23600 - protein, 9 aa, synthetic construct
  REGION 1..9: note = Seizure 6-like protein 2 (844-852)
YEAGDTREY

SEQ ID NO: 23601 - protein, 9 aa, synthetic construct
  REGION 1..9: note = Protein SSX5 (55-63)
YEAMTKLGF

SEQ ID NO: 23602 - protein, 9 aa, synthetic construct
  REGION 1..9: note = ATP-binding cassette sub-family C member 8 (1326-1334)
YEGLLAPSL

SEQ ID NO: 23603 - protein, 7 aa, synthetic construct
  REGION 1..7: note = L-dopachrome tautomerase (303-309)
YEGLLRR

SEQ ID NO: 23604 - protein, 8 aa, synthetic construct
  REGION 1..8: note = Melanophilin (122-129)
YEHVKARF

SEQ ID NO: 23605 - protein, 7 aa, synthetic construct
  REGION 1..7: note = Annexin A5 (94-100)
YELKHAL

SEQ ID NO: 23606 - protein, 9 aa, synthetic construct
  REGION 1..9: note = Gamma-secretase C-terminal fragment 59 (647-655)
YENPTYKFF

SEQ ID NO: 23607 - protein, 7 aa, synthetic construct
  REGION 1..7: note = 39S ribosomal protein L20, mitochondrial (108-114)
YEPKTFK

SEQ ID NO: 23608 - protein, 9 aa, synthetic construct
  REGION 1..9: note = Migration stimulation factor FN70 (392-400)
YEQDQKYSF

SEQ ID NO: 23609 - protein, 12 aa, synthetic construct
  REGION 1..12: note = Spectrin beta chain, non-erythrocytic 5 (750-761)
YFADAAEAASWL

SEQ ID NO: 23610 - protein, 7 aa, synthetic construct
  REGION 1..7: note = Glia-derived nexin (200-206)
YFKGLWK

SEQ ID NO: 23611 - protein, 9 aa, synthetic construct
  REGION 1..9: note = Serine-tRNA ligase, cytoplasmic (194-202)
YFLKGVLVF

SEQ ID NO: 23612 - protein, 10 aa, synthetic construct
  REGION 1..10: note = Tyrosine-protein kinase receptor (124-133)
YGAAGGKGAK

SEQ ID NO: 23613 - protein, 10 aa, synthetic construct
  REGION 1..10: note = Hemoglobin subunit alpha (25-34)
YGAEALERMF

SEQ ID NO: 23614 - protein, 17 aa, synthetic construct
  REGION 1..17: note = Hemoglobin subunit alpha (25-41)
YGAEALERMFLSFPTTK

SEQ ID NO: 23615 - protein, 8 aa, synthetic construct
  REGION 1..8: note = Tubulin beta-6 chain (157-164)
YGDLNHLV

SEQ ID NO: 23616 - protein, 8 aa, synthetic construct
  REGION 1..8: note = WD repeat-containing protein 3 (588-595)
YGHKLPVI

SEQ ID NO: 23617 - protein, 9 aa, synthetic construct
  REGION 1..9: note = Translocating chain-associated membrane protein 1 (75-83)
YGIKDLATV

SEQ ID NO: 23618 - protein, 7 aa, synthetic construct
  REGION 1..7: note = U2 small nuclear ribonucleoprotein B'' (75-81)
YGKPMRI

SEQ ID NO: 23619 - protein, 7 aa, synthetic construct
  REGION 1..7: note = Nucleoporin NUP53 (179-185)
YGNILKH

SEQ ID NO: 23620 - protein, 9 aa, synthetic construct
  REGION 1..9: note = Filamin-A (1844-1852)
YGPGLTHGV

SEQ ID NO: 23621 - protein, 7 aa, synthetic construct
  REGION 1..7: note = Vacuolar protein sorting-associated protein 51 homolog (123-129)
YGQAVRY

SEQ ID NO: 23622 - protein, 7 aa, synthetic construct
  REGION 1..7: note = Serine palmitoyltransferase 3 (290-296)
YGQPRTR

SEQ ID NO: 23623 - protein, 7 aa, synthetic construct
  REGION 1..7: note = Tyrosine-protein kinase Fyn (385-391)
YGRFTIK

SEQ ID NO: 23624 - protein, 16 aa, synthetic construct
  REGION 1..16: note = Annexin A2 (24-39)
YGSVKAYTNFDAERDA

SEQ ID NO: 23625 - protein, 8 aa, synthetic construct
  REGION 1..8: note = Band 4.1-like protein 3 (187-194)
YGVDLHHA

SEQ ID NO: 23626 - protein, 7 aa, synthetic construct
  REGION 1..7: note = Parafibromin (315-321)
YHGMTLK

SEQ ID NO: 23627 - protein, 6 aa, synthetic construct
  REGION 1..6: note = Fibronectin type III domain-containing protein 3B (351-356)
YHVRVY

SEQ ID NO: 23628 - protein, 11 aa, synthetic construct
  REGION 1..11: note = cAMP-responsive element modulator (185-195)
YIAIAQGGTIQ

SEQ ID NO: 23629 - protein, 9 aa, synthetic construct
  REGION 1..9: note = HEAT repeat-containing protein 1 (1013-1021)
YIAKDLMKV

SEQ ID NO: 23630 - protein, 9 aa, synthetic construct
  REGION 1..9: note = Gamma-tubulin complex component 6 (1683-1691)
YIANQILHV

SEQ ID NO: 23631 - protein, 9 aa, synthetic construct
  REGION 1..9: note = CAAX prenyl protease 1 homolog (218-226)
YIAPLFDKF

SEQ ID NO: 23632 - protein, 12 aa, synthetic construct
  REGION 1..12: note = Serum albumin (287-298)
YICENQDSISSK

SEQ ID NO: 23633 - protein, 9 aa, synthetic construct
  REGION 1..9: note = Ankyrin-2 (1793-1801)
YIDEHGHTV

SEQ ID NO: 23634 - protein, 6 aa, synthetic construct
  REGION 1..6: note = E3 ubiquitin-protein ligase RNF216 (59-64)
YIDFKF

SEQ ID NO: 23635 - protein, 9 aa, synthetic construct
  REGION 1..9: note = Ribonuclease 3 (577-585)
YIDKDLEYV

SEQ ID NO: 23636 - protein, 9 aa, synthetic construct
  REGION 1..9: note = Eukaryotic translation initiation factor 3 subunit L (522-530)
YIDKDMIHI

SEQ ID NO: 23637 - protein, 8 aa, synthetic construct
  REGION 1..8: note = Receptor tyrosine-protein kinase erbB-3 (148-155)
YIEKNDKL

SEQ ID NO: 23638 - protein, 9 aa, synthetic construct
  REGION 1..9: note = Laminin subunit beta-1 (396-404)
YIEKVVYTV

SEQ ID NO: 23639 - protein, 8 aa, synthetic construct
  REGION 1..8: note = 26S proteasome non-ATPase regulatory subunit 8 (132-139)
YIKHPVSL

SEQ ID NO: 23640 - protein, 8 aa, synthetic construct
  REGION 1..8: note = Retinoblastoma-like protein 2 (1013-1020)
YIKQIKTF

SEQ ID NO: 23641 - protein, 9 aa, synthetic construct
  REGION 1..9: note = Exostosin-2 (348-356)
YILPFSEVL

SEQ ID NO: 23642 - protein, 10 aa, synthetic construct
  REGION 1..10: note = E3 ubiquitin-protein ligase RNF114 (116-125)
YIMEGVKATI

SEQ ID NO: 23643 - protein, 9 aa, synthetic construct
  REGION 1..9: note = Cytoplasmic dynein 1 heavy chain 1 (2489-2497)
YIQRYLVYA

SEQ ID NO: 23644 - protein, 9 aa, synthetic construct
  REGION 1..9: note = Ceramide synthase 2 (78-86)
YIRAGTLIM

SEQ ID NO: 23645 - protein, 9 aa, synthetic construct
  REGION 1..9: note = Kinesin-like protein KIF11 (399-407)
YISEENFRV

SEQ ID NO: 23646 - protein, 8 aa, synthetic construct
  REGION 1..8: note = Cleft lip and palate transmembrane protein 1 (108-115)
YISEHEHF

SEQ ID NO: 23647 - protein, 9 aa, synthetic construct
  REGION 1..9: note = V-type proton ATPase subunit B, brain isoform (266-274)
YITEGQIYV

SEQ ID NO: 23648 - protein, 10 aa, synthetic construct
  REGION 1..10: note = E3 ubiquitin-protein ligase HERC2 (1123-1132)
YIVEGDFTGV

SEQ ID NO: 23649 - protein, 10 aa, synthetic construct
  REGION 1..10: note = Dedicator of cytokinesis protein 7 (457-466)
YIYPQSLNFA

SEQ ID NO: 23650 - protein, 7 aa, synthetic construct
  REGION 1..7: note = Eukaryotic peptide chain release factor GTP-binding subunit ERF3A (309-315)
YKDMGTV

SEQ ID NO: 23651 - protein, 7 aa, synthetic construct
  REGION 1..7: note = Store-operated calcium entry-associated regulatory factor (105-111)
YKFGKTV

SEQ ID NO: 23652 - protein, 7 aa, synthetic construct
  REGION 1..7: note = Ras-related protein Rab-20 (158-164)
YKKILKY

SEQ ID NO: 23653 - protein, 10 aa, synthetic construct
  REGION 1..10: note = Cytochrome c oxidase subunit 5B, mitochondrial (120-129)
YKLVPQQLAH

SEQ ID NO: 23654 - protein, 8 aa, synthetic construct
  REGION 1..8: note = Alpha-2-macroglobulin (163-170)
YKPGQTVK

SEQ ID NO: 23655 - protein, 8 aa, synthetic construct
  REGION 1..8: note = Fanconi anemia group I protein (1039-1046)
YKSPVILL

SEQ ID NO: 23656 - protein, 9 aa, synthetic construct
  REGION 1..9: note = Thioredoxin-interacting protein (221-229)
YLANGQTKV

SEQ ID NO: 23657 - protein, 10 aa, synthetic construct
  REGION 1..10: note = Laminin subunit gamma-1 (667-676)
YLDDVTLASA

SEQ ID NO: 23658 - protein, 9 aa, synthetic construct
  REGION 1..9: note = Dedicator of cytokinesis protein 7 (628-636)
YLDKFFALV

SEQ ID NO: 23659 - protein, 9 aa, synthetic construct
  REGION 1..9: note = Dedicator of cytokinesis protein 6 (723-731)
YLDKFFTLV

SEQ ID NO: 23660 - protein, 9 aa, synthetic construct
  REGION 1..9: note = Zinc finger protein 573 (42-50)
YLDPNQRDL

SEQ ID NO: 23661 - protein, 9 aa, synthetic construct
  REGION 1..9: note = Kinesin-like protein KIF13B (1105-1113)
YLDQQLQKL

SEQ ID NO: 23662 - protein, 8 aa, synthetic construct
  REGION 1..8: note = ATP-binding cassette sub-family E member 1 (491-498)
YLDSEQRL

SEQ ID NO: 23663 - protein, 9 aa, synthetic construct
  REGION 1..9: note = Laminin subunit beta-1 (1753-1761)
YLEDKAQEL

SEQ ID NO: 23664 - protein, 9 aa, synthetic construct
  REGION 1..9: note = Enhancer of mRNA-decapping protein 4 (906-914)
YLEEAVMHL

SEQ ID NO: 23665 - protein, 9 aa, synthetic construct
  REGION 1..9: note = Inositol-trisphosphate 3-kinase A (270-278)
YLEEELTKA

SEQ ID NO: 23666 - protein, 8 aa, synthetic construct
  REGION 1..8: note = Ubiquitin carboxyl-terminal hydrolase 7 (1093-1100)
YLEKAIKI

SEQ ID NO: 23667 - protein, 8 aa, synthetic construct
  REGION 1..8: note = Plectin (1070-1077)
YLEKLKTI

SEQ ID NO: 23668 - protein, 9 aa, synthetic construct
  REGION 1..9: note = Heparan-sulfate 6-O-sulfotransferase 2 (442-450)
YLFEKTFNM

SEQ ID NO: 23669 - protein, 9 aa, synthetic construct
  REGION 1..9: note = Thioredoxin domain-containing protein 16 (103-111)
YLFKGNILL

SEQ ID NO: 23670 - protein, 9 aa, synthetic construct
  REGION 1..9: note = Bax inhibitor 1 (186-194)
YLFLGGILM

SEQ ID NO: 23671 - protein, 9 aa, synthetic construct
  REGION 1..9: note = T-box transcription factor TBX3 (251-259)
YLFPETEFI

SEQ ID NO: 23672 - protein, 9 aa, synthetic construct
  REGION 1..9: note = Cyclin-dependent kinase 2 (107-115)
YLFQLLQGL

SEQ ID NO: 23673 - protein, 9 aa, synthetic construct
  REGION 1..9: note = Electroneutral sodium bicarbonate exchanger 1 (1036-1044)
YLGASNYRT

SEQ ID NO: 23674 - protein, 9 aa, synthetic construct
  REGION 1..9: note = Hexokinase-1 (749-757)
YLGEIVRNI

SEQ ID NO: 23675 - protein, 8 aa, synthetic construct
  REGION 1..8: note = Clustered mitochondria protein homolog (510-517)
YLGKVLEL

SEQ ID NO: 23676 - protein, 9 aa, synthetic construct
  REGION 1..9: note = Putative ATP-dependent RNA helicase DHX33 (179-187)
YLHAALVSV

SEQ ID NO: 23677 - protein, 7 aa, synthetic construct
  REGION 1..7: note = Rho-related BTB domain-containing protein 3 (560-566)
YLIFSQK

SEQ ID NO: 23678 - protein, 9 aa, synthetic construct
  REGION 1..9: note = E3 ubiquitin-protein ligase TRIM36 (266-274)
YLIGKESQV

SEQ ID NO: 23679 - protein, 9 aa, synthetic construct
  REGION 1..9: note = ER membrane protein complex subunit 4 (136-144)
YLIGNLMGL

SEQ ID NO: 23680 - protein, 9 aa, synthetic construct
  REGION 1..9: note = F-box only protein 21 (364-372)
YLIGQHVTA

SEQ ID NO: 23681 - protein, 9 aa, synthetic construct
  REGION 1..9: note Dolichyl-diphosphooligosaccharide-proteinosyltransferase subunit 2 (343-351)
YLIIGDATL

SEQ ID NO: 23682 - protein, 10 aa, synthetic construct
  REGION 1..10: note = Nuclear export mediator factor NEMF (539-548)
YLIIGGRDQQ

SEQ ID NO: 23683 - protein, 9 aa, synthetic construct
  REGION 1..9: note = 60S ribosomal protein L3 (286-294)
YLIKDGKLI

SEQ ID NO: 23684 - protein, 9 aa, synthetic construct
  REGION 1..9: note = WD repeat-containing protein 6 (703-711)
YLKDGDVML

SEQ ID NO: 23685 - protein, 7 aa, synthetic construct
  REGION 1..7: note = SFRS17A protein (23-29)
YLKPITK

SEQ ID NO: 23686 - protein, 10 aa, synthetic construct
  REGION 1..10: note = TRPM8 channel-associated factor 2 (446-455)
YLLEGQNAEV

SEQ ID NO: 23687 - protein, 9 aa, synthetic construct
  REGION 1..9: note = Maestro heat-like repeat-containing protein family member 7 (965-973)
YLLIPLLER

SEQ ID NO: 23688 - protein, 10 aa, synthetic construct
  REGION 1..10: note = Translocating chain-associated membrane protein 1 (211-220)
YLLNLNHLGL

SEQ ID NO: 23689 - protein, 10 aa, synthetic construct
  REGION 1..10: note = Synemin (706-715)
YLLSKDIKEV

SEQ ID NO: 23690 - protein, 11 aa, synthetic construct
  REGION 1..11: note = E3 ubiquitin-protein ligase RNF213 (2078-2088)
YLMDINGKMWL

SEQ ID NO: 23691 - protein, 9 aa, synthetic construct
  REGION 1..9: note = Nesprin-1 (1560-1568)
YLMEARYSL

SEQ ID NO: 23692 - protein, 9 aa, synthetic construct
  REGION 1..9: note = Leucine-rich repeat and calponin homology domain-containing protein 1 (147-155)
YLNLSRNQL

SEQ ID NO: 23693 - protein, 9 aa, synthetic construct
  REGION 1..9: note = Kinesin-like protein KIF13B (1450-1458)
YLNPVKSFV

SEQ ID NO: 23694 - protein, 9 aa, synthetic construct
  REGION 1..9: note = Inactive ubiquitin carboxyl-terminal hydrolase 53 (271-279)
YLPGLFYRV

SEQ ID NO: 23695 - protein, 9 aa, synthetic construct
  REGION 1..9: note = Sterol regulatory element-binding protein 1 (1096-1104)
YLPPGFLSA

SEQ ID NO: 23696 - protein, 9 aa, synthetic construct
  REGION 1..9: note = La-related protein 4 (424-432)
YLQKETSTL

SEQ ID NO: 23697 - protein, 10 aa, synthetic construct
  REGION 1..10: note = Calcium/calmodulin-dependent 3',5'-cyclic nucleotide phosphodiesterase 1C (18-27)
YLQPEQIEKI

SEQ ID NO: 23698 - protein, 6 aa, synthetic construct
  REGION 1..6: note = Tyrosine-protein phosphatase non-receptor type 23 (30-35)
YLREHF

SEQ ID NO: 23699 - protein, 10 aa, synthetic construct
  REGION 1..10: note = Ubiquitin-like modifier-activating enzyme 7 (247-256)
YLRGGAITEV

SEQ ID NO: 23700 - protein, 11 aa, synthetic construct
  REGION 1..11: note = Protein dopey-1 (743-753)
YLSAFLAACQL

SEQ ID NO: 23701 - protein, 10 aa, synthetic construct
  REGION 1..10: note = 2-hydroxyacylsphingosine 1-beta-galactosyltransferase (299-308)
YLSEDIANKL

SEQ ID NO: 23702 - protein, 9 aa, synthetic construct
  REGION 1..9: note = Trafficking kinesin-binding protein 2 (496-504)
YLSEKQFFA

SEQ ID NO: 23703 - protein, 9 aa, synthetic construct
  REGION 1..9: note = Coatomer subunit beta' (490-498)
YLSEKVLAA

SEQ ID NO: 23704 - protein, 9 aa, synthetic construct
  REGION 1..9: note = Rho GTPase-activating protein 1 (214-222)
YLSELSEHV

SEQ ID NO: 23705 - protein, 8 aa, synthetic construct
  REGION 1..8: note = Polyadenylate-binding protein-interacting protein 1 (112-119)
YLSHHLTI

SEQ ID NO: 23706 - protein, 9 aa, synthetic construct
  REGION 1..9: note = Alpha-N-acetylglucosaminidase (583-591)
YLSKELASL

SEQ ID NO: 23707 - protein, 9 aa, synthetic construct
  REGION 1..9: note = Cytoplasmic dynein 1 heavy chain 1 (3552-3560)
YLSNADERL

SEQ ID NO: 23708 - protein, 9 aa, synthetic construct
  REGION 1..9: note = Serine/threonine-protein kinase A-Raf (529-537)
YLSPDLSKI

SEQ ID NO: 23709 - protein, 9 aa, synthetic construct
  REGION 1..9: note = UDP-glucose:glycoprotein glucosyltransferase 2 (1269-1277)
YLSPTFKEV

SEQ ID NO: 23710 - protein, 9 aa, synthetic construct
  REGION 1..9: note = Cathepsin D (150-158)
YLSQDTVSV

SEQ ID NO: 23711 - protein, 9 aa, synthetic construct
  REGION 1..9: note = Plexin-B3 (1418-1426)
YLTDIMRTL

SEQ ID NO: 23712 - protein, 14 aa, synthetic construct
  REGION 1..14: note = Plexin-B3 (1418-1431)
YLTDIMRTLLGDLA

SEQ ID NO: 23713 - protein, 9 aa, synthetic construct
  REGION 1..9: note = Alpha-1,3-mannosyl-glycoprotein 4-beta-N-acetylglucosaminyltransferase B (56-64)
YLTDTLHSL

SEQ ID NO: 23714 - protein, 9 aa, synthetic construct
  REGION 1..9: note = Apoptosis-associated speck-like protein containing a CARD (184-192)
YLVEDLERS

SEQ ID NO: 23715 - protein, 9 aa, synthetic construct
  REGION 1..9: note = Probable ATP-dependent RNA helicase DDX47 (248-256)
YLVYILNEL

SEQ ID NO: 23716 - protein, 7 aa, synthetic construct
  REGION 1..7: note = Serum albumin (162-168)
YLYEIAR

SEQ ID NO: 23717 - protein, 9 aa, synthetic construct
  REGION 1..9: note = Protein sel-1 homolog 1 (457-465)
YLYGRGVQV

SEQ ID NO: 23718 - protein, 10 aa, synthetic construct
  REGION 1..10: note = Probable G-protein coupled receptor 158 (82-91)
YLYTGDSHQL

SEQ ID NO: 23719 - protein, 9 aa, synthetic construct
  REGION 1..9: note = Cytochrome c oxidase subunit 7A-related protein, mitochondrial (106-114)
YMASQPKNK

SEQ ID NO: 23720 - protein, 9 aa, synthetic construct
  REGION 1..9: note = Hemicentin-2 (2923-2931)
YMCVAENQA

SEQ ID NO: 23721 - protein, 9 aa, synthetic construct
  REGION 1..9: note = Protein shisa-5 (129-137)
YMDAPKAAL

SEQ ID NO: 23722 - protein, 10 aa, synthetic construct
  REGION 1..10: note = Lysosomal-trafficking regulator (1891-1900)
YMNENGEFKL

SEQ ID NO: 23723 - protein, 9 aa, synthetic construct
  REGION 1..9: note = Phosphatidylinositol N-acetylglucosaminyltransferase subunit H (129-137)
YMQKVIYYL

SEQ ID NO: 23724 - protein, 8 aa, synthetic construct
  REGION 1..8: note = Transmembraneoprotein NMB (37-44)
YMREHNQL

SEQ ID NO: 23725 - protein, 6 aa, synthetic construct
  REGION 1..6: note = Histone-lysine N-methyltransferase ASH1L (2260-2265)
YNFHSF

SEQ ID NO: 23726 - protein, 9 aa, synthetic construct
  REGION 1..9: note = Actin-related protein 2 (225-233)
YNIEQEQKL

SEQ ID NO: 23727 - protein, 8 aa, synthetic construct
  REGION 1..8: note = 26S proteasome non-ATPase regulatory subunit 8 (148-155)
YNKVFLAK

SEQ ID NO: 23728 - protein, 8 aa, synthetic construct
  REGION 1..8: note = Serine-protein kinase ATM (1148-1155)
YNRKSVLL

SEQ ID NO: 23729 - protein, 24 aa, synthetic construct
  REGION 1..24: note = Alanine-tRNA ligase, cytoplasmic (487-510)
YNYHLDSSGSYVFENTVATVMALR

SEQ ID NO: 23730 - protein, 8 aa, synthetic construct
  REGION 1..8: note = PHD finger protein 20 (103-110)
YPAKVTAV

SEQ ID NO: 23731 - protein, 9 aa, synthetic construct
  REGION 1..9: note = Supervillin (1594-1602)
YPARAPSVV

SEQ ID NO: 23732 - protein, 10 aa, synthetic construct
  REGION 1..10: note = Ras GTPase-activating protein nGAP (628-637)
YPDDRTSRTL

SEQ ID NO: 23733 - protein, 8 aa, synthetic construct
  REGION 1..8: note = Splicing factor 3B subunit 3 (520-527)
YPDGIRHI

SEQ ID NO: 23734 - protein, 9 aa, synthetic construct
  REGION 1..9: note = Vacuolar protein sorting-associated protein 13B (2316-2324)
YPEPRVLTL

SEQ ID NO: 23735 - protein, 8 aa, synthetic construct
  REGION 1..8: note = Constitutive coactivator of peroxisome proliferator-activated receptor gamma (665-672)
YPGNPLRH

SEQ ID NO: 23736 - protein, 7 aa, synthetic construct
  REGION 1..7: note = Heterogeneous nuclear ribonucleoprotein U-like protein 1 (369-375)
YPHVLVK

SEQ ID NO: 23737 - protein, 9 aa, synthetic construct
  REGION 1..9: note = Actin, cytoplasmic 2 (69-77)
YPIEHGIVT

SEQ ID NO: 23738 - protein, 9 aa, synthetic construct
  REGION 1..9: note = Isoleucine-tRNA ligase, cytoplasmic (845-853)
YPLKEIVVI

SEQ ID NO: 23739 - protein, 9 aa, synthetic construct
  REGION 1..9: note = Transmembrane protein 98 (147-155)
YPPLDPKLL

SEQ ID NO: 23740 - protein, 9 aa, synthetic construct
  REGION 1..9: note = Fatty aldehyde dehydrogenase (440-448)
YPPNSQSKV

SEQ ID NO: 23741 - protein, 11 aa, synthetic construct
  REGION 1..11: note = All-trans-retinol 13,14-reductase (15-25)
YPRGGSSEIAF

SEQ ID NO: 23742 - protein, 8 aa, synthetic construct
  REGION 1..8: note = Syntenin-1 (46-53)
YPRLYPEL

SEQ ID NO: 23743 - protein, 9 aa, synthetic construct
  REGION 1..9: note = Protocadherin gamma-C3 (569-577)
YPRPGGSSV

SEQ ID NO: 23744 - protein, 10 aa, synthetic construct
  REGION 1..10: note = Phosphatidylcholine translocator ABCB4 (403-412)
YPSRANVKIL

SEQ ID NO: 23745 - protein, 10 aa, synthetic construct
  REGION 1..10: note = AT-rich interactive domain-containing protein 1A (921-930)
YPYGGPYDRV

SEQ ID NO: 23746 - protein, 9 aa, synthetic construct
  REGION 1..9: note = Ataxin-2-like protein (1021-1029)
YPYIGHPQV

SEQ ID NO: 23747 - protein, 9 aa, synthetic construct
  REGION 1..9: note = Desmin (387-395)
YQDLLNVKM

SEQ ID NO: 23748 - protein, 9 aa, synthetic construct
  REGION 1..9: note = Laminin subunit beta-1 (934-942)
YQDPVTLQL

SEQ ID NO: 23749 - protein, 8 aa, synthetic construct
  REGION 1..8: note = Vimentin (358-365)
YQDTIGRL

SEQ ID NO: 23750 - protein, 12 aa, synthetic construct
  REGION 1..12: note = Regulator of nonsense transcripts 1 (154-165)
YQHGGVTGLSQY

SEQ ID NO: 23751 - protein, 8 aa, synthetic construct
  REGION 1..8: note = AP-5 complex subunit zeta-1 (389-396)
YQHLFTRI

SEQ ID NO: 23752 - protein, 7 aa, synthetic construct
  REGION 1..7: note = Cytoplasmic dynein 1 heavy chain 1 (2959-2965)
YQIKVHR

SEQ ID NO: 23753 - protein, 8 aa, synthetic construct
  REGION 1..8: note = Bardet-Biedl syndrome 4 protein (46-53)
YQKAFEHL

SEQ ID NO: 23754 - protein, 9 aa, synthetic construct
  REGION 1..9: note = Remodeling and spacing factor 1 (52-60)
YQLDQDHNV

SEQ ID NO: 23755 - protein, 9 aa, synthetic construct
  REGION 1..9: note = Exportin-7 (341-349)
YQLGELVKV

SEQ ID NO: 23756 - protein, 9 aa, synthetic construct
  REGION 1..9: note = T-box transcription factor TBX3 (264-272)
YQNDKITQL

SEQ ID NO: 23757 - protein, 8 aa, synthetic construct
  REGION 1..8: note = Rho GTPase-activating protein 5 (414-421)
YQNHVQHL

SEQ ID NO: 23758 - protein, 8 aa, synthetic construct
  REGION 1..8: note = Zinc finger MYM-type protein 4 (345-352)
YQNVVHKL

SEQ ID NO: 23759 - protein, 8 aa, synthetic construct
  REGION 1..8: note = Signal transducer and activator of transcription 6 (88-95)
YQRDPLKL

SEQ ID NO: 23760 - protein, 9 aa, synthetic construct
  REGION 1..9: note = TBC1 domain family member 16 (260-268)
YQTDYFHLF

SEQ ID NO: 23761 - protein, 10 aa, synthetic construct
  REGION 1..10: note = Fatty acid synthase (959-968)
YQWDDPDPRL

SEQ ID NO: 23762 - protein, 8 aa, synthetic construct
  REGION 1..8: note = Homeodomain-interacting protein kinase 4 (181-188)
YRAPEILL

SEQ ID NO: 23763 - protein, 8 aa, synthetic construct
  REGION 1..8: note = Glycogen synthase kinase-3 beta (222-229)
YRAPELIF

SEQ ID NO: 23764 - protein, 9 aa, synthetic construct
  REGION 1..9: note = Protocadherin gamma-C3 (727-735)
YRAPVSSLY

SEQ ID NO: 23765 - protein, 9 aa, synthetic construct
  REGION 1..9: note = Proteasome subunit beta type-4 (223-231)
YRDARSYNR

SEQ ID NO: 23766 - protein, 8 aa, synthetic construct
  REGION 1..8: note = Pyruvate kinase PKM (392-399)
YRGIFPVL

SEQ ID NO: 23767 - protein, 12 aa, synthetic construct
  REGION 1..12: note = Alpha-enolase (33-44)
YRHIADLAGNSE

SEQ ID NO: 23768 - protein, 11 aa, synthetic construct
  REGION 1..11: note = Chondroitin sulfate proteoglycan 4 (1979-1989)
YRLIQGPQYGH

SEQ ID NO: 23769 - protein, 9 aa, synthetic construct
  REGION 1..9: note = SLIT and NTRK-like protein 2 (712-720)
YRNLQEFSY

SEQ ID NO: 23770 - protein, 8 aa, synthetic construct
  REGION 1..8: note = HIG1 domain family member 2A, mitochondrial (29-36)
YRNPESFK

SEQ ID NO: 23771 - protein, 9 aa, synthetic construct
  REGION 1..9: note = Glycogen phosphorylase, brain form (792-800)
YRNPKEWTK

SEQ ID NO: 23772 - protein, 8 aa, synthetic construct
  REGION 1..8: note = Dual specificity protein kinase CLK3 (317-324)
YRPPEVIL

SEQ ID NO: 23773 - protein, 7 aa, synthetic construct
  REGION 1..7: note = Chromodomain-helicase-DNA-binding protein 4 (169-175)
YRTLTNY

SEQ ID NO: 23774 - protein, 9 aa, synthetic construct
  REGION 1..9: note = ATP-dependent RNA helicase DDX3X (243-251)
YSDGPGEAL

SEQ ID NO: 23775 - protein, 10 aa, synthetic construct
  REGION 1..10: note = Transcription factor SOX-10 (402-411)
YSDHQPSGPY

SEQ ID NO: 23776 - protein, 11 aa, synthetic construct
  REGION 1..11: note = Transcription factor SOX-10 (402-412)
YSDHQPSGPYY

SEQ ID NO: 23777 - protein, 9 aa, synthetic construct
  REGION 1..9: note = Rab3 effector-like (158-166)
YSDPFVKVY

SEQ ID NO: 23778 - protein, 12 aa, synthetic construct
  REGION 1..12: note = Lysosomal-trafficking regulator (864-875)
YSDSPQSLSKFY

SEQ ID NO: 23779 - protein, 9 aa, synthetic construct
  REGION 1..9: note = Unconventional myosin-XVIIIa (454-462)
YSEKVMHMF

SEQ ID NO: 23780 - protein, 9 aa, synthetic construct
  REGION 1..9: note = DNA polymerase alpha catalytic subunit (732-740)
YSESSQLLY

SEQ ID NO: 23781 - protein, 10 aa, synthetic construct
  REGION 1..10: note = AF4/FMR2 family member 4 (970-979)
YSETVDLIKY

SEQ ID NO: 23782 - protein, 8 aa, synthetic construct
  REGION 1..8: note = CDK5 regulatory subunit-associated protein 3 (494-501)
YSGRPVNL

SEQ ID NO: 23783 - protein, 7 aa, synthetic construct
  REGION 1..7: note = SAM and SH3 domain-containing protein 1 (307-313)
YSGVHKK

SEQ ID NO: 23784 - protein, 9 aa, synthetic construct
  REGION 1..9: note = Nucleolar pre-ribosomal-associated protein 1 (1469-1477)
YSHLEGARF

SEQ ID NO: 23785 - protein, 8 aa, synthetic construct
  REGION 1..8: note = Inositol 1,4,5-trisphosphate receptor type 3 (2259-2266)
YSIRPLIV

SEQ ID NO: 23786 - protein, 7 aa, synthetic construct
  REGION 1..7: note = Rho-associated protein kinase 1 (287-293)
YSKIMNH

SEQ ID NO: 23787 - protein, 7 aa, synthetic construct
  REGION 1..7: note = Proteasome activator complex subunit 4 (40-46)
YSKTEHL

SEQ ID NO: 23788 - protein, 9 aa, synthetic construct
  REGION 1..9: note = Melanoma-associated antigen D2 (326-334)
YSLEKVFGI

SEQ ID NO: 23789 - protein, 16 aa, synthetic construct
  REGION 1..16: note = PERQ amino acid-rich with GYF domain-containing protein 1 (739-754)
YSLHGSSGEIESVDDY

SEQ ID NO: 23790 - protein, 8 aa, synthetic construct
  REGION 1..8: note = 60S ribosomal protein L6 (63-70)
YSRKAMYK

SEQ ID NO: 23791 - protein, 8 aa, synthetic construct
  REGION 1..8: note = BTB/POZ domain-containing protein KCTD20 (143-150)
YSSKLYRF

SEQ ID NO: 23792 - protein, 14 aa, synthetic construct
  REGION 1..14: note = Eukaryotic translation initiation factor 3 subunit D (59-72)
YSSQFGGGSQYAYF

SEQ ID NO: 23793 - protein, 9 aa, synthetic construct
  REGION 1..9: note = Bromo adjacent homology domain-containing 1 protein (744-752)
YSTPPHRTV

SEQ ID NO: 23794 - protein, 23 aa, synthetic construct
  REGION 1..23: note = Actin, gamma-enteric smooth muscle (295-317)
YSVWIGGSILASLSTFQQMWISK

SEQ ID NO: 23795 - protein, 36 aa, synthetic construct
  REGION 1..36: note = Actin, cytoplasmic 2 (337-372)
YSVWIGGSILASLSTFQQMWISKQEYDESGPSIVHR

SEQ ID NO: 23796 - protein, 9 aa, synthetic construct
  REGION 1..9: note = Uncharacterized protein C5orf34 (326-334)
YSYPELVKM

SEQ ID NO: 23797 - protein, 9 aa, synthetic construct
  REGION 1..9: note = Citrate synthase, mitochondrial (189-197)
YTDHQFTEL

SEQ ID NO: 23798 - protein, 8 aa, synthetic construct
  REGION 1..8: note = Guanine nucleotide-binding protein subunit beta-2-like 1 (302-309)
YTDNLVRV

SEQ ID NO: 23799 - protein, 10 aa, synthetic construct
  REGION 1..10: note = Transcription factor SOX-10 (369-378)
YTDQPSTSQI

SEQ ID NO: 23800 - protein, 8 aa, synthetic construct
  REGION 1..8: note = WD repeat-containing protein 1 (54-61)
YTEHAHQV

SEQ ID NO: 23801 - protein, 7 aa, synthetic construct
  REGION 1..7: note = Protocadherin Fat 2 (2518-2524)
YTIINKL

SEQ ID NO: 23802 - protein, 8 aa, synthetic construct
  REGION 1..8: note = 1,2-dihydroxy-3-keto-5-methylthiopentene dioxygenase (142-149)
YTKAMRLF

SEQ ID NO: 23803 - protein, 13 aa, synthetic construct
  REGION 1..13: note = Syndecan-3 (419-431)
YTLEEPKQASVTY

SEQ ID NO: 23804 - protein, 9 aa, synthetic construct
  REGION 1..9: note = Trophinin (94-102)
YTLEKMFRV

SEQ ID NO: 23805 - protein, 9 aa, synthetic construct
  REGION 1..9: note = Zinc finger E-box-binding homeobox 2 (504-512)
YTLEKVNEA

SEQ ID NO: 23806 - protein, 10 aa, synthetic construct
  REGION 1..10: note = Probable ATP-dependent RNA helicase DDX5 (540-549)
YTNGSFGSNF

SEQ ID NO: 23807 - protein, 22 aa, synthetic construct
  REGION 1..22: note = Fructose-bisphosphate aldolase A (397-418)
YTPSGQAGAAASESLFVSNHAY

SEQ ID NO: 23808 - protein, 9 aa, synthetic construct
  REGION 1..9: note = DNA replication licensing factor MCM3 (251-259)
YTSGTFRTV

SEQ ID NO: 23809 - protein, 14 aa, synthetic construct
  REGION 1..14: note = Melanocyte protein PMEL (265-278)
YTWDFGDSSGTLIS

SEQ ID NO: 23810 - protein, 17 aa, synthetic construct
  REGION 1..17: note = Melanocyte protein PMEL (265-281)
YTWDFGDSSGTLISRAL

SEQ ID NO: 23811 - protein, 10 aa, synthetic construct
  REGION 1..10: note = Adenylate cyclase type 6 (111-120)
YVACALLVFC

SEQ ID NO: 23812 - protein, 10 aa, synthetic construct
  REGION 1..10: note = Lysine-specific histone demethylase 1A (121-130)
YVADLGAMVV

SEQ ID NO: 23813 - protein, 8 aa, synthetic construct
  REGION 1..8: note = HLA class I histocompatibility antigen, B-49 alpha chain (51-58)
YVDDTLFV

SEQ ID NO: 23814 - protein, 8 aa, synthetic construct
  REGION 1..8: note = HLA class I histocompatibility antigen, B-13 alpha chain (26-33)
YVDDTQFV

SEQ ID NO: 23815 - protein, 10 aa, synthetic construct
  REGION 1..10: note = HLA class I histocompatibility antigen, Cw-5 alpha chain (51-60)
YVDDTQFVQF

SEQ ID NO: 23816 - protein, 11 aa, synthetic construct
  REGION 1..11: note = HLA class I histocompatibility antigen, B-13 alpha chain (26-36)
YVDDTQFVRFD

SEQ ID NO: 23817 - protein, 12 aa, synthetic construct
  REGION 1..12: note = HLA class I histocompatibility antigen, B-13 alpha chain (26-37)
YVDDTQFVRFDS

SEQ ID NO: 23818 - protein, 10 aa, synthetic construct
  REGION 1..10: note = Helicase SKI2W (1066-1075)
YVDEAGTVKL

SEQ ID NO: 23819 - protein, 10 aa, synthetic construct
  REGION 1..10: note = 40S ribosomal protein S16 (98-107)
YVDEASKKEI

SEQ ID NO: 23820 - protein, 8 aa, synthetic construct
  REGION 1..8: note = Angiomotin-like protein 1 (605-612)
YVEKVEKL

SEQ ID NO: 23821 - protein, 8 aa, synthetic construct
  REGION 1..8: note = Angiomotin-like protein 2 (482-489)
YVEKVERL

SEQ ID NO: 23822 - protein, 7 aa, synthetic construct
  REGION 1..7: note = Melanoma-derived growth regulatory protein (71-77)
YVFSKLK

SEQ ID NO: 23823 - protein, 9 aa, synthetic construct
  REGION 1..9: note = Glutamine-tRNA ligase (632-640)
YVIELQHVV

SEQ ID NO: 23824 - protein, 10 aa, synthetic construct
  REGION 1..10: note = E3 ubiquitin-protein ligase Arkadia (683-692)
YVIPHPVHAF

SEQ ID NO: 23825 - protein, 9 aa, synthetic construct
  REGION 1..9: note = Apoptosis-resistant E3 ubiquitin protein ligase 1 (356-364)
YVSPKQFSV

SEQ ID NO: 23826 - protein, 8 aa, synthetic construct
  REGION 1..8: note = Signal transducer and activator of transcription 2 (829-836)
YVSRPSHF

SEQ ID NO: 23827 - protein, 9 aa, synthetic construct
  REGION 1..9: note = Serine/threonine-protein kinase SMG1 (424-432)
YVTDVLYRV

SEQ ID NO: 23828 - protein, 12 aa, synthetic construct
  REGION 1..12: note = Filamin-A (2047-2058)
YVTEIDQDKYAV

SEQ ID NO: 23829 - protein, 9 aa, synthetic construct
  REGION 1..9: note = Fructose-bisphosphate aldolase A (258-266)
YVTEKVLAA

SEQ ID NO: 23830 - protein, 9 aa, synthetic construct
  REGION 1..9: note = Tensin-1 (17-25)
YVTERIIAV

SEQ ID NO: 23831 - protein, 9 aa, synthetic construct
  REGION 1..9: note = Membrane-associated transporter protein (55-63)
YVTPVLLSV

SEQ ID NO: 23832 - protein, 10 aa, synthetic construct
  REGION 1..10: note = Attractin (187-196)
YVYDGDSIYA

SEQ ID NO: 23833 - protein, 7 aa, synthetic construct
  REGION 1..7: note = Histone H2B type 2-F (41-47)
YVYKVLK

SEQ ID NO: 23834 - protein, 7 aa, synthetic construct
  REGION 1..7: note = 40S ribosomal protein S29 (7-13)
YWSHPRK

SEQ ID NO: 23835 - protein, 32 aa, synthetic construct
  REGION 1..32: note = Keratin, type I cytoskeletal 18 (212-243)
YWSQQIEESTTVVTTQSAEVGAAETTLTELRR

SEQ ID NO: 23836 - protein, 9 aa, synthetic construct
  REGION 1..9: note = Dual specificity tyrosine-phosphorylation-regulated kinase 1A (471-479)
YYALQHSFF

SEQ ID NO: 23837 - protein, 9 aa, synthetic construct
  REGION 1..9: note = Cap-specific mRNAucleoside-2'-O-)-methyltransferase 1 (795-803)
YYGRLFWEW

SEQ ID NO: 23838 - protein, 9 aa, synthetic construct
  REGION 1..9: note = Motile sperm domain-containing protein 2 (174-182)
YYPKYLSKI

SEQ ID NO: 23839 - protein, 9 aa, synthetic construct
  REGION 1..9: note = Procollagen-lysine,2-oxoglutarate 5-dioxygenase 2 (114-122)
YYTKGFALL

SEQ ID NO: 23840 - protein, 9 aa, synthetic construct
  REGION 1..9: note = Receptor-type protein tyrosine phosphatase beta (1197-1205)
YYTVRNFTL

SEQ ID NO: 23841 - protein, 9 aa, synthetic construct
  REGION 1..9: note = CASP8 and FADD-like apoptosis regulator (367-375)
YYVWLQHTL

SEQ ID NO: 23842 - protein, 9 aa, synthetic construct
  REGION 1..9: note = Tyrosine-protein kinase JAK1 (67-75)
ALYDENTKL

SEQ ID NO: 23843 - protein, 9 aa, synthetic construct
  REGION 1..9: note = RNA-binding protein 4 (259-267)
AMASHLTST

SEQ ID NO: 23844 - protein, 9 aa, synthetic construct
  REGION 1..9: note = Neuroligin-3 (389-397)
EGLKFVEGV

SEQ ID NO: 23845 - protein, 9 aa, synthetic construct
  REGION 1..9: note = StAR-related lipid transfer protein 7, mitochondrial (235-243)
GMPDFLEKL

SEQ ID NO: 23846 - protein, 9 aa, synthetic construct
  REGION 1..9: note = Katanin p60 ATPase-containing subunit A1 (77-85)
KLDSTPLKA

SEQ ID NO: 23847 - protein, 9 aa, synthetic construct
  REGION 1..9: note = YrdC domain-containing protein, mitochondrial (184-192)
QMFEGPLAL

SEQ ID NO: 23848 - protein, 9 aa, synthetic construct
  REGION 1..9: note = Protein FAM72C (114-122)
RLDSTGVNV

SEQ ID NO: 23849 - protein, 11 aa, synthetic construct
  REGION 1..11: note = ATP-dependent RNA helicase DHX36 (643-653)
RLMDPPSNEAV

SEQ ID NO: 23850 - protein, 9 aa, synthetic construct
  REGION 1..9: note = Serine/arginine repetitive matrix protein 2 (2370-2378)
RMAPALSGA

SEQ ID NO: 23851 - protein, 9 aa, synthetic construct
  REGION 1..9: note = Nuclear receptor coactivator 1 (835-843)
RMDGAVTSV

SEQ ID NO: 23852 - protein, 9 aa, synthetic construct
  REGION 1..9: note = Ethanolamine kinase 1 (232-240)
RQLAKIHAI

SEQ ID NO: 23853 - protein, 9 aa, synthetic construct
  REGION 1..9: note = Clathrin heavy chain 1 (1039-1047)
RVMEYINRL

SEQ ID NO: 23854 - protein, 9 aa, synthetic construct
  REGION 1..9: note = Large proline-rich protein BAG6 (530-538)
SLAQMVSGL

SEQ ID NO: 23855 - protein, 9 aa, synthetic construct
  REGION 1..9: note = Mediator of RNA polymerase II transcription subunit 8 (11-19)
SLDALLSQV

SEQ ID NO: 23856 - protein, 11 aa, synthetic construct
  REGION 1..11: note = Cathepsin L1 (247-257)
VAIDAGHESFL

SEQ ID NO: 23857 - protein, 9 aa, synthetic construct
  REGION 1..9: note = UDP-glucose:glycoprotein glucosyltransferase 2 (187-195)
YAEMGTRTF

SEQ ID NO: 23858 - protein, 10 aa, synthetic construct
  REGION 1..10: note = Alkyldihydroxyacetonephosphate synthase, peroxisomal (308-317)
STVGGWVSTR

SEQ ID NO: 23859 - protein, 18 aa, synthetic construct
  REGION 1..18: note = Paired box protein Pax-2 (160-177)
APGHTIVPSTASPPVSSA

SEQ ID NO: 23860 - protein, 15 aa, synthetic construct
  REGION 1..15: note = Glutamyl aminopeptidase (290-304)
AVHQFDSVKRISNSG

SEQ ID NO: 23861 - protein, 8 aa, synthetic construct
  REGION 1..8: note = Inositol 1,4,5-trisphosphate receptor type 3 (333-340)
DILIRTEL

SEQ ID NO: 23862 - protein, 9 aa, synthetic construct
  REGION 1..9: note = Fatty acid synthase (1644-1652)
EAASVPVVY

SEQ ID NO: 23863 - protein, 12 aa, synthetic construct
  REGION 1..12: note = POTE ankyrin domain family member E (1064-1075)
ESGPSIVHRKCF

SEQ ID NO: 23864 - protein, 9 aa, synthetic construct
  REGION 1..9: note = Beta-1-syntrophin (163-171)
LADPENRQL

SEQ ID NO: 23865 - protein, 9 aa, synthetic construct
  REGION 1..9: note = Egl nine homolog 3 (194-202)
NPHEVQPSY

SEQ ID NO: 23866 - protein, 8 aa, synthetic construct
  REGION 1..8: note = GRB2-related adapter protein (34-41)
QNWYKAEL

SEQ ID NO: 23867 - protein, 9 aa, synthetic construct
  REGION 1..9: note = Protein-lysine 6-oxidase (86-94)
QPRTPILLI

SEQ ID NO: 23868 - protein, 8 aa, synthetic construct
  REGION 1..8: note = Adenomatous polyposis coli protein (222-229)
QQIEKDIL

SEQ ID NO: 23869 - protein, 9 aa, synthetic construct
  REGION 1..9: note = Insulin-like growth factor-binding protein 3 (5-13)
RPTLWAAAL

SEQ ID NO: 23870 - protein, 14 aa, synthetic construct
  REGION 1..14: note = Thrombospondin-1 (56-69)
SPAFRIEDANLIPP

SEQ ID NO: 23871 - protein, 10 aa, synthetic construct
  REGION 1..10: note = Epidermal growth factor receptor (1026-1035)
SPSTSRTPLL

SEQ ID NO: 23872 - protein, 16 aa, synthetic construct
  REGION 1..16: note = Thrombospondin-2 (96-111)
SRGTLLALEGPGLSQR

SEQ ID NO: 23873 - protein, 9 aa, synthetic construct
  REGION 1..9: note = Transforming growth factor beta-1 (263-271)
TPLERAQHL

SEQ ID NO: 23874 - protein, 17 aa, synthetic construct
  REGION 1..17: note = Transforming growth factor-beta-induced protein ig-h3 (579-595)
VSGGIGALVRLKSLQGD

SEQ ID NO: 23875 - protein, 10 aa, synthetic construct
  REGION 1..10: note = Matrilysin (167-176)
YPFDGPGNTL

SEQ ID NO: 23876 - protein, 10 aa, synthetic construct
  REGION 1..10: note = Cytochrome b-c1 complex subunit Rieske, mitochondrial (82-91)
DIKVPDFSEY

SEQ ID NO: 23877 - protein, 12 aa, synthetic construct
  REGION 1..12: note = Thioredoxin-related transmembrane protein 4 (92-103)
DVIQEPGLSGRF

SEQ ID NO: 23878 - protein, 12 aa, synthetic construct
  REGION 1..12: note = Keratin, type I cytoskeletal 9 (29-40)
EEANNDLENKIQ

SEQ ID NO: 23879 - protein, 14 aa, synthetic construct
  REGION 1..14: note = POTE ankyrin domain family member E (805-818)
LTEAPLNPKANREK

SEQ ID NO: 23880 - protein, 17 aa, synthetic construct
  REGION 1..17: note = POTE ankyrin domain family member E (805-821)
LTEAPLNPKANREKMTQ

SEQ ID NO: 23881 - protein, 12 aa, synthetic construct
  REGION 1..12: note = 40S ribosomal protein S21 (35-46)
NVAEVDKVTGRF

SEQ ID NO: 23882 - protein, 9 aa, synthetic construct
  REGION 1..9: note = Keratin, type II cytoskeletal 2 epidermal (170-178)
NVKVDPEIQ

SEQ ID NO: 23883 - protein, 18 aa, synthetic construct
  REGION 1..18: note = Heat shock protein beta-1 (188-205)
RAQLGGPEAAKSDETAAK

SEQ ID NO: 23884 - protein, 11 aa, synthetic construct
  REGION 1..11: note = Actin, alpha skeletal muscle (2-12)
REIVRDIKEKL

SEQ ID NO: 23885 - protein, 14 aa, synthetic construct
  REGION 1..14: note = ATP synthase subunit gamma, mitochondrial (176-189)
SGYEFDEGSIIFNK

SEQ ID NO: 23886 - protein, 12 aa, synthetic construct
  REGION 1..12: note = Fibronectin (1340-1351)
SVYEQHESTPLR

SEQ ID NO: 23887 - protein, 16 aa, synthetic construct
  REGION 1..16: note = Vimentin (38-53)
YSLGSALRPSTSRSLY

SEQ ID NO: 23888 - protein, 9 aa, synthetic construct
  REGION 1..9: note = Guanylate kinase (10-18)
AAAALGRAP

SEQ ID NO: 23889 - protein, 9 aa, synthetic construct
  REGION 1..9: note = T-box transcription factor TBX2 (59-67)
AAAEAGLHV

SEQ ID NO: 23890 - protein, 12 aa, synthetic construct
  REGION 1..12: note = Heterogeneous nuclear ribonucleoprotein L (36-47)
AAAGGGGGGGRY

SEQ ID NO: 23891 - protein, 13 aa, synthetic construct
  REGION 1..13: note = Heterogeneous nuclear ribonucleoprotein L (36-48)
AAAGGGGGGGRYY

SEQ ID NO: 23892 - protein, 8 aa, synthetic construct
  REGION 1..8: note = Exocyst complex component 4 (16-23)
AAAHSVVL

SEQ ID NO: 23893 - protein, 9 aa, synthetic construct
  REGION 1..9: note = Fumarate hydratase, mitochondrial (155-163)
AAAIEVHEV

SEQ ID NO: 23894 - protein, 9 aa, synthetic construct
  REGION 1..9: note = Calcium-binding mitochondrial carrier protein Aralar2 (2-10)
AAAKVALTK

SEQ ID NO: 23895 - protein, 9 aa, synthetic construct
  REGION 1..9: note = ATP-binding cassette sub-family B member 10, mitochondrial (226-234)
AAANAIRVY

SEQ ID NO: 23896 - protein, 11 aa, synthetic construct
  REGION 1..11: note = Iroquois-class homeodomain protein IRX-2 (414-424)
AAAPGEALHTA

SEQ ID NO: 23897 - protein, 8 aa, synthetic construct
  REGION 1..8: note = Bcl-2-binding component 3 (195-202)
AAAPPLTL

SEQ ID NO: 23898 - protein, 9 aa, synthetic construct
  REGION 1..9: note = Polyadenylate-binding protein 4 (547-555)
AAAPPQEQK

SEQ ID NO: 23899 - protein, 9 aa, synthetic construct
  REGION 1..9: note = Protein Shroom2 (289-297)
AAAQHFTAL

SEQ ID NO: 23900 - protein, 9 aa, synthetic construct
  REGION 1..9: note = LRRN4 C-terminal-like protein (230-238)
AAARAAGAL

SEQ ID NO: 23901 - protein, 10 aa, synthetic construct
  REGION 1..10: note = Pyridoxal-dependent decarboxylase domain-containing protein 1 (179-188)
AAARPGLGQY

SEQ ID NO: 23902 - protein, 9 aa, synthetic construct
  REGION 1..9: note = T-complex protein 1 subunit alpha (24-32)
AAASIANIV

SEQ ID NO: 23903 - protein, 9 aa, synthetic construct
  REGION 1..9: note = Neuronal pentraxin receptor (38-46)
AAASPGPQR

SEQ ID NO: 23904 - protein, 9 aa, synthetic construct
  REGION 1..9: note = Disco-interacting protein 2 homolog C (25-33)
AAAVDVRTW

SEQ ID NO: 23905 - protein, 11 aa, synthetic construct
  REGION 1..11: note = Tubulin beta-4B chain (10-20)
AACDPRHGRYL

SEQ ID NO: 23906 - protein, 9 aa, synthetic construct
  REGION 1..9: note = Cartilage-associated protein (245-253)
AACEGSREI

SEQ ID NO: 23907 - protein, 9 aa, synthetic construct
  REGION 1..9: note = Phenylalanine-tRNA ligase alpha subunit (118-126)
AADGPRVFR

SEQ ID NO: 23908 - protein, 9 aa, synthetic construct
  REGION 1..9: note = Importin-4 (48-56)
AADPQIRQF

SEQ ID NO: 23909 - protein, 8 aa, synthetic construct
  REGION 1..8: note = UBA-like domain-containing protein 1 (24-31)
AADQAKQL

SEQ ID NO: 23910 - protein, 11 aa, synthetic construct
  REGION 1..11: note = Melanoma antigen preferentially expressed in tumors (59-69)
AAFDGRHSQTL

SEQ ID NO: 23911 - protein, 9 aa, synthetic construct
  REGION 1..9: note = Cleavage and polyadenylation specificity factor subunit 2 (121-129)
AAFDKIQQL

SEQ ID NO: 23912 - protein, 9 aa, synthetic construct
  REGION 1..9: note = Splicing factor 3B subunit 1 (744-752)
AAFLKAIGY

SEQ ID NO: 23913 - protein, 9 aa, synthetic construct
  REGION 1..9: note = V-type proton ATPase subunit H (287-295)
AAFRNFLEK

SEQ ID NO: 23914 - protein, 9 aa, synthetic construct
  REGION 1..9: note = Macrophage-capping protein (134-142)
AAIKKLYQV

SEQ ID NO: 23915 - protein, 9 aa, synthetic construct
  REGION 1..9: note = Ferritin heavy chain (81-89)
AAINRQINL

SEQ ID NO: 23916 - protein, 9 aa, synthetic construct
  REGION 1..9: note = Growth arrest-specific protein 8 (268-276)
AAIQEVQQK

SEQ ID NO: 23917 - protein, 9 aa, synthetic construct
  REGION 1..9: note = Malate dehydrogenase, cytoplasmic (114-122)
AALDKYAKK

SEQ ID NO: 23918 - protein, 11 aa, synthetic construct
  REGION 1..11: note = Numb-like protein (541-551)
AALEGKATVEK

SEQ ID NO: 23919 - protein, 9 aa, synthetic construct
  REGION 1..9: note = Leucine-rich repeat-containing protein 41 (525-533)
AAMKGNSTL

SEQ ID NO: 23920 - protein, 10 aa, synthetic construct
  REGION 1..10: note = Alkyldihydroxyacetonephosphate synthase, peroxisomal (76-85)
AAQESGTIPK

SEQ ID NO: 23921 - protein, 9 aa, synthetic construct
  REGION 1..9: note = HEAT repeat-containing protein 5B (541-549)
AAQNSRLSL

SEQ ID NO: 23922 - protein, 9 aa, synthetic construct
  REGION 1..9: note = cAMP-dependent protein kinase type I-alpha regulatory subunit (7-15)
AASEEARSL

SEQ ID NO: 23923 - protein, 9 aa, synthetic construct
  REGION 1..9: note = WD repeat-containing protein 54 (75-83)
AASGHFICV

SEQ ID NO: 23924 - protein, 9 aa, synthetic construct
  REGION 1..9: note = Sterol regulatory element-binding protein 2 (104-112)
AASPQAPTL

SEQ ID NO: 23925 - protein, 9 aa, synthetic construct
  REGION 1..9: note = Vesicle transport through interaction with t-SNAREs homolog 1B (5-13)
AASSEHFEK

SEQ ID NO: 23926 - protein, 9 aa, synthetic construct
  REGION 1..9: note = Actin, cytoplasmic 2 (21-29)
AASSSSLEK

SEQ ID NO: 23927 - protein, 9 aa, synthetic construct
  REGION 1..9: note = Talin-1 (770-778)
AATAVTQAL

SEQ ID NO: 23928 - protein, 9 aa, synthetic construct
  REGION 1..9: note = Serine/threonine-protein phosphatase 4 regulatory subunit 3B (382-390)
AATDIFSYL

SEQ ID NO: 23929 - protein, 9 aa, synthetic construct
  REGION 1..9: note = Long-chain fatty acid transport protein 1 (241-249)
AAVADPHSL

SEQ ID NO: 23930 - protein, 9 aa, synthetic construct
  REGION 1..9: note = Bifunctional apoptosis regulator (156-164)
AAVNPGRSL

SEQ ID NO: 23931 - protein, 11 aa, synthetic construct
  REGION 1..11: note = Ligand-dependent nuclear receptor-interacting factor 1 (176-186)
AAYEQSHFFNK

SEQ ID NO: 23932 - protein, 9 aa, synthetic construct
  REGION 1..9: note = Drebrin (97-105)
ACASHVAKV

SEQ ID NO: 23933 - protein, 9 aa, synthetic construct
  REGION 1..9: note = WASH complex subunit strumpellin (384-392)
ACDPNNKRL

SEQ ID NO: 23934 - protein, 9 aa, synthetic construct
  REGION 1..9: note = Zinc finger protein 106 (941-949)
ACLDKFVRV

SEQ ID NO: 23935 - protein, 11 aa, synthetic construct
  REGION 1..11: note = Fructose-bisphosphate aldolase A (33-43)
ADESTGSIAKR

SEQ ID NO: 23936 - protein, 11 aa, synthetic construct
  REGION 1..11: note = Selenoprotein N (53-63)
AEAQAAARQEL

SEQ ID NO: 23937 - protein, 11 aa, synthetic construct
  REGION 1..11: note = Myosin-11 (2-12)
AEAREKETKAL

SEQ ID NO: 23938 - protein, 9 aa, synthetic construct
  REGION 1..9: note = Tetratricopeptide repeat protein 37 (1248-1256)
AEDEKNTAL

SEQ ID NO: 23939 - protein, 9 aa, synthetic construct
  REGION 1..9: note = Heat shock factor protein 1 (137-145)
AEDPTISLL

SEQ ID NO: 23940 - protein, 10 aa, synthetic construct
  REGION 1..10: note = Melanoma antigen recognized by T-cells 1 (24-33)
AEEAAGIGIL

SEQ ID NO: 23941 - protein, 9 aa, synthetic construct
  REGION 1..9: note = Protein SFI1 homolog (356-364)
AEEPHALEL

SEQ ID NO: 23942 - protein, 11 aa, synthetic construct
  REGION 1..11: note = Metalloproteinase inhibitor 2 (114-124)
AEGDGKMHITL

SEQ ID NO: 23943 - protein, 9 aa, synthetic construct
  REGION 1..9: note = T-complex protein 1 subunit zeta (326-334)
AEHSESGQL

SEQ ID NO: 23944 - protein, 11 aa, synthetic construct
  REGION 1..11: note = ALK tyrosine kinase receptor (403-413)
AEIKTTNEVVL

SEQ ID NO: 23945 - protein, 11 aa, synthetic construct
  REGION 1..11: note = Junction plakoglobin (137-147)
AELATRALPEL

SEQ ID NO: 23946 - protein, 9 aa, synthetic construct
  REGION 1..9: note = E3 ubiquitin-protein ligase BRE1A (672-680)
AELEDLRQR

SEQ ID NO: 23947 - protein, 10 aa, synthetic construct
  REGION 1..10: note = Disheveled-associated activator of morphogenesis 2 (875-884)
AELEKEVGNL

SEQ ID NO: 23948 - protein, 10 aa, synthetic construct
  REGION 1..10: note = MAD2L1-binding protein (129-138)
AELESVLSHL

SEQ ID NO: 23949 - protein, 10 aa, synthetic construct
  REGION 1..10: note = Inactive ubiquitin carboxyl-terminal hydrolase 54 (1171-1180)
AEPDIYQEKL

SEQ ID NO: 23950 - protein, 11 aa, synthetic construct
  REGION 1..11: note = Stathmin-3 (108-118)
AERREHEREVL

SEQ ID NO: 23951 - protein, 8 aa, synthetic construct
  REGION 1..8: note = Cytoplasmic dynein 1 light intermediate chain 2 (86-93)
AESLPETL

SEQ ID NO: 23952 - protein, 10 aa, synthetic construct
  REGION 1..10: note = Neurosecretory protein VGF (183-192)
AETETRTHTL

SEQ ID NO: 23953 - protein, 9 aa, synthetic construct
  REGION 1..9: note = Gamma-interferon-inducible protein 16 (79-87)
AETLKKEKL

SEQ ID NO: 23954 - protein, 10 aa, synthetic construct
  REGION 1..10: note = Formin-binding protein 1-like (452-461)
AETMNNIDRL

SEQ ID NO: 23955 - protein, 10 aa, synthetic construct
  REGION 1..10: note = Tumor susceptibility gene 101 protein (282-291)
AEVDKNIELL

SEQ ID NO: 23956 - protein, 9 aa, synthetic construct
  REGION 1..9: note = Consortin (611-619)
AEVVPTEGL

SEQ ID NO: 23957 - protein, 9 aa, synthetic construct
  REGION 1..9: note = Nuclear mitotic apparatus protein 1 (857-865)
AGIESHSEL

SEQ ID NO: 23958 - protein, 9 aa, synthetic construct
  REGION 1..9: note = Nuclear receptor corepressor 2 (1168-1176)
AGPPESLGV

SEQ ID NO: 23959 - protein, 11 aa, synthetic construct
  REGION 1..11: note = Hermansky-Pudlak syndrome 5 protein (284-294)
AGSSQSLSFPK

SEQ ID NO: 23960 - protein, 9 aa, synthetic construct
  REGION 1..9: note = Actin-related protein 2/3 complex subunit 1B (24-32)
AICPNNHEV

SEQ ID NO: 23961 - protein, 14 aa, synthetic construct
  REGION 1..14: note = Syndecan-3 (292-305)
AIDSGSSAAQLPQK

SEQ ID NO: 23962 - protein, 9 aa, synthetic construct
  REGION 1..9: note = Ewing's tumor-associated antigen 1 (284-292)
AIFDGSTQK

SEQ ID NO: 23963 - protein, 11 aa, synthetic construct
  REGION 1..11: note = Tectonic-3 (478-488)
AIFGNADPAQK

SEQ ID NO: 23964 - protein, 9 aa, synthetic construct
  REGION 1..9: note = Kinesin-like protein KIF20B (640-648)
AIFKDLVGK

SEQ ID NO: 23965 - protein, 9 aa, synthetic construct
  REGION 1..9: note = Rho-related GTP-binding protein RhoQ (186-194)
AIIAILTPK

SEQ ID NO: 23966 - protein, 9 aa, synthetic construct
  REGION 1..9: note = Protein wntless homolog (4-12)
AIIENMSTK

SEQ ID NO: 23967 - protein, 9 aa, synthetic construct
  REGION 1..9: note = Eukaryotic translation initiation factor 3 subunit C-like protein (482-490)
AIIERVQRY

SEQ ID NO: 23968 - protein, 11 aa, synthetic construct
  REGION 1..11: note = 40S ribosomal protein S17 (39-49)
AIIPSKKLRNK

SEQ ID NO: 23969 - protein, 10 aa, synthetic construct
  REGION 1..10: note = Ribulose-phosphate 3-epimerase (118-127)
AIKPGTSVEY

SEQ ID NO: 23970 - protein, 11 aa, synthetic construct
  REGION 1..11: note = Serine/threonine-protein kinase Sgk1 (47-57)
AIKPPLKAFMK

SEQ ID NO: 23971 - protein, 9 aa, synthetic construct
  REGION 1..9: note = NF-kappa-B inhibitor beta (102-110)
AILGETSTV

SEQ ID NO: 23972 - protein, 10 aa, synthetic construct
  REGION 1..10: note = GTP-binding protein Rheb (10-19)
AILGYRSVGK

SEQ ID NO: 23973 - protein, 11 aa, synthetic construct
  REGION 1..11: note = Fibroblast growth factor 14 isoform 6 (201-211)
AIMNGGKPVNK

SEQ ID NO: 23974 - protein, 9 aa, synthetic construct
  REGION 1..9: note = Puratrophin-1 (1020-1028)
AINDRTVNY

SEQ ID NO: 23975 - protein, 9 aa, synthetic construct
  REGION 1..9: note = Mitotic spindle assembly checkpoint protein MAD2A (123-131)
AIQDEIRSV

SEQ ID NO: 23976 - protein, 9 aa, synthetic construct
  REGION 1..9: note = Radixin (19-27)
AIQPNTTGK

SEQ ID NO: 23977 - protein, 11 aa, synthetic construct
  REGION 1..11: note = ATP-dependent 6-phosphofructokinase, platelet type (229-239)
AIYDGFDGFAK

SEQ ID NO: 23978 - protein, 13 aa, synthetic construct
  REGION 1..13: note = Cytochrome b-c1 complex subunit 9 (42-54)
AIYDHINEGKLWK

SEQ ID NO: 23979 - protein, 12 aa, synthetic construct
  REGION 1..12: note = Transcription initiation factor IIB (257-268)
AIYMASQASAEK

SEQ ID NO: 23980 - protein, 9 aa, synthetic construct
  REGION 1..9: note = Serine dehydratase-like (282-290)
AIYSGLLRR

SEQ ID NO: 23981 - protein, 13 aa, synthetic construct
  REGION 1..13: note = Keratin, type II cytoskeletal 1 (303-315)
AKLDNLQQEIDFL

SEQ ID NO: 23982 - protein, 8 aa, synthetic construct
  REGION 1..8: note = Kv channel-interacting protein 2 (72-79)
ALAAPASL

SEQ ID NO: 23983 - protein, 9 aa, synthetic construct
  REGION 1..9: note = GPI ethanolamine phosphate transferase 3 (917-925)
ALAASILRR

SEQ ID NO: 23984 - protein, 11 aa, synthetic construct
  REGION 1..11: note = Core histone macro-H2A.1 (296-306)
ALADDKKLKSI

SEQ ID NO: 23985 - protein, 11 aa, synthetic construct
  REGION 1..11: note = Phosphatidylinositol 3-kinase regulatory subunit beta (169-179)
ALADGIKSFLL

SEQ ID NO: 23986 - protein, 11 aa, synthetic construct
  REGION 1..11: note = Basement membrane-specific heparan sulfate proteoglycan core protein (1484-1494)
ALADLDELLIR

SEQ ID NO: 23987 - protein, 11 aa, synthetic construct
  REGION 1..11: note = Protein SHQ1 homolog (400-410)
ALAEALKEVSL

SEQ ID NO: 23988 - protein, 11 aa, synthetic construct
  REGION 1..11: note = Tropomodulin-1 (243-253)
ALAEMLKENKV

SEQ ID NO: 23989 - protein, 10 aa, synthetic construct
  REGION 1..10: note = Beta-1,4-glucuronyltransferase 1 (66-75)
ALASGGVLDA

SEQ ID NO: 23990 - protein, 9 aa, synthetic construct
  REGION 1..9: note = Zinc finger FYVE domain-containing protein 16 (1461-1469)
ALCPHLKTL

SEQ ID NO: 23991 - protein, 9 aa, synthetic construct
  REGION 1..9: note = V-type proton ATPase subunit F (77-85)
ALDAHQQSI

SEQ ID NO: 23992 - protein, 9 aa, synthetic construct
  REGION 1..9: note = 17-beta-hydroxysteroid dehydrogenase 14 (169-177)
ALDESPYGV

SEQ ID NO: 23993 - protein, 11 aa, synthetic construct
  REGION 1..11: note = 17-beta-hydroxysteroid dehydrogenase 14 (169-179)
ALDESPYGVRV

SEQ ID NO: 23994 - protein, 9 aa, synthetic construct
  REGION 1..9: note = Arf-GAP with SH3 domain, ANK repeat and PH domain-containing protein 1 (493-501)
ALDIAKRLK

SEQ ID NO: 23995 - protein, 9 aa, synthetic construct
  REGION 1..9: note = TATA box-binding protein-like protein 1 (8-16)
ALDILITNV

SEQ ID NO: 23996 - protein, 9 aa, synthetic construct
  REGION 1..9: note = Glutaminyl-peptide cyclotransferase (173-181)
ALDKKLLSL

SEQ ID NO: 23997 - protein, 11 aa, synthetic construct
  REGION 1..11: note = Pre-mRNA-processing factor 17 (138-148)
ALDPSLDNHQV

SEQ ID NO: 23998 - protein, 11 aa, synthetic construct
  REGION 1..11: note = 60S ribosomal protein L7a (86-96)
ALDRQTATQLL

SEQ ID NO: 23999 - protein, 11 aa, synthetic construct
  REGION 1..11: note = Chromodomain-helicase-DNA-binding protein 1-like (822-832)
ALEEGLKKIFL

SEQ ID NO: 24000 - protein, 10 aa, synthetic construct
  REGION 1..10: note = Keratin, type I cytoskeletal 10 (217-226)
ALEEQLQQIR

SEQ ID NO: 24001 - protein, 9 aa, synthetic construct
  REGION 1..9: note = Ribonuclease pancreatic (2-10)
ALEKSLVRL

SEQ ID NO: 24002 - protein, 11 aa, synthetic construct
  REGION 1..11: note = Ribonuclease pancreatic (2-12)
ALEKSLVRLLL

SEQ ID NO: 24003 - protein, 13 aa, synthetic construct
  REGION 1..13: note = NADPH oxidase 5 (49-61)
ALFDSDRSGTITL

SEQ ID NO: 24004 - protein, 11 aa, synthetic construct
  REGION 1..11: note = Ankyrin repeat and SAM domain-containing protein 1A (255-265)
ALFGKTDVVQI

SEQ ID NO: 24005 - protein, 12 aa, synthetic construct
  REGION 1..12: note = Alpha-1,6-mannosylglycoprotein 6-beta-N-acetylglucosaminyltransferase A (2-13)
ALFTPWKLSSQK

SEQ ID NO: 24006 - protein, 11 aa, synthetic construct
  REGION 1..11: note = Cell division cycle protein 16 homolog (22-32)
ALFWADKVASL

SEQ ID NO: 24007 - protein, 9 aa, synthetic construct
  REGION 1..9: note = Cleft lip and palate transmembrane protein 1 (123-131)
ALFWEQHDL

SEQ ID NO: 24008 - protein, 12 aa, synthetic construct
  REGION 1..12: note = Ras-related protein Rab-27A (14-25)
ALGDSGVGKTSV

SEQ ID NO: 24009 - protein, 9 aa, synthetic construct
  REGION 1..9: note = Membrane-associated transporter protein (129-137)
ALIANPRRK

SEQ ID NO: 24010 - protein, 12 aa, synthetic construct
  REGION 1..12: note = E3 ubiquitin-protein ligase CBL-B (341-352)
ALIDGSREGFYL

SEQ ID NO: 24011 - protein, 10 aa, synthetic construct
  REGION 1..10: note = Polypyrimidine tract-binding protein 1 (173-182)
ALIDLHNHDL

SEQ ID NO: 24012 - protein, 9 aa, synthetic construct
  REGION 1..9: note = Protein S100-B (10-18)
ALIDVFHQY

SEQ ID NO: 24013 - protein, 11 aa, synthetic construct
  REGION 1..11: note = Melanoma-associated antigen C2 (196-206)
ALIEVGPDHFC

SEQ ID NO: 24014 - protein, 10 aa, synthetic construct
  REGION 1..10: note = Coatomer subunit zeta-1 (3-12)
ALILEPSLYT

SEQ ID NO: 24015 - protein, 9 aa, synthetic construct
  REGION 1..9: note = S-adenosylmethionine synthase isoform type-2 (221-229)
ALKEKVIKA

SEQ ID NO: 24016 - protein, 10 aa, synthetic construct
  REGION 1..10: note = Zinc finger protein 318 (262-271)
ALKEPQGNLY

SEQ ID NO: 24017 - protein, 9 aa, synthetic construct
  REGION 1..9: note = Spliceosome-associated protein CWC15 homolog (128-136)
ALLAELEKI

SEQ ID NO: 24018 - protein, 7 aa, synthetic construct
  REGION 1..7: note = Protein DGCR6L (54-60)
ALLDGTV

SEQ ID NO: 24019 - protein, 12 aa, synthetic construct
  REGION 1..12: note = Eukaryotic translation initiation factor 3 subunit C-like protein (633-644)
ALLDIQSSGRAK

SEQ ID NO: 24020 - protein, 12 aa, synthetic construct
  REGION 1..12: note = Neural Wiskott-Aldrich syndrome protein (408-419)
ALLDQIREGAQL

SEQ ID NO: 24021 - protein, 12 aa, synthetic construct
  REGION 1..12: note = Wiskott-Aldrich syndrome protein (433-444)
ALLDQIRQGIQL

SEQ ID NO: 24022 - protein, 11 aa, synthetic construct
  REGION 1..11: note = Serine/threonine-protein kinase PRP4 homolog (104-114)
ALLEDLEKQRA

SEQ ID NO: 24023 - protein, 10 aa, synthetic construct
  REGION 1..10: note = Melanoma antigen preferentially expressed in tumors (371-380)
ALLERASATL

SEQ ID NO: 24024 - protein, 10 aa, synthetic construct
  REGION 1..10: note = Cleft lip and palate transmembrane protein 1 (348-357)
ALLETNPYLL

SEQ ID NO: 24025 - protein, 15 aa, synthetic construct
  REGION 1..15: note = Proteasome subunit alpha type-7 (194-208)
ALLEVVQSGGKNIEL

SEQ ID NO: 24026 - protein, 10 aa, synthetic construct
  REGION 1..10: note = Ankyrin repeat domain-containing protein 17 (368-377)
ALLIERGASL

SEQ ID NO: 24027 - protein, 9 aa, synthetic construct
  REGION 1..9: note = Down syndrome critical region protein 3 (171-179)
ALLPKFLLR

SEQ ID NO: 24028 - protein, 9 aa, synthetic construct
  REGION 1..9: note = Melanoma antigen preferentially expressed in tumors (397-405)
ALLPSLSHC

SEQ ID NO: 24029 - protein, 9 aa, synthetic construct
  REGION 1..9: note = Neuronal membraneoprotein M6-b (96-104)
ALLSEVIQL

SEQ ID NO: 24030 - protein, 9 aa, synthetic construct
  REGION 1..9: note = Ragulator complex protein LAMTOR1 (52-60)
ALLSSILAK

SEQ ID NO: 24031 - protein, 9 aa, synthetic construct
  REGION 1..9: note = Sulfate transporter (523-531)
ALLSTEIGL

SEQ ID NO: 24032 - protein, 10 aa, synthetic construct
  REGION 1..10: note = Activator of 90 kDa heat shock protein ATPase homolog 1 (58-67)
ALMKEEGVKL

SEQ ID NO: 24033 - protein, 9 aa, synthetic construct
  REGION 1..9: note = rRNA 2'-O-methyltransferase fibrillarin (244-252)
ALNAHTFLR

SEQ ID NO: 24034 - protein, 11 aa, synthetic construct
  REGION 1..11: note = Catenin alpha-1 (363-373)
ALNSAIDKMTK

SEQ ID NO: 24035 - protein, 9 aa, synthetic construct
  REGION 1..9: note = Cytoglobin (88-96)
ALNTVVENL

SEQ ID NO: 24036 - protein, 9 aa, synthetic construct
  REGION 1..9: note = Growth/differentiation factor 15 (96-104)
ALPEGLPEA

SEQ ID NO: 24037 - protein, 9 aa, synthetic construct
  REGION 1..9: note = Homer protein homolog 3 (191-199)
ALQDSNNKL

SEQ ID NO: 24038 - protein, 11 aa, synthetic construct
  REGION 1..11: note = Metastasis suppressor protein 1 (165-175)
ALQDVNDKYLL

SEQ ID NO: 24039 - protein, 9 aa, synthetic construct
  REGION 1..9: note = 1-acyl-sn-glycerol-3-phosphate acyltransferase gamma (283-291)
ALQEIYNQK

SEQ ID NO: 24040 - protein, 10 aa, synthetic construct
  REGION 1..10: note = Neuralized-like protein 4 (559-568)
ALRDGEVFQV

SEQ ID NO: 24041 - protein, 9 aa, synthetic construct
  REGION 1..9: note = Neurosecretory protein VGF (3-11)
ALRLSASAL

SEQ ID NO: 24042 - protein, 9 aa, synthetic construct
  REGION 1..9: note = Dystonin (375-383)
ALRPEVERL

SEQ ID NO: 24043 - protein, 12 aa, synthetic construct
  REGION 1..12: note = Vimentin (308-319)
ALRQAKQESTEY

SEQ ID NO: 24044 - protein, 9 aa, synthetic construct
  REGION 1..9: note = Coiled-coil domain-containing protein 154 (502-510)
ALRQELATL

SEQ ID NO: 24045 - protein, 15 aa, synthetic construct
  REGION 1..15: note = 60S ribosomal protein L36 (2-16)
ALRYPMAVGLNKGHK

SEQ ID NO: 24046 - protein, 10 aa, synthetic construct
  REGION 1..10: note = Integrin alpha-V (893-902)
ALSEGDIHTL

SEQ ID NO: 24047 - protein, 9 aa, synthetic construct
  REGION 1..9: note = Kinesin-like protein KIF20B (1148-1156)
ALSELTQGV

SEQ ID NO: 24048 - protein, 9 aa, synthetic construct
  REGION 1..9: note = Ankycorbin (690-698)
ALSEMKSQY

SEQ ID NO: 24049 - protein, 9 aa, synthetic construct
  REGION 1..9: note = Lysine-specific demethylase 5A (119-127)
ALSKIVASK

SEQ ID NO: 24050 - protein, 9 aa, synthetic construct
  REGION 1..9: note = Probable phospholipid-transporting ATPase IIA (685-693)
ALSQFVIHR

SEQ ID NO: 24051 - protein, 9 aa, synthetic construct
  REGION 1..9: note = Chondroitin sulfate proteoglycan 4 (45-53)
ALTDIDLQL

SEQ ID NO: 24052 - protein, 9 aa, synthetic construct
  REGION 1..9: note = HRAS-like suppressor 3 (84-92)
ALTDKAIVK

SEQ ID NO: 24053 - protein, 9 aa, synthetic construct
  REGION 1..9: note = Neuroblastoma breakpoint family member 6 (396-404)
ALVDKIKKD

SEQ ID NO: 24054 - protein, 10 aa, synthetic construct
  REGION 1..10: note = Glycosylphosphatidylinositol anchor attachment 1 protein (38-47)
ALVFPPLTQR

SEQ ID NO: 24055 - protein, 12 aa, synthetic construct
  REGION 1..12: note = Nuclear nucleic acid-binding protein C1D (121-132)
ALWEPKSKNASK

SEQ ID NO: 24056 - protein, 9 aa, synthetic construct
  REGION 1..9: note = Separin (752-760)
ALWKELLTK

SEQ ID NO: 24057 - protein, 9 aa, synthetic construct
  REGION 1..9: note = Fucose mutarotase (91-99)
ALYGNLILR

SEQ ID NO: 24058 - protein, 9 aa, synthetic construct
  REGION 1..9: note = Proteasome subunit beta type-4 (6-14)
ALYRGPITR

SEQ ID NO: 24059 - protein, 9 aa, synthetic construct
  REGION 1..9: note = Mitofusin-2 (433-441)
AMAEEIRRL

SEQ ID NO: 24060 - protein, 11 aa, synthetic construct
  REGION 1..11: note = Methionine synthase (1208-1218)
AMAPASAVSGL

SEQ ID NO: 24061 - protein, 9 aa, synthetic construct
  REGION 1..9: note = Basement membrane-specific heparan sulfate proteoglycan core protein (3206-3214)
AMAPGAPQV

SEQ ID NO: 24062 - protein, 10 aa, synthetic construct
  REGION 1..10: note = Unconventional myosin-IXa (1913-1922)
AMDDGKSIRY

SEQ ID NO: 24063 - protein, 11 aa, synthetic construct
  REGION 1..11: note = Ubiquitin carboxyl-terminal hydrolase 4 (692-702)
AMDWDSETRRL

SEQ ID NO: 24064 - protein, 10 aa, synthetic construct
  REGION 1..10: note = Myosin regulatory light polypeptide 9 (24-33)
AMFDQSQIQE

SEQ ID NO: 24065 - protein, 12 aa, synthetic construct
  REGION 1..12: note = Eukaryotic translation initiation factor 3 subunit K (2-13)
AMFEQMRANVGK

SEQ ID NO: 24066 - protein, 12 aa, synthetic construct
  REGION 1..12: note = Exportin-4 (248-259)
AMFESSQNVLLK

SEQ ID NO: 24067 - protein, 9 aa, synthetic construct
  REGION 1..9: note = Ankyrin repeat domain-containing protein SOWAHC (349-357)
AMHGHVEVV

SEQ ID NO: 24068 - protein, 9 aa, synthetic construct
  REGION 1..9: note = Calpain-7 (409-417)
AMHSDSQTF

SEQ ID NO: 24069 - protein, 9 aa, synthetic construct
  REGION 1..9: note = Cytoplasmic FMR1-interacting protein 1 (490-498)
AMIKGLQVL

SEQ ID NO: 24070 - protein, 9 aa, synthetic construct
  REGION 1..9: note = DNA repair protein RAD50 (657-665)
AMLAGATAV

SEQ ID NO: 24071 - protein, 12 aa, synthetic construct
  REGION 1..12: note = Melanocyte protein PMEL (184-195)
AMLGTHTMEVTV

SEQ ID NO: 24072 - protein, 8 aa, synthetic construct
  REGION 1..8: note = Protein AAR2 homolog (287-294)
AMMKHHTL

SEQ ID NO: 24073 - protein, 11 aa, synthetic construct
  REGION 1..11: note = Atherin (156-166)
AMNKEGGTASV

SEQ ID NO: 24074 - protein, 10 aa, synthetic construct
  REGION 1..10: note = Guanine nucleotide-binding protein G(s) subunit alpha isoforms short (95-104)
AMSNLVPPVE

SEQ ID NO: 24075 - protein, 10 aa, synthetic construct
  REGION 1..10: note = Ubiquitin-conjugating enzyme E2 H (97-106)
AMYLHRPEEY

SEQ ID NO: 24076 - protein, 12 aa, synthetic construct
  REGION 1..12: note = Copine-1 (72-83)
AQAAHQGTASQY

SEQ ID NO: 24077 - protein, 11 aa, synthetic construct
  REGION 1..11: note = Copine-1 (403-413)
AQAAHQGTASY

SEQ ID NO: 24078 - protein, 10 aa, synthetic construct
  REGION 1..10: note = Fatty acid synthase (1283-1292)
AQAELQQHDV

SEQ ID NO: 24079 - protein, 9 aa, synthetic construct
  REGION 1..9: note = Catenin beta-1 (702-710)
AQGEPLGYR

SEQ ID NO: 24080 - protein, 9 aa, synthetic construct
  REGION 1..9: note = Protein tyrosine phosphatase type IVA 1 (36-44)
AQHDLYADK

SEQ ID NO: 24081 - protein, 8 aa, synthetic construct
  REGION 1..8: note = Glutathione S-transferase A4 (32-39)
AQKAIIRY

SEQ ID NO: 24082 - protein, 9 aa, synthetic construct
  REGION 1..9: note = Patatin-like phospholipase domain-containing protein 7 (872-880)
AQKQLILLH

SEQ ID NO: 24083 - protein, 9 aa, synthetic construct
  REGION 1..9: note = Vigilin (548-556)
AQKSDIVQL

SEQ ID NO: 24084 - protein, 8 aa, synthetic construct
  REGION 1..8: note = CD276 antigen (61-68)
AQLNLIWQ

SEQ ID NO: 24085 - protein, 10 aa, synthetic construct
  REGION 1..10: note = Zinc finger protein 507 (116-125)
AQNEGKAMSY

SEQ ID NO: 24086 - protein, 9 aa, synthetic construct
  REGION 1..9: note = Hemicentin-1 (4060-4068)
AQNPAGTAL

SEQ ID NO: 24087 - protein, 9 aa, synthetic construct
  REGION 1..9: note = NAD(P) transhydrogenase, mitochondrial (158-166)
AQNPELLNK

SEQ ID NO: 24088 - protein, 9 aa, synthetic construct
  REGION 1..9: note = Elongator complex protein 2 (42-50)
AQQNDQFQK

SEQ ID NO: 24089 - protein, 9 aa, synthetic construct
  REGION 1..9: note = Microphthalmia-associated transcription factor (118-126)
AQRQQVKQY

SEQ ID NO: 24090 - protein, 9 aa, synthetic construct
  REGION 1..9: note = Cytoplasmic polyadenylation element-binding protein 1 (45-53)
AQSSTHSVL

SEQ ID NO: 24091 - protein, 9 aa, synthetic construct
  REGION 1..9: note = GMP synthase (glutamine-hydrolyzing) (130-138)
AQYGKVIDR

SEQ ID NO: 24092 - protein, 9 aa, synthetic construct
  REGION 1..9: note = 1,2-dihydroxy-3-keto-5-methylthiopentene dioxygenase (181-189)
ARGQYVKFL

SEQ ID NO: 24093 - protein, 9 aa, synthetic construct
  REGION 1..9: note = Ankyrin repeat and LEM domain-containing protein 2 (211-219)
ARNERIYVY

SEQ ID NO: 24094 - protein, 9 aa, synthetic construct
  REGION 1..9: note Dolichyl-diphosphooligosaccharide-proteinosyltransferase subunit 2 (256-264)
ASAAAVLSH

SEQ ID NO: 24095 - protein, 10 aa, synthetic construct
  REGION 1..10: note = Probable RNA-binding protein 19 (488-497)
ASALGSSSYK

SEQ ID NO: 24096 - protein, 9 aa, synthetic construct
  REGION 1..9: note = E3 ubiquitin-protein ligase MSL2 (294-302)
ASAPVTVKR

SEQ ID NO: 24097 - protein, 9 aa, synthetic construct
  REGION 1..9: note = Gelsolin (362-370)
ASDFITKMD

SEQ ID NO: 24098 - protein, 11 aa, synthetic construct
  REGION 1..11: note = Transient receptor potential cation channel subfamily M member 1 (215-225)
ASDILSFAHKY

SEQ ID NO: 24099 - protein, 10 aa, synthetic construct
  REGION 1..10: note = Suppressor of IKBKE 1 (58-67)
ASDMKDMSKY

SEQ ID NO: 24100 - protein, 10 aa, synthetic construct
  REGION 1..10: note = FERM domain-containing protein 4A (516-525)
ASDPNVSKKL

SEQ ID NO: 24101 - protein, 11 aa, synthetic construct
  REGION 1..11: note = FERM domain-containing protein 4A (483-493)
ASDPNVSKKLK

SEQ ID NO: 24102 - protein, 10 aa, synthetic construct
  REGION 1..10: note = Centrosomal protein of 68 kDa (12-21)
ASEDTKAQSY

SEQ ID NO: 24103 - protein, 10 aa, synthetic construct
  REGION 1..10: note = Nucleoside diphosphate kinase (158-167)
ASEEHLKQHY

SEQ ID NO: 24104 - protein, 12 aa, synthetic construct
  REGION 1..12: note = Unconventional myosin-Ic (842-853)
ASEIFKGKKDNY

SEQ ID NO: 24105 - protein, 11 aa, synthetic construct
  REGION 1..11: note = Amino-terminal enhancer of split (51-61)
ASEKSEMQRHY

SEQ ID NO: 24106 - protein, 9 aa, synthetic construct
  REGION 1..9: note = Retinal dehydrogenase 1 (82-90)
ASERGRLLY

SEQ ID NO: 24107 - protein, 10 aa, synthetic construct
  REGION 1..10: note = Macrophage metalloelastase (13-22)
ASGALPLNSS

SEQ ID NO: 24108 - protein, 11 aa, synthetic construct
  REGION 1..11: note = Nuclear factor interleukin-3-regulated protein (14-24)
ASLDASSNVDK

SEQ ID NO: 24109 - protein, 11 aa, synthetic construct
  REGION 1..11: note = Melanocyte protein PMEL (619-629)
ASLIYRRRLMK

SEQ ID NO: 24110 - protein, 11 aa, synthetic construct
  REGION 1..11: note = SH2B adapter protein 3 (209-219)
ASMDSGARWQR

SEQ ID NO: 24111 - protein, 10 aa, synthetic construct
  REGION 1..10: note = Protein argonaute-1 (168-177)
ASMRYTPVGR

SEQ ID NO: 24112 - protein, 9 aa, synthetic construct
  REGION 1..9: note = 5'-3' exoribonuclease 2 (454-462)
ASNPRQAAY

SEQ ID NO: 24113 - protein, 15 aa, synthetic construct
  REGION 1..15: note = PERQ amino acid-rich with GYF domain-containing protein 2 (1277-1291)
ASSERLNMGEIETLD

SEQ ID NO: 24114 - protein, 16 aa, synthetic construct
  REGION 1..16: note = PERQ amino acid-rich with GYF domain-containing protein 2 (1277-1292)
ASSERLNMGEIETLDD

SEQ ID NO: 24115 - protein, 17 aa, synthetic construct
  REGION 1..17: note = PERQ amino acid-rich with GYF domain-containing protein 2 (1277-1293)
ASSERLNMGEIETLDDY

SEQ ID NO: 24116 - protein, 18 aa, synthetic construct
  REGION 1..18: note = Vimentin (54-71)
ASSPGGVYATRSSAVRLR

SEQ ID NO: 24117 - protein, 14 aa, synthetic construct
  REGION 1..14: note = Chondroitin sulfate proteoglycan 4 (1607-1620)
ASSSAGTDPQLLLY

SEQ ID NO: 24118 - protein, 9 aa, synthetic construct
  REGION 1..9: note = Contactin-associated protein-like 3B (2-10)
ASVAWAVLK

SEQ ID NO: 24119 - protein, 9 aa, synthetic construct
  REGION 1..9: note = Sister chromatid cohesion protein PDS5 homolog B (520-528)
ASVKAIFSK

SEQ ID NO: 24120 - protein, 15 aa, synthetic construct
  REGION 1..15: note = RNA-binding protein 14 (526-540)
ASYAAQQHPQAAASY

SEQ ID NO: 24121 - protein, 11 aa, synthetic construct
  REGION 1..11: note = N6-adenosine-methyltransferase subunit METTL14 (53-63)
ASYDTSAPNAK

SEQ ID NO: 24122 - protein, 10 aa, synthetic construct
  REGION 1..10: note = Origin recognition complex subunit 5 (316-325)
ASYNPARTDK

SEQ ID NO: 24123 - protein, 12 aa, synthetic construct
  REGION 1..12: note = SPRY domain-containing SOCS box protein 1 (216-227)
ATADAPLHSVGY

SEQ ID NO: 24124 - protein, 9 aa, synthetic construct
  REGION 1..9: note = Laminin subunit beta-2 (265-273)
ATADLALGR

SEQ ID NO: 24125 - protein, 10 aa, synthetic construct
  REGION 1..10: note = Oxidative stress-induced growth inhibitor 1 (253-262)
ATAGDIAHYY

SEQ ID NO: 24126 - protein, 9 aa, synthetic construct
  REGION 1..9: note = Uncharacterized protein KIAA0355 (675-683)
ATAMVTEQK

SEQ ID NO: 24127 - protein, 9 aa, synthetic construct
  REGION 1..9: note = E1A-binding protein p400 (1093-1101)
ATAQVVQQK

SEQ ID NO: 24128 - protein, 11 aa, synthetic construct
  REGION 1..11: note = Huntingtin-interacting protein 1 (499-509)
ATARIEEMLSK

SEQ ID NO: 24129 - protein, 12 aa, synthetic construct
  REGION 1..12: note = Coatomer subunit beta' (703-714)
ATASGNANMVNK

SEQ ID NO: 24130 - protein, 10 aa, synthetic construct
  REGION 1..10: note = Vacuolar protein sorting-associated protein 18 homolog (854-863)
ATCDFPLLNR

SEQ ID NO: 24131 - protein, 8 aa, synthetic construct
  REGION 1..8: note = PH domain leucine-rich repeat-containing protein phosphatase 1 (536-543)
ATDAPLRK

SEQ ID NO: 24132 - protein, 9 aa, synthetic construct
  REGION 1..9: note = Myomegalin (2167-2175)
ATDGSFANK

SEQ ID NO: 24133 - protein, 11 aa, synthetic construct
  REGION 1..11: note = Slit homolog 3 protein (1187-1197)
ATDKDNGILLY

SEQ ID NO: 24134 - protein, 11 aa, synthetic construct
  REGION 1..11: note = Protocadherin Fat 2 (739-749)
ATDPDAGFNGK

SEQ ID NO: 24135 - protein, 11 aa, synthetic construct
  REGION 1..11: note = DNA-dependent protein kinase catalytic subunit (4080-4090)
ATDPNILGRTW

SEQ ID NO: 24136 - protein, 10 aa, synthetic construct
  REGION 1..10: note = Apolipoprotein D (122-131)
ATDYENYALV

SEQ ID NO: 24137 - protein, 11 aa, synthetic construct
  REGION 1..11: note = Apolipoprotein D (122-132)
ATDYENYALVY

SEQ ID NO: 24138 - protein, 9 aa, synthetic construct
  REGION 1..9: note = Semaphorin-5A (423-431)
ATDYGTIKK

SEQ ID NO: 24139 - protein, 7 aa, synthetic construct
  REGION 1..7: note = Fibronectin type III domain-containing protein 3B (348-354)
ATDYHVR

SEQ ID NO: 24140 - protein, 11 aa, synthetic construct
  REGION 1..11: note = Zinc finger MYM-type protein 3 (76-86)
ATELLGLGGLL

SEQ ID NO: 24141 - protein, 9 aa, synthetic construct
  REGION 1..9: note = B-cell CLL/lymphoma 9 protein (163-171)
ATEPTPAQK

SEQ ID NO: 24142 - protein, 11 aa, synthetic construct
  REGION 1..11: note = Ribosome-binding protein 1 (277-287)
ATEQEDAAVAK

SEQ ID NO: 24143 - protein, 13 aa, synthetic construct
  REGION 1..13: note = Centrosome-associated protein 350 (621-633)
ATEQKNKRLQELY

SEQ ID NO: 24144 - protein, 11 aa, synthetic construct
  REGION 1..11: note = Uncharacterized aarF domain-containing protein kinase 2 (137-147)
ATETSGPTYIK

SEQ ID NO: 24145 - protein, 12 aa, synthetic construct
  REGION 1..12: note = Protein Tob1 (180-191)
ATFAATKFGSTK

SEQ ID NO: 24146 - protein, 10 aa, synthetic construct
  REGION 1..10: note = FAST kinase domain-containing protein 2 (426-435)
ATFDIWKFRK

SEQ ID NO: 24147 - protein, 11 aa, synthetic construct
  REGION 1..11: note = Nephrocystin-3 (43-53)
ATFEHDRDKVK

SEQ ID NO: 24148 - protein, 10 aa, synthetic construct
  REGION 1..10: note = Calcium-binding protein 39 (186-195)
ATFKDLLTRH

SEQ ID NO: 24149 - protein, 9 aa, synthetic construct
  REGION 1..9: note = cAMP-specific 3',5'-cyclic phosphodiesterase 4B (107-115)
ATFPGHSQR

SEQ ID NO: 24150 - protein, 9 aa, synthetic construct
  REGION 1..9: note = Kynurenine-oxoglutarate transaminase 3 (99-107)
ATFPGMWER

SEQ ID NO: 24151 - protein, 9 aa, synthetic construct
  REGION 1..9: note = Pleckstrin homology domain-containing family H member 1 (733-741)
ATGPPALLR

SEQ ID NO: 24152 - protein, 11 aa, synthetic construct
  REGION 1..11: note = von Willebrand factor A domain-containing protein 5A (184-194)
ATIDSQHGIEK

SEQ ID NO: 24153 - protein, 11 aa, synthetic construct
  REGION 1..11: note = General transcription factor IIH subunit 2 (32-42)
ATIEDILFKAK

SEQ ID NO: 24154 - protein, 9 aa, synthetic construct
  REGION 1..9: note = F-BAR domain only protein 2 (41-49)
ATIEEAYSR

SEQ ID NO: 24155 - protein, 13 aa, synthetic construct
  REGION 1..13: note = DNA-binding protein RFX7 (683-695)
ATIEGQKQGSVKK

SEQ ID NO: 24156 - protein, 9 aa, synthetic construct
  REGION 1..9: note = Mitochondrial Rho GTPase 2 (88-96)
ATIEKIRTK

SEQ ID NO: 24157 - protein, 11 aa, synthetic construct
  REGION 1..11: note = Transformation/transcription domain-associated protein (1416-1426)
ATIEVDQIHTH

SEQ ID NO: 24158 - protein, 12 aa, synthetic construct
  REGION 1..12: note = Vacuolar-sorting protein SNF8 (73-84)
ATIGVDPLASGK

SEQ ID NO: 24159 - protein, 9 aa, synthetic construct
  REGION 1..9: note = Inhibitor of Bruton tyrosine kinase (45-53)
ATIKDVFGR

SEQ ID NO: 24160 - protein, 11 aa, synthetic construct
  REGION 1..11: note = Probable ATP-dependent RNA helicase DDX60-like (899-909)
ATINNPNLLTK

SEQ ID NO: 24161 - protein, 10 aa, synthetic construct
  REGION 1..10: note = Ankyrin repeat domain-containing protein 17 (1306-1315)
ATITDKEMLK

SEQ ID NO: 24162 - protein, 9 aa, synthetic construct
  REGION 1..9: note = Signal recognition particle 54 kDa protein (152-160)
ATKARIPFY

SEQ ID NO: 24163 - protein, 9 aa, synthetic construct
  REGION 1..9: note = Fanconi anemia group I protein (138-146)
ATKKENLAY

SEQ ID NO: 24164 - protein, 10 aa, synthetic construct
  REGION 1..10: note = Gephyrin (610-619)
ATLDIDGVRK

SEQ ID NO: 24165 - protein, 9 aa, synthetic construct
  REGION 1..9: note = Histone deacetylase 10 (469-477)
ATLDVAVRR

SEQ ID NO: 24166 - protein, 10 aa, synthetic construct
  REGION 1..10: note = MOB kinase activator 1A (76-85)
ATLGSGNLRQ

SEQ ID NO: 24167 - protein, 9 aa, synthetic construct
  REGION 1..9: note = ADP-ribosylation factor-like protein 2 (118-126)
ATLLIFANK

SEQ ID NO: 24168 - protein, 11 aa, synthetic construct
  REGION 1..11: note = Telomerase protein component 1 (53-63)
ATLPDLKTMEK

SEQ ID NO: 24169 - protein, 9 aa, synthetic construct
  REGION 1..9: note = Septin-4 (109-117)
ATLPNQVHR

SEQ ID NO: 24170 - protein, 10 aa, synthetic construct
  REGION 1..10: note = Glycogen phosphorylase, muscle form (303-312)
ATLQDIIRRF

SEQ ID NO: 24171 - protein, 11 aa, synthetic construct
  REGION 1..11: note = PH domain leucine-rich repeat-containing protein phosphatase 1 (228-238)
ATLSEETNSIL

SEQ ID NO: 24172 - protein, 9 aa, synthetic construct
  REGION 1..9: note = Kazrin (140-148)
ATLTKDVPK

SEQ ID NO: 24173 - protein, 11 aa, synthetic construct
  REGION 1..11: note = BUB3-interacting and GLEBS motif-containing protein ZNF207 (352-362)
ATLTTTSATSK

SEQ ID NO: 24174 - protein, 10 aa, synthetic construct
  REGION 1..10: note = Eukaryotic initiation factor 4A-III (5-14)
ATMATSGSAR

SEQ ID NO: 24175 - protein, 13 aa, synthetic construct
  REGION 1..13: note = Eukaryotic translation initiation factor 3 subunit J (234-246)
ATMKDDLADYGGY

SEQ ID NO: 24176 - protein, 16 aa, synthetic construct
  REGION 1..16: note = Eukaryotic translation initiation factor 3 subunit J (234-249)
ATMKDDLADYGGYDGG

SEQ ID NO: 24177 - protein, 10 aa, synthetic construct
  REGION 1..10: note = Growth hormone-inducible transmembrane protein (334-343)
ATMLATGGNR

SEQ ID NO: 24178 - protein, 12 aa, synthetic construct
  REGION 1..12: note = Growth hormone-inducible transmembrane protein (334-345)
ATMLATGGNRKK

SEQ ID NO: 24179 - protein, 11 aa, synthetic construct
  REGION 1..11: note = Signal recognition particle subunit SRP68 (260-270)
ATMSEVEWRGR

SEQ ID NO: 24180 - protein, 11 aa, synthetic construct
  REGION 1..11: note = Protein phosphatase 1G (149-159)
ATMTIEELLTR

SEQ ID NO: 24181 - protein, 9 aa, synthetic construct
  REGION 1..9: note = E3 ubiquitin-protein ligase HECTD1 (175-183)
ATNNMNLSR

SEQ ID NO: 24182 - protein, 10 aa, synthetic construct
  REGION 1..10: note = X-ray repair cross-complementing protein 6 (454-463)
ATPEQVGKMK

SEQ ID NO: 24183 - protein, 10 aa, synthetic construct
  REGION 1..10: note = Cytoplasmic dynein 1 heavy chain 1 (3980-3989)
ATPIGQAIHR

SEQ ID NO: 24184 - protein, 9 aa, synthetic construct
  REGION 1..9: note = Estradiol 17-beta-dehydrogenase 11 (131-139)
ATQDPQIEK

SEQ ID NO: 24185 - protein, 15 aa, synthetic construct
  REGION 1..15: note = Calsyntenin-1 (947-961)
ATRQQQLEWDDSTLS

SEQ ID NO: 24186 - protein, 16 aa, synthetic construct
  REGION 1..16: note = Calsyntenin-1 (947-962)
ATRQQQLEWDDSTLSY

SEQ ID NO: 24187 - protein, 9 aa, synthetic construct
  REGION 1..9: note = Intron-binding protein aquarius (1477-1485)
ATSAPEETK

SEQ ID NO: 24188 - protein, 9 aa, synthetic construct
  REGION 1..9: note = Kelch repeat and BTB domain-containing protein 4 (535-543)
ATSAVTVTR

SEQ ID NO: 24189 - protein, 11 aa, synthetic construct
  REGION 1..11: note = Basement membrane-specific heparan sulfate proteoglycan core protein (2027-2037)
ATSPAGTAQAR

SEQ ID NO: 24190 - protein, 9 aa, synthetic construct
  REGION 1..9: note = Neural cell adhesion molecule L1 (1237-1245)
ATSPINPAV

SEQ ID NO: 24191 - protein, 9 aa, synthetic construct
  REGION 1..9: note = G-protein coupled receptor 143 (61-69)
ATSPPASVR

SEQ ID NO: 24192 - protein, 10 aa, synthetic construct
  REGION 1..10: note = Melanoma-associated antigen D1 (132-141)
ATTGELAANK

SEQ ID NO: 24193 - protein, 11 aa, synthetic construct
  REGION 1..11: note = Sterol regulatory element-binding protein 1 (957-967)
ATTPASSSIDK

SEQ ID NO: 24194 - protein, 9 aa, synthetic construct
  REGION 1..9: note = Helicase SKI2W (127-135)
ATTSLSLRR

SEQ ID NO: 24195 - protein, 9 aa, synthetic construct
  REGION 1..9: note = E3 ubiquitin-protein ligase RING1 (290-298)
ATVDHLSKY

SEQ ID NO: 24196 - protein, 11 aa, synthetic construct
  REGION 1..11: note = ATP-dependent RNA helicase DHX29 (735-745)
ATVDSEKFSTY

SEQ ID NO: 24197 - protein, 9 aa, synthetic construct
  REGION 1..9: note = Multidrug resistance-associated protein 4 (364-372)
ATVLFGIAR

SEQ ID NO: 24198 - protein, 9 aa, synthetic construct
  REGION 1..9: note = FACT complex subunit SPT16 (415-423)
ATVLTSVKK

SEQ ID NO: 24199 - protein, 10 aa, synthetic construct
  REGION 1..10: note = Putative phospholipase B-like 2 (360-369)
ATWADIFKRF

SEQ ID NO: 24200 - protein, 9 aa, synthetic construct
  REGION 1..9: note = Arf-GAP with GTPase, ANK repeat and PH domain-containing protein 3 (232-240)
ATYGLNVER

SEQ ID NO: 24201 - protein, 9 aa, synthetic construct
  REGION 1..9: note = Histone acetyltransferase p300 (1189-1197)
ATYYSYQNR

SEQ ID NO: 24202 - protein, 9 aa, synthetic construct
  REGION 1..9: note = Girdin (155-163)
AVAAHIQEV

SEQ ID NO: 24203 - protein, 13 aa, synthetic construct
  REGION 1..13: note = Sodium/potassium-transporting ATPase subunit alpha-1 (249-261)
AVAGDASESALLK

SEQ ID NO: 24204 - protein, 12 aa, synthetic construct
  REGION 1..12: note = RanBP-type and C3HC4-type zinc finger-containing protein 1 (18-29)
AVAGGDEQVAMK

SEQ ID NO: 24205 - protein, 11 aa, synthetic construct
  REGION 1..11: note = Mitochondrial import inner membrane translocase subunit Tim13 (31-41)
AVANAQELLQR

SEQ ID NO: 24206 - protein, 11 aa, synthetic construct
  REGION 1..11: note = cDNA FLJ78342 (66-76)
AVAQMDFIKLY

SEQ ID NO: 24207 - protein, 10 aa, synthetic construct
  REGION 1..10: note = Serine/threonine-protein kinase ATR (1642-1651)
AVASFRSKAY

SEQ ID NO: 24208 - protein, 9 aa, synthetic construct
  REGION 1..9: note = G-protein coupled receptor 143 (219-227)
AVASLLKGR

SEQ ID NO: 24209 - protein, 9 aa, synthetic construct
  REGION 1..9: note = Cadherin EGF LAG seven-pass G-type receptor 2 (2176-2184)
AVASVIIYR

SEQ ID NO: 24210 - protein, 9 aa, synthetic construct
  REGION 1..9: note = Signal peptidase complex catalytic subunit SEC11A (119-127)
AVDDRGLYK

SEQ ID NO: 24211 - protein, 11 aa, synthetic construct
  REGION 1..11: note = MICOS complex subunit MIC60 (276-286)
AVDEAADALLK

SEQ ID NO: 24212 - protein, 10 aa, synthetic construct
  REGION 1..10: note = Multivesicular body subunit 12A (118-127)
AVFDVRLSGK

SEQ ID NO: 24213 - protein, 9 aa, synthetic construct
  REGION 1..9: note = Peroxisomal multifunctional enzyme type 2 (271-279)
AVFEWHITK

SEQ ID NO: 24214 - protein, 16 aa, synthetic construct
  REGION 1..16: note = Peroxisomal multifunctional enzyme type 2 (648-663)
AVFEWHITKGGNIGAK

SEQ ID NO: 24215 - protein, 10 aa, synthetic construct
  REGION 1..10: note = Transmembraneoprotein NMB (550-559)
AVFFPGNQEK

SEQ ID NO: 24216 - protein, 9 aa, synthetic construct
  REGION 1..9: note = Transmembrane protein 50A (132-140)
AVFFQNAFI

SEQ ID NO: 24217 - protein, 9 aa, synthetic construct
  REGION 1..9: note = tRNA-splicing endonuclease subunit Sen2 (4-12)
AVFHAPKRK

SEQ ID NO: 24218 - protein, 9 aa, synthetic construct
  REGION 1..9: note = Kinesin-like protein KIF13B (224-232)
AVFKITLTH

SEQ ID NO: 24219 - protein, 10 aa, synthetic construct
  REGION 1..10: note = Kinesin-like protein KIF1B (252-261)
AVFTIVFTQK

SEQ ID NO: 24220 - protein, 11 aa, synthetic construct
  REGION 1..11: note = GMP synthase (glutamine-hydrolyzing) (400-410)
AVHIDNGFMRK

SEQ ID NO: 24221 - protein, 9 aa, synthetic construct
  REGION 1..9: note = Lysosomal-trafficking regulator (2018-2026)
AVHPPTNTY

SEQ ID NO: 24222 - protein, 9 aa, synthetic construct
  REGION 1..9: note = Disintegrin and metalloproteinase domain-containing protein 10 (184-192)
AVIAQISSH

SEQ ID NO: 24223 - protein, 12 aa, synthetic construct
  REGION 1..12: note = UDP-N-acetylglucosamine-peptide N-acetylglucosaminyltransferase 110 kDa subunit (593-604)
AVIDFKSNGHIY

SEQ ID NO: 24224 - protein, 10 aa, synthetic construct
  REGION 1..10: note = Armadillo repeat-containing X-linked protein 5 (128-137)
AVIEANIRSY

SEQ ID NO: 24225 - protein, 10 aa, synthetic construct
  REGION 1..10: note = Cytoplasmic dynein 1 heavy chain 1 (3288-3297)
AVIEAQNAVK

SEQ ID NO: 24226 - protein, 10 aa, synthetic construct
  REGION 1..10: note = Tyrosine-protein phosphatase non-receptor type 1 (109-118)
AVIEGAKFIM

SEQ ID NO: 24227 - protein, 9 aa, synthetic construct
  REGION 1..9: note = Adenosine 3'-phospho 5'-phosphosulfate transporter 2 (240-248)
AVIGNVQEK

SEQ ID NO: 24228 - protein, 10 aa, synthetic construct
  REGION 1..10: note = Protocadherin Fat 4 (1541-1550)
AVIGSVLTTI

SEQ ID NO: 24229 - protein, 10 aa, synthetic construct
  REGION 1..10: note = Kinesin-like protein KIF1B (391-400)
AVINEDPNAK

SEQ ID NO: 24230 - protein, 13 aa, synthetic construct
  REGION 1..13: note = RING finger protein 37 (351-363)
AVIPSSIVLPSQK

SEQ ID NO: 24231 - protein, 9 aa, synthetic construct
  REGION 1..9: note = DNA repair protein SWI5 homolog isoform 2 (175-183)
AVIRGVTTK

SEQ ID NO: 24232 - protein, 10 aa, synthetic construct
  REGION 1..10: note = Zinc finger protein 28 homolog (116-125)
AVITERLTSY

SEQ ID NO: 24233 - protein, 10 aa, synthetic construct
  REGION 1..10: note = Eukaryotic translation initiation factor 3 subunit E (260-269)
AVITNKDVRK

SEQ ID NO: 24234 - protein, 10 aa, synthetic construct
  REGION 1..10: note = Proline-rich protein 13 (52-61)
AVIVDKKMQK

SEQ ID NO: 24235 - protein, 9 aa, synthetic construct
  REGION 1..9: note = Heat shock 70 kDa protein 4 (349-357)
AVKEKISKF

SEQ ID NO: 24236 - protein, 9 aa, synthetic construct
  REGION 1..9: note = Very long-chain specific acyl-CoA dehydrogenase, mitochondrial (252-260)
AVKEKITAF

SEQ ID NO: 24237 - protein, 9 aa, synthetic construct
  REGION 1..9: note = Heat shock protein 105 kDa (349-357)
AVKERIAKF

SEQ ID NO: 24238 - protein, 9 aa, synthetic construct
  REGION 1..9: note = Hermansky-Pudlak syndrome 5 protein (25-33)
AVKESVSSF

SEQ ID NO: 24239 - protein, 11 aa, synthetic construct
  REGION 1..11: note = Interleukin-1 receptor accessory protein (505-515)
AVKETKVKELK

SEQ ID NO: 24240 - protein, 10 aa, synthetic construct
  REGION 1..10: note = Actin-related protein 2/3 complex subunit 4 (75-84)
AVKQADEIEK

SEQ ID NO: 24241 - protein, 9 aa, synthetic construct
  REGION 1..9: note = Phosphatidylinositol 4,5-bisphosphate 3-kinase catalytic subunit beta isoform (406-414)
AVLDKVKTK

SEQ ID NO: 24242 - protein, 9 aa, synthetic construct
  REGION 1..9: note = Periodic tryptophan protein 1 homolog (46-54)
AVLDLSWNK

SEQ ID NO: 24243 - protein, 9 aa, synthetic construct
  REGION 1..9: note = Glutamate receptor ionotropic, NMDA 2A (236-244)
AVLILSEAR

SEQ ID NO: 24244 - protein, 9 aa, synthetic construct
  REGION 1..9: note = ADP-ribosylation factor 5 (119-127)
AVLLVFANK

SEQ ID NO: 24245 - protein, 11 aa, synthetic construct
  REGION 1..11: note = Casein kinase II subunit alpha' (340-350)
AVLSSGLTAAR

SEQ ID NO: 24246 - protein, 12 aa, synthetic construct
  REGION 1..12: note = COP9 signalosome complex subunit 8 (4-15)
AVMAESAFSFKK

SEQ ID NO: 24247 - protein, 10 aa, synthetic construct
  REGION 1..10: note = FACT complex subunit SPT16 (328-337)
AVMDVVKKQK

SEQ ID NO: 24248 - protein, 9 aa, synthetic construct
  REGION 1..9: note = Prefoldin subunit 5 (143-151)
AVMEMMSQK

SEQ ID NO: 24249 - protein, 11 aa, synthetic construct
  REGION 1..11: note = DNA-directed RNA polymerase I subunit RPA1 (330-340)
AVMKDVVLIRK

SEQ ID NO: 24250 - protein, 9 aa, synthetic construct
  REGION 1..9: note = Pleckstrin homology domain-containing family A member 1 (203-211)
AVMKNWKRR

SEQ ID NO: 24251 - protein, 9 aa, synthetic construct
  REGION 1..9: note = Catenin beta-1 (172-180)
AVMVHQLSK

SEQ ID NO: 24252 - protein, 10 aa, synthetic construct
  REGION 1..10: note = Galectin-3 (212-221)
AVNDAHLLQY

SEQ ID NO: 24253 - protein, 9 aa, synthetic construct
  REGION 1..9: note = CDC42 small effector protein 1 (56-64)
AVQEQMRSK

SEQ ID NO: 24254 - protein, 10 aa, synthetic construct
  REGION 1..10: note = Transforming growth factor-beta-induced protein ig-h3 (50-59)
AVQKVIGTNR

SEQ ID NO: 24255 - protein, 10 aa, synthetic construct
  REGION 1..10: note = 26S proteasome non-ATPase regulatory subunit 6 (44-53)
AVRDNNMAPY

SEQ ID NO: 24256 - protein, 9 aa, synthetic construct
  REGION 1..9: note = Amidophosphoribosyltransferase (196-204)
AVRDPYGNR

SEQ ID NO: 24257 - protein, 10 aa, synthetic construct
  REGION 1..10: note = WD repeat-containing protein 63 (83-92)
AVSDFHPVKK

SEQ ID NO: 24258 - protein, 9 aa, synthetic construct
  REGION 1..9: note = GRAM domain-containing protein 4 (475-483)
AVSTPSTQK

SEQ ID NO: 24259 - protein, 9 aa, synthetic construct
  REGION 1..9: note = Hyaluronidase-2 (16-24)
AVSWAMELK

SEQ ID NO: 24260 - protein, 12 aa, synthetic construct
  REGION 1..12: note = 72 kDa type IV collagenase (603-614)
AVVDLQGGGHSY

SEQ ID NO: 24261 - protein, 9 aa, synthetic construct
  REGION 1..9: note = Folliculin-interacting protein 1 (548-556)
AVVDQITRH

SEQ ID NO: 24262 - protein, 10 aa, synthetic construct
  REGION 1..10: note = Calcineurin subunit B type 1 (155-164)
AVVGGLDIHK

SEQ ID NO: 24263 - protein, 11 aa, synthetic construct
  REGION 1..11: note = Calcineurin subunit B type 1 (155-165)
AVVGGLDIHKK

SEQ ID NO: 24264 - protein, 9 aa, synthetic construct
  REGION 1..9: note Dolichyl-diphosphooligosaccharide-proteinosyltransferase subunit STT3A (152-160)
AVVPGYISR

SEQ ID NO: 24265 - protein, 11 aa, synthetic construct
  REGION 1..11: note = Nodal modulator 3 (366-376)
AVVSGESCPGK

SEQ ID NO: 24266 - protein, 10 aa, synthetic construct
  REGION 1..10: note = Protein phosphatase 1B (57-66)
AVYDGHAGSR

SEQ ID NO: 24267 - protein, 11 aa, synthetic construct
  REGION 1..11: note = Biotinidase (61-71)
AVYEHPSILSL

SEQ ID NO: 24268 - protein, 10 aa, synthetic construct
  REGION 1..10: note = Protein-lysine N-methyltransferase METTL10 (40-49)
AVYERELQTF

SEQ ID NO: 24269 - protein, 11 aa, synthetic construct
  REGION 1..11: note = Carbonic anhydrase 14 (307-317)
AVYFIARKIRK

SEQ ID NO: 24270 - protein, 9 aa, synthetic construct
  REGION 1..9: note = TBC1 domain family member 16 (146-154)
AVYNPAVGY

SEQ ID NO: 24271 - protein, 9 aa, synthetic construct
  REGION 1..9: note = Tetraspanin-4 (42-50)
AYTDKIDRY

SEQ ID NO: 24272 - protein, 11 aa, synthetic construct
  REGION 1..11: note = Protein HIRA (749-759)
CVACEKRMLSV

SEQ ID NO: 24273 - protein, 11 aa, synthetic construct
  REGION 1..11: note = Heterogeneous nuclear ribonucleoprotein A0 (150-160)
DAADKAAVVKF

SEQ ID NO: 24274 - protein, 11 aa, synthetic construct
  REGION 1..11: note = Gelsolin (291-301)
DAANRKLAKLY

SEQ ID NO: 24275 - protein, 11 aa, synthetic construct
  REGION 1..11: note = Thimet oligopeptidase (401-411)
DAASGEVVGKF

SEQ ID NO: 24276 - protein, 9 aa, synthetic construct
  REGION 1..9: note = WD repeat-containing protein 61 (85-93)
DAHIRLWDL

SEQ ID NO: 24277 - protein, 9 aa, synthetic construct
  REGION 1..9: note = Delta-1-pyrroline-5-carboxylate synthase (648-656)
DAIDHIHKY

SEQ ID NO: 24278 - protein, 9 aa, synthetic construct
  REGION 1..9: note = Serine/arginine-rich splicing factor 9 (67-75)
DAIYGRNGY

SEQ ID NO: 24279 - protein, 11 aa, synthetic construct
  REGION 1..11: note = DNA-directed RNA polymerases I, II, and III subunit RPABC5 (33-43)
DALDALGLKRY

SEQ ID NO: 24280 - protein, 11 aa, synthetic construct
  REGION 1..11: note = Cell division cycle protein 16 homolog (140-150)
DALDNRTLATY

SEQ ID NO: 24281 - protein, 9 aa, synthetic construct
  REGION 1..9: note = Mitogen-activated protein kinase kinase kinase 1 (693-701)
DANSRTSQL

SEQ ID NO: 24282 - protein, 9 aa, synthetic construct
  REGION 1..9: note = 28S ribosomal protein S22, mitochondrial (296-304)
DATNLVQLY

SEQ ID NO: 24283 - protein, 10 aa, synthetic construct
  REGION 1..10: note = Kinase D-interacting substrate of 220 kDa (264-273)
DAYREYIAQM

SEQ ID NO: 24284 - protein, 11 aa, synthetic construct
  REGION 1..11: note = Actin, aortic smooth muscle (58-68)
DEAQSKRGILT

SEQ ID NO: 24285 - protein, 9 aa, synthetic construct
  REGION 1..9: note = Remodeling and spacing factor 1 (1413-1421)
DELLRVTDL

SEQ ID NO: 24286 - protein, 9 aa, synthetic construct
  REGION 1..9: note = 28S ribosomal protein S14, mitochondrial (49-57)
DERLRINSL

SEQ ID NO: 24287 - protein, 9 aa, synthetic construct
  REGION 1..9: note = Kinesin-like protein KIF15 (1289-1297)
DEVERTQTL

SEQ ID NO: 24288 - protein, 9 aa, synthetic construct
  REGION 1..9: note = CAP-Gly domain-containing linker protein 1 (519-527)
DHQREITSL

SEQ ID NO: 24289 - protein, 9 aa, synthetic construct
  REGION 1..9: note = Peroxisome proliferator-activated receptor gamma coactivator-related protein 1 (1261-1269)
DHYQRQRVL

SEQ ID NO: 24290 - protein, 9 aa, synthetic construct
  REGION 1..9: note = Poly (ADP-ribose) polymerase 1 (993-1001)
DIAQVNLKY

SEQ ID NO: 24291 - protein, 10 aa, synthetic construct
  REGION 1..10: note = RILP-like protein 1 (29-38)
DIASLVGHEF

SEQ ID NO: 24292 - protein, 10 aa, synthetic construct
  REGION 1..10: note = Probable ATP-dependent RNA helicase DDX58 (896-905)
DIATGVQTLY

SEQ ID NO: 24293 - protein, 9 aa, synthetic construct
  REGION 1..9: note = RNA-binding protein 8A (72-80)
DIHDKFAEY

SEQ ID NO: 24294 - protein, 10 aa, synthetic construct
  REGION 1..10: note = Filamin-A (897-906)
DIIDHHDNTY

SEQ ID NO: 24295 - protein, 12 aa, synthetic construct
  REGION 1..12: note = SURP and G-patch domain-containing protein 2 (265-276)
DIIDKSDVFSRF

SEQ ID NO: 24296 - protein, 9 aa, synthetic construct
  REGION 1..9: note = Lymphocyte cytosolic protein 2 (500-508)
DIIDYFRKM

SEQ ID NO: 24297 - protein, 10 aa, synthetic construct
  REGION 1..10: note = Cytoplasmic dynein 2 heavy chain 1 (253-262)
DIIGGSFGRF

SEQ ID NO: 24298 - protein, 11 aa, synthetic construct
  REGION 1..11: note = Protein farnesyltransferase subunit beta (120-130)
DIINREKLLQY

SEQ ID NO: 24299 - protein, 13 aa, synthetic construct
  REGION 1..13: note = Delta(24)-sterol reductase (252-264)
DIIPFGNNPIFRY

SEQ ID NO: 24300 - protein, 13 aa, synthetic construct
  REGION 1..13: note = Putative annexin A2-like protein (158-170)
DIISDTSGDFRKL

SEQ ID NO: 24301 - protein, 9 aa, synthetic construct
  REGION 1..9: note = Nucleophosmin (246-254)
DIKAKMQAS

SEQ ID NO: 24302 - protein, 9 aa, synthetic construct
  REGION 1..9: note = Actin, alpha skeletal muscle (7-15)
DIKEKLCYV

SEQ ID NO: 24303 - protein, 9 aa, synthetic construct
  REGION 1..9: note = Ubiquitin fusion degradation protein 1 homolog (289-297)
DIKRGIPNY

SEQ ID NO: 24304 - protein, 10 aa, synthetic construct
  REGION 1..10: note = POZ-, AT hook-, and zinc finger-containing protein 1 (116-125)
DILDFAYTSR

SEQ ID NO: 24305 - protein, 9 aa, synthetic construct
  REGION 1..9: note = Pre-mRNA-processing-splicing factor 8 (298-306)
DINKIIIRQ

SEQ ID NO: 24306 - protein, 9 aa, synthetic construct
  REGION 1..9: note = Trimethyllysine dioxygenase, mitochondrial (352-360)
DIPERILTY

SEQ ID NO: 24307 - protein, 10 aa, synthetic construct
  REGION 1..10: note = 5'-nucleotidase domain-containing protein 1 (161-170)
DIVAAIQHNY

SEQ ID NO: 24308 - protein, 9 aa, synthetic construct
  REGION 1..9: note = Integrin-linked protein kinase (81-89)
DIVQKLLQY

SEQ ID NO: 24309 - protein, 10 aa, synthetic construct
  REGION 1..10: note = Calcium/calmodulin-dependent protein kinase type 1 (83-92)
DIYESGGHLY

SEQ ID NO: 24310 - protein, 10 aa, synthetic construct
  REGION 1..10: note = Pantothenate kinase 2, mitochondrial (45-54)
DIYGGDYERF

SEQ ID NO: 24311 - protein, 10 aa, synthetic construct
  REGION 1..10: note = F-box only protein 11 (39-48)
DIYNHMYSGV

SEQ ID NO: 24312 - protein, 9 aa, synthetic construct
  REGION 1..9: note = Translin-associated protein X (51-59)
DKYERLVKL

SEQ ID NO: 24313 - protein, 9 aa, synthetic construct
  REGION 1..9: note = R3H and coiled-coil domain-containing protein 1 (315-323)
DLAHVVEIY

SEQ ID NO: 24314 - protein, 9 aa, synthetic construct
  REGION 1..9: note = CUGBP Elav-like family member 5 (41-49)
DLDAIKLFV

SEQ ID NO: 24315 - protein, 12 aa, synthetic construct
  REGION 1..12: note = Lanosterol 14-alpha demethylase (473-484)
DLIDGYFPTVNY

SEQ ID NO: 24316 - protein, 9 aa, synthetic construct
  REGION 1..9: note = Heterogeneous nuclear ribonucleoprotein A0 (113-121)
DLIEHFSQF

SEQ ID NO: 24317 - protein, 9 aa, synthetic construct
  REGION 1..9: note = DNA polymerase zeta catalytic subunit (2457-2465)
DLIGKTSEM

SEQ ID NO: 24318 - protein, 11 aa, synthetic construct
  REGION 1..11: note = Probable fibrosin-1 (455-465)
DLIGQDLNSRY

SEQ ID NO: 24319 - protein, 12 aa, synthetic construct
  REGION 1..12: note = DNA repair endonuclease XPF (720-731)
DLIGSLNNGRLY

SEQ ID NO: 24320 - protein, 9 aa, synthetic construct
  REGION 1..9: note = Alpha-catulin (622-630)
DLIHQLEVF

SEQ ID NO: 24321 - protein, 9 aa, synthetic construct
  REGION 1..9: note = Spermidine synthase (215-223)
DLIKEMRQF

SEQ ID NO: 24322 - protein, 9 aa, synthetic construct
  REGION 1..9: note = Reticulon-4 (494-502)
DLIKETKLS

SEQ ID NO: 24323 - protein, 11 aa, synthetic construct
  REGION 1..11: note = Rho guanine nucleotide exchange factor 1 (77-87)
DLISEDVQRRF

SEQ ID NO: 24324 - protein, 10 aa, synthetic construct
  REGION 1..10: note = Microtubule-associated serine/threonine-protein kinase 4 (1003-1012)
DLITHINGEP

SEQ ID NO: 24325 - protein, 9 aa, synthetic construct
  REGION 1..9: note = Calcium/calmodulin-dependent protein kinase kinase 2 (186-194)
DLKDLITRM

SEQ ID NO: 24326 - protein, 9 aa, synthetic construct
  REGION 1..9: note = Heterogeneous nuclear ribonucleoprotein A/B (85-93)
DLKDYFTKF

SEQ ID NO: 24327 - protein, 9 aa, synthetic construct
  REGION 1..9: note = Mediator of RNA polymerase II transcription subunit 8 (21-29)
DLKNSLGSF

SEQ ID NO: 24328 - protein, 9 aa, synthetic construct
  REGION 1..9: note = CASP8 and FADD-like apoptosis regulator (163-171)
DLKTKIQKY

SEQ ID NO: 24329 - protein, 11 aa, synthetic construct
  REGION 1..11: note = Glycogen (starch) synthase, muscle (593-603)
DLLDWKYLGRY

SEQ ID NO: 24330 - protein, 10 aa, synthetic construct
  REGION 1..10: note = Fez family zinc finger protein 1 isoform 2 (119-128)
DLLNCALSLK

SEQ ID NO: 24331 - protein, 9 aa, synthetic construct
  REGION 1..9: note = EPM2A-interacting protein 1 (205-213)
DLLTIINLT

SEQ ID NO: 24332 - protein, 10 aa, synthetic construct
  REGION 1..10: note = Sorting nexin-17 (151-160)
DLPDDLIGYF

SEQ ID NO: 24333 - protein, 9 aa, synthetic construct
  REGION 1..9: note = UBAP1-MVB12-associated (UMA)-domain containing protein 1 isoform b (71-79)
DLPDHLLSY

SEQ ID NO: 24334 - protein, 10 aa, synthetic construct
  REGION 1..10: note = Rap guanine nucleotide exchange factor 2 (604-613)
DLPDQVLRVF

SEQ ID NO: 24335 - protein, 11 aa, synthetic construct
  REGION 1..11: note = Class E basic helix-loop-helix protein 40 (21-31)
DLPGMYPAHMY

SEQ ID NO: 24336 - protein, 9 aa, synthetic construct
  REGION 1..9: note = Coiled-coil domain-containing protein 22 (96-104)
DLRDLLLFL

SEQ ID NO: 24337 - protein, 11 aa, synthetic construct
  REGION 1..11: note = Transient receptor potential cation channel subfamily M member 1 (109-119)
DLVGKDVTRVY

SEQ ID NO: 24338 - protein, 10 aa, synthetic construct
  REGION 1..10: note = Regulatory-associated protein of mTOR (292-301)
DLVKDNGHKY

SEQ ID NO: 24339 - protein, 10 aa, synthetic construct
  REGION 1..10: note = Holliday junction recognition protein (177-186)
DLYAGMLHSM

SEQ ID NO: 24340 - protein, 9 aa, synthetic construct
  REGION 1..9: note = Zinc finger protein 1 homolog (74-82)
DLYEKTLKY

SEQ ID NO: 24341 - protein, 9 aa, synthetic construct
  REGION 1..9: note = Cytoplasmic FMR1-interacting protein 1 (703-711)
DLYNDSAHY

SEQ ID NO: 24342 - protein, 10 aa, synthetic construct
  REGION 1..10: note = DNA (cytosine-5)-methyltransferase 1 (862-871)
DLYPEHYRKY

SEQ ID NO: 24343 - protein, 9 aa, synthetic construct
  REGION 1..9: note = Phosphoglycerate kinase 1 (52-60)
DNGAKSVVL

SEQ ID NO: 24344 - protein, 9 aa, synthetic construct
  REGION 1..9: note = 60S ribosomal protein L23 (30-38)
DNTGAKNLY

SEQ ID NO: 24345 - protein, 9 aa, synthetic construct
  REGION 1..9: note = Nuclear pore complex protein Nup88 (194-202)
DNVIRIYSL

SEQ ID NO: 24346 - protein, 12 aa, synthetic construct
  REGION 1..12: note = KAT8 regulatory NSL complex subunit 2 (176-187)
DQEDPLKHAGVY

SEQ ID NO: 24347 - protein, 12 aa, synthetic construct
  REGION 1..12: note = EH domain-containing protein 1 (222-233)
DQIETQQLMRVY

SEQ ID NO: 24348 - protein, 13 aa, synthetic construct
  REGION 1..13: note = Eukaryotic translation initiation factor 3 subunit C-like protein (888-900)
DQKDGYRKNEGYM

SEQ ID NO: 24349 - protein, 9 aa, synthetic construct
  REGION 1..9: note = Isoleucine-tRNA ligase, cytoplasmic (424-432)
DQLLRNNDL

SEQ ID NO: 24350 - protein, 9 aa, synthetic construct
  REGION 1..9: note = V-type proton ATPase subunit H (445-453)
DQQVRYNAL

SEQ ID NO: 24351 - protein, 9 aa, synthetic construct
  REGION 1..9: note = Neuroblastoma-amplified sequence (1664-1672)
DQYKRETIL

SEQ ID NO: 24352 - protein, 10 aa, synthetic construct
  REGION 1..10: note = GTPase KRas (69-78)
DQYMRTGEGF

SEQ ID NO: 24353 - protein, 9 aa, synthetic construct
  REGION 1..9: note = Vigilin (368-376)
DRALRSFKL

SEQ ID NO: 24354 - protein, 9 aa, synthetic construct
  REGION 1..9: note = Tyrosine-protein kinase BAZ1B (189-197)
DREDKRSAL

SEQ ID NO: 24355 - protein, 9 aa, synthetic construct
  REGION 1..9: note = Clathrin heavy chain 1 (779-787)
DRFDFVHDL

SEQ ID NO: 24356 - protein, 9 aa, synthetic construct
  REGION 1..9: note = KxDL motif-containing protein 1 (43-51)
DRFEKTNEM

SEQ ID NO: 24357 - protein, 9 aa, synthetic construct
  REGION 1..9: note = PAB-dependent poly(A)-specific ribonuclease subunit PAN2 (264-272)
DRFLKVYDL

SEQ ID NO: 24358 - protein, 9 aa, synthetic construct
  REGION 1..9: note = Monofunctional C1-tetrahydrofolate synthase, mitochondrial (503-511)
DRFLRKITI

SEQ ID NO: 24359 - protein, 9 aa, synthetic construct
  REGION 1..9: note = Cyclin-G1 (81-89)
DRFLSKMKV

SEQ ID NO: 24360 - protein, 9 aa, synthetic construct
  REGION 1..9: note = Lanosterol synthase (287-295)
DRFTKSISI

SEQ ID NO: 24361 - protein, 9 aa, synthetic construct
  REGION 1..9: note = Vacuolar protein sorting-associated protein 51 homolog (86-94)
DRHERITKL

SEQ ID NO: 24362 - protein, 9 aa, synthetic construct
  REGION 1..9: note = Endoplasmin (716-724)
DRIERMLRL

SEQ ID NO: 24363 - protein, 9 aa, synthetic construct
  REGION 1..9: note = Transcription elongation factor SPT5 (314-322)
DRIKARMSL

SEQ ID NO: 24364 - protein, 9 aa, synthetic construct
  REGION 1..9: note = Regulator of nonsense transcripts 3B (254-262)
DRIPERDKL

SEQ ID NO: 24365 - protein, 10 aa, synthetic construct
  REGION 1..10: note = Coatomer subunit epsilon (160-169)
DRLDLARKEL

SEQ ID NO: 24366 - protein, 9 aa, synthetic construct
  REGION 1..9: note = DNA-dependent protein kinase catalytic subunit (2537-2545)
DRLLALNSL

SEQ ID NO: 24367 - protein, 9 aa, synthetic construct
  REGION 1..9: note = DNA replication complex GINS protein PSF1 (82-90)
DRLLRIRAL

SEQ ID NO: 24368 - protein, 9 aa, synthetic construct
  REGION 1..9: note = Telomerase-binding protein EST1A (484-492)
DRNLRVKAL

SEQ ID NO: 24369 - protein, 9 aa, synthetic construct
  REGION 1..9: note = SUMO-activating enzyme subunit 1 (20-28)
DRQIRLWGL

SEQ ID NO: 24370 - protein, 9 aa, synthetic construct
  REGION 1..9: note = Phenylalanine-tRNA ligase alpha subunit (353-361)
DRVFRNETL

SEQ ID NO: 24371 - protein, 9 aa, synthetic construct
  REGION 1..9: note = T-complex protein 1 subunit zeta (127-135)
DRVKKIIEL

SEQ ID NO: 24372 - protein, 9 aa, synthetic construct
  REGION 1..9: note = 39S ribosomal protein L20, mitochondrial (16-24)
DRYFRIQEV

SEQ ID NO: 24373 - protein, 9 aa, synthetic construct
  REGION 1..9: note = Spectrin alpha chain, non-erythrocytic 1 (24-32)
DRYHRFKEL

SEQ ID NO: 24374 - protein, 9 aa, synthetic construct
  REGION 1..9: note = Small nuclear ribonucleoprotein Sm D2 (93-101)
DRYISKMFL

SEQ ID NO: 24375 - protein, 9 aa, synthetic construct
  REGION 1..9: note = Nuclear factor of activated T-cells, cytoplasmic 3 (487-495)
DRYLRPHAF

SEQ ID NO: 24376 - protein, 9 aa, synthetic construct
  REGION 1..9: note = 60S ribosomal protein L27 (47-55)
DRYPRKVTA

SEQ ID NO: 24377 - protein, 9 aa, synthetic construct
  REGION 1..9: note = Ubiquitin carboxyl-terminal hydrolase 45 (410-418)
DRYSGNVTI

SEQ ID NO: 24378 - protein, 9 aa, synthetic construct
  REGION 1..9: note = Major prion protein (147-155)
DRYYRENMH

SEQ ID NO: 24379 - protein, 10 aa, synthetic construct
  REGION 1..10: note = Nucleolar protein 4-like (309-318)
DSAAITHSTY

SEQ ID NO: 24380 - protein, 10 aa, synthetic construct
  REGION 1..10: note = Splicing factor U2AF 65 kDa subunit (293-302)
DSATGLSKGY

SEQ ID NO: 24381 - protein, 10 aa, synthetic construct
  REGION 1..10: note = Eukaryotic translation initiation factor 4 gamma 3 (1501-1510)
DSDTEKELQA

SEQ ID NO: 24382 - protein, 10 aa, synthetic construct
  REGION 1..10: note = Gamma-glutamylaminecyclotransferase (138-147)
DSEGPHGLRY

SEQ ID NO: 24383 - protein, 12 aa, synthetic construct
  REGION 1..12: note = Bromodomain and WD repeat-containing protein 1 (1792-1803)
DSEPGRSGGRKY

SEQ ID NO: 24384 - protein, 10 aa, synthetic construct
  REGION 1..10: note = RNA-binding protein 39 (262-271)
DSETGRSKGY

SEQ ID NO: 24385 - protein, 9 aa, synthetic construct
  REGION 1..9: note = Bcl-2-like protein 12 (183-191)
DSFARLVEL

SEQ ID NO: 24386 - protein, 9 aa, synthetic construct
  REGION 1..9: note = Melanophilin (443-451)
DSFDRKSVY

SEQ ID NO: 24387 - protein, 9 aa, synthetic construct
  REGION 1..9: note = TBC1 domain family member 4 (590-598)
DSFERSNSL

SEQ ID NO: 24388 - protein, 10 aa, synthetic construct
  REGION 1..10: note = Signal transducer and activator of transcription 1-alpha/beta (24-33)
DSFPMEIRQY

SEQ ID NO: 24389 - protein, 11 aa, synthetic construct
  REGION 1..11: note = Signal transducer and activator of transcription 1-alpha/beta (24-34)
DSFPMEIRQYL

SEQ ID NO: 24390 - protein, 10 aa, synthetic construct
  REGION 1..10: note = Signal transducer and activator of transcription 3 (24-33)
DSFPMELRQF

SEQ ID NO: 24391 - protein, 12 aa, synthetic construct
  REGION 1..12: note = Syndecan-3 (294-305)
DSGSSAAQLPQK

SEQ ID NO: 24392 - protein, 10 aa, synthetic construct
  REGION 1..10: note = Protein MON2 homolog (1214-1223)
DSIGEKLGRY

SEQ ID NO: 24393 - protein, 9 aa, synthetic construct
  REGION 1..9: note = Disco-interacting protein 2 homolog A (882-890)
DSIHQVGVY

SEQ ID NO: 24394 - protein, 9 aa, synthetic construct
  REGION 1..9: note = ATP-dependent RNA helicase DDX54 (547-555)
DSIKNYRSR

SEQ ID NO: 24395 - protein, 9 aa, synthetic construct
  REGION 1..9: note = Peptidyl-prolyl cis-trans isomerase FKBP9 (369-377)
DSISITSHY

SEQ ID NO: 24396 - protein, 9 aa, synthetic construct
  REGION 1..9: note = Methyltransferase-like protein 13 (209-217)
DSKDPTLGM

SEQ ID NO: 24397 - protein, 9 aa, synthetic construct
  REGION 1..9: note = Protein AHNAK2 (672-680)
DSKFKMPKF

SEQ ID NO: 24398 - protein, 10 aa, synthetic construct
  REGION 1..10: note = Arf-GAP with SH3 domain, ANK repeat and PH domain-containing protein 2 (284-293)
DSQIRQSTAY

SEQ ID NO: 24399 - protein, 9 aa, synthetic construct
  REGION 1..9: note = RNA-binding protein 3 (119-127)
DSRPGGYGY

SEQ ID NO: 24400 - protein, 9 aa, synthetic construct
  REGION 1..9: note = T-complex protein 1 subunit alpha (459-467)
DSTDLVAKL

SEQ ID NO: 24401 - protein, 9 aa, synthetic construct
  REGION 1..9: note = Signal-induced proliferation-associated 1-like protein 2 (438-446)
DSTGTHSLY

SEQ ID NO: 24402 - protein, 11 aa, synthetic construct
  REGION 1..11: note = Heterogeneous nuclear ribonucleoprotein A1-like 2 (4-14)
DSVDKIVIQKY

SEQ ID NO: 24403 - protein, 11 aa, synthetic construct
  REGION 1..11: note = Mitochondrial import inner membrane translocase subunit TIM50 (212-222)
DSVDPHGFISY

SEQ ID NO: 24404 - protein, 9 aa, synthetic construct
  REGION 1..9: note = Basement membrane-specific heparan sulfate proteoglycan core protein (608-616)
DSYGGSLRY

SEQ ID NO: 24405 - protein, 9 aa, synthetic construct
  REGION 1..9: note = Transmembrane and TPR repeat-containing protein 1 (529-537)
DTAEAKMYY

SEQ ID NO: 24406 - protein, 9 aa, synthetic construct
  REGION 1..9: note = Methylthioribose-1-phosphate isomerase (208-216)
DTANKVGTY

SEQ ID NO: 24407 - protein, 10 aa, synthetic construct
  REGION 1..10: note = Apoptogenic protein 1, mitochondrial (36-45)
DTAPSGVSRF

SEQ ID NO: 24408 - protein, 13 aa, synthetic construct
  REGION 1..13: note = Solute carrier family 35 member B1 (75-87)
DTARVDRTRSWLY

SEQ ID NO: 24409 - protein, 14 aa, synthetic construct
  REGION 1..14: note = Heterogeneous nuclear ribonucleoproteins A2/B1 (110-123)
DTEEHHLRDYFEEY

SEQ ID NO: 24410 - protein, 14 aa, synthetic construct
  REGION 1..14: note = Heat shock 70 kDa protein 1-like (48-61)
DTERLIGDAAKNQV

SEQ ID NO: 24411 - protein, 9 aa, synthetic construct
  REGION 1..9: note = N-acetylglucosamine-1-phosphotransferase subunits alpha/beta (929-937)
DTFADSLRY

SEQ ID NO: 24412 - protein, 9 aa, synthetic construct
  REGION 1..9: note = AT-rich interactive domain-containing protein 5B (227-235)
DTFDHPTLI

SEQ ID NO: 24413 - protein, 11 aa, synthetic construct
  REGION 1..11: note = Transcription factor SOX-6 (351-361)
DTFEHGGGHSY

SEQ ID NO: 24414 - protein, 9 aa, synthetic construct
  REGION 1..9: note = Triple functional domain protein (2621-2629)
DTFETPTSY

SEQ ID NO: 24415 - protein, 11 aa, synthetic construct
  REGION 1..11: note Dolichyl-diphosphooligosaccharide-proteinosyltransferase subunit 1 (402-412)
DTFGRPVIVAY

SEQ ID NO: 24416 - protein, 11 aa, synthetic construct
  REGION 1..11: note = CTTNBP2 N-terminal-like protein (57-67)
DTFIEERYGKY

SEQ ID NO: 24417 - protein, 10 aa, synthetic construct
  REGION 1..10: note = UTP-glucose-1-phosphate uridylyltransferase (237-246)
DTFIGEGKEY

SEQ ID NO: 24418 - protein, 13 aa, synthetic construct
  REGION 1..13: note = Interferon-related developmental regulator 1 (375-387)
DTFKEVLGSGMQY

SEQ ID NO: 24419 - protein, 10 aa, synthetic construct
  REGION 1..10: note = H2.0-like homeobox protein (254-263)
DTFPGPYAVL

SEQ ID NO: 24420 - protein, 9 aa, synthetic construct
  REGION 1..9: note = G-protein coupled receptor 126 (533-541)
DTFSHSTKF

SEQ ID NO: 24421 - protein, 9 aa, synthetic construct
  REGION 1..9: note = Rhophilin-2 (261-269)
DTFTHTPSY

SEQ ID NO: 24422 - protein, 9 aa, synthetic construct
  REGION 1..9: note = 40S ribosomal protein S14 (39-47)
DTFVHVTDL

SEQ ID NO: 24423 - protein, 10 aa, synthetic construct
  REGION 1..10: note = Lysosomal glucocerebrosidase precursor (428-437)
DTFYKQPMFY

SEQ ID NO: 24424 - protein, 9 aa, synthetic construct
  REGION 1..9: note = Zinc finger CCCH-type with G patch domain-containing protein (515-523)
DTHKKMTEF

SEQ ID NO: 24425 - protein, 9 aa, synthetic construct
  REGION 1..9: note = Utrophin (3189-3197)
DTHSRIEQY

SEQ ID NO: 24426 - protein, 10 aa, synthetic construct
  REGION 1..10: note = C2 domain-containing protein 5 (611-620)
DTIAKNKELY

SEQ ID NO: 24427 - protein, 12 aa, synthetic construct
  REGION 1..12: note = Polyadenylate-binding protein 4 (303-314)
DTIDDEKLRKEF

SEQ ID NO: 24428 - protein, 11 aa, synthetic construct
  REGION 1..11: note = Plastin-3 (116-126)
DTIDERAINKK

SEQ ID NO: 24429 - protein, 9 aa, synthetic construct
  REGION 1..9: note = Kin of IRRE-like protein 1 (277-285)
DTIDTREEY

SEQ ID NO: 24430 - protein, 14 aa, synthetic construct
  REGION 1..14: note = Small ubiquitin-related modifier 2 isoform b precursor (58-71)
DTIDVFQQQTGGVY

SEQ ID NO: 24431 - protein, 12 aa, synthetic construct
  REGION 1..12: note = SUMO-activating enzyme subunit 2 (50-61)
DTIDVSNLNRQF

SEQ ID NO: 24432 - protein, 9 aa, synthetic construct
  REGION 1..9: note = Tryptophan-tRNA ligase, cytoplasmic (382-390)
DTIEEHRQF

SEQ ID NO: 24433 - protein, 13 aa, synthetic construct
  REGION 1..13: note = Heterogeneous nuclear ribonucleoproteins A2/B1 (127-139)
DTIEIITDRQSGK

SEQ ID NO: 24434 - protein, 9 aa, synthetic construct
  REGION 1..9: note = Unconventional myosin-Id (61-69)
DTIEQYKGR

SEQ ID NO: 24435 - protein, 12 aa, synthetic construct
  REGION 1..12: note = Ubiquitin-like protein 5 (22-33)
DTIGDLKKLIAA

SEQ ID NO: 24436 - protein, 10 aa, synthetic construct
  REGION 1..10: note = Trifunctional purine biosynthetic protein adenosine-3 (45-54)
DTIGQDLVAM

SEQ ID NO: 24437 - protein, 9 aa, synthetic construct
  REGION 1..9: note = Cytoplasmic polyadenylation element-binding protein 4 (17-25)
DTIKGRLNY

SEQ ID NO: 24438 - protein, 9 aa, synthetic construct
  REGION 1..9: note = Mitochondrial dynamics protein MID51 (222-230)
DTIMNVPGF

SEQ ID NO: 24439 - protein, 11 aa, synthetic construct
  REGION 1..11: note = UPF0489 protein C5orf22 (148-158)
DTIQEKVLNML

SEQ ID NO: 24440 - protein, 10 aa, synthetic construct
  REGION 1..10: note = Coiled-coil and C2 domain-containing protein 2A (426-435)
DTIQKTINEY

SEQ ID NO: 24441 - protein, 9 aa, synthetic construct
  REGION 1..9: note = Interferon-induced helicase C domain-containing protein 1 (615-623)
DTIRMIDAY

SEQ ID NO: 24442 - protein, 9 aa, synthetic construct
  REGION 1..9: note = Zinc finger protein 143 (92-100)
DTISALEQY

SEQ ID NO: 24443 - protein, 10 aa, synthetic construct
  REGION 1..10: note = Gamma-interferon-inducible protein 16 (447-456)
DTISKMNDFM

SEQ ID NO: 24444 - protein, 12 aa, synthetic construct
  REGION 1..12: note = Gamma-interferon-inducible protein 16 (447-458)
DTISKMNDFMRM

SEQ ID NO: 24445 - protein, 9 aa, synthetic construct
  REGION 1..9: note = Sphingolipid delta(4)-desaturase DES1 (268-276)
DTISPYSRM

SEQ ID NO: 24446 - protein, 11 aa, synthetic construct
  REGION 1..11: note = Pre-mRNA-splicing factor RBM22 (241-251)
DTITETDLRNH

SEQ ID NO: 24447 - protein, 12 aa, synthetic construct
  REGION 1..12: note = Pre-mRNA-splicing factor RBM22 (241-252)
DTITETDLRNHF

SEQ ID NO: 24448 - protein, 13 aa, synthetic construct
  REGION 1..13: note = Pre-mRNA-splicing factor RBM22 (241-253)
DTITETDLRNHFY

SEQ ID NO: 24449 - protein, 11 aa, synthetic construct
  REGION 1..11: note = Intermediate filament family orphan 1 (232-242)
DTITPEIRALY

SEQ ID NO: 24450 - protein, 10 aa, synthetic construct
  REGION 1..10: note = Condensin complex subunit 1 (61-70)
DTIYSILHHF

SEQ ID NO: 24451 - protein, 9 aa, synthetic construct
  REGION 1..9: note = Protein SCO1 homolog, mitochondrial (97-105)
DTKEAIANY

SEQ ID NO: 24452 - protein, 9 aa, synthetic construct
  REGION 1..9: note = Amyloid beta A4 protein (64-72)
DTKEGILQY

SEQ ID NO: 24453 - protein, 9 aa, synthetic construct
  REGION 1..9: note = Intraflagellar transport protein 74 homolog (328-336)
DTKEKINQF

SEQ ID NO: 24454 - protein, 9 aa, synthetic construct
  REGION 1..9: note = Charged multivesicular body protein 5 (21-29)
DTKTTVDAM

SEQ ID NO: 24455 - protein, 9 aa, synthetic construct
  REGION 1..9: note = DNA-directed RNA polymerase II subunit RPB2 (738-746)
DTLAHVLYY

SEQ ID NO: 24456 - protein, 9 aa, synthetic construct
  REGION 1..9: note = Presenilin-2 (439-447)
DTLASHQLY

SEQ ID NO: 24457 - protein, 9 aa, synthetic construct
  REGION 1..9: note = Acidic fibroblast growth factor intracellular-binding protein (55-63)
DTMDHYRTF

SEQ ID NO: 24458 - protein, 9 aa, synthetic construct
  REGION 1..9: note = Parafibromin (134-142)
DTMGTYHGM

SEQ ID NO: 24459 - protein, 10 aa, synthetic construct
  REGION 1..10: note = Dual specificity protein phosphatase 10 (341-350)
DTMQRLNIGY

SEQ ID NO: 24460 - protein, 9 aa, synthetic construct
  REGION 1..9: note = FRAS1-related extracellular matrix protein 2 (1562-1570)
DTPDKLLKF

SEQ ID NO: 24461 - protein, 9 aa, synthetic construct
  REGION 1..9: note = Translin-associated protein X (212-220)
DTPFEVSQF

SEQ ID NO: 24462 - protein, 10 aa, synthetic construct
  REGION 1..10: note = Translation factor GUF1, mitochondrial (140-149)
DTPGHVDFSY

SEQ ID NO: 24463 - protein, 9 aa, synthetic construct
  REGION 1..9: note = Protein KIAA0100 (293-301)
DTPPFALGF

SEQ ID NO: 24464 - protein, 9 aa, synthetic construct
  REGION 1..9: note = Nuclear receptor subfamily 4 group A member 2 (395-403)
DTQHIQQFY

SEQ ID NO: 24465 - protein, 9 aa, synthetic construct
  REGION 1..9: note = Nuclear protein localization protein 4 homolog (319-327)
DTRKGTVRY

SEQ ID NO: 24466 - protein, 9 aa, synthetic construct
  REGION 1..9: note = Nuclear pore complex protein Nup205 (1075-1083)
DTSGPTMRY

SEQ ID NO: 24467 - protein, 9 aa, synthetic construct
  REGION 1..9: note = Disintegrin and metalloproteinase domain-containing protein 10 (98-106)
DTSHIYTGH

SEQ ID NO: 24468 - protein, 10 aa, synthetic construct
  REGION 1..10: note = Protein YIF1B (38-47)
DTSSAQSRGY

SEQ ID NO: 24469 - protein, 9 aa, synthetic construct
  REGION 1..9: note = NHS-like protein 1 (768-776)
DTSSVKSEY

SEQ ID NO: 24470 - protein, 9 aa, synthetic construct
  REGION 1..9: note = Peptidyl-glycine alpha-amidating monooxygenase (99-107)
DTVHHMLLF

SEQ ID NO: 24471 - protein, 9 aa, synthetic construct
  REGION 1..9: note = E3 SUMO-protein ligase RanBP2 (3197-3205)
DTVKKIESF

SEQ ID NO: 24472 - protein, 9 aa, synthetic construct
  REGION 1..9: note = Nodal modulator 3 (6-14)
DTVKQMNKY

SEQ ID NO: 24473 - protein, 9 aa, synthetic construct
  REGION 1..9: note = Rho GTPase-activating protein 31 (892-900)
DTVTDIAQH

SEQ ID NO: 24474 - protein, 11 aa, synthetic construct
  REGION 1..11: note = E3 ubiquitin-protein ligase MYLIP (278-288)
DTVTSAVMMQY

SEQ ID NO: 24475 - protein, 11 aa, synthetic construct
  REGION 1..11: note = Eukaryotic translation initiation factor 4H (5-15)
DTYDDRAYSSF

SEQ ID NO: 24476 - protein, 11 aa, synthetic construct
  REGION 1..11: note = Vacuolar fusion protein CCZ1 homolog (308-318)
DTYEELHLIVY

SEQ ID NO: 24477 - protein, 12 aa, synthetic construct
  REGION 1..12: note = Ethanolamine-phosphate cytidylyltransferase (124-135)
DTYEEVKQAGRY

SEQ ID NO: 24478 - protein, 12 aa, synthetic construct
  REGION 1..12: note = Beta-secretase 2 (127-138)
DTYFDTERSSTY

SEQ ID NO: 24479 - protein, 10 aa, synthetic construct
  REGION 1..10: note = Glycoprotein endo-alpha-1,2-mannosidase-like protein (245-254)
DTYGSHGAFY

SEQ ID NO: 24480 - protein, 10 aa, synthetic construct
  REGION 1..10: note = Mid1-interacting protein 1 (5-14)
DTYNQKHSLF

SEQ ID NO: 24481 - protein, 10 aa, synthetic construct
  REGION 1..10: note = Tetratricopeptide repeat protein 37 (1017-1026)
DTYNVAIRNY

SEQ ID NO: 24482 - protein, 10 aa, synthetic construct
  REGION 1..10: note = Zinc finger CCCH domain-containing protein 13 (520-529)
DTYPEESRSY

SEQ ID NO: 24483 - protein, 11 aa, synthetic construct
  REGION 1..11: note = Cartilage acidic protein 1 (17-27)
DVAAEAGVSKY

SEQ ID NO: 24484 - protein, 11 aa, synthetic construct
  REGION 1..11: note = Putative GTP-binding protein 6 (258-268)
DVAHSDLILHV

SEQ ID NO: 24485 - protein, 9 aa, synthetic construct
  REGION 1..9: note = Polynucleotide 5'-hydroxyl-kinase NOL9 (563-571)
DVAPTHILY

SEQ ID NO: 24486 - protein, 12 aa, synthetic construct
  REGION 1..12: note = Hsc70-interacting protein (337-348)
DVAQNPANMSKY

SEQ ID NO: 24487 - protein, 11 aa, synthetic construct
  REGION 1..11: note = WD repeat domain-containing protein 83 (95-105)
DVASGQVVRKF

SEQ ID NO: 24488 - protein, 9 aa, synthetic construct
  REGION 1..9: note = Protein S100-B (13-21)
DVFHQYSGR

SEQ ID NO: 24489 - protein, 10 aa, synthetic construct
  REGION 1..10: note = Sentrin-specific protease 5 (531-540)
DVFNEDFSNR

SEQ ID NO: 24490 - protein, 10 aa, synthetic construct
  REGION 1..10: note = Nicotinamide phosphoribosyltransferase (94-103)
DVFNEKGWNY

SEQ ID NO: 24491 - protein, 10 aa, synthetic construct
  REGION 1..10: note = DNA excision repair protein ERCC-8 (78-87)
DVFNFEETVY

SEQ ID NO: 24492 - protein, 11 aa, synthetic construct
  REGION 1..11: note = Phosphomannomutase 1 (190-200)
DVFPEGWDKRY

SEQ ID NO: 24493 - protein, 10 aa, synthetic construct
  REGION 1..10: note = Serine/threonine-protein kinase N3 (654-663)
DVFPEPQARF

SEQ ID NO: 24494 - protein, 10 aa, synthetic construct
  REGION 1..10: note = Solute carrier family 23 member 2 (334-343)
DVFPPDSTKY

SEQ ID NO: 24495 - protein, 13 aa, synthetic construct
  REGION 1..13: note = Solute carrier family 23 member 2 (334-346)
DVFPPDSTKYGFY

SEQ ID NO: 24496 - protein, 11 aa, synthetic construct
  REGION 1..11: note = MOB kinase activator 2 (126-136)
DVFPTKYGREF

SEQ ID NO: 24497 - protein, 10 aa, synthetic construct
  REGION 1..10: note = U4/U6.U5 tri-snRNP-associated protein 2 (186-195)
DVFQGSMRIF

SEQ ID NO: 24498 - protein, 9 aa, synthetic construct
  REGION 1..9: note = Ankyrin repeat and BTB/POZ domain-containing protein 1 (59-67)
DVFTHVLYY

SEQ ID NO: 24499 - protein, 13 aa, synthetic construct
  REGION 1..13: note = General transcription factor II-I (53-65)
DVFVVGTERGRAF

SEQ ID NO: 24500 - protein, 12 aa, synthetic construct
  REGION 1..12: note = HLA class I histocompatibility antigen, A-1 alpha chain (101-112)
DVGPDGRFLRGY

SEQ ID NO: 24501 - protein, 10 aa, synthetic construct
  REGION 1..10: note = Histone deacetylase 6 (104-113)
DVHHGQGTQF

SEQ ID NO: 24502 - protein, 10 aa, synthetic construct
  REGION 1..10: note = Kaptin (205-214)
DVHNFPGTSR

SEQ ID NO: 24503 - protein, 10 aa, synthetic construct
  REGION 1..10: note = Neutral alpha-glucosidase AB (329-338)
DVHNIYGLYV

SEQ ID NO: 24504 - protein, 9 aa, synthetic construct
  REGION 1..9: note = Speriolin-like protein (115-123)
DVHPAFSEF

SEQ ID NO: 24505 - protein, 12 aa, synthetic construct
  REGION 1..12: note = Caveolin-1 (5-16)
DVIAEPEGTHSF

SEQ ID NO: 24506 - protein, 11 aa, synthetic construct
  REGION 1..11: note = Death effector domain-containing protein (51-61)
DVIDDHERGLI

SEQ ID NO: 24507 - protein, 9 aa, synthetic construct
  REGION 1..9: note = Protein LDOC1L (24-32)
DVIDTLTSL

SEQ ID NO: 24508 - protein, 9 aa, synthetic construct
  REGION 1..9: note = Uncharacterized protein C20orf194 (832-840)
DVIDVVQAL

SEQ ID NO: 24509 - protein, 9 aa, synthetic construct
  REGION 1..9: note = ATP-dependent RNA helicase DHX36 (400-408)
DVIEKIRYV

SEQ ID NO: 24510 - protein, 11 aa, synthetic construct
  REGION 1..11: note = E3 ubiquitin-protein ligase RNF213 (1304-1314)
DVIFKDFVNKY

SEQ ID NO: 24511 - protein, 9 aa, synthetic construct
  REGION 1..9: note = 60S ribosomal protein L3 (213-221)
DVIGVTKGK

SEQ ID NO: 24512 - protein, 11 aa, synthetic construct
  REGION 1..11: note = 60S ribosomal protein L3 (213-223)
DVIGVTKGKGY

SEQ ID NO: 24513 - protein, 12 aa, synthetic construct
  REGION 1..12: note = Triple functional domain protein (785-796)
DVIHQGQDLLQY

SEQ ID NO: 24514 - protein, 9 aa, synthetic construct
  REGION 1..9: note = Ran GTPase-activating protein 1 (40-48)
DVIKEIEDF

SEQ ID NO: 24515 - protein, 9 aa, synthetic construct
  REGION 1..9: note = Spindle and kinetochore-associated protein 1 (163-171)
DVIKEINKA

SEQ ID NO: 24516 - protein, 10 aa, synthetic construct
  REGION 1..10: note = Cytoplasmic dynein 2 heavy chain 1 (2609-2618)
DVIKKGLIHY

SEQ ID NO: 24517 - protein, 9 aa, synthetic construct
  REGION 1..9: note = Fanconi anemia group D2 protein (348-356)
DVIKSAIRY

SEQ ID NO: 24518 - protein, 9 aa, synthetic construct
  REGION 1..9: note = Elongation factor G, mitochondrial (730-738)
DVINKYLEA

SEQ ID NO: 24519 - protein, 13 aa, synthetic construct
  REGION 1..13: note = Thioredoxin-related transmembrane protein 4 (92-104)
DVIQEPGLSGRFF

SEQ ID NO: 24520 - protein, 9 aa, synthetic construct
  REGION 1..9: note = WD repeat-containing protein 26 (126-134)
DVIRLIGQH

SEQ ID NO: 24521 - protein, 9 aa, synthetic construct
  REGION 1..9: note = Coenzyme Q-binding protein COQ10 homolog B, mitochondrial (62-70)
DVISKRSGY

SEQ ID NO: 24522 - protein, 9 aa, synthetic construct
  REGION 1..9: note = Mediator of RNA polymerase II transcription subunit 27 (126-134)
DVISRIDRM

SEQ ID NO: 24523 - protein, 10 aa, synthetic construct
  REGION 1..10: note = Antigen KI-67 (86-95)
DVITIIDRSF

SEQ ID NO: 24524 - protein, 12 aa, synthetic construct
  REGION 1..12: note = Antigen KI-67 (86-97)
DVITIIDRSFRY

SEQ ID NO: 24525 - protein, 12 aa, synthetic construct
  REGION 1..12: note = ER membrane protein complex subunit 1 (96-107)
DVITVSNGGRIM

SEQ ID NO: 24526 - protein, 10 aa, synthetic construct
  REGION 1..10: note = 40S ribosomal protein S18 (89-98)
DVKDGKYSQV

SEQ ID NO: 24527 - protein, 9 aa, synthetic construct
  REGION 1..9: note = Cell cycle progression protein 1 (703-711)
DVKDYLRNM

SEQ ID NO: 24528 - protein, 9 aa, synthetic construct
  REGION 1..9: note = Transmembrane protein 168 (117-125)
DVKEESTKY

SEQ ID NO: 24529 - protein, 9 aa, synthetic construct
  REGION 1..9: note = Nuclear pore complex protein Nup107 (812-820)
DVKEKMYNV

SEQ ID NO: 24530 - protein, 10 aa, synthetic construct
  REGION 1..10: note = UTP-glucose-1-phosphate uridylyltransferase (289-298)
DVKGGTLTQY

SEQ ID NO: 24531 - protein, 9 aa, synthetic construct
  REGION 1..9: note = Lon protease homolog, mitochondrial (277-285)
DVKKRILEF

SEQ ID NO: 24532 - protein, 9 aa, synthetic construct
  REGION 1..9: note = DDB1- and CUL4-associated factor 4 (130-138)
DVKVGGSKY

SEQ ID NO: 24533 - protein, 13 aa, synthetic construct
  REGION 1..13: note = Lon protease homolog, mitochondrial (129-141)
DVLEETNIPKRLY

SEQ ID NO: 24534 - protein, 9 aa, synthetic construct
  REGION 1..9: note = AP-2 complex subunit mu (176-184)
DVLESVNLL

SEQ ID NO: 24535 - protein, 17 aa, synthetic construct
  REGION 1..17: note = PRKR-interacting protein 1 (66-82)
DVMGSSAGAGSGEFHVY

SEQ ID NO: 24536 - protein, 9 aa, synthetic construct
  REGION 1..9: note = Rho-associated protein kinase 2 (99-107)
DVPEKWAKF

SEQ ID NO: 24537 - protein, 9 aa, synthetic construct
  REGION 1..9: note = Rho-associated protein kinase 1 (169-177)
DVPEKWARF

SEQ ID NO: 24538 - protein, 9 aa, synthetic construct
  REGION 1..9: note = Protein diaphanous homolog 2 (54-62)
DVRDRITSF

SEQ ID NO: 24539 - protein, 9 aa, synthetic construct
  REGION 1..9: note = RIB43A-like with coiled-coils protein 2 (62-70)
DVRNTISGM

SEQ ID NO: 24540 - protein, 9 aa, synthetic construct
  REGION 1..9: note = Dipeptidyl peptidase 1 (107-115)
DVTDFISHL

SEQ ID NO: 24541 - protein, 9 aa, synthetic construct
  REGION 1..9: note = RANBP2-like and GRIP domain-containing protein 2 (107-115)
DVTDGRAKY

SEQ ID NO: 24542 - protein, 9 aa, synthetic construct
  REGION 1..9: note = TATA box-binding protein-associated factor RNA polymerase I subunit C (102-110)
DVTEQISRF

SEQ ID NO: 24543 - protein, 10 aa, synthetic construct
  REGION 1..10: note = Zinc finger protein 552 (41-50)
DVTLENLALM

SEQ ID NO: 24544 - protein, 9 aa, synthetic construct
  REGION 1..9: note = Bromodomain adjacent to zinc finger domain protein 1A (531-539)
DVTSANAKY

SEQ ID NO: 24545 - protein, 10 aa, synthetic construct
  REGION 1..10: note = Trafficking protein particle complex subunit 2-like protein (7-16)
DVVDEKISAM

SEQ ID NO: 24546 - protein, 9 aa, synthetic construct
  REGION 1..9: note = Sorting nexin-8 (312-320)
DVVEKLNLF

SEQ ID NO: 24547 - protein, 11 aa, synthetic construct
  REGION 1..11: note = DCN1-like protein 4 (58-68)
DVVGPEGMEKF

SEQ ID NO: 24548 - protein, 9 aa, synthetic construct
  REGION 1..9: note = Inositol-trisphosphate 3-kinase B (718-726)
DVVKDGERY

SEQ ID NO: 24549 - protein, 9 aa, synthetic construct
  REGION 1..9: note = Cold shock domain-containing protein E1 (173-181)
DVVKEIFFH

SEQ ID NO: 24550 - protein, 10 aa, synthetic construct
  REGION 1..10: note = Cold shock domain-containing protein E1 (173-182)
DVVKEIFFHY

SEQ ID NO: 24551 - protein, 13 aa, synthetic construct
  REGION 1..13: note = Peptidyl-prolyl cis-trans isomerase H (34-46)
DVVPKTAENFRQF

SEQ ID NO: 24552 - protein, 9 aa, synthetic construct
  REGION 1..9: note = Glypican-1 (232-240)
DVVRKVAQV

SEQ ID NO: 24553 - protein, 10 aa, synthetic construct
  REGION 1..10: note = F-box only protein 31 (25-34)
DVYAKLLHRY

SEQ ID NO: 24554 - protein, 11 aa, synthetic construct
  REGION 1..11: note = 26S proteasome non-ATPase regulatory subunit 1 (492-502)
DVYDLLKTNLY

SEQ ID NO: 24555 - protein, 11 aa, synthetic construct
  REGION 1..11: note = RNA polymerase II-associated factor 1 homolog (252-262)
DVYDYKIAREY

SEQ ID NO: 24556 - protein, 11 aa, synthetic construct
  REGION 1..11: note = Cat eye syndrome critical region protein 5 (318-328)
DVYGANLFHQY

SEQ ID NO: 24557 - protein, 9 aa, synthetic construct
  REGION 1..9: note = Cystathionine gamma-lyase (112-120)
DVYGGTNRY

SEQ ID NO: 24558 - protein, 10 aa, synthetic construct
  REGION 1..10: note = Cystathionine gamma-lyase (112-121)
DVYGGTNRYF

SEQ ID NO: 24559 - protein, 10 aa, synthetic construct
  REGION 1..10: note = Transcription elongation factor SPT6 (339-348)
DVYNHFLLYY

SEQ ID NO: 24560 - protein, 10 aa, synthetic construct
  REGION 1..10: note = Inactive tyrosine-protein kinase 7 (954-963)
DVYNSEYYHF

SEQ ID NO: 24561 - protein, 10 aa, synthetic construct
  REGION 1..10: note = Melanoma-associated antigen D1 (507-516)
DVYPEIIERA

SEQ ID NO: 24562 - protein, 12 aa, synthetic construct
  REGION 1..12: note = Melanoma-associated antigen D2 (315-326)
DVYPEIIERAGY

SEQ ID NO: 24563 - protein, 11 aa, synthetic construct
  REGION 1..11: note = ATP synthase mitochondrial F1 complex assembly factor 1 (232-242)
EAAASQLILYH

SEQ ID NO: 24564 - protein, 11 aa, synthetic construct
  REGION 1..11: note = Uncharacterized protein C20orf194 (141-151)
EAAEEFKITSF

SEQ ID NO: 24565 - protein, 12 aa, synthetic construct
  REGION 1..12: note = Calpain small subunit 1 (199-210)
EAAGFHLNEHLY

SEQ ID NO: 24566 - protein, 9 aa, synthetic construct
  REGION 1..9: note = Protein GREB1 (686-694)
EAAPDIMHY

SEQ ID NO: 24567 - protein, 11 aa, synthetic construct
  REGION 1..11: note = ATP-dependent DNA helicase Q4 (32-42)
EAAPEETRALY

SEQ ID NO: 24568 - protein, 11 aa, synthetic construct
  REGION 1..11: note = Metal transporter CNNM3 (26-36)
EAAPGPRVLGF

SEQ ID NO: 24569 - protein, 11 aa, synthetic construct
  REGION 1..11: note = Nucleoside diphosphate kinase, mitochondrial (131-141)
EAAPGTIRGDF

SEQ ID NO: 24570 - protein, 9 aa, synthetic construct
  REGION 1..9: note = 3-hydroxy-3-methylglutaryl-coenzyme A reductase (567-575)
EAFDSTSRF

SEQ ID NO: 24571 - protein, 10 aa, synthetic construct
  REGION 1..10: note = Isovaleryl-CoA dehydrogenase, mitochondrial (310-319)
EAFGQKIGHF

SEQ ID NO: 24572 - protein, 11 aa, synthetic construct
  REGION 1..11: note = Proteasome activator complex subunit 3 (94-104)
EAFQGTKVFVM

SEQ ID NO: 24573 - protein, 10 aa, synthetic construct
  REGION 1..10: note = Proteasome activator complex subunit 2 (158-167)
EAFQTTISKY

SEQ ID NO: 24574 - protein, 9 aa, synthetic construct
  REGION 1..9: note = Chloride intracellular channel protein 1 (201-209)
EAFRGVHRY

SEQ ID NO: 24575 - protein, 10 aa, synthetic construct
  REGION 1..10: note = Growth arrest-specific protein 8 (145-154)
EAFTDIKNYY

SEQ ID NO: 24576 - protein, 9 aa, synthetic construct
  REGION 1..9: note = Ras-related protein Rab-27A (147-155)
EAIALAEKY

SEQ ID NO: 24577 - protein, 10 aa, synthetic construct
  REGION 1..10: note = Alpha-actinin-4 (524-533)
EAIDQLHLEY

SEQ ID NO: 24578 - protein, 10 aa, synthetic construct
  REGION 1..10: note = Small integral membrane protein 8 (79-88)
EAIDSEGHSY

SEQ ID NO: 24579 - protein, 11 aa, synthetic construct
  REGION 1..11: note = Small integral membrane protein 8 (79-89)
EAIDSEGHSYM

SEQ ID NO: 24580 - protein, 11 aa, synthetic construct
  REGION 1..11: note = Condensin complex subunit 1 (636-646)
EAIGIISKMMY

SEQ ID NO: 24581 - protein, 11 aa, synthetic construct
  REGION 1..11: note = Nuclear pore complex protein Nup133 (332-342)
EAIKEGVNIRY

SEQ ID NO: 24582 - protein, 10 aa, synthetic construct
  REGION 1..10: note = Synergin gamma (170-179)
EAIKGNLDGF

SEQ ID NO: 24583 - protein, 9 aa, synthetic construct
  REGION 1..9: note = N-lysine methyltransferase SMYD2 (289-297)
EAIRDMVRY

SEQ ID NO: 24584 - protein, 11 aa, synthetic construct
  REGION 1..11: note = Trabeculin-alpha (3748-3758)
EAISLLNSERY

SEQ ID NO: 24585 - protein, 10 aa, synthetic construct
  REGION 1..10: note = KN motif and ankyrin repeat domain-containing protein 1 (1144-1153)
EAISPDVLRY

SEQ ID NO: 24586 - protein, 13 aa, synthetic construct
  REGION 1..13: note = E3 ubiquitin-protein ligase Praja-1 (266-278)
EAISYVDPQFLTY

SEQ ID NO: 24587 - protein, 9 aa, synthetic construct
  REGION 1..9: note = DNA replication licensing factor MCM5 (614-622)
EAIVRIAEA

SEQ ID NO: 24588 - protein, 10 aa, synthetic construct
  REGION 1..10: note = Nucleoporin Nup43 (370-379)
EAIYVTRHLF

SEQ ID NO: 24589 - protein, 11 aa, synthetic construct
  REGION 1..11: note = UDP-glucose 6-dehydrogenase (76-86)
EALNLPEVARY

SEQ ID NO: 24590 - protein, 9 aa, synthetic construct
  REGION 1..9: note = Centromere protein F (1214-1222)
EAMLRNKEL

SEQ ID NO: 24591 - protein, 9 aa, synthetic construct
  REGION 1..9: note = Heme-binding protein 1 (57-65)
EAMPKVAKY

SEQ ID NO: 24592 - protein, 10 aa, synthetic construct
  REGION 1..10: note = Cytoskeleton-associated protein 5 (1575-1584)
EAMSGHIDQF

SEQ ID NO: 24593 - protein, 9 aa, synthetic construct
  REGION 1..9: note = Pre-mRNA-processing-splicing factor 8 (1105-1113)
EARDLIQRY

SEQ ID NO: 24594 - protein, 13 aa, synthetic construct
  REGION 1..13: note = Syntenin-1 (34-46)
EASAPIPHDGNLY

SEQ ID NO: 24595 - protein, 9 aa, synthetic construct
  REGION 1..9: note = Lysine-specific demethylase 7A (449-457)
EATSPYHSR

SEQ ID NO: 24596 - protein, 11 aa, synthetic construct
  REGION 1..11: note = TNF receptor-associated factor 5 (400-410)
EAVDGHTVSIF

SEQ ID NO: 24597 - protein, 12 aa, synthetic construct
  REGION 1..12: note = Mitochondrial-processing peptidase subunit alpha (283-294)
EAVDIDRSVAQY

SEQ ID NO: 24598 - protein, 9 aa, synthetic construct
  REGION 1..9: note = Transcriptional enhancer factor TEF-3 (263-271)
EAVDIRQIY

SEQ ID NO: 24599 - protein, 10 aa, synthetic construct
  REGION 1..10: note = LIX1-like protein (28-37)
EAVEAVVRSF

SEQ ID NO: 24600 - protein, 10 aa, synthetic construct
  REGION 1..10: note = Integrin alpha-7 (432-441)
EAVGIKSFGY

SEQ ID NO: 24601 - protein, 10 aa, synthetic construct
  REGION 1..10: note = Phosphatidylinositol 3-kinase regulatory subunit alpha (173-182)
EAVGKKLHEY

SEQ ID NO: 24602 - protein, 10 aa, synthetic construct
  REGION 1..10: note = 26S protease regulatory subunit 7 (411-420)
EAVNKVIKSY

SEQ ID NO: 24603 - protein, 9 aa, synthetic construct
  REGION 1..9: note = Methyltransferase-like protein 13 (244-252)
EAVQERQQY

SEQ ID NO: 24604 - protein, 9 aa, synthetic construct
  REGION 1..9: note = Renalase (186-194)
EAVSYSSRY

SEQ ID NO: 24605 - protein, 10 aa, synthetic construct
  REGION 1..10: note = Poly (ADP-ribose) polymerase 4 (695-704)
EAVTQGHGAY

SEQ ID NO: 24606 - protein, 9 aa, synthetic construct
  REGION 1..9: note = Importin subunit alpha-1 (396-404)
EAVWAVTNY

SEQ ID NO: 24607 - protein, 10 aa, synthetic construct
  REGION 1..10: note = DNA replication licensing factor MCM4 (656-665)
EAYDRRLAHH

SEQ ID NO: 24608 - protein, 9 aa, synthetic construct
  REGION 1..9: note = Trafficking protein particle complex subunit 12 (300-308)
EAYHSVIKY

SEQ ID NO: 24609 - protein, 10 aa, synthetic construct
  REGION 1..10: note = Leucine-rich PPR motif-containing protein, mitochondrial (1198-1207)
EAYNSLMKSY

SEQ ID NO: 24610 - protein, 9 aa, synthetic construct
  REGION 1..9: note = Protein mago nashi homolog 2 (5-13)
EAYVHKSVM

SEQ ID NO: 24611 - protein, 9 aa, synthetic construct
  REGION 1..9: note = Coatomer subunit beta (79-87)
EAYVHVNQY

SEQ ID NO: 24612 - protein, 11 aa, synthetic construct
  REGION 1..11: note = Sorting and assembly machinery component 50 homolog (365-375)
EAYWAGGLHLY

SEQ ID NO: 24613 - protein, 9 aa, synthetic construct
  REGION 1..9: note = Superkiller viralicidic activity 2-like 2 (938-946)
ECAKRIAKV

SEQ ID NO: 24614 - protein, 10 aa, synthetic construct
  REGION 1..10: note = Vimentin (180-189)
EDIMRLREKL

SEQ ID NO: 24615 - protein, 9 aa, synthetic construct
  REGION 1..9: note = U3 small nucleolar ribonucleoprotein protein IMP3 (43-51)
EDYTRYNQL

SEQ ID NO: 24616 - protein, 9 aa, synthetic construct
  REGION 1..9: note = Ataxin-10 (298-306)
EEALATIRL

SEQ ID NO: 24617 - protein, 10 aa, synthetic construct
  REGION 1..10: note = Transmembrane protein 150C (126-135)
EEIHNVGTSL

SEQ ID NO: 24618 - protein, 9 aa, synthetic construct
  REGION 1..9: note = Zinc finger FYVE domain-containing protein 16 (415-423)
EEIQNSVVL

SEQ ID NO: 24619 - protein, 9 aa, synthetic construct
  REGION 1..9: note = Cofilin-1 (141-149)
EEVKDRCTL

SEQ ID NO: 24620 - protein, 14 aa, synthetic construct
  REGION 1..14: note = Phosphoglycerate kinase 1 (404-417)
EGKVLPGVDALSNI

SEQ ID NO: 24621 - protein, 9 aa, synthetic construct
  REGION 1..9: note = NADH dehydrogenase (ubiquinone) 1 alpha subcomplex subunit 11 (51-59)
EGVAKVGQY

SEQ ID NO: 24622 - protein, 9 aa, synthetic construct
  REGION 1..9: note = (Pyruvate dehydrogenase (acetyl-transferring)) kinase isozyme 4, mitochondrial (229-237)
EHQENQPSL

SEQ ID NO: 24623 - protein, 10 aa, synthetic construct
  REGION 1..10: note = Intraflagellar transport protein 172 homolog (6-15)
EIADQVSREY

SEQ ID NO: 24624 - protein, 9 aa, synthetic construct
  REGION 1..9: note = Alpha- and gamma-adaptin-binding protein p34 (72-80)
EIAESVQAF

SEQ ID NO: 24625 - protein, 9 aa, synthetic construct
  REGION 1..9: note = Cleavage and polyadenylation specificity factor subunit 3 (29-37)
EIAGVKLLY

SEQ ID NO: 24626 - protein, 10 aa, synthetic construct
  REGION 1..10: note = Carbohydrate sulfotransferase 10 (216-225)
EIAPGIIRKY

SEQ ID NO: 24627 - protein, 10 aa, synthetic construct
  REGION 1..10: note = Fatty acid synthase (760-769)
EIAPHALLQA

SEQ ID NO: 24628 - protein, 10 aa, synthetic construct
  REGION 1..10: note = Cullin-7 (1259-1268)
EIATTFEHYY

SEQ ID NO: 24629 - protein, 10 aa, synthetic construct
  REGION 1..10: note = Exportin-2 (752-761)
EIFDGIQPKM

SEQ ID NO: 24630 - protein, 11 aa, synthetic construct
  REGION 1..11: note = Exportin-2 (752-762)
EIFDGIQPKMF

SEQ ID NO: 24631 - protein, 9 aa, synthetic construct
  REGION 1..9: note = Utrophin (1655-1663)
EIFDGNVAH

SEQ ID NO: 24632 - protein, 9 aa, synthetic construct
  REGION 1..9: note = Cold shock domain-containing protein E1 (177-185)
EIFFHYSEF

SEQ ID NO: 24633 - protein, 11 aa, synthetic construct
  REGION 1..11: note = Neuron navigator 2 (2237-2247)
EIFNGLLNCKY

SEQ ID NO: 24634 - protein, 10 aa, synthetic construct
  REGION 1..10: note = F-box only protein 25 (53-62)
EIFNNEEHEY

SEQ ID NO: 24635 - protein, 10 aa, synthetic construct
  REGION 1..10: note = Ubiquitin-protein ligase E3A (558-567)
EIFNPDIGMF

SEQ ID NO: 24636 - protein, 10 aa, synthetic construct
  REGION 1..10: note = Exportin-4 (988-997)
EIFPEKIPQL

SEQ ID NO: 24637 - protein, 9 aa, synthetic construct
  REGION 1..9: note = Interferon-induced GTP-binding protein Mx1 (576-584)
EIFQHLMAY

SEQ ID NO: 24638 - protein, 9 aa, synthetic construct
  REGION 1..9: note = Zinc finger CCCH-type antiviral protein 1 (57-65)
EIHHLHPEY

SEQ ID NO: 24639 - protein, 13 aa, synthetic construct
  REGION 1..13: note = Nuclear pore complex protein Nup205 (794-806)
EIIAYKPPGFSLM

SEQ ID NO: 24640 - protein, 10 aa, synthetic construct
  REGION 1..10: note = Caseinolytic peptidase B protein homolog (651-660)
EIIDKDSKTR

SEQ ID NO: 24641 - protein, 10 aa, synthetic construct
  REGION 1..10: note = Mitogen-activated protein kinase kinase kinase 6 (286-295)
EIIDQGPRGY

SEQ ID NO: 24642 - protein, 9 aa, synthetic construct
  REGION 1..9: note = Leucine-rich repeat and coiled-coil domain-containing protein 1 (237-245)
EIIDRMPVI

SEQ ID NO: 24643 - protein, 10 aa, synthetic construct
  REGION 1..10: note = Brefeldin A-inhibited guanine nucleotide-exchange protein 2 (645-654)
EIIEHGIELF

SEQ ID NO: 24644 - protein, 9 aa, synthetic construct
  REGION 1..9: note = Nuclear envelope integral membrane protein 1 (143-151)
EIIEKDTKY

SEQ ID NO: 24645 - protein, 9 aa, synthetic construct
  REGION 1..9: note = Complex I assembly factor TMEM126B, mitochondrial (25-33)
EIIEKNFDY

SEQ ID NO: 24646 - protein, 9 aa, synthetic construct
  REGION 1..9: note = MAGUK p55 subfamily member 5 (623-631)
EIIEKTREM

SEQ ID NO: 24647 - protein, 10 aa, synthetic construct
  REGION 1..10: note = Nucleolar pre-ribosomal-associated protein 1 (606-615)
EIIGGERSVF

SEQ ID NO: 24648 - protein, 11 aa, synthetic construct
  REGION 1..11: note = Ribosome-releasing factor 2, mitochondrial (541-551)
EIIHDRIKREY

SEQ ID NO: 24649 - protein, 12 aa, synthetic construct
  REGION 1..12: note = ATP-dependent RNA helicase DDX3X (189-200)
EIIMGNIELTRY

SEQ ID NO: 24650 - protein, 10 aa, synthetic construct
  REGION 1..10: note = Bifunctional 3'-phosphoadenosine 5'-phosphosulfate synthase 2 (546-555)
EIIPFRVAAY

SEQ ID NO: 24651 - protein, 10 aa, synthetic construct
  REGION 1..10: note = Zinc finger protein 322 (34-43)
EIIQIDGHIY

SEQ ID NO: 24652 - protein, 11 aa, synthetic construct
  REGION 1..11: note = Tuftelin-interacting protein 11 (334-344)
EIIQNDRQLQY

SEQ ID NO: 24653 - protein, 9 aa, synthetic construct
  REGION 1..9: note = Polyadenylate-binding protein-interacting protein 1 (232-240)
EIIQRIENV

SEQ ID NO: 24654 - protein, 9 aa, synthetic construct
  REGION 1..9: note = AF4/FMR2 family member 3 (304-312)
EIIREMTWL

SEQ ID NO: 24655 - protein, 12 aa, synthetic construct
  REGION 1..12: note = Centrosomal protein of 95 kDa (16-27)
EIIRLGDTAHTF

SEQ ID NO: 24656 - protein, 11 aa, synthetic construct
  REGION 1..11: note = Plectin (3616-3626)
EIIRQQGLASY

SEQ ID NO: 24657 - protein, 10 aa, synthetic construct
  REGION 1..10: note = Shugoshin-like 2 (621-630)
EIISGMNHMY

SEQ ID NO: 24658 - protein, 9 aa, synthetic construct
  REGION 1..9: note = Serine/threonine-protein phosphatase 2A 55 kDa regulatory subunit B alpha isoform (283-291)
EIISSISDV

SEQ ID NO: 24659 - protein, 10 aa, synthetic construct
  REGION 1..10: note = Mitochondrial-processing peptidase subunit alpha (407-416)
EIITKEFILM

SEQ ID NO: 24660 - protein, 10 aa, synthetic construct
  REGION 1..10: note = NEDD4-binding protein 1 (737-746)
EIITKRLLQY

SEQ ID NO: 24661 - protein, 9 aa, synthetic construct
  REGION 1..9: note = Arf-GAP with Rho-GAP domain, ANK repeat and PH domain-containing protein 2 (579-587)
EIITPYRSF

SEQ ID NO: 24662 - protein, 9 aa, synthetic construct
  REGION 1..9: note = 40S ribosomal protein S16 (106-114)
EIKDILIQY

SEQ ID NO: 24663 - protein, 9 aa, synthetic construct
  REGION 1..9: note = Peroxisomal NADH pyrophosphatase NUDT12 (204-212)
EIKDKLLNY

SEQ ID NO: 24664 - protein, 9 aa, synthetic construct
  REGION 1..9: note = Double-stranded RNA-specific adenosine deaminase (298-306)
EIKEKICDY

SEQ ID NO: 24665 - protein, 9 aa, synthetic construct
  REGION 1..9: note = Ras association domain-containing protein 3 (53-61)
EIKEKVHKY

SEQ ID NO: 24666 - protein, 9 aa, synthetic construct
  REGION 1..9: note = Hsc70-interacting protein (246-254)
EIKERIERV

SEQ ID NO: 24667 - protein, 9 aa, synthetic construct
  REGION 1..9: note = Mixed lineage kinase domain-like protein (171-179)
EIKETLRQY

SEQ ID NO: 24668 - protein, 10 aa, synthetic construct
  REGION 1..10: note = Radixin (207-216)
EIKNKKGTEL

SEQ ID NO: 24669 - protein, 10 aa, synthetic construct
  REGION 1..10: note = 40S ribosomal protein S15 (106-115)
EIKPEMIGHY

SEQ ID NO: 24670 - protein, 9 aa, synthetic construct
  REGION 1..9: note = G1/S-specific cyclin-D3 (51-59)
EIKPHMRKM

SEQ ID NO: 24671 - protein, 9 aa, synthetic construct
  REGION 1..9: note = Coiled-coil domain-containing protein 93 (285-293)
EIKQIVSEY

SEQ ID NO: 24672 - protein, 9 aa, synthetic construct
  REGION 1..9: note = Ras association domain-containing protein 5 (16-24)
EIKQKIDSY

SEQ ID NO: 24673 - protein, 10 aa, synthetic construct
  REGION 1..10: note = Heterogeneous nuclear ribonucleoprotein Q (352-361)
EILEKAFSQF

SEQ ID NO: 24674 - protein, 10 aa, synthetic construct
  REGION 1..10: note = Heterogeneous nuclear ribonucleoprotein R (257-266)
EILEKSFSEF

SEQ ID NO: 24675 - protein, 12 aa, synthetic construct
  REGION 1..12: note = MRG/MORF4L-binding protein (94-105)
EILPFPNPERNF

SEQ ID NO: 24676 - protein, 10 aa, synthetic construct
  REGION 1..10: note = Vacuolar protein sorting-associated protein 13A (700-709)
EIMDRAYDSF

SEQ ID NO: 24677 - protein, 10 aa, synthetic construct
  REGION 1..10: note = Structural maintenance of chromosomes protein 6 (921-930)
EIMEHRFKTY

SEQ ID NO: 24678 - protein, 11 aa, synthetic construct
  REGION 1..11: note = Tyrosine-protein phosphatase non-receptor type 3 (704-714)
EIPAANLVNKY

SEQ ID NO: 24679 - protein, 12 aa, synthetic construct
  REGION 1..12: note = Transmembrane emp24 domain-containing protein 4 (45-56)
EIPDETMVIGNY

SEQ ID NO: 24680 - protein, 10 aa, synthetic construct
  REGION 1..10: note = Prostacyclin synthase (472-481)
EIPEFDLSRY

SEQ ID NO: 24681 - protein, 9 aa, synthetic construct
  REGION 1..9: note = 5,6-dihydroxyindole-2-carboxylic acid oxidase (465-473)
EIQWPSREF

SEQ ID NO: 24682 - protein, 11 aa, synthetic construct
  REGION 1..11: note = Fibronectin type III domain-containing protein 3B (823-833)
EIRDLLPAAQY

SEQ ID NO: 24683 - protein, 9 aa, synthetic construct
  REGION 1..9: note = Elongation factor Tu, mitochondrial (198-206)
EIRELLTEF

SEQ ID NO: 24684 - protein, 10 aa, synthetic construct
  REGION 1..10: note = Protein FAM46D (230-239)
EIRGGGLLKY

SEQ ID NO: 24685 - protein, 10 aa, synthetic construct
  REGION 1..10: note = Transcriptional repressor NF-X1 (64-73)
EISAVHQHSY

SEQ ID NO: 24686 - protein, 9 aa, synthetic construct
  REGION 1..9: note = DNA replication licensing factor MCM3 (496-504)
EISDHVLRM

SEQ ID NO: 24687 - protein, 9 aa, synthetic construct
  REGION 1..9: note = Phospholipase D2 (660-668)
EIVDRILKA

SEQ ID NO: 24688 - protein, 9 aa, synthetic construct
  REGION 1..9: note = DNA-directed RNA polymerase III subunit RPC3 (19-27)
EIVEKIGVH

SEQ ID NO: 24689 - protein, 10 aa, synthetic construct
  REGION 1..10: note = BRCA1-associated protein (136-145)
EIVHGIMHLY

SEQ ID NO: 24690 - protein, 9 aa, synthetic construct
  REGION 1..9: note = DNA mismatch repair protein Msh2 (580-588)
EIVNISSGY

SEQ ID NO: 24691 - protein, 9 aa, synthetic construct
  REGION 1..9: note = DNA-directed RNA polymerase III subunit RPC3 (265-273)
EIVRTMLRM

SEQ ID NO: 24692 - protein, 10 aa, synthetic construct
  REGION 1..10: note = Nuclear pore complex protein Nup160 (917-926)
EIVSTPRLQY

SEQ ID NO: 24693 - protein, 10 aa, synthetic construct
  REGION 1..10: note = Alpha-soluble NSF attachment protein (43-52)
EIYARAANMF

SEQ ID NO: 24694 - protein, 10 aa, synthetic construct
  REGION 1..10: note = Isocitrate dehydrogenase (NADP) cytoplasmic (130-139)
EIYDKQYKSQ

SEQ ID NO: 24695 - protein, 10 aa, synthetic construct
  REGION 1..10: note = Oligodendrocyte transcription factor 2 (209-218)
EIYGGHHAGF

SEQ ID NO: 24696 - protein, 13 aa, synthetic construct
  REGION 1..13: note = Splicing factor 3B subunit 1 (42-54)
EIYGGSDSRFAGY

SEQ ID NO: 24697 - protein, 9 aa, synthetic construct
  REGION 1..9: note = Plexin-C1 (1523-1531)
EIYKYIVKY

SEQ ID NO: 24698 - protein, 10 aa, synthetic construct
  REGION 1..10: note = Kinesin-like protein KIF2C (403-412)
EIYNGKLFDL

SEQ ID NO: 24699 - protein, 10 aa, synthetic construct
  REGION 1..10: note = Cyclin E variant ex7del (18-27)
EIYPPKLHQF

SEQ ID NO: 24700 - protein, 9 aa, synthetic construct
  REGION 1..9: note = Coatomer subunit beta' (352-360)
EIYPQTIQH

SEQ ID NO: 24701 - protein, 9 aa, synthetic construct
  REGION 1..9: note = Replication factor C subunit 2 (159-167)
EIYSKTTRF

SEQ ID NO: 24702 - protein, 9 aa, synthetic construct
  REGION 1..9: note = Alpha-soluble NSF attachment protein (109-117)
EIYTDMGRF

SEQ ID NO: 24703 - protein, 9 aa, synthetic construct
  REGION 1..9: note = FYVE and coiled-coil domain-containing protein 1 (1096-1104)
EKATTKIQE

SEQ ID NO: 24704 - protein, 9 aa, synthetic construct
  REGION 1..9: note = Tripartite motif-containing protein 42 (167-175)
EKCLRQLQK

SEQ ID NO: 24705 - protein, 10 aa, synthetic construct
  REGION 1..10: note = Protein Mis18-beta (196-205)
EKIAELKEKI

SEQ ID NO: 24706 - protein, 10 aa, synthetic construct
  REGION 1..10: note = E3 ubiquitin-protein ligase TRIM13 (190-199)
EKLQHTLDQK

SEQ ID NO: 24707 - protein, 9 aa, synthetic construct
  REGION 1..9: note = AP-2 complex subunit alpha-1 (36-44)
ELANIRSKF

SEQ ID NO: 24708 - protein, 11 aa, synthetic construct
  REGION 1..11: note = L-dopachrome tautomerase (109-119)
ELAPIGHNRMY

SEQ ID NO: 24709 - protein, 9 aa, synthetic construct
  REGION 1..9: note = Prelamin-A/C (122-130)
ELDFQKNIY

SEQ ID NO: 24710 - protein, 11 aa, synthetic construct
  REGION 1..11: note = Unconventional myosin-Va (1068-1078)
ELDLNDERLRY

SEQ ID NO: 24711 - protein, 10 aa, synthetic construct
  REGION 1..10: note = Centrosomal protein of 112 kDa (922-931)
ELEDTISSLK

SEQ ID NO: 24712 - protein, 10 aa, synthetic construct
  REGION 1..10: note = Coatomer subunit epsilon (18-27)
ELFDVKNAFY

SEQ ID NO: 24713 - protein, 10 aa, synthetic construct
  REGION 1..10: note = Histone H2A deubiquitinase MYSM1 (25-34)
ELFEQGLAKF

SEQ ID NO: 24714 - protein, 10 aa, synthetic construct
  REGION 1..10: note = General transcription factor II-I (326-335)
ELFERKYAQA

SEQ ID NO: 24715 - protein, 10 aa, synthetic construct
  REGION 1..10: note = Vacuolar protein sorting-associated protein 13A (890-899)
ELFHKDIEAF

SEQ ID NO: 24716 - protein, 12 aa, synthetic construct
  REGION 1..12: note = THO complex subunit 3 (40-51)
ELFRGHSKTREF

SEQ ID NO: 24717 - protein, 9 aa, synthetic construct
  REGION 1..9: note = Integrator complex subunit 8 (283-291)
ELIAEIGSL

SEQ ID NO: 24718 - protein, 11 aa, synthetic construct
  REGION 1..11: note = Influenza virus NS1A-binding protein (345-355)
ELIEKPMSPMQ

SEQ ID NO: 24719 - protein, 11 aa, synthetic construct
  REGION 1..11: note = Switch-associated protein 70 (177-187)
ELIELIGNGQF

SEQ ID NO: 24720 - protein, 9 aa, synthetic construct
  REGION 1..9: note = Uncharacterized protein C20orf96 (128-136)
ELIETIQEM

SEQ ID NO: 24721 - protein, 11 aa, synthetic construct
  REGION 1..11: note = Derlin-1 (173-183)
ELIGNLVGHLY

SEQ ID NO: 24722 - protein, 11 aa, synthetic construct
  REGION 1..11: note = Endoplasmin (169-179)
ELIGQFGVGFY

SEQ ID NO: 24723 - protein, 10 aa, synthetic construct
  REGION 1..10: note = High affinity cationic amino acid transporter 1 (138-147)
ELIGRPIGEF

SEQ ID NO: 24724 - protein, 9 aa, synthetic construct
  REGION 1..9: note = F-BAR domain only protein 2 (94-102)
ELIKEVQKY

SEQ ID NO: 24725 - protein, 9 aa, synthetic construct
  REGION 1..9: note = Regulatory-associated protein of mTOR (80-88)
ELINNIKYY

SEQ ID NO: 24726 - protein, 9 aa, synthetic construct
  REGION 1..9: note = Heat shock protein HSP 90-alpha (498-506)
ELIPEYLNF

SEQ ID NO: 24727 - protein, 8 aa, synthetic construct
  REGION 1..8: note = ATP-dependent DNA helicase Q1 (34-41)
ELIQKKKV

SEQ ID NO: 24728 - protein, 9 aa, synthetic construct
  REGION 1..9: note = LisH domain-containing protein FOPNL (55-63)
ELIREYLEF

SEQ ID NO: 24729 - protein, 9 aa, synthetic construct
  REGION 1..9: note = Condensin complex subunit 1 (994-1002)
ELIRGICEM

SEQ ID NO: 24730 - protein, 9 aa, synthetic construct
  REGION 1..9: note = Inositol-tetrakisphosphate 1-kinase (111-119)
ELIRKIEAY

SEQ ID NO: 24731 - protein, 9 aa, synthetic construct
  REGION 1..9: note = Probable ubiquitin carboxyl-terminal hydrolase FAF-X (1964-1972)
ELIRYISEL

SEQ ID NO: 24732 - protein, 9 aa, synthetic construct
  REGION 1..9: note = Cyclin-dependent kinase 17 (448-456)
ELITKFLQY

SEQ ID NO: 24733 - protein, 11 aa, synthetic construct
  REGION 1..11: note = AP-1 complex subunit sigma-1A (76-86)
ELITLELIHRY

SEQ ID NO: 24734 - protein, 9 aa, synthetic construct
  REGION 1..9: note = Ras GTPase-activating protein-binding protein 1 (355-363)
ELKDFFQSY

SEQ ID NO: 24735 - protein, 9 aa, synthetic construct
  REGION 1..9: note = Polypeptide N-acetylgalactosaminyltransferase 18 (200-208)
ELKEKLTEY

SEQ ID NO: 24736 - protein, 9 aa, synthetic construct
  REGION 1..9: note = Zinc finger CCCH domain-containing protein 13 (909-917)
ELKEKVSSV

SEQ ID NO: 24737 - protein, 9 aa, synthetic construct
  REGION 1..9: note = Ankyrin repeat and LEM domain-containing protein 2 (463-471)
ELKERIREY

SEQ ID NO: 24738 - protein, 9 aa, synthetic construct
  REGION 1..9: note = Histone-lysine N-methyltransferase SUV420H1 (136-144)
ELKEVIERF

SEQ ID NO: 24739 - protein, 9 aa, synthetic construct
  REGION 1..9: note = Glyceraldehyde-3-phosphate dehydrogenase, testis-specific (295-303)
ELKGKLTGM

SEQ ID NO: 24740 - protein, 9 aa, synthetic construct
  REGION 1..9: note = Periphilin-1 (355-363)
ELKHFIAEY

SEQ ID NO: 24741 - protein, 9 aa, synthetic construct
  REGION 1..9: note = Probable ATP-dependent RNA helicase DDX46 (184-192)
ELKKEIEEM

SEQ ID NO: 24742 - protein, 9 aa, synthetic construct
  REGION 1..9: note = Serine/threonine-protein kinase Nek2 (90-98)
ELKLKEIQL

SEQ ID NO: 24743 - protein, 9 aa, synthetic construct
  REGION 1..9: note = Golgin subfamily A member 4 (1075-1083)
ELKQKILLF

SEQ ID NO: 24744 - protein, 9 aa, synthetic construct
  REGION 1..9: note = CAP-Gly domain-containing linker protein 1 (612-620)
ELKTQIEKM

SEQ ID NO: 24745 - protein, 12 aa, synthetic construct
  REGION 1..12: note = Stromal cell-derived factor 2 (200-211)
ELLKAEAHHAEL

SEQ ID NO: 24746 - protein, 8 aa, synthetic construct
  REGION 1..8: note = Heat shock protein 105 kDa (312-319)
ELLQKIEV

SEQ ID NO: 24747 - protein, 11 aa, synthetic construct
  REGION 1..11: note = 26S proteasome non-ATPase regulatory subunit 6 (212-222)
ELMDYKTFVTY

SEQ ID NO: 24748 - protein, 10 aa, synthetic construct
  REGION 1..10: note = Centrosomal protein CEP57L1 (4-13)
ELMHSIVGSY

SEQ ID NO: 24749 - protein, 10 aa, synthetic construct
  REGION 1..10: note = ATP-dependent RNA helicase DDX18 (213-222)
ELMTHHVHTY

SEQ ID NO: 24750 - protein, 10 aa, synthetic construct
  REGION 1..10: note = Puromycin-sensitive aminopeptidase (151-160)
ELNDKMKGFY

SEQ ID NO: 24751 - protein, 9 aa, synthetic construct
  REGION 1..9: note = Vimentin (109-117)
ELNDRFANY

SEQ ID NO: 24752 - protein, 9 aa, synthetic construct
  REGION 1..9: note = Serine/threonine-protein kinase Nek2 (28-36)
ELNEIITRM

SEQ ID NO: 24753 - protein, 9 aa, synthetic construct
  REGION 1..9: note = Semaphorin-4C (385-393)
ELPDNILNF

SEQ ID NO: 24754 - protein, 9 aa, synthetic construct
  REGION 1..9: note = RNA polymerase II elongation factor ELL2 (524-532)
ELPDYLIKY

SEQ ID NO: 24755 - protein, 8 aa, synthetic construct
  REGION 1..8: note = Zinc finger CCCH domain-containing protein 4 (417-424)
ELPKKREL

SEQ ID NO: 24756 - protein, 9 aa, synthetic construct
  REGION 1..9: note = Nuclear pore complex protein Nup205 (523-531)
ELQGHIGRF

SEQ ID NO: 24757 - protein, 10 aa, synthetic construct
  REGION 1..10: note = Alpha-enolase (15-24)
ELRDNDKTRY

SEQ ID NO: 24758 - protein, 9 aa, synthetic construct
  REGION 1..9: note = TAR DNA-binding protein 43 (206-214)
ELREFFSQY

SEQ ID NO: 24759 - protein, 9 aa, synthetic construct
  REGION 1..9: note = Serine/threonine-protein kinase TAO3 (456-464)
ELREQMSGY

SEQ ID NO: 24760 - protein, 9 aa, synthetic construct
  REGION 1..9: note = Rho guanine nucleotide exchange factor 2 (258-266)
ELSDIHTRF

SEQ ID NO: 24761 - protein, 9 aa, synthetic construct
  REGION 1..9: note = dCTP pyrophosphatase 1 (95-103)
ELSDVLIYL

SEQ ID NO: 24762 - protein, 9 aa, synthetic construct
  REGION 1..9: note = Protein phosphatase 1 regulatory subunit 12A (956-964)
ELTDLKLQL

SEQ ID NO: 24763 - protein, 11 aa, synthetic construct
  REGION 1..11: note = Clustered mitochondria protein homolog (607-617)
ELVDAFVEHRY

SEQ ID NO: 24764 - protein, 9 aa, synthetic construct
  REGION 1..9: note = Splicing factor 3B subunit 2 (26-34)
ELVERLQSY

SEQ ID NO: 24765 - protein, 12 aa, synthetic construct
  REGION 1..12: note = F-box only protein 34 (410-421)
ELVGLPFSSHTY

SEQ ID NO: 24766 - protein, 9 aa, synthetic construct
  REGION 1..9: note = Inositol-tetrakisphosphate 1-kinase (76-84)
ELVHRFQEY

SEQ ID NO: 24767 - protein, 9 aa, synthetic construct
  REGION 1..9: note = Protein DEK (174-182)
ELVKRILNF

SEQ ID NO: 24768 - protein, 10 aa, synthetic construct
  REGION 1..10: note = Sorting nexin-4 (344-353)
ELVTGTVRTF

SEQ ID NO: 24769 - protein, 9 aa, synthetic construct
  REGION 1..9: note = DNA replication complex GINS protein PSF2 (13-21)
ELVTIIPNF

SEQ ID NO: 24770 - protein, 10 aa, synthetic construct
  REGION 1..10: note = U3 small nucleolar RNA-associated protein 15 homolog (362-371)
ELYDRDLKHF

SEQ ID NO: 24771 - protein, 10 aa, synthetic construct
  REGION 1..10: note = Pumilio homolog 3 (274-283)
ELYGNTFQLY

SEQ ID NO: 24772 - protein, 9 aa, synthetic construct
  REGION 1..9: note = TELO2-interacting protein 1 homolog (510-518)
ELYHQSVVY

SEQ ID NO: 24773 - protein, 10 aa, synthetic construct
  REGION 1..10: note = Protein RRP5 homolog (1712-1721)
ELYNRMLKRF

SEQ ID NO: 24774 - protein, 10 aa, synthetic construct
  REGION 1..10: note = Tetratricopeptide repeat protein 37 (950-959)
ELYQYNILQM

SEQ ID NO: 24775 - protein, 9 aa, synthetic construct
  REGION 1..9: note = Vacuolar fusion protein CCZ1 homolog (448-456)
ELYVILNQK

SEQ ID NO: 24776 - protein, 10 aa, synthetic construct
  REGION 1..10: note = Clathrin heavy chain 1 (1402-1411)
ELYYRAIQFY

SEQ ID NO: 24777 - protein, 9 aa, synthetic construct
  REGION 1..9: note = Dedicator of cytokinesis protein 7 (167-175)
EMKDRITYF

SEQ ID NO: 24778 - protein, 9 aa, synthetic construct
  REGION 1..9: note = Kinetochore-associated protein DSN1 homolog (194-202)
EMKEYITKF

SEQ ID NO: 24779 - protein, 9 aa, synthetic construct
  REGION 1..9: note = Actin-related protein 5 (513-521)
EMRPFRSSF

SEQ ID NO: 24780 - protein, 11 aa, synthetic construct
  REGION 1..11: note = 5,6-dihydroxyindole-2-carboxylic acid oxidase (428-438)
ENAPIGHNRQY

SEQ ID NO: 24781 - protein, 11 aa, synthetic construct
  REGION 1..11: note = Eukaryotic translation initiation factor 3 subunit L (295-305)
ENIELNKKSMY

SEQ ID NO: 24782 - protein, 9 aa, synthetic construct
  REGION 1..9: note = Inositol-3-phosphate synthase 1 (246-254)
ENLLRTIEL

SEQ ID NO: 24783 - protein, 9 aa, synthetic construct
  REGION 1..9: note = 15-hydroxyprostaglandin dehydrogenase (NAD(+)) (198-206)
ENMGQYIEY

SEQ ID NO: 24784 - protein, 9 aa, synthetic construct
  REGION 1..9: note = Mitogen-activated protein kinase 8 (261-269)
ENRPKYAGY

SEQ ID NO: 24785 - protein, 9 aa, synthetic construct
  REGION 1..9: note = THO complex subunit 1 (70-78)
ENVLAIISL

SEQ ID NO: 24786 - protein, 10 aa, synthetic construct
  REGION 1..10: note = Protein-methionine sulfoxide oxidase MICAL1 (261-270)
EQHPGDGHFY

SEQ ID NO: 24787 - protein, 9 aa, synthetic construct
  REGION 1..9: note = Gamma-tubulin complex component 2 (486-494)
EQIEKAFNY

SEQ ID NO: 24788 - protein, 9 aa, synthetic construct
  REGION 1..9: note = Dual specificity protein phosphatase 19 (169-177)
EQTSFTSAF

SEQ ID NO: 24789 - protein, 9 aa, synthetic construct
  REGION 1..9: note = Semaphorin-4C (402-410)
EQVGPRWSR

SEQ ID NO: 24790 - protein, 9 aa, synthetic construct
  REGION 1..9: note = Eukaryotic translation initiation factor 3 subunit A (577-585)
ERKERLESL

SEQ ID NO: 24791 - protein, 9 aa, synthetic construct
  REGION 1..9: note = Protein enabled homolog (159-167)
ERLERQERL

SEQ ID NO: 24792 - protein, 8 aa, synthetic construct
  REGION 1..8: note = Endoplasmin (719-726)
ERMLRLSL

SEQ ID NO: 24793 - protein, 9 aa, synthetic construct
  REGION 1..9: note = Nuclear factor NF-kappa-B p100 subunit (588-596)
ERQGGRTAL

SEQ ID NO: 24794 - protein, 9 aa, synthetic construct
  REGION 1..9: note = Dual specificity protein phosphatase 4 (110-118)
ERSPRAESL

SEQ ID NO: 24795 - protein, 9 aa, synthetic construct
  REGION 1..9: note = Zinc finger protein 264 (382-390)
ESAALIHHY

SEQ ID NO: 24796 - protein, 9 aa, synthetic construct
  REGION 1..9: note = Histone acetyltransferase p300 (621-629)
ESANNRAEY

SEQ ID NO: 24797 - protein, 11 aa, synthetic construct
  REGION 1..11: note = Glutamine and serine-rich protein 1 (139-149)
ESAPHLLQPQF

SEQ ID NO: 24798 - protein, 10 aa, synthetic construct
  REGION 1..10: note = Chromodomain-helicase-DNA-binding protein 9 (1356-1365)
ESAYILQGGY

SEQ ID NO: 24799 - protein, 10 aa, synthetic construct
  REGION 1..10: note = Protein fem-1 homolog B (29-38)
ESDIRYLLGY

SEQ ID NO: 24800 - protein, 11 aa, synthetic construct
  REGION 1..11: note = ER membrane protein complex subunit 1 (169-179)
ESDSIHYQMVY

SEQ ID NO: 24801 - protein, 10 aa, synthetic construct
  REGION 1..10: note = Prolyl endopeptidase FAP (88-97)
ESDYSKLWRY

SEQ ID NO: 24802 - protein, 10 aa, synthetic construct
  REGION 1..10: note = 28S ribosomal protein S18b, mitochondrial (60-69)
ESEEYQERYG

SEQ ID NO: 24803 - protein, 12 aa, synthetic construct
  REGION 1..12: note = CD109 antigen (1076-1087)
ESEFSRGISDNY

SEQ ID NO: 24804 - protein, 8 aa, synthetic construct
  REGION 1..8: note = Asparagine synthetase (glutamine-hydrolyzing) (389-396)
ESERLLRE

SEQ ID NO: 24805 - protein, 10 aa, synthetic construct
  REGION 1..10: note = Serine/threonine-protein kinase Nek3 (67-76)
ESFEAEGHLY

SEQ ID NO: 24806 - protein, 9 aa, synthetic construct
  REGION 1..9: note = Sestrin-3 (9-17)
ESFLRSQFY

SEQ ID NO: 24807 - protein, 11 aa, synthetic construct
  REGION 1..11: note = Torsin-1A-interacting protein 2 (368-378)
ESFPAGSTLIF

SEQ ID NO: 24808 - protein, 12 aa, synthetic construct
  REGION 1..12: note = Torsin-1A-interacting protein 2 (368-379)
ESFPAGSTLIFY

SEQ ID NO: 24809 - protein, 10 aa, synthetic construct
  REGION 1..10: note = Cell division cycle-associated protein 7 (137-146)
ESFPGSFRGR

SEQ ID NO: 24810 - protein, 12 aa, synthetic construct
  REGION 1..12: note = Putative elongation factor 1-alpha-like 3 (413-424)
ESFSDYPPLGRF

SEQ ID NO: 24811 - protein, 10 aa, synthetic construct
  REGION 1..10: note = Dual specificity protein kinase TTK (197-206)
ESFSGSLGHL

SEQ ID NO: 24812 - protein, 9 aa, synthetic construct
  REGION 1..9: note = ER degradation-enhancing alpha-mannosidase-like protein 2 (361-369)
ESIEKISKV

SEQ ID NO: 24813 - protein, 11 aa, synthetic construct
  REGION 1..11: note = E3 ubiquitin-protein ligase HECTD1 (531-541)
ESIERLPLHLY

SEQ ID NO: 24814 - protein, 9 aa, synthetic construct
  REGION 1..9: note = Zinc-binding alcohol dehydrogenase domain-containing protein 2 (347-355)
ESIFRAVNY

SEQ ID NO: 24815 - protein, 10 aa, synthetic construct
  REGION 1..10: note = GATA zinc finger domain-containing protein 1 (140-149)
ESIFYKGVYY

SEQ ID NO: 24816 - protein, 9 aa, synthetic construct
  REGION 1..9: note = Abnormal spindle-like microcephaly-associated protein (62-70)
ESILTIQKY

SEQ ID NO: 24817 - protein, 13 aa, synthetic construct
  REGION 1..13: note = Ceramide synthase 4 (291-303)
ESISNRGPFFGYY

SEQ ID NO: 24818 - protein, 13 aa, synthetic construct
  REGION 1..13: note = Leucine-rich repeat-containing protein 9 (566-578)
ESISQSNYPMVNS

SEQ ID NO: 24819 - protein, 10 aa, synthetic construct
  REGION 1..10: note = Cytochrome b5 domain-containing protein 1 (157-166)
ESIWEILHRY

SEQ ID NO: 24820 - protein, 9 aa, synthetic construct
  REGION 1..9: note = Poly (ADP-ribose) polymerase 9 (164-172)
ESKQFVARY

SEQ ID NO: 24821 - protein, 9 aa, synthetic construct
  REGION 1..9: note = Coiled-coil domain-containing protein 158 (458-466)
ESLEKVSSL

SEQ ID NO: 24822 - protein, 11 aa, synthetic construct
  REGION 1..11: note = Leucine-rich repeat-containing protein 57 (51-61)
ESLPPLLIGKF

SEQ ID NO: 24823 - protein, 10 aa, synthetic construct
  REGION 1..10: note = N-acetylglucosamine-1-phosphotransferase subunits alpha/beta (1173-1182)
ESMFPIPSQF

SEQ ID NO: 24824 - protein, 11 aa, synthetic construct
  REGION 1..11: note = Protein disulfide-isomerase A3 (36-46)
ESRISDTGSAG

SEQ ID NO: 24825 - protein, 9 aa, synthetic construct
  REGION 1..9: note = BRCA1-A complex subunit BRE (134-142)
ESSRLMFEY

SEQ ID NO: 24826 - protein, 9 aa, synthetic construct
  REGION 1..9: note = Protein FAM135A (825-833)
ESTSAISEI

SEQ ID NO: 24827 - protein, 9 aa, synthetic construct
  REGION 1..9: note = Transcriptional enhancer factor TEF-1 (240-248)
ESVDIRQIY

SEQ ID NO: 24828 - protein, 10 aa, synthetic construct
  REGION 1..10: note = OTU domain-containing protein 7B (579-588)
ESVGNGGSKY

SEQ ID NO: 24829 - protein, 9 aa, synthetic construct
  REGION 1..9: note = Scm-like with four MBT domains protein 1 (492-500)
ESVMINGKY

SEQ ID NO: 24830 - protein, 9 aa, synthetic construct
  REGION 1..9: note = Tensin-1 (839-847)
ESVPPGRSY

SEQ ID NO: 24831 - protein, 10 aa, synthetic construct
  REGION 1..10: note = Zinc transporter ZIP6 (242-251)
ESVSEPRKGF

SEQ ID NO: 24832 - protein, 10 aa, synthetic construct
  REGION 1..10: note = 26S proteasome non-ATPase regulatory subunit 6 (309-318)
ESYRSLTLGY

SEQ ID NO: 24833 - protein, 10 aa, synthetic construct
  REGION 1..10: note = Exonuclease 1 (584-593)
ESYSFESSKF

SEQ ID NO: 24834 - protein, 8 aa, synthetic construct
  REGION 1..8: note = Lactosylceramide alpha-2,3-sialyltransferase (260-267)
ETAFDILQ

SEQ ID NO: 24835 - protein, 11 aa, synthetic construct
  REGION 1..11: note = Transcription factor SOX-10 (359-369)
ETAGPQGPPHY

SEQ ID NO: 24836 - protein, 9 aa, synthetic construct
  REGION 1..9: note = DNA-directed RNA polymerases I, II, and III subunit RPABC1 (198-206)
ETAGRYITY

SEQ ID NO: 24837 - protein, 12 aa, synthetic construct
  REGION 1..12: note = HLA class I histocompatibility antigen, A-66 alpha chain (147-158)
ETAHEAEQWRAY

SEQ ID NO: 24838 - protein, 10 aa, synthetic construct
  REGION 1..10: note = Actin-related protein 3 (171-180)
ETAKAVKERY

SEQ ID NO: 24839 - protein, 11 aa, synthetic construct
  REGION 1..11: note = Protein S100-A1 (6-16)
ETAMETLINVF

SEQ ID NO: 24840 - protein, 11 aa, synthetic construct
  REGION 1..11: note = ATP-binding cassette sub-family E member 1 (335-345)
ETANEEEVKKM

SEQ ID NO: 24841 - protein, 10 aa, synthetic construct
  REGION 1..10: note = YLP motif-containing protein 1 (228-237)
ETAPRHMMRL

SEQ ID NO: 24842 - protein, 11 aa, synthetic construct
  REGION 1..11: note = Ataxin-10 (40-50)
ETAPRTIFQRV

SEQ ID NO: 24843 - protein, 9 aa, synthetic construct
  REGION 1..9: note = Protein cordon-bleu (683-691)
ETAPRVTSF

SEQ ID NO: 24844 - protein, 9 aa, synthetic construct
  REGION 1..9: note = Alpha-1,3-mannosyl-glycoprotein 2-beta-N-acetylglucosaminyltransferase (147-155)
ETAQAIASY

SEQ ID NO: 24845 - protein, 9 aa, synthetic construct
  REGION 1..9: note = Exocyst complex component 8 (72-80)
ETAREISYL

SEQ ID NO: 24846 - protein, 9 aa, synthetic construct
  REGION 1..9: note = Tudor domain-containing protein 7 (5-13)
ETARIAQLV

SEQ ID NO: 24847 - protein, 10 aa, synthetic construct
  REGION 1..10: note = Spectrin beta chain, non-erythrocytic 1 (1262-1271)
ETASELLMRL

SEQ ID NO: 24848 - protein, 10 aa, synthetic construct
  REGION 1..10: note = E3 ubiquitin-protein ligase RNF213 (3983-3992)
ETASKTLSRF

SEQ ID NO: 24849 - protein, 11 aa, synthetic construct
  REGION 1..11: note = Kinesin-like protein KIF2C (317-327)
ETASNEVVYRF

SEQ ID NO: 24850 - protein, 9 aa, synthetic construct
  REGION 1..9: note = Protein furry homolog-like (371-379)
ETASRIAKV

SEQ ID NO: 24851 - protein, 9 aa, synthetic construct
  REGION 1..9: note = Endoplasmin (698-706)
ETATLRSGY

SEQ ID NO: 24852 - protein, 11 aa, synthetic construct
  REGION 1..11: note = 2'-5'-oligoadenylate synthase 1 (355-365)
ETDDPRRYQKY

SEQ ID NO: 24853 - protein, 9 aa, synthetic construct
  REGION 1..9: note = Putative pre-mRNA-splicing factor ATP-dependent RNA helicase DHX32 (324-332)
ETEKRCQVY

SEQ ID NO: 24854 - protein, 14 aa, synthetic construct
  REGION 1..14: note = Sorting nexin-17 (7-20)
ETESRSGDSGGSAY

SEQ ID NO: 24855 - protein, 11 aa, synthetic construct
  REGION 1..11: note = Caldesmon (164-174)
ETETVTKSYQK

SEQ ID NO: 24856 - protein, 10 aa, synthetic construct
  REGION 1..10: note = Deoxyhypusine synthase (353-362)
ETFAQKMDAF

SEQ ID NO: 24857 - protein, 10 aa, synthetic construct
  REGION 1..10: note = Cytoplasmic dynein 1 heavy chain 1 (1934-1943)
ETFDFQAMGR

SEQ ID NO: 24858 - protein, 11 aa, synthetic construct
  REGION 1..11: note = Protein FAM127B (29-39)
ETFDGDTDRLP

SEQ ID NO: 24859 - protein, 13 aa, synthetic construct
  REGION 1..13: note = Nicastrin (333-345)
ETFDYIGSSRMVY

SEQ ID NO: 24860 - protein, 9 aa, synthetic construct
  REGION 1..9: note = CAAX prenyl protease 1 homolog (62-70)
ETFEKSRLY

SEQ ID NO: 24861 - protein, 11 aa, synthetic construct
  REGION 1..11: note = Ceramide glucosyltransferase (71-81)
ETFFELDYPKY

SEQ ID NO: 24862 - protein, 10 aa, synthetic construct
  REGION 1..10: note = Mediator of RNA polymerase II transcription subunit 13-like (1814-1823)
ETFGEASQKY

SEQ ID NO: 24863 - protein, 9 aa, synthetic construct
  REGION 1..9: note = Eukaryotic peptide chain release factor GTP-binding subunit ERF3A (465-473)
ETFKDFPQM

SEQ ID NO: 24864 - protein, 12 aa, synthetic construct
  REGION 1..12: note = Eukaryotic peptide chain release factor GTP-binding subunit ERF3A (465-476)
ETFKDFPQMGRF

SEQ ID NO: 24865 - protein, 10 aa, synthetic construct
  REGION 1..10: note = Kv channel-interacting protein 4 isoform 5 (81-90)
ETFKEIYSQF

SEQ ID NO: 24866 - protein, 10 aa, synthetic construct
  REGION 1..10: note = Dephospho-CoA kinase domain-containing protein (98-107)
ETFKYFLRGY

SEQ ID NO: 24867 - protein, 11 aa, synthetic construct
  REGION 1..11: note = Proteasome-associated protein ECM29 homolog (349-359)
ETFPANIQVVY

SEQ ID NO: 24868 - protein, 10 aa, synthetic construct
  REGION 1..10: note = Telomeric repeat-binding factor 2 (175-184)
ETFQQKMLRF

SEQ ID NO: 24869 - protein, 9 aa, synthetic construct
  REGION 1..9: note = E3 ubiquitin-protein ligase RNF213 (2162-2170)
ETFQRPYQY

SEQ ID NO: 24870 - protein, 10 aa, synthetic construct
  REGION 1..10: note = Uncharacterized protein C7orf43 (200-209)
ETFRGEQSAF

SEQ ID NO: 24871 - protein, 10 aa, synthetic construct
  REGION 1..10: note = 40S ribosomal protein S7 (169-178)
ETFSGVYKKL

SEQ ID NO: 24872 - protein, 9 aa, synthetic construct
  REGION 1..9: note = Protein SGT1 homolog (78-86)
ETFTEGQKL

SEQ ID NO: 24873 - protein, 9 aa, synthetic construct
  REGION 1..9: note = Mitotic spindle assembly checkpoint protein MAD2A (41-49)
ETFTRVQKY

SEQ ID NO: 24874 - protein, 10 aa, synthetic construct
  REGION 1..10: note = Src substrate cortactin (75-84)
ETGPKASHGY

SEQ ID NO: 24875 - protein, 11 aa, synthetic construct
  REGION 1..11: note = Tetratricopeptide repeat protein 17 (861-871)
ETGQIENGHRY

SEQ ID NO: 24876 - protein, 9 aa, synthetic construct
  REGION 1..9: note = Inositol 1,4,5-trisphosphate receptor type 2 (1301-1309)
ETHGRHVEY

SEQ ID NO: 24877 - protein, 9 aa, synthetic construct
  REGION 1..9: note = L-dopachrome tautomerase (196-204)
ETHLSSKRY

SEQ ID NO: 24878 - protein, 11 aa, synthetic construct
  REGION 1..11: note = Nucleoside diphosphate kinase homolog 5 (107-117)
ETHPDSLRAIY

SEQ ID NO: 24879 - protein, 10 aa, synthetic construct
  REGION 1..10: note = Conserved oligomeric Golgi complex subunit 4 (61-70)
ETHQPIVETY

SEQ ID NO: 24880 - protein, 10 aa, synthetic construct
  REGION 1..10: note = Nuclear autoantigenic sperm protein (246-255)
ETHYQLGLAY

SEQ ID NO: 24881 - protein, 9 aa, synthetic construct
  REGION 1..9: note = Glutamine-fructose-6-phosphate aminotransferase (isomerizing) 1 (27-35)
ETIAKLVKY

SEQ ID NO: 24882 - protein, 12 aa, synthetic construct
  REGION 1..12: note = Splicing factor 3A subunit 2 (36-47)
ETIDINKDPYFM

SEQ ID NO: 24883 - protein, 9 aa, synthetic construct
  REGION 1..9: note = Alpha-aminoadipic semialdehyde synthase, mitochondrial (614-622)
ETIDKAKEV

SEQ ID NO: 24884 - protein, 10 aa, synthetic construct
  REGION 1..10: note = HEAT repeat-containing protein 5B (1515-1524)
ETIDTARLHY

SEQ ID NO: 24885 - protein, 11 aa, synthetic construct
  REGION 1..11: note = Methylsterol monooxygenase 1 (92-102)
ETIDVHSGYDI

SEQ ID NO: 24886 - protein, 9 aa, synthetic construct
  REGION 1..9: note = Threonine-tRNA ligase, cytoplasmic (692-700)
ETIERLQQL

SEQ ID NO: 24887 - protein, 9 aa, synthetic construct
  REGION 1..9: note = TBC1 domain family member 10A (329-337)
ETIERLRSL

SEQ ID NO: 24888 - protein, 13 aa, synthetic construct
  REGION 1..13: note = GRIP and coiled-coil domain-containing protein 1 (19-31)
ETIETQKKQLLQY

SEQ ID NO: 24889 - protein, 9 aa, synthetic construct
  REGION 1..9: note = DNA-directed RNA polymerase III subunit RPC3 (517-525)
ETIFLLESY

SEQ ID NO: 24890 - protein, 9 aa, synthetic construct
  REGION 1..9: note = Dynamin-like 120 kDa protein, mitochondrial (435-443)
ETIFSISKA

SEQ ID NO: 24891 - protein, 11 aa, synthetic construct
  REGION 1..11: note = Regulatory-associated protein of mTOR (100-110)
ETIGANLQKQY

SEQ ID NO: 24892 - protein, 9 aa, synthetic construct
  REGION 1..9: note = Heterogeneous nuclear ribonucleoprotein K (95-103)
ETIGEILKK

SEQ ID NO: 24893 - protein, 9 aa, synthetic construct
  REGION 1..9: note = X-ray repair cross-complementing protein 5 (17-25)
ETIGKKFEK

SEQ ID NO: 24894 - protein, 12 aa, synthetic construct
  REGION 1..12: note = Superkiller viralicidic activity 2-like 2 (269-280)
ETIILLPDNVHY

SEQ ID NO: 24895 - protein, 11 aa, synthetic construct
  REGION 1..11: note = Golgi-specific brefeldin A-resistance guanine nucleotide exchange factor 1 (948-958)
ETIIQKAISGF

SEQ ID NO: 24896 - protein, 10 aa, synthetic construct
  REGION 1..10: note = Inositol polyphosphate multikinase (205-214)
ETIKDGVSRF

SEQ ID NO: 24897 - protein, 10 aa, synthetic construct
  REGION 1..10: note = Cyclin-dependent kinase 4 (41-50)
ETIKDLMRQF

SEQ ID NO: 24898 - protein, 12 aa, synthetic construct
  REGION 1..12: note = Ral GTPase-activating protein subunit beta (590-601)
ETILPDRELSKF

SEQ ID NO: 24899 - protein, 10 aa, synthetic construct
  REGION 1..10: note = Mitochondrial Rho GTPase 1 (129-138)
ETILPIMNQY

SEQ ID NO: 24900 - protein, 9 aa, synthetic construct
  REGION 1..9: note = Sodium-dependent neutral amino acid transporter B(0)AT2 (81-89)
ETIMKFLKM

SEQ ID NO: 24901 - protein, 9 aa, synthetic construct
  REGION 1..9: note = Rab GDP dissociation inhibitor beta (124-132)
ETINRIKLY

SEQ ID NO: 24902 - protein, 9 aa, synthetic construct
  REGION 1..9: note = cAMP-specific 3',5'-cyclic phosphodiesterase 4B (104-112)
ETIQTYRSV

SEQ ID NO: 24903 - protein, 10 aa, synthetic construct
  REGION 1..10: note = Platelet-derived growth factor D (54-63)
ETIQVKGNGY

SEQ ID NO: 24904 - protein, 9 aa, synthetic construct
  REGION 1..9: note = Vacuolar protein-sorting-associated protein 36 (204-212)
ETIRFKSYL

SEQ ID NO: 24905 - protein, 9 aa, synthetic construct
  REGION 1..9: note = Transmembrane protein 260 (666-674)
ETIRHFRLY

SEQ ID NO: 24906 - protein, 10 aa, synthetic construct
  REGION 1..10: note = Probable ATP-dependent RNA helicase DDX41 (307-316)
ETIRHGVHMM

SEQ ID NO: 24907 - protein, 9 aa, synthetic construct
  REGION 1..9: note = Lysophospholipid acyltransferase 7 (297-305)
ETIRNIDCY

SEQ ID NO: 24908 - protein, 9 aa, synthetic construct
  REGION 1..9: note = HAUS augmin-like complex subunit 2 (20-28)
ETIRNIPHL

SEQ ID NO: 24909 - protein, 10 aa, synthetic construct
  REGION 1..10: note = Dynamin-2 (654-663)
ETIRNLVDSY

SEQ ID NO: 24910 - protein, 9 aa, synthetic construct
  REGION 1..9: note = Basic leucine zipper and W2 domain-containing protein 2 (106-114)
ETIRNYAQV

SEQ ID NO: 24911 - protein, 9 aa, synthetic construct
  REGION 1..9: note = T-complex protein 1 subunit alpha (15-23)
ETIRSQNVM

SEQ ID NO: 24912 - protein, 9 aa, synthetic construct
  REGION 1..9: note = Zinc finger FYVE domain-containing protein 16 (802-810)
ETISKAQAF

SEQ ID NO: 24913 - protein, 9 aa, synthetic construct
  REGION 1..9: note = dTDP-D-glucose 4,6-dehydratase (30-38)
ETISNKQNY

SEQ ID NO: 24914 - protein, 12 aa, synthetic construct
  REGION 1..12: note = Lysosomal glucocerebrosidase (500-511)
ETISPGYSIHTY

SEQ ID NO: 24915 - protein, 9 aa, synthetic construct
  REGION 1..9: note = Delta(14)-sterol reductase (327-335)
ETISTATGR

SEQ ID NO: 24916 - protein, 11 aa, synthetic construct
  REGION 1..11: note = UDP-N-acetylhexosamine pyrophosphorylase (460-470)
ETITADVNHNL

SEQ ID NO: 24917 - protein, 9 aa, synthetic construct
  REGION 1..9: note = THO complex subunit 2 (857-865)
ETITKFLQL

SEQ ID NO: 24918 - protein, 11 aa, synthetic construct
  REGION 1..11: note = S-phase kinase-associated protein 2 (283-293)
ETITQLNLSGY

SEQ ID NO: 24919 - protein, 11 aa, synthetic construct
  REGION 1..11: note = Minor histocompatibility antigen H13 (68-78)
ETITSRDAARF

SEQ ID NO: 24920 - protein, 9 aa, synthetic construct
  REGION 1..9: note = DNA repair protein complementing XP-A cells (180-188)
ETIVHQHEY

SEQ ID NO: 24921 - protein, 9 aa, synthetic construct
  REGION 1..9: note = Disco-interacting protein 2 homolog B (143-151)
ETIVNVLDF

SEQ ID NO: 24922 - protein, 10 aa, synthetic construct
  REGION 1..10: note = Tumor suppressor candidate 2 (66-75)
ETIVTKNGQK

SEQ ID NO: 24923 - protein, 10 aa, synthetic construct
  REGION 1..10: note = RuvB-like 2 (169-178)
ETIYDLGTKM

SEQ ID NO: 24924 - protein, 11 aa, synthetic construct
  REGION 1..11: note = Mediator of RNA polymerase II transcription subunit 23 (553-563)
ETIYGNGIMRI

SEQ ID NO: 24925 - protein, 9 aa, synthetic construct
  REGION 1..9: note = Peroxisome biogenesis factor 1 (491-499)
ETKDGLKEF

SEQ ID NO: 24926 - protein, 9 aa, synthetic construct
  REGION 1..9: note = F-box only protein 38 (25-33)
ETKDYMNQL

SEQ ID NO: 24927 - protein, 11 aa, synthetic construct
  REGION 1..11: note = Destrin (90-100)
ETKESRKEELM

SEQ ID NO: 24928 - protein, 9 aa, synthetic construct
  REGION 1..9: note = Dynein light chain 1, cytoplasmic (69-77)
ETKHFIYFY

SEQ ID NO: 24929 - protein, 9 aa, synthetic construct
  REGION 1..9: note = ATP-dependent RNA helicase DDX50 (83-91)
ETKKNVTEM

SEQ ID NO: 24930 - protein, 9 aa, synthetic construct
  REGION 1..9: note = Protein LTV1 homolog (235-243)
ETKSRFTEY

SEQ ID NO: 24931 - protein, 9 aa, synthetic construct
  REGION 1..9: note = UPF0462 protein C4orf33 (111-119)
ETKWEGKAY

SEQ ID NO: 24932 - protein, 10 aa, synthetic construct
  REGION 1..10: note = Alpha-centractin (232-241)
ETLETEKAQY

SEQ ID NO: 24933 - protein, 11 aa, synthetic construct
  REGION 1..11: note = Alpha-centractin (232-242)
ETLETEKAQYY

SEQ ID NO: 24934 - protein, 9 aa, synthetic construct
  REGION 1..9: note = Heterogeneous nuclear ribonucleoprotein L (557-565)
ETLGFLNHY

SEQ ID NO: 24935 - protein, 10 aa, synthetic construct
  REGION 1..10: note = Truncated extracellular matrix protein 1 (208-217)
ETLNFLEIGY

SEQ ID NO: 24936 - protein, 11 aa, synthetic construct
  REGION 1..11: note = HEAT repeat-containing protein 1 (1769-1779)
ETLPHFISPYL

SEQ ID NO: 24937 - protein, 9 aa, synthetic construct
  REGION 1..9: note = Neuron navigator 2 (931-939)
ETLQRNTSL

SEQ ID NO: 24938 - protein, 10 aa, synthetic construct
  REGION 1..10: note = LIM domain-binding protein 3 (205-214)
ETLREMAQMY

SEQ ID NO: 24939 - protein, 10 aa, synthetic construct
  REGION 1..10: note = Transient receptor potential cation channel subfamily M member 7 (239-248)
ETMAMKLLTY

SEQ ID NO: 24940 - protein, 13 aa, synthetic construct
  REGION 1..13: note = Nucleoporin NUP188 homolog (30-42)
ETMDPFVDRIGYF

SEQ ID NO: 24941 - protein, 13 aa, synthetic construct
  REGION 1..13: note = Aldehyde dehydrogenase family 1 member A3 (118-130)
ETMDTGKPFLHAF

SEQ ID NO: 24942 - protein, 11 aa, synthetic construct
  REGION 1..11: note = Myosin-10 (328-338)
ETMEAMHIMGF

SEQ ID NO: 24943 - protein, 10 aa, synthetic construct
  REGION 1..10: note = Heterogeneous nuclear ribonucleoprotein H (76-85)
ETMGHRYVEV

SEQ ID NO: 24944 - protein, 9 aa, synthetic construct
  REGION 1..9: note = ETS-related transcription factor Elf-2 (173-181)
ETMGRALRY

SEQ ID NO: 24945 - protein, 9 aa, synthetic construct
  REGION 1..9: note = Serine/threonine-protein phosphatase 4 regulatory subunit 2 (37-45)
ETMIQWSQF

SEQ ID NO: 24946 - protein, 9 aa, synthetic construct
  REGION 1..9: note = Apolipoprotein E (84-92)
ETMKELKAY

SEQ ID NO: 24947 - protein, 9 aa, synthetic construct
  REGION 1..9: note = Ribosome-recycling factor, mitochondrial (153-161)
ETMKQIKQY

SEQ ID NO: 24948 - protein, 10 aa, synthetic construct
  REGION 1..10: note = Interferon-induced protein with tetratricopeptide repeats 1 (375-384)
ETMQDIHFHY

SEQ ID NO: 24949 - protein, 11 aa, synthetic construct
  REGION 1..11: note = Inositol 1,4,5-trisphosphate receptor type 3 (1262-1272)
ETMQHIFLNNY

SEQ ID NO: 24950 - protein, 10 aa, synthetic construct
  REGION 1..10: note = TRPM8 channel-associated factor 1 (132-141)
ETMTEKLVKF

SEQ ID NO: 24951 - protein, 10 aa, synthetic construct
  REGION 1..10: note = Carnitine O-acetyltransferase (515-524)
ETNAARLAHY

SEQ ID NO: 24952 - protein, 9 aa, synthetic construct
  REGION 1..9: note = Trafficking kinesin-binding protein 2 (258-266)
ETNAQMSRM

SEQ ID NO: 24953 - protein, 9 aa, synthetic construct
  REGION 1..9: note = BTB/POZ domain-containing protein 3 (304-312)
ETNDIFLWY

SEQ ID NO: 24954 - protein, 9 aa, synthetic construct
  REGION 1..9: note = Myotubularin (266-274)
ETNKQISKL

SEQ ID NO: 24955 - protein, 12 aa, synthetic construct
  REGION 1..12: note = Serine-tRNA ligase, mitochondrial (334-345)
ETNTGQEPRGLY

SEQ ID NO: 24956 - protein, 9 aa, synthetic construct
  REGION 1..9: note = E3 ubiquitin-protein ligase RFWD3 (353-361)
ETNTVVQTY

SEQ ID NO: 24957 - protein, 10 aa, synthetic construct
  REGION 1..10: note = Protein bicaudal D homolog 2 (309-318)
ETPNRVMLDY

SEQ ID NO: 24958 - protein, 9 aa, synthetic construct
  REGION 1..9: note = Splicing factor, proline- and glutamine-rich (475-483)
ETPPRFAQH

SEQ ID NO: 24959 - protein, 10 aa, synthetic construct
  REGION 1..10: note = Histone-lysine N-methyltransferase 2C (4271-4280)
ETPSKAFHQY

SEQ ID NO: 24960 - protein, 11 aa, synthetic construct
  REGION 1..11: note = Tetratricopeptide repeat protein 4 (310-320)
ETPSWDLEQKY

SEQ ID NO: 24961 - protein, 9 aa, synthetic construct
  REGION 1..9: note = T-complex protein 1 subunit eta (146-154)
ETQIGGERY

SEQ ID NO: 24962 - protein, 9 aa, synthetic construct
  REGION 1..9: note = Proteasome subunit alpha type-5 (37-45)
ETQNHWFTY

SEQ ID NO: 24963 - protein, 10 aa, synthetic construct
  REGION 1..10: note = Zinc finger MIZ domain-containing protein 1 (308-317)
ETQNKDINQY

SEQ ID NO: 24964 - protein, 9 aa, synthetic construct
  REGION 1..9: note = Histone-lysine N-methyltransferase NSD3 (50-58)
ETQTKYQSY

SEQ ID NO: 24965 - protein, 9 aa, synthetic construct
  REGION 1..9: note = Elongation factor 1-gamma (326-334)
ETQTLVREY

SEQ ID NO: 24966 - protein, 10 aa, synthetic construct
  REGION 1..10: note = Calcipressin-1 (27-36)
ETRAKFESLF

SEQ ID NO: 24967 - protein, 9 aa, synthetic construct
  REGION 1..9: note = Protein FAM184A (53-61)
ETREKILQY

SEQ ID NO: 24968 - protein, 11 aa, synthetic construct
  REGION 1..11: note = Zinc finger protein 428 (46-56)
ETREPAETGGY

SEQ ID NO: 24969 - protein, 11 aa, synthetic construct
  REGION 1..11: note = Rho GTPase-activating protein 26 (401-411)
ETRGINEQGLY

SEQ ID NO: 24970 - protein, 12 aa, synthetic construct
  REGION 1..12: note = A-kinase anchor protein 2 (904-915)
ETRPEGSYFSKY

SEQ ID NO: 24971 - protein, 9 aa, synthetic construct
  REGION 1..9: note = Pre-mRNA-splicing regulator WTAP (228-236)
ETRQQLAQY

SEQ ID NO: 24972 - protein, 9 aa, synthetic construct
  REGION 1..9: note = F-box/WD repeat-containing protein 11 (431-439)
ETRSPSRTY

SEQ ID NO: 24973 - protein, 11 aa, synthetic construct
  REGION 1..11: note = F-box/WD repeat-containing protein 11 (431-441)
ETRSPSRTYTY

SEQ ID NO: 24974 - protein, 9 aa, synthetic construct
  REGION 1..9: note = Zinc finger CCCH domain-containing protein 13 (597-605)
ETRSSYPER

SEQ ID NO: 24975 - protein, 12 aa, synthetic construct
  REGION 1..12: note = Zinc finger CCCH domain-containing protein 13 (597-608)
ETRSSYPERDRY

SEQ ID NO: 24976 - protein, 9 aa, synthetic construct
  REGION 1..9: note = Serine/threonine-protein kinase TBK1 (301-309)
ETSDILHRM

SEQ ID NO: 24977 - protein, 10 aa, synthetic construct
  REGION 1..10: note = Vimentin (457-466)
ETSQHHDDLE

SEQ ID NO: 24978 - protein, 9 aa, synthetic construct
  REGION 1..9: note = Centromere protein F (880-888)
ETSQRISKL

SEQ ID NO: 24979 - protein, 11 aa, synthetic construct
  REGION 1..11: note = Peptidyl-glycine alpha-amidating monooxygenase (904-914)
ETSSGRVLGRF

SEQ ID NO: 24980 - protein, 11 aa, synthetic construct
  REGION 1..11: note = Heterogeneous nuclear ribonucleoprotein A1 (24-34)
ETTDESLRSHF

SEQ ID NO: 24981 - protein, 9 aa, synthetic construct
  REGION 1..9: note = Exportin-7 (20-28)
ETTDTTTRL

SEQ ID NO: 24982 - protein, 9 aa, synthetic construct
  REGION 1..9: note = Poly (ADP-ribose) polymerase 4 (422-430)
ETTEFLSKL

SEQ ID NO: 24983 - protein, 10 aa, synthetic construct
  REGION 1..10: note = Flap endonuclease 1 (59-68)
ETTSHLMGMF

SEQ ID NO: 24984 - protein, 11 aa, synthetic construct
  REGION 1..11: note = Flap endonuclease 1 (59-69)
ETTSHLMGMFY

SEQ ID NO: 24985 - protein, 9 aa, synthetic construct
  REGION 1..9: note = Zinc finger MYM-type protein 3 (161-169)
ETTSIATAR

SEQ ID NO: 24986 - protein, 9 aa, synthetic construct
  REGION 1..9: note = Transcription initiation factor TFIID subunit 4B (139-147)
ETTSNITSR

SEQ ID NO: 24987 - protein, 9 aa, synthetic construct
  REGION 1..9: note = Uncharacterized protein C1orf112 (237-245)
ETTTRISLL

SEQ ID NO: 24988 - protein, 9 aa, synthetic construct
  REGION 1..9: note = TM2 domain-containing protein 2 isoform b (68-76)
ETTTWERKY

SEQ ID NO: 24989 - protein, 9 aa, synthetic construct
  REGION 1..9: note = Ubiquitin-like protein FUBI (19-27)
ETVAQIKAH

SEQ ID NO: 24990 - protein, 9 aa, synthetic construct
  REGION 1..9: note = Dynactin subunit 1 (38-46)
ETVGDLEAM

SEQ ID NO: 24991 - protein, 11 aa, synthetic construct
  REGION 1..11: note = Interferon-induced GTP-binding protein Mx1 (394-404)
ETVGEEDIRLF

SEQ ID NO: 24992 - protein, 9 aa, synthetic construct
  REGION 1..9: note = Glycerol-3-phosphate acyltransferase 1, mitochondrial (479-487)
ETVGKFIQY

SEQ ID NO: 24993 - protein, 9 aa, synthetic construct
  REGION 1..9: note = 28S ribosomal protein S23, mitochondrial (7-15)
ETVGSIFSR

SEQ ID NO: 24994 - protein, 10 aa, synthetic construct
  REGION 1..10: note = Structural maintenance of chromosomes flexible hinge domain-containing protein 1 (89-98)
ETVKDGVTLY

SEQ ID NO: 24995 - protein, 9 aa, synthetic construct
  REGION 1..9: note = Phosphoprotein associated withosphingolipid-enriched microdomains 1 (182-190)
ETVKEIKEV

SEQ ID NO: 24996 - protein, 10 aa, synthetic construct
  REGION 1..10: note = Developmentally-regulated GTP-binding protein 1 (203-212)
ETVKSILAEY

SEQ ID NO: 24997 - protein, 9 aa, synthetic construct
  REGION 1..9: note = Ribosomal RNA small subunit methyltransferase NEP1 (48-56)
ETVKVGKTY

SEQ ID NO: 24998 - protein, 9 aa, synthetic construct
  REGION 1..9: note = ADP-ribosylation factor GTPase-activating protein 3 (388-396)
ETVLKTTGY

SEQ ID NO: 24999 - protein, 10 aa, synthetic construct
  REGION 1..10: note = Zinc finger protein 574 (7-16)
ETVLYIEHRY

SEQ ID NO: 25000 - protein, 11 aa, synthetic construct
  REGION 1..11: note = Ankyrin repeat and LEM domain-containing protein 2 (291-301)
ETVNKERANSY

SEQ ID NO: 25001 - protein, 10 aa, synthetic construct
  REGION 1..10: note = Absent in melanoma 1 protein (1522-1531)
ETVNLRSLGF

SEQ ID NO: 25002 - protein, 9 aa, synthetic construct
  REGION 1..9: note = Rab GDP dissociation inhibitor alpha (74-82)
ETVNRIKLY

SEQ ID NO: 25003 - protein, 9 aa, synthetic construct
  REGION 1..9: note = Tumor susceptibility gene 101 protein (24-32)
ETVNVITLY

SEQ ID NO: 25004 - protein, 9 aa, synthetic construct
  REGION 1..9: note = Peroxisome proliferator-activated receptor delta (255-263)
ETVRELTEF

SEQ ID NO: 25005 - protein, 9 aa, synthetic construct
  REGION 1..9: note = Trafficking kinesin-binding protein 1 (346-354)
ETVRNINQV

SEQ ID NO: 25006 - protein, 9 aa, synthetic construct
  REGION 1..9: note = T-complex protein 1 subunit delta (524-532)
ETVRSILKI

SEQ ID NO: 25007 - protein, 10 aa, synthetic construct
  REGION 1..10: note = Golgin subfamily A member 7 (45-54)
ETVRTLNNLY

SEQ ID NO: 25008 - protein, 9 aa, synthetic construct
  REGION 1..9: note = Nuclear receptor 2C2-associated protein (9-17)
ETVSRVSSV

SEQ ID NO: 25009 - protein, 9 aa, synthetic construct
  REGION 1..9: note = Transitional endoplasmic reticulum ATPase (94-102)
ETVVEVPQV

SEQ ID NO: 25010 - protein, 9 aa, synthetic construct
  REGION 1..9: note = Exportin-T (504-512)
ETVVRYEKF

SEQ ID NO: 25011 - protein, 9 aa, synthetic construct
  REGION 1..9: note = HLA class II histocompatibility antigen, DP alpha 1 chain (71-79)
ETVWHLEEF

SEQ ID NO: 25012 - protein, 12 aa, synthetic construct
  REGION 1..12: note = 28S ribosomal protein S33, mitochondrial (47-58)
ETYDWYPNHHTY

SEQ ID NO: 25013 - protein, 10 aa, synthetic construct
  REGION 1..10: note = Dedicator of cytokinesis protein 1 (40-49)
ETYEGWYRGY

SEQ ID NO: 25014 - protein, 9 aa, synthetic construct
  REGION 1..9: note = Pre-mRNA-processing factor 6 (444-452)
ETYENARKV

SEQ ID NO: 25015 - protein, 9 aa, synthetic construct
  REGION 1..9: note = Transcription elongation factor SPT6 (938-946)
ETYEWARKM

SEQ ID NO: 25016 - protein, 10 aa, synthetic construct
  REGION 1..10: note = Exocyst complex component 7 (575-584)
ETYGAFLQKF

SEQ ID NO: 25017 - protein, 9 aa, synthetic construct
  REGION 1..9: note = C-C motif chemokine 28 (119-127)
ETYGHKTPY

SEQ ID NO: 25018 - protein, 9 aa, synthetic construct
  REGION 1..9: note = Myotonin-protein kinase (311-319)
ETYGKIVHY

SEQ ID NO: 25019 - protein, 9 aa, synthetic construct
  REGION 1..9: note = Quinone oxidoreductase (51-59)
ETYIRSGTY

SEQ ID NO: 25020 - protein, 10 aa, synthetic construct
  REGION 1..10: note = RNA-binding protein 8A (106-115)
ETYKEAQAAM

SEQ ID NO: 25021 - protein, 9 aa, synthetic construct
  REGION 1..9: note = Aurora kinase A (336-344)
ETYKRISRV

SEQ ID NO: 25022 - protein, 9 aa, synthetic construct
  REGION 1..9: note = 60 kDa SS-A/Ro ribonucleoprotein (329-337)
ETYKTGHGL

SEQ ID NO: 25023 - protein, 10 aa, synthetic construct
  REGION 1..10: note = U6 snRNA-associated Sm-like protein LSm4 (23-32)
ETYNGHLVSC

SEQ ID NO: 25024 - protein, 10 aa, synthetic construct
  REGION 1..10: note = Centromere protein J (230-239)
ETYPSNILSH

SEQ ID NO: 25025 - protein, 10 aa, synthetic construct
  REGION 1..10: note = Arf-GAP with coiled-coil, ANK repeat and PH domain-containing protein 2 (748-757)
ETYQDIFRDF

SEQ ID NO: 25026 - protein, 9 aa, synthetic construct
  REGION 1..9: note = Bifunctional coenzyme A synthase (290-298)
ETYRGGMAI

SEQ ID NO: 25027 - protein, 12 aa, synthetic construct
  REGION 1..12: note = Vacuolar protein sorting-associated protein 13B (522-533)
ETYTEIAGMQRF

SEQ ID NO: 25028 - protein, 9 aa, synthetic construct
  REGION 1..9: note = CD81 antigen (34-42)
EVAAGIWGF

SEQ ID NO: 25029 - protein, 12 aa, synthetic construct
  REGION 1..12: note = Transforming acidic coiled-coil-containing protein 3 (321-332)
EVAAGQMASSSR

SEQ ID NO: 25030 - protein, 11 aa, synthetic construct
  REGION 1..11: note = Condensin complex subunit 2 (680-690)
EVADEKMLSGL

SEQ ID NO: 25031 - protein, 10 aa, synthetic construct
  REGION 1..10: note = Rootletin (1797-1806)
EVADLELQRV

SEQ ID NO: 25032 - protein, 9 aa, synthetic construct
  REGION 1..9: note = KN motif and ankyrin repeat domain-containing protein 2 (488-496)
EVADPTAHR

SEQ ID NO: 25033 - protein, 9 aa, synthetic construct
  REGION 1..9: note = Protein phosphatase 1H (361-369)
EVAEAITQF

SEQ ID NO: 25034 - protein, 9 aa, synthetic construct
  REGION 1..9: note = Geminin (143-151)
EVAEHVQYM

SEQ ID NO: 25035 - protein, 9 aa, synthetic construct
  REGION 1..9: note = Tankyrase-2 (672-680)
EVAELLVKH

SEQ ID NO: 25036 - protein, 10 aa, synthetic construct
  REGION 1..10: note = Abnormal spindle-like microcephaly-associated protein (73-82)
EVAEVKISHF

SEQ ID NO: 25037 - protein, 9 aa, synthetic construct
  REGION 1..9: note = Tankyrase-1 (618-626)
EVAEYLLEH

SEQ ID NO: 25038 - protein, 11 aa, synthetic construct
  REGION 1..11: note = HRAS-like suppressor 3 (72-82)
EVAGAGAASVM

SEQ ID NO: 25039 - protein, 9 aa, synthetic construct
  REGION 1..9: note = CAD protein (1287-1295)
EVAGFGESR

SEQ ID NO: 25040 - protein, 9 aa, synthetic construct
  REGION 1..9: note = 5'-nucleotidase (100-108)
EVAHFMNAL

SEQ ID NO: 25041 - protein, 11 aa, synthetic construct
  REGION 1..11: note = 5'-nucleotidase (100-110)
EVAHFMNALRY

SEQ ID NO: 25042 - protein, 9 aa, synthetic construct
  REGION 1..9: note = Protein disulfide-isomerase A4 (440-448)
EVAKDFPEY

SEQ ID NO: 25043 - protein, 11 aa, synthetic construct
  REGION 1..11: note = Eukaryotic translation initiation factor 2-alpha kinase 1 (153-163)
EVALEAQTSRY

SEQ ID NO: 25044 - protein, 9 aa, synthetic construct
  REGION 1..9: note = Amyloid protein-binding protein 2 (469-477)
EVALSVGHL

SEQ ID NO: 25045 - protein, 11 aa, synthetic construct
  REGION 1..11: note = Microtubule-associated protein 4 (341-351)
EVAPAKDVTLL

SEQ ID NO: 25046 - protein, 9 aa, synthetic construct
  REGION 1..9: note = Striatin (575-583)
EVAPALSVF

SEQ ID NO: 25047 - protein, 11 aa, synthetic construct
  REGION 1..11: note = cDNA FLJ60317, highly similar to Aminoacylase-1 (EC 3.5.1.14) (143-153)
EVAPGYVVTVL

SEQ ID NO: 25048 - protein, 9 aa, synthetic construct
  REGION 1..9: note = E3 ubiquitin-protein ligase TRIM63 (155-163)
EVAPLQSVF

SEQ ID NO: 25049 - protein, 11 aa, synthetic construct
  REGION 1..11: note = Kelch-like protein 21 (364-374)
EVAPMLKAREY

SEQ ID NO: 25050 - protein, 10 aa, synthetic construct
  REGION 1..10: note = Endophilin-B2 (59-68)
EVAPPASGTR

SEQ ID NO: 25051 - protein, 11 aa, synthetic construct
  REGION 1..11: note = Niemann-Pick C1 protein (730-740)
EVAPSMFLSSF

SEQ ID NO: 25052 - protein, 9 aa, synthetic construct
  REGION 1..9: note = E3 ubiquitin-protein ligase Topors (578-586)
EVAQPSREF

SEQ ID NO: 25053 - protein, 11 aa, synthetic construct
  REGION 1..11: note = Zinc finger protein 131 (41-51)
EVASAKQSVKY

SEQ ID NO: 25054 - protein, 9 aa, synthetic construct
  REGION 1..9: note = Autophagy-related protein 9A (160-168)
EVASALRSF

SEQ ID NO: 25055 - protein, 9 aa, synthetic construct
  REGION 1..9: note = Methyltransferase-like protein 13 (163-171)
EVATQWFGF

SEQ ID NO: 25056 - protein, 9 aa, synthetic construct
  REGION 1..9: note = D-3-phosphoglycerate dehydrogenase (159-167)
EVATRMQSF

SEQ ID NO: 25057 - protein, 9 aa, synthetic construct
  REGION 1..9: note = DNA-dependent protein kinase catalytic subunit (713-721)
EVAVKMKQY

SEQ ID NO: 25058 - protein, 11 aa, synthetic construct
  REGION 1..11: note = Ribonuclease H2 subunit C (72-82)
EVAVPPGLVGY

SEQ ID NO: 25059 - protein, 11 aa, synthetic construct
  REGION 1..11: note = Endoplasmic reticulum lectin 1 (124-134)
EVCHGKHIRQY

SEQ ID NO: 25060 - protein, 9 aa, synthetic construct
  REGION 1..9: note = Serine/threonine-protein phosphatase 4 regulatory subunit 2 (20-28)
EVCPVLDQF

SEQ ID NO: 25061 - protein, 9 aa, synthetic construct
  REGION 1..9: note = FRAS1-related extracellular matrix protein 1 (1345-1353)
EVDLNLLRY

SEQ ID NO: 25062 - protein, 11 aa, synthetic construct
  REGION 1..11: note = Melanoma-associated antigen 3 (168-178)
EVDPIGHLYIF

SEQ ID NO: 25063 - protein, 9 aa, synthetic construct
  REGION 1..9: note = SET domain-containing protein 5 (26-34)
EVEAPYLSR

SEQ ID NO: 25064 - protein, 10 aa, synthetic construct
  REGION 1..10: note = DENN domain-containing protein 5A (179-188)
EVFANRFTQM

SEQ ID NO: 25065 - protein, 10 aa, synthetic construct
  REGION 1..10: note = Nck-associated protein 1 (479-488)
EVFDFRGMRL

SEQ ID NO: 25066 - protein, 10 aa, synthetic construct
  REGION 1..10: note = Probable ubiquitin carboxyl-terminal hydrolase FAF-X (1928-1937)
EVFDHMMKRM

SEQ ID NO: 25067 - protein, 10 aa, synthetic construct
  REGION 1..10: note = Disheveled-associated activator of morphogenesis 2 (1033-1042)
EVFDKDLCKL

SEQ ID NO: 25068 - protein, 10 aa, synthetic construct
  REGION 1..10: note = Ribosomal RNA processing protein 36 homolog (132-141)
EVFDKTYQFL

SEQ ID NO: 25069 - protein, 12 aa, synthetic construct
  REGION 1..12: note = FAST kinase domain-containing protein 5 (107-118)
EVFDSFENMRVF

SEQ ID NO: 25070 - protein, 11 aa, synthetic construct
  REGION 1..11: note = Melanoma-associated antigen 2 (229-239)
EVFEGREDSVF

SEQ ID NO: 25071 - protein, 10 aa, synthetic construct
  REGION 1..10: note = Protein arginine N-methyltransferase 5 (308-317)
EVFEKDPIKY

SEQ ID NO: 25072 - protein, 10 aa, synthetic construct
  REGION 1..10: note = Presenilin-2 (337-346)
EVFEPPLTGY

SEQ ID NO: 25073 - protein, 10 aa, synthetic construct
  REGION 1..10: note = GMP reductase 1 (254-263)
EVFERNGRKL

SEQ ID NO: 25074 - protein, 9 aa, synthetic construct
  REGION 1..9: note = Lanosterol synthase (479-487)
EVFGDIMID

SEQ ID NO: 25075 - protein, 10 aa, synthetic construct
  REGION 1..10: note = Monocarboxylate transporter 7 (340-349)
EVFGRIGAGF

SEQ ID NO: 25076 - protein, 9 aa, synthetic construct
  REGION 1..9: note = Zinc finger protein ZIC 2 (187-195)
EVFGRSEQY

SEQ ID NO: 25077 - protein, 9 aa, synthetic construct
  REGION 1..9: note = Nesprin-2 (6334-6342)
EVFGRVSRF

SEQ ID NO: 25078 - protein, 9 aa, synthetic construct
  REGION 1..9: note = Trifunctional purine biosynthetic protein adenosine-3 (10-18)
EVFHAGTAL

SEQ ID NO: 25079 - protein, 10 aa, synthetic construct
  REGION 1..10: note = Ribosomal protein S6 kinase alpha-5 (267-276)
EVFHDQLHTF

SEQ ID NO: 25080 - protein, 10 aa, synthetic construct
  REGION 1..10: note = Non-POU domain-containing octamer-binding protein (13-22)
EVFIHKDKGF

SEQ ID NO: 25081 - protein, 9 aa, synthetic construct
  REGION 1..9: note = DNA-directed RNA polymerase II subunit RPB4 (59-67)
EVFMKTLNY

SEQ ID NO: 25082 - protein, 10 aa, synthetic construct
  REGION 1..10: note = Quinone oxidoreductase (196-205)
EVFNHREVNY

SEQ ID NO: 25083 - protein, 10 aa, synthetic construct
  REGION 1..10: note = FACT complex subunit SPT16 (192-201)
EVFNKFFKER

SEQ ID NO: 25084 - protein, 10 aa, synthetic construct
  REGION 1..10: note = UDP-N-acetylglucosamine-peptide N-acetylglucosaminyltransferase 110 kDa subunit (229-238)
EVFPEFAAAH

SEQ ID NO: 25085 - protein, 10 aa, synthetic construct
  REGION 1..10: note = Serine/threonine-protein kinase LATS2 (719-728)
EVFPEHLARF

SEQ ID NO: 25086 - protein, 11 aa, synthetic construct
  REGION 1..11: note = Serine/threonine-protein phosphatase 6 regulatory ankyrin repeat subunit A (779-789)
EVFQKTEGNAF

SEQ ID NO: 25087 - protein, 11 aa, synthetic construct
  REGION 1..11: note = Replication protein A 70 kDa DNA-binding subunit (560-570)
EVFQNANFRSF

SEQ ID NO: 25088 - protein, 10 aa, synthetic construct
  REGION 1..10: note = F-box/LRR-repeat protein 5 (115-124)
EVFQPMLMEY

SEQ ID NO: 25089 - protein, 10 aa, synthetic construct
  REGION 1..10: note = Histone-lysine N-methyltransferase SETD2 (2472-2481)
EVFRKEMSQF

SEQ ID NO: 25090 - protein, 10 aa, synthetic construct
  REGION 1..10: note = Zinc finger and SCAN domain-containing protein 30 (45-54)
EVFRQKFRQF

SEQ ID NO: 25091 - protein, 10 aa, synthetic construct
  REGION 1..10: note = WD repeat and FYVE domain-containing protein 3 (667-676)
EVFSGDGRNY

SEQ ID NO: 25092 - protein, 10 aa, synthetic construct
  REGION 1..10: note = Coiled-coil domain-containing protein 136 (105-114)
EVFTKQIQQL

SEQ ID NO: 25093 - protein, 10 aa, synthetic construct
  REGION 1..10: note = RCC1 and BTB domain-containing protein 2 (124-133)
EVFTWGHNAY

SEQ ID NO: 25094 - protein, 11 aa, synthetic construct
  REGION 1..11: note = Pre-mRNA-splicing factor ATP-dependent RNA helicase DHX15 (379-389)
EVGDIKIIPLY

SEQ ID NO: 25095 - protein, 9 aa, synthetic construct
  REGION 1..9: note = Protein AAR2 homolog (40-48)
EVGPKFRGV

SEQ ID NO: 25096 - protein, 10 aa, synthetic construct
  REGION 1..10: note = Adipocyte plasma membrane-associated protein (403-412)
EVHEHDGHLY

SEQ ID NO: 25097 - protein, 11 aa, synthetic construct
  REGION 1..11: note = Adipocyte plasma membrane-associated protein (403-413)
EVHEHDGHLYL

SEQ ID NO: 25098 - protein, 12 aa, synthetic construct
  REGION 1..12: note = Phosphatase and actin regulator 1 (636-647)
EVHELSRHLTRF

SEQ ID NO: 25099 - protein, 10 aa, synthetic construct
  REGION 1..10: note = GPI transamidase component PIG-T (291-300)
EVHPPPTTTY

SEQ ID NO: 25100 - protein, 11 aa, synthetic construct
  REGION 1..11: note = Aryl hydrocarbon receptor nuclear translocator 2 (438-448)
EVHQRDGLSSY

SEQ ID NO: 25101 - protein, 10 aa, synthetic construct
  REGION 1..10: note = Uncharacterized protein C1orf131 (173-182)
EVHRFGITGY

SEQ ID NO: 25102 - protein, 12 aa, synthetic construct
  REGION 1..12: note = 2-methoxy-6-polyprenyl-1,4-benzoquinol methylase, mitochondrial (272-283)
EVIAGDWKSYQY

SEQ ID NO: 25103 - protein, 9 aa, synthetic construct
  REGION 1..9: note = DNA mismatch repair protein Msh2 (914-922)
EVIAKNNSF

SEQ ID NO: 25104 - protein, 12 aa, synthetic construct
  REGION 1..12: note = Protein CutA (104-115)
EVIALPVEQGNF

SEQ ID NO: 25105 - protein, 11 aa, synthetic construct
  REGION 1..11: note = Drebrin-like protein (403-413)
EVIDEGWWRGY

SEQ ID NO: 25106 - protein, 11 aa, synthetic construct
  REGION 1..11: note = Alpha/beta hydrolase domain-containing protein 17B (236-246)
EVIDFSHGLAL

SEQ ID NO: 25107 - protein, 12 aa, synthetic construct
  REGION 1..12: note = Alpha/beta hydrolase domain-containing protein 17A (256-267)
EVIDFSHGLALY

SEQ ID NO: 25108 - protein, 11 aa, synthetic construct
  REGION 1..11: note = Alpha/beta hydrolase domain-containing protein 17C (277-287)
EVIDFSHGLAM

SEQ ID NO: 25109 - protein, 12 aa, synthetic construct
  REGION 1..12: note = Alpha/beta hydrolase domain-containing protein 17C (277-288)
EVIDFSHGLAMY

SEQ ID NO: 25110 - protein, 12 aa, synthetic construct
  REGION 1..12: note = SH3 and PX domain-containing protein 2A (332-343)
EVIDKNSGGWWY

SEQ ID NO: 25111 - protein, 9 aa, synthetic construct
  REGION 1..9: note = XK-related protein 9 (123-131)
EVIDRVTDL

SEQ ID NO: 25112 - protein, 10 aa, synthetic construct
  REGION 1..10: note = Histidine-tRNA ligase, cytoplasmic (90-99)
EVIDTPVFEL

SEQ ID NO: 25113 - protein, 9 aa, synthetic construct
  REGION 1..9: note = SNF-related serine/threonine-protein kinase (80-88)
EVIDTQTKL

SEQ ID NO: 25114 - protein, 9 aa, synthetic construct
  REGION 1..9: note = Mitochondrial ribonuclease P protein 3 (193-201)
EVIDVFEIM

SEQ ID NO: 25115 - protein, 11 aa, synthetic construct
  REGION 1..11: note = Mitochondrial ribonuclease P protein 3 (193-203)
EVIDVFEIMKA

SEQ ID NO: 25116 - protein, 10 aa, synthetic construct
  REGION 1..10: note = N-terminal Xaa-Pro-Lys N-methyltransferase 1 (4-13)
EVIEDEKQFY

SEQ ID NO: 25117 - protein, 9 aa, synthetic construct
  REGION 1..9: note = T-complex protein 1 subunit theta (127-135)
EVIEGYEIA

SEQ ID NO: 25118 - protein, 10 aa, synthetic construct
  REGION 1..10: note = Phosphatidate phosphatase LPIN1 (766-775)
EVIEKKPEKF

SEQ ID NO: 25119 - protein, 10 aa, synthetic construct
  REGION 1..10: note = SH3 and PX domain-containing protein 2B (396-405)
EVIEKNLSGW

SEQ ID NO: 25120 - protein, 10 aa, synthetic construct
  REGION 1..10: note = Dynamin-1-like protein (634-643)
EVIERLIKSY

SEQ ID NO: 25121 - protein, 9 aa, synthetic construct
  REGION 1..9: note = Asparagine synthetase (glutamine-hydrolyzing) (326-334)
EVIFSLETY

SEQ ID NO: 25122 - protein, 10 aa, synthetic construct
  REGION 1..10: note = Dynamin-like 120 kDa protein, mitochondrial (156-165)
EVIGASDLLL

SEQ ID NO: 25123 - protein, 11 aa, synthetic construct
  REGION 1..11: note = Dynamin-like 120 kDa protein, mitochondrial (156-166)
EVIGASDLLLL

SEQ ID NO: 25124 - protein, 9 aa, synthetic construct
  REGION 1..9: note = Protein phosphatase 1 regulatory subunit 37 (75-83)
EVIGAYKQA

SEQ ID NO: 25125 - protein, 11 aa, synthetic construct
  REGION 1..11: note = Protein TMEPAI (199-209)
EVIGHYPGSSF

SEQ ID NO: 25126 - protein, 12 aa, synthetic construct
  REGION 1..12: note = Mitogen-activated protein kinase kinase kinase 11 (121-132)
EVIGIGGFGKVY

SEQ ID NO: 25127 - protein, 11 aa, synthetic construct
  REGION 1..11: note = Ropporin-1B (190-200)
EVIGPDGLITV

SEQ ID NO: 25128 - protein, 12 aa, synthetic construct
  REGION 1..12: note = Hepatocyte growth factor receptor (215-226)
EVIGRGHFGCVY

SEQ ID NO: 25129 - protein, 11 aa, synthetic construct
  REGION 1..11: note = Inositol-trisphosphate 3-kinase B (875-885)
EVIGSSLLFIH

SEQ ID NO: 25130 - protein, 11 aa, synthetic construct
  REGION 1..11: note = Protein furry homolog-like(141-151)
EVIGVLAQSKF

SEQ ID NO: 25131 - protein, 10 aa, synthetic construct
  REGION 1..10: note = Transportin-3 (359-368)
EVIHGIFKAY

SEQ ID NO: 25132 - protein, 9 aa, synthetic construct
  REGION 1..9: note = ELAV-like protein 1 (101-109)
EVIKDANLY

SEQ ID NO: 25133 - protein, 12 aa, synthetic construct
  REGION 1..12: note = Exocyst complex component 3 (390-401)
EVIKLTDPSLLY

SEQ ID NO: 25134 - protein, 10 aa, synthetic construct
  REGION 1..10: note = Eukaryotic translation initiation factor 3 subunit L (50-59)
EVIKNFIQYF

SEQ ID NO: 25135 - protein, 10 aa, synthetic construct
  REGION 1..10: note = Ribosome maturation protein SBDS (156-165)
EVIKQLKEKM

SEQ ID NO: 25136 - protein, 9 aa, synthetic construct
  REGION 1..9: note = Myosin-10 (1642-1650)
EVIKQLRKL

SEQ ID NO: 25137 - protein, 9 aa, synthetic construct
  REGION 1..9: note = Exosome complex component RRP43 (268-276)
EVIKSMKPK

SEQ ID NO: 25138 - protein, 9 aa, synthetic construct
  REGION 1..9: note = Cofilin-2 (10-18)
EVIKVFNDM

SEQ ID NO: 25139 - protein, 9 aa, synthetic construct
  REGION 1..9: note = T-complex protein 1 subunit beta (512-520)
EVILRVDNI

SEQ ID NO: 25140 - protein, 10 aa, synthetic construct
  REGION 1..10: note = E3 ubiquitin-protein ligase TRIM63 (81-90)
EVIMDRHGVY

SEQ ID NO: 25141 - protein, 11 aa, synthetic construct
  REGION 1..11: note = Nucleosome-remodeling factor subunit BPTF (564-574)
EVIMKGNINNY

SEQ ID NO: 25142 - protein, 9 aa, synthetic construct
  REGION 1..9: note = Gamma-interferon-inducible protein 16 (15-23)
EVINDYHFR

SEQ ID NO: 25143 - protein, 11 aa, synthetic construct
  REGION 1..11: note = Rho guanine nucleotide exchange factor 12 (790-800)
EVINELFYTER

SEQ ID NO: 25144 - protein, 10 aa, synthetic construct
  REGION 1..10: note = Eukaryotic translation initiation factor 3 subunit G (58-67)
EVINGNIKTV

SEQ ID NO: 25145 - protein, 9 aa, synthetic construct
  REGION 1..9: note = Isoleucine-tRNA ligase, cytoplasmic (989-997)
EVINRIQKL

SEQ ID NO: 25146 - protein, 9 aa, synthetic construct
  REGION 1..9: note = Trafficking protein particle complex subunit 9 (680-688)
EVIPALPRL

SEQ ID NO: 25147 - protein, 10 aa, synthetic construct
  REGION 1..10: note = Dynactin subunit 6 (135-144)
EVIPENTVIY

SEQ ID NO: 25148 - protein, 9 aa, synthetic construct
  REGION 1..9: note = Transcriptional adapter 1 (289-297)
EVIPTHTVY

SEQ ID NO: 25149 - protein, 11 aa, synthetic construct
  REGION 1..11: note = Heme oxygenase 1 (103-113)
EVIPYTPAMQR

SEQ ID NO: 25150 - protein, 12 aa, synthetic construct
  REGION 1..12: note = Heme oxygenase 1 (103-114)
EVIPYTPAMQRY

SEQ ID NO: 25151 - protein, 13 aa, synthetic construct
  REGION 1..13: note = MAX gene-associated protein (214-226)
EVIQLNGPGVHTF

SEQ ID NO: 25152 - protein, 12 aa, synthetic construct
  REGION 1..12: note = Kalirin (827-838)
EVIQQGQDLHQY

SEQ ID NO: 25153 - protein, 9 aa, synthetic construct
  REGION 1..9: note = Cyclin-I (47-55)
EVIQWLAKL

SEQ ID NO: 25154 - protein, 9 aa, synthetic construct
  REGION 1..9: note = Protein dopey-2 (236-244)
EVIRAFYSY

SEQ ID NO: 25155 - protein, 9 aa, synthetic construct
  REGION 1..9: note = Inositol-tetrakisphosphate 1-kinase (260-268)
EVIRELSRA

SEQ ID NO: 25156 - protein, 10 aa, synthetic construct
  REGION 1..10: note = Serine/threonine-protein kinase ICK (67-76)
EVIRENDHLY

SEQ ID NO: 25157 - protein, 13 aa, synthetic construct
  REGION 1..13: note = Peptidyl-prolyl cis-trans isomerase FKBP1A (55-67)
EVIRGWEEGVAQM

SEQ ID NO: 25158 - protein, 9 aa, synthetic construct
  REGION 1..9: note = BCL2/adenovirus E1B 19 kDa protein-interacting protein 2 (170-178)
EVIRKGSIT

SEQ ID NO: 25159 - protein, 11 aa, synthetic construct
  REGION 1..11: note = BCL2/adenovirus E1B 19 kDa protein-interacting protein 2 (170-180)
EVIRKGSITEY

SEQ ID NO: 25160 - protein, 11 aa, synthetic construct
  REGION 1..11: note = General vesicular transport factor p115 (180-190)
EVIRNDGVLLL

SEQ ID NO: 25161 - protein, 12 aa, synthetic construct
  REGION 1..12: note = Mitogen-activated protein kinase kinase kinase 3 (568-579)
EVISGEGYGRKA

SEQ ID NO: 25162 - protein, 10 aa, synthetic construct
  REGION 1..10: note = Protein FRA10AC1 (165-174)
EVISGKGQFF

SEQ ID NO: 25163 - protein, 10 aa, synthetic construct
  REGION 1..10: note = Ectonucleoside triphosphate diphosphohydrolase 4 (216-225)
EVISGKQEGV

SEQ ID NO: 25164 - protein, 11 aa, synthetic construct
  REGION 1..11: note = Ectonucleoside triphosphate diphosphohydrolase 4 (216-226)
EVISGKQEGVY

SEQ ID NO: 25165 - protein, 12 aa, synthetic construct
  REGION 1..12: note = Protein CIP2A (34-45)
EVISGQKLTRLF

SEQ ID NO: 25166 - protein, 9 aa, synthetic construct
  REGION 1..9: note = Syntaxin-18 (55-63)
EVISHIGKL

SEQ ID NO: 25167 - protein, 9 aa, synthetic construct
  REGION 1..9: note = CREB3 regulatory factor (131-139)
EVISKTPTL

SEQ ID NO: 25168 - protein, 9 aa, synthetic construct
  REGION 1..9: note = Cullin-9 (584-592)
EVISKYEKA

SEQ ID NO: 25169 - protein, 9 aa, synthetic construct
  REGION 1..9: note = FAS-associated factor 2 (195-203)
EVISLINTR

SEQ ID NO: 25170 - protein, 10 aa, synthetic construct
  REGION 1..10: note = Pseudopodium-enriched atypical kinase 1 (20-29)
EVISNEGGRF

SEQ ID NO: 25171 - protein, 10 aa, synthetic construct
  REGION 1..10: note = Alpha-1,3-mannosyl-glycoprotein 4-beta-N-acetylglucosaminyltransferase B (111-120)
EVISPSPHFY

SEQ ID NO: 25172 - protein, 9 aa, synthetic construct
  REGION 1..9: note = ATP-binding cassette sub-family A member 5 (1411-1419)
EVISRITHA

SEQ ID NO: 25173 - protein, 12 aa, synthetic construct
  REGION 1..12: note = Importin subunit alpha-5 (120-131)
EVISTPGVVARF

SEQ ID NO: 25174 - protein, 9 aa, synthetic construct
  REGION 1..9: note = Ankycorbin (933-941)
EVISVYRMH

SEQ ID NO: 25175 - protein, 9 aa, synthetic construct
  REGION 1..9: note = Ataxin-2 (291-299)
EVISWGSGR

SEQ ID NO: 25176 - protein, 11 aa, synthetic construct
  REGION 1..11: note = Unconventional myosin-X (308-318)
EVITAMDVMQF

SEQ ID NO: 25177 - protein, 11 aa, synthetic construct
  REGION 1..11: note = Ras GTPase-activating protein 3 (134-144)
EVITDTGVVCH

SEQ ID NO: 25178 - protein, 10 aa, synthetic construct
  REGION 1..10: note = Nuclear export mediator factor NEMF (306-315)
EVITHELQDF

SEQ ID NO: 25179 - protein, 11 aa, synthetic construct
  REGION 1..11: note = Phospholipid scramblase 2 (86-96)
EVITLERPLRC

SEQ ID NO: 25180 - protein, 10 aa, synthetic construct
  REGION 1..10: note = A-kinase anchor protein 9 (1601-1610)
EVITNRPKGF

SEQ ID NO: 25181 - protein, 12 aa, synthetic construct
  REGION 1..12: note = Translation initiation factor eIF-2B subunit gamma (272-283)
EVIVGNDQLMEI

SEQ ID NO: 25182 - protein, 9 aa, synthetic construct
  REGION 1..9: note = Methylmalonyl-CoA mutase, mitochondrial (484-492)
EVIVGVNKY

SEQ ID NO: 25183 - protein, 9 aa, synthetic construct
  REGION 1..9: note = Insulin-like growth factor 2 mRNA-binding protein 2 (555-563)
EVIVRIIGH

SEQ ID NO: 25184 - protein, 9 aa, synthetic construct
  REGION 1..9: note = Dynactin subunit 4 (424-432)
EVIWLTQHV

SEQ ID NO: 25185 - protein, 11 aa, synthetic construct
  REGION 1..11: note = Actin-related protein 8 (209-219)
EVIWSHAIQKY

SEQ ID NO: 25186 - protein, 9 aa, synthetic construct
  REGION 1..9: note = BTB/POZ domain-containing protein 10 (398-406)
EVIYNYVQR

SEQ ID NO: 25187 - protein, 9 aa, synthetic construct
  REGION 1..9: note = Ras GTPase-activating-like protein IQGAP1 (1602-1610)
EVKAKFMGV

SEQ ID NO: 25188 - protein, 9 aa, synthetic construct
  REGION 1..9: note = E3 ubiquitin-protein ligase CBL-B (290-298)
EVKARLQKY

SEQ ID NO: 25189 - protein, 11 aa, synthetic construct
  REGION 1..11: note = F-box only protein 22 (380-390)
EVKDDDLFHSY

SEQ ID NO: 25190 - protein, 11 aa, synthetic construct
  REGION 1..11: note = Cation-independent mannose-6-phosphate receptor (1228-1238)
EVKDPRHGNLY

SEQ ID NO: 25191 - protein, 10 aa, synthetic construct
  REGION 1..10: note = Centromere protein F (1197-1206)
EVKEISLDSY

SEQ ID NO: 25192 - protein, 9 aa, synthetic construct
  REGION 1..9: note = Apolipoprotein E (249-257)
EVKEQVAEV

SEQ ID NO: 25193 - protein, 9 aa, synthetic construct
  REGION 1..9: note = Ras association domain-containing protein 8 (290-298)
EVKGKIGKV

SEQ ID NO: 25194 - protein, 10 aa, synthetic construct
  REGION 1..10: note = Prolyl endopeptidase-like (114-123)
EVKHGGFVYY

SEQ ID NO: 25195 - protein, 9 aa, synthetic construct
  REGION 1..9: note = Ras association domain-containing protein 2 (297-305)
EVKKLMRKY

SEQ ID NO: 25196 - protein, 9 aa, synthetic construct
  REGION 1..9: note = Ethylmalonyl-CoA decarboxylase (36-44)
EVKKTLQQF

SEQ ID NO: 25197 - protein, 9 aa, synthetic construct
  REGION 1..9: note = Proteasome activator complex subunit 3 (10-18)
EVKLKVDSF

SEQ ID NO: 25198 - protein, 9 aa, synthetic construct
  REGION 1..9: note = Integrator complex subunit 11 (350-358)
EVKMQVEYM

SEQ ID NO: 25199 - protein, 9 aa, synthetic construct
  REGION 1..9: note = Elongator complex protein 1 (50-58)
EVKNEVSLV

SEQ ID NO: 25200 - protein, 15 aa, synthetic construct
  REGION 1..15: note = Delta-1-pyrroline-5-carboxylate synthase (320-334)
EVKPAGPTVEQQGEM

SEQ ID NO: 25201 - protein, 16 aa, synthetic construct
  REGION 1..16: note = Delta-1-pyrroline-5-carboxylate synthase (320-335)
EVKPAGPTVEQQGEMA

SEQ ID NO: 25202 - protein, 9 aa, synthetic construct
  REGION 1..9: note = Ras-related GTP-binding protein D (60-68)
EVKPRILLM

SEQ ID NO: 25203 - protein, 9 aa, synthetic construct
  REGION 1..9: note = Histone deacetylase 9 (142-150)
EVKQKLQEF

SEQ ID NO: 25204 - protein, 9 aa, synthetic construct
  REGION 1..9: note = Periodic tryptophan protein 1 homolog (31-39)
EVKRLIAEA

SEQ ID NO: 25205 - protein, 9 aa, synthetic construct
  REGION 1..9: note = Pachytene checkpoint protein 2 homolog (146-154)
EVKSHLLDY

SEQ ID NO: 25206 - protein, 9 aa, synthetic construct
  REGION 1..9: note = Apoptosis-inducing factor 1, mitochondrial (276-284)
EVKSRTTLF

SEQ ID NO: 25207 - protein, 9 aa, synthetic construct
  REGION 1..9: note = Chloride intracellular channel protein 4 (83-91)
EVKTDVNKI

SEQ ID NO: 25208 - protein, 9 aa, synthetic construct
  REGION 1..9: note = Kinetochore-associated protein DSN1 homolog (235-243)
EVKVEPMTY

SEQ ID NO: 25209 - protein, 9 aa, synthetic construct
  REGION 1..9: note = Glycerol-3-phosphate dehydrogenase, mitochondrial (410-418)
EVKYGIKEY

SEQ ID NO: 25210 - protein, 9 aa, synthetic construct
  REGION 1..9: note = Bifunctional coenzyme A synthase (63-71)
EVLDFITHL

SEQ ID NO: 25211 - protein, 10 aa, synthetic construct
  REGION 1..10: note = Insulin-like growth factor 2 mRNA-binding protein 2 (95-104)
EVLDGLLAQY

SEQ ID NO: 25212 - protein, 10 aa, synthetic construct
  REGION 1..10: note = Serine/threonine-protein kinase PRP4 homolog (170-179)
EVLDKRYNVY

SEQ ID NO: 25213 - protein, 11 aa, synthetic construct
  REGION 1..11: note = Estradiol 17-beta-dehydrogenase 1 (203-213)
EVLDRTDIHTF

SEQ ID NO: 25214 - protein, 10 aa, synthetic construct
  REGION 1..10: note = Receptor-type protein tyrosine phosphatase beta (1332-1341)
EVLDSHIHAY

SEQ ID NO: 25215 - protein, 10 aa, synthetic construct
  REGION 1..10: note = Insulin-like growth factor 2 mRNA-binding protein 3 (95-104)
EVLDSLLVQY

SEQ ID NO: 25216 - protein, 9 aa, synthetic construct
  REGION 1..9: note = StAR-related lipid transfer protein 7, mitochondrial (136-144)
EVLHWVTHF

SEQ ID NO: 25217 - protein, 10 aa, synthetic construct
  REGION 1..10: note = Ubiquitin-associated protein 1-like (34-43)
EVLLGSMHDF

SEQ ID NO: 25218 - protein, 10 aa, synthetic construct
  REGION 1..10: note = Mitofusin-2 (308-317)
EVLNARIQKA

SEQ ID NO: 25219 - protein, 10 aa, synthetic construct
  REGION 1..10: note = Exportin-6 (272-281)
EVLNRIQFRY

SEQ ID NO: 25220 - protein, 10 aa, synthetic construct
  REGION 1..10: note = Ancient ubiquitous protein 1 (306-315)
EVLPHVPLGV

SEQ ID NO: 25221 - protein, 10 aa, synthetic construct
  REGION 1..10: note = Spectrin alpha chain, non-erythrocytic 1 (185-194)
EVLQKKFEEF

SEQ ID NO: 25222 - protein, 9 aa, synthetic construct
  REGION 1..9: note = Importin-7 (378-386)
EVLQKTMGF

SEQ ID NO: 25223 - protein, 9 aa, synthetic construct
  REGION 1..9: note = Class E basic helix-loop-helix protein 41 (141-149)
EVLQYLSRF

SEQ ID NO: 25224 - protein, 9 aa, synthetic construct
  REGION 1..9: note = MAGEC3 protein (192-200)
EVLSAIGVC

SEQ ID NO: 25225 - protein, 11 aa, synthetic construct
  REGION 1..11: note = Serine/threonine-protein kinase Nek2 (9-19)
EVLYTIGTGSY

SEQ ID NO: 25226 - protein, 11 aa, synthetic construct
  REGION 1..11: note = Ly6/PLAUR domain-containing protein 1 isoform c (73-83)
EVMEQSAGIMY

SEQ ID NO: 25227 - protein, 10 aa, synthetic construct
  REGION 1..10: note = Protein FAM118A (215-224)
EVMEVLQNLY

SEQ ID NO: 25228 - protein, 12 aa, synthetic construct
  REGION 1..12: note = Proteasome maturation protein (125-136)
EVMGEPHLMVEY

SEQ ID NO: 25229 - protein, 10 aa, synthetic construct
  REGION 1..10: note = Isoprenoid synthase domain-containing protein isoform X7 (103-112)
EVMKSIIQKY

SEQ ID NO: 25230 - protein, 10 aa, synthetic construct
  REGION 1..10: note = Alkyldihydroxyacetonephosphate synthase, peroxisomal (89-98)
EVMKWNGWGY

SEQ ID NO: 25231 - protein, 11 aa, synthetic construct
  REGION 1..11: note = Protein-L-isoaspartate(D-aspartate) O-methyltransferase (30-40)
EVMLATDRSHY

SEQ ID NO: 25232 - protein, 10 aa, synthetic construct
  REGION 1..10: note = Prolyl 3-hydroxylase 1 (335-344)
EVMNQNLAYY

SEQ ID NO: 25233 - protein, 9 aa, synthetic construct
  REGION 1..9: note = tRNA-dihydrouridine(20) synthase (NAD(P)+)-like (227-235)
EVMQKYIRY

SEQ ID NO: 25234 - protein, 10 aa, synthetic construct
  REGION 1..10: note = Actin-related protein 2/3 complex subunit 3 (127-136)
EVMRAYLQQL

SEQ ID NO: 25235 - protein, 9 aa, synthetic construct
  REGION 1..9: note = Transcription factor SOX-10 (284-292)
EVMSNMETF

SEQ ID NO: 25236 - protein, 10 aa, synthetic construct
  REGION 1..10: note = Mitofusin-2 (23-32)
EVNASPLKHF

SEQ ID NO: 25237 - protein, 11 aa, synthetic construct
  REGION 1..11: note = Procollagen C-endopeptidase enhancer 2 (220-230)
EVNDARRIGKY

SEQ ID NO: 25238 - protein, 9 aa, synthetic construct
  REGION 1..9: note = Ankycorbin (840-848)
EVNELLQKF

SEQ ID NO: 25239 - protein, 9 aa, synthetic construct
  REGION 1..9: note = mRNA turnover protein 4 homolog (111-119)
EVNEWFTKY

SEQ ID NO: 25240 - protein, 10 aa, synthetic construct
  REGION 1..10: note = Ethanolamine-phosphate cytidylyltransferase (254-263)
EVNHYKGKNY

SEQ ID NO: 25241 - protein, 9 aa, synthetic construct
  REGION 1..9: note = Long-chain-fatty-acid-CoA ligase 4 (89-97)
EVNRRVNNF

SEQ ID NO: 25242 - protein, 9 aa, synthetic construct
  REGION 1..9: note = Serpin B8 (76-84)
EVNRTGTQY

SEQ ID NO: 25243 - protein, 9 aa, synthetic construct
  REGION 1..9: note = T-complex protein 1 subunit zeta (101-109)
EVNSGFFYK

SEQ ID NO: 25244 - protein, 9 aa, synthetic construct
  REGION 1..9: note = Sodium/potassium/calcium exchanger 5 (372-380)
EVNSRGLTY

SEQ ID NO: 25245 - protein, 10 aa, synthetic construct
  REGION 1..10: note = Putative PIP5K1A and PSMD4-like protein (632-641)
EVNTEKLTAF

SEQ ID NO: 25246 - protein, 11 aa, synthetic construct
  REGION 1..11: note = FAST kinase domain-containing protein 1 (204-214)
EVNVAKSIAKF

SEQ ID NO: 25247 - protein, 9 aa, synthetic construct
  REGION 1..9: note = Protein NATD1 (59-67)
EVPDAYRGR

SEQ ID NO: 25248 - protein, 9 aa, synthetic construct
  REGION 1..9: note = Thioredoxin-like protein 4A (65-73)
EVPDFNKMY

SEQ ID NO: 25249 - protein, 12 aa, synthetic construct
  REGION 1..12: note = Cyclin-A2 (174-185)
EVPDYHEDIHTY

SEQ ID NO: 25250 - protein, 10 aa, synthetic construct
  REGION 1..10: note = Protein FAM135B (80-89)
EVPINDAVVF

SEQ ID NO: 25251 - protein, 9 aa, synthetic construct
  REGION 1..9: note = Serine/threonine-protein kinase 36 (1232-1240)
EVPQRLLEM

SEQ ID NO: 25252 - protein, 10 aa, synthetic construct
  REGION 1..10: note = La-related protein 1 (262-271)
EVPREKLASR

SEQ ID NO: 25253 - protein, 10 aa, synthetic construct
  REGION 1..10: note = Meckel syndrome type 1 protein (150-159)
EVPSFLVERM

SEQ ID NO: 25254 - protein, 10 aa, synthetic construct
  REGION 1..10: note = Copine-1 (173-182)
EVPTQLVSYF

SEQ ID NO: 25255 - protein, 13 aa, synthetic construct
  REGION 1..13: note = Macrophage-capping protein (97-109)
EVQGNESDLFMSY

SEQ ID NO: 25256 - protein, 9 aa, synthetic construct
  REGION 1..9: note = 26S protease regulatory subunit 8 (142-150)
EVQRTMLEL

SEQ ID NO: 25257 - protein, 9 aa, synthetic construct
  REGION 1..9: note = Coatomer subunit gamma-2 (523-531)
EVRDRATFY

SEQ ID NO: 25258 - protein, 10 aa, synthetic construct
  REGION 1..10: note = Ubiquitin-protein ligase E3C (567-576)
EVREEYITAF

SEQ ID NO: 25259 - protein, 10 aa, synthetic construct
  REGION 1..10: note = Lactadherin (36-45)
EVRGDVFPSY

SEQ ID NO: 25260 - protein, 9 aa, synthetic construct
  REGION 1..9: note = Spindle and kinetochore-associated protein 1 (243-251)
EVRGGGLTR

SEQ ID NO: 25261 - protein, 10 aa, synthetic construct
  REGION 1..10: note = Spindle and kinetochore-associated protein 1 (243-252)
EVRGGGLTRY

SEQ ID NO: 25262 - protein, 10 aa, synthetic construct
  REGION 1..10: note = GTP-binding protein 1 (445-454)
EVRGGQTASF

SEQ ID NO: 25263 - protein, 9 aa, synthetic construct
  REGION 1..9: note = Glutaredoxin-3 (140-148)
EVRQGLKAY

SEQ ID NO: 25264 - protein, 10 aa, synthetic construct
  REGION 1..10: note = Fatty acid synthase (674-683)
EVRTGGMAFH

SEQ ID NO: 25265 - protein, 9 aa, synthetic construct
  REGION 1..9: note = Putative butyrophilin subfamily 2 member A3 (62-70)
EVRWFQSQF

SEQ ID NO: 25266 - protein, 9 aa, synthetic construct
  REGION 1..9: note = Butyrophilin subfamily 2 member A1 (63-71)
EVRWFRSQF

SEQ ID NO: 25267 - protein, 10 aa, synthetic construct
  REGION 1..10: note = Interleukin-1 receptor-associated kinase 4 (159-168)
EVSDTRFHSF

SEQ ID NO: 25268 - protein, 9 aa, synthetic construct
  REGION 1..9: note = E3 ubiquitin-protein ligase UBR5 (24-32)
EVSEKLNKY

SEQ ID NO: 25269 - protein, 9 aa, synthetic construct
  REGION 1..9: note = Protein FAM111B (228-236)
EVSGKVLEM

SEQ ID NO: 25270 - protein, 11 aa, synthetic construct
  REGION 1..11: note = Cytosolic carboxypeptidase 1 (764-774)
EVSGMRPGVAY

SEQ ID NO: 25271 - protein, 9 aa, synthetic construct
  REGION 1..9: note = Alpha-actinin-1 (574-582)
EVSKIVQTY

SEQ ID NO: 25272 - protein, 9 aa, synthetic construct
  REGION 1..9: note = cGMP-inhibited 3',5'-cyclic phosphodiesterase B (656-664)
EVSLDLILV

SEQ ID NO: 25273 - protein, 11 aa, synthetic construct
  REGION 1..11: note = Growth hormone-inducible transmembrane protein (303-313)
EVSPMYGVQKY

SEQ ID NO: 25274 - protein, 9 aa, synthetic construct
  REGION 1..9: note = NADH-ubiquinone oxidoreductase 75 kDa subunit, mitochondrial (537-545)
EVSPNLVRY

SEQ ID NO: 25275 - protein, 10 aa, synthetic construct
  REGION 1..10: note = Proton myo-inositol cotransporter (179-188)
EVSPPNLRGR

SEQ ID NO: 25276 - protein, 9 aa, synthetic construct
  REGION 1..9: note = Abnormal spindle-like microcephaly-associated protein (322-330)
EVSPRIPEC

SEQ ID NO: 25277 - protein, 10 aa, synthetic construct
  REGION 1..10: note = AP-1 complex subunit beta-1 (934-943)
EVSQHVYQAY

SEQ ID NO: 25278 - protein, 9 aa, synthetic construct
  REGION 1..9: note = Transcription factor TFIIIB component B'' homolog (1376-1384)
EVSSHFSHF

SEQ ID NO: 25279 - protein, 10 aa, synthetic construct
  REGION 1..10: note = Retinoblastoma-like protein 1 (130-139)
EVSTVIFKKY

SEQ ID NO: 25280 - protein, 11 aa, synthetic construct
  REGION 1..11: note = Xenotropic and polytropic retrovirus receptor 1 (40-50)
EVTDEDTVKRY

SEQ ID NO: 25281 - protein, 10 aa, synthetic construct
  REGION 1..10: note = U3 small nucleolar ribonucleoprotein protein IMP3 (22-31)
EVTDHNLHEL

SEQ ID NO: 25282 - protein, 9 aa, synthetic construct
  REGION 1..9: note = Ankyrin repeat domain-containing protein 54 (279-287)
EVTDLLASF

SEQ ID NO: 25283 - protein, 12 aa, synthetic construct
  REGION 1..12: note = Protein SET (111-122)
EVTEFEDIKSGY

SEQ ID NO: 25284 - protein, 9 aa, synthetic construct
  REGION 1..9: note = Prostaglandin E synthase 2 (201-209)
EVTEFGNKY

SEQ ID NO: 25285 - protein, 9 aa, synthetic construct
  REGION 1..9: note = Zinc finger CCHC domain-containing protein 14 (136-144)
EVTEFISKL

SEQ ID NO: 25286 - protein, 9 aa, synthetic construct
  REGION 1..9: note = Beta-parvin (274-282)
EVTELETQF

SEQ ID NO: 25287 - protein, 9 aa, synthetic construct
  REGION 1..9: note = Tankyrase-2 (358-366)
EVTELLVKH

SEQ ID NO: 25288 - protein, 9 aa, synthetic construct
  REGION 1..9: note = RNA-binding protein 26 (806-814)
EVTELRRKY

SEQ ID NO: 25289 - protein, 9 aa, synthetic construct
  REGION 1..9: note = Ribonucleoprotein PTB-binding 2 (177-185)
EVTGHSKGY

SEQ ID NO: 25290 - protein, 10 aa, synthetic construct
  REGION 1..10: note = Integrin alpha-X (448-457)
EVTGTQIGSY

SEQ ID NO: 25291 - protein, 9 aa, synthetic construct
  REGION 1..9: note = Catalase (10-18)
EVTHDITKY

SEQ ID NO: 25292 - protein, 9 aa, synthetic construct
  REGION 1..9: note = Plectin (3906-3914)
EVTKNLQKF

SEQ ID NO: 25293 - protein, 9 aa, synthetic construct
  REGION 1..9: note = EH domain-binding protein 1 (186-194)
EVTKNYRGV

SEQ ID NO: 25294 - protein, 9 aa, synthetic construct
  REGION 1..9: note = Apoptosis-inducing factor 2 (169-177)
EVTLIHSQV

SEQ ID NO: 25295 - protein, 11 aa, synthetic construct
  REGION 1..11: note = Ankyrin repeat and KH domain-containing protein 1 (1670-1680)
EVTPNSLSTSY

SEQ ID NO: 25296 - protein, 10 aa, synthetic construct
  REGION 1..10: note = Teneurin-4 (87-96)
EVTPPHGTLY

SEQ ID NO: 25297 - protein, 9 aa, synthetic construct
  REGION 1..9: note = Translocon-associated protein subunit gamma (99-107)
EVTRKLSEA

SEQ ID NO: 25298 - protein, 9 aa, synthetic construct
  REGION 1..9: note = FAD synthase (63-71)
EVTSFSNRF

SEQ ID NO: 25299 - protein, 9 aa, synthetic construct
  REGION 1..9: note = Probable ATP-dependent RNA helicase DDX5 (30-38)
EVTTARSQF

SEQ ID NO: 25300 - protein, 9 aa, synthetic construct
  REGION 1..9: note = EH domain-binding protein 1-like protein 1 (1049-1057)
EVTTGYRGV

SEQ ID NO: 25301 - protein, 9 aa, synthetic construct
  REGION 1..9: note = Formin-binding protein 4 (242-250)
EVTWELPQY

SEQ ID NO: 25302 - protein, 9 aa, synthetic construct
  REGION 1..9: note = NGFI-A-binding protein 1 (307-315)
EVTYKYTYR

SEQ ID NO: 25303 - protein, 10 aa, synthetic construct
  REGION 1..10: note = Serine/threonine-protein kinase TAO2 (52-61)
EVVAIKKMSY

SEQ ID NO: 25304 - protein, 10 aa, synthetic construct
  REGION 1..10: note = Phosphatidate phosphatase LPIN1 (844-853)
EVVDHVFPLL

SEQ ID NO: 25305 - protein, 9 aa, synthetic construct
  REGION 1..9: note = Glutamate decarboxylase 1 (118-126)
EVVDILLNY

SEQ ID NO: 25306 - protein, 10 aa, synthetic construct
  REGION 1..10: note = Nardilysin (988-997)
EVVDKKIEEF

SEQ ID NO: 25307 - protein, 9 aa, synthetic construct
  REGION 1..9: note = Lethal(3)malignant brain tumor-like protein 3 (457-465)
EVVDKRNPM

SEQ ID NO: 25308 - protein, 13 aa, synthetic construct
  REGION 1..13: note = Contactin-associated protein-like 4 (182-194)
EVVDLDGKSSLLY

SEQ ID NO: 25309 - protein, 9 aa, synthetic construct
  REGION 1..9: note = Translation initiation factor eIF-2B subunit gamma (116-124)
EVVDLFRAY

SEQ ID NO: 25310 - protein, 11 aa, synthetic construct
  REGION 1..11: note = Translation initiation factor eIF-2B subunit gamma (116-126)
EVVDLFRAYDA

SEQ ID NO: 25311 - protein, 9 aa, synthetic construct
  REGION 1..9: note = Collagen triple helix repeat-containing protein 1 (46-54)
EVVDLYNGM

SEQ ID NO: 25312 - protein, 11 aa, synthetic construct
  REGION 1..11: note = Unconventional myosin-X (2025-2035)
EVVDVAKLMKA

SEQ ID NO: 25313 - protein, 12 aa, synthetic construct
  REGION 1..12: note = Unconventional myosin-X (2025-2036)
EVVDVAKLMKAY

SEQ ID NO: 25314 - protein, 11 aa, synthetic construct
  REGION 1..11: note = Gephyrin (726-736)
EVVDVMVIGRL

SEQ ID NO: 25315 - protein, 9 aa, synthetic construct
  REGION 1..9: note = Guanine nucleotide-binding protein-like 3-like protein (181-189)
EVVEKWLDY

SEQ ID NO: 25316 - protein, 9 aa, synthetic construct
  REGION 1..9: note = Kinetochore protein Nuf2 (271-279)
EVVEKYEIY

SEQ ID NO: 25317 - protein, 9 aa, synthetic construct
  REGION 1..9: note = TBC1 domain family member 13 (209-217)
EVVERILFI

SEQ ID NO: 25318 - protein, 11 aa, synthetic construct
  REGION 1..11: note = Putative ATP-dependent RNA helicase TDRD9 (906-916)
EVVEVGHFWGY

SEQ ID NO: 25319 - protein, 10 aa, synthetic construct
  REGION 1..10: note = Cytosolic non-specific dipeptidase (351-360)
EVVGEQVTSY

SEQ ID NO: 25320 - protein, 9 aa, synthetic construct
  REGION 1..9: note = Nuclear pore complex protein Nup160 (1025-1033)
EVVGIIESR

SEQ ID NO: 25321 - protein, 9 aa, synthetic construct
  REGION 1..9: note = Pseudopodium-enriched atypical kinase 1 (303-311)
EVVGKIRSL

SEQ ID NO: 25322 - protein, 11 aa, synthetic construct
  REGION 1..11: note = DCN1-like protein 5 (65-75)
EVVGPEGMEKF

SEQ ID NO: 25323 - protein, 10 aa, synthetic construct
  REGION 1..10: note = 3 beta-hydroxysteroid dehydrogenase type 7 (131-140)
EVVGPNTKGH

SEQ ID NO: 25324 - protein, 9 aa, synthetic construct
  REGION 1..9: note = Tetratricopeptide repeat protein 5 (59-67)
EVVGSVQGK

SEQ ID NO: 25325 - protein, 11 aa, synthetic construct
  REGION 1..11: note = Diacylglycerol kinase theta (848-858)
EVVGVTGVVHM

SEQ ID NO: 25326 - protein, 9 aa, synthetic construct
  REGION 1..9: note = WD repeat-containing protein 35 (735-743)
EVVGYFGRF

SEQ ID NO: 25327 - protein, 9 aa, synthetic construct
  REGION 1..9: note = Signal transducer and activator of transcription 1-alpha/beta (212-220)
EVVHKIIEL

SEQ ID NO: 25328 - protein, 9 aa, synthetic construct
  REGION 1..9: note = Hemicentin-1 (5-13)
EVVHTVFLF

SEQ ID NO: 25329 - protein, 12 aa, synthetic construct
  REGION 1..12: note = Midasin (1181-1192)
EVVKAHPRFMLF

SEQ ID NO: 25330 - protein, 9 aa, synthetic construct
  REGION 1..9: note = Heat shock protein HSP 90-beta (126-134)
EVVKKHSQF

SEQ ID NO: 25331 - protein, 9 aa, synthetic construct
  REGION 1..9: note = Peroxisomal multifunctional enzyme type 2 (641-649)
EVVKKVNAV

SEQ ID NO: 25332 - protein, 9 aa, synthetic construct
  REGION 1..9: note = 39S ribosomal protein L21, mitochondrial (78-86)
EVVKKVNEM

SEQ ID NO: 25333 - protein, 9 aa, synthetic construct
  REGION 1..9: note = Non-canonical poly(A) RNA polymerase PAPD7 (53-61)
EVVKRIETV

SEQ ID NO: 25334 - protein, 13 aa, synthetic construct
  REGION 1..13: note = Radial spoke head 10 homolog B2 (158-170)
EVVNGMRNGFGMF

SEQ ID NO: 25335 - protein, 11 aa, synthetic construct
  REGION 1..11: note = DNA replication licensing factor MCM7 (92-102)
EVVNKDVLDVY

SEQ ID NO: 25336 - protein, 9 aa, synthetic construct
  REGION 1..9: note = Unconventional myosin-Ib (290-298)
EVVNKINRA

SEQ ID NO: 25337 - protein, 14 aa, synthetic construct
  REGION 1..14: note = Protein ELYS (55-68)
EVVNSITGERLSAY

SEQ ID NO: 25338 - protein, 9 aa, synthetic construct
  REGION 1..9: note = Transcription factor SOX-13 (110-118)
EVVPAIEKL

SEQ ID NO: 25339 - protein, 9 aa, synthetic construct
  REGION 1..9: note = Cathepsin K (85-93)
EVVQKMTGL

SEQ ID NO: 25340 - protein, 9 aa, synthetic construct
  REGION 1..9: note = Protein C12orf4 (366-374)
EVVQQVVLY

SEQ ID NO: 25341 - protein, 9 aa, synthetic construct
  REGION 1..9: note = Peptidylprolyl isomerase domain and WD repeat-containing protein 1 (616-624)
EVVQRISNV

SEQ ID NO: 25342 - protein, 15 aa, synthetic construct
  REGION 1..15: note = Proteasome subunit alpha type-7 (197-211)
EVVQSGGKNIELAVM

SEQ ID NO: 25343 - protein, 9 aa, synthetic construct
  REGION 1..9: note = E3 ubiquitin-protein ligase BRE1B (40-48)
EVVRETGEY

SEQ ID NO: 25344 - protein, 9 aa, synthetic construct
  REGION 1..9: note = Melanoma-associated antigen 12 (168-176)
EVVRIGHLY

SEQ ID NO: 25345 - protein, 9 aa, synthetic construct
  REGION 1..9: note = Unconventional myosin-IXb (955-963)
EVVRKILLL

SEQ ID NO: 25346 - protein, 10 aa, synthetic construct
  REGION 1..10: note = Cytoskeleton-associated protein 5 (88-97)
EVVSGVVSKV

SEQ ID NO: 25347 - protein, 9 aa, synthetic construct
  REGION 1..9: note = Ubiquitin-conjugating enzyme E2 variant 3 (232-240)
EVVSHTSQV

SEQ ID NO: 25348 - protein, 11 aa, synthetic construct
  REGION 1..11: note = RNA demethylase ALKBH5 (109-119)
EVVSRAEKGLY

SEQ ID NO: 25349 - protein, 10 aa, synthetic construct
  REGION 1..10: note = Integrator complex subunit 1 (1714-1723)
EVVSSTVRAV

SEQ ID NO: 25350 - protein, 11 aa, synthetic construct
  REGION 1..11: note = Cullin-3 (55-65)
EVVTEHLINKV

SEQ ID NO: 25351 - protein, 11 aa, synthetic construct
  REGION 1..11: note = Ankyrin repeat and zinc finger domain-containing protein 1 (16-26)
EVVTHKTFHRY

SEQ ID NO: 25352 - protein, 10 aa, synthetic construct
  REGION 1..10: note = Cyclin-dependent kinase 2 (224-233)
EVVWPGVTSM

SEQ ID NO: 25353 - protein, 13 aa, synthetic construct
  REGION 1..13: note = Contactin-associated protein-like 3B (182-194)
EVVYFDGQSALLY

SEQ ID NO: 25354 - protein, 9 aa, synthetic construct
  REGION 1..9: note = DDB1- and CUL4-associated factor 7 (176-184)
EVYDIAFSR

SEQ ID NO: 25355 - protein, 10 aa, synthetic construct
  REGION 1..10: note = DDB1- and CUL4-associated factor 7 (176-185)
EVYDIAFSRA

SEQ ID NO: 25356 - protein, 12 aa, synthetic construct
  REGION 1..12: note = Melanotransferrin (97-108)
EVYDQEVGTSYY

SEQ ID NO: 25357 - protein, 10 aa, synthetic construct
  REGION 1..10: note = Nuclear pore complex protein Nup155 (1301-1310)
EVYDQLFKSR

SEQ ID NO: 25358 - protein, 9 aa, synthetic construct
  REGION 1..9: note = Protein polybromo-1 (670-678)
EVYEAVKNY

SEQ ID NO: 25359 - protein, 10 aa, synthetic construct
  REGION 1..10: note = DNA-directed RNA polymerase, mitochondrial (459-468)
EVYEGRFSLY

SEQ ID NO: 25360 - protein, 11 aa, synthetic construct
  REGION 1..11: note = DNA-directed RNA polymerase, mitochondrial (459-469)
EVYEGRFSLYP

SEQ ID NO: 25361 - protein, 10 aa, synthetic construct
  REGION 1..10: note = Tyrosine-protein kinase ABL1 (255-264)
EVYEGVWKKY

SEQ ID NO: 25362 - protein, 10 aa, synthetic construct
  REGION 1..10: note = Protein lin-7 homolog C (52-61)
EVYEHVYETV

SEQ ID NO: 25363 - protein, 9 aa, synthetic construct
  REGION 1..9: note = Zinc finger protein 292 (337-345)
EVYEKVVDY

SEQ ID NO: 25364 - protein, 11 aa, synthetic construct
  REGION 1..11: note = Muscular LMNA-interacting protein (350-360)
EVYEPNPFSKY

SEQ ID NO: 25365 - protein, 9 aa, synthetic construct
  REGION 1..9: note = rRNA methyltransferase 2, mitochondrial (229-237)
EVYFLATQY

SEQ ID NO: 25366 - protein, 10 aa, synthetic construct
  REGION 1..10: note = Large neutral amino acids transporter small subunit 1 (122-131)
EVYGSLPAFL

SEQ ID NO: 25367 - protein, 12 aa, synthetic construct
  REGION 1..12: note = Procollagen-lysine,2-oxoglutarate 5-dioxygenase 2 (336-347)
EVYHEKDIKVFF

SEQ ID NO: 25368 - protein, 10 aa, synthetic construct
  REGION 1..10: note = Nucleoside diphosphate kinase 7 (250-259)
EVYKGVVTEY

SEQ ID NO: 25369 - protein, 11 aa, synthetic construct
  REGION 1..11: note = Ras GTPase-activating-like protein IQGAP3 (1166-1176)
EVYKVVGNLLY

SEQ ID NO: 25370 - protein, 10 aa, synthetic construct
  REGION 1..10: note = Kinesin-like protein KIF14 (5-14)
EVYNEKIHDL

SEQ ID NO: 25371 - protein, 10 aa, synthetic construct
  REGION 1..10: note = Kinesin-like protein KIF18B (166-175)
EVYNEQIHDL

SEQ ID NO: 25372 - protein, 10 aa, synthetic construct
  REGION 1..10: note = Kinesin-like protein KIF18A (161-170)
EVYNEQIRDL

SEQ ID NO: 25373 - protein, 9 aa, synthetic construct
  REGION 1..9: note = F-box only protein 32 (44-52)
EVYNKENLF

SEQ ID NO: 25374 - protein, 13 aa, synthetic construct
  REGION 1..13: note = Tyrosinase (409-421)
EVYPEANAPIGHN

SEQ ID NO: 25375 - protein, 12 aa, synthetic construct
  REGION 1..12: note = Ubiquitin carboxyl-terminal hydrolase 11 (150-161)
EVYPVELLLVRH

SEQ ID NO: 25376 - protein, 9 aa, synthetic construct
  REGION 1..9: note = E3 ubiquitin-protein ligase UBR2 (37-45)
EVYQHLAHY

SEQ ID NO: 25377 - protein, 10 aa, synthetic construct
  REGION 1..10: note = Small nuclear ribonucleoprotein Sm D3 (26-35)
EVYRGKLIEA

SEQ ID NO: 25378 - protein, 10 aa, synthetic construct
  REGION 1..10: note = Transmembrane protein 201 (151-160)
EVYRHHLEQM

SEQ ID NO: 25379 - protein, 11 aa, synthetic construct
  REGION 1..11: note = Pre-mRNA-processing-splicing factor 8 (2324-2334)
EVYSADREDLY

SEQ ID NO: 25380 - protein, 11 aa, synthetic construct
  REGION 1..11: note = Semaphorin-7A (114-124)
EVYSTIRKQEY

SEQ ID NO: 25381 - protein, 11 aa, synthetic construct
  REGION 1..11: note = cAMP-dependent protein kinase type I-alpha regulatory subunit (103-113)
EVYTEEDAASY

SEQ ID NO: 25382 - protein, 10 aa, synthetic construct
  REGION 1..10: note = Arf-GAP with Rho-GAP domain, ANK repeat and PH domain-containing protein 1 (574-583)
EVYTEGERLY

SEQ ID NO: 25383 - protein, 10 aa, synthetic construct
  REGION 1..10: note = DNA repair endonuclease XPF (99-108)
EVYTQGGVIF

SEQ ID NO: 25384 - protein, 10 aa, synthetic construct
  REGION 1..10: note = Signal transducer and activator of transcription 2 (831-840)
EVYVSRPSHF

SEQ ID NO: 25385 - protein, 11 aa, synthetic construct
  REGION 1..11: note = Signal transducer and activator of transcription 2 (831-841)
EVYVSRPSHFY

SEQ ID NO: 25386 - protein, 9 aa, synthetic construct
  REGION 1..9: note = Phospholipase A-2-activating protein (168-176)
EVYYGHTNY

SEQ ID NO: 25387 - protein, 11 aa, synthetic construct
  REGION 1..11: note = Phospholipase A-2-activating protein (168-178)
EVYYGHTNYIY

SEQ ID NO: 25388 - protein, 9 aa, synthetic construct
  REGION 1..9: note = Protein virilizer homolog (485-493)
FADHVSSSL

SEQ ID NO: 25389 - protein, 9 aa, synthetic construct
  REGION 1..9: note = CLIP-associating protein 1 (877-885)
FADPHSKRV

SEQ ID NO: 25390 - protein, 10 aa, synthetic construct
  REGION 1..10: note = CLIP-associating protein 1 (877-886)
FADPHSKRVF

SEQ ID NO: 25391 - protein, 9 aa, synthetic construct
  REGION 1..9: note = Calmodulin-regulated spectrin-associated protein 2 (673-681)
FAEQKFRKL

SEQ ID NO: 25392 - protein, 10 aa, synthetic construct
  REGION 1..10: note = Sorting nexin-17 (460-469)
FAFEGIGDED

SEQ ID NO: 25393 - protein, 9 aa, synthetic construct
  REGION 1..9: note = Melanoma-associated antigen C1 (1035-1043)
FAFGEPREL

SEQ ID NO: 25394 - protein, 16 aa, synthetic construct
  REGION 1..16: note = POTE ankyrin domain family member F (721-736)
FAGDDAPRAVFPSIVG

SEQ ID NO: 25395 - protein, 11 aa, synthetic construct
  REGION 1..11: note = Up-regulator of cell proliferation (600-610)
FAHFPGLASEL

SEQ ID NO: 25396 - protein, 9 aa, synthetic construct
  REGION 1..9: note = Glycerol-3-phosphate dehydrogenase, mitochondrial (27-35)
FAHYRRKQM

SEQ ID NO: 25397 - protein, 8 aa, synthetic construct
  REGION 1..8: note = Alpha-catulin (24-31)
FALDSGLE

SEQ ID NO: 25398 - protein, 11 aa, synthetic construct
  REGION 1..11: note = Melanocyte protein PMEL (247-257)
FALQLHDPSGY

SEQ ID NO: 25399 - protein, 10 aa, synthetic construct
  REGION 1..10: note = Eukaryotic translation initiation factor 3 subunit E (53-62)
FAMDVYKNLY

SEQ ID NO: 25400 - protein, 9 aa, synthetic construct
  REGION 1..9: note = NHL repeat-containing protein 2 (407-415)
FAQPSGLSL

SEQ ID NO: 25401 - protein, 9 aa, synthetic construct
  REGION 1..9: note = Dynactin subunit 1 (1206-1214)
FATFPSSAF

SEQ ID NO: 25402 - protein, 8 aa, synthetic construct
  REGION 1..8: note = Translocon-associated protein subunit gamma (75-82)
FAYKNVKF

SEQ ID NO: 25403 - protein, 12 aa, synthetic construct
  REGION 1..12: note = Protein disulfide-isomerase A3 (160-171)
FDDSFSEAHSEF

SEQ ID NO: 25404 - protein, 9 aa, synthetic construct
  REGION 1..9: note = Phosphatidylinositol 3,4,5-trisphosphate 3-phosphatase and dual-specificity protein phosphatase PTEN (90-98)
FEDHNPPQL

SEQ ID NO: 25405 - protein, 15 aa, synthetic construct
  REGION 1..15: note = Keratin, type I cytoskeletal 9 (465-479)
FESSGAGKIGLGGRG

SEQ ID NO: 25406 - protein, 16 aa, synthetic construct
  REGION 1..16: note = Keratin, type I cytoskeletal 9 (465-480)
FESSGAGKIGLGGRGG

SEQ ID NO: 25407 - protein, 12 aa, synthetic construct
  REGION 1..12: note = Interleukin enhancer-binding factor 3 (693-704)
FFTDCYGYHDFG

SEQ ID NO: 25408 - protein, 14 aa, synthetic construct
  REGION 1..14: note = Interleukin enhancer-binding factor 3 (693-706)
FFTDCYGYHDFGSS

SEQ ID NO: 25409 - protein, 10 aa, synthetic construct
  REGION 1..10: note = Apolipoprotein B-100 (2396-2405)
FIDDAVKKLN

SEQ ID NO: 25410 - protein, 9 aa, synthetic construct
  REGION 1..9: note = Probable tRNA (uracil-O(2)-)-methyltransferase (608-616)
FIDQVVLQV

SEQ ID NO: 25411 - protein, 11 aa, synthetic construct
  REGION 1..11: note = Plexin-A2 (789-799)
FIIDNPQDLKV

SEQ ID NO: 25412 - protein, 13 aa, synthetic construct
  REGION 1..13: note = Filamin-A (2041-2053)
FIIDTRDAGYGGL

SEQ ID NO: 25413 - protein, 15 aa, synthetic construct
  REGION 1..15: note = Filamin-A (2041-2055)
FIIDTRDAGYGGLSL

SEQ ID NO: 25414 - protein, 9 aa, synthetic construct
  REGION 1..9: note = Uncharacterized protein CXorf57 (552-560)
FILFFYGSD

SEQ ID NO: 25415 - protein, 11 aa, synthetic construct
  REGION 1..11: note = Sorting nexin-14 (234-244)
FLADPDTVNHL

SEQ ID NO: 25416 - protein, 12 aa, synthetic construct
  REGION 1..12: note = Protein YIF1B (69-80)
FLADPVSNMAMA

SEQ ID NO: 25417 - protein, 10 aa, synthetic construct
  REGION 1..10: note = Class E basic helix-loop-helix protein 41 (366-375)
FLDKSGLEKY

SEQ ID NO: 25418 - protein, 12 aa, synthetic construct
  REGION 1..12: note = Class E basic helix-loop-helix protein 41 (366-377)
FLDKSGLEKYLY

SEQ ID NO: 25419 - protein, 10 aa, synthetic construct
  REGION 1..10: note = Ceramide synthase 1 (207-216)
FLHDISDVQL

SEQ ID NO: 25420 - protein, 9 aa, synthetic construct
  REGION 1..9: note = Exostosin-2 (253-261)
FLLSSQVGL

SEQ ID NO: 25421 - protein, 11 aa, synthetic construct
  REGION 1..11: note = Uncharacterized protein C15orf61 (147-157)
FLNKEDEGAMY

SEQ ID NO: 25422 - protein, 9 aa, synthetic construct
  REGION 1..9: note = Spatacsin (617-625)
FLNNQIKEL

SEQ ID NO: 25423 - protein, 9 aa, synthetic construct
  REGION 1..9: note = 2',3'-cyclic-nucleotide 3'-phosphodiesterase (12-20)
FLPKIFFRK

SEQ ID NO: 25424 - protein, 11 aa, synthetic construct
  REGION 1..11: note = Polyphosphoinositide phosphatase (404-414)
FLPPEHTIVYI

SEQ ID NO: 25425 - protein, 10 aa, synthetic construct
  REGION 1..10: note = Alpha/beta hydrolase domain-containing protein 17C (35-44)
FLPPEPTYTV

SEQ ID NO: 25426 - protein, 11 aa, synthetic construct
  REGION 1..11: note = Zinc finger protein with KRAB and SCAN domains 1 (104-114)
FLSILPKELQV

SEQ ID NO: 25427 - protein, 10 aa, synthetic construct
  REGION 1..10: note = Presenilin-2 (437-446)
FMDTLASHQL

SEQ ID NO: 25428 - protein, 11 aa, synthetic construct
  REGION 1..11: note = Presenilin-2 (437-447)
FMDTLASHQLY

SEQ ID NO: 25429 - protein, 12 aa, synthetic construct
  REGION 1..12: note = Presenilin-2 (437-448)
FMDTLASHQLYI

SEQ ID NO: 25430 - protein, 11 aa, synthetic construct
  REGION 1..11: note = Protein tyrosine phosphatase type IVA 1 (23-33)
FMEFLKGSGDY

SEQ ID NO: 25431 - protein, 9 aa, synthetic construct
  REGION 1..9: note = SHC-transforming protein 4 (33-41)
FRNESITSL

SEQ ID NO: 25432 - protein, 10 aa, synthetic construct
  REGION 1..10: note = Caprin-1 (656-665)
FSAPRDYSGY

SEQ ID NO: 25433 - protein, 9 aa, synthetic construct
  REGION 1..9: note = Uncharacterized protein CXorf23 (6-14)
FSDGRTQKY

SEQ ID NO: 25434 - protein, 12 aa, synthetic construct
  REGION 1..12: note = DNA-directed RNA polymerase I subunit RPA2 (493-504)
FSDHNQSPRNMY

SEQ ID NO: 25435 - protein, 11 aa, synthetic construct
  REGION 1..11: note = Serine/threonine-protein kinase RIO2 (416-426)
FSEEKNRTENY

SEQ ID NO: 25436 - protein, 10 aa, synthetic construct
  REGION 1..10: note = Tubulin alpha-1C chain (18-27)
FSETGAGKHV

SEQ ID NO: 25437 - protein, 8 aa, synthetic construct
  REGION 1..8: note = Nucleosome assembly protein 1-like 1 (245-252)
FSFDGPEI

SEQ ID NO: 25438 - protein, 10 aa, synthetic construct
  REGION 1..10: note = RNA-binding protein EWS (285-294)
FSGPGENRSM

SEQ ID NO: 25439 - protein, 9 aa, synthetic construct
  REGION 1..9: note = 40S ribosomal protein S27 (111-119)
FSHAQTVVL

SEQ ID NO: 25440 - protein, 9 aa, synthetic construct
  REGION 1..9: note = ADP-ribose pyrophosphatase, mitochondrial (257-265)
FSQDHLVIY

SEQ ID NO: 25441 - protein, 17 aa, synthetic construct
  REGION 1..17: note = PERQ amino acid-rich with GYF domain-containing protein 2 (1273-1289)
FSVNASSERLNMGEIET

SEQ ID NO: 25442 - protein, 11 aa, synthetic construct
  REGION 1..11: note = Serine/threonine-protein kinase Sgk1 (516-526)
FSYAPPTDSFL

SEQ ID NO: 25443 - protein, 11 aa, synthetic construct
  REGION 1..11: note = Transcription factor SOX-10 (425-435)
FSYMGPSQRPL

SEQ ID NO: 25444 - protein, 11 aa, synthetic construct
  REGION 1..11: note = Protein argonaute-3 (775-785)
FTADELQLLTY

SEQ ID NO: 25445 - protein, 9 aa, synthetic construct
  REGION 1..9: note = Protein FAM102B (9-17)
FTAESSREV

SEQ ID NO: 25446 - protein, 9 aa, synthetic construct
  REGION 1..9: note = Dipeptidyl peptidase 2 (373-381)
FTDELRQRY

SEQ ID NO: 25447 - protein, 9 aa, synthetic construct
  REGION 1..9: note = Membrane-associated transporter protein (338-346)
FTDFMGQIV

SEQ ID NO: 25448 - protein, 10 aa, synthetic construct
  REGION 1..10: note = Membrane-associated transporter protein (338-347)
FTDFMGQIVY

SEQ ID NO: 25449 - protein, 8 aa, synthetic construct
  REGION 1..8: note = Probable guanine nucleotide exchange factor MCF2L2 (62-69)
FTDIGIKY

SEQ ID NO: 25450 - protein, 10 aa, synthetic construct
  REGION 1..10: note = Testis-expressed sequence 10 protein (107-116)
FTDKDANVRL

SEQ ID NO: 25451 - protein, 9 aa, synthetic construct
  REGION 1..9: note = Semaphorin-5A (1065-1073)
FTDLNNYDE

SEQ ID NO: 25452 - protein, 10 aa, synthetic construct
  REGION 1..10: note = Semaphorin-5A (1065-1074)
FTDLNNYDEY

SEQ ID NO: 25453 - protein, 9 aa, synthetic construct
  REGION 1..9: note = Tubulin polyglutamylase complex subunit 1 (17-25)
FTDSGRQSV

SEQ ID NO: 25454 - protein, 11 aa, synthetic construct
  REGION 1..11: note = Leucine-rich repeat-containing protein 42 (128-138)
FTEPGAGLRAL

SEQ ID NO: 25455 - protein, 9 aa, synthetic construct
  REGION 1..9: note = AF4/FMR2 family member 1 (3-11)
FTERVNSSG

SEQ ID NO: 25456 - protein, 7 aa, synthetic construct
  REGION 1..7: note = von Willebrand factor A domain-containing protein 9 (129-135)
FTIDGPL

SEQ ID NO: 25457 - protein, 9 aa, synthetic construct
  REGION 1..9: note = Elongator complex protein 1 (934-942)
FTIDKYLKR

SEQ ID NO: 25458 - protein, 17 aa, synthetic construct
  REGION 1..17: note = Melanocyte protein PMEL (214-230)
FTITDQVPFSVSVSQLR

SEQ ID NO: 25459 - protein, 11 aa, synthetic construct
  REGION 1..11: note = Hypoxia-inducible factor 1-alpha (295-305)
FTKGQVTTGQY

SEQ ID NO: 25460 - protein, 9 aa, synthetic construct
  REGION 1..9: note = Ropporin-1B (203-211)
FTQNPRVWL

SEQ ID NO: 25461 - protein, 8 aa, synthetic construct
  REGION 1..8: note = Nephrocystin-4 (1264-1271)
FTSHPQEL

SEQ ID NO: 25462 - protein, 9 aa, synthetic construct
  REGION 1..9: note = Very-long-chain enoyl-CoA reductase (119-127)
FTSSRHTVV

SEQ ID NO: 25463 - protein, 9 aa, synthetic construct
  REGION 1..9: note = Cytoplasmic dynein 2 heavy chain 1 (2484-2492)
FTVDDYSHY

SEQ ID NO: 25464 - protein, 15 aa, synthetic construct
  REGION 1..15: note = Cleft lip and palate transmembrane protein 1-like protein (157-171)
FVFDGSSLPADVHRY

SEQ ID NO: 25465 - protein, 11 aa, synthetic construct
  REGION 1..11: note = TNF receptor-associated factor 4 (202-212)
FVFDTIQSHQY

SEQ ID NO: 25466 - protein, 9 aa, synthetic construct
  REGION 1..9: note = NADH dehydrogenase (ubiquinone) 1 beta subcomplex subunit 1 (32-40)
FVIGCYLDR

SEQ ID NO: 25467 - protein, 11 aa, synthetic construct
  REGION 1..11: note = FAD-dependent oxidoreductase domain-containing protein 2 (493-503)
FVINMEYGRNF

SEQ ID NO: 25468 - protein, 9 aa, synthetic construct
  REGION 1..9: note = Ran GTPase-activating protein 1 (562-570)
FVTKPNSAL

SEQ ID NO: 25469 - protein, 9 aa, synthetic construct
  REGION 1..9: note = Long-chain-fatty-acid-CoA ligase 3 (624-632)
FVVPNQKEL

SEQ ID NO: 25470 - protein, 10 aa, synthetic construct
  REGION 1..10: note = Mitochondrial folate transporter/carrier (297-306)
FVVYENVSHF

SEQ ID NO: 25471 - protein, 10 aa, synthetic construct
  REGION 1..10: note = F-box only protein 21 (602-611)
FVYETVQNIY

SEQ ID NO: 25472 - protein, 11 aa, synthetic construct
  REGION 1..11: note = Transmembrane protein 181 (554-564)
FVYSPSKNALY

SEQ ID NO: 25473 - protein, 9 aa, synthetic construct
  REGION 1..9: note = GDP-fucose protein O-fucosyltransferase 1 (2-10)
GAAAWARPL

SEQ ID NO: 25474 - protein, 9 aa, synthetic construct
  REGION 1..9: note = Zinc finger and BTB domain-containing protein 7A (137-145)
GADAGQLDL

SEQ ID NO: 25475 - protein, 10 aa, synthetic construct
  REGION 1..10: note = 3'(2'),5'-bisphosphate nucleotidase 1 (176-185)
GAFGFQLKEV

SEQ ID NO: 25476 - protein, 9 aa, synthetic construct
  REGION 1..9: note = X-ray repair cross-complementing protein 5 (469-477)
GAHFSVSSL

SEQ ID NO: 25477 - protein, 9 aa, synthetic construct
  REGION 1..9: note = Replication protein A 70 kDa DNA-binding subunit (8-16)
GAIAAIMQK

SEQ ID NO: 25478 - protein, 9 aa, synthetic construct
  REGION 1..9: note = WD repeat-containing protein 89 (351-359)
GAIEKTFTK

SEQ ID NO: 25479 - protein, 11 aa, synthetic construct
  REGION 1..11: note = Elongation factor 2 (190-200)
GALCEENMRGV

SEQ ID NO: 25480 - protein, 9 aa, synthetic construct
  REGION 1..9: note = NHP2-like protein 1 (38-46)
GANEATKTL

SEQ ID NO: 25481 - protein, 13 aa, synthetic construct
  REGION 1..13: note = Nestin (515-527)
GAPVHLGQGQFLK

SEQ ID NO: 25482 - protein, 17 aa, synthetic construct
  REGION 1..17: note = Galectin-1 (66-82)
GAWGTEQREAVFPFQPG

SEQ ID NO: 25483 - protein, 9 aa, synthetic construct
  REGION 1..9: note = Calcium-transporting ATPase type 2C member 1 (481-489)
GAYEQVIKY

SEQ ID NO: 25484 - protein, 9 aa, synthetic construct
  REGION 1..9: note = Delta(24)-sterol reductase (349-357)
GAYGEPRVK

SEQ ID NO: 25485 - protein, 9 aa, synthetic construct
  REGION 1..9: note = Ribosomal protein S6 kinase alpha-5 (58-66)
GAYGKVFLV

SEQ ID NO: 25486 - protein, 15 aa, synthetic construct
  REGION 1..15: note = Heterogeneous nuclear ribonucleoprotein F (26-40)
GAYSSQVMQGMGVSA

SEQ ID NO: 25487 - protein, 9 aa, synthetic construct
  REGION 1..9: note = Complement factor H-related protein 2 (34-42)
GDITSFLLS

SEQ ID NO: 25488 - protein, 9 aa, synthetic construct
  REGION 1..9: note = Protein SMG8 (168-176)
GEAGGGLSL

SEQ ID NO: 25489 - protein, 12 aa, synthetic construct
  REGION 1..12: note = Cytoplasmic dynein 1 heavy chain 1 (2969-2980)
GEDFDEDLRTVL

SEQ ID NO: 25490 - protein, 10 aa, synthetic construct
  REGION 1..10: note = Cytoplasmic dynein 1 light intermediate chain 1 (74-83)
GEDGAGKTSL

SEQ ID NO: 25491 - protein, 9 aa, synthetic construct
  REGION 1..9: note = Neural cell adhesion molecule L1 (1050-1058)
GEEKGGASL

SEQ ID NO: 25492 - protein, 9 aa, synthetic construct
  REGION 1..9: note = HEAT repeat-containing protein 5B (1966-1974)
GEEQNRVQL

SEQ ID NO: 25493 - protein, 11 aa, synthetic construct
  REGION 1..11: note = Rho guanine nucleotide exchange factor 2 (798-808)
GEERATEAGSL

SEQ ID NO: 25494 - protein, 9 aa, synthetic construct
  REGION 1..9: note = Chondroitin sulfate synthase 2 (169-177)
GEERPIGHL

SEQ ID NO: 25495 - protein, 10 aa, synthetic construct
  REGION 1..10: note = CD276 antigen (290-299)
GEGEGSKTAL

SEQ ID NO: 25496 - protein, 9 aa, synthetic construct
  REGION 1..9: note = Ras GTPase-activating-like protein IQGAP1 (1300-1308)
GEIINTHTL

SEQ ID NO: 25497 - protein, 9 aa, synthetic construct
  REGION 1..9: note = Bifunctional 3'-phosphoadenosine 5'-phosphosulfate synthase 2 (170-178)
GEIKGFTGI

SEQ ID NO: 25498 - protein, 11 aa, synthetic construct
  REGION 1..11: note = Serine/threonine-protein kinase TBK1 (496-506)
GEISDIHTKLL

SEQ ID NO: 25499 - protein, 10 aa, synthetic construct
  REGION 1..10: note = Leucine zipper putative tumor suppressor 2 (448-457)
GEISLLKQQL

SEQ ID NO: 25500 - protein, 11 aa, synthetic construct
  REGION 1..11: note = DNA-directed RNA polymerase III subunit RPC3 (18-28)
GEIVEKIGVHL

SEQ ID NO: 25501 - protein, 9 aa, synthetic construct
  REGION 1..9: note = Coatomer subunit beta' (652-660)
GELKIAYQL

SEQ ID NO: 25502 - protein, 9 aa, synthetic construct
  REGION 1..9: note = DNA topoisomerase 3-beta-1 (168-176)
GEPDHNEAL

SEQ ID NO: 25503 - protein, 12 aa, synthetic construct
  REGION 1..12: note = Ras-related protein Rab-5A (27-38)
GESAVGKSSLVL

SEQ ID NO: 25504 - protein, 9 aa, synthetic construct
  REGION 1..9: note = Hemicentin-1 (1905-1913)
GETQQHIQL

SEQ ID NO: 25505 - protein, 9 aa, synthetic construct
  REGION 1..9: note = NF-kappa-B inhibitor beta (105-113)
GETSTVEKL

SEQ ID NO: 25506 - protein, 9 aa, synthetic construct
  REGION 1..9: note = Probable N-acetyltransferase 16 (116-124)
GETVLVEGL

SEQ ID NO: 25507 - protein, 13 aa, synthetic construct
  REGION 1..13: note = 5,6-dihydroxyindole-2-carboxylic acid oxidase (209-221)
GEVDFSHEGPAFL

SEQ ID NO: 25508 - protein, 11 aa, synthetic construct
  REGION 1..11: note = Unconventional myosin-X (1723-1733)
GEVVEKLIRGL

SEQ ID NO: 25509 - protein, 10 aa, synthetic construct
  REGION 1..10: note = Ornithine aminotransferase, mitochondrial (121-130)
GEYEEYITKL

SEQ ID NO: 25510 - protein, 9 aa, synthetic construct
  REGION 1..9: note = Carbonic anhydrase-related protein (45-53)
GEYQSPINL

SEQ ID NO: 25511 - protein, 17 aa, synthetic construct
  REGION 1..17: note = Peptidyl-prolyl cis-trans isomerase A (64-80)
GGDFTRHNGTGGKSIYG

SEQ ID NO: 25512 - protein, 14 aa, synthetic construct
  REGION 1..14: note = NEDD8-conjugating enzyme Ubc12 (170-183)
GGYIGSTYFERCLK

SEQ ID NO: 25513 - protein, 10 aa, synthetic construct
  REGION 1..10: note = Fibrocystin-L (2531-2540)
GIEHGNILQY

SEQ ID NO: 25514 - protein, 9 aa, synthetic construct
  REGION 1..9: note = Polypeptide N-acetylgalactosaminyltransferase 16 (295-303)
GIFVIDKSW

SEQ ID NO: 25515 - protein, 10 aa, synthetic construct
  REGION 1..10: note = 2'-5'-oligoadenylate synthase-like protein (493-502)
GIQDSDTLIL

SEQ ID NO: 25516 - protein, 9 aa, synthetic construct
  REGION 1..9: note = 60S ribosomal protein L37a (8-16)
GIVGKYGTR

SEQ ID NO: 25517 - protein, 9 aa, synthetic construct
  REGION 1..9: note = Intraflagellar transport protein 172 homolog (129-137)
GLAEGKVRL

SEQ ID NO: 25518 - protein, 9 aa, synthetic construct
  REGION 1..9: note = Pre-B-cell leukemia transcription factor-interacting protein 1 (428-436)
GLAELGHRL

SEQ ID NO: 25519 - protein, 9 aa, synthetic construct
  REGION 1..9: note = NADH dehydrogenase (ubiquinone) 1 alpha subcomplex subunit 1 (20-28)
GLATAYIHR

SEQ ID NO: 25520 - protein, 9 aa, synthetic construct
  REGION 1..9: note = Selenocysteine insertion sequence-binding protein 2-like (751-759)
GLDEALYNV

SEQ ID NO: 25521 - protein, 9 aa, synthetic construct
  REGION 1..9: note = Solute carrier family 25 member 33 (93-101)
GLGPNLVGV

SEQ ID NO: 25522 - protein, 8 aa, synthetic construct
  REGION 1..8: note = Lysine-specific demethylase 3A (124-131)
GLGSITSV

SEQ ID NO: 25523 - protein, 9 aa, synthetic construct
  REGION 1..9: note = Membrane-associated transporter protein (409-417)
GLGTGFIGL

SEQ ID NO: 25524 - protein, 9 aa, synthetic construct
  REGION 1..9: note = Plectin (546-554)
GLHQSIEEF

SEQ ID NO: 25525 - protein, 9 aa, synthetic construct
  REGION 1..9: note = Filamin-A (1300-1308)
GLHSVDVTY

SEQ ID NO: 25526 - protein, 12 aa, synthetic construct
  REGION 1..12: note = Ubiquitin-conjugating enzyme E2 G1 (28-39)
GLIDDNDLYRWE

SEQ ID NO: 25527 - protein, 9 aa, synthetic construct
  REGION 1..9: note = Dedicator of cytokinesis protein 11 (1172-1180)
GLLLENIQR

SEQ ID NO: 25528 - protein, 11 aa, synthetic construct
  REGION 1..11: note = ATP-dependent RNA helicase DDX1 (121-131)
GLMKGKHYYEV

SEQ ID NO: 25529 - protein, 9 aa, synthetic construct
  REGION 1..9: note = U7 snRNA-associated Sm-like protein LSm10 (23-31)
GLQGRVTTV

SEQ ID NO: 25530 - protein, 9 aa, synthetic construct
  REGION 1..9: note = Mortality factor 4-like protein 1 (100-108)
GLQQKNVEV

SEQ ID NO: 25531 - protein, 7 aa, synthetic construct
  REGION 1..7: note = Microtubule-associated protein 1B (225-231)
GLSEFTE

SEQ ID NO: 25532 - protein, 9 aa, synthetic construct
  REGION 1..9: note = Pterin-4-alpha-carbinolamine dehydratase (12-20)
GLSERDINL

SEQ ID NO: 25533 - protein, 9 aa, synthetic construct
  REGION 1..9: note = Protein-methionine sulfoxide oxidase MICAL3 (1054-1062)
GLSEVLVQI

SEQ ID NO: 25534 - protein, 9 aa, synthetic construct
  REGION 1..9: note = Probable E3 ubiquitin-protein ligase HERC1 (3214-3222)
GLTDIRTLV

SEQ ID NO: 25535 - protein, 11 aa, synthetic construct
  REGION 1..11: note = Zinc transporter ZIP14 (20-30)
GLWRTTPEAHA

SEQ ID NO: 25536 - protein, 11 aa, synthetic construct
  REGION 1..11: note = Prolyl 3-hydroxylase 2 (87-97)
GLYEAIADHYM

SEQ ID NO: 25537 - protein, 10 aa, synthetic construct
  REGION 1..10: note = Guanine nucleotide-binding protein-like 3-like protein (377-386)
GLYSQEQAAK

SEQ ID NO: 25538 - protein, 9 aa, synthetic construct
  REGION 1..9: note = Tuberin (1302-1310)
GMDRRTDAY

SEQ ID NO: 25539 - protein, 11 aa, synthetic construct
  REGION 1..11: note = Unconventional myosin-Va (1628-1638)
GMLEHETIQGV

SEQ ID NO: 25540 - protein, 17 aa, synthetic construct
  REGION 1..17: note = Spectrin alpha chain, non-erythrocytic 1 (367-383)
GMMPRDETDSKTASPWK

SEQ ID NO: 25541 - protein, 9 aa, synthetic construct
  REGION 1..9: note = Solute carrier family 35 member E1 (21-29)
GMMTAILGV

SEQ ID NO: 25542 - protein, 9 aa, synthetic construct
  REGION 1..9: note = Catenin beta-1 (106-114)
GMQIPSTQF

SEQ ID NO: 25543 - protein, 17 aa, synthetic construct
  REGION 1..17: note = Autophagy-related protein 2 homolog A (1914-1930)
GMRNQIVPDAHKDHALK

SEQ ID NO: 25544 - protein, 9 aa, synthetic construct
  REGION 1..9: note = Synaptic vesicle membrane protein VAT-1 homolog (137-145)
GMWQEEVTV

SEQ ID NO: 25545 - protein, 12 aa, synthetic construct
  REGION 1..12: note = BMP and activin membrane-bound inhibitor homolog (249-260)
GMYSGHGKLEFV

SEQ ID NO: 25546 - protein, 10 aa, synthetic construct
  REGION 1..10: note = Bifunctional lysine-specific demethylase and histidyl-hydroxylase MINA (93-102)
GMYYGRDVNV

SEQ ID NO: 25547 - protein, 17 aa, synthetic construct
  REGION 1..17: note = Heterogeneous nuclear ribonucleoprotein A1-like 2 (126-142)
GNFGGRSSGPYGGGGQY

SEQ ID NO: 25548 - protein, 9 aa, synthetic construct
  REGION 1..9: note = Uncharacterized protein KIAA1841 (80-88)
GNVISILIS

SEQ ID NO: 25549 - protein, 16 aa, synthetic construct
  REGION 1..16: note = Vimentin (17-32)
GPGTASRPSSSRSYVT

SEQ ID NO: 25550 - protein, 17 aa, synthetic construct
  REGION 1..17: note = Vimentin (17-33)
GPGTASRPSSSRSYVTT

SEQ ID NO: 25551 - protein, 14 aa, synthetic construct
  REGION 1..14: note = Stromal membrane-associated protein 2 (336-349)
GQAANQTLSPQMWK

SEQ ID NO: 25552 - protein, 11 aa, synthetic construct
  REGION 1..11: note = Integrin beta-3 (297-307)
GQCHVGSDNHY

SEQ ID NO: 25553 - protein, 10 aa, synthetic construct
  REGION 1..10: note = Anaphase-promoting complex subunit 7 (149-158)
GQERPSVTSY

SEQ ID NO: 25554 - protein, 9 aa, synthetic construct
  REGION 1..9: note = Protein FAM98A (492-500)
GQFEQHFQH

SEQ ID NO: 25555 - protein, 10 aa, synthetic construct
  REGION 1..10: note = UPF0428 protein CXorf56 (123-132)
GQGFGKTNIY

SEQ ID NO: 25556 - protein, 9 aa, synthetic construct
  REGION 1..9: note = Melanoma antigen preferentially expressed in tumors (89-97)
GQHLHLETF

SEQ ID NO: 25557 - protein, 9 aa, synthetic construct
  REGION 1..9: note = Sodium-dependent neutral amino acid transporter B(0)AT2 (281-289)
GQITHNTSF

SEQ ID NO: 25558 - protein, 9 aa, synthetic construct
  REGION 1..9: note = Class E basic helix-loop-helix protein 41 (208-216)
GQKLEPLAY

SEQ ID NO: 25559 - protein, 14 aa, synthetic construct
  REGION 1..14: note = Heterogeneous nuclear ribonucleoprotein U (692-705)
GQKPWSQHYHQGYY

SEQ ID NO: 25560 - protein, 9 aa, synthetic construct
  REGION 1..9: note = CAP-Gly domain-containing linker protein 3 (317-325)
GQKQGIVRF

SEQ ID NO: 25561 - protein, 10 aa, synthetic construct
  REGION 1..10: note = Protein SCAI (271-280)
GQLSLADALI

SEQ ID NO: 25562 - protein, 11 aa, synthetic construct
  REGION 1..11: note = Ras GTPase-activating protein-binding protein 2 (102-112)
GQPERKFMQTF

SEQ ID NO: 25563 - protein, 9 aa, synthetic construct
  REGION 1..9: note = Clathrin heavy chain 1 (26-34)
GQPQPGFGY

SEQ ID NO: 25564 - protein, 9 aa, synthetic construct
  REGION 1..9: note = Kinesin-like protein KIF3C (89-97)
GQTGTGKTY

SEQ ID NO: 25565 - protein, 10 aa, synthetic construct
  REGION 1..10: note = F-box only protein 7 (137-146)
GQVPHSLETL

SEQ ID NO: 25566 - protein, 9 aa, synthetic construct
  REGION 1..9: note = Protein FAM13A (81-89)
GRDKGLINK

SEQ ID NO: 25567 - protein, 19 aa, synthetic construct
  REGION 1..19: note = Nucleolar and spindle-associated protein 1 (253-271)
GRSCGPASQSTLGLKGSLK

SEQ ID NO: 25568 - protein, 9 aa, synthetic construct
  REGION 1..9: note = Phosphatidylinositide phosphatase SAC2 (738-746)
GSDLPIIEK

SEQ ID NO: 25569 - protein, 11 aa, synthetic construct
  REGION 1..11: note = Anoctamin-4 (845-855)
GSEFSGTPLKY

SEQ ID NO: 25570 - protein, 14 aa, synthetic construct
  REGION 1..14: note = Keratin, type II cytoskeletal 1 (603-616)
GSGGGSSGGSIGGR

SEQ ID NO: 25571 - protein, 9 aa, synthetic construct
  REGION 1..9: note = HLA class I histocompatibility antigen, B-50 alpha chain (25-33)
GSHSMRYFH

SEQ ID NO: 25572 - protein, 9 aa, synthetic construct
  REGION 1..9: note = LIM and calponin homology domains-containing protein 1 (610-618)
GSIEINIKK

SEQ ID NO: 25573 - protein, 12 aa, synthetic construct
  REGION 1..12: note = Poly(rC)-binding protein 1 (26-37)
GSIIGKKGESVK

SEQ ID NO: 25574 - protein, 13 aa, synthetic construct
  REGION 1..13: note = Poly(rC)-binding protein 2 (26-38)
GSIIGKKGESVKK

SEQ ID NO: 25575 - protein, 9 aa, synthetic construct
  REGION 1..9: note = Parkinson disease 7 domain-containing protein 1 (55-63)
GSLARILQH

SEQ ID NO: 25576 - protein, 9 aa, synthetic construct
  REGION 1..9: note = Integrator complex subunit 4 (30-38)
GSLEKSVTK

SEQ ID NO: 25577 - protein, 10 aa, synthetic construct
  REGION 1..10: note = Phytanoyl-CoA dioxygenase, peroxisomal (117-126)
GSLKPHDYPK

SEQ ID NO: 25578 - protein, 9 aa, synthetic construct
  REGION 1..9: note = Signal peptidase complex catalytic subunit SEC11A (55-63)
GSMEPAFHR

SEQ ID NO: 25579 - protein, 9 aa, synthetic construct
  REGION 1..9: note = ER membrane protein complex subunit 1 (351-359)
GSMGSFSEK

SEQ ID NO: 25580 - protein, 11 aa, synthetic construct
  REGION 1..11: note = SLAIN motif-containing protein 2 (286-296)
GSMKDDSWKDG

SEQ ID NO: 25581 - protein, 9 aa, synthetic construct
  REGION 1..9: note = Dynein heavy chain 14, axonemal (154-162)
GSSKIAIQK

SEQ ID NO: 25582 - protein, 11 aa, synthetic construct
  REGION 1..11: note = Dyslexia-associated protein KIAA0319-like protein (680-690)
GSVPNGQTPLK

SEQ ID NO: 25583 - protein, 13 aa, synthetic construct
  REGION 1..13: note = 28S ribosomal protein S16, mitochondrial (52-64)
GSYDPLPNSHGEK

SEQ ID NO: 25584 - protein, 9 aa, synthetic construct
  REGION 1..9: note = Transcription factor SOX-10 (199-207)
GTAAIQAHY

SEQ ID NO: 25585 - protein, 10 aa, synthetic construct
  REGION 1..10: note = 5,6-dihydroxyindole-2-carboxylic acid oxidase (495-504)
GTASYLIRAR

SEQ ID NO: 25586 - protein, 8 aa, synthetic construct
  REGION 1..8: note = FRAS1-related extracellular matrix protein 1 (1422-1429)
GTDKPEEL

SEQ ID NO: 25587 - protein, 9 aa, synthetic construct
  REGION 1..9: note = Retinol dehydrogenase 8 (207-215)
GTDPETLHY

SEQ ID NO: 25588 - protein, 9 aa, synthetic construct
  REGION 1..9: note = Receptor-type tyrosine-protein phosphatase gamma isoform X5 (1086-1094)
GTDYINASY

SEQ ID NO: 25589 - protein, 9 aa, synthetic construct
  REGION 1..9: note = Fibronectin (331-339)
GTDYKIYLY

SEQ ID NO: 25590 - protein, 9 aa, synthetic construct
  REGION 1..9: note = Myelin proteolipid protein (42-50)
GTEKLIETY

SEQ ID NO: 25591 - protein, 12 aa, synthetic construct
  REGION 1..12: note = Fructose-bisphosphate aldolase A (48-59)
GTENTEENRRFY

SEQ ID NO: 25592 - protein, 12 aa, synthetic construct
  REGION 1..12: note = Activating signal cointegrator 1 complex subunit 3 (1388-1399)
GTEYYDGKTRRY

SEQ ID NO: 25593 - protein, 10 aa, synthetic construct
  REGION 1..10: note = 39S ribosomal protein L41, mitochondrial (18-27)
GTFDPDNLEK

SEQ ID NO: 25594 - protein, 12 aa, synthetic construct
  REGION 1..12: note = Fibronectin (567-578)
GTFYQIGDSWEK

SEQ ID NO: 25595 - protein, 9 aa, synthetic construct
  REGION 1..9: note = NHS-like protein 1 (375-383)
GTGTLLRPK

SEQ ID NO: 25596 - protein, 10 aa, synthetic construct
  REGION 1..10: note = Receptor-interacting serine/threonine-protein kinase 4 (183-192)
GTIAYLPPER

SEQ ID NO: 25597 - protein, 10 aa, synthetic construct
  REGION 1..10: note = Centromere protein F (3155-3164)
GTILREPTTK

SEQ ID NO: 25598 - protein, 9 aa, synthetic construct
  REGION 1..9: note = SWI/SNF-related matrix-associated actin-dependent regulator of chromatin subfamily E member 1-related (80-88)
GTLDFYMAR

SEQ ID NO: 25599 - protein, 12 aa, synthetic construct
  REGION 1..12: note = Translocating chain-associated membrane protein 1 (356-367)
GTLTSNVADSPR

SEQ ID NO: 25600 - protein, 10 aa, synthetic construct
  REGION 1..10: note = Anaphase-promoting complex subunit 1 (1218-1227)
GTMDMSITRL

SEQ ID NO: 25601 - protein, 11 aa, synthetic construct
  REGION 1..11: note = F-actin-capping protein subunit beta (211-221)
GTMNLGGSLTR

SEQ ID NO: 25602 - protein, 10 aa, synthetic construct
  REGION 1..10: note = Mitochondrial intermediate peptidase (222-231)
GTNFPNKIEK

SEQ ID NO: 25603 - protein, 9 aa, synthetic construct
  REGION 1..9: note = Synaptobrevin homolog YKT6 (178-186)
GTQSKAFYK

SEQ ID NO: 25604 - protein, 9 aa, synthetic construct
  REGION 1..9: note = Protein FAM83D (419-427)
GTQTAVITR

SEQ ID NO: 25605 - protein, 9 aa, synthetic construct
  REGION 1..9: note = Neuron navigator 2 (769-777)
GTQVTHSTL

SEQ ID NO: 25606 - protein, 9 aa, synthetic construct
  REGION 1..9: note = MpV17 transgene, murine homolog, glomerulosclerosis, isoform CRA_f (79-87)
GTTKVDALK

SEQ ID NO: 25607 - protein, 10 aa, synthetic construct
  REGION 1..10: note = Sorcin (118-127)
GTVDPQELQK

SEQ ID NO: 25608 - protein, 12 aa, synthetic construct
  REGION 1..12: note = Galectin-3 (136-147)
GTVKPNANRIAL

SEQ ID NO: 25609 - protein, 11 aa, synthetic construct
  REGION 1..11: note = Putative germ cell-less protein-like 1-like (82-92)
GTYGLDSVKKK

SEQ ID NO: 25610 - protein, 16 aa, synthetic construct
  REGION 1..16: note = Chromobox protein homolog 6 (397-412)
GVAGAAGGGGSIGASK

SEQ ID NO: 25611 - protein, 9 aa, synthetic construct
  REGION 1..9: note = WD repeat-containing protein 1 (324-332)
GVDGNVRLY

SEQ ID NO: 25612 - protein, 9 aa, synthetic construct
  REGION 1..9: note = Zinc finger protein 106 (750-758)
GVFEGHTSK

SEQ ID NO: 25613 - protein, 10 aa, synthetic construct
  REGION 1..10: note = Scavenger receptor class B member 1 (291-300)
GVFEGIPTYR

SEQ ID NO: 25614 - protein, 10 aa, synthetic construct
  REGION 1..10: note = Vacuolar-sorting protein SNF8 (5-14)
GVGAGAIAKK

SEQ ID NO: 25615 - protein, 14 aa, synthetic construct
  REGION 1..14: note = Dedicator of cytokinesis protein 4 (591-604)
GVIDAAVNGGVSRY

SEQ ID NO: 25616 - protein, 9 aa, synthetic construct
  REGION 1..9: note = Ribosomal protein S6 kinase delta-1 (332-340)
GVIDKVLLV

SEQ ID NO: 25617 - protein, 9 aa, synthetic construct
  REGION 1..9: note = Disabled homolog 2 (110-118)
GVIEHEHPV

SEQ ID NO: 25618 - protein, 11 aa, synthetic construct
  REGION 1..11: note = Probable ATP-dependent RNA helicase DDX58 (746-756)
GVIEKEQINMY

SEQ ID NO: 25619 - protein, 11 aa, synthetic construct
  REGION 1..11: note = Regulator of chromosome condensation (182-192)
GVIGLLEPMKK

SEQ ID NO: 25620 - protein, 10 aa, synthetic construct
  REGION 1..10: note = Interleukin enhancer-binding factor 3 (91-100)
GVMRVGLVAK

SEQ ID NO: 25621 - protein, 9 aa, synthetic construct
  REGION 1..9: note = Chromodomain-helicase-DNA-binding protein 4 (1522-1530)
GVMSLIRKK

SEQ ID NO: 25622 - protein, 9 aa, synthetic construct
  REGION 1..9: note = Non-structural maintenance of chromosomes element 1 homolog (3-11)
GVMTDVHRR

SEQ ID NO: 25623 - protein, 12 aa, synthetic construct
  REGION 1..12: note = POTE ankyrin domain family member I (75-86)
GVTHTVPIYEGY

SEQ ID NO: 25624 - protein, 10 aa, synthetic construct
  REGION 1..10: note = Protein-glutamine gamma-glutamyltransferase 6 (232-241)
GVVQGQWQGK

SEQ ID NO: 25625 - protein, 12 aa, synthetic construct
  REGION 1..12: note = Copine-3 (78-89)
GVYDIDNKTIEL

SEQ ID NO: 25626 - protein, 10 aa, synthetic construct
  REGION 1..10: note = Hyccin (107-116)
GVYNLEIVDK

SEQ ID NO: 25627 - protein, 11 aa, synthetic construct
  REGION 1..11: note = Alpha-actinin-4 (5-15)
HAANQSYQYGP

SEQ ID NO: 25628 - protein, 16 aa, synthetic construct
  REGION 1..16: note = Alpha-actinin-4 (5-20)
HAANQSYQYGPSSAGN

SEQ ID NO: 25629 - protein, 9 aa, synthetic construct
  REGION 1..9: note = Transforming growth factor-beta receptor-associated protein 1 (725-733)
HAGPTAHEL

SEQ ID NO: 25630 - protein, 10 aa, synthetic construct
  REGION 1..10: note = Leucine-rich repeat-containing protein 1 (515-524)
HAIDRVTTSV

SEQ ID NO: 25631 - protein, 9 aa, synthetic construct
  REGION 1..9: note = Coatomer subunit beta (447-455)
HAIKSVKIY

SEQ ID NO: 25632 - protein, 9 aa, synthetic construct
  REGION 1..9: note = G-protein coupled receptor 143 (190-198)
HAIPHYVTM

SEQ ID NO: 25633 - protein, 9 aa, synthetic construct
  REGION 1..9: note = ATP-dependent RNA helicase DDX3X (209-217)
HAIPIIKEK

SEQ ID NO: 25634 - protein, 9 aa, synthetic construct
  REGION 1..9: note = Protein Smaug homolog 2 (682-690)
HALGGEHFL

SEQ ID NO: 25635 - protein, 9 aa, synthetic construct
  REGION 1..9: note = Protein GREB1 (566-574)
HAMDGASHL

SEQ ID NO: 25636 - protein, 9 aa, synthetic construct
  REGION 1..9: note = Mothers against decapentaplegic homolog 4 (405-413)
HAVFVQSYY

SEQ ID NO: 25637 - protein, 9 aa, synthetic construct
  REGION 1..9: note = U4/U6.U5 tri-snRNP-associated protein 2 (151-159)
HAYIHSVQF

SEQ ID NO: 25638 - protein, 9 aa, synthetic construct
  REGION 1..9: note = Helicase SRCAP (102-110)
HEAEIETRI

SEQ ID NO: 25639 - protein, 10 aa, synthetic construct
  REGION 1..10: note = Zinc finger FYVE domain-containing protein 16 (414-423)
HEEIQNSVVL

SEQ ID NO: 25640 - protein, 15 aa, synthetic construct
  REGION 1..15: note = Phospholipid hydroperoxide glutathione peroxidase, mitochondrial (42-56)
HEFSAKDIDGHMVNL

SEQ ID NO: 25641 - protein, 10 aa, synthetic construct
  REGION 1..10: note = Activin receptor type-1B isoform X3 (285-294)
HEHGSLFDYL

SEQ ID NO: 25642 - protein, 9 aa, synthetic construct
  REGION 1..9: note = Sex comb on midleg-like protein 4 (131-139)
HEIDGNALL

SEQ ID NO: 25643 - protein, 13 aa, synthetic construct
  REGION 1..13: note = Insulin-like growth factor-binding protein 7 (270-282)
HEIPVKKGEGAEL

SEQ ID NO: 25644 - protein, 9 aa, synthetic construct
  REGION 1..9: note = Major facilitator superfamily domain-containing protein 12 (161-169)
HEKVELTAL

SEQ ID NO: 25645 - protein, 10 aa, synthetic construct
  REGION 1..10: note = Putative RNA-binding protein Luc7-like 1 (110-119)
HELNEEIGKL

SEQ ID NO: 25646 - protein, 9 aa, synthetic construct
  REGION 1..9: note = Alpha-parvin (245-253)
HERDAFDTL

SEQ ID NO: 25647 - protein, 8 aa, synthetic construct
  REGION 1..8: note = Monocarboxylate transporter 5 (168-175)
HETEESTI

SEQ ID NO: 25648 - protein, 10 aa, synthetic construct
  REGION 1..10: note = Cadherin-19 (309-318)
HETQEGIVIL

SEQ ID NO: 25649 - protein, 10 aa, synthetic construct
  REGION 1..10: note = Liprin-alpha-1 (69-78)
HEVGHERDSL

SEQ ID NO: 25650 - protein, 10 aa, synthetic construct
  REGION 1..10: note = 60S ribosomal protein L36a-like (90-99)
HFELGGDKKR

SEQ ID NO: 25651 - protein, 12 aa, synthetic construct
  REGION 1..12: note = 60S ribosomal protein L36a-like (90-101)
HFELGGDKKRKG

SEQ ID NO: 25652 - protein, 13 aa, synthetic construct
  REGION 1..13: note = 60S ribosomal protein L36a-like (90-102)
HFELGGDKKRKGQ

SEQ ID NO: 25653 - protein, 17 aa, synthetic construct
  REGION 1..17: note = 60S ribosomal protein L36a-like (90-106)
HFELGGDKKRKGQVIQF

SEQ ID NO: 25654 - protein, 13 aa, synthetic construct
  REGION 1..13: note = Interleukin enhancer-binding factor 3 (666-678)
HGGYMNAGAGYGS

SEQ ID NO: 25655 - protein, 9 aa, synthetic construct
  REGION 1..9: note = Tubulin beta-2A chain (21-29)
HGIDPTGSY

SEQ ID NO: 25656 - protein, 13 aa, synthetic construct
  REGION 1..13: note = Dyslexia-associated protein KIAA0319-like protein (676-688)
HGQNGSVPNGQTP

SEQ ID NO: 25657 - protein, 10 aa, synthetic construct
  REGION 1..10: note = Putative heat shock protein HSP 90-beta-3 (6-15)
HHGEEEVETF

SEQ ID NO: 25658 - protein, 16 aa, synthetic construct
  REGION 1..16: note = G protein-coupled receptor kinase 5 (575-590)
HHINSNHVSSNSTGSS

SEQ ID NO: 25659 - protein, 17 aa, synthetic construct
  REGION 1..17: note = Non-POU domain-containing octamer-binding protein (28-44)
HHQQQQQQPPPPPIPAN

SEQ ID NO: 25660 - protein, 9 aa, synthetic construct
  REGION 1..9: note = F-box/WD repeat-containing protein 11 (32-40)
HIAENILSY

SEQ ID NO: 25661 - protein, 9 aa, synthetic construct
  REGION 1..9: note = 60S ribosomal protein L8 (172-180)
HIGKPSTIR

SEQ ID NO: 25662 - protein, 9 aa, synthetic construct
  REGION 1..9: note = Retinol dehydrogenase 14 (257-265)
HIHIPLLVK

SEQ ID NO: 25663 - protein, 9 aa, synthetic construct
  REGION 1..9: note = HMG box-containing protein 1 (138-146)
HIIATSKSL

SEQ ID NO: 25664 - protein, 10 aa, synthetic construct
  REGION 1..10: note = NADH-ubiquinone oxidoreductase chain 5 (394-403)
HIIETANMSY

SEQ ID NO: 25665 - protein, 9 aa, synthetic construct
  REGION 1..9: note = UBX domain-containing protein 2A (198-206)
HIKDFIEKY

SEQ ID NO: 25666 - protein, 10 aa, synthetic construct
  REGION 1..10: note = Tyrosine-protein kinase JAK1 (584-593)
HIYSGTLMDY

SEQ ID NO: 25667 - protein, 10 aa, synthetic construct
  REGION 1..10: note = Disintegrin and metalloproteinase domain-containing protein 10 (101-110)
HIYTGHIYDY

SEQ ID NO: 25668 - protein, 9 aa, synthetic construct
  REGION 1..9: note = Cyclin-L2 (129-137)
HLASKIEEA

SEQ ID NO: 25669 - protein, 9 aa, synthetic construct
  REGION 1..9: note = Nesprin-1 (1108-1116)
HLDEDQQEL

SEQ ID NO: 25670 - protein, 7 aa, synthetic construct
  REGION 1..7: note = UDP-N-acetylglucosamine-dolichyl-phosphate N-acetylglucosaminephosphotransferase (55-61)
HLDLGIL

SEQ ID NO: 25671 - protein, 8 aa, synthetic construct
  REGION 1..8: note = UDP-N-acetylglucosamine-dolichyl-phosphate N-acetylglucosaminephosphotransferase (55-62)
HLDLGILY

SEQ ID NO: 25672 - protein, 8 aa, synthetic construct
  REGION 1..8: note = Histone H3-like centromeric protein A (104-111)
HLFEDAYL

SEQ ID NO: 25673 - protein, 9 aa, synthetic construct
  REGION 1..9: note = Histone H3-like centromeric protein A (104-112)
HLFEDAYLL

SEQ ID NO: 25674 - protein, 10 aa, synthetic construct
  REGION 1..10: note = WD repeat-containing protein 43 (142-151)
HLFEHILNGY

SEQ ID NO: 25675 - protein, 9 aa, synthetic construct
  REGION 1..9: note = UPF0536 protein C12orf66 (239-247)
HLFGGQSQK

SEQ ID NO: 25676 - protein, 10 aa, synthetic construct
  REGION 1..10: note = Protein Shroom4 (1371-1380)
HLFVGDLDKV

SEQ ID NO: 25677 - protein, 10 aa, synthetic construct
  REGION 1..10: note = cDNA FLJ60317, highly similar to Aminoacylase-1 (EC 3.5.1.14) (332-341)
HLKEGSVTSV

SEQ ID NO: 25678 - protein, 11 aa, synthetic construct
  REGION 1..11: note = Homeodomain-interacting protein kinase 2 (531-541)
HLLDFPHSTHV

SEQ ID NO: 25679 - protein, 9 aa, synthetic construct
  REGION 1..9: note = Pre-mRNA-processing-splicing factor 8 (1875-1883)
HLLDFPNIV

SEQ ID NO: 25680 - protein, 11 aa, synthetic construct
  REGION 1..11: note = Adenylosuccinate lyase (442-452)
HLLDPSSFTGR

SEQ ID NO: 25681 - protein, 11 aa, synthetic construct
  REGION 1..11: note = Mitotic checkpoint serine/threonine-protein kinase BUB1 (791-801)
HLLGEGAFAQV

SEQ ID NO: 25682 - protein, 9 aa, synthetic construct
  REGION 1..9: note = Superkiller viralicidic activity 2-like 2 (735-743)
HLLSAISSV

SEQ ID NO: 25683 - protein, 9 aa, synthetic construct
  REGION 1..9: note = Glutamine synthetase (8-16)
HLNKGIKQV

SEQ ID NO: 25684 - protein, 9 aa, synthetic construct
  REGION 1..9: note = Integrator complex subunit 11 (516-524)
HLPDGSVTV

SEQ ID NO: 25685 - protein, 9 aa, synthetic construct
  REGION 1..9: note = Putative ATP-dependent RNA helicase TDRD12 (984-992)
HLPEHFHTL

SEQ ID NO: 25686 - protein, 9 aa, synthetic construct
  REGION 1..9: note = Unconventional myosin-Id (220-228)
HLQKSLSSY

SEQ ID NO: 25687 - protein, 9 aa, synthetic construct
  REGION 1..9: note = Testis-expressed sequence 10 protein (95-103)
HLSNILSEV

SEQ ID NO: 25688 - protein, 9 aa, synthetic construct
  REGION 1..9: note = NADH-ubiquinone oxidoreductase chain 4 (83-91)
HLSSEPLSR

SEQ ID NO: 25689 - protein, 9 aa, synthetic construct
  REGION 1..9: note = RAD50-interacting protein 1 (429-437)
HLVDEVLLF

SEQ ID NO: 25690 - protein, 9 aa, synthetic construct
  REGION 1..9: note = Thiamin pyrophosphokinase 1 (34-42)
HLWNKALLR

SEQ ID NO: 25691 - protein, 10 aa, synthetic construct
  REGION 1..10: note = Proline-rich nuclear receptor coactivator 1 (204-213)
HLYEQPKINR

SEQ ID NO: 25692 - protein, 9 aa, synthetic construct
  REGION 1..9: note = 60S ribosomal protein L19 (99-107)
HMYHSLYLK

SEQ ID NO: 25693 - protein, 9 aa, synthetic construct
  REGION 1..9: note = COP9 signalosome complex subunit 8 (47-55)
HNDMNNARY

SEQ ID NO: 25694 - protein, 12 aa, synthetic construct
  REGION 1..12: note = Probable ATP-dependent RNA helicase DDX5 (585-596)
HNGMNQQAYAYP

SEQ ID NO: 25695 - protein, 8 aa, synthetic construct
  REGION 1..8: note = Ankycorbin (931-938)
HQEVISVY

SEQ ID NO: 25696 - protein, 14 aa, synthetic construct
  REGION 1..14: note = Protein FAM98A (489-502)
HQGGQFEQHFQHGG

SEQ ID NO: 25697 - protein, 8 aa, synthetic construct
  REGION 1..8: note = WD repeat-containing protein 70 (230-237)
HQIKSLQY

SEQ ID NO: 25698 - protein, 10 aa, synthetic construct
  REGION 1..10: note = Sulfotransferase 1C2 (198-207)
HQILFLFYED

SEQ ID NO: 25699 - protein, 11 aa, synthetic construct
  REGION 1..11: note = Melanocyte protein PMEL (562-572)
HQILKGGSGTY

SEQ ID NO: 25700 - protein, 8 aa, synthetic construct
  REGION 1..8: note = Kinesin-1 heavy chain (712-719)
HQKQISSL

SEQ ID NO: 25701 - protein, 9 aa, synthetic construct
  REGION 1..9: note = Zinc finger SWIM domain-containing protein 3 (499-507)
HQSGSELAY

SEQ ID NO: 25702 - protein, 10 aa, synthetic construct
  REGION 1..10: note = Catenin delta-2 (274-283)
HRPPASEYTM

SEQ ID NO: 25703 - protein, 13 aa, synthetic construct
  REGION 1..13: note = RNMT-activating mini protein (94-106)
HRQEPYYPQQYGH

SEQ ID NO: 25704 - protein, 9 aa, synthetic construct
  REGION 1..9: note = Biorientation of chromosomes in cell division protein 1-like 1 (75-83)
HSALPNQSL

SEQ ID NO: 25705 - protein, 10 aa, synthetic construct
  REGION 1..10: note = Monoacylglycerol lipase ABHD12 (365-374)
HSDLGYRHKY

SEQ ID NO: 25706 - protein, 11 aa, synthetic construct
  REGION 1..11: note = Transient receptor potential cation channel subfamily A member 1 (758-768)
HSEILDTTNSY

SEQ ID NO: 25707 - protein, 9 aa, synthetic construct
  REGION 1..9: note = Alstrom syndrome protein 1 (958-966)
HSEKSSVFY

SEQ ID NO: 25708 - protein, 9 aa, synthetic construct
  REGION 1..9: note = Glycine dehydrogenase (decarboxylating), mitochondrial (529-537)
HSETNIVRY

SEQ ID NO: 25709 - protein, 10 aa, synthetic construct
  REGION 1..10: note = Dedicator of cytokinesis protein 9 (1147-1156)
HSFDDRYASR

SEQ ID NO: 25710 - protein, 11 aa, synthetic construct
  REGION 1..11: note = Tubulin alpha-3C/D chain (138-148)
HSFGGGTGSGF

SEQ ID NO: 25711 - protein, 12 aa, synthetic construct
  REGION 1..12: note = Tubulin alpha-1C chain (104-115)
HSFGGGTGSGFT

SEQ ID NO: 25712 - protein, 8 aa, synthetic construct
  REGION 1..8: note = E3 ubiquitin-protein ligase TRIM33 (605-612)
HSGPQYSM

SEQ ID NO: 25713 - protein, 14 aa, synthetic construct
  REGION 1..14: note = Tubulin gamma-1 chain (139-152)
HSIAGGTGSGLGSY

SEQ ID NO: 25714 - protein, 12 aa, synthetic construct
  REGION 1..12: note = Macrophage migration inhibitory factor (61-72)
HSIGKIGGAQNR

SEQ ID NO: 25715 - protein, 11 aa, synthetic construct
  REGION 1..11: note = Rho-related BTB domain-containing protein 3 (176-186)
HSLDDFYIGKY

SEQ ID NO: 25716 - protein, 11 aa, synthetic construct
  REGION 1..11: note = Copper transport protein ATOX1 (46-56)
HSMDTLLATLK

SEQ ID NO: 25717 - protein, 8 aa, synthetic construct
  REGION 1..8: note = 40S ribosomal protein S20 (92-99)
HSPSEIVK

SEQ ID NO: 25718 - protein, 12 aa, synthetic construct
  REGION 1..12: note = Transcriptional regulator Kaiso (573-584)
HSQDPSGDSKLY

SEQ ID NO: 25719 - protein, 10 aa, synthetic construct
  REGION 1..10: note = FERM domain-containing protein 4A (823-832)
HSQSQPSSQY

SEQ ID NO: 25720 - protein, 9 aa, synthetic construct
  REGION 1..9: note = Nipped-B-like protein (134-142)
HSSPASSNY

SEQ ID NO: 25721 - protein, 10 aa, synthetic construct
  REGION 1..10: note = Melanocyte protein PMEL (639-648)
HSSSHWLRLP

SEQ ID NO: 25722 - protein, 9 aa, synthetic construct
  REGION 1..9: note = Transformation/transcription domain-associated protein (3009-3017)
HSSSIVTAY

SEQ ID NO: 25723 - protein, 11 aa, synthetic construct
  REGION 1..11: note = PERQ amino acid-rich with GYF domain-containing protein 2 (1230-1240)
HSTLHSVFQTN

SEQ ID NO: 25724 - protein, 15 aa, synthetic construct
  REGION 1..15: note = PERQ amino acid-rich with GYF domain-containing protein 2 (1230-1244)
HSTLHSVFQTNQSNN

SEQ ID NO: 25725 - protein, 9 aa, synthetic construct
  REGION 1..9: note = Ribosome maturation protein SBDS (54-62)
HSVFVNVSK

SEQ ID NO: 25726 - protein, 8 aa, synthetic construct
  REGION 1..8: note = Proteasome assembly chaperone 2 (85-92)
HSYQRNDL

SEQ ID NO: 25727 - protein, 9 aa, synthetic construct
  REGION 1..9: note = Adenine DNAosylase (479-487)
HTAAVSTAM

SEQ ID NO: 25728 - protein, 9 aa, synthetic construct
  REGION 1..9: note = Protein archease (38-46)
HTADVHGLY

SEQ ID NO: 25729 - protein, 10 aa, synthetic construct
  REGION 1..10: note = Protein archease (38-47)
HTADVHGLYY

SEQ ID NO: 25730 - protein, 10 aa, synthetic construct
  REGION 1..10: note = Protein O-linked-mannose beta-1,2-N-acetylglucosaminyltransferase 1 (410-419)
HTAEDPALLY

SEQ ID NO: 25731 - protein, 9 aa, synthetic construct
  REGION 1..9: note = Proton myo-inositol cotransporter (546-554)
HTAEYLTYY

SEQ ID NO: 25732 - protein, 9 aa, synthetic construct
  REGION 1..9: note = Hydroxyacylglutathione hydrolase-like protein (110-118)
HTAGHMSYF

SEQ ID NO: 25733 - protein, 9 aa, synthetic construct
  REGION 1..9: note = Tensin-1 (628-636)
HTAPMRPSY

SEQ ID NO: 25734 - protein, 9 aa, synthetic construct
  REGION 1..9: note = CD63 antigen (131-139)
HTASILDRM

SEQ ID NO: 25735 - protein, 9 aa, synthetic construct
  REGION 1..9: note = Alanine-tRNA ligase, cytoplasmic (605-613)
HTATHILNF

SEQ ID NO: 25736 - protein, 8 aa, synthetic construct
  REGION 1..8: note = U3 small nucleolar RNA-associated protein 6 homolog (267-274)
HTDDPLTW

SEQ ID NO: 25737 - protein, 8 aa, synthetic construct
  REGION 1..8: note = Mitochondrial enolase superfamily member 1 (29-36)
HTDPDYSA

SEQ ID NO: 25738 - protein, 10 aa, synthetic construct
  REGION 1..10: note = Ras GTPase-activating protein 3 (501-510)
HTDPQTSRTL

SEQ ID NO: 25739 - protein, 10 aa, synthetic construct
  REGION 1..10: note = Zinc finger protein DZIP1 (221-230)
HTEENSHFEY

SEQ ID NO: 25740 - protein, 9 aa, synthetic construct
  REGION 1..9: note = Protein FAM214A (1013-1021)
HTEERLLRY

SEQ ID NO: 25741 - protein, 12 aa, synthetic construct
  REGION 1..12: note = Melanophilin (469-480)
HTFAKPVVAHQS

SEQ ID NO: 25742 - protein, 11 aa, synthetic construct
  REGION 1..11: note = Cytochrome c oxidase subunit 1 (503-513)
HTFEEPVYMKS

SEQ ID NO: 25743 - protein, 13 aa, synthetic construct
  REGION 1..13: note = Protein tyrosine phosphatase type IVA 1 (21-33)
HTFMEFLKGSGDY

SEQ ID NO: 25744 - protein, 10 aa, synthetic construct
  REGION 1..10: note = GRB2-associated-binding protein 2 (554-563)
HTFNSSSSQY

SEQ ID NO: 25745 - protein, 9 aa, synthetic construct
  REGION 1..9: note = Discoidin, CUB and LCCL domain-containing protein 1 (613-621)
HTFSAQSGY

SEQ ID NO: 25746 - protein, 9 aa, synthetic construct
  REGION 1..9: note = Importin-8 (408-416)
HTIDTILTV

SEQ ID NO: 25747 - protein, 11 aa, synthetic construct
  REGION 1..11: note = Protein pelota homolog (100-110)
HTIELEPNRQF

SEQ ID NO: 25748 - protein, 9 aa, synthetic construct
  REGION 1..9: note = Tubulin polyglutamylase TTLL5 (968-976)
HTIGPFSSF

SEQ ID NO: 25749 - protein, 10 aa, synthetic construct
  REGION 1..10: note = Nuclear pore complex protein Nup107 (862-871)
HTILHSTGQY

SEQ ID NO: 25750 - protein, 10 aa, synthetic construct
  REGION 1..10: note = S-methyl-5'-thioadenosine phosphorylase (65-74)
HTIMPSKVNY

SEQ ID NO: 25751 - protein, 9 aa, synthetic construct
  REGION 1..9: note = Serologically defined colon cancer antigen 8 (120-128)
HTINDQSQY

SEQ ID NO: 25752 - protein, 9 aa, synthetic construct
  REGION 1..9: note = Minor histocompatibility antigen H13 (119-127)
HTISPFMNK

SEQ ID NO: 25753 - protein, 14 aa, synthetic construct
  REGION 1..14: note = Tyrosinase (143-156)
HTISSDYVIPIGTY

SEQ ID NO: 25754 - protein, 9 aa, synthetic construct
  REGION 1..9: note = Cytoskeleton-associated protein 2 (499-507)
HTIVDILTM

SEQ ID NO: 25755 - protein, 10 aa, synthetic construct
  REGION 1..10: note = Cytoplasmic protein NCK2 (351-360)
HTMDELVEHY

SEQ ID NO: 25756 - protein, 12 aa, synthetic construct
  REGION 1..12: note = U3 small nucleolar RNA-associated protein 18 homolog (362-373)
HTMDFSPRSGYF

SEQ ID NO: 25757 - protein, 11 aa, synthetic construct
  REGION 1..11: note = Queuine tRNA-ribosyltransferase subunit QTRTD1 (26-36)
HTMDIPGCLLY

SEQ ID NO: 25758 - protein, 9 aa, synthetic construct
  REGION 1..9: note = Syntaxin-18 (80-88)
HTMSEYGRM

SEQ ID NO: 25759 - protein, 10 aa, synthetic construct
  REGION 1..10: note = Histone-lysine N-methyltransferase setd3 (279-288)
HTNGLITTGY

SEQ ID NO: 25760 - protein, 11 aa, synthetic construct
  REGION 1..11: note = Alpha-adducin (241-251)
HTPAGAAVSAM

SEQ ID NO: 25761 - protein, 10 aa, synthetic construct
  REGION 1..10: note = Alpha-1,6-mannosylglycoprotein 6-beta-N-acetylglucosaminyltransferase B (424-433)
HTPDNSFMGF

SEQ ID NO: 25762 - protein, 10 aa, synthetic construct
  REGION 1..10: note = Lanosterol 14-alpha demethylase (489-498)
HTPENPVIRY

SEQ ID NO: 25763 - protein, 11 aa, synthetic construct
  REGION 1..11: note = Iroquois-class homeodomain protein IRX-5 (89-99)
HTPGMAGSLGY

SEQ ID NO: 25764 - protein, 9 aa, synthetic construct
  REGION 1..9: note = Ligand of Numb protein X 2 (443-451)
HTPPPYYSR

SEQ ID NO: 25765 - protein, 11 aa, synthetic construct
  REGION 1..11: note = Tensin-1 (410-420)
HTQGPLDGSLY

SEQ ID NO: 25766 - protein, 10 aa, synthetic construct
  REGION 1..10: note = Succinate dehydrogenase (ubiquinone) flavoprotein subunit, mitochondrial (270-279)
HTSTGDGTAM

SEQ ID NO: 25767 - protein, 9 aa, synthetic construct
  REGION 1..9: note = Very-long-chain (3R)-3-hydroxyacyl-CoA dehydratase 3 (185-193)
HTVADMMYF

SEQ ID NO: 25768 - protein, 9 aa, synthetic construct
  REGION 1..9: note = Tetratricopeptide repeat protein 38 (218-226)
HTVAHIHEM

SEQ ID NO: 25769 - protein, 10 aa, synthetic construct
  REGION 1..10: note = U3 small nucleolar RNA-associated protein 15 homolog (126-135)
HTVDFTADKY

SEQ ID NO: 25770 - protein, 11 aa, synthetic construct
  REGION 1..11: note = Aprataxin (170-180)
HTVGEKVIVDF

SEQ ID NO: 25771 - protein, 10 aa, synthetic construct
  REGION 1..10: note = Sodium-dependent phosphate transporter 1 (379-388)
HTVHKDSGLY

SEQ ID NO: 25772 - protein, 10 aa, synthetic construct
  REGION 1..10: note = Heterogeneous nuclear ribonucleoprotein A1-like 2 (15-24)
HTVNGHNCEV

SEQ ID NO: 25773 - protein, 12 aa, synthetic construct
  REGION 1..12: note = Melanocyte protein PMEL (285-296)
HTYLEPGPVTAQ

SEQ ID NO: 25774 - protein, 10 aa, synthetic construct
  REGION 1..10: note = Oxidoreductase-like domain-containing protein 1 (115-124)
HVADENLKAF

SEQ ID NO: 25775 - protein, 10 aa, synthetic construct
  REGION 1..10: note = Condensin complex subunit 2 (196-205)
HVADGSATEM

SEQ ID NO: 25776 - protein, 10 aa, synthetic construct
  REGION 1..10: note = 1-phosphatidylinositol 4,5-bisphosphate phosphodiesterase beta-4 (428-437)
HVAEERNIHY

SEQ ID NO: 25777 - protein, 10 aa, synthetic construct
  REGION 1..10: note = Protein FAN (292-301)
HVAEHTAESY

SEQ ID NO: 25778 - protein, 9 aa, synthetic construct
  REGION 1..9: note = GPI-anchor transamidase (62-70)
HVANTLSVY

SEQ ID NO: 25779 - protein, 10 aa, synthetic construct
  REGION 1..10: note = RNA polymerase-associated protein CTR9 homolog (745-754)
HVAPSDTVLM

SEQ ID NO: 25780 - protein, 11 aa, synthetic construct
  REGION 1..11: note = RNA polymerase-associated protein CTR9 homolog (745-755)
HVAPSDTVLMF

SEQ ID NO: 25781 - protein, 9 aa, synthetic construct
  REGION 1..9: note = 40S ribosomal protein S16 (76-84)
HVAQIYAIR

SEQ ID NO: 25782 - protein, 9 aa, synthetic construct
  REGION 1..9: note = F-box only protein 31 (181-189)
HVDDPMRFK

SEQ ID NO: 25783 - protein, 9 aa, synthetic construct
  REGION 1..9: note = tRNA wybutosine-synthesizing protein 2 homolog (192-200)
HVDNGIRYK

SEQ ID NO: 25784 - protein, 8 aa, synthetic construct
  REGION 1..8: note = P protein (222-229)
HVDSTLLQ

SEQ ID NO: 25785 - protein, 9 aa, synthetic construct
  REGION 1..9: note = P protein (222-230)
HVDSTLLQV

SEQ ID NO: 25786 - protein, 10 aa, synthetic construct
  REGION 1..10: note = PRELI domain containing protein 3B (8-17)
HVFDHPWETV

SEQ ID NO: 25787 - protein, 10 aa, synthetic construct
  REGION 1..10: note = RNA polymerase II subunit A C-terminal domain phosphatase (243-252)
HVFTFGSRLY

SEQ ID NO: 25788 - protein, 9 aa, synthetic construct
  REGION 1..9: note = Neuropilin-2 (221-229)
HVGPLIGKY

SEQ ID NO: 25789 - protein, 9 aa, synthetic construct
  REGION 1..9: note = Filamin-A (138-146)
HVGSRLYSV

SEQ ID NO: 25790 - protein, 9 aa, synthetic construct
  REGION 1..9: note = Endoribonuclease Dicer (1769-1777)
HVIDDFVQF

SEQ ID NO: 25791 - protein, 11 aa, synthetic construct
  REGION 1..11: note = TRAF2 and NCK-interacting protein kinase (370-380)
HVIDVDSGNSY

SEQ ID NO: 25792 - protein, 11 aa, synthetic construct
  REGION 1..11: note = Activity-dependent neuroprotector homeobox protein (210-220)
HVIEDHERIGY

SEQ ID NO: 25793 - protein, 9 aa, synthetic construct
  REGION 1..9: note = Interferon-induced helicase C domain-containing protein 1 (921-929)
HVIEKMHHV

SEQ ID NO: 25794 - protein, 11 aa, synthetic construct
  REGION 1..11: note = Cytochrome b-c1 complex subunit 2, mitochondrial (172-182)
HVIENLHAAAY

SEQ ID NO: 25795 - protein, 9 aa, synthetic construct
  REGION 1..9: note = Myomegalin (2179-2187)
HVIGHIDDY

SEQ ID NO: 25796 - protein, 11 aa, synthetic construct
  REGION 1..11: note = Protein bicaudal C homolog 1 (746-756)
HVIGKGGNNIK

SEQ ID NO: 25797 - protein, 10 aa, synthetic construct
  REGION 1..10: note = 116 kDa U5 small nuclear ribonucleoprotein component (627-636)
HVILGTGELY

SEQ ID NO: 25798 - protein, 10 aa, synthetic construct
  REGION 1..10: note = Voltage-gated potassium channel subunit beta-1 (216-225)
HVINQGMAMY

SEQ ID NO: 25799 - protein, 9 aa, synthetic construct
  REGION 1..9: note = Regulator of telomere elongation helicase 1 (740-748)
HVIRDVAQF

SEQ ID NO: 25800 - protein, 10 aa, synthetic construct
  REGION 1..10: note = BTB/POZ domain-containing protein KCTD1 (197-206)
HVIRFPLNGY

SEQ ID NO: 25801 - protein, 12 aa, synthetic construct
  REGION 1..12: note = DNA-directed RNA polymerase II subunit RPB1 (1384-1395)
HVISFDGSYVNY

SEQ ID NO: 25802 - protein, 10 aa, synthetic construct
  REGION 1..10: note = Disco-interacting protein 2 homolog C (561-570)
HVISIPYSLM

SEQ ID NO: 25803 - protein, 9 aa, synthetic construct
  REGION 1..9: note = E3 SUMO-protein ligase RanBP2 (2985-2993)
HVITKTMEL

SEQ ID NO: 25804 - protein, 10 aa, synthetic construct
  REGION 1..10: note = 40S ribosomal protein S4, Y isoform 1 (208-217)
HVKDANGNSF

SEQ ID NO: 25805 - protein, 10 aa, synthetic construct
  REGION 1..10: note = Nodal modulator 3 (252-261)
HVLGTITTDK

SEQ ID NO: 25806 - protein, 10 aa, synthetic construct
  REGION 1..10: note = Pecanex-like protein 1 (113-122)
HVMDDGTNEY

SEQ ID NO: 25807 - protein, 10 aa, synthetic construct
  REGION 1..10: note = Pleckstrin homology domain-containing family G member 3 (497-506)
HVMDSHVSER

SEQ ID NO: 25808 - protein, 11 aa, synthetic construct
  REGION 1..11: note = Elongation factor G, mitochondrial (445-455)
HVPDPVISIAM

SEQ ID NO: 25809 - protein, 9 aa, synthetic construct
  REGION 1..9: note = Probable phospholipid-transporting ATPase IIB (501-509)
HVRDSYSQM

SEQ ID NO: 25810 - protein, 9 aa, synthetic construct
  REGION 1..9: note = Sideroflexin-1 (171-179)
HVSPLIGRF

SEQ ID NO: 25811 - protein, 9 aa, synthetic construct
  REGION 1..9: note = Long-chain-fatty-acid-CoA ligase 3 (4-12)
HVSSKPSTM

SEQ ID NO: 25812 - protein, 11 aa, synthetic construct
  REGION 1..11: note = Zinc finger protein 451 (549-559)
HVTEFHNGHRY

SEQ ID NO: 25813 - protein, 9 aa, synthetic construct
  REGION 1..9: note = Deoxyribose-phosphate aldolase (322-330)
HVTGRYAAY

SEQ ID NO: 25814 - protein, 9 aa, synthetic construct
  REGION 1..9: note = Phosphoribosylformylglycinamidine synthase (342-350)
HVVAGTAGY

SEQ ID NO: 25815 - protein, 10 aa, synthetic construct
  REGION 1..10: note = Jouberin (369-378)
HVVDEHTGQY

SEQ ID NO: 25816 - protein, 9 aa, synthetic construct
  REGION 1..9: note = Nephrocystin-4 (1128-1136)
HVVDQVFRF

SEQ ID NO: 25817 - protein, 11 aa, synthetic construct
  REGION 1..11: note = Tetratricopeptide repeat protein 39B (542-552)
HVVESEKLLKY

SEQ ID NO: 25818 - protein, 10 aa, synthetic construct
  REGION 1..10: note = Dedicator of cytokinesis protein 10 (121-130)
HVVNYKYEQY

SEQ ID NO: 25819 - protein, 9 aa, synthetic construct
  REGION 1..9: note = Large proline-rich protein BAG6 (350-358)
HVVRPMSHY

SEQ ID NO: 25820 - protein, 9 aa, synthetic construct
  REGION 1..9: note = HEAT repeat-containing protein 5A (373-381)
HVVSSVSSF

SEQ ID NO: 25821 - protein, 12 aa, synthetic construct
  REGION 1..12: note = WD repeat-containing protein 74 (10-21)
HVWVGTETGILK

SEQ ID NO: 25822 - protein, 11 aa, synthetic construct
  REGION 1..11: note = Vesicle-associated membrane protein 7 (159-169)
HVYEEPQAHYY

SEQ ID NO: 25823 - protein, 10 aa, synthetic construct
  REGION 1..10: note = Regulator of chromosome condensation (291-300)
HVYGFGLSNY

SEQ ID NO: 25824 - protein, 9 aa, synthetic construct
  REGION 1..9: note = Transmembrane protein 209 (513-521)
HVYNLPKGR

SEQ ID NO: 25825 - protein, 10 aa, synthetic construct
  REGION 1..10: note = Bcl-2 homologous antagonist/killer (141-150)
HVYQHGLTGF

SEQ ID NO: 25826 - protein, 9 aa, synthetic construct
  REGION 1..9: note = Little elongation complex subunit 1 (1936-1944)
HVYVGNISK

SEQ ID NO: 25827 - protein, 10 aa, synthetic construct
  REGION 1..10: note = Neutral amino acid transporter B(0) (523-532)
HYRGPAGDAT

SEQ ID NO: 25828 - protein, 10 aa, synthetic construct
  REGION 1..10: note = UPF0568 protein C14orf166 (230-239)
IADPKTDHRL

SEQ ID NO: 25829 - protein, 9 aa, synthetic construct
  REGION 1..9: note = Endoplasmin (212-220)
IADPRGNTL

SEQ ID NO: 25830 - protein, 12 aa, synthetic construct
  REGION 1..12: note = 40S ribosomal protein S19 (134-145)
IAGQVAAANKKH

SEQ ID NO: 25831 - protein, 9 aa, synthetic construct
  REGION 1..9: note = Tensin-1 (1325-1333)
IASPGSPSL

SEQ ID NO: 25832 - protein, 9 aa, synthetic construct
  REGION 1..9: note = Hemicentin-1 (4090-4098)
IAVDKPITL

SEQ ID NO: 25833 - protein, 9 aa, synthetic construct
  REGION 1..9: note = Uncharacterized protein KIAA1210 (412-420)
IAVERVISV

SEQ ID NO: 25834 - protein, 9 aa, synthetic construct
  REGION 1..9: note = Protein SDE2 homolog (286-294)
IDKETIDLL

SEQ ID NO: 25835 - protein, 13 aa, synthetic construct
  REGION 1..13: note = Syndecan-3 (293-305)
IDSGSSAAQLPQK

SEQ ID NO: 25836 - protein, 10 aa, synthetic construct
  REGION 1..10: note = Cullin-3 (721-730)
IEGLIEREYL

SEQ ID NO: 25837 - protein, 8 aa, synthetic construct
  REGION 1..8: note Dolichyl-diphosphooligosaccharide-proteinosyltransferase subunit 1 (381-388)
IEIDSPYE

SEQ ID NO: 25838 - protein, 11 aa, synthetic construct
  REGION 1..11: note = Complex I assembly factor TMEM126B, mitochondrial (24-34)
IEIIEKNFDYL

SEQ ID NO: 25839 - protein, 10 aa, synthetic construct
  REGION 1..10: note = Copper transport protein ATOX1 (42-51)
IESEHSMDTL

SEQ ID NO: 25840 - protein, 11 aa, synthetic construct
  REGION 1..11: note = Copper transport protein ATOX1 (42-52)
IESEHSMDTLL

SEQ ID NO: 25841 - protein, 8 aa, synthetic construct
  REGION 1..8: note = N-acyl-aromatic-L-amino acid amidohydrolase (carboxylate-forming) (191-198)
IFSRMRTL

SEQ ID NO: 25842 - protein, 10 aa, synthetic construct
  REGION 1..10: note = Cadherin-19 (91-100)
IIDERTGDIY

SEQ ID NO: 25843 - protein, 9 aa, synthetic construct
  REGION 1..9: note = 40S ribosomal protein S17 (95-103)
IIEVDPDTK

SEQ ID NO: 25844 - protein, 10 aa, synthetic construct
  REGION 1..10: note = FACT complex subunit SSRP1 (30-39)
IIFKNSKTGK

SEQ ID NO: 25845 - protein, 9 aa, synthetic construct
  REGION 1..9: note = Neuron navigator 2 (2224-2232)
IILDNLHHV

SEQ ID NO: 25846 - protein, 14 aa, synthetic construct
  REGION 1..14: note = Putative heat shock 70 kDa protein 7 (30-43)
ILANDQGNRTTPSY

SEQ ID NO: 25847 - protein, 10 aa, synthetic construct
  REGION 1..10: note = Fer-1-like protein 5 (1201-1210)
ILASCELILQ

SEQ ID NO: 25848 - protein, 10 aa, synthetic construct
  REGION 1..10: note = U6 snRNA-associated Sm-like protein LSm8 (16-25)
ILDESHERVF

SEQ ID NO: 25849 - protein, 10 aa, synthetic construct
  REGION 1..10: note = Cleft lip and palate transmembrane protein 1 (410-419)
ILDNETNFVV

SEQ ID NO: 25850 - protein, 9 aa, synthetic construct
  REGION 1..9: note = Vesicle transport protein USE1 (249-257)
ILFIRIMPK

SEQ ID NO: 25851 - protein, 10 aa, synthetic construct
  REGION 1..10: note = TELO2-interacting protein 1 homolog (52-61)
ILFPLRFTLK

SEQ ID NO: 25852 - protein, 17 aa, synthetic construct
  REGION 1..17: note = Transforming growth factor beta receptor type 3 (374-390)
ILLDPGALPALQNPPIR

SEQ ID NO: 25853 - protein, 11 aa, synthetic construct
  REGION 1..11: note = Serine/threonine-protein kinase Sgk1 (323-333)
ILLDSQGHIVL

SEQ ID NO: 25854 - protein, 11 aa, synthetic construct
  REGION 1..11: note = Eukaryotic translation initiation factor 3 subunit A (542-552)
ILQEKEEQHQL

SEQ ID NO: 25855 - protein, 9 aa, synthetic construct
  REGION 1..9: note = Inositol-trisphosphate 3-kinase B (133-141)
ILQRELQNV

SEQ ID NO: 25856 - protein, 10 aa, synthetic construct
  REGION 1..10: note = Myotubularin-related protein 6 isoform X4 (104-113)
ILTKELLHSV

SEQ ID NO: 25857 - protein, 13 aa, synthetic construct
  REGION 1..13: note = Sodium/potassium/calcium exchanger 5 (18-30)
ILWATAHLPLSGT

SEQ ID NO: 25858 - protein, 11 aa, synthetic construct
  REGION 1..11: note = Chromosome transmission fidelity protein 8 homolog (58-68)
ILYGKIIHLEK

SEQ ID NO: 25859 - protein, 10 aa, synthetic construct
  REGION 1..10: note = 40S ribosomal protein S3 (188-197)
IMLPWDPTGK

SEQ ID NO: 25860 - protein, 8 aa, synthetic construct
  REGION 1..8: note = Vimentin (182-189)
IMRLREKL

SEQ ID NO: 25861 - protein, 12 aa, synthetic construct
  REGION 1..12: note = MAGUK p55 subfamily member 2 (395-406)
IMWDPDRYGTTV

SEQ ID NO: 25862 - protein, 9 aa, synthetic construct
  REGION 1..9: note = Bromodomain adjacent to zinc finger domain protein 1A (730-738)
INCVTREPL

SEQ ID NO: 25863 - protein, 9 aa, synthetic construct
  REGION 1..9: note = Sarcospan (117-125)
IQFSMKLLY

SEQ ID NO: 25864 - protein, 10 aa, synthetic construct
  REGION 1..10: note = Catalase (347-356)
IQYSGEVRRF

SEQ ID NO: 25865 - protein, 17 aa, synthetic construct
  REGION 1..17: note = Calmodulin (126-142)
IREADIDGDGQVNYEEF

SEQ ID NO: 25866 - protein, 9 aa, synthetic construct
  REGION 1..9: note = 60S ribosomal protein L32 (21-29)
IRHQSDRYV

SEQ ID NO: 25867 - protein, 9 aa, synthetic construct
  REGION 1..9: note = ATP-citrate synthase (6-14)
ISEQTGKEL

SEQ ID NO: 25868 - protein, 9 aa, synthetic construct
  REGION 1..9: note = XAGE1D protein (105-113)
ISQTPGINL

SEQ ID NO: 25869 - protein, 8 aa, synthetic construct
  REGION 1..8: note = Metalloproteinase inhibitor 4 (52-59)
ISSEKVVP

SEQ ID NO: 25870 - protein, 12 aa, synthetic construct
  REGION 1..12: note = Transmembraneoprotein NMB (483-494)
ISVPDRDPASPL

SEQ ID NO: 25871 - protein, 11 aa, synthetic construct
  REGION 1..11: note = 40S ribosomal protein S18 (30-40)
ITAIKGVGRRY

SEQ ID NO: 25872 - protein, 9 aa, synthetic construct
  REGION 1..9: note = Melanoma-associated antigen D4 (549-557)
ITDDFVKQK

SEQ ID NO: 25873 - protein, 15 aa, synthetic construct
  REGION 1..15: note = Melanocyte protein PMEL (216-230)
ITDQVPFSVSVSQLR

SEQ ID NO: 25874 - protein, 11 aa, synthetic construct
  REGION 1..11: note = Voltage-dependent L-type calcium channel subunit alpha-1C (1300-1310)
ITENAEENSRI

SEQ ID NO: 25875 - protein, 10 aa, synthetic construct
  REGION 1..10: note = Beta-adrenergic receptor kinase 2 (53-62)
ITFDKIFNQK

SEQ ID NO: 25876 - protein, 13 aa, synthetic construct
  REGION 1..13: note = Galectin-3 (132-144)
ITILGTVKPNANR

SEQ ID NO: 25877 - protein, 15 aa, synthetic construct
  REGION 1..15: note = Galectin-3 (132-146)
ITILGTVKPNANRIA

SEQ ID NO: 25878 - protein, 9 aa, synthetic construct
  REGION 1..9: note = Catalase (42-50)
ITVGPRGPL

SEQ ID NO: 25879 - protein, 9 aa, synthetic construct
  REGION 1..9: note = Dipeptidyl peptidase 4 (185-193)
ITWTGKEDI

SEQ ID NO: 25880 - protein, 11 aa, synthetic construct
  REGION 1..11: note = Galectin-8 (91-101)
ITYDTPFKREK

SEQ ID NO: 25881 - protein, 12 aa, synthetic construct
  REGION 1..12: note = Proteasome subunit alpha type-7 (133-144)
IVGFDFDGTPRL

SEQ ID NO: 25882 - protein, 9 aa, synthetic construct
  REGION 1..9: note = F-box only protein 11 (19-27)
IVHTNFVEK

SEQ ID NO: 25883 - protein, 9 aa, synthetic construct
  REGION 1..9: note = Protein SMG5 (881-889)
IVIIPRTVI

SEQ ID NO: 25884 - protein, 13 aa, synthetic construct
  REGION 1..13: note = Zinc finger CCHC domain-containing protein 10 (33-45)
IVIRDSVAQAGLK

SEQ ID NO: 25885 - protein, 10 aa, synthetic construct
  REGION 1..10: note = Teneurin-4 (347-356)
IVISATLVIL

SEQ ID NO: 25886 - protein, 9 aa, synthetic construct
  REGION 1..9: note = U4/U6 small nuclear ribonucleoprotein Prp31 (462-470)
IVNPQAAEK

SEQ ID NO: 25887 - protein, 9 aa, synthetic construct
  REGION 1..9: note = P antigen family member 5 (47-55)
IVQQPTEEK

SEQ ID NO: 25888 - protein, 10 aa, synthetic construct
  REGION 1..10: note = Carbohydrate sulfotransferase 9 (266-275)
IYTRLNTYTK

SEQ ID NO: 25889 - protein, 13 aa, synthetic construct
  REGION 1..13: note = Cap-specific mRNAucleoside-2'-O-)-methyltransferase 1 (72-84)
KADSLVEGTSSRY

SEQ ID NO: 25890 - protein, 9 aa, synthetic construct
  REGION 1..9: note = Antigen KI-67 (793-801)
KADVEEEFL

SEQ ID NO: 25891 - protein, 10 aa, synthetic construct
  REGION 1..10: note = Coatomer subunit zeta-1 (19-28)
KAFEKNIFNK

SEQ ID NO: 25892 - protein, 11 aa, synthetic construct
  REGION 1..11: note = Zinc finger and SCAN domain-containing protein 21 (278-288)
KAFGQSSDLLK

SEQ ID NO: 25893 - protein, 9 aa, synthetic construct
  REGION 1..9: note = Estradiol 17-beta-dehydrogenase 11 (153-161)
KAFLPAMTK

SEQ ID NO: 25894 - protein, 10 aa, synthetic construct
  REGION 1..10: note = Antigen KI-67 (828-837)
KAFMGTPVQK

SEQ ID NO: 25895 - protein, 9 aa, synthetic construct
  REGION 1..9: note = Zinc finger protein 7 (98-106)
KAFSQSSSL

SEQ ID NO: 25896 - protein, 11 aa, synthetic construct
  REGION 1..11: note = Zinc finger protein 430 (519-529)
KAFSQSSTLTK

SEQ ID NO: 25897 - protein, 10 aa, synthetic construct
  REGION 1..10: note = Xaa-Pro dipeptidase (484-493)
KAFTPFSGPK

SEQ ID NO: 25898 - protein, 11 aa, synthetic construct
  REGION 1..11: note = Zinc finger protein 721 (184-194)
KAFTSSTTLTK

SEQ ID NO: 25899 - protein, 9 aa, synthetic construct
  REGION 1..9: note = Dynactin subunit 1 (141-149)
KAHAKAIEM

SEQ ID NO: 25900 - protein, 9 aa, synthetic construct
  REGION 1..9: note = Histone-binding protein RBBP7 (263-271)
KAIFTGHSA

SEQ ID NO: 25901 - protein, 9 aa, synthetic construct
  REGION 1..9: note = Protein ECT2 (595-603)
KAIGSLKEV

SEQ ID NO: 25902 - protein, 9 aa, synthetic construct
  REGION 1..9: note = Nitrogen permease regulator 3-like protein (253-261)
KAIRPYHAL

SEQ ID NO: 25903 - protein, 9 aa, synthetic construct
  REGION 1..9: note = Elongation factor 1-gamma (193-201)
KAKDPFAHL

SEQ ID NO: 25904 - protein, 11 aa, synthetic construct
  REGION 1..11: note = Dynamin-like 120 kDa protein, mitochondrial (154-164)
KALPSSEDLVK

SEQ ID NO: 25905 - protein, 10 aa, synthetic construct
  REGION 1..10: note = Annexin A1 (98-107)
KALTGHLEEV

SEQ ID NO: 25906 - protein, 9 aa, synthetic construct
  REGION 1..9: note = Phosphoinositide 3-kinase regulatory subunit 4 (572-580)
KANDVLLSH

SEQ ID NO: 25907 - protein, 9 aa, synthetic construct
  REGION 1..9: note = UDP-glucose:glycoprotein glucosyltransferase 2 (1135-1143)
KANPGAWIL

SEQ ID NO: 25908 - protein, 9 aa, synthetic construct
  REGION 1..9: note = Importin subunit alpha-1 (486-494)
KASLSLIEK

SEQ ID NO: 25909 - protein, 9 aa, synthetic construct
  REGION 1..9: note = Ectonucleoside triphosphate diphosphohydrolase 6 (156-164)
KATPLVLKA

SEQ ID NO: 25910 - protein, 9 aa, synthetic construct
  REGION 1..9: note = Protein FAM161A (564-572)
KAYDSHQSL

SEQ ID NO: 25911 - protein, 11 aa, synthetic construct
  REGION 1..11: note = Gamma-soluble NSF attachment protein (76-86)
KAYEQAGMMLK

SEQ ID NO: 25912 - protein, 9 aa, synthetic construct
  REGION 1..9: note = Cell division cycle protein 23 homolog (85-93)
KAYFDVKEY

SEQ ID NO: 25913 - protein, 11 aa, synthetic construct
  REGION 1..11: note = 28S ribosomal protein S29, mitochondrial (321-331)
KAYLPQELLGK

SEQ ID NO: 25914 - protein, 9 aa, synthetic construct
  REGION 1..9: note = NF-kappa-B inhibitor zeta (545-553)
KAYNGNTAL

SEQ ID NO: 25915 - protein, 9 aa, synthetic construct
  REGION 1..9: note = Protein phosphatase Slingshot homolog 1 (418-426)
KAYNYVKQK

SEQ ID NO: 25916 - protein, 9 aa, synthetic construct
  REGION 1..9: note = Integrator complex subunit 11 (122-130)
KAYYAGHVL

SEQ ID NO: 25917 - protein, 9 aa, synthetic construct
  REGION 1..9: note = Switch-associated protein 70 (278-286)
KCFDKTFEI

SEQ ID NO: 25918 - protein, 10 aa, synthetic construct
  REGION 1..10: note = Zinc finger protein 860 (39-48)
KCLDPTQRAL

SEQ ID NO: 25919 - protein, 10 aa, synthetic construct
  REGION 1..10: note = Keratin, type II cytoskeletal 1 (289-298)
KDVDGAYMTK

SEQ ID NO: 25920 - protein, 10 aa, synthetic construct
  REGION 1..10: note = Little elongation complex subunit 1 (521-530)
KEAAPGKSEL

SEQ ID NO: 25921 - protein, 10 aa, synthetic construct
  REGION 1..10: note = Rho guanine nucleotide exchange factor 40 (405-414)
KEDASHQEAL

SEQ ID NO: 25922 - protein, 9 aa, synthetic construct
  REGION 1..9: note = Ras-related protein Ral-A (118-126)
KEDENVPFL

SEQ ID NO: 25923 - protein, 9 aa, synthetic construct
  REGION 1..9: note = DNA ligase 3 (389-397)
KEDEQQQAL

SEQ ID NO: 25924 - protein, 9 aa, synthetic construct
  REGION 1..9: note = Protein SOGA1 (625-633)
KEDQQRALL

SEQ ID NO: 25925 - protein, 9 aa, synthetic construct
  REGION 1..9: note Dolichyl-diphosphooligosaccharide-proteinosyltransferase subunit 2 (229-237)
KEDQVIQLM

SEQ ID NO: 25926 - protein, 10 aa, synthetic construct
  REGION 1..10: note = DNA replication licensing factor MCM7 (259-268)
KEDVNEAIRL

SEQ ID NO: 25927 - protein, 10 aa, synthetic construct
  REGION 1..10: note = Spermine synthase (169-178)
KEDYTGKDVL

SEQ ID NO: 25928 - protein, 9 aa, synthetic construct
  REGION 1..9: note = Integrin alpha-7 (1092-1100)
KEEKTGTIL

SEQ ID NO: 25929 - protein, 9 aa, synthetic construct
  REGION 1..9: note = Eukaryotic translation initiation factor 3 subunit A (105-113)
KEESQQMVL

SEQ ID NO: 25930 - protein, 13 aa, synthetic construct
  REGION 1..13: note = Solute carrier family 43 member 3 (268-280)
KEETPGAGQKQEL

SEQ ID NO: 25931 - protein, 9 aa, synthetic construct
  REGION 1..9: note = Ras-related protein Rab-17 (148-156)
KEFADSQKL

SEQ ID NO: 25932 - protein, 12 aa, synthetic construct
  REGION 1..12: note = Exportin-1 (1023-1034)
KEFAGEDTSDLF

SEQ ID NO: 25933 - protein, 8 aa, synthetic construct
  REGION 1..8: note = Heat shock protein HSP 90-alpha (656-663)
KEFEGKTL

SEQ ID NO: 25934 - protein, 9 aa, synthetic construct
  REGION 1..9: note = Protein phosphatase Slingshot homolog 1 (292-300)
KEFIDNEML

SEQ ID NO: 25935 - protein, 10 aa, synthetic construct
  REGION 1..10: note = Oxidative stress-induced growth inhibitor 1 (196-205)
KEHAIPHVVL

SEQ ID NO: 25936 - protein, 9 aa, synthetic construct
  REGION 1..9: note = Trophinin (105-113)
KEIDKQSSL

SEQ ID NO: 25937 - protein, 10 aa, synthetic construct
  REGION 1..10: note = Heat shock 70 kDa protein 4 (766-775)
KEIEAKIKEL

SEQ ID NO: 25938 - protein, 9 aa, synthetic construct
  REGION 1..9: note = WASH complex subunit 7 (678-686)
KEIEKDLRL

SEQ ID NO: 25939 - protein, 10 aa, synthetic construct
  REGION 1..10: note = THO complex subunit 5 homolog (217-226)
KEIEVKKEYL

SEQ ID NO: 25940 - protein, 10 aa, synthetic construct
  REGION 1..10: note = Calcium/calmodulin-dependent protein kinase type IV (135-144)
KEIFETPTEI

SEQ ID NO: 25941 - protein, 11 aa, synthetic construct
  REGION 1..11: note = Kinesin-like protein KIF2C (653-663)
KEIIQQGPDWL

SEQ ID NO: 25942 - protein, 10 aa, synthetic construct
  REGION 1..10: note = Spectrin beta chain, non-erythrocytic 1 (924-933)
KEIKAQQDKL

SEQ ID NO: 25943 - protein, 9 aa, synthetic construct
  REGION 1..9: note = Eukaryotic translation initiation factor 3 subunit E (29-37)
KEIYNEKEL

SEQ ID NO: 25944 - protein, 9 aa, synthetic construct
  REGION 1..9: note = Telomere-associated protein RIF1 (519-527)
KEKPGSEVL

SEQ ID NO: 25945 - protein, 10 aa, synthetic construct
  REGION 1..10: note = Beclin-1 (185-194)
KELALEEERL

SEQ ID NO: 25946 - protein, 9 aa, synthetic construct
  REGION 1..9: note = Ras and Rab interactor 1 (172-180)
KELEAISHL

SEQ ID NO: 25947 - protein, 9 aa, synthetic construct
  REGION 1..9: note = Liprin-beta-1 (682-690)
KELGIKHSL

SEQ ID NO: 25948 - protein, 11 aa, synthetic construct
  REGION 1..11: note = Protein S100-A1 (32-42)
KELKELLQTEL

SEQ ID NO: 25949 - protein, 9 aa, synthetic construct
  REGION 1..9: note = L-dopachrome tautomerase (418-426)
KELPSLHVL

SEQ ID NO: 25950 - protein, 10 aa, synthetic construct
  REGION 1..10: note = Loss of heterozygosity 12 chromosomal region 1 protein (119-128)
KEMDLSVETL

SEQ ID NO: 25951 - protein, 9 aa, synthetic construct
  REGION 1..9: note = Disabled homolog 2 (652-660)
KEMFKDFQL

SEQ ID NO: 25952 - protein, 12 aa, synthetic construct
  REGION 1..12: note = T-complex protein 1 subunit epsilon (113-124)
KEMNPALGIDCL

SEQ ID NO: 25953 - protein, 11 aa, synthetic construct
  REGION 1..11: note = Ras-related protein Rab-13 (99-109)
KENASAGVERL

SEQ ID NO: 25954 - protein, 10 aa, synthetic construct
  REGION 1..10: note = Ras-related protein Rab-34 (152-161)
KENDPSSVLL

SEQ ID NO: 25955 - protein, 10 aa, synthetic construct
  REGION 1..10: note = AN1-type zinc finger protein 5 (200-209)
KENPVVVAEK

SEQ ID NO: 25956 - protein, 9 aa, synthetic construct
  REGION 1..9: note = Hypoxia-inducible factor 1-alpha (392-400)
KEPDALTLL

SEQ ID NO: 25957 - protein, 9 aa, synthetic construct
  REGION 1..9: note = P protein (539-547)
KEPSEIVEL

SEQ ID NO: 25958 - protein, 11 aa, synthetic construct
  REGION 1..11: note = Zinc finger protein 36, C3H1 type-like 2 (102-112)
KEPSGGGGTAL

SEQ ID NO: 25959 - protein, 9 aa, synthetic construct
  REGION 1..9: note = V-type proton ATPase subunit H (86-94)
KEQTVQYIL

SEQ ID NO: 25960 - protein, 11 aa, synthetic construct
  REGION 1..11: note = Filamin A-interacting protein 1-like (562-572)
KERDDLKNKLK

SEQ ID NO: 25961 - protein, 10 aa, synthetic construct
  REGION 1..10: note = Transcription factor 7-like 2 (348-357)
KESAAINQIL

SEQ ID NO: 25962 - protein, 9 aa, synthetic construct
  REGION 1..9: note = Dynactin subunit 2 (127-135)
KESATEEKL

SEQ ID NO: 25963 - protein, 9 aa, synthetic construct
  REGION 1..9: note = Cullin-1 (229-237)
KESFESQFL

SEQ ID NO: 25964 - protein, 10 aa, synthetic construct
  REGION 1..10: note = Lysine-specific histone demethylase 1B (522-531)
KESGIQFSEL

SEQ ID NO: 25965 - protein, 9 aa, synthetic construct
  REGION 1..9: note = Ras-related GTP-binding protein D (313-321)
KESTAIIKL

SEQ ID NO: 25966 - protein, 9 aa, synthetic construct
  REGION 1..9: note = Ras-related protein Rab-7a (48-56)
KEVMVDDRL

SEQ ID NO: 25967 - protein, 9 aa, synthetic construct
  REGION 1..9: note = Cold shock domain-containing protein E1 (675-683)
KEVQDGIEL

SEQ ID NO: 25968 - protein, 8 aa, synthetic construct
  REGION 1..8: note = Band 4.1-like protein 2 (195-202)
KEVQTNEL

SEQ ID NO: 25969 - protein, 9 aa, synthetic construct
  REGION 1..9: note = Nuclear receptor subfamily 4 group A member 3 (320-328)
KEVVRTDSL

SEQ ID NO: 25970 - protein, 11 aa, synthetic construct
  REGION 1..11: note = RuvB-like 1 (68-78)
KEVYEGEVTEL

SEQ ID NO: 25971 - protein, 9 aa, synthetic construct
  REGION 1..9: note = F-box only protein 32 (43-51)
KEVYNKENL

SEQ ID NO: 25972 - protein, 9 aa, synthetic construct
  REGION 1..9: note = Armadillo repeat-containing X-linked protein 1 (379-387)
KEWDREILL

SEQ ID NO: 25973 - protein, 9 aa, synthetic construct
  REGION 1..9: note = Sentrin-specific protease 6 (154-162)
KEYPPHVQK

SEQ ID NO: 25974 - protein, 11 aa, synthetic construct
  REGION 1..11: note = Iron-responsive element-binding protein 2 (24-34)
KFFDVSKLGTK

SEQ ID NO: 25975 - protein, 9 aa, synthetic construct
  REGION 1..9: note = Nucleolin (110-118)
KGATPGKAL

SEQ ID NO: 25976 - protein, 9 aa, synthetic construct
  REGION 1..9: note = PRELI domain-containing protein 1, mitochondrial (160-168)
KGFEYILAK

SEQ ID NO: 25977 - protein, 10 aa, synthetic construct
  REGION 1..10: note = CD302 antigen (84-93)
KGPDDILLGM

SEQ ID NO: 25978 - protein, 9 aa, synthetic construct
  REGION 1..9: note = Epithelial discoidin domain-containing receptor 1 (781-789)
KIADFGMSR

SEQ ID NO: 25979 - protein, 11 aa, synthetic construct
  REGION 1..11: note = Merlin (209-219)
KIAQDLEMYGV

SEQ ID NO: 25980 - protein, 9 aa, synthetic construct
  REGION 1..9: note = Afadin (742-750)
KIDDVLHTL

SEQ ID NO: 25981 - protein, 9 aa, synthetic construct
  REGION 1..9: note = Leucine-rich repeat-containing protein 9 (112-120)
KIENLEKLI

SEQ ID NO: 25982 - protein, 9 aa, synthetic construct
  REGION 1..9: note = Gamma-interferon-inducible protein 16 (67-75)
KIFEDIPTL

SEQ ID NO: 25983 - protein, 10 aa, synthetic construct
  REGION 1..10: note = Palladin (13-22)
KIFEGMPVTF

SEQ ID NO: 25984 - protein, 10 aa, synthetic construct
  REGION 1..10: note = Cytochrome c oxidase subunit 2 (217-226)
KIFEMGPVFT

SEQ ID NO: 25985 - protein, 9 aa, synthetic construct
  REGION 1..9: note = Small subunit processome component 20 homolog (391-399)
KIFESRFEK

SEQ ID NO: 25986 - protein, 11 aa, synthetic construct
  REGION 1..11: note = Zinc finger protein 141 (290-300)
KIFTSSSNFAK

SEQ ID NO: 25987 - protein, 9 aa, synthetic construct
  REGION 1..9: note = Tudor domain-containing protein 3 (524-532)
KIFYNSGPK

SEQ ID NO: 25988 - protein, 9 aa, synthetic construct
  REGION 1..9: note = Cytoskeleton-associated protein 5 (868-876)
KIGDKNWKI

SEQ ID NO: 25989 - protein, 9 aa, synthetic construct
  REGION 1..9: note = Neuron navigator 2 (2313-2321)
KIIDWIPKV

SEQ ID NO: 25990 - protein, 12 aa, synthetic construct
  REGION 1..12: note = RanBP2-like and GRIP domain-containing protein 3 (721-732)
KILDDSDSNLSV

SEQ ID NO: 25991 - protein, 10 aa, synthetic construct
  REGION 1..10: note = Creatine kinase S-type, mitochondrial (344-353)
KILENLRLQK

SEQ ID NO: 25992 - protein, 9 aa, synthetic construct
  REGION 1..9: note = Ankyrin repeat and KH domain-containing protein 1 (866-874)
KILKELQKV

SEQ ID NO: 25993 - protein, 9 aa, synthetic construct
  REGION 1..9: note = Protein phosphatase 1 regulatory subunit 21 (355-363)
KILPYQLKR

SEQ ID NO: 25994 - protein, 10 aa, synthetic construct
  REGION 1..10: note = Cytoglobin (125-134)
KILSGVILEV

SEQ ID NO: 25995 - protein, 9 aa, synthetic construct
  REGION 1..9: note = Trimethylguanosine synthase (510-518)
KILSKVEKF

SEQ ID NO: 25996 - protein, 11 aa, synthetic construct
  REGION 1..11: note = X-ray repair cross-complementing protein 6 (451-461)
KIMATPEQVGK

SEQ ID NO: 25997 - protein, 9 aa, synthetic construct
  REGION 1..9: note = Syntaxin-binding protein 1 (13-21)
KIMHDVIKK

SEQ ID NO: 25998 - protein, 9 aa, synthetic construct
  REGION 1..9: note = Protein S100-A10 (54-62)
KIMKDLDQC

SEQ ID NO: 25999 - protein, 9 aa, synthetic construct
  REGION 1..9: note = 60S ribosomal protein L26 (28-36)
KIMSSPLSK

SEQ ID NO: 26000 - protein, 9 aa, synthetic construct
  REGION 1..9: note = Inversin (350-358)
KINPNVQDY

SEQ ID NO: 26001 - protein, 11 aa, synthetic construct
  REGION 1..11: note = E3 SUMO-protein ligase NSE2 (96-106)
KIPDLKLLVEK

SEQ ID NO: 26002 - protein, 9 aa, synthetic construct
  REGION 1..9: note = Arrestin domain-containing protein 4 (273-281)
KIPPVTPSI

SEQ ID NO: 26003 - protein, 9 aa, synthetic construct
  REGION 1..9: note = Utrophin (2159-2167)
KISESLRTV

SEQ ID NO: 26004 - protein, 10 aa, synthetic construct
  REGION 1..10: note = Nucleolar protein 58 (40-49)
KIVKLKHFEK

SEQ ID NO: 26005 - protein, 12 aa, synthetic construct
  REGION 1..12: note = ATP synthase subunit g, mitochondrial (55-66)
KIVNSAQTGSFK

SEQ ID NO: 26006 - protein, 12 aa, synthetic construct
  REGION 1..12: note = Pre-mRNA-processing factor 19 (375-386)
KIWDLKERTNVA

SEQ ID NO: 26007 - protein, 10 aa, synthetic construct
  REGION 1..10: note = Melanoma-associated antigen 12 (220-229)
KIWEELSVLE

SEQ ID NO: 26008 - protein, 9 aa, synthetic construct
  REGION 1..9: note = 60S ribosomal protein L3 (278-286)
KIYKIGQGY

SEQ ID NO: 26009 - protein, 11 aa, synthetic construct
  REGION 1..11: note = SWI/SNF-related matrix-associated actin-dependent regulator of chromatin subfamily A member 5 (411-421)
KIYVGLSKMQR

SEQ ID NO: 26010 - protein, 9 aa, synthetic construct
  REGION 1..9: note = Dynein heavy chain 5, axonemal (1406-1414)
KKQLNLLQK

SEQ ID NO: 26011 - protein, 9 aa, synthetic construct
  REGION 1..9: note = Tubulin alpha-1C chain (89-97)
KLADQCTGL

SEQ ID NO: 26012 - protein, 9 aa, synthetic construct
  REGION 1..9: note = Protein TANC1 (1398-1406)
KLCPTNQEV

SEQ ID NO: 26013 - protein, 10 aa, synthetic construct
  REGION 1..10: note = Golgi-associated PDZ and coiled-coil motif-containing protein (449-458)
KLDDLHTLYH

SEQ ID NO: 26014 - protein, 9 aa, synthetic construct
  REGION 1..9: note = Dystonin (4697-4705)
KLDDMLSEL

SEQ ID NO: 26015 - protein, 9 aa, synthetic construct
  REGION 1..9: note = Prefoldin subunit 3 (21-29)
KLDEQYQKY

SEQ ID NO: 26016 - protein, 10 aa, synthetic construct
  REGION 1..10: note = DNA topoisomerase 2-alpha (278-287)
KLDETGNSLK

SEQ ID NO: 26017 - protein, 10 aa, synthetic construct
  REGION 1..10: note = Cysteine-tRNA ligase, cytoplasmic (716-725)
KLFEAQEKLY

SEQ ID NO: 26018 - protein, 11 aa, synthetic construct
  REGION 1..11: note = Pleckstrin homology-like domain family B member 1 (803-813)
KLFEDLEFQQL

SEQ ID NO: 26019 - protein, 9 aa, synthetic construct
  REGION 1..9: note = Protein CASP (544-552)
KLFEKIKFL

SEQ ID NO: 26020 - protein, 10 aa, synthetic construct
  REGION 1..10: note = Integrator complex subunit 11 (251-260)
KLFIPWTNQK

SEQ ID NO: 26021 - protein, 9 aa, synthetic construct
  REGION 1..9: note = Lathosterol oxidase (289-297)
KLFNGEFTK

SEQ ID NO: 26022 - protein, 11 aa, synthetic construct
  REGION 1..11: note = Cytochrome c oxidase subunit 7A2, mitochondrial (33-43)
KLFQEDDEIPL

SEQ ID NO: 26023 - protein, 10 aa, synthetic construct
  REGION 1..10: note = Ubiquitin carboxyl-terminal hydrolase 1 (428-437)
KLFQGQLVLR

SEQ ID NO: 26024 - protein, 11 aa, synthetic construct
  REGION 1..11: note = Coatomer subunit gamma-1 (75-85)
KLFQSNDPTLR

SEQ ID NO: 26025 - protein, 8 aa, synthetic construct
  REGION 1..8: note = Probable U3 small nucleolar RNA-associated protein 11 (142-149)
KLFVIAQK

SEQ ID NO: 26026 - protein, 12 aa, synthetic construct
  REGION 1..12: note = Thyroid hormone receptor-associated protein 3 (547-558)
KLGAKGDFPTGK

SEQ ID NO: 26027 - protein, 9 aa, synthetic construct
  REGION 1..9: note = F-box only protein 7 (249-257)
KLGENVANI

SEQ ID NO: 26028 - protein, 9 aa, synthetic construct
  REGION 1..9: note = Vam6/Vps39-like protein (271-279)
KLGTDPTHV

SEQ ID NO: 26029 - protein, 9 aa, synthetic construct
  REGION 1..9: note = Zinc finger protein 106 (287-295)
KLGTVATYR

SEQ ID NO: 26030 - protein, 10 aa, synthetic construct
  REGION 1..10: note = Large subunit GTPase 1 homolog (102-111)
KLHEENKQFL

SEQ ID NO: 26031 - protein, 9 aa, synthetic construct
  REGION 1..9: note = Serine/threonine-protein kinase RIO2 (60-68)
KLIAWERTK

SEQ ID NO: 26032 - protein, 12 aa, synthetic construct
  REGION 1..12: note = Inter-alpha-trypsin inhibitor heavy chain H5 (795-806)
KLIDGEYKDYLA

SEQ ID NO: 26033 - protein, 9 aa, synthetic construct
  REGION 1..9: note = Elongation of very long chain fatty acids protein 5 (120-128)
KLIEFMDTF

SEQ ID NO: 26034 - protein, 9 aa, synthetic construct
  REGION 1..9: note = Transcription factor E2F4 (96-104)
KLIELKAEI

SEQ ID NO: 26035 - protein, 9 aa, synthetic construct
  REGION 1..9: note = Dedicator of cytokinesis protein 9 (1738-1746)
KLIIPIYEK

SEQ ID NO: 26036 - protein, 9 aa, synthetic construct
  REGION 1..9: note = Amyloid-like protein 2 (10-18)
KLKDLAFLK

SEQ ID NO: 26037 - protein, 9 aa, synthetic construct
  REGION 1..9: note = Kinesin-like protein KIF20B (1224-1232)
KLKEEITQL

SEQ ID NO: 26038 - protein, 9 aa, synthetic construct
  REGION 1..9: note = Dystonin (2863-2871)
KLKESLEKA

SEQ ID NO: 26039 - protein, 9 aa, synthetic construct
  REGION 1..9: note = Heat shock 70 kDa protein 4 (124-132)
KLKETAESV

SEQ ID NO: 26040 - protein, 9 aa, synthetic construct
  REGION 1..9: note = Lon protease homolog 2, peroxisomal (304-312)
KLKKRVLEY

SEQ ID NO: 26041 - protein, 9 aa, synthetic construct
  REGION 1..9: note = Cytoplasmic dynein 1 heavy chain 1 (681-689)
KLKQDGDSF

SEQ ID NO: 26042 - protein, 11 aa, synthetic construct
  REGION 1..11: note = E3 ubiquitin-protein ligase UBR3 (1192-1202)
KLLAEFASRQK

SEQ ID NO: 26043 - protein, 10 aa, synthetic construct
  REGION 1..10: note = Cytoplasmic dynein 1 heavy chain 1 (1715-1724)
KLLAESVTEV

SEQ ID NO: 26044 - protein, 9 aa, synthetic construct
  REGION 1..9: note = WD repeat and HMG-box DNA-binding protein 1 (77-85)
KLLAIPVEK

SEQ ID NO: 26045 - protein, 12 aa, synthetic construct
  REGION 1..12: note = Tight junction-associated protein 1 (150-161)
KLLDAKNTINKL

SEQ ID NO: 26046 - protein, 10 aa, synthetic construct
  REGION 1..10: note = Protein FAM32A (36-45)
KLLEAMGTSK

SEQ ID NO: 26047 - protein, 10 aa, synthetic construct
  REGION 1..10: note = SEC14 domain and spectrin repeat-containing protein 1 (418-427)
KLLEEKLKSV

SEQ ID NO: 26048 - protein, 9 aa, synthetic construct
  REGION 1..9: note = Probable dimethyladenosine transferase (73-81)
KLLEKAKKV

SEQ ID NO: 26049 - protein, 9 aa, synthetic construct
  REGION 1..9: note = Polymerase I and transcript release factor (109-117)
KLLEKVRKV

SEQ ID NO: 26050 - protein, 9 aa, synthetic construct
  REGION 1..9: note = Retinaldehyde-binding protein 1 (261-269)
KLLERVFVH

SEQ ID NO: 26051 - protein, 9 aa, synthetic construct
  REGION 1..9: note = Ubiquitin-conjugating enzyme E2 Q1 (46-54)
KLLESIFHR

SEQ ID NO: 26052 - protein, 9 aa, synthetic construct
  REGION 1..9: note = S-adenosylmethionine decarboxylase proenzyme (12-20)
KLLEVWFSR

SEQ ID NO: 26053 - protein, 10 aa, synthetic construct
  REGION 1..10: note = General transcription factor 3C polypeptide 1 (82-91)
KLLKEFKRND

SEQ ID NO: 26054 - protein, 10 aa, synthetic construct
  REGION 1..10: note = Enhancer of mRNA-decapping protein 4 (1087-1096)
KLLKSKNLTD

SEQ ID NO: 26055 - protein, 12 aa, synthetic construct
  REGION 1..12: note = Growth arrest and DNA damage-inducible protein GADD45 alpha (45-56)
KLLNVDPDNVVL

SEQ ID NO: 26056 - protein, 10 aa, synthetic construct
  REGION 1..10: note = Box C/D snoRNA protein 1 (321-330)
KLLPNGFTKR

SEQ ID NO: 26057 - protein, 9 aa, synthetic construct
  REGION 1..9: note = HMG box-containing protein 1 (263-271)
KLLSHEESV

SEQ ID NO: 26058 - protein, 12 aa, synthetic construct
  REGION 1..12: note = Ubiquitin-conjugating enzyme E2 E1 (43-54)
KLLSTSAKRIQK

SEQ ID NO: 26059 - protein, 11 aa, synthetic construct
  REGION 1..11: note = Junction plakoglobin (325-335)
KLLWTTSRVLK

SEQ ID NO: 26060 - protein, 9 aa, synthetic construct
  REGION 1..9: note = Mitogen-activated protein kinase 6 (549-557)
KLNDLNSSV

SEQ ID NO: 26061 - protein, 9 aa, synthetic construct
  REGION 1..9: note = Platelet-activating factor acetylhydrolase IB subunit alpha (71-79)
KLNEAKEEF

SEQ ID NO: 26062 - protein, 9 aa, synthetic construct
  REGION 1..9: note = Structural maintenance of chromosomes protein 1A (1009-1017)
KLNEQQSVL

SEQ ID NO: 26063 - protein, 11 aa, synthetic construct
  REGION 1..11: note = 60S ribosomal protein L4 (327-337)
KLNPYAKTMRR

SEQ ID NO: 26064 - protein, 9 aa, synthetic construct
  REGION 1..9: note = Pleckstrin homology domain-containing family A member 5 (187-195)
KLNSLPSEY

SEQ ID NO: 26065 - protein, 9 aa, synthetic construct
  REGION 1..9: note = RUN and FYVE domain-containing protein 2 (250-258)
KLQEENHQL

SEQ ID NO: 26066 - protein, 9 aa, synthetic construct
  REGION 1..9: note = Bardet-Biedl syndrome 5 protein (242-250)
KLQESVKEI

SEQ ID NO: 26067 - protein, 10 aa, synthetic construct
  REGION 1..10: note = Calponin-3 (64-73)
KLQPGSVKKV

SEQ ID NO: 26068 - protein, 10 aa, synthetic construct
  REGION 1..10: note = AP-1 complex subunit beta-1 (876-885)
KLQSSNIFTV

SEQ ID NO: 26069 - protein, 9 aa, synthetic construct
  REGION 1..9: note = RuvB-like 1 (214-222)
KLRGEINKV

SEQ ID NO: 26070 - protein, 10 aa, synthetic construct
  REGION 1..10: note = Integrin beta-1 (331-340)
KLSEGVTISY

SEQ ID NO: 26071 - protein, 11 aa, synthetic construct
  REGION 1..11: note = 3-hydroxy-3-methylglutaryl-coenzyme A reductase (502-512)
KLSEPSSLQYL

SEQ ID NO: 26072 - protein, 9 aa, synthetic construct
  REGION 1..9: note = DNA topoisomerase 1 (248-256)
KLSPKAEEV

SEQ ID NO: 26073 - protein, 10 aa, synthetic construct
  REGION 1..10: note = Neuron navigator 2 (616-625)
KLSSGLPQQK

SEQ ID NO: 26074 - protein, 11 aa, synthetic construct
  REGION 1..11: note = Coatomer subunit alpha (619-629)
KLVGQSIIAYL

SEQ ID NO: 26075 - protein, 9 aa, synthetic construct
  REGION 1..9: note = Proteasome activator complex subunit 3 (201-209)
KLVSKIAKY

SEQ ID NO: 26076 - protein, 10 aa, synthetic construct
  REGION 1..10: note = Coatomer subunit beta' (124-133)
KLWDWDKKWS

SEQ ID NO: 26077 - protein, 11 aa, synthetic construct
  REGION 1..11: note = Treslin (218-228)
KLWESPDHLGY

SEQ ID NO: 26078 - protein, 10 aa, synthetic construct
  REGION 1..10: note = Lambda-crystallin homolog (33-42)
KLYDIEQQQI

SEQ ID NO: 26079 - protein, 11 aa, synthetic construct
  REGION 1..11: note = 26S proteasome non-ATPase regulatory subunit 11 (325-335)
KLYDNLLEQNL

SEQ ID NO: 26080 - protein, 9 aa, synthetic construct
  REGION 1..9: note = Calpain-1 catalytic subunit (654-662)
KLYELIITR

SEQ ID NO: 26081 - protein, 10 aa, synthetic construct
  REGION 1..10: note = Calpain-1 catalytic subunit (654-663)
KLYELIITRY

SEQ ID NO: 26082 - protein, 9 aa, synthetic construct
  REGION 1..9: note = Signal recognition particle 9 kDa protein (16-24)
KLYLADPMK

SEQ ID NO: 26083 - protein, 9 aa, synthetic construct
  REGION 1..9: note = Gap junction alpha-3 protein (313-321)
KLYNGHHHL

SEQ ID NO: 26084 - protein, 9 aa, synthetic construct
  REGION 1..9: note = Dedicator of cytokinesis protein 5 (1299-1307)
KLYQEIISY

SEQ ID NO: 26085 - protein, 10 aa, synthetic construct
  REGION 1..10: note = Rab GDP dissociation inhibitor beta (130-139)
KLYSESLARY

SEQ ID NO: 26086 - protein, 9 aa, synthetic construct
  REGION 1..9: note = 2',3'-cyclic-nucleotide 3'-phosphodiesterase (351-359)
KLYSLGNGR

SEQ ID NO: 26087 - protein, 9 aa, synthetic construct
  REGION 1..9: note = Cytochrome b-c1 complex subunit 9 (9-17)
KLYSLLFRR

SEQ ID NO: 26088 - protein, 10 aa, synthetic construct
  REGION 1..10: note = Dual specificity tyrosine-phosphorylation-regulated kinase 3 (365-374)
KLYTYIQSRF

SEQ ID NO: 26089 - protein, 11 aa, synthetic construct
  REGION 1..11: note = Something about silencing protein 10 (134-144)
KLYYDTDYGSK

SEQ ID NO: 26090 - protein, 9 aa, synthetic construct
  REGION 1..9: note = Stathmin (95-103)
KMAEEKLTH

SEQ ID NO: 26091 - protein, 11 aa, synthetic construct
  REGION 1..11: note = Stathmin (95-105)
KMAEEKLTHKM

SEQ ID NO: 26092 - protein, 11 aa, synthetic construct
  REGION 1..11: note = Eukaryotic peptide chain release factor GTP-binding subunit ERF3B (350-360)
KMDDPTVNWSI

SEQ ID NO: 26093 - protein, 9 aa, synthetic construct
  REGION 1..9: note = Dihydropyrimidinase-related protein 1 (341-349)
KMDENQFVA

SEQ ID NO: 26094 - protein, 9 aa, synthetic construct
  REGION 1..9: note = Interferon regulatory factor 9 (369-377)
KMEQAFARY

SEQ ID NO: 26095 - protein, 9 aa, synthetic construct
  REGION 1..9: note = Guanine nucleotide-binding protein G(i) subunit alpha-1 (197-205)
KMFDVGGQR

SEQ ID NO: 26096 - protein, 13 aa, synthetic construct
  REGION 1..13: note = Transketolase (516-528)
KMFGIDRDAIAQA

SEQ ID NO: 26097 - protein, 11 aa, synthetic construct
  REGION 1..11: note = Zinc finger FYVE domain-containing protein 16 (254-264)
KMFHAKDKLQH

SEQ ID NO: 26098 - protein, 8 aa, synthetic construct
  REGION 1..8: note = Ubiquitin-associated domain-containing protein 2 (83-90)
KMFQVHQV

SEQ ID NO: 26099 - protein, 11 aa, synthetic construct
  REGION 1..11: note = Intraflagellar transport protein 88 homolog (227-237)
KMFSNAGILKM

SEQ ID NO: 26100 - protein, 9 aa, synthetic construct
  REGION 1..9: note = Integrin alpha-7 (1061-1069)
KMGFFKRAK

SEQ ID NO: 26101 - protein, 9 aa, synthetic construct
  REGION 1..9: note = FACT complex subunit SPT16 (120-128)
KMIEAIKES

SEQ ID NO: 26102 - protein, 10 aa, synthetic construct
  REGION 1..10: note = BRISC and BRCA1-A complex member 1 (126-135)
KMIEMFVRTK

SEQ ID NO: 26103 - protein, 9 aa, synthetic construct
  REGION 1..9: note = Spartin (80-88)
KMKETLQNV

SEQ ID NO: 26104 - protein, 10 aa, synthetic construct
  REGION 1..10: note = DNA topoisomerase 1 (262-271)
KMLDHEYTTK

SEQ ID NO: 26105 - protein, 10 aa, synthetic construct
  REGION 1..10: note = Tropomodulin-3 (307-316)
KMLEENTNIL

SEQ ID NO: 26106 - protein, 10 aa, synthetic construct
  REGION 1..10: note = Enhancer of mRNA-decapping protein 3 (373-382)
KMLESITNEL

SEQ ID NO: 26107 - protein, 9 aa, synthetic construct
  REGION 1..9: note = Transient receptor potential cation channel subfamily M member 2 (1336-1344)
KMLEVLVVK

SEQ ID NO: 26108 - protein, 9 aa, synthetic construct
  REGION 1..9: note = MICAL-like protein 1 (843-851)
KMLKLLGNK

SEQ ID NO: 26109 - protein, 10 aa, synthetic construct
  REGION 1..10: note = Cofilin-1 (73-82)
KMLPDKDCRY

SEQ ID NO: 26110 - protein, 11 aa, synthetic construct
  REGION 1..11: note = Cofilin-1 (73-83)
KMLPDKDCRYA

SEQ ID NO: 26111 - protein, 9 aa, synthetic construct
  REGION 1..9: note = Leucine-rich repeat-containing protein 40 (539-547)
KMMENLTTL

SEQ ID NO: 26112 - protein, 9 aa, synthetic construct
  REGION 1..9: note = U3 small nucleolar ribonucleoprotein protein MPP10 (357-365)
KMNEKIASL

SEQ ID NO: 26113 - protein, 9 aa, synthetic construct
  REGION 1..9: note = Unconventional myosin-X (643-651)
KMPDQFDQA

SEQ ID NO: 26114 - protein, 9 aa, synthetic construct
  REGION 1..9: note = Voltage-dependent calcium channel subunit alpha-2/delta-1 (39-47)
KMQEDLVTL

SEQ ID NO: 26115 - protein, 12 aa, synthetic construct
  REGION 1..12: note = Gamma-secretase C-terminal fragment 59 (620-631)
KMQQNGYENPTY

SEQ ID NO: 26116 - protein, 11 aa, synthetic construct
  REGION 1..11: note = U2 small nuclear ribonucleoprotein B'' (47-57)
KMRGQAFVIFK

SEQ ID NO: 26117 - protein, 9 aa, synthetic construct
  REGION 1..9: note = Aryl hydrocarbon receptor nuclear translocator (104-112)
KMTAYITEL

SEQ ID NO: 26118 - protein, 9 aa, synthetic construct
  REGION 1..9: note = Uncharacterized protein C20orf194 (424-432)
KMTFHIHAV

SEQ ID NO: 26119 - protein, 9 aa, synthetic construct
  REGION 1..9: note = Aryl hydrocarbon receptor nuclear translocator 2 (67-75)
KMTQYITEL

SEQ ID NO: 26120 - protein, 9 aa, synthetic construct
  REGION 1..9: note = Dual specificity mitogen-activated protein kinase kinase 7 (221-229)
KMTVAIVKA

SEQ ID NO: 26121 - protein, 12 aa, synthetic construct
  REGION 1..12: note = A-kinase anchor protein 11 (898-909)
KMVDERTDYLTK

SEQ ID NO: 26122 - protein, 11 aa, synthetic construct
  REGION 1..11: note = 5-demethoxyubiquinone hydroxylase, mitochondrial (1-11)
KMWDQEKDHLK

SEQ ID NO: 26123 - protein, 12 aa, synthetic construct
  REGION 1..12: note = 5-demethoxyubiquinone hydroxylase, mitochondrial (1-12)
KMWDQEKDHLKK

SEQ ID NO: 26124 - protein, 15 aa, synthetic construct
  REGION 1..15: note = Neuroblast differentiation-associated protein AHNAK (5087-5101)
KMYFPDVEFDIKSPK

SEQ ID NO: 26125 - protein, 11 aa, synthetic construct
  REGION 1..11: note = General transcription factor 3C polypeptide 3 (166-176)
KMYGYVDTLLT

SEQ ID NO: 26126 - protein, 10 aa, synthetic construct
  REGION 1..10: note = Round spermatid basic protein 1 (272-281)
KMYNKEVQTV

SEQ ID NO: 26127 - protein, 11 aa, synthetic construct
  REGION 1..11: note = 116 kDa U5 small nuclear ribonucleoprotein component (480-490)
KMYSTDDGVQF

SEQ ID NO: 26128 - protein, 9 aa, synthetic construct
  REGION 1..9: note = 60S ribosomal protein L17 (96-104)
KNAESNAEL

SEQ ID NO: 26129 - protein, 9 aa, synthetic construct
  REGION 1..9: note = Ras GTPase-activating-like protein IQGAP2 (729-737)
KNDLLSELL

SEQ ID NO: 26130 - protein, 9 aa, synthetic construct
  REGION 1..9: note = FACT complex subunit SPT16 (53-61)
KNFDMVIVY

SEQ ID NO: 26131 - protein, 8 aa, synthetic construct
  REGION 1..8: note = Glutathione S-transferase theta-2B (23-30)
KNGIPLEL

SEQ ID NO: 26132 - protein, 15 aa, synthetic construct
  REGION 1..15: note = Stromal cell-derived factor 2 (197-211)
KPSELLKAEAHHAEL

SEQ ID NO: 26133 - protein, 12 aa, synthetic construct
  REGION 1..12: note = Spectrin beta chain, non-erythrocytic 1 (1179-1190)
KQAEAFLNNQEY

SEQ ID NO: 26134 - protein, 9 aa, synthetic construct
  REGION 1..9: note = Melanocyte protein PMEL (629-637)
KQDFSVPQL

SEQ ID NO: 26135 - protein, 8 aa, synthetic construct
  REGION 1..8: note = EF-hand calcium-binding domain-containing protein 14 (264-271)
KQDILYLH

SEQ ID NO: 26136 - protein, 9 aa, synthetic construct
  REGION 1..9: note = Syntaxin-binding protein 6 (78-86)
KQFEGSTSF

SEQ ID NO: 26137 - protein, 9 aa, synthetic construct
  REGION 1..9: note = E3 ubiquitin-protein ligase makorin-1 (320-328)
KQFESKIIK

SEQ ID NO: 26138 - protein, 9 aa, synthetic construct
  REGION 1..9: note = Nucleoside diphosphate-linked moiety X motif 19 (337-345)
KQFHRIVTY

SEQ ID NO: 26139 - protein, 10 aa, synthetic construct
  REGION 1..10: note = ADP-ribosylation factor GTPase-activating protein 2 (453-462)
KQGVKSVAGK

SEQ ID NO: 26140 - protein, 9 aa, synthetic construct
  REGION 1..9: note = Lanosterol 14-alpha demethylase (169-177)
KQHVSIIEK

SEQ ID NO: 26141 - protein, 10 aa, synthetic construct
  REGION 1..10: note = 60 kDa SS-A/Ro ribonucleoprotein (14-23)
KQIANSQDGY

SEQ ID NO: 26142 - protein, 9 aa, synthetic construct
  REGION 1..9: note = Cytoplasmic dynein 1 heavy chain 1 (3819-3827)
KQIHFLYQY

SEQ ID NO: 26143 - protein, 10 aa, synthetic construct
  REGION 1..10: note = Catenin alpha-1 (287-296)
KQIIVDPLSF

SEQ ID NO: 26144 - protein, 10 aa, synthetic construct
  REGION 1..10: note = Cytoplasmic dynein 1 heavy chain 1 (1464-1473)
KQIREVWNTY

SEQ ID NO: 26145 - protein, 11 aa, synthetic construct
  REGION 1..11: note = Proteasome subunit alpha type-4 (158-168)
KQKEVEQLIKK

SEQ ID NO: 26146 - protein, 11 aa, synthetic construct
  REGION 1..11: note = Tyrosinase (505-515)
KQLPEEKQPLL

SEQ ID NO: 26147 - protein, 10 aa, synthetic construct
  REGION 1..10: note = Guanine nucleotide-binding protein G(s) subunit alpha isoforms short (28-37)
KQLQKDKQVY

SEQ ID NO: 26148 - protein, 9 aa, synthetic construct
  REGION 1..9: note = Small kinetochore-associated protein (228-236)
KQMEELQAL

SEQ ID NO: 26149 - protein, 9 aa, synthetic construct
  REGION 1..9: note = DnaJ homolog subfamily C member 4 (151-159)
KQNKQVLGY

SEQ ID NO: 26150 - protein, 9 aa, synthetic construct
  REGION 1..9: note = Cytoplasmic dynein 1 heavy chain 1 (3266-3274)
KQQEVIADK

SEQ ID NO: 26151 - protein, 9 aa, synthetic construct
  REGION 1..9: note = Pyridoxal kinase (29-37)
KQQNPRLVY

SEQ ID NO: 26152 - protein, 9 aa, synthetic construct
  REGION 1..9: note = PRELI domain-containing protein 1, mitochondrial (211-219)
KQQQQQQFV

SEQ ID NO: 26153 - protein, 9 aa, synthetic construct
  REGION 1..9: note = Mitochondrial import receptor subunit TOM7 homolog (9-17)
KQRLQQLFK

SEQ ID NO: 26154 - protein, 9 aa, synthetic construct
  REGION 1..9: note = Protein Simiate (164-172)
KQYEEVMVK

SEQ ID NO: 26155 - protein, 9 aa, synthetic construct
  REGION 1..9: note = 60S ribosomal protein L35a (45-53)
KRCAYVYKA

SEQ ID NO: 26156 - protein, 9 aa, synthetic construct
  REGION 1..9: note = Fructose-bisphosphate aldolase A (82-90)
KRCQYVTEK

SEQ ID NO: 26157 - protein, 9 aa, synthetic construct
  REGION 1..9: note = Trafficking kinesin-binding protein 2 (839-847)
KRLGIARVV

SEQ ID NO: 26158 - protein, 9 aa, synthetic construct
  REGION 1..9: note = Chitinase domain-containing protein 1 (226-234)
KRVGLIHML

SEQ ID NO: 26159 - protein, 11 aa, synthetic construct
  REGION 1..11: note = Myc proto-oncogene protein (324-334)
KRVKLDSVRVL

SEQ ID NO: 26160 - protein, 9 aa, synthetic construct
  REGION 1..9: note = Msx2-interacting protein (27-35)
KRYGRVESV

SEQ ID NO: 26161 - protein, 11 aa, synthetic construct
  REGION 1..11: note = DmX-like protein 2 (1150-1160)
KSDALLSKDRY

SEQ ID NO: 26162 - protein, 11 aa, synthetic construct
  REGION 1..11: note = Mitochondrial Rho GTPase 1 (528-538)
KSDLHEVKQEY

SEQ ID NO: 26163 - protein, 14 aa, synthetic construct
  REGION 1..14: note = LON peptidase N-terminal domain and RING finger protein 2 (360-373)
KSDMLGNTNSSVLY

SEQ ID NO: 26164 - protein, 9 aa, synthetic construct
  REGION 1..9: note = Transmembrane protein 70, mitochondrial (84-92)
KSEDGRLIY

SEQ ID NO: 26165 - protein, 11 aa, synthetic construct
  REGION 1..11: note = Coiled-coil domain-containing protein 50 (470-480)
KSESSHKGFHY

SEQ ID NO: 26166 - protein, 10 aa, synthetic construct
  REGION 1..10: note = 26S proteasome non-ATPase regulatory subunit 2 (545-554)
KSETELKDTY

SEQ ID NO: 26167 - protein, 8 aa, synthetic construct
  REGION 1..8: note = Clathrin heavy chain 1 (706-713)
KSFEGLFY

SEQ ID NO: 26168 - protein, 9 aa, synthetic construct
  REGION 1..9: note = Formin-1 (1326-1334)
KSFETTVRY

SEQ ID NO: 26169 - protein, 9 aa, synthetic construct
  REGION 1..9: note = Ubiquitin-like modifier-activating enzyme 6 (628-636)
KSFPAAIEH

SEQ ID NO: 26170 - protein, 10 aa, synthetic construct
  REGION 1..10: note = Probable cation-transporting ATPase 13A3 (833-842)
KSFSVILEHF

SEQ ID NO: 26171 - protein, 10 aa, synthetic construct
  REGION 1..10: note = Glutamate-rich WD repeat-containing protein 1 (341-350)
KSGSPVATFK

SEQ ID NO: 26172 - protein, 11 aa, synthetic construct
  REGION 1..11: note = Bifunctional UDP-N-acetylglucosamine 2-epimerase/N-acetylmannosamine kinase (375-385)
KSIDLQEPLQK

SEQ ID NO: 26173 - protein, 9 aa, synthetic construct
  REGION 1..9: note = Retinoblastoma-like protein 1 (69-77)
KSIIPTVGK

SEQ ID NO: 26174 - protein, 10 aa, synthetic construct
  REGION 1..10: note = NAD(P)H dehydrogenase (quinone) 1 (259-268)
KSIPTDNQIK

SEQ ID NO: 26175 - protein, 9 aa, synthetic construct
  REGION 1..9: note = Small kinetochore-associated protein (70-78)
KSLLPVRSK

SEQ ID NO: 26176 - protein, 11 aa, synthetic construct
  REGION 1..11: note = Leucine-rich repeat-containing protein 40 (210-220)
KSLPAEINRMK

SEQ ID NO: 26177 - protein, 9 aa, synthetic construct
  REGION 1..9: note = Putative ATP-dependent RNA helicase DHX57 (635-643)
KSSATRLLY

SEQ ID NO: 26178 - protein, 9 aa, synthetic construct
  REGION 1..9: note = Ankycorbin (402-410)
KSSPSVLIH

SEQ ID NO: 26179 - protein, 10 aa, synthetic construct
  REGION 1..10: note = Alternative protein MKKS (31-40)
KSSPVFQIPK

SEQ ID NO: 26180 - protein, 9 aa, synthetic construct
  REGION 1..9: note = ATP synthase F(0) complex subunit C2, mitochondrial (31-39)
KSTSQLLSR

SEQ ID NO: 26181 - protein, 9 aa, synthetic construct
  REGION 1..9: note = Clathrin heavy chain 1 (468-476)
KSVDPTLAL

SEQ ID NO: 26182 - protein, 10 aa, synthetic construct
  REGION 1..10: note = Programmed cell death 6-interacting protein (574-583)
KSVNFDMTSK

SEQ ID NO: 26183 - protein, 11 aa, synthetic construct
  REGION 1..11: note = Sodium/potassium-transporting ATPase subunit beta-3 (33-43)
KSWGSQYVVGK

SEQ ID NO: 26184 - protein, 9 aa, synthetic construct
  REGION 1..9: note = Arf-GAP with SH3 domain, ANK repeat and PH domain-containing protein 1 (73-81)
KTADKLKQY

SEQ ID NO: 26185 - protein, 10 aa, synthetic construct
  REGION 1..10: note = DNA-directed RNA polymerase II subunit RPB1 (853-862)
KTAETGYIQR

SEQ ID NO: 26186 - protein, 10 aa, synthetic construct
  REGION 1..10: note = DNA-directed RNA polymerase III subunit RPC1 (133-142)
KTAETGYMQR

SEQ ID NO: 26187 - protein, 9 aa, synthetic construct
  REGION 1..9: note = Chromodomain-helicase-DNA-binding protein 9 (992-1000)
KTDDSLEKY

SEQ ID NO: 26188 - protein, 9 aa, synthetic construct
  REGION 1..9: note = TBC1 domain family member 15 (379-387)
KTDEYFRMK

SEQ ID NO: 26189 - protein, 9 aa, synthetic construct
  REGION 1..9: note = Elongator complex protein 6 (28-36)
KTDGSFLVH

SEQ ID NO: 26190 - protein, 9 aa, synthetic construct
  REGION 1..9: note = PHD finger-like domain-containing protein 5A (95-103)
KTDLFYERK

SEQ ID NO: 26191 - protein, 10 aa, synthetic construct
  REGION 1..10: note = EF-hand calcium-binding domain-containing protein 7 (222-231)
KTDPETFLNK

SEQ ID NO: 26192 - protein, 11 aa, synthetic construct
  REGION 1..11: note = A-kinase anchor protein 13 (287-297)
KTDSKSIMRMK

SEQ ID NO: 26193 - protein, 10 aa, synthetic construct
  REGION 1..10: note = Tumor necrosis factor receptor superfamily member 14 (17-26)
KTDVLRLVLY

SEQ ID NO: 26194 - protein, 9 aa, synthetic construct
  REGION 1..9: note = Poly (ADP-ribose) polymerase 14 (1027-1035)
KTDVVVNSV

SEQ ID NO: 26195 - protein, 10 aa, synthetic construct
  REGION 1..10: note = Uncharacterized protein C19orf43 (137-146)
KTEDEVLTSK

SEQ ID NO: 26196 - protein, 9 aa, synthetic construct
  REGION 1..9: note = M-phase phosphoprotein 8 (68-76)
KTEGGKVLY

SEQ ID NO: 26197 - protein, 11 aa, synthetic construct
  REGION 1..11: note = Protein PRR5-ARHGAP8 (76-86)
KTELGSFFTEY

SEQ ID NO: 26198 - protein, 11 aa, synthetic construct
  REGION 1..11: note = Switch-associated protein 70 (282-292)
KTFEISASDKK

SEQ ID NO: 26199 - protein, 10 aa, synthetic construct
  REGION 1..10: note = Cytoplasmic dynein 1 heavy chain 1 (872-881)
KTFSEILNRV

SEQ ID NO: 26200 - protein, 10 aa, synthetic construct
  REGION 1..10: note = N-acetylglucosamine-6-sulfatase (191-200)
KTIDPELLGK

SEQ ID NO: 26201 - protein, 11 aa, synthetic construct
  REGION 1..11: note = DNA/RNA-binding protein KIN17 (231-241)
KTIGSSASVKR

SEQ ID NO: 26202 - protein, 11 aa, synthetic construct
  REGION 1..11: note = FH2 domain-containing protein 1 (90-100)
KTIPEEQVRGK

SEQ ID NO: 26203 - protein, 9 aa, synthetic construct
  REGION 1..9: note = Nck-associated protein 1 (635-643)
KTISQAVNK

SEQ ID NO: 26204 - protein, 9 aa, synthetic construct
  REGION 1..9: note = Endoplasmic reticulum-Golgi intermediate compartment protein 3 (4-12)
KTLEDFRVK

SEQ ID NO: 26205 - protein, 10 aa, synthetic construct
  REGION 1..10: note = Mitochondrial inner membrane protease ATP23 homolog (100-109)
KTLETNPYVK

SEQ ID NO: 26206 - protein, 12 aa, synthetic construct
  REGION 1..12: note = cAMP-dependent protein kinase type I-alpha regulatory subunit (123-134)
KTMAALAKAIEK

SEQ ID NO: 26207 - protein, 10 aa, synthetic construct
  REGION 1..10: note = Arfaptin-2 (216-225)
KTMEDTLMTV

SEQ ID NO: 26208 - protein, 11 aa, synthetic construct
  REGION 1..11: note = Telomere-associated protein RIF1 (1915-1925)
KTMELNVGNEA

SEQ ID NO: 26209 - protein, 11 aa, synthetic construct
  REGION 1..11: note = Protein GREB1 (304-314)
KTMTSTEQSLY

SEQ ID NO: 26210 - protein, 12 aa, synthetic construct
  REGION 1..12: note = Protein GREB1 (304-315)
KTMTSTEQSLYY

SEQ ID NO: 26211 - protein, 9 aa, synthetic construct
  REGION 1..9: note = U3 small nucleolar RNA-associated protein 18 homolog (120-128)
KTNPKIQSI

SEQ ID NO: 26212 - protein, 9 aa, synthetic construct
  REGION 1..9: note = Huntingtin-interacting protein 1-related protein (29-37)
KTQAISISK

SEQ ID NO: 26213 - protein, 9 aa, synthetic construct
  REGION 1..9: note = Proteasome subunit alpha type-1 (121-129)
KTQIPTQRY

SEQ ID NO: 26214 - protein, 9 aa, synthetic construct
  REGION 1..9: note = F-box only protein 32 (74-82)
KTQYFHQEK

SEQ ID NO: 26215 - protein, 11 aa, synthetic construct
  REGION 1..11: note = Oxysterol-binding protein-related protein 1 (153-163)
KTTELTALLNR

SEQ ID NO: 26216 - protein, 11 aa, synthetic construct
  REGION 1..11: note = G patch domain and KOW motifs-containing protein (49-59)
KTVEGRELQSV

SEQ ID NO: 26217 - protein, 9 aa, synthetic construct
  REGION 1..9: note = Melanocyte protein PMEL (154-162)
KTWDQVPFS

SEQ ID NO: 26218 - protein, 12 aa, synthetic construct
  REGION 1..12: note = Melanocyte protein PMEL (154-165)
KTWDQVPFSVSV

SEQ ID NO: 26219 - protein, 8 aa, synthetic construct
  REGION 1..8: note = Melanocyte protein PMEL (154-161)
KTWGQYWQ

SEQ ID NO: 26220 - protein, 9 aa, synthetic construct
  REGION 1..9: note = UDP-glucose 4-epimerase (176-184)
KTWNAVLLR

SEQ ID NO: 26221 - protein, 10 aa, synthetic construct
  REGION 1..10: note = UDP-glucose 4-epimerase (176-185)
KTWNAVLLRY

SEQ ID NO: 26222 - protein, 9 aa, synthetic construct
  REGION 1..9: note = Transcription factor IIIA (198-206)
KTWTELLKH

SEQ ID NO: 26223 - protein, 11 aa, synthetic construct
  REGION 1..11: note = A-kinase anchor protein 8-like (264-274)
KTWTTADFRTK

SEQ ID NO: 26224 - protein, 11 aa, synthetic construct
  REGION 1..11: note = Nuclear pore complex protein Nup107 (574-584)
KTYIQLLIREK

SEQ ID NO: 26225 - protein, 9 aa, synthetic construct
  REGION 1..9: note = Poly(A)-specific ribonuclease PARN-like domain-containing protein 1 (364-372)
KVAHLLLQK

SEQ ID NO: 26226 - protein, 11 aa, synthetic construct
  REGION 1..11: note = Mesoderm development candidate 1 (236-246)
KVAPSELARSR

SEQ ID NO: 26227 - protein, 11 aa, synthetic construct
  REGION 1..11: note = Calponin-3 (251-261)
KVASQKGMSVY

SEQ ID NO: 26228 - protein, 9 aa, synthetic construct
  REGION 1..9: note = Trafficking protein particle complex subunit 11 (134-142)
KVAVVLIQK

SEQ ID NO: 26229 - protein, 9 aa, synthetic construct
  REGION 1..9: note = Poly(A) polymerase gamma (590-598)
KVDSTVKTV

SEQ ID NO: 26230 - protein, 12 aa, synthetic construct
  REGION 1..12: note = Actin-related protein 2/3 complex subunit 3 (147-158)
KVFDPQNDKPSK

SEQ ID NO: 26231 - protein, 12 aa, synthetic construct
  REGION 1..12: note = Myosin regulatory light chain 10 (142-153)
KVFDTEGKGFVK

SEQ ID NO: 26232 - protein, 9 aa, synthetic construct
  REGION 1..9: note = AP-2 complex subunit mu (405-413)
KVFEPKLNY

SEQ ID NO: 26233 - protein, 9 aa, synthetic construct
  REGION 1..9: note = Lysine-specific histone demethylase 1A (228-236)
KVFLFIRNR

SEQ ID NO: 26234 - protein, 9 aa, synthetic construct
  REGION 1..9: note = Serine/threonine-protein phosphatase 2A activator (141-149)
KVFNRYLEV

SEQ ID NO: 26235 - protein, 9 aa, synthetic construct
  REGION 1..9: note = Long-chain-fatty-acid-CoA ligase 3 (90-98)
KVFTYAKNK

SEQ ID NO: 26236 - protein, 9 aa, synthetic construct
  REGION 1..9: note = Caspase-2 (77-85)
KVGSFSQNV

SEQ ID NO: 26237 - protein, 9 aa, synthetic construct
  REGION 1..9: note = Syntaxin-binding protein 1 (125-133)
KVIKTLTEI

SEQ ID NO: 26238 - protein, 11 aa, synthetic construct
  REGION 1..11: note = Zinc finger protein 721 (244-254)
KVISSSSSFAK

SEQ ID NO: 26239 - protein, 10 aa, synthetic construct
  REGION 1..10: note = Protein kinase C delta type (353-362)
KVLGKGSFGK

SEQ ID NO: 26240 - protein, 12 aa, synthetic construct
  REGION 1..12: note = Inositol 1,4,5-trisphosphate receptor type 1 (451-462)
KVLGSIAGKLEK

SEQ ID NO: 26241 - protein, 11 aa, synthetic construct
  REGION 1..11: note = Nuclease-sensitive element-binding protein 1 (58-68)
KVLGTVKWFNV

SEQ ID NO: 26242 - protein, 9 aa, synthetic construct
  REGION 1..9: note = SLIT-ROBO Rho GTPase-activating protein 1 (156-164)
KVLNELYTV

SEQ ID NO: 26243 - protein, 11 aa, synthetic construct
  REGION 1..11: note = Trafficking protein particle complex subunit 11 (54-64)
KVLPGDHEYPK

SEQ ID NO: 26244 - protein, 11 aa, synthetic construct
  REGION 1..11: note = B-cell CLL/lymphoma 7 protein family member B (20-30)
KVMAAIEKVRK

SEQ ID NO: 26245 - protein, 9 aa, synthetic construct
  REGION 1..9: note = Uncharacterized protein C10orf88 (295-303)
KVMPQNHSF

SEQ ID NO: 26246 - protein, 9 aa, synthetic construct
  REGION 1..9: note = Max-like protein X (158-166)
KVNYEQIVK

SEQ ID NO: 26247 - protein, 9 aa, synthetic construct
  REGION 1..9: note = Mitochondrial antiviral-signaling protein (311-319)
KVPANPASV

SEQ ID NO: 26248 - protein, 10 aa, synthetic construct
  REGION 1..10: note = Guanine nucleotide-binding protein G(s) subunit alpha isoforms short (77-86)
KVQDIKNNLK

SEQ ID NO: 26249 - protein, 10 aa, synthetic construct
  REGION 1..10: note = Kinectin (324-333)
KVQELQNLLK

SEQ ID NO: 26250 - protein, 9 aa, synthetic construct
  REGION 1..9: note = Centromere protein F (2787-2795)
KVREEIAEY

SEQ ID NO: 26251 - protein, 9 aa, synthetic construct
  REGION 1..9: note = Transcription elongation factor SPT6 (191-199)
KVSDGIYQH

SEQ ID NO: 26252 - protein, 9 aa, synthetic construct
  REGION 1..9: note = Peptidyl-prolyl cis-trans isomerase FKBP3 (80-88)
KVSEQVKNV

SEQ ID NO: 26253 - protein, 9 aa, synthetic construct
  REGION 1..9: note = Exocyst complex component 7 (506-514)
KVTDYIAEK

SEQ ID NO: 26254 - protein, 9 aa, synthetic construct
  REGION 1..9: note = 39S ribosomal protein L51, mitochondrial (1-9)
KVVDRWNEK

SEQ ID NO: 26255 - protein, 9 aa, synthetic construct
  REGION 1..9: note = Zinc finger CCHC-type and RNA-binding motif-containing protein 1 (35-43)
KVVKVTIMK

SEQ ID NO: 26256 - protein, 9 aa, synthetic construct
  REGION 1..9: note = Liprin-beta-1 (756-764)
KVVSVLHHL

SEQ ID NO: 26257 - protein, 9 aa, synthetic construct
  REGION 1..9: note = Pre-mRNA-splicing factor SPF27 (136-144)
KVYNENLVH

SEQ ID NO: 26258 - protein, 9 aa, synthetic construct
  REGION 1..9: note = Extended synaptotagmin-2 (225-233)
KVYTENVDK

SEQ ID NO: 26259 - protein, 9 aa, synthetic construct
  REGION 1..9: note = DNA helicase MCM8 (563-571)
KYIGYARQY

SEQ ID NO: 26260 - protein, 9 aa, synthetic construct
  REGION 1..9: note = Ubiquitin-associated protein 2-like (970-978)
KYPPPYKHF

SEQ ID NO: 26261 - protein, 9 aa, synthetic construct
  REGION 1..9: note = Fc receptor-like protein 3 (587-595)
LAAAAALLH

SEQ ID NO: 26262 - protein, 10 aa, synthetic construct
  REGION 1..10: note = Nucleosome assembly protein 1-like 1 (320-329)
LAADFEIGHF

SEQ ID NO: 26263 - protein, 9 aa, synthetic construct
  REGION 1..9: note = Lanosterol 14-alpha demethylase (46-54)
LAAGHLVQL

SEQ ID NO: 26264 - protein, 8 aa, synthetic construct
  REGION 1..8: note = KIAA1751 protein (14-21)
LADALLLE

SEQ ID NO: 26265 - protein, 9 aa, synthetic construct
  REGION 1..9: note = Tripartite motif-containing protein 35 (187-195)
LADEKMKQL

SEQ ID NO: 26266 - protein, 9 aa, synthetic construct
  REGION 1..9: note = Rho GTPase-activating protein 11B (163-171)
LADHTVHVL

SEQ ID NO: 26267 - protein, 10 aa, synthetic construct
  REGION 1..10: note = Annexin A1 (198-207)
LADSDARALY

SEQ ID NO: 26268 - protein, 11 aa, synthetic construct
  REGION 1..11: note = Macrophage migration inhibitory factor (82-92)
LAERLRISPDR

SEQ ID NO: 26269 - protein, 9 aa, synthetic construct
  REGION 1..9: note = MICOS complex subunit MIC10 (43-51)
LAFGSGMGL

SEQ ID NO: 26270 - protein, 9 aa, synthetic construct
  REGION 1..9: note = Dedicator of cytokinesis protein 11 (1003-1011)
LAIIPHVTI

SEQ ID NO: 26271 - protein, 11 aa, synthetic construct
  REGION 1..11: note = Thioredoxin domain-containing protein 15 (243-253)
LALDASQHSSL

SEQ ID NO: 26272 - protein, 9 aa, synthetic construct
  REGION 1..9: note = Ribosomal protein S6 kinase alpha-2 (72-80)
LALDHLHSL

SEQ ID NO: 26273 - protein, 9 aa, synthetic construct
  REGION 1..9: note = Breast cancer type 2 susceptibility protein (901-909)
LALGNTKEL

SEQ ID NO: 26274 - protein, 9 aa, synthetic construct
  REGION 1..9: note = Dual specificity protein phosphatase 3 (113-121)
LAQKNGRVL

SEQ ID NO: 26275 - protein, 9 aa, synthetic construct
  REGION 1..9: note = Transmembrane protein 8A (26-34)
LARPPPASA

SEQ ID NO: 26276 - protein, 12 aa, synthetic construct
  REGION 1..12: note = Serine protease 56 (350-361)
LAWDPPQELQAD

SEQ ID NO: 26277 - protein, 10 aa, synthetic construct
  REGION 1..10: note = Vacuolar protein sorting-associated protein 13B (3150-3159)
LDASLLQKQI

SEQ ID NO: 26278 - protein, 13 aa, synthetic construct
  REGION 1..13: note = Zinc finger protein castor homolog 1 (1616-1628)
LDGSLSLGAEPGS

SEQ ID NO: 26279 - protein, 9 aa, synthetic construct
  REGION 1..9: note = Connector enhancer of kinase suppressor of ras 3 (161-169)
LDLTTTVQK

SEQ ID NO: 26280 - protein, 10 aa, synthetic construct
  REGION 1..10: note = Coiled-coil domain-containing protein 66 (308-317)
LDQSRETVLL

SEQ ID NO: 26281 - protein, 11 aa, synthetic construct
  REGION 1..11: note = Protein S100-A9 (66-76)
LDTNADKQLSF

SEQ ID NO: 26282 - protein, 9 aa, synthetic construct
  REGION 1..9: note = Uveal autoantigen with coiled-coil domains and ankyrin repeats (769-777)
LDVTQKYTE

SEQ ID NO: 26283 - protein, 9 aa, synthetic construct
  REGION 1..9: note = Actin-binding LIM protein 1 (304-312)
LDYKDLAAI

SEQ ID NO: 26284 - protein, 10 aa, synthetic construct
  REGION 1..10: note = Uncharacterized protein (163-172)
LEEYNKILLD

SEQ ID NO: 26285 - protein, 10 aa, synthetic construct
  REGION 1..10: note = Tyrosinase (279-288)
LEEYNSHQSL

SEQ ID NO: 26286 - protein, 10 aa, synthetic construct
  REGION 1..10: note = Vimentin (404-413)
LEGEESRISL

SEQ ID NO: 26287 - protein, 17 aa, synthetic construct
  REGION 1..17: note = Keratin, type I cytoskeletal 10 (257-273)
LEGEGSSGGGGRGGGSF

SEQ ID NO: 26288 - protein, 10 aa, synthetic construct
  REGION 1..10: note = Eukaryotic translation initiation factor 3 subunit M (232-241)
LEGELIHDLL

SEQ ID NO: 26289 - protein, 9 aa, synthetic construct
  REGION 1..9: note = Nestin (589-597)
LEKENKELL

SEQ ID NO: 26290 - protein, 11 aa, synthetic construct
  REGION 1..11: note = Protein FAM167B (131-141)
LELEPGAGLAL

SEQ ID NO: 26291 - protein, 9 aa, synthetic construct
  REGION 1..9: note = Nestin (560-568)
LENQSHETL

SEQ ID NO: 26292 - protein, 10 aa, synthetic construct
  REGION 1..10: note = Alpha-actinin-4 (707-716)
LEQQHQLIQE

SEQ ID NO: 26293 - protein, 11 aa, synthetic construct
  REGION 1..11: note = Ribosomal protein S6 kinase delta-1 (1025-1035)
LERLGAGVAGV

SEQ ID NO: 26294 - protein, 9 aa, synthetic construct
  REGION 1..9: note = Coiled-coil domain-containing protein 77 (409-417)
LERRRILEV

SEQ ID NO: 26295 - protein, 9 aa, synthetic construct
  REGION 1..9: note = Hydrocephalus-inducing protein homolog (151-159)
LFDHVTERE

SEQ ID NO: 26296 - protein, 7 aa, synthetic construct
  REGION 1..7: note = Nucleoredoxin (9-15)
LGEKLVT

SEQ ID NO: 26297 - protein, 13 aa, synthetic construct
  REGION 1..13: note = Protein S100-A9 (26-38)
LGHPDTLNQGEFK

SEQ ID NO: 26298 - protein, 9 aa, synthetic construct
  REGION 1..9: note = Serine beta-lactamase-like protein LACTB, mitochondrial (52-60)
LGVKLAGGL

SEQ ID NO: 26299 - protein, 11 aa, synthetic construct
  REGION 1..11: note = Galectin-1 (43-53)
LHFNPRFNAHG

SEQ ID NO: 26300 - protein, 10 aa, synthetic construct
  REGION 1..10: note = Translocon-associated protein subunit gamma (176-185)
LIALLSTGSK

SEQ ID NO: 26301 - protein, 10 aa, synthetic construct
  REGION 1..10: note = Alpha-actinin-4 (718-727)
LIFDNKHTNY

SEQ ID NO: 26302 - protein, 10 aa, synthetic construct
  REGION 1..10: note = Solute carrier family 40 member 1 (135-144)
LIITIANIAN

SEQ ID NO: 26303 - protein, 11 aa, synthetic construct
  REGION 1..11: note = Prohibitin (163-173)
LILDDVSLTHL

SEQ ID NO: 26304 - protein, 10 aa, synthetic construct
  REGION 1..10: note = Lysosomal-associated transmembrane protein 4B (214-223)
LIYPNSIQEY

SEQ ID NO: 26305 - protein, 9 aa, synthetic construct
  REGION 1..9: note = Desmoplakin (486-494)
LKEQAIKIT

SEQ ID NO: 26306 - protein, 9 aa, synthetic construct
  REGION 1..9: note = Histone deacetylase complex subunit SAP30L (60-68)
LKLDIDKSL

SEQ ID NO: 26307 - protein, 10 aa, synthetic construct
  REGION 1..10: note = Lipoxygenase homology domain-containing protein 1 (933-942)
LKSSKTNSDK

SEQ ID NO: 26308 - protein, 9 aa, synthetic construct
  REGION 1..9: note = Alpha-1-antichymotrypsin (12-20)
LLAAGFCPA

SEQ ID NO: 26309 - protein, 11 aa, synthetic construct
  REGION 1..11: note = Granulocyte-macrophage colony-stimulating factor receptor subunit alpha (9-19)
LLCELPHPAFL

SEQ ID NO: 26310 - protein, 9 aa, synthetic construct
  REGION 1..9: note = Probable serine carboxypeptidase CPVL (258-266)
LLDEKQKKY

SEQ ID NO: 26311 - protein, 9 aa, synthetic construct
  REGION 1..9: note = Teashirt homolog 3 (435-443)
LLDEKVQSV

SEQ ID NO: 26312 - protein, 9 aa, synthetic construct
  REGION 1..9: note = Alpha-aminoadipic semialdehyde synthase, mitochondrial (668-676)
LLDGKVVNV

SEQ ID NO: 26313 - protein, 9 aa, synthetic construct
  REGION 1..9: note = Catenin delta-1 (315-323)
LLDHPKKEV

SEQ ID NO: 26314 - protein, 9 aa, synthetic construct
  REGION 1..9: note = Interleukin-13 receptor subunit alpha-2 (164-172)
LLDTNYNLF

SEQ ID NO: 26315 - protein, 10 aa, synthetic construct
  REGION 1..10: note = Interleukin-13 receptor subunit alpha-2 (164-173)
LLDTNYNLFY

SEQ ID NO: 26316 - protein, 10 aa, synthetic construct
  REGION 1..10: note = RAD50-interacting protein 1 (435-444)
LLFERELHSV

SEQ ID NO: 26317 - protein, 13 aa, synthetic construct
  REGION 1..13: note = Sorting nexin-21 (131-143)
LLFEVTSANVVKD

SEQ ID NO: 26318 - protein, 9 aa, synthetic construct
  REGION 1..9: note = Complement decay-accelerating factor (14-22)
LLGELPRLL

SEQ ID NO: 26319 - protein, 9 aa, synthetic construct
  REGION 1..9: note = Torsin-1A-interacting protein 2, isoform IFRG15 (90-98)
LLGPPLVRK

SEQ ID NO: 26320 - protein, 11 aa, synthetic construct
  REGION 1..11: note = Collagen alpha-1(IV) chain (17-27)
LLHEEHSRAAA

SEQ ID NO: 26321 - protein, 9 aa, synthetic construct
  REGION 1..9: note = Pescadillo homolog (73-81)
LLHEPIVNK

SEQ ID NO: 26322 - protein, 8 aa, synthetic construct
  REGION 1..8: note = DST protein (851-858)
LLKDKLDE

SEQ ID NO: 26323 - protein, 9 aa, synthetic construct
  REGION 1..9: note = Inverted formin-2 (76-84)
LLLEALARL

SEQ ID NO: 26324 - protein, 11 aa, synthetic construct
  REGION 1..11: note = Metastasis suppressor protein 1 (174-184)
LLLEETEKQAV

SEQ ID NO: 26325 - protein, 11 aa, synthetic construct
  REGION 1..11: note = Signal transducer and activator of transcription 6 (550-560)
LLLNEPDGTFL

SEQ ID NO: 26326 - protein, 9 aa, synthetic construct
  REGION 1..9: note = Carboxypeptidase N catalytic chain (379-387)
LLLPGIYTV

SEQ ID NO: 26327 - protein, 9 aa, synthetic construct
  REGION 1..9: note = KATNB1-like protein 1 (135-143)
LLRNIQILK

SEQ ID NO: 26328 - protein, 9 aa, synthetic construct
  REGION 1..9: note = Zinc finger protein ubi-d4 (122-130)
LLRTDPLEK

SEQ ID NO: 26329 - protein, 11 aa, synthetic construct
  REGION 1..11: note = Cytoplasmic dynein 1 heavy chain 1 (2160-2170)
LLSDVFPGVQY

SEQ ID NO: 26330 - protein, 11 aa, synthetic construct
  REGION 1..11: note = Aspartate beta-hydroxylase domain-containing protein 1 (342-352)
LLVDDSFLHTV

SEQ ID NO: 26331 - protein, 11 aa, synthetic construct
  REGION 1..11: note = Lon protease homolog 2, peroxisomal (173-183)
LLVRQIEGLKL

SEQ ID NO: 26332 - protein, 10 aa, synthetic construct
  REGION 1..10: note = Growth hormone-inducible transmembrane protein (291-300)
LLYDTQKVIK

SEQ ID NO: 26333 - protein, 9 aa, synthetic construct
  REGION 1..9: note = Integrin alpha-7 (875-883)
LLYPMQVEL

SEQ ID NO: 26334 - protein, 11 aa, synthetic construct
  REGION 1..11: note = Protein FAM69B (179-189)
LMADFNKDNRV

SEQ ID NO: 26335 - protein, 9 aa, synthetic construct
  REGION 1..9: note = Pre-mRNA-processing factor 6 (250-258)
LMDMRLSQV

SEQ ID NO: 26336 - protein, 9 aa, synthetic construct
  REGION 1..9: note = L-dopachrome tautomerase (194-202)
LMETHLSSK

SEQ ID NO: 26337 - protein, 9 aa, synthetic construct
  REGION 1..9: note = Hippocampus abundant transcript-like protein 1 (59-67)
LMNGLIQGV

SEQ ID NO: 26338 - protein, 12 aa, synthetic construct
  REGION 1..12: note = Vimentin (413-424)
LPLPNFSSLNLR

SEQ ID NO: 26339 - protein, 10 aa, synthetic construct
  REGION 1..10: note = Vimentin (431-440)
LPLVDTHSKR

SEQ ID NO: 26340 - protein, 9 aa, synthetic construct
  REGION 1..9: note = Ectonucleotide pyrophosphatase/phosphodiesterase family member 1 (605-613)
LPYGRPRVL

SEQ ID NO: 26341 - protein, 10 aa, synthetic construct
  REGION 1..10: note = Eukaryotic translation initiation factor 5A-1 (102-111)
LQDSGEVRED

SEQ ID NO: 26342 - protein, 9 aa, synthetic construct
  REGION 1..9: note = Coiled-coil domain-containing protein 13 (338-346)
LQRELEELK

SEQ ID NO: 26343 - protein, 9 aa, synthetic construct
  REGION 1..9: note = Zinc finger protein 703 (534-542)
LRNPHTLGL

SEQ ID NO: 26344 - protein, 10 aa, synthetic construct
  REGION 1..10: note = ATP-binding cassette sub-family A member 13 (39-48)
LSAIQGVTLA

SEQ ID NO: 26345 - protein, 11 aa, synthetic construct
  REGION 1..11: note = GPI-anchor transamidase (151-161)
LSDDRSNILIY

SEQ ID NO: 26346 - protein, 9 aa, synthetic construct
  REGION 1..9: note = General transcription factor 3C polypeptide 2 (596-604)
LSDGSLKLY

SEQ ID NO: 26347 - protein, 9 aa, synthetic construct
  REGION 1..9: note = Myotubularin-related protein 5 (501-509)
LSDPFYRTL

SEQ ID NO: 26348 - protein, 9 aa, synthetic construct
  REGION 1..9: note = Low affinity immunoglobulin gamma Fc region receptor II-b (113-121)
LSDPVHLTV

SEQ ID NO: 26349 - protein, 9 aa, synthetic construct
  REGION 1..9: note = Tyrosine-protein kinase JAK1 (30-38)
LSDREPLRL

SEQ ID NO: 26350 - protein, 9 aa, synthetic construct
  REGION 1..9: note = Exportin-5 (689-697)
LSDVDAFIA

SEQ ID NO: 26351 - protein, 11 aa, synthetic construct
  REGION 1..11: note = DNA polymerase zeta catalytic subunit (2423-2433)
LSDWFDNKTDL

SEQ ID NO: 26352 - protein, 9 aa, synthetic construct
  REGION 1..9: note = Little elongation complex subunit 1 (1975-1983)
LSELKIQKI

SEQ ID NO: 26353 - protein, 11 aa, synthetic construct
  REGION 1..11: note = Cell surfaceoprotein MUC18 (332-342)
LSEPQELLVNY

SEQ ID NO: 26354 - protein, 9 aa, synthetic construct
  REGION 1..9: note = Putative stereocilin-like protein (36-44)
LSFLKSLLS

SEQ ID NO: 26355 - protein, 9 aa, synthetic construct
  REGION 1..9: note = Melanocyte protein PMEL (177-185)
LSIGTGRAM

SEQ ID NO: 26356 - protein, 9 aa, synthetic construct
  REGION 1..9: note = Cytoplasmic dynein 1 heavy chain 1 (746-754)
LSKEVRNLK

SEQ ID NO: 26357 - protein, 9 aa, synthetic construct
  REGION 1..9: note = Exophilin-5 (986-994)
LSKTESISV

SEQ ID NO: 26358 - protein, 10 aa, synthetic construct
  REGION 1..10: note = EF-hand calcium-binding domain-containing protein 6 (344-353)
LSLPTQELRP

SEQ ID NO: 26359 - protein, 9 aa, synthetic construct
  REGION 1..9: note = Methylcrotonoyl-CoA carboxylase subunit alpha, mitochondrial (108-116)
LSMEKIIQV

SEQ ID NO: 26360 - protein, 11 aa, synthetic construct
  REGION 1..11: note = Zinc finger and BTB domain-containing protein 34 (63-73)
LSTMSGLSISV

SEQ ID NO: 26361 - protein, 9 aa, synthetic construct
  REGION 1..9: note = Vacuolar protein sorting-associated protein 13B (1713-1721)
LSVAQVQLL

SEQ ID NO: 26362 - protein, 9 aa, synthetic construct
  REGION 1..9: note = PERQ amino acid-rich with GYF domain-containing protein 1 (92-100)
LSVNSVAVL

SEQ ID NO: 26363 - protein, 11 aa, synthetic construct
  REGION 1..11: note = Mitogen-activated protein kinase 14 (122-132)
LTDDHVQFLIY

SEQ ID NO: 26364 - protein, 11 aa, synthetic construct
  REGION 1..11: note = FAST kinase domain-containing protein 5 (625-635)
LTDDLMNKLLK

SEQ ID NO: 26365 - protein, 11 aa, synthetic construct
  REGION 1..11: note = Vacuolar protein sorting-associated protein VTA1 homolog (134-144)
LTDENVKHRKY

SEQ ID NO: 26366 - protein, 10 aa, synthetic construct
  REGION 1..10: note = Ectonucleoside triphosphate diphosphohydrolase 4 (199-208)
LTDIPVHFDF

SEQ ID NO: 26367 - protein, 7 aa, synthetic construct
  REGION 1..7: note = 39S ribosomal protein L52, mitochondrial (43-49)
LTELPDW

SEQ ID NO: 26368 - protein, 10 aa, synthetic construct
  REGION 1..10: note = Glutathione S-transferase theta-1 (64-73)
LTESVAILLY

SEQ ID NO: 26369 - protein, 9 aa, synthetic construct
  REGION 1..9: note = AFG3-like protein 2 (346-354)
LTGPPGTGK

SEQ ID NO: 26370 - protein, 7 aa, synthetic construct
  REGION 1..7: note = Keratin, type I cytoskeletal 9 (86-92)
LTKTLND

SEQ ID NO: 26371 - protein, 11 aa, synthetic construct
  REGION 1..11: note = Amphoterin-induced protein 1 (187-197)
LTLLDLSSNKL

SEQ ID NO: 26372 - protein, 9 aa, synthetic construct
  REGION 1..9: note = Delta and Notch-like epidermal growth factor-related receptor (632-640)
LTNMPRHSL

SEQ ID NO: 26373 - protein, 12 aa, synthetic construct
  REGION 1..12: note = Synaptosomal-associated protein 23 (156-167)
LTQVGSILGNLK

SEQ ID NO: 26374 - protein, 11 aa, synthetic construct
  REGION 1..11: note = Inactive rhomboid protein 2 (165-175)
LTSFTSVRSGY

SEQ ID NO: 26375 - protein, 9 aa, synthetic construct
  REGION 1..9: note = Tubulin beta-4B chain (273-281)
LTSRGSQQY

SEQ ID NO: 26376 - protein, 9 aa, synthetic construct
  REGION 1..9: note = Tectonic-3 (319-327)
LTVEPGASL

SEQ ID NO: 26377 - protein, 10 aa, synthetic construct
  REGION 1..10: note = LON peptidase N-terminal domain and RING finger protein 1 (764-773)
LTYFSRDQSK

SEQ ID NO: 26378 - protein, 15 aa, synthetic construct
  REGION 1..15: note = 60S ribosomal protein L34 (5-19)
LTYRRRLSYNTASNK

SEQ ID NO: 26379 - protein, 10 aa, synthetic construct
  REGION 1..10: note = Aspartate beta-hydroxylase domain-containing protein 1 (343-352)
LVDDSFLHTV

SEQ ID NO: 26380 - protein, 8 aa, synthetic construct
  REGION 1..8: note = Cytosolic non-specific dipeptidase (250-257)
LVDKRGNI

SEQ ID NO: 26381 - protein, 10 aa, synthetic construct
  REGION 1..10: note = Thymidine phosphorylase (223-232)
LVEGLSALVV

SEQ ID NO: 26382 - protein, 9 aa, synthetic construct
  REGION 1..9: note = Matrin-3 (461-469)
LVFGKPVRV

SEQ ID NO: 26383 - protein, 11 aa, synthetic construct
  REGION 1..11: note = POTE ankyrin domain family member F (708-718)
LVIDNGSGMCK

SEQ ID NO: 26384 - protein, 11 aa, synthetic construct
  REGION 1..11: note = Phospholipid hydroperoxide glutathione peroxidase, mitochondrial (187-197)
LVIEKDLPHYF

SEQ ID NO: 26385 - protein, 11 aa, synthetic construct
  REGION 1..11: note = Roquin-2 (100-110)
LVIESIPVLGT

SEQ ID NO: 26386 - protein, 9 aa, synthetic construct
  REGION 1..9: note = Probable ATP-dependent RNA helicase DDX17 (248-256)
LVLAPTREL

SEQ ID NO: 26387 - protein, 9 aa, synthetic construct
  REGION 1..9: note = Melanocyte protein PMEL (10-18)
LVLKRCLLH

SEQ ID NO: 26388 - protein, 13 aa, synthetic construct
  REGION 1..13: note = Beta-actin-like protein 2 (9-21)
LVVDNGSGMCKAG

SEQ ID NO: 26389 - protein, 9 aa, synthetic construct
  REGION 1..9: note = DNA mismatch repair protein Msh6 (111-119)
LYSQAGLLA

SEQ ID NO: 26390 - protein, 11 aa, synthetic construct
  REGION 1..11: note = Olfactory receptor 4M2 (122-132)
LYTAICRPLHY

SEQ ID NO: 26391 - protein, 13 aa, synthetic construct
  REGION 1..13: note = Heterogeneous nuclear ribonucleoprotein L (35-47)
MAAAGGGGGGGRY

SEQ ID NO: 26392 - protein, 10 aa, synthetic construct
  REGION 1..10: note = Exocyst complex component 4 (1-10)
MAAEAAGGKY

SEQ ID NO: 26393 - protein, 9 aa, synthetic construct
  REGION 1..9: note = Liprin-alpha-1 (538-546)
MADGHTDSY

SEQ ID NO: 26394 - protein, 9 aa, synthetic construct
  REGION 1..9: note = Cystatin-C (1-9)
MAGPLRAPL

SEQ ID NO: 26395 - protein, 10 aa, synthetic construct
  REGION 1..10: note = WD repeat-containing protein 7 (1479-1488)
MAHDGKEHRF

SEQ ID NO: 26396 - protein, 11 aa, synthetic construct
  REGION 1..11: note = WD repeat-containing protein 7 (1479-1489)
MAHDGKEHRFM

SEQ ID NO: 26397 - protein, 9 aa, synthetic construct
  REGION 1..9: note = Tubulin polyglutamylase complex subunit 2 (33-41)
MAINSISKL

SEQ ID NO: 26398 - protein, 11 aa, synthetic construct
  REGION 1..11: note = Intron-binding protein aquarius (867-877)
MALDIDERHLL

SEQ ID NO: 26399 - protein, 11 aa, synthetic construct
  REGION 1..11: note = Ribonuclease pancreatic (1-11)
MALEKSLVRLL

SEQ ID NO: 26400 - protein, 12 aa, synthetic construct
  REGION 1..12: note = Actin, cytoplasmic 2 (18-29)
MATAASSSSLEK

SEQ ID NO: 26401 - protein, 9 aa, synthetic construct
  REGION 1..9: note = STE20-related kinase adapter protein alpha (113-121)
MAYGSAKDL

SEQ ID NO: 26402 - protein, 10 aa, synthetic construct
  REGION 1..10: note = High mobility group protein 20A (131-140)
MEFEERNAAL

SEQ ID NO: 26403 - protein, 11 aa, synthetic construct
  REGION 1..11: note = Squalene synthase (112-122)
MESKEKDRQVL

SEQ ID NO: 26404 - protein, 9 aa, synthetic construct
  REGION 1..9: note = A-kinase anchor protein 11 (545-553)
MIKDSIQKF

SEQ ID NO: 26405 - protein, 9 aa, synthetic construct
  REGION 1..9: note = Protein mago nashi homolog (45-53)
MIRKEELEI

SEQ ID NO: 26406 - protein, 10 aa, synthetic construct
  REGION 1..10: note = Hypoxia-inducible factor 1-alpha (109-118)
MIYISDNVNK

SEQ ID NO: 26407 - protein, 11 aa, synthetic construct
  REGION 1..11: note = Nidogen-1 (1-11)
MLASSSRIRAA

SEQ ID NO: 26408 - protein, 11 aa, synthetic construct
  REGION 1..11: note = Spectrin beta chain, non-erythrocytic 1 (1424-1434)
MLENQMEVRKK

SEQ ID NO: 26409 - protein, 11 aa, synthetic construct
  REGION 1..11: note = Prostate tumor-overexpressed gene 1 protein (184-194)
MLFPHISPCEV

SEQ ID NO: 26410 - protein, 9 aa, synthetic construct
  REGION 1..9: note = Melanoma-associated antigen D2 (305-313)
MLKDIIKEY

SEQ ID NO: 26411 - protein, 11 aa, synthetic construct
  REGION 1..11: note = DNA-directed RNA polymerases I, II, and III subunit RPABC5 (48-58)
MLLAHVDLIEK

SEQ ID NO: 26412 - protein, 10 aa, synthetic construct
  REGION 1..10: note = Coatomer subunit gamma-1 (404-413)
MLREEGGFEY

SEQ ID NO: 26413 - protein, 9 aa, synthetic construct
  REGION 1..9: note = G-protein coupled receptor 143 (175-183)
MLYYPSVSR

SEQ ID NO: 26414 - protein, 18 aa, synthetic construct
  REGION 1..18: note = G-protein coupled receptor 143 (175-192)
MLYYPSVSRKLLEYIEEI

SEQ ID NO: 26415 - protein, 12 aa, synthetic construct
  REGION 1..12: note = LIM domain and actin-binding protein 1 (101-112)
MMFEKGEPTQTK

SEQ ID NO: 26416 - protein, 8 aa, synthetic construct
  REGION 1..8: note = T-complex protein 1 subunit eta (172-179)
MMLDDLLQ

SEQ ID NO: 26417 - protein, 9 aa, synthetic construct
  REGION 1..9: note = Neuroblast differentiation-associated protein AHNAK (2771-2779)
MPKISMPGF

SEQ ID NO: 26418 - protein, 9 aa, synthetic construct
  REGION 1..9: note = Neuroblast differentiation-associated protein AHNAK (749-757)
MPKMKMPKF

SEQ ID NO: 26419 - protein, 9 aa, synthetic construct
  REGION 1..9: note = Neuroblast differentiation-associated protein AHNAK (1382-1390)
MPKVKMPKF

SEQ ID NO: 26420 - protein, 8 aa, synthetic construct
  REGION 1..8: note = ATP-dependent RNA helicase DDX24 (584-591)
MQYPGRSL

SEQ ID NO: 26421 - protein, 13 aa, synthetic construct
  REGION 1..13: note = Leucine zipper putative tumor suppressor 1 (179-191)
MSSLPTHSTSSSY

SEQ ID NO: 26422 - protein, 9 aa, synthetic construct
  REGION 1..9: note = Liprin-alpha-1 (1170-1178)
MSSPSMQPK

SEQ ID NO: 26423 - protein, 11 aa, synthetic construct
  REGION 1..11: note = Vimentin (1-11)
MSTRSVSSSSY

SEQ ID NO: 26424 - protein, 9 aa, synthetic construct
  REGION 1..9: note = ADP-ribosylation factor-like protein 5B (133-141)
MTAAEISKY

SEQ ID NO: 26425 - protein, 13 aa, synthetic construct
  REGION 1..13: note = CD44 antigen (412-424)
MTADETRNLQNVD

SEQ ID NO: 26426 - protein, 9 aa, synthetic construct
  REGION 1..9: note = RNA-binding protein 14 (266-274)
MTAQAASYR

SEQ ID NO: 26427 - protein, 14 aa, synthetic construct
  REGION 1..14: note = TBC1 domain family member 7 (1-14)
MTEDSQRNFRSVYY

SEQ ID NO: 26428 - protein, 7 aa, synthetic construct
  REGION 1..7: note = E3 ubiquitin-protein ligase UBR5 (2723-2729)
MTERQDL

SEQ ID NO: 26429 - protein, 10 aa, synthetic construct
  REGION 1..10: note = SEC14-like protein 2 (333-342)
MTEVLPNQRY

SEQ ID NO: 26430 - protein, 9 aa, synthetic construct
  REGION 1..9: note = Cleavage and polyadenylation specificity factor subunit 3 (99-107)
MTHATKAIY

SEQ ID NO: 26431 - protein, 10 aa, synthetic construct
  REGION 1..10: note = Protein phosphatase 1G (151-160)
MTIEELLTRY

SEQ ID NO: 26432 - protein, 13 aa, synthetic construct
  REGION 1..13: note = E3 ubiquitin-protein ligase RNF13 (5-17)
MTSLAWDPTTLRY

SEQ ID NO: 26433 - protein, 9 aa, synthetic construct
  REGION 1..9: note = L-dopachrome tautomerase (30-38)
MTVDSLVNK

SEQ ID NO: 26434 - protein, 17 aa, synthetic construct
  REGION 1..17: note = 2-oxoisovalerate dehydrogenase subunit alpha, mitochondrial (262-278)
MTYRIGHHSTSDDSSAY

SEQ ID NO: 26435 - protein, 10 aa, synthetic construct
  REGION 1..10: note = Ubiquitin carboxyl-terminal hydrolase 11 (498-507)
MVADVFSHRF

SEQ ID NO: 26436 - protein, 10 aa, synthetic construct
  REGION 1..10: note = DnaJ homolog subfamily C member 3 (1-10)
MVAPGSVTSR

SEQ ID NO: 26437 - protein, 14 aa, synthetic construct
  REGION 1..14: note = Proteasome subunit beta type-4 (84-97)
MVIDEELLGDGHSY

SEQ ID NO: 26438 - protein, 8 aa, synthetic construct
  REGION 1..8: note = Adenylate kinase 9 (1518-1525)
MVIFELSV

SEQ ID NO: 26439 - protein, 11 aa, synthetic construct
  REGION 1..11: note = Zinc transporter ZIP6 (217-227)
MVIMGDGLHNF

SEQ ID NO: 26440 - protein, 9 aa, synthetic construct
  REGION 1..9: note = Vigilin (427-435)
MVKDLINRM

SEQ ID NO: 26441 - protein, 9 aa, synthetic construct
  REGION 1..9: note = Helicase with zinc finger domain 2 (1524-1532)
MVKEYMIQF

SEQ ID NO: 26442 - protein, 9 aa, synthetic construct
  REGION 1..9: note = Major centromere autoantigen B (13-21)
MVKRYLTSF

SEQ ID NO: 26443 - protein, 17 aa, synthetic construct
  REGION 1..17: note = ATP synthase subunit e, mitochondrial (1-17)
MVPPVQVSPLIKLGRYS

SEQ ID NO: 26444 - protein, 10 aa, synthetic construct
  REGION 1..10: note = UV excision repair protein RAD23 homolog B (172-181)
MVTEIMSMGY

SEQ ID NO: 26445 - protein, 10 aa, synthetic construct
  REGION 1..10: note = NGFI-A-binding protein 2 (244-253)
MVVESVERIF

SEQ ID NO: 26446 - protein, 13 aa, synthetic construct
  REGION 1..13: note = Peptidase inhibitor 15 (91-103)
MVWDENLAKSAEA

SEQ ID NO: 26447 - protein, 9 aa, synthetic construct
  REGION 1..9: note = AT-rich interactive domain-containing protein 2 (84-92)
NAAFALKQY

SEQ ID NO: 26448 - protein, 9 aa, synthetic construct
  REGION 1..9: note = Sphingomyelin phosphodiesterase 4 (248-256)
NADPASHEI

SEQ ID NO: 26449 - protein, 8 aa, synthetic construct
  REGION 1..8: note = 60S ribosomal protein L17 (97-104)
NAESNAEL

SEQ ID NO: 26450 - protein, 9 aa, synthetic construct
  REGION 1..9: note = Ethylmalonyl-CoA decarboxylase (70-78)
NAFSGVMML

SEQ ID NO: 26451 - protein, 15 aa, synthetic construct
  REGION 1..15: note = Syndecan-3 (291-305)
NAIDSGSSAAQLPQK

SEQ ID NO: 26452 - protein, 9 aa, synthetic construct
  REGION 1..9: note = Importin subunit alpha-5 (231-239)
NAVWALSNL

SEQ ID NO: 26453 - protein, 10 aa, synthetic construct
  REGION 1..10: note = EGF domain-specific O-linked N-acetylglucosamine transferase (20-29)
NEAPPNTHSI

SEQ ID NO: 26454 - protein, 9 aa, synthetic construct
  REGION 1..9: note = Coatomer subunit beta (113-121)
NEFIRGSTL

SEQ ID NO: 26455 - protein, 11 aa, synthetic construct
  REGION 1..11: note = Prefoldin subunit 2 (68-78)
NEFREKHNIRL

SEQ ID NO: 26456 - protein, 9 aa, synthetic construct
  REGION 1..9: note = GCN1 general control of amino-acid synthesis 1-like 1 (1511-1519)
NEFVRDTAL

SEQ ID NO: 26457 - protein, 10 aa, synthetic construct
  REGION 1..10: note = Dynamin-like 120 kDa protein, mitochondrial (618-627)
NEILDEVISL

SEQ ID NO: 26458 - protein, 9 aa, synthetic construct
  REGION 1..9: note = Vimentin (102-110)
NEKVELQEL

SEQ ID NO: 26459 - protein, 12 aa, synthetic construct
  REGION 1..12: note = Keratin, type I cytoskeletal 10 (90-101)
NHEEEMKDLRNV

SEQ ID NO: 26460 - protein, 12 aa, synthetic construct
  REGION 1..12: note = Calponin-3 (250-261)
NKVASQKGMSVY

SEQ ID NO: 26461 - protein, 11 aa, synthetic construct
  REGION 1..11: note = Guanine nucleotide-binding protein-like 3-like protein (343-353)
NLEEISNYYGV

SEQ ID NO: 26462 - protein, 11 aa, synthetic construct
  REGION 1..11: note = Peroxisomal acyl-coenzyme A oxidase 1 (631-641)
NLFEWAKNSPL

SEQ ID NO: 26463 - protein, 9 aa, synthetic construct
  REGION 1..9: note = Galectin-1 (33-41)
NLGKDSNNL

SEQ ID NO: 26464 - protein, 11 aa, synthetic construct
  REGION 1..11: note = Glycogenin-2 (64-74)
NLIDSADYIHL

SEQ ID NO: 26465 - protein, 12 aa, synthetic construct
  REGION 1..12: note = Putative ATP-dependent RNA helicase DDX11-like protein 8 (397-408)
NLIDTITGMHSV

SEQ ID NO: 26466 - protein, 9 aa, synthetic construct
  REGION 1..9: note = Glutathione S-transferase Mu 2 (180-188)
NLKDFISRF

SEQ ID NO: 26467 - protein, 9 aa, synthetic construct
  REGION 1..9: note = SAM and SH3 domain-containing protein 1 (646-654)
NLKEHMPTF

SEQ ID NO: 26468 - protein, 9 aa, synthetic construct
  REGION 1..9: note = Abelson tyrosine-protein kinase 2 (353-361)
NLLDYLREC

SEQ ID NO: 26469 - protein, 13 aa, synthetic construct
  REGION 1..13: note = Multidrug resistance-associated protein 7 (339-351)
NLLGTDSERLLNF

SEQ ID NO: 26470 - protein, 10 aa, synthetic construct
  REGION 1..10: note = Catenin alpha-1 (815-824)
NLMNAVVQTV

SEQ ID NO: 26471 - protein, 11 aa, synthetic construct
  REGION 1..11: note = Small glutamine-rich tetratricopeptide repeat-containing protein alpha (236-246)
NLMNNPQIQQL

SEQ ID NO: 26472 - protein, 8 aa, synthetic construct
  REGION 1..8: note = Leucine-rich repeat-containing protein 4C (125-132)
NLNTLELF

SEQ ID NO: 26473 - protein, 9 aa, synthetic construct
  REGION 1..9: note = N-terminal Xaa-Pro-Lys N-methyltransferase 1 (210-218)
NLPDEIYHV

SEQ ID NO: 26474 - protein, 10 aa, synthetic construct
  REGION 1..10: note = N-terminal Xaa-Pro-Lys N-methyltransferase 1 (210-219)
NLPDEIYHVY

SEQ ID NO: 26475 - protein, 9 aa, synthetic construct
  REGION 1..9: note = DNA repair protein RAD51 homolog 3 (205-213)
NLRDLEILL

SEQ ID NO: 26476 - protein, 9 aa, synthetic construct
  REGION 1..9: note = MIT domain-containing protein 1 (60-68)
NLREKISKY

SEQ ID NO: 26477 - protein, 9 aa, synthetic construct
  REGION 1..9: note = Negative regulator of reactive oxygen species (622-630)
NLSSKIIRV

SEQ ID NO: 26478 - protein, 11 aa, synthetic construct
  REGION 1..11: note = Galectin-3-binding protein (51-61)
NLWDLTDASVV

SEQ ID NO: 26479 - protein, 9 aa, synthetic construct
  REGION 1..9: note = 2'-5'-oligoadenylate synthase 3 (990-998)
NMAEGFRTV

SEQ ID NO: 26480 - protein, 9 aa, synthetic construct
  REGION 1..9: note = X-ray repair cross-complementing protein 5 (410-418)
NMLNPPAEV

SEQ ID NO: 26481 - protein, 9 aa, synthetic construct
  REGION 1..9: note = Heterogeneous nuclear ribonucleoprotein H (351-359)
NMQHRYVEL

SEQ ID NO: 26482 - protein, 9 aa, synthetic construct
  REGION 1..9: note = Monocarboxylate transporter 7 (86-94)
NRFGHRLVV

SEQ ID NO: 26483 - protein, 9 aa, synthetic construct
  REGION 1..9: note = Leucine-rich repeat-containing protein C10orf11 (190-198)
NRFIRDDQL

SEQ ID NO: 26484 - protein, 8 aa, synthetic construct
  REGION 1..8: note = Proteasome subunit beta type-4 (230-237)
NRFQIATV

SEQ ID NO: 26485 - protein, 9 aa, synthetic construct
  REGION 1..9: note = Vacuolar protein sorting-associated protein 16 homolog (30-38)
NRGDFFMTL

SEQ ID NO: 26486 - protein, 9 aa, synthetic construct
  REGION 1..9: note = Transcription factor MafF (38-46)
NRHLRGLSA

SEQ ID NO: 26487 - protein, 9 aa, synthetic construct
  REGION 1..9: note = RNA polymerase-associated protein RTF1 homolog (202-210)
NRIEKREVL

SEQ ID NO: 26488 - protein, 8 aa, synthetic construct
  REGION 1..8: note = Catenin beta-1 (586-593)
NRIVIRGL

SEQ ID NO: 26489 - protein, 9 aa, synthetic construct
  REGION 1..9: note = Zinc finger and BTB domain-containing protein 38 (384-392)
NRLDRHEQI

SEQ ID NO: 26490 - protein, 9 aa, synthetic construct
  REGION 1..9: note = 40S ribosomal protein S24 (15-23)
NRLLQRKQM

SEQ ID NO: 26491 - protein, 8 aa, synthetic construct
  REGION 1..8: note = Cytoplasmic FMR1-interacting protein 1 (839-846)
NRMTHKLL

SEQ ID NO: 26492 - protein, 9 aa, synthetic construct
  REGION 1..9: note = Transcription initiation factor IIA subunit 2 (54-62)
NRVNFRGSL

SEQ ID NO: 26493 - protein, 9 aa, synthetic construct
  REGION 1..9: note = Pseudouridine-5'-phosphatase (35-43)
NRYDKKYSW

SEQ ID NO: 26494 - protein, 13 aa, synthetic construct
  REGION 1..13: note = Ribonucleoside-diphosphate reductase large subunit (35-47)
NSAIIYDRDFSYN

SEQ ID NO: 26495 - protein, 9 aa, synthetic construct
  REGION 1..9: note = Rho-related BTB domain-containing protein 3 (241-249)
NSDLNNLLF

SEQ ID NO: 26496 - protein, 12 aa, synthetic construct
  REGION 1..12: note = SAM and SH3 domain-containing protein 1 (424-435)
NSDPMGKEGDFV

SEQ ID NO: 26497 - protein, 13 aa, synthetic construct
  REGION 1..13: note = SAM and SH3 domain-containing protein 1 (424-436)
NSDPMGKEGDFVY

SEQ ID NO: 26498 - protein, 10 aa, synthetic construct
  REGION 1..10: note = Schlafen family member 5 (601-610)
NSDRKAQSVY

SEQ ID NO: 26499 - protein, 11 aa, synthetic construct
  REGION 1..11: note = RELT-like protein 1 (113-123)
NSDTVGQIVHY

SEQ ID NO: 26500 - protein, 11 aa, synthetic construct
  REGION 1..11: note = Peptidyl-prolyl cis-trans isomerase FKBP9 (143-153)
NSEDQVQIHTY

SEQ ID NO: 26501 - protein, 11 aa, synthetic construct
  REGION 1..11: note = Zinc finger protein 583 (85-95)
NSEFSSKQETY

SEQ ID NO: 26502 - protein, 7 aa, synthetic construct
  REGION 1..7: note = Thymidylate synthase (205-211)
NSELSCQ

SEQ ID NO: 26503 - protein, 9 aa, synthetic construct
  REGION 1..9: note = Zinc finger protein 280D (611-619)
NTALRNLRY

SEQ ID NO: 26504 - protein, 9 aa, synthetic construct
  REGION 1..9: note = DNA-directed RNA polymerase III subunit RPC10 (26-34)
NTCPYVHNI

SEQ ID NO: 26505 - protein, 11 aa, synthetic construct
  REGION 1..11: note = Heterogeneous nuclear ribonucleoprotein L-like (153-163)
NTDDPSGGNKV

SEQ ID NO: 26506 - protein, 10 aa, synthetic construct
  REGION 1..10: note = Ubiquitin-like protein 5 (19-28)
NTDDTIGDLK

SEQ ID NO: 26507 - protein, 9 aa, synthetic construct
  REGION 1..9: note = Lysosomal-trafficking regulator (2269-2277)
NTDDWENFA

SEQ ID NO: 26508 - protein, 9 aa, synthetic construct
  REGION 1..9: note = Serine/threonine-protein kinase 4 (95-103)
NTDLWIVME

SEQ ID NO: 26509 - protein, 18 aa, synthetic construct
  REGION 1..18: note = Selenoprotein O (185-202)
NTDNMSILGLTIDYGPFG

SEQ ID NO: 26510 - protein, 10 aa, synthetic construct
  REGION 1..10: note = DNA-binding protein inhibitor ID-4 (141-150)
NTDPAGAVNK

SEQ ID NO: 26511 - protein, 10 aa, synthetic construct
  REGION 1..10: note = ADP-ribosylation factor-binding protein GGA2 (54-63)
NTDPNGPTHA

SEQ ID NO: 26512 - protein, 9 aa, synthetic construct
  REGION 1..9: note = Phenylalanine-tRNA ligase beta subunit (486-494)
NTDVGAKNY

SEQ ID NO: 26513 - protein, 9 aa, synthetic construct
  REGION 1..9: note = Fructose-bisphosphate aldolase A (51-59)
NTEENRRFY

SEQ ID NO: 26514 - protein, 9 aa, synthetic construct
  REGION 1..9: note = Fructose-bisphosphate aldolase C (85-93)
NTEENRRLY

SEQ ID NO: 26515 - protein, 11 aa, synthetic construct
  REGION 1..11: note = Dynamin-1 (590-600)
NTEQRNVYKDY

SEQ ID NO: 26516 - protein, 9 aa, synthetic construct
  REGION 1..9: note = Neuron navigator 2 (838-846)
NTESGRYVY

SEQ ID NO: 26517 - protein, 9 aa, synthetic construct
  REGION 1..9: note = WW domain-binding protein 2 (24-32)
NTESILMSY

SEQ ID NO: 26518 - protein, 11 aa, synthetic construct
  REGION 1..11: note = Short/branched chain specific acyl-CoA dehydrogenase, mitochondrial (422-432)
NTIAKHIDAEY

SEQ ID NO: 26519 - protein, 12 aa, synthetic construct
  REGION 1..12: note = Mothers against decapentaplegic homolog 2 (91-102)
NTIDQWDTTGLY

SEQ ID NO: 26520 - protein, 12 aa, synthetic construct
  REGION 1..12: note = CDK5 and ABL1 enzyme substrate 1 (7-18)
NTIDSTSSFSQF

SEQ ID NO: 26521 - protein, 9 aa, synthetic construct
  REGION 1..9: note = H(+)/Cl(-) exchange transporter 5 (18-26)
NTIDWVREK

SEQ ID NO: 26522 - protein, 9 aa, synthetic construct
  REGION 1..9: note = Coiled-coil domain-containing protein 93 (523-531)
NTLDDKKVY

SEQ ID NO: 26523 - protein, 9 aa, synthetic construct
  REGION 1..9: note = COP9 signalosome complex subunit 6 (300-308)
NTMNQFVNK

SEQ ID NO: 26524 - protein, 9 aa, synthetic construct
  REGION 1..9: note = Protein FAM50A (156-164)
NTMQQFLQK

SEQ ID NO: 26525 - protein, 9 aa, synthetic construct
  REGION 1..9: note = 26S proteasome non-ATPase regulatory subunit 8 (201-209)
NTPKKMTDY

SEQ ID NO: 26526 - protein, 9 aa, synthetic construct
  REGION 1..9: note = G-protein coupled receptor 98 (3795-3803)
NTTTLQLQI

SEQ ID NO: 26527 - protein, 10 aa, synthetic construct
  REGION 1..10: note = Calsyntenin-1 (464-473)
NVEFPSVTLY

SEQ ID NO: 26528 - protein, 12 aa, synthetic construct
  REGION 1..12: note = 39S ribosomal protein L2, mitochondrial (195-206)
NVESEPGRGAQY

SEQ ID NO: 26529 - protein, 11 aa, synthetic construct
  REGION 1..11: note = Geranylgeranyl transferase type-2 subunit beta (112-122)
NVIDVNKVVEY

SEQ ID NO: 26530 - protein, 11 aa, synthetic construct
  REGION 1..11: note = Zinc finger protein 638 (207-217)
NVIDYGHASKY

SEQ ID NO: 26531 - protein, 10 aa, synthetic construct
  REGION 1..10: note = Neuropathy target esterase (1252-1261)
NVIEKMLTDR

SEQ ID NO: 26532 - protein, 10 aa, synthetic construct
  REGION 1..10: note = Protein MMS22-like (799-808)
NVIEQYIGRF

SEQ ID NO: 26533 - protein, 9 aa, synthetic construct
  REGION 1..9: note = Syndetin (606-614)
NVIRLVGKY

SEQ ID NO: 26534 - protein, 9 aa, synthetic construct
  REGION 1..9: note = tRNA (guanine(37)-N1)-methyltransferase (163-171)
NVSPQISKY

SEQ ID NO: 26535 - protein, 11 aa, synthetic construct
  REGION 1..11: note = Probable crossover junction endonuclease EME2 (356-366)
PDLSRRICLFL

SEQ ID NO: 26536 - protein, 11 aa, synthetic construct
  REGION 1..11: note = Neuronal acetylcholine receptor subunit alpha-3 (433-443)
PEIKEAIQSVK

SEQ ID NO: 26537 - protein, 9 aa, synthetic construct
  REGION 1..9: note = Ribosomal L1 domain-containing protein 1 (244-252)
PEKWESVKL

SEQ ID NO: 26538 - protein, 9 aa, synthetic construct
  REGION 1..9: note = Galectin-3 (191-199)
PFESGKPFK

SEQ ID NO: 26539 - protein, 11 aa, synthetic construct
  REGION 1..11: note = 40S ribosomal protein S19 (2-12)
PGVTVKDVNQQ

SEQ ID NO: 26540 - protein, 8 aa, synthetic construct
  REGION 1..8: note = Carbohydrate sulfotransferase 5 (259-266)
PHLRLIRE

SEQ ID NO: 26541 - protein, 10 aa, synthetic construct
  REGION 1..10: note = Myosin regulatory light chain 12A (152-161)
PIDKKGNFNY

SEQ ID NO: 26542 - protein, 11 aa, synthetic construct
  REGION 1..11: note = A-kinase anchor protein 11 (107-117)
PLDISSDPLNQ

SEQ ID NO: 26543 - protein, 9 aa, synthetic construct
  REGION 1..9: note = SYTL2 protein (325-333)
PLRMLLIAK

SEQ ID NO: 26544 - protein, 11 aa, synthetic construct
  REGION 1..11: note = Titin (13404-13414)
PPVEEREIEKY

SEQ ID NO: 26545 - protein, 9 aa, synthetic construct
  REGION 1..9: note = Translation initiation factor eIF-2B subunit delta (205-213)
PQYSRQNSL

SEQ ID NO: 26546 - protein, 9 aa, synthetic construct
  REGION 1..9: note = Ubiquitin-associated protein 2-like (957-965)
PSGYGSHGY

SEQ ID NO: 26547 - protein, 12 aa, synthetic construct
  REGION 1..12: note = Enhancer of filamentation 1 (121-132)
PTGHGTQEQEVY

SEQ ID NO: 26548 - protein, 12 aa, synthetic construct
  REGION 1..12: note = Phosphatidylethanolamine-binding protein 1 (2-13)
PVDLSKWSGPLS

SEQ ID NO: 26549 - protein, 9 aa, synthetic construct
  REGION 1..9: note = DNA ligase 3 (547-555)
QAFPGGHSM

SEQ ID NO: 26550 - protein, 9 aa, synthetic construct
  REGION 1..9: note = E3 ubiquitin-protein ligase BRE1B (135-143)
QAGPINREM

SEQ ID NO: 26551 - protein, 9 aa, synthetic construct
  REGION 1..9: note = Tyrosine-protein phosphatase non-receptor type 20 (25-33)
QALSPLLSV

SEQ ID NO: 26552 - protein, 9 aa, synthetic construct
  REGION 1..9: note = Importin subunit beta-1 (408-416)
QAMPTLIEL

SEQ ID NO: 26553 - protein, 10 aa, synthetic construct
  REGION 1..10: note = UBX domain-containing protein 6 (85-94)
QEDPEEFYVL

SEQ ID NO: 26554 - protein, 8 aa, synthetic construct
  REGION 1..8: note = Spectrin beta chain, non-erythrocytic 5 (1672-1679)
QEELAIYW

SEQ ID NO: 26555 - protein, 13 aa, synthetic construct
  REGION 1..13: note = Growth/differentiation factor 15 (4-16)
QELRTVNGSQMLL

SEQ ID NO: 26556 - protein, 10 aa, synthetic construct
  REGION 1..10: note = Ethanolamine kinase 1 (326-335)
QFIDYEYSGY

SEQ ID NO: 26557 - protein, 10 aa, synthetic construct
  REGION 1..10: note = Leucine-rich repeat-containing protein 15 (122-131)
QGLDSLESLL

SEQ ID NO: 26558 - protein, 10 aa, synthetic construct
  REGION 1..10: note = Methyltransferase-like protein 25 (467-476)
QGLPTESLFY

SEQ ID NO: 26559 - protein, 9 aa, synthetic construct
  REGION 1..9: note = Nuclear migration protein nudC (20-28)
QHEGGVQEL

SEQ ID NO: 26560 - protein, 9 aa, synthetic construct
  REGION 1..9: note = Threonine-tRNA ligase, cytoplasmic (535-543)
QIKDAIGRY

SEQ ID NO: 26561 - protein, 9 aa, synthetic construct
  REGION 1..9: note = Cytoplasmic dynein 1 heavy chain 1 (2212-2220)
QITQINHGL

SEQ ID NO: 26562 - protein, 12 aa, synthetic construct
  REGION 1..12: note = Importin-8 (185-196)
QIVQLLPDSSYY

SEQ ID NO: 26563 - protein, 10 aa, synthetic construct
  REGION 1..10: note = Histone-lysine N-methyltransferase SUV39H1 (268-277)
QIYDRQGATY

SEQ ID NO: 26564 - protein, 9 aa, synthetic construct
  REGION 1..9: note = PH and SEC7 domain-containing protein 3 (214-222)
QKDLTALLT

SEQ ID NO: 26565 - protein, 9 aa, synthetic construct
  REGION 1..9: note = Zinc finger and BTB domain-containing protein 37 (95-103)
QLADIISYL

SEQ ID NO: 26566 - protein, 9 aa, synthetic construct
  REGION 1..9: note = Protein FAM98B (139-147)
QLDKNSEVY

SEQ ID NO: 26567 - protein, 10 aa, synthetic construct
  REGION 1..10: note = Calsyntenin-1 (952-961)
QLEWDDSTLS

SEQ ID NO: 26568 - protein, 9 aa, synthetic construct
  REGION 1..9: note = Poly (ADP-ribose) polymerase 4 (351-359)
QLIRDMVNV

SEQ ID NO: 26569 - protein, 9 aa, synthetic construct
  REGION 1..9: note = Rap guanine nucleotide exchange factor 6 (270-278)
QLLEFMHQL

SEQ ID NO: 26570 - protein, 9 aa, synthetic construct
  REGION 1..9: note = Probable dimethyladenosine transferase (249-257)
QLLEKNYRI

SEQ ID NO: 26571 - protein, 11 aa, synthetic construct
  REGION 1..11: note = 26S proteasome non-ATPase regulatory subunit 6 (306-316)
QLLESYRSLTL

SEQ ID NO: 26572 - protein, 9 aa, synthetic construct
  REGION 1..9: note = Chromosome-associated kinesin KIF4A (982-990)
QLLRENEII

SEQ ID NO: 26573 - protein, 11 aa, synthetic construct
  REGION 1..11: note = Voltage-gated potassium channel subunit beta-2 (329-339)
QLMENIGAIQV

SEQ ID NO: 26574 - protein, 9 aa, synthetic construct
  REGION 1..9: note = Chromatin assembly factor 1 subunit B (113-121)
QLNKENWTV

SEQ ID NO: 26575 - protein, 9 aa, synthetic construct
  REGION 1..9: note = Transcription activator BRG1 (179-187)
QLRAQIMAY

SEQ ID NO: 26576 - protein, 9 aa, synthetic construct
  REGION 1..9: note = Nuclear factor erythroid 2-related factor 1 (321-329)
QLSEAQLSL

SEQ ID NO: 26577 - protein, 9 aa, synthetic construct
  REGION 1..9: note = Protein AHNAK2 (5375-5383)
QLWEDSVLT

SEQ ID NO: 26578 - protein, 9 aa, synthetic construct
  REGION 1..9: note = Alpha-2-macroglobulin receptor-associated protein (61-69)
QLWEKAQRL

SEQ ID NO: 26579 - protein, 9 aa, synthetic construct
  REGION 1..9: note = Lysine-specific histone demethylase 1A (239-247)
QLWLDNPKI

SEQ ID NO: 26580 - protein, 10 aa, synthetic construct
  REGION 1..10: note = YrdC domain-containing protein, mitochondrial (184-193)
QMFEGPLALT

SEQ ID NO: 26581 - protein, 9 aa, synthetic construct
  REGION 1..9: note = U3 small nucleolar RNA-associated protein 14 homolog A (505-513)
QMIDLQNLL

SEQ ID NO: 26582 - protein, 9 aa, synthetic construct
  REGION 1..9: note = Sodium/myo-inositol cotransporter (686-694)
QMLEETRQV

SEQ ID NO: 26583 - protein, 11 aa, synthetic construct
  REGION 1..11: note = Neuroblastoma-amplified sequence (2232-2242)
QMLPAEGVKEL

SEQ ID NO: 26584 - protein, 9 aa, synthetic construct
  REGION 1..9: note = Vimentin (343-351)
QMREMEENF

SEQ ID NO: 26585 - protein, 9 aa, synthetic construct
  REGION 1..9: note = Transmembrane emp24 domain-containing protein 4 (59-67)
QMWDKQKEV

SEQ ID NO: 26586 - protein, 9 aa, synthetic construct
  REGION 1..9: note = G protein-coupled receptor SNSR1 (285-293)
QNLKLVLQK

SEQ ID NO: 26587 - protein, 9 aa, synthetic construct
  REGION 1..9: note = DNA-directed RNA polymerase I subunit RPA2 (30-38)
QQKAALQEL

SEQ ID NO: 26588 - protein, 9 aa, synthetic construct
  REGION 1..9: note = Histone-lysine N-methyltransferase 2C (1225-1233)
QQQQQQQQF

SEQ ID NO: 26589 - protein, 9 aa, synthetic construct
  REGION 1..9: note = Synaptosomal-associated protein 29 (42-50)
QQYLRQEVL

SEQ ID NO: 26590 - protein, 12 aa, synthetic construct
  REGION 1..12: note = Vimentin (195-206)
QREEAENTLQSF

SEQ ID NO: 26591 - protein, 9 aa, synthetic construct
  REGION 1..9: note = Very long-chain specific acyl-CoA dehydrogenase, mitochondrial (600-608)
QSDPWQQEL

SEQ ID NO: 26592 - protein, 10 aa, synthetic construct
  REGION 1..10: note = Neuropilin-2 (690-699)
QSDSQREGQY

SEQ ID NO: 26593 - protein, 9 aa, synthetic construct
  REGION 1..9: note = Kelch-like protein 42 (26-34)
QSDYFRALY

SEQ ID NO: 26594 - protein, 11 aa, synthetic construct
  REGION 1..11: note = HLA class I histocompatibility antigen, B-8 alpha chain (111-121)
QSEAGSHTLQS

SEQ ID NO: 26595 - protein, 13 aa, synthetic construct
  REGION 1..13: note = HLA class I histocompatibility antigen, A-66 alpha chain (86-98)
QSEDGSHTIQRMY

SEQ ID NO: 26596 - protein, 14 aa, synthetic construct
  REGION 1..14: note = Cold-inducible RNA-binding protein (147-160)
QSGGYSDRSSGGSY

SEQ ID NO: 26597 - protein, 13 aa, synthetic construct
  REGION 1..13: note = Caprin-1 (653-665)
QSQFSAPRDYSGY

SEQ ID NO: 26598 - protein, 10 aa, synthetic construct
  REGION 1..10: note = Zinc finger and BTB domain-containing protein 17 (685-694)
QTDADFYQQY

SEQ ID NO: 26599 - protein, 9 aa, synthetic construct
  REGION 1..9: note = RNA polymerase-associated protein CTR9 homolog (424-432)
QTDIQGALS

SEQ ID NO: 26600 - protein, 10 aa, synthetic construct
  REGION 1..10: note = Glia-derived nexin (301-310)
QTDLKEPLKV

SEQ ID NO: 26601 - protein, 11 aa, synthetic construct
  REGION 1..11: note = Calreticulin (119-129)
QTDMHGDSEYN

SEQ ID NO: 26602 - protein, 9 aa, synthetic construct
  REGION 1..9: note = Intraflagellar transport protein 172 homolog (85-93)
QTDNIIYVY

SEQ ID NO: 26603 - protein, 10 aa, synthetic construct
  REGION 1..10: note = Putative E3 ubiquitin-protein ligase UNKL (18-27)
QTEKPTHYRY

SEQ ID NO: 26604 - protein, 10 aa, synthetic construct
  REGION 1..10: note = Zinc finger protein 217 (667-676)
QTETAADCRY

SEQ ID NO: 26605 - protein, 9 aa, synthetic construct
  REGION 1..9: note = Interleukin-13 receptor subunit alpha-1 (268-276)
QTETHNVFY

SEQ ID NO: 26606 - protein, 9 aa, synthetic construct
  REGION 1..9: note = Centrosomal protein of 295 kDa (745-753)
QTETQQRDY

SEQ ID NO: 26607 - protein, 9 aa, synthetic construct
  REGION 1..9: note = Basic leucine zipper and W2 domain-containing protein 1 (165-173)
QTIGARKEL

SEQ ID NO: 26608 - protein, 9 aa, synthetic construct
  REGION 1..9: note = Ubiquitin carboxyl-terminal hydrolase 32 (111-119)
QTIKEIHEY

SEQ ID NO: 26609 - protein, 10 aa, synthetic construct
  REGION 1..10: note = Zinc fingers and homeoboxes protein 3 (607-616)
QTPDFTPTKY

SEQ ID NO: 26610 - protein, 11 aa, synthetic construct
  REGION 1..11: note = Glycerol-3-phosphate dehydrogenase 1-like protein (226-236)
QTSAEVYRILK

SEQ ID NO: 26611 - protein, 9 aa, synthetic construct
  REGION 1..9: note = Probable ATP-dependent RNA helicase DDX47 (228-236)
QTVEKLQQY

SEQ ID NO: 26612 - protein, 10 aa, synthetic construct
  REGION 1..10: note = WD repeat-containing protein 62 (147-156)
QVAEMLGHKY

SEQ ID NO: 26613 - protein, 10 aa, synthetic construct
  REGION 1..10: note = Ran GTPase-activating protein 1 (17-26)
QVAGGQLSFK

SEQ ID NO: 26614 - protein, 9 aa, synthetic construct
  REGION 1..9: note = Pre-mRNA-processing factor 19 (209-217)
QVASHVGLH

SEQ ID NO: 26615 - protein, 11 aa, synthetic construct
  REGION 1..11: note = Rootletin (1601-1611)
QVATLERSLQA

SEQ ID NO: 26616 - protein, 12 aa, synthetic construct
  REGION 1..12: note = Tripartite motif-containing protein 2 (694-705)
QVFDGSGSFLSY

SEQ ID NO: 26617 - protein, 10 aa, synthetic construct
  REGION 1..10: note = Basic leucine zipper and W2 domain-containing protein 2 (113-122)
QVFNKLIRRY

SEQ ID NO: 26618 - protein, 10 aa, synthetic construct
  REGION 1..10: note = Sec1 family domain-containing protein 2 (210-219)
QVIAADLANY

SEQ ID NO: 26619 - protein, 11 aa, synthetic construct
  REGION 1..11: note = Putative Polycomb group protein ASXL1 (36-46)
QVIEAEGLKEM

SEQ ID NO: 26620 - protein, 11 aa, synthetic construct
  REGION 1..11: note = SURP and G-patch domain-containing protein 2 (69-79)
QVIGHRKLGHF

SEQ ID NO: 26621 - protein, 9 aa, synthetic construct
  REGION 1..9: note = Vimentin (453-461)
QVINETSQH

SEQ ID NO: 26622 - protein, 10 aa, synthetic construct
  REGION 1..10: note = Vimentin (453-462)
QVINETSQHH

SEQ ID NO: 26623 - protein, 12 aa, synthetic construct
  REGION 1..12: note = Vimentin (453-464)
QVINETSQHHDD

SEQ ID NO: 26624 - protein, 9 aa, synthetic construct
  REGION 1..9: note = Splicing factor U2AF 65 kDa subunit (274-282)
QVKELLTSF

SEQ ID NO: 26625 - protein, 9 aa, synthetic construct
  REGION 1..9: note = Glutathione-specific gamma-glutamylcyclotransferase 1 (98-106)
QVQGEQVSK

SEQ ID NO: 26626 - protein, 10 aa, synthetic construct
  REGION 1..10: note = tRNA-splicing ligase RtcB homolog (232-241)
QVVDEIFNEY

SEQ ID NO: 26627 - protein, 10 aa, synthetic construct
  REGION 1..10: note = Xylulose kinase (511-520)
QVYEALLPQY

SEQ ID NO: 26628 - protein, 10 aa, synthetic construct
  REGION 1..10: note = 2'-5'-oligoadenylate synthase 3 (908-917)
QVYVDLIHSY

SEQ ID NO: 26629 - protein, 9 aa, synthetic construct
  REGION 1..9: note = FERM domain-containing protein 8 (28-36)
RAADVLVYL

SEQ ID NO: 26630 - protein, 9 aa, synthetic construct
  REGION 1..9: note = Non-canonical poly(A) RNA polymerase PAPD7 (152-160)
RAAEFIKNY

SEQ ID NO: 26631 - protein, 9 aa, synthetic construct
  REGION 1..9: note = Nuclear export mediator factor NEMF (136-144)
RAAEPLLTL

SEQ ID NO: 26632 - protein, 13 aa, synthetic construct
  REGION 1..13: note = Non-POU domain-containing octamer-binding protein (367-379)
RAAPGAEFAPNKR

SEQ ID NO: 26633 - protein, 11 aa, synthetic construct
  REGION 1..11: note = Fatty acid synthase (2275-2285)
RAAPLDSIHSL

SEQ ID NO: 26634 - protein, 10 aa, synthetic construct
  REGION 1..10: note = Sodium/potassium-transporting ATPase subunit alpha-3 (42-51)
RAAVPDAVGK

SEQ ID NO: 26635 - protein, 9 aa, synthetic construct
  REGION 1..9: note = Nuclear pore complex protein Nup205 (413-421)
RADEDARMI

SEQ ID NO: 26636 - protein, 9 aa, synthetic construct
  REGION 1..9: note = Uncharacterized protein KIAA0930 (312-320)
RADGNFLLY

SEQ ID NO: 26637 - protein, 9 aa, synthetic construct
  REGION 1..9: note = Cytochrome b-c1 complex subunit 9 (34-42)
RAFDQGADA

SEQ ID NO: 26638 - protein, 11 aa, synthetic construct
  REGION 1..11: note = E3 ubiquitin-protein ligase DTX3L (679-689)
RAFDQKLIFTV

SEQ ID NO: 26639 - protein, 9 aa, synthetic construct
  REGION 1..9: note = Protein transport protein Sec16A (1122-1130)
RAFPGPLAK

SEQ ID NO: 26640 - protein, 10 aa, synthetic construct
  REGION 1..10: note = Protein ECT2 (107-116)
RAFSFSKTPK

SEQ ID NO: 26641 - protein, 9 aa, synthetic construct
  REGION 1..9: note = Rho GTPase-activating protein 11B (16-24)
RAFYGIKVK

SEQ ID NO: 26642 - protein, 11 aa, synthetic construct
  REGION 1..11: note = Glutaminyl-peptide cyclotransferase (172-182)
RALDKKLLSLK

SEQ ID NO: 26643 - protein, 9 aa, synthetic construct
  REGION 1..9: note = Clathrin heavy chain 1 (625-633)
RALEHFTDL

SEQ ID NO: 26644 - protein, 9 aa, synthetic construct
  REGION 1..9: note = Guanine nucleotide exchange factor DBS (926-934)
RALEQSQSL

SEQ ID NO: 26645 - protein, 9 aa, synthetic construct
  REGION 1..9: note = ALX homeobox protein 1 (94-102)
RAMDNCNSL

SEQ ID NO: 26646 - protein, 10 aa, synthetic construct
  REGION 1..10: note = Inositol hexakisphosphate kinase 2 (6-15)
RAMDVEPRAK

SEQ ID NO: 26647 - protein, 9 aa, synthetic construct
  REGION 1..9: note = Hsp70-binding protein 1 (283-291)
RAMQQQVQK

SEQ ID NO: 26648 - protein, 9 aa, synthetic construct
  REGION 1..9: note = Ankyrin-2 (388-396)
RANPNARAL

SEQ ID NO: 26649 - protein, 13 aa, synthetic construct
  REGION 1..13: note = N-terminal kinase-like protein (673-685)
RASQSPTGAAGKL

SEQ ID NO: 26650 - protein, 9 aa, synthetic construct
  REGION 1..9: note = Retinoic acid receptor alpha (15-23)
RATSSTQSL

SEQ ID NO: 26651 - protein, 9 aa, synthetic construct
  REGION 1..9: note = Coiled-coil domain-containing protein 124 (215-223)
RAVPFNAPK

SEQ ID NO: 26652 - protein, 9 aa, synthetic construct
  REGION 1..9: note = Eukaryotic peptide chain release factor GTP-binding subunit ERF3A (143-151)
RAYFETEKK

SEQ ID NO: 26653 - protein, 10 aa, synthetic construct
  REGION 1..10: note = CCR4-NOT transcription complex subunit 1 (1694-1703)
RAYGSPWCNK

SEQ ID NO: 26654 - protein, 9 aa, synthetic construct
  REGION 1..9: note = E3 ubiquitin-protein ligase UBR5 (1124-1132)
RAYPAAITI

SEQ ID NO: 26655 - protein, 10 aa, synthetic construct
  REGION 1..10: note = SWI/SNF-related matrix-associated actin-dependent regulator of chromatin subfamily E member 1-related (135-144)
RAYQQSEAYK

SEQ ID NO: 26656 - protein, 9 aa, synthetic construct
  REGION 1..9: note = Hermansky-Pudlak syndrome 3 protein (89-97)
RAYVNWRNK

SEQ ID NO: 26657 - protein, 9 aa, synthetic construct
  REGION 1..9: note = 60S ribosomal protein L37 (21-29)
RCGSKAYHL

SEQ ID NO: 26658 - protein, 14 aa, synthetic construct
  REGION 1..14: note = PEST proteolytic signal-containing nuclear protein (112-125)
RDTPTSAGPNSFNK

SEQ ID NO: 26659 - protein, 10 aa, synthetic construct
  REGION 1..10: note = Nuclear mitotic apparatus protein 1 (76-85)
REAEQMGNEL

SEQ ID NO: 26660 - protein, 10 aa, synthetic construct
  REGION 1..10: note = Melanotransferrin (44-53)
REAGIQPSLL

SEQ ID NO: 26661 - protein, 10 aa, synthetic construct
  REGION 1..10: note = Kinesin-like protein (353-362)
REAGNINQSL

SEQ ID NO: 26662 - protein, 9 aa, synthetic construct
  REGION 1..9: note = Vacuolar protein sorting-associated protein 72 homolog (174-182)
REAKITEEL

SEQ ID NO: 26663 - protein, 9 aa, synthetic construct
  REGION 1..9: note = Src substrate cortactin (417-425)
REASSQQGL

SEQ ID NO: 26664 - protein, 11 aa, synthetic construct
  REGION 1..11: note = Cullin-4B (258-268)
REDSLDSVLFL

SEQ ID NO: 26665 - protein, 10 aa, synthetic construct
  REGION 1..10: note = Beta-citrylglutamate synthase B (18-27)
REDYPQKEIL

SEQ ID NO: 26666 - protein, 10 aa, synthetic construct
  REGION 1..10: note = RE1-silencing transcription factor (872-881)
REEASGDQKL

SEQ ID NO: 26667 - protein, 12 aa, synthetic construct
  REGION 1..12: note = 39S ribosomal protein L37, mitochondrial (242-253)
REEIEATKNHVL

SEQ ID NO: 26668 - protein, 9 aa, synthetic construct
  REGION 1..9: note = ATP-dependent RNA helicase DHX36 (91-99)
REEQIVQLL

SEQ ID NO: 26669 - protein, 9 aa, synthetic construct
  REGION 1..9: note = 60S ribosomal protein L3-like (69-77)
REEVEAVTI

SEQ ID NO: 26670 - protein, 10 aa, synthetic construct
  REGION 1..10: note = Colorectal mutant cancer protein (584-593)
REFEVETERL

SEQ ID NO: 26671 - protein, 11 aa, synthetic construct
  REGION 1..11: note = Proteasome subunit alpha type-7 (169-179)
REFLEKNYTDE

SEQ ID NO: 26672 - protein, 9 aa, synthetic construct
  REGION 1..9: note = TBC1 domain family member 16 (242-250)
REFPEAEAL

SEQ ID NO: 26673 - protein, 9 aa, synthetic construct
  REGION 1..9: note = Leucine-rich repeat and calponin homology domain-containing protein 3 (427-435)
REFQKTEDM

SEQ ID NO: 26674 - protein, 9 aa, synthetic construct
  REGION 1..9: note = 5,6-dihydroxyindole-2-carboxylic acid oxidase (471-479)
REFSVPEII

SEQ ID NO: 26675 - protein, 9 aa, synthetic construct
  REGION 1..9: note = Rhophilin-2 (553-561)
REGDYIVSI

SEQ ID NO: 26676 - protein, 11 aa, synthetic construct
  REGION 1..11: note = Contactin-associated protein-like 3B (224-234)
REGQHGNHITL

SEQ ID NO: 26677 - protein, 12 aa, synthetic construct
  REGION 1..12: note = Colorectal mutant cancer protein (255-266)
REHEDVQERTTL

SEQ ID NO: 26678 - protein, 9 aa, synthetic construct
  REGION 1..9: note = Protein orai-2 (155-163)
REIEELHKL

SEQ ID NO: 26679 - protein, 9 aa, synthetic construct
  REGION 1..9: note = Pyridoxal-dependent decarboxylase domain-containing protein 1 (596-604)
REIEENSRL

SEQ ID NO: 26680 - protein, 9 aa, synthetic construct
  REGION 1..9: note = Zinc finger FYVE domain-containing protein 16 (199-207)
REIGGIKEL

SEQ ID NO: 26681 - protein, 11 aa, synthetic construct
  REGION 1..11: note = Cathepsin K (225-235)
REIPEGNEKAL

SEQ ID NO: 26682 - protein, 9 aa, synthetic construct
  REGION 1..9: note = Calcineurin-binding protein cabin-1 (253-261)
REKEPDLKL

SEQ ID NO: 26683 - protein, 9 aa, synthetic construct
  REGION 1..9: note = B-cell lymphoma 3 protein (77-85)
RELDIYNNL

SEQ ID NO: 26684 - protein, 9 aa, synthetic construct
  REGION 1..9: note = Serine/threonine-protein kinase Nek9 (195-203)
REMEEKVTL

SEQ ID NO: 26685 - protein, 9 aa, synthetic construct
  REGION 1..9: note = Vimentin (345-353)
REMEENFAV

SEQ ID NO: 26686 - protein, 9 aa, synthetic construct
  REGION 1..9: note = Mitogen-activated protein kinase kinase kinase 1 (162-170)
REMENKETL

SEQ ID NO: 26687 - protein, 10 aa, synthetic construct
  REGION 1..10: note = Protein lin-9 homolog (312-321)
REMNTEAEKL

SEQ ID NO: 26688 - protein, 10 aa, synthetic construct
  REGION 1..10: note = KN motif and ankyrin repeat domain-containing protein 1 (483-492)
REMTKLKQEL

SEQ ID NO: 26689 - protein, 10 aa, synthetic construct
  REGION 1..10: note = Sorting nexin-29 (92-101)
RENEVLKVQL

SEQ ID NO: 26690 - protein, 9 aa, synthetic construct
  REGION 1..9: note = RNA-binding protein 27 (502-510)
RENNEQPTL

SEQ ID NO: 26691 - protein, 11 aa, synthetic construct
  REGION 1..11: note = N-alpha-acetyltransferase 11 (175-185)
RENQETQGSTL

SEQ ID NO: 26692 - protein, 10 aa, synthetic construct
  REGION 1..10: note = Heterogeneous nuclear ribonucleoprotein K (171-180)
RENTQTTIKL

SEQ ID NO: 26693 - protein, 11 aa, synthetic construct
  REGION 1..11: note = Probable ATP-dependent RNA helicase DDX5 (511-521)
RENYDRGYSSL

SEQ ID NO: 26694 - protein, 12 aa, synthetic construct
  REGION 1..12: note = Probable ATP-dependent RNA helicase DDX5 (511-522)
RENYDRGYSSLL

SEQ ID NO: 26695 - protein, 10 aa, synthetic construct
  REGION 1..10: note = Hsp70-binding protein 1 (357-366)
REPELGLEEL

SEQ ID NO: 26696 - protein, 10 aa, synthetic construct
  REGION 1..10: note = Tripartite motif-containing protein 65 (51-60)
REPFPDGAEL

SEQ ID NO: 26697 - protein, 10 aa, synthetic construct
  REGION 1..10: note = Melanoma-associated antigen 2 (155-164)
REPVTKAEML

SEQ ID NO: 26698 - protein, 9 aa, synthetic construct
  REGION 1..9: note = FAS-associated factor 1 (349-357)
REQDEAYRL

SEQ ID NO: 26699 - protein, 9 aa, synthetic construct
  REGION 1..9: note = Intersectin-2 (475-483)
REQEEIVRL

SEQ ID NO: 26700 - protein, 10 aa, synthetic construct
  REGION 1..10: note = L-dopachrome tautomerase (138-147)
REQFLGALDL

SEQ ID NO: 26701 - protein, 11 aa, synthetic construct
  REGION 1..11: note = Ras-responsive element-binding protein 1 (361-371)
REQPSEGATEL

SEQ ID NO: 26702 - protein, 9 aa, synthetic construct
  REGION 1..9: note = Microtubule-actin cross-linking factor 1, isoforms 1/2/3/5 (4309-4317)
REQQLQSTL

SEQ ID NO: 26703 - protein, 9 aa, synthetic construct
  REGION 1..9: note = V-type proton ATPase subunit D (194-202)
REREEFYRL

SEQ ID NO: 26704 - protein, 9 aa, synthetic construct
  REGION 1..9: note = Eukaryotic translation initiation factor 4B (372-380)
REREVEERL

SEQ ID NO: 26705 - protein, 11 aa, synthetic construct
  REGION 1..11: note = Proteasome activator complex subunit 3 (19-29)
RERITSEAEDL

SEQ ID NO: 26706 - protein, 9 aa, synthetic construct
  REGION 1..9: note = Lysosomal-trafficking regulator (1440-1448)
RESFPHRLL

SEQ ID NO: 26707 - protein, 10 aa, synthetic construct
  REGION 1..10: note = Cytoplasmic dynein 1 intermediate chain 1 (57-66)
RETEALLQSI

SEQ ID NO: 26708 - protein, 10 aa, synthetic construct
  REGION 1..10: note = Annexin A5 (227-236)
RETSGNLEQL

SEQ ID NO: 26709 - protein, 11 aa, synthetic construct
  REGION 1..11: note = Dexamethasone-induced Ras-related protein 1 (153-163)
REVDQREIEQL

SEQ ID NO: 26710 - protein, 13 aa, synthetic construct
  REGION 1..13: note = Dual specificity protein phosphatase 10 (294-306)
REVGGGASAASSL

SEQ ID NO: 26711 - protein, 11 aa, synthetic construct
  REGION 1..11: note = Transmembrane channel-like protein 6 (57-67)
REVTGSSQQTL

SEQ ID NO: 26712 - protein, 10 aa, synthetic construct
  REGION 1..10: note = Sarcoplasmic/endoplasmic reticulum calcium ATPase 2 (549-558)
REWGSGSDTL

SEQ ID NO: 26713 - protein, 10 aa, synthetic construct
  REGION 1..10: note = GPN-loop GTPase 1 (251-260)
REYRPEYERL

SEQ ID NO: 26714 - protein, 9 aa, synthetic construct
  REGION 1..9: note = Rab-like protein 3 (198-206)
RFFDKVIEK

SEQ ID NO: 26715 - protein, 10 aa, synthetic construct
  REGION 1..10: note = DNA mismatch repair protein Msh3 (26-35)
RFFQSTGSLK

SEQ ID NO: 26716 - protein, 18 aa, synthetic construct
  REGION 1..18: note = Transgelin-2 (182-199)
RGASQAGMTGYGMPRQIL

SEQ ID NO: 26717 - protein, 11 aa, synthetic construct
  REGION 1..11: note = F-box/LRR-repeat protein 4 (358-368)
RGFISVAGFSR

SEQ ID NO: 26718 - protein, 11 aa, synthetic construct
  REGION 1..11: note = Isocitrate dehydrogenase (NAD) subunit alpha, mitochondrial (25-35)
RGFTGGINFAK

SEQ ID NO: 26719 - protein, 9 aa, synthetic construct
  REGION 1..9: note = POM121 and ZP3 fusion protein (9-17)
RIAPPDRRF

SEQ ID NO: 26720 - protein, 11 aa, synthetic construct
  REGION 1..11: note = Histone H2B type 1-A (74-84)
RIASEASRLAH

SEQ ID NO: 26721 - protein, 9 aa, synthetic construct
  REGION 1..9: note = Cell division cycle 5-like protein (33-41)
RIASLLHRK

SEQ ID NO: 26722 - protein, 10 aa, synthetic construct
  REGION 1..10: note = Transmembrane protein 230 (98-107)
RIAYYASKGY

SEQ ID NO: 26723 - protein, 9 aa, synthetic construct
  REGION 1..9: note = Galectin-3-binding protein (216-224)
RIDITLSSV

SEQ ID NO: 26724 - protein, 9 aa, synthetic construct
  REGION 1..9: note = Nuclear pore complex protein Nup88 (356-364)
RIDLIPSLY

SEQ ID NO: 26725 - protein, 11 aa, synthetic construct
  REGION 1..11: note Dolichyl-diphosphooligosaccharide-proteinosyltransferase 48 kDa subunit (359-369)
RIDPFVRTFLK

SEQ ID NO: 26726 - protein, 11 aa, synthetic construct
  REGION 1..11: note = 78 kDa glucose-regulated protein (540-550)
RIDTRNELESY

SEQ ID NO: 26727 - protein, 9 aa, synthetic construct
  REGION 1..9: note = Tuftelin-interacting protein 11 (402-410)
RIFETLQDK

SEQ ID NO: 26728 - protein, 9 aa, synthetic construct
  REGION 1..9: note = DNA-directed RNA polymerase III subunit RPC3 (364-372)
RIFRLVLQK

SEQ ID NO: 26729 - protein, 9 aa, synthetic construct
  REGION 1..9: note = Serine/threonine-protein phosphatase 2A regulatory subunit B'' subunit beta (354-362)
RIFSGAVTR

SEQ ID NO: 26730 - protein, 13 aa, synthetic construct
  REGION 1..13: note = Interleukin enhancer-binding factor 3 (5-17)
RIFVNDDRHVMAK

SEQ ID NO: 26731 - protein, 9 aa, synthetic construct
  REGION 1..9: note = Peroxisome biogenesis factor 10 (83-91)
RIHVPSSLR

SEQ ID NO: 26732 - protein, 9 aa, synthetic construct
  REGION 1..9: note = A-kinase anchor protein 13 (58-66)
RIIDSKFLK

SEQ ID NO: 26733 - protein, 9 aa, synthetic construct
  REGION 1..9: note = Oligoribonuclease, mitochondrial (133-141)
RIIDVSTVK

SEQ ID NO: 26734 - protein, 9 aa, synthetic construct
  REGION 1..9: note = Actin filament-associated protein 1-like 1 (363-371)
RIIGFSKKK

SEQ ID NO: 26735 - protein, 11 aa, synthetic construct
  REGION 1..11: note = Choline kinase alpha (244-254)
RIKFTEESRIK

SEQ ID NO: 26736 - protein, 9 aa, synthetic construct
  REGION 1..9: note = Endothelin B receptor (208-216)
RIKGIGVPK

SEQ ID NO: 26737 - protein, 10 aa, synthetic construct
  REGION 1..10: note = Uncharacterized protein C1orf21 (35-44)
RIKPVEEVKY

SEQ ID NO: 26738 - protein, 9 aa, synthetic construct
  REGION 1..9: note = Chromodomain-helicase-DNA-binding protein 8 (579-587)
RILDESHSI

SEQ ID NO: 26739 - protein, 10 aa, synthetic construct
  REGION 1..10: note = SH3 domain-binding glutamic acid-rich-like protein 3 (159-168)
RILDGKRIQY

SEQ ID NO: 26740 - protein, 12 aa, synthetic construct
  REGION 1..12: note = Ubiquitin conjugation factor E4 B (856-867)
RILDPAYPDITL

SEQ ID NO: 26741 - protein, 9 aa, synthetic construct
  REGION 1..9: note = Shugoshin-like 2 (1098-1106)
RILDSVQGK

SEQ ID NO: 26742 - protein, 11 aa, synthetic construct
  REGION 1..11: note = Serine/threonine-protein phosphatase 6 regulatory subunit 3 (385-395)
RILEAWEMNEK

SEQ ID NO: 26743 - protein, 11 aa, synthetic construct
  REGION 1..11: note = 60S ribosomal protein L19 (117-127)
RILMEHIHKLK

SEQ ID NO: 26744 - protein, 11 aa, synthetic construct
  REGION 1..11: note = Eukaryotic translation initiation factor 3 subunit A (623-633)
RILQEHEQIKK

SEQ ID NO: 26745 - protein, 10 aa, synthetic construct
  REGION 1..10: note = Pre-mRNA-splicing factor ATP-dependent RNA helicase DHX15 (666-675)
RIMDRFNLPR

SEQ ID NO: 26746 - protein, 11 aa, synthetic construct
  REGION 1..11: note = Cell differentiation protein RCD1 homolog (169-179)
RIMESGSELSK

SEQ ID NO: 26747 - protein, 11 aa, synthetic construct
  REGION 1..11: note = Elongation factor 2 (428-438)
RIMGPNYTPGK

SEQ ID NO: 26748 - protein, 11 aa, synthetic construct
  REGION 1..11: note = Calcineurin binding protein 1, isoform CRA_c (308-318)
RIMSETYMLIK

SEQ ID NO: 26749 - protein, 9 aa, synthetic construct
  REGION 1..9: note = Synaptonemal complex central element protein 1 (59-67)
RINEVQQAK

SEQ ID NO: 26750 - protein, 10 aa, synthetic construct
  REGION 1..10: note = Ninein (1240-1249)
RIPEASPKYK

SEQ ID NO: 26751 - protein, 10 aa, synthetic construct
  REGION 1..10: note = Ribosomal protein 63, mitochondrial (11-20)
RIPGRQWIGK

SEQ ID NO: 26752 - protein, 11 aa, synthetic construct
  REGION 1..11: note = Cullin-1 (328-338)
RIQDGLGELKK

SEQ ID NO: 26753 - protein, 11 aa, synthetic construct
  REGION 1..11: note = Malate dehydrogenase, mitochondrial (229-239)
RIQEAGTEVVK

SEQ ID NO: 26754 - protein, 9 aa, synthetic construct
  REGION 1..9: note = Spectrin beta chain, non-erythrocytic 1 (1245-1253)
RIQEKVDSI

SEQ ID NO: 26755 - protein, 10 aa, synthetic construct
  REGION 1..10: note = Thyroid adenoma-associated protein (692-701)
RIQESSQVLY

SEQ ID NO: 26756 - protein, 9 aa, synthetic construct
  REGION 1..9: note = DNA replication licensing factor MCM6 (207-215)
RIQETQAEL

SEQ ID NO: 26757 - protein, 9 aa, synthetic construct
  REGION 1..9: note = Antigen KI-67 (38-46)
RIQLPVVSK

SEQ ID NO: 26758 - protein, 9 aa, synthetic construct
  REGION 1..9: note = RNA-binding E3 ubiquitin-protein ligase MEX3C (156-164)
RIQQQTHTY

SEQ ID NO: 26759 - protein, 11 aa, synthetic construct
  REGION 1..11: note = Tubulin beta chain (18-28)
RISEQFTAMFR

SEQ ID NO: 26760 - protein, 9 aa, synthetic construct
  REGION 1..9: note = Zinc finger protein 529 (330-338)
RISSQLIEH

SEQ ID NO: 26761 - protein, 9 aa, synthetic construct
  REGION 1..9: note = Lysine-specific histone demethylase 1B (473-481)
RITDPTIDK

SEQ ID NO: 26762 - protein, 10 aa, synthetic construct
  REGION 1..10: note = Cleavage stimulation factor subunit 2 (179-188)
RIVDPEIALK

SEQ ID NO: 26763 - protein, 9 aa, synthetic construct
  REGION 1..9: note = Unconventional myosin-X (239-247)
RIVDYLLEK

SEQ ID NO: 26764 - protein, 9 aa, synthetic construct
  REGION 1..9: note = CDP-diacylglycerol-glycerol-3-phosphate 3-phosphatidyltransferase, mitochondrial (76-84)
RIWSLQFSR

SEQ ID NO: 26765 - protein, 9 aa, synthetic construct
  REGION 1..9: note = Dynein heavy chain 6, axonemal (191-199)
RIYAATFEK

SEQ ID NO: 26766 - protein, 10 aa, synthetic construct
  REGION 1..10: note = DNA-directed RNA polymerase II subunit RPB2 (409-418)
RIYAQKFIDR

SEQ ID NO: 26767 - protein, 9 aa, synthetic construct
  REGION 1..9: note = U4/U6 small nuclear ribonucleoprotein Prp31 (203-211)
RIYEYVESR

SEQ ID NO: 26768 - protein, 9 aa, synthetic construct
  REGION 1..9: note = Long-chain-fatty-acid-CoA ligase 4 (339-347)
RIYKNVMSK

SEQ ID NO: 26769 - protein, 9 aa, synthetic construct
  REGION 1..9: note = 28S ribosomal protein S21, mitochondrial (50-58)
RIYNMEMAR

SEQ ID NO: 26770 - protein, 9 aa, synthetic construct
  REGION 1..9: note = Ankyrin repeat and SOCS box protein 4 (318-326)
RIYPPQFHK

SEQ ID NO: 26771 - protein, 9 aa, synthetic construct
  REGION 1..9: note = Transformation/transcription domain-associated protein (296-304)
RIYQELVTK

SEQ ID NO: 26772 - protein, 10 aa, synthetic construct
  REGION 1..10: note = Semaphorin-5A (736-745)
RLADPNLLEV

SEQ ID NO: 26773 - protein, 9 aa, synthetic construct
  REGION 1..9: note = Long-chain fatty acid transport protein 3 (117-125)
RLAELAQQR

SEQ ID NO: 26774 - protein, 11 aa, synthetic construct
  REGION 1..11: note = E3 ubiquitin-protein ligase TRIM56 (291-301)
RLAELEGREQV

SEQ ID NO: 26775 - protein, 9 aa, synthetic construct
  REGION 1..9: note = Catenin beta-1 (124-132)
RLAEPSQML

SEQ ID NO: 26776 - protein, 9 aa, synthetic construct
  REGION 1..9: note = 14-3-3 protein eta (12-20)
RLAEQAERY

SEQ ID NO: 26777 - protein, 9 aa, synthetic construct
  REGION 1..9: note = Syntaxin-binding protein 1 (171-179)
RLAEQIATL

SEQ ID NO: 26778 - protein, 9 aa, synthetic construct
  REGION 1..9: note = GPALPP motifs-containing protein 1 (89-97)
RLAEQVSSY

SEQ ID NO: 26779 - protein, 10 aa, synthetic construct
  REGION 1..10: note = Ubiquitin carboxyl-terminal hydrolase 19 (897-906)
RLAEVIKNRF

SEQ ID NO: 26780 - protein, 11 aa, synthetic construct
  REGION 1..11: note = Receptor tyrosine-protein kinase erbB-3 (916-926)
RLAEVPDLLEK

SEQ ID NO: 26781 - protein, 11 aa, synthetic construct
  REGION 1..11: note = Catenin beta-1 (274-284)
RLAGGLQKMVA

SEQ ID NO: 26782 - protein, 9 aa, synthetic construct
  REGION 1..9: note = Echinoderm microtubule-associated protein-like 3 (815-823)
RLAPRLAGR

SEQ ID NO: 26783 - protein, 9 aa, synthetic construct
  REGION 1..9: note = Nucleolar protein 56 (212-220)
RLAQFIGNR

SEQ ID NO: 26784 - protein, 9 aa, synthetic construct
  REGION 1..9: note = Sorting nexin-17 (261-269)
RLAQTLRHY

SEQ ID NO: 26785 - protein, 12 aa, synthetic construct
  REGION 1..12: note = Microtubule-associated protein 4 (922-933)
RLATNTSAPDLK

SEQ ID NO: 26786 - protein, 9 aa, synthetic construct
  REGION 1..9: note = P2X purinoceptor 7 (277-285)
RLDDKTTNV

SEQ ID NO: 26787 - protein, 11 aa, synthetic construct
  REGION 1..11: note = Nuclear RNA export factor 1 (219-229)
RLDDMSSIVQK

SEQ ID NO: 26788 - protein, 10 aa, synthetic construct
  REGION 1..10: note = Potassium voltage-gated channel subfamily G member 3 (115-124)
RLDDRMSDTY

SEQ ID NO: 26789 - protein, 10 aa, synthetic construct
  REGION 1..10: note = FERM domain-containing protein 6 (225-234)
RLDDVAVHYY

SEQ ID NO: 26790 - protein, 9 aa, synthetic construct
  REGION 1..9: note Dolichyl-diphosphooligosaccharide-proteinosyltransferase subunit 2 (190-198)
RLDELGGVY

SEQ ID NO: 26791 - protein, 9 aa, synthetic construct
  REGION 1..9: note = Activating signal cointegrator 1 (224-232)
RLDETIQAI

SEQ ID NO: 26792 - protein, 9 aa, synthetic construct
  REGION 1..9: note = Helicase-like transcription factor (880-888)
RLDGSMAQK

SEQ ID NO: 26793 - protein, 9 aa, synthetic construct
  REGION 1..9: note = Tubulin alpha-1C chain (355-363)
RLDHKFDLM

SEQ ID NO: 26794 - protein, 9 aa, synthetic construct
  REGION 1..9: note = Protein kinase C and casein kinase substrate in neurons protein 2 (427-435)
RLDNGQVGL

SEQ ID NO: 26795 - protein, 9 aa, synthetic construct
  REGION 1..9: note = Coiled-coil domain-containing protein 138 (306-314)
RLDNLQRKY

SEQ ID NO: 26796 - protein, 9 aa, synthetic construct
  REGION 1..9: note = Melanoma antigen preferentially expressed in tumors (312-320)
RLDQLLRHV

SEQ ID NO: 26797 - protein, 9 aa, synthetic construct
  REGION 1..9: note = Coiled-coil domain-containing protein 91 (405-413)
RLDQVIRQR

SEQ ID NO: 26798 - protein, 11 aa, synthetic construct
  REGION 1..11: note = Nicastrin (281-291)
RLDSRSFFWNV

SEQ ID NO: 26799 - protein, 9 aa, synthetic construct
  REGION 1..9: note = C-Jun-amino-terminal kinase-interacting protein 4 (1097-1105)
RLDSTLRLY

SEQ ID NO: 26800 - protein, 9 aa, synthetic construct
  REGION 1..9: note = Cyclin-dependent kinase 2 (36-44)
RLDTETEGV

SEQ ID NO: 26801 - protein, 9 aa, synthetic construct
  REGION 1..9: note = Uncharacterized protein C19orf60 (50-58)
RLEEGHRQY

SEQ ID NO: 26802 - protein, 10 aa, synthetic construct
  REGION 1..10: note = Cap-specific mRNAucleoside-2'-O-)-methyltransferase 1 (708-717)
RLEEMEKIFV

SEQ ID NO: 26803 - protein, 11 aa, synthetic construct
  REGION 1..11: note = Pre-mRNA-processing factor 6 (317-327)
RLEEVTGKLQV

SEQ ID NO: 26804 - protein, 10 aa, synthetic construct
  REGION 1..10: note = Armadillo repeat-containing protein 8 (27-36)
RLFDPDPQKV

SEQ ID NO: 26805 - protein, 10 aa, synthetic construct
  REGION 1..10: note = Receptor-interacting serine/threonine-protein kinase 4 (198-207)
RLFDTKHDVY

SEQ ID NO: 26806 - protein, 10 aa, synthetic construct
  REGION 1..10: note = Phosphatidylinositol 4-kinase beta (132-141)
RLFESKLFDI

SEQ ID NO: 26807 - protein, 10 aa, synthetic construct
  REGION 1..10: note = Cartilage-associated protein (107-116)
RLFGGLLRRA

SEQ ID NO: 26808 - protein, 10 aa, synthetic construct
  REGION 1..10: note = Synaptonemal complex protein SC65 (104-113)
RLFGRVLERA

SEQ ID NO: 26809 - protein, 12 aa, synthetic construct
  REGION 1..12: note = Diamine acetyltransferase 1 (155-166)
RLFKIDKEYLLK

SEQ ID NO: 26810 - protein, 11 aa, synthetic construct
  REGION 1..11: note = Dol-P-Man:Man(5)GlcNAc(2)-PP-Dol alpha-1,3-mannosyltransferase (123-133)
RLFNDPVAMVL

SEQ ID NO: 26811 - protein, 9 aa, synthetic construct
  REGION 1..9: note = Membralin (58-66)
RLFPPAFRR

SEQ ID NO: 26812 - protein, 9 aa, synthetic construct
  REGION 1..9: note = DNA primase small subunit (19-27)
RLFPYSQYY

SEQ ID NO: 26813 - protein, 9 aa, synthetic construct
  REGION 1..9: note = Homeobox protein cut-like 1 (640-648)
RLFQEVPKR

SEQ ID NO: 26814 - protein, 11 aa, synthetic construct
  REGION 1..11: note = Coatomer subunit gamma-2 (75-85)
RLFQSNDQTLR

SEQ ID NO: 26815 - protein, 9 aa, synthetic construct
  REGION 1..9: note = 28S ribosomal protein S2, mitochondrial (251-259)
RLFQTAITR

SEQ ID NO: 26816 - protein, 9 aa, synthetic construct
  REGION 1..9: note = Armadillo repeat-containing protein 2 (134-142)
RLFRAASQR

SEQ ID NO: 26817 - protein, 10 aa, synthetic construct
  REGION 1..10: note = Nicalin (40-49)
RLFSRLYTYK

SEQ ID NO: 26818 - protein, 12 aa, synthetic construct
  REGION 1..12: note = C-Jun-amino-terminal kinase-interacting protein 4 (548-559)
RLFSSSSNTTKK

SEQ ID NO: 26819 - protein, 10 aa, synthetic construct
  REGION 1..10: note = 40S ribosomal protein S17 (23-32)
RLGNDFHTNK

SEQ ID NO: 26820 - protein, 10 aa, synthetic construct
  REGION 1..10: note = Thrombospondin-2 (245-254)
RLGPHVTTEY

SEQ ID NO: 26821 - protein, 9 aa, synthetic construct
  REGION 1..9: note = Ankyrin repeat domain-containing protein 54 (100-108)
RLGPTGKEV

SEQ ID NO: 26822 - protein, 10 aa, synthetic construct
  REGION 1..10: note = Protein fantom (56-65)
RLHDENILLK

SEQ ID NO: 26823 - protein, 13 aa, synthetic construct
  REGION 1..13: note = 40S ribosomal protein S20 (87-99)
RLIDLHSPSEIVK

SEQ ID NO: 26824 - protein, 11 aa, synthetic construct
  REGION 1..11: note = 28S ribosomal protein S5, mitochondrial (246-256)
RLIGIKDMYAK

SEQ ID NO: 26825 - protein, 9 aa, synthetic construct
  REGION 1..9: note = Abnormal spindle-like microcephaly-associated protein (521-529)
RLIQTTWRK

SEQ ID NO: 26826 - protein, 9 aa, synthetic construct
  REGION 1..9: note = Calcineurin-binding protein cabin-1 (136-144)
RLIRIPLAR

SEQ ID NO: 26827 - protein, 11 aa, synthetic construct
  REGION 1..11: note = Chromatin assembly factor 1 subunit A (782-792)
RLISENSVYEK

SEQ ID NO: 26828 - protein, 9 aa, synthetic construct
  REGION 1..9: note = Rho guanine nucleotide exchange factor 39 (185-193)
RLISETAQR

SEQ ID NO: 26829 - protein, 12 aa, synthetic construct
  REGION 1..12: note = DCN1-like protein 5 (40-51)
RLISGEEHFSSK

SEQ ID NO: 26830 - protein, 12 aa, synthetic construct
  REGION 1..12: note = 40S ribosomal protein S4, X isoform (81-92)
RLIYDTKGRFAV

SEQ ID NO: 26831 - protein, 9 aa, synthetic construct
  REGION 1..9: note = Protein PRRC2A (2074-2082)
RLKATPSTY

SEQ ID NO: 26832 - protein, 9 aa, synthetic construct
  REGION 1..9: note = Nuclear migration protein nudC (143-151)
RLKGKDMVV

SEQ ID NO: 26833 - protein, 11 aa, synthetic construct
  REGION 1..11: note = tRNA-splicing endonuclease subunit Sen34 (58-68)
RLLAEIGAVTL

SEQ ID NO: 26834 - protein, 9 aa, synthetic construct
  REGION 1..9: note = Transcription factor SPT20 homolog (262-270)
RLLDFLQKR

SEQ ID NO: 26835 - protein, 9 aa, synthetic construct
  REGION 1..9: note = Mitogen-activated protein kinase-binding protein 1 (92-100)
RLLDKWVEL

SEQ ID NO: 26836 - protein, 9 aa, synthetic construct
  REGION 1..9: note = E3 ubiquitin-protein ligase RNF14 (373-381)
RLLDQRYGK

SEQ ID NO: 26837 - protein, 11 aa, synthetic construct
  REGION 1..11: note = Lysine-specific histone demethylase 1A (408-418)
RLLEATSYLSH

SEQ ID NO: 26838 - protein, 9 aa, synthetic construct
  REGION 1..9: note = 39S ribosomal protein L37, mitochondrial (112-120)
RLLEGVKQA

SEQ ID NO: 26839 - protein, 9 aa, synthetic construct
  REGION 1..9: note = Transient receptor potential cation channel subfamily M member 1 (158-166)
RLLEKHISL

SEQ ID NO: 26840 - protein, 9 aa, synthetic construct
  REGION 1..9: note = DNA-directed RNA polymerase III subunit RPC3 (458-466)
RLLEKSQRV

SEQ ID NO: 26841 - protein, 9 aa, synthetic construct
  REGION 1..9: note = citron Rho-interacting kinase isoform X13 (384-392)
RLLELETRL

SEQ ID NO: 26842 - protein, 9 aa, synthetic construct
  REGION 1..9: note = Clathrin heavy chain 1 (583-591)
RLLEMNLMH

SEQ ID NO: 26843 - protein, 11 aa, synthetic construct
  REGION 1..11: note = Unconventional myosin-Va (137-147)
RLLESQLQSQK

SEQ ID NO: 26844 - protein, 11 aa, synthetic construct
  REGION 1..11: note = Glycogen synthase kinase-3 beta (319-329)
RLLEYTPTARL

SEQ ID NO: 26845 - protein, 17 aa, synthetic construct
  REGION 1..17: note = Oxidation resistance protein 1 (21-37)
RLLGFGGGGEARQTLAK

SEQ ID NO: 26846 - protein, 8 aa, synthetic construct
  REGION 1..8: note = Membrane-associated transporter protein (209-216)
RLLGTEFQ

SEQ ID NO: 26847 - protein, 9 aa, synthetic construct
  REGION 1..9: note = Microsomal glutathione S-transferase 1 (147-155)
RLLKSKLYL

SEQ ID NO: 26848 - protein, 9 aa, synthetic construct
  REGION 1..9: note = Actin-binding protein anillin (762-770)
RLLLIATGK

SEQ ID NO: 26849 - protein, 10 aa, synthetic construct
  REGION 1..10: note = DNA replication licensing factor MCM6 (11-20)
RLLNKSIIRV

SEQ ID NO: 26850 - protein, 11 aa, synthetic construct
  REGION 1..11: note = Activating signal cointegrator 1 complex subunit 3 (832-842)
RLLNLSKVIDK

SEQ ID NO: 26851 - protein, 11 aa, synthetic construct
  REGION 1..11: note = Glioma tumor suppressor candidate region gene 2 protein (165-175)
RLLNPSATRAK

SEQ ID NO: 26852 - protein, 10 aa, synthetic construct
  REGION 1..10: note = Ectonucleoside triphosphate diphosphohydrolase 6 (169-178)
RLLPGEKAQK

SEQ ID NO: 26853 - protein, 11 aa, synthetic construct
  REGION 1..11: note = Myomegalin (2291-2301)
RLLQSTTEHLK

SEQ ID NO: 26854 - protein, 9 aa, synthetic construct
  REGION 1..9: note = Carbohydrate sulfotransferase 14 (180-188)
RLLSAYRNK

SEQ ID NO: 26855 - protein, 12 aa, synthetic construct
  REGION 1..12: note = GPI-anchor transamidase (149-160)
RLLSDDRSNILI

SEQ ID NO: 26856 - protein, 10 aa, synthetic construct
  REGION 1..10: note = Spermatogenesis-associated protein 20 (128-137)
RLLSEDFVSV

SEQ ID NO: 26857 - protein, 11 aa, synthetic construct
  REGION 1..11: note = Attractin (51-61)
RLLSPPLRPRL

SEQ ID NO: 26858 - protein, 12 aa, synthetic construct
  REGION 1..12: note = Attractin (51-62)
RLLSPPLRPRLL

SEQ ID NO: 26859 - protein, 9 aa, synthetic construct
  REGION 1..9: note = Actin-binding protein anillin (910-918)
RLLTSITTK

SEQ ID NO: 26860 - protein, 11 aa, synthetic construct
  REGION 1..11: note = Serine/threonine-protein kinase mTOR (2429-2439)
RLMDTNTKGNK

SEQ ID NO: 26861 - protein, 11 aa, synthetic construct
  REGION 1..11: note = Dehydrodolichyl diphosphate syntase complex subunit DHDDS (103-113)
RLMEEKEKLQK

SEQ ID NO: 26862 - protein, 9 aa, synthetic construct
  REGION 1..9: note = Dedicator of cytokinesis protein 4 (213-221)
RLMERLLDY

SEQ ID NO: 26863 - protein, 9 aa, synthetic construct
  REGION 1..9: note = Nuclear receptor-interacting protein 3 (4-12)
RLMETNLSK

SEQ ID NO: 26864 - protein, 12 aa, synthetic construct
  REGION 1..12: note = Heterogeneous nuclear ribonucleoprotein Q (192-203)
RLMMDPLTGLNR

SEQ ID NO: 26865 - protein, 11 aa, synthetic construct
  REGION 1..11: note = Heat shock protein 105 kDa (169-179)
RLMNDMTAVAL

SEQ ID NO: 26866 - protein, 9 aa, synthetic construct
  REGION 1..9: note = RILP-like protein 1 (52-60)
RLMPKVVRV

SEQ ID NO: 26867 - protein, 9 aa, synthetic construct
  REGION 1..9: note = U5 small nuclear ribonucleoprotein 200 kDa helicase (841-849)
RLMRAIFEI

SEQ ID NO: 26868 - protein, 9 aa, synthetic construct
  REGION 1..9: note = FYVE, RhoGEF and PH domain-containing protein 4 (32-40)
RLMSKNFTK

SEQ ID NO: 26869 - protein, 9 aa, synthetic construct
  REGION 1..9: note = Hyaluronan mediated motility receptor (119-127)
RLNAALREK

SEQ ID NO: 26870 - protein, 9 aa, synthetic construct
  REGION 1..9: note = Cytochrome c oxidase subunit 5A, mitochondrial (98-106)
RLNDFASTV

SEQ ID NO: 26871 - protein, 9 aa, synthetic construct
  REGION 1..9: note = Spectrin beta chain, non-erythrocytic 1 (2278-2286)
RLNDGNEYL

SEQ ID NO: 26872 - protein, 10 aa, synthetic construct
  REGION 1..10: note = V-type proton ATPase subunit H (382-391)
RLNEKNYELL

SEQ ID NO: 26873 - protein, 11 aa, synthetic construct
  REGION 1..11: note = Pyruvate kinase PKM (73-83)
RLNFSHGTHEY

SEQ ID NO: 26874 - protein, 12 aa, synthetic construct
  REGION 1..12: note = 60S acidic ribosomal protein P2 (38-49)
RLNKVISELNGK

SEQ ID NO: 26875 - protein, 9 aa, synthetic construct
  REGION 1..9: note = Midasin (2183-2191)
RLNNKINSY

SEQ ID NO: 26876 - protein, 11 aa, synthetic construct
  REGION 1..11: note = RalBP1-associated Eps domain-containing protein 1 (712-722)
RLNSELQQQLK

SEQ ID NO: 26877 - protein, 10 aa, synthetic construct
  REGION 1..10: note = Testis-expressed sequence 10 protein (473-482)
RLNSKQLNRL

SEQ ID NO: 26878 - protein, 10 aa, synthetic construct
  REGION 1..10: note = Integrator complex subunit 8 (649-658)
RLPDIPLRQV

SEQ ID NO: 26879 - protein, 11 aa, synthetic construct
  REGION 1..11: note = Protrudin (48-58)
RLPDSELMRRK

SEQ ID NO: 26880 - protein, 11 aa, synthetic construct
  REGION 1..11: note = Beta-1,3-N-acetylglucosaminyltransferase radical fringe (267-277)
RLPPDTLLQQV

SEQ ID NO: 26881 - protein, 9 aa, synthetic construct
  REGION 1..9: note = F-actin-capping protein subunit beta (41-49)
RLPPQQIEK

SEQ ID NO: 26882 - protein, 13 aa, synthetic construct
  REGION 1..13: note = Transmembrane protein 51 (123-135)
RLPQGTMFPATRK

SEQ ID NO: 26883 - protein, 9 aa, synthetic construct
  REGION 1..9: note = Inactive tyrosine-protein kinase 7 (362-370)
RLPTHGRVY

SEQ ID NO: 26884 - protein, 9 aa, synthetic construct
  REGION 1..9: note = Bridging integrator 3 (137-145)
RLQAKVEKY

SEQ ID NO: 26885 - protein, 10 aa, synthetic construct
  REGION 1..10: note = Nck-associated protein 1 (492-501)
RLQAYTSVSK

SEQ ID NO: 26886 - protein, 9 aa, synthetic construct
  REGION 1..9: note = Scavenger receptor class A member 5 (244-252)
RLQDLRVLV

SEQ ID NO: 26887 - protein, 13 aa, synthetic construct
  REGION 1..13: note = Protein FAM167A (131-143)
RLQDQQLARQLMR

SEQ ID NO: 26888 - protein, 10 aa, synthetic construct
  REGION 1..10: note = KH domain-containing, RNA-binding, signal transduction-associated protein 1 (186-195)
RLQEETGAKI

SEQ ID NO: 26889 - protein, 9 aa, synthetic construct
  REGION 1..9: note = 26S proteasome non-ATPase regulatory subunit 12 (39-47)
RLQEVIETL

SEQ ID NO: 26890 - protein, 11 aa, synthetic construct
  REGION 1..11: note = Sentrin-specific protease 6 (172-182)
RLQGVERIMKK

SEQ ID NO: 26891 - protein, 12 aa, synthetic construct
  REGION 1..12: note = 60S ribosomal protein L10 (109-120)
RLQTGMRGAFGK

SEQ ID NO: 26892 - protein, 10 aa, synthetic construct
  REGION 1..10: note = Integrin beta-3 (117-126)
RLRPDDSKNF

SEQ ID NO: 26893 - protein, 10 aa, synthetic construct
  REGION 1..10: note = Protogenin (10-19)
RLRPPGMLLR

SEQ ID NO: 26894 - protein, 11 aa, synthetic construct
  REGION 1..11: note = DNA replication licensing factor MCM5 (573-583)
RLSAEAAEKLK

SEQ ID NO: 26895 - protein, 12 aa, synthetic construct
  REGION 1..12: note = EF-hand domain-containing protein D2 (176-187)
RLSEIDVSSEGV

SEQ ID NO: 26896 - protein, 9 aa, synthetic construct
  REGION 1..9: note = MICOS complex subunit MIC25 (29-37)
RLSENVVNR

SEQ ID NO: 26897 - protein, 9 aa, synthetic construct
  REGION 1..9: note = Neuron navigator 2 (2169-2177)
RLSEYIVLR

SEQ ID NO: 26898 - protein, 11 aa, synthetic construct
  REGION 1..11: note = Serine palmitoyltransferase 2 (212-222)
RLSGATIRIFK

SEQ ID NO: 26899 - protein, 9 aa, synthetic construct
  REGION 1..9: note = T-complex protein 1 subunit delta (435-443)
RLTEYSRTL

SEQ ID NO: 26900 - protein, 9 aa, synthetic construct
  REGION 1..9: note = 60S ribosomal protein L36 (32-40)
RLTKHTKFV

SEQ ID NO: 26901 - protein, 9 aa, synthetic construct
  REGION 1..9: note = Centromere protein F (420-428)
RLTQELQQA

SEQ ID NO: 26902 - protein, 10 aa, synthetic construct
  REGION 1..10: note = Spectrin beta chain, non-erythrocytic 1 (2078-2087)
RLTTLELLEV

SEQ ID NO: 26903 - protein, 13 aa, synthetic construct
  REGION 1..13: note = Disintegrin and metalloproteinase domain-containing protein 10 (389-401)
RLVDADGPLARLK

SEQ ID NO: 26904 - protein, 11 aa, synthetic construct
  REGION 1..11: note = DNA mismatch repair protein Mlh1 (265-275)
RLVESTSLRKA

SEQ ID NO: 26905 - protein, 9 aa, synthetic construct
  REGION 1..9: note = Coiled-coil domain-containing protein 144A (749-757)
RLVKELRTV

SEQ ID NO: 26906 - protein, 13 aa, synthetic construct
  REGION 1..13: note = Sialidase-3 (111-123)
RLVSNSWTQAILK

SEQ ID NO: 26907 - protein, 9 aa, synthetic construct
  REGION 1..9: note = Uridine phosphorylase 1 (90-98)
RLVSYFIKK

SEQ ID NO: 26908 - protein, 9 aa, synthetic construct
  REGION 1..9: note = Cryptochrome-2 (155-163)
RLWDLYKKV

SEQ ID NO: 26909 - protein, 15 aa, synthetic construct
  REGION 1..15: note = Ribosome biogenesis protein WDR12 (322-336)
RLWDPRTKDGSLVSL

SEQ ID NO: 26910 - protein, 10 aa, synthetic construct
  REGION 1..10: note = Protein polybromo-1 (982-991)
RLWEDSAGEK

SEQ ID NO: 26911 - protein, 9 aa, synthetic construct
  REGION 1..9: note = ATP-dependent RNA helicase DDX24 (447-455)
RLWELIKEK

SEQ ID NO: 26912 - protein, 10 aa, synthetic construct
  REGION 1..10: note = DnaJ homolog subfamily C member 4 (11-20)
RLWPRNPPSR

SEQ ID NO: 26913 - protein, 12 aa, synthetic construct
  REGION 1..12: note = Multifunctional protein ADE2 (215-226)
RLWPSGDRSQQK

SEQ ID NO: 26914 - protein, 11 aa, synthetic construct
  REGION 1..11: note = 39S ribosomal protein L37, mitochondrial (162-172)
RLWQTTEEIPK

SEQ ID NO: 26915 - protein, 10 aa, synthetic construct
  REGION 1..10: note = Protein phosphatase Slingshot homolog 1 (144-153)
RLWSDTKIHL

SEQ ID NO: 26916 - protein, 10 aa, synthetic construct
  REGION 1..10: note = Inositol 1,4,5-trisphosphate receptor type 1 (806-815)
RLWSEIPSEI

SEQ ID NO: 26917 - protein, 10 aa, synthetic construct
  REGION 1..10: note = E3 ubiquitin-protein ligase Mdm2 (71-80)
RLYDEKQQHI

SEQ ID NO: 26918 - protein, 12 aa, synthetic construct
  REGION 1..12: note = E3 ubiquitin-protein ligase Mdm2 (65-76)
RLYDEKQQHIVY

SEQ ID NO: 26919 - protein, 11 aa, synthetic construct
  REGION 1..11: note = ATP-binding cassette sub-family B member 10, mitochondrial (542-552)
RLYDPASGTIS

SEQ ID NO: 26920 - protein, 10 aa, synthetic construct
  REGION 1..10: note = MICOS complex subunit MIC26 (165-174)
RLYDWGLRGY

SEQ ID NO: 26921 - protein, 9 aa, synthetic construct
  REGION 1..9: note = ADP-ribosylation factor-like protein 4D (182-190)
RLYEMILKR

SEQ ID NO: 26922 - protein, 13 aa, synthetic construct
  REGION 1..13: note = Probable fibrosin-1 (306-318)
RLYGLEPAHPLLY

SEQ ID NO: 26923 - protein, 10 aa, synthetic construct
  REGION 1..10: note = Tubulin-specific chaperone C (217-226)
RLYGNPNTLR

SEQ ID NO: 26924 - protein, 9 aa, synthetic construct
  REGION 1..9: note = Tubulin polyglutamylase TTLL7 (399-407)
RLYGQNSIK

SEQ ID NO: 26925 - protein, 9 aa, synthetic construct
  REGION 1..9: note = Condensin-2 complex subunit G2 (329-337)
RLYKPILWR

SEQ ID NO: 26926 - protein, 9 aa, synthetic construct
  REGION 1..9: note = Partitioning defective 6 homolog beta (159-167)
RLYKYGTEK

SEQ ID NO: 26927 - protein, 10 aa, synthetic construct
  REGION 1..10: note = HCG2002594, isoform CRA_c (311-320)
RLYPWGIVEV

SEQ ID NO: 26928 - protein, 8 aa, synthetic construct
  REGION 1..8: note = Conserved oligomeric Golgi complex subunit 4 (121-128)
RLYQAIQR

SEQ ID NO: 26929 - protein, 11 aa, synthetic construct
  REGION 1..11: note = Proteasome subunit alpha type-7 (143-153)
RLYQTDPSGTY

SEQ ID NO: 26930 - protein, 9 aa, synthetic construct
  REGION 1..9: note = Coiled-coil domain-containing protein 77 (127-135)
RLYSENDRL

SEQ ID NO: 26931 - protein, 10 aa, synthetic construct
  REGION 1..10: note = 39S ribosomal protein L17, mitochondrial (74-83)
RMADFWLTEK

SEQ ID NO: 26932 - protein, 13 aa, synthetic construct
  REGION 1..13: note = Coiled-coil-helix-coiled-coil-helix domain-containing protein 2 (11-23)
RMAPPASRAPQMR

SEQ ID NO: 26933 - protein, 9 aa, synthetic construct
  REGION 1..9: note = Exportin-1 (44-52)
RMAQEVLTH

SEQ ID NO: 26934 - protein, 10 aa, synthetic construct
  REGION 1..10: note = Lon protease homolog 2, peroxisomal (632-641)
RMDGEGQLTL

SEQ ID NO: 26935 - protein, 9 aa, synthetic construct
  REGION 1..9: note = DNA mismatch repair protein Msh3 (448-456)
RMDNIYFEY

SEQ ID NO: 26936 - protein, 12 aa, synthetic construct
  REGION 1..12: note = 39S ribosomal protein L51, mitochondrial (101-112)
RMFADDLHNLNK

SEQ ID NO: 26937 - protein, 11 aa, synthetic construct
  REGION 1..11: note = 60S ribosomal protein L4 (100-110)
RMFAPTKTWRR

SEQ ID NO: 26938 - protein, 9 aa, synthetic construct
  REGION 1..9: note = Zinc finger BED domain-containing protein 5 (228-236)
RMFDEQYSK

SEQ ID NO: 26939 - protein, 11 aa, synthetic construct
  REGION 1..11: note = HLA class II histocompatibility antigen, DP alpha 1 chain (6-16)
RMFHIRAVILR

SEQ ID NO: 26940 - protein, 10 aa, synthetic construct
  REGION 1..10: note = Protein Shroom2 (323-332)
RMFIGDLDKV

SEQ ID NO: 26941 - protein, 10 aa, synthetic construct
  REGION 1..10: note = Cullin-1 (506-515)
RMFQDIGVSK

SEQ ID NO: 26942 - protein, 12 aa, synthetic construct
  REGION 1..12: note = EPM2A-interacting protein 1 (249-260)
RMIGENSGLVSY

SEQ ID NO: 26943 - protein, 10 aa, synthetic construct
  REGION 1..10: note = Leucine-rich repeat and WD repeat-containing protein 1 (193-202)
RMISEELVAA

SEQ ID NO: 26944 - protein, 10 aa, synthetic construct
  REGION 1..10: note = Endoplasmin (509-518)
RMKEKQDKIY

SEQ ID NO: 26945 - protein, 11 aa, synthetic construct
  REGION 1..11: note = Heat shock protein HSP 90-alpha (605-615)
RMKENQKHIYY

SEQ ID NO: 26946 - protein, 10 aa, synthetic construct
  REGION 1..10: note = Heat shock protein HSP 90-beta (401-410)
RMKETQKSIY

SEQ ID NO: 26947 - protein, 11 aa, synthetic construct
  REGION 1..11: note = Heat shock protein HSP 90-beta (401-411)
RMKETQKSIYY

SEQ ID NO: 26948 - protein, 10 aa, synthetic construct
  REGION 1..10: note = 60S ribosomal protein L39 (28-37)
RMKTGNKIRY

SEQ ID NO: 26949 - protein, 9 aa, synthetic construct
  REGION 1..9: note = Liprin-alpha-4 (339-347)
RMLDHLTKK

SEQ ID NO: 26950 - protein, 10 aa, synthetic construct
  REGION 1..10: note = Eukaryotic translation initiation factor 3 subunit A (752-761)
RMLEDRDLFV

SEQ ID NO: 26951 - protein, 9 aa, synthetic construct
  REGION 1..9: note = Proteasome subunit beta type-7 (103-111)
RMLKQMLFR

SEQ ID NO: 26952 - protein, 11 aa, synthetic construct
  REGION 1..11: note = cDNA FLJ78342 (112-122)
RMLQISESSFL

SEQ ID NO: 26953 - protein, 11 aa, synthetic construct
  REGION 1..11: note = rRNA-processing protein FCF1 homolog (15-25)
RMLSLRDQRLK

SEQ ID NO: 26954 - protein, 10 aa, synthetic construct
  REGION 1..10: note = Meiotic nuclear division protein 1 homolog (15-24)
RMMEIFSETK

SEQ ID NO: 26955 - protein, 11 aa, synthetic construct
  REGION 1..11: note = Zinc finger FYVE domain-containing protein 16 (812-822)
RMMSPTGSNLK

SEQ ID NO: 26956 - protein, 9 aa, synthetic construct
  REGION 1..9: note = DNA replication ATP-dependent helicase/nuclease DNA2 (828-836)
RMNSKIMSL

SEQ ID NO: 26957 - protein, 11 aa, synthetic construct
  REGION 1..11: note = WAS protein family homolog 1 (5-15)
RMQHSLAGQTY

SEQ ID NO: 26958 - protein, 9 aa, synthetic construct
  REGION 1..9: note = Neuron navigator 2 (1941-1949)
RMQSEIEKL

SEQ ID NO: 26959 - protein, 9 aa, synthetic construct
  REGION 1..9: note = 28 kDa heat- and acid-stable phosphoprotein (173-181)
RMQSLSLNK

SEQ ID NO: 26960 - protein, 13 aa, synthetic construct
  REGION 1..13: note = cDNA FLJ57726, highly similar to Heterogeneous nuclear ribonucleoprotein H3 (32-44)
RMRDGRGMGGHGY

SEQ ID NO: 26961 - protein, 9 aa, synthetic construct
  REGION 1..9: note = Histone-lysine N-methyltransferase EHMT2 (42-50)
RMSDDVHSL

SEQ ID NO: 26962 - protein, 9 aa, synthetic construct
  REGION 1..9: note = La-related protein 4 (502-510)
RMSDVVKGV

SEQ ID NO: 26963 - protein, 16 aa, synthetic construct
  REGION 1..16: note = Casein kinase I isoform delta (394-409)
RMSTSQNSIPFEHHGK

SEQ ID NO: 26964 - protein, 9 aa, synthetic construct
  REGION 1..9: note = Nucleophosmin (277-285)
RMTDQEAIQ

SEQ ID NO: 26965 - protein, 10 aa, synthetic construct
  REGION 1..10: note = DNA mismatch repair protein Msh6 (302-311)
RMVTGNGSLK

SEQ ID NO: 26966 - protein, 11 aa, synthetic construct
  REGION 1..11: note = Mesencephalic astrocyte-derived neurotrophic factor (3-13)
RMWATQGLAVA

SEQ ID NO: 26967 - protein, 9 aa, synthetic construct
  REGION 1..9: note = Arginine/serine-rich coiled-coil protein 2 (170-178)
RNLDAQYEM

SEQ ID NO: 26968 - protein, 17 aa, synthetic construct
  REGION 1..17: note = Melanocyte protein PMEL (241-257)
RNQPLTFALQLHDPSGY

SEQ ID NO: 26969 - protein, 9 aa, synthetic construct
  REGION 1..9: note = Keratin, type I cytoskeletal 10 (99-107)
RNVSTGDVN

SEQ ID NO: 26970 - protein, 9 aa, synthetic construct
  REGION 1..9: note = Dystonin (4836-4844)
RQAEEFHSV

SEQ ID NO: 26971 - protein, 9 aa, synthetic construct
  REGION 1..9: note = Stathmin-3 (130-138)
RQAEEKLNY

SEQ ID NO: 26972 - protein, 9 aa, synthetic construct
  REGION 1..9: note = Elongation factor 1-gamma (99-107)
RQAFPNTNR

SEQ ID NO: 26973 - protein, 9 aa, synthetic construct
  REGION 1..9: note = A-kinase anchor protein 10, mitochondrial (481-489)
RQAWTTMEK

SEQ ID NO: 26974 - protein, 9 aa, synthetic construct
  REGION 1..9: note = Vimentin (207-215)
RQDVDNASL

SEQ ID NO: 26975 - protein, 9 aa, synthetic construct
  REGION 1..9: note = Acidic fibroblast growth factor intracellular-binding protein (136-144)
RQFDNFKRV

SEQ ID NO: 26976 - protein, 8 aa, synthetic construct
  REGION 1..8: note = Lysine-specific demethylase 5B (878-885)
RQFVTQLY

SEQ ID NO: 26977 - protein, 9 aa, synthetic construct
  REGION 1..9: note = Fibronectin type III domain-containing protein 3B (198-206)
RQIDRQNRL

SEQ ID NO: 26978 - protein, 10 aa, synthetic construct
  REGION 1..10: note = Cytochrome P450 2U1 (288-297)
RQIEKDITSF

SEQ ID NO: 26979 - protein, 8 aa, synthetic construct
  REGION 1..8: note = Interferon alpha-inducible protein 6 (2-9)
RQKAVSLF

SEQ ID NO: 26980 - protein, 9 aa, synthetic construct
  REGION 1..9: note = THAP domain-containing protein 1 (175-183)
RQLEKLKEV

SEQ ID NO: 26981 - protein, 11 aa, synthetic construct
  REGION 1..11: note = 3-hydroxy-3-methylglutaryl-coenzyme A reductase (84-94)
RQLGSKYILGI

SEQ ID NO: 26982 - protein, 9 aa, synthetic construct
  REGION 1..9: note = Protein FAM32A (72-80)
RQMERILKK

SEQ ID NO: 26983 - protein, 9 aa, synthetic construct
  REGION 1..9: note = Splicing factor 3A subunit 1 (72-80)
RQNEINNPK

SEQ ID NO: 26984 - protein, 9 aa, synthetic construct
  REGION 1..9: note = Spectrin beta chain, non-erythrocytic 1 (1161-1169)
RQNLLSQSH

SEQ ID NO: 26985 - protein, 9 aa, synthetic construct
  REGION 1..9: note = Unconventional myosin-X (252-260)
RQNPGERNY

SEQ ID NO: 26986 - protein, 10 aa, synthetic construct
  REGION 1..10: note = Phosphatidylinositol-binding clathrin assembly protein (139-148)
RQVAFDFTKV

SEQ ID NO: 26987 - protein, 9 aa, synthetic construct
  REGION 1..9: note = Hom s 2 (98-106)
RQVTGVTRV

SEQ ID NO: 26988 - protein, 10 aa, synthetic construct
  REGION 1..10: note = Alpha-actinin-1 (672-681)
RQYEKSIVNY

SEQ ID NO: 26989 - protein, 9 aa, synthetic construct
  REGION 1..9: note = Protein CREG2 (251-259)
RQYEWFFMK

SEQ ID NO: 26990 - protein, 9 aa, synthetic construct
  REGION 1..9: note = Transmembrane emp24 domain-containing protein 4 (92-100)
RQYGSEGRF

SEQ ID NO: 26991 - protein, 9 aa, synthetic construct
  REGION 1..9: note = Bromodomain adjacent to zinc finger domain protein 2B (487-495)
RQYPEVIKY

SEQ ID NO: 26992 - protein, 9 aa, synthetic construct
  REGION 1..9: note = Myb-binding protein 1A (59-67)
RRDFQIRVL

SEQ ID NO: 26993 - protein, 9 aa, synthetic construct
  REGION 1..9: note = FLYWCH-type zinc finger-containing protein 1 (137-145)
RRGPGPLTL

SEQ ID NO: 26994 - protein, 9 aa, synthetic construct
  REGION 1..9: note = NEDD8 ultimate buster 1 (431-439)
RRLENIRFL

SEQ ID NO: 26995 - protein, 9 aa, synthetic construct
  REGION 1..9: note = Tribbles homolog 2 (31-39)
RSAEPSQSF

SEQ ID NO: 26996 - protein, 9 aa, synthetic construct
  REGION 1..9: note = Adenylate kinase 2, mitochondrial (175-183)
RSDDNEKAL

SEQ ID NO: 26997 - protein, 11 aa, synthetic construct
  REGION 1..11: note = Rhomboid-like protein (64-74)
RSDPGTSGEAY

SEQ ID NO: 26998 - protein, 11 aa, synthetic construct
  REGION 1..11: note = THO complex subunit 5 homolog (27-37)
RSDTEQEGKYY

SEQ ID NO: 26999 - protein, 9 aa, synthetic construct
  REGION 1..9: note = Serine/threonine-protein kinase VRK2 (112-120)
RSDVEILGY

SEQ ID NO: 27000 - protein, 13 aa, synthetic construct
  REGION 1..13: note = Eukaryotic translation initiation factor 3 subunit E (431-443)
RSEAPNWATQDSG

SEQ ID NO: 27001 - protein, 13 aa, synthetic construct
  REGION 1..13: note = Annexin A1 (303-315)
RSEIDMNDIKAFY

SEQ ID NO: 27002 - protein, 10 aa, synthetic construct
  REGION 1..10: note = Protein LAP2 (1012-1021)
RSESTENQSY

SEQ ID NO: 27003 - protein, 9 aa, synthetic construct
  REGION 1..9: note = Zinc finger and BTB domain-containing protein 17 (362-370)
RSFSDPTSK

SEQ ID NO: 27004 - protein, 11 aa, synthetic construct
  REGION 1..11: note = Acyl-coenzyme A thioesterase THEM4 (34-44)
RSFSSEEVILK

SEQ ID NO: 27005 - protein, 9 aa, synthetic construct
  REGION 1..9: note = Hypoxia-inducible factor 1-alpha (30-38)
RSKESEVFY

SEQ ID NO: 27006 - protein, 9 aa, synthetic construct
  REGION 1..9: note = Tubulin-tyrosine ligase-like protein 12 (425-433)
RSLDTHVTK

SEQ ID NO: 27007 - protein, 11 aa, synthetic construct
  REGION 1..11: note = UHRF1-binding protein 1 (558-568)
RSLEQFKAIYK

SEQ ID NO: 27008 - protein, 9 aa, synthetic construct
  REGION 1..9: note = EWS RNA-binding protein variant 6 (391-399)
RSLRYYYEK

SEQ ID NO: 27009 - protein, 11 aa, synthetic construct
  REGION 1..11: note = Transmembrane protein 131 (709-719)
RSLSEDVRFYY

SEQ ID NO: 27010 - protein, 9 aa, synthetic construct
  REGION 1..9: note = Solute carrier family 25 member 35 (270-278)
RSLYYTDTK

SEQ ID NO: 27011 - protein, 9 aa, synthetic construct
  REGION 1..9: note = Phospholipid hydroperoxide glutathione peroxidase, mitochondrial (39-47)
RSMHEFSAK

SEQ ID NO: 27012 - protein, 9 aa, synthetic construct
  REGION 1..9: note = Ubiquitin-like protein 7 (210-218)
RSMPSSSYR

SEQ ID NO: 27013 - protein, 9 aa, synthetic construct
  REGION 1..9: note = Baculoviral IAP repeat-containing protein 6 (3123-3131)
RSMVSTIMK

SEQ ID NO: 27014 - protein, 9 aa, synthetic construct
  REGION 1..9: note = Testis-specific Y-encoded protein 1 (206-214)
RSNPYFQNK

SEQ ID NO: 27015 - protein, 9 aa, synthetic construct
  REGION 1..9: note = Eukaryotic translation initiation factor 2 subunit 2 (285-293)
RSPDTILQK

SEQ ID NO: 27016 - protein, 12 aa, synthetic construct
  REGION 1..12: note = Myb-binding protein 1A (545-556)
RSPSLLQSGAKK

SEQ ID NO: 27017 - protein, 10 aa, synthetic construct
  REGION 1..10: note = Histone acetyltransferase KAT2A (279-288)
RSQAEDVATY

SEQ ID NO: 27018 - protein, 9 aa, synthetic construct
  REGION 1..9: note = Sorting nexin-17 (193-201)
RSQEYKIVL

SEQ ID NO: 27019 - protein, 16 aa, synthetic construct
  REGION 1..16: note = Cold-inducible RNA-binding protein (145-160)
RSQSGGYSDRSSGGSY

SEQ ID NO: 27020 - protein, 13 aa, synthetic construct
  REGION 1..13: note = Heterogeneous nuclear ribonucleoprotein A1-like 2 (131-143)
RSSGPYGGGGQYF

SEQ ID NO: 27021 - protein, 9 aa, synthetic construct
  REGION 1..9: note = Solute carrier family 22 member 18 (22-30)
RSSVILLTY

SEQ ID NO: 27022 - protein, 10 aa, synthetic construct
  REGION 1..10: note = Lysine-specific histone demethylase 1A (632-641)
RSTSQTFIYK

SEQ ID NO: 27023 - protein, 9 aa, synthetic construct
  REGION 1..9: note = Butyrophilin subfamily 2 member A2 (135-143)
RSYDEAILR

SEQ ID NO: 27024 - protein, 10 aa, synthetic construct
  REGION 1..10: note = Butyrophilin subfamily 2 member A2 (135-144)
RSYDEAILRL

SEQ ID NO: 27025 - protein, 9 aa, synthetic construct
  REGION 1..9: note = Vacuolar protein sorting-associated protein 52 homolog (301-309)
RSYLGRLMK

SEQ ID NO: 27026 - protein, 11 aa, synthetic construct
  REGION 1..11: note = CDKN2AIP N-terminal-like protein (28-38)
RSYSESEKQWK

SEQ ID NO: 27027 - protein, 12 aa, synthetic construct
  REGION 1..12: note = Vimentin (28-39)
RSYVTTSTRTYS

SEQ ID NO: 27028 - protein, 11 aa, synthetic construct
  REGION 1..11: note = Ribosome biogenesis protein BOP1 (9-19)
RTAAPSVRPEK

SEQ ID NO: 27029 - protein, 11 aa, synthetic construct
  REGION 1..11: note = Myelin basic protein (92-102)
RTAHYGSLPQK

SEQ ID NO: 27030 - protein, 17 aa, synthetic construct
  REGION 1..17: note = HIRA-interacting protein 3 (190-206)
RTAWNPLGEAAPPGELY

SEQ ID NO: 27031 - protein, 9 aa, synthetic construct
  REGION 1..9: note = WD repeat-containing protein 91 (7-15)
RTDELVREY

SEQ ID NO: 27032 - protein, 9 aa, synthetic construct
  REGION 1..9: note = Protein FAM199X (55-63)
RTDPLHRFH

SEQ ID NO: 27033 - protein, 13 aa, synthetic construct
  REGION 1..13: note = Sodium/potassium/calcium exchanger 5 (203-215)
RTDSGIFYEDSGY

SEQ ID NO: 27034 - protein, 12 aa, synthetic construct
  REGION 1..12: note = Multivesicular body subunit 12B (107-118)
RTDYEYQHSNLY

SEQ ID NO: 27035 - protein, 10 aa, synthetic construct
  REGION 1..10: note = Upstream stimulatory factor 1 (52-61)
RTENGGQVMY

SEQ ID NO: 27036 - protein, 11 aa, synthetic construct
  REGION 1..11: note = Upstream stimulatory factor 2 (69-79)
RTETNGGQVTY

SEQ ID NO: 27037 - protein, 12 aa, synthetic construct
  REGION 1..12: note = Plexin-C1 (1024-1035)
RTFFPESGGFTH

SEQ ID NO: 27038 - protein, 10 aa, synthetic construct
  REGION 1..10: note = Spatacsin (651-660)
RTFMIKFPWK

SEQ ID NO: 27039 - protein, 10 aa, synthetic construct
  REGION 1..10: note = Cytoplasmic dynein 1 heavy chain 1 (4159-4168)
RTFSSIPVSR

SEQ ID NO: 27040 - protein, 9 aa, synthetic construct
  REGION 1..9: note = Abhydrolase domain-containing protein 2 (144-152)
RTFVDYAQK

SEQ ID NO: 27041 - protein, 9 aa, synthetic construct
  REGION 1..9: note = Probable ATP-dependent RNA helicase DDX5 (559-567)
RTGNPTGTY

SEQ ID NO: 27042 - protein, 11 aa, synthetic construct
  REGION 1..11: note = Ras-related protein Rab-1B (48-58)
RTIELDGKTIK

SEQ ID NO: 27043 - protein, 14 aa, synthetic construct
  REGION 1..14: note = NADH dehydrogenase (ubiquinone) 1 beta subcomplex subunit 4 (72-85)
RTINVYPNFRPTPK

SEQ ID NO: 27044 - protein, 13 aa, synthetic construct
  REGION 1..13: note = S-adenosylmethionine decarboxylase proenzyme (33-45)
RTIPRSEWDILLK

SEQ ID NO: 27045 - protein, 9 aa, synthetic construct
  REGION 1..9: note = Midasin (1582-1590)
RTLFKFMKK

SEQ ID NO: 27046 - protein, 9 aa, synthetic construct
  REGION 1..9: note = DNA dC-dU-editing enzyme APOBEC-3B (183-191)
RTLKEILRY

SEQ ID NO: 27047 - protein, 11 aa, synthetic construct
  REGION 1..11: note = Disintegrin and metalloproteinase domain-containing protein 10 (147-157)
RTLPFHSVIYH

SEQ ID NO: 27048 - protein, 11 aa, synthetic construct
  REGION 1..11: note = BTB/POZ domain-containing adapter for CUL3-mediated RhoA degradation protein 1 (57-67)
RTLTGQDTMLK

SEQ ID NO: 27049 - protein, 14 aa, synthetic construct
  REGION 1..14: note = Heat shock protein HSP 90-beta (32-45)
RTLTLVDTGIGMTK

SEQ ID NO: 27050 - protein, 12 aa, synthetic construct
  REGION 1..12: note = UDP-N-acetylhexosamine pyrophosphorylase (169-180)
RTMESTKEFFTK

SEQ ID NO: 27051 - protein, 11 aa, synthetic construct
  REGION 1..11: note = Hypoxia-inducible factor 1-alpha (180-190)
RTMNIKSATWK

SEQ ID NO: 27052 - protein, 9 aa, synthetic construct
  REGION 1..9: note = Spindle and centriole-associated protein 1 (657-665)
RTNESLIQR

SEQ ID NO: 27053 - protein, 10 aa, synthetic construct
  REGION 1..10: note = COBW domain-containing protein 2 (353-362)
RTNRLVLLGR

SEQ ID NO: 27054 - protein, 10 aa, synthetic construct
  REGION 1..10: note = Alpha-adducin (193-202)
RTPSFLKKSK

SEQ ID NO: 27055 - protein, 9 aa, synthetic construct
  REGION 1..9: note = Programmed cell death 6-interacting protein (478-486)
RTPSNELYK

SEQ ID NO: 27056 - protein, 12 aa, synthetic construct
  REGION 1..12: note = Leucine zipper putative tumor suppressor 1 (432-443)
RTQDLEGALRTK

SEQ ID NO: 27057 - protein, 9 aa, synthetic construct
  REGION 1..9: note = Protein disulfide-isomerase A4 (155-163)
RTQEEIVAK

SEQ ID NO: 27058 - protein, 11 aa, synthetic construct
  REGION 1..11: note = Glycerol kinase (118-128)
RTQSTVESLSK

SEQ ID NO: 27059 - protein, 10 aa, synthetic construct
  REGION 1..10: note = E3 ubiquitin-protein ligase DZIP3 (287-296)
RTQYNEQINK

SEQ ID NO: 27060 - protein, 9 aa, synthetic construct
  REGION 1..9: note = SHC SH2 domain-binding protein 1 (434-442)
RTSAEFLMK

SEQ ID NO: 27061 - protein, 10 aa, synthetic construct
  REGION 1..10: note = Microtubule-associated protein 1B (1897-1906)
RTSDVGGYYY

SEQ ID NO: 27062 - protein, 9 aa, synthetic construct
  REGION 1..9: note = Phosphatidylinositol 3-kinase regulatory subunit beta (469-477)
RTSQELQMK

SEQ ID NO: 27063 - protein, 11 aa, synthetic construct
  REGION 1..11: note = Plakophilin-4 (455-465)
RTSSQRSTLTY

SEQ ID NO: 27064 - protein, 9 aa, synthetic construct
  REGION 1..9: note = E3-independent E2 ubiquitin-conjugating enzyme (103-111)
RTTDIVIRI

SEQ ID NO: 27065 - protein, 11 aa, synthetic construct
  REGION 1..11: note = Uncharacterized protein KIAA1211 (15-25)
RTTSWAKSKLF

SEQ ID NO: 27066 - protein, 9 aa, synthetic construct
  REGION 1..9: note = Eukaryotic translation initiation factor 3 subunit E (74-82)
RTTVVAQLK

SEQ ID NO: 27067 - protein, 11 aa, synthetic construct
  REGION 1..11: note Dolichyl-diphosphooligosaccharide-proteinosyltransferase subunit 1 (38-48)
RTVDLSSHLAK

SEQ ID NO: 27068 - protein, 10 aa, synthetic construct
  REGION 1..10: note = 28S ribosomal protein S24, mitochondrial (77-86)
RTVEDVFLRK

SEQ ID NO: 27069 - protein, 11 aa, synthetic construct
  REGION 1..11: note = Serpin B6 (125-135)
RTVEKELTYEK

SEQ ID NO: 27070 - protein, 10 aa, synthetic construct
  REGION 1..10: note = Ribosome biogenesis protein BOP1 (389-398)
RTVPVGGVVK

SEQ ID NO: 27071 - protein, 9 aa, synthetic construct
  REGION 1..9: note = Histone-lysine N-methyltransferase SETMAR (106-114)
RTVQWWFKK

SEQ ID NO: 27072 - protein, 10 aa, synthetic construct
  REGION 1..10: note = Kinesin-like protein KIF22 (23-32)
RTVTGAKPLK

SEQ ID NO: 27073 - protein, 9 aa, synthetic construct
  REGION 1..9: note = Ubiquitin-like-conjugating enzyme ATG3 (198-206)
RTYDLYITY

SEQ ID NO: 27074 - protein, 9 aa, synthetic construct
  REGION 1..9: note = Phosphatidylinositol 4-kinase alpha (889-897)
RTYDMIQYY

SEQ ID NO: 27075 - protein, 11 aa, synthetic construct
  REGION 1..11: note = Serine-protein kinase ATM (2034-2044)
RTYEHEAMWGK

SEQ ID NO: 27076 - protein, 10 aa, synthetic construct
  REGION 1..10: note = Vimentin (36-45)
RTYSLGSALR

SEQ ID NO: 27077 - protein, 11 aa, synthetic construct
  REGION 1..11: note = Protein-methionine sulfoxide oxidase MICAL3 (192-202)
RTYTEEELNAK

SEQ ID NO: 27078 - protein, 10 aa, synthetic construct
  REGION 1..10: note = Nucleolar and coiled-body phosphoprotein 1 (638-647)
RVADNSFDAK

SEQ ID NO: 27079 - protein, 9 aa, synthetic construct
  REGION 1..9: note = Arginine vasopressin-induced protein 1 (66-74)
RVAEALKRL

SEQ ID NO: 27080 - protein, 9 aa, synthetic construct
  REGION 1..9: note = Chondroitin sulfate synthase 3 (30-38)
RVAELSERK

SEQ ID NO: 27081 - protein, 9 aa, synthetic construct
  REGION 1..9: note = Caspase-9 (236-244)
RVANAVSVK

SEQ ID NO: 27082 - protein, 13 aa, synthetic construct
  REGION 1..13: note = Caspase-9 (236-248)
RVANAVSVKGIYK

SEQ ID NO: 27083 - protein, 11 aa, synthetic construct
  REGION 1..11: note = 7-dehydrocholesterol reductase (339-349)
RVANHQKDLFR

SEQ ID NO: 27084 - protein, 11 aa, synthetic construct
  REGION 1..11: note = SHC-transforming protein 3 (55-65)
RVCEAVPGAKG

SEQ ID NO: 27085 - protein, 10 aa, synthetic construct
  REGION 1..10: note = Transmembrane protein 98 (138-147)
RVDDVVKSMY

SEQ ID NO: 27086 - protein, 10 aa, synthetic construct
  REGION 1..10: note = Protein OS-9 (16-25)
RVDEPLSCSY

SEQ ID NO: 27087 - protein, 9 aa, synthetic construct
  REGION 1..9: note = Eukaryotic peptide chain release factor subunit 1 (402-410)
RVDFQGMEY

SEQ ID NO: 27088 - protein, 11 aa, synthetic construct
  REGION 1..11: note = Nuclear fragile X mental retardation-interacting protein 2 (272-282)
RVDGSKPIWKY

SEQ ID NO: 27089 - protein, 10 aa, synthetic construct
  REGION 1..10: note = COP9 signalosome complex subunit 1 (484-493)
RVDSHSKILY

SEQ ID NO: 27090 - protein, 10 aa, synthetic construct
  REGION 1..10: note = Brefeldin A-inhibited guanine nucleotide-exchange protein 1 (1662-1671)
RVDTQDQGMY

SEQ ID NO: 27091 - protein, 9 aa, synthetic construct
  REGION 1..9: note = Coiled-coil domain-containing protein 127 (252-260)
RVEEAILEK

SEQ ID NO: 27092 - protein, 11 aa, synthetic construct
  REGION 1..11: note = Copine-1 (267-277)
RVETEYSFLDY

SEQ ID NO: 27093 - protein, 10 aa, synthetic construct
  REGION 1..10: note = Tumor protein D53 (48-57)
RVETTVTSLK

SEQ ID NO: 27094 - protein, 10 aa, synthetic construct
  REGION 1..10: note = Chromobox protein homolog 6 (9-18)
RVFAAESIIK

SEQ ID NO: 27095 - protein, 9 aa, synthetic construct
  REGION 1..9: note = Eukaryotic initiation factor 4A-III (166-174)
RVFDMIRRR

SEQ ID NO: 27096 - protein, 10 aa, synthetic construct
  REGION 1..10: note = DNA topoisomerase 3-beta-1 (263-272)
RVFDREIAQM

SEQ ID NO: 27097 - protein, 9 aa, synthetic construct
  REGION 1..9: note = Annexin A1 (235-243)
RVFQKYTKY

SEQ ID NO: 27098 - protein, 10 aa, synthetic construct
  REGION 1..10: note = Hermansky-Pudlak syndrome 5 protein (137-146)
RVFVGDHAGK

SEQ ID NO: 27099 - protein, 12 aa, synthetic construct
  REGION 1..12: note = Non-specific lipid-transfer protein (13-24)
RVFVVGVGMTKF

SEQ ID NO: 27100 - protein, 9 aa, synthetic construct
  REGION 1..9: note = Receptor activity-modifying protein 2 (18-26)
RVGRPAALR

SEQ ID NO: 27101 - protein, 12 aa, synthetic construct
  REGION 1..12: note = ATP-dependent RNA helicase DDX3X (407-418)
RVGSTSENITQK

SEQ ID NO: 27102 - protein, 9 aa, synthetic construct
  REGION 1..9: note = Dol-P-Man:Man(5)GlcNAc(2)-PP-Dol alpha-1,3-mannosyltransferase (115-123)
RVHSIFVLR

SEQ ID NO: 27103 - protein, 10 aa, synthetic construct
  REGION 1..10: note = Lon protease homolog 2, peroxisomal (197-206)
RVIAIRPIRR

SEQ ID NO: 27104 - protein, 9 aa, synthetic construct
  REGION 1..9: note = B-cell lymphoma 3 protein (267-275)
RVIDILRGK

SEQ ID NO: 27105 - protein, 12 aa, synthetic construct
  REGION 1..12: note = Serine/threonine-protein kinase TBK1 (143-154)
RVIGEDGQSVYK

SEQ ID NO: 27106 - protein, 13 aa, synthetic construct
  REGION 1..13: note = Stress-70 protein, mitochondrial (218-230)
RVINEPTAAALAY

SEQ ID NO: 27107 - protein, 11 aa, synthetic construct
  REGION 1..11: note = Synembryn-A (493-503)
RVIQPMGMSPR

SEQ ID NO: 27108 - protein, 11 aa, synthetic construct
  REGION 1..11: note = GDP-fucose protein O-fucosyltransferase 1 (101-111)
RVISLEDFMEK

SEQ ID NO: 27109 - protein, 12 aa, synthetic construct
  REGION 1..12: note = Creatine kinase M-type (236-247)
RVISMEKGGNMK

SEQ ID NO: 27110 - protein, 12 aa, synthetic construct
  REGION 1..12: note = COX assembly mitochondrial protein 2 homolog (63-74)
RVIVTHGSLKLK

SEQ ID NO: 27111 - protein, 9 aa, synthetic construct
  REGION 1..9: note = ENTH domain-containing protein 1 (376-384)
RVKEIVINK

SEQ ID NO: 27112 - protein, 12 aa, synthetic construct
  REGION 1..12: note = Epidermal growth factor receptor substrate 15 (33-44)
RVLASDAAAFLK

SEQ ID NO: 27113 - protein, 10 aa, synthetic construct
  REGION 1..10: note = Transient receptor potential cation channel subfamily M member 1 (871-880)
RVLDIFGVNK

SEQ ID NO: 27114 - protein, 11 aa, synthetic construct
  REGION 1..11: note = Anaphase-promoting complex subunit 2 (163-173)
RVLDPSMVILE

SEQ ID NO: 27115 - protein, 12 aa, synthetic construct
  REGION 1..12: note = Monofunctional C1-tetrahydrofolate synthase, mitochondrial (497-508)
RVLDTNDRFLRK

SEQ ID NO: 27116 - protein, 10 aa, synthetic construct
  REGION 1..10: note = Uncharacterized protein C19orf52 (162-171)
RVLDVGFVGR

SEQ ID NO: 27117 - protein, 9 aa, synthetic construct
  REGION 1..9: note = Paired amphipathic helix protein Sin3b (506-514)
RVLESVQKK

SEQ ID NO: 27118 - protein, 11 aa, synthetic construct
  REGION 1..11: note = Nipped-B-like protein (1779-1789)
RVLGENAIAVR

SEQ ID NO: 27119 - protein, 9 aa, synthetic construct
  REGION 1..9: note = Interferon-stimulated gene 20 kDa protein (131-139)
RVLSERLLH

SEQ ID NO: 27120 - protein, 10 aa, synthetic construct
  REGION 1..10: note = Interferon-stimulated gene 20 kDa protein (131-140)
RVLSERLLHK

SEQ ID NO: 27121 - protein, 9 aa, synthetic construct
  REGION 1..9: note = 14-3-3 protein sigma (60-68)
RVLSSIEQK

SEQ ID NO: 27122 - protein, 11 aa, synthetic construct
  REGION 1..11: note = Guanine nucleotide-binding protein G(s) subunit alpha isoforms short (187-197)
RVLTSGIFETK

SEQ ID NO: 27123 - protein, 9 aa, synthetic construct
  REGION 1..9: note = T lymphocyte c-maf long form (21-29)
RVLTSVFTK

SEQ ID NO: 27124 - protein, 9 aa, synthetic construct
  REGION 1..9: note = Beta-parvin (351-359)
RVLYNLFTK

SEQ ID NO: 27125 - protein, 11 aa, synthetic construct
  REGION 1..11: note = B-cell CLL/lymphoma 7 protein family member A (20-30)
RVMAAIEKVRK

SEQ ID NO: 27126 - protein, 11 aa, synthetic construct
  REGION 1..11: note = Nuclear transcription factor Y subunit gamma (25-35)
RVMEEIRNLTV

SEQ ID NO: 27127 - protein, 11 aa, synthetic construct
  REGION 1..11: note = Poly (ADP-ribose) polymerase 4 (419-429)
RVNETTEFLSK

SEQ ID NO: 27128 - protein, 10 aa, synthetic construct
  REGION 1..10: note = Ceramide synthase 5 (379-388)
RVNGHMGGSY

SEQ ID NO: 27129 - protein, 9 aa, synthetic construct
  REGION 1..9: note = Cytoplasmic dynein 1 heavy chain 1 (759-767)
RVPLAIVNK

SEQ ID NO: 27130 - protein, 10 aa, synthetic construct
  REGION 1..10: note = Protein scribble homolog (161-170)
RVPQAEGPPK

SEQ ID NO: 27131 - protein, 11 aa, synthetic construct
  REGION 1..11: note = Phosphatidylinositol 3-kinase regulatory subunit gamma (209-219)
RVQAEDLLYGK

SEQ ID NO: 27132 - protein, 10 aa, synthetic construct
  REGION 1..10: note = Large neutral amino acids transporter small subunit 1 (195-204)
RVQDAFAAAK

SEQ ID NO: 27133 - protein, 12 aa, synthetic construct
  REGION 1..12: note = ATPase family AAA domain-containing protein 3A (605-616)
RVQDAVQQHQQK

SEQ ID NO: 27134 - protein, 11 aa, synthetic construct
  REGION 1..11: note = Fibronectin type III domain-containing protein 3B (271-281)
RVQDILSGIEK

SEQ ID NO: 27135 - protein, 9 aa, synthetic construct
  REGION 1..9: note = 6-phosphofructo-2-kinase/fructose-2,6-bisphosphatase 2 (228-236)
RVQDYIQSK

SEQ ID NO: 27136 - protein, 11 aa, synthetic construct
  REGION 1..11: note = Probable ATP-dependent RNA helicase DHX37 (767-777)
RVQSEEMLEDK

SEQ ID NO: 27137 - protein, 10 aa, synthetic construct
  REGION 1..10: note = Charged multivesicular body protein 1b (75-84)
RVQTAVTMGK

SEQ ID NO: 27138 - protein, 14 aa, synthetic construct
  REGION 1..14: note = 28S ribosomal protein S29, mitochondrial (232-245)
RVRNATDAVGIVLK

SEQ ID NO: 27139 - protein, 9 aa, synthetic construct
  REGION 1..9: note = F-box only protein 21 (77-85)
RVRWPSLMK

SEQ ID NO: 27140 - protein, 10 aa, synthetic construct
  REGION 1..10: note = Platelet-activating factor acetylhydrolase 2, cytoplasmic (188-197)
RVSECLRVLK

SEQ ID NO: 27141 - protein, 9 aa, synthetic construct
  REGION 1..9: note = ADP-ribosylation factor GTPase-activating protein 1 (148-156)
RVSGQPQSV

SEQ ID NO: 27142 - protein, 9 aa, synthetic construct
  REGION 1..9: note = DNA polymerase delta catalytic subunit (537-545)
RVTGVPLSY

SEQ ID NO: 27143 - protein, 10 aa, synthetic construct
  REGION 1..10: note = E3 ubiquitin-protein ligase MIB2 (258-267)
RVVDIRGWDV

SEQ ID NO: 27144 - protein, 9 aa, synthetic construct
  REGION 1..9: note = NADH dehydrogenase (ubiquinone) 1 alpha subcomplex subunit 6 (77-85)
RVVDLLVIK

SEQ ID NO: 27145 - protein, 11 aa, synthetic construct
  REGION 1..11: note = Lysine-specific histone demethylase 1B (420-430)
RVWDDKSFKGV

SEQ ID NO: 27146 - protein, 11 aa, synthetic construct
  REGION 1..11: note = Coatomer subunit alpha (160-170)
RVWDISGLRKK

SEQ ID NO: 27147 - protein, 13 aa, synthetic construct
  REGION 1..13: note = ATP-binding cassette sub-family B member 8, mitochondrial (669-681)
RVWEAGTHEELLK

SEQ ID NO: 27148 - protein, 10 aa, synthetic construct
  REGION 1..10: note = Methyltransferase-like protein 8 (334-343)
RVWIQGKFQK

SEQ ID NO: 27149 - protein, 10 aa, synthetic construct
  REGION 1..10: note = Charged multivesicular body protein 1a (46-55)
RVYAENAIRK

SEQ ID NO: 27150 - protein, 9 aa, synthetic construct
  REGION 1..9: note = Neuferricin (62-70)
RVYDVSSGR

SEQ ID NO: 27151 - protein, 9 aa, synthetic construct
  REGION 1..9: note = Formin-binding protein 1-like (96-104)
RVYGELMRY

SEQ ID NO: 27152 - protein, 10 aa, synthetic construct
  REGION 1..10: note = Actin filament-associated protein 1-like 2 (535-544)
RVYLDLTPVK

SEQ ID NO: 27153 - protein, 11 aa, synthetic construct
  REGION 1..11: note = Transcription termination factor 2 (414-424)
RVYLTTQLKQK

SEQ ID NO: 27154 - protein, 9 aa, synthetic construct
  REGION 1..9: note = Follistatin-related protein 5 (344-352)
RVYPESQAR

SEQ ID NO: 27155 - protein, 11 aa, synthetic construct
  REGION 1..11: note = Serine/threonine-protein kinase pim-1 (296-306)
RVYSPPEWIRY

SEQ ID NO: 27156 - protein, 10 aa, synthetic construct
  REGION 1..10: note = Epidermal growth factor receptor kinase substrate 8 (772-781)
RVYSQITVQK

SEQ ID NO: 27157 - protein, 11 aa, synthetic construct
  REGION 1..11: note = Bifunctional 3'-phosphoadenosine 5'-phosphosulfate synthase 1 (386-396)
RVYWNDGLDQY

SEQ ID NO: 27158 - protein, 9 aa, synthetic construct
  REGION 1..9: note = ATP-binding cassette sub-family B member 6, mitochondrial (144-152)
RYREAIIKY

SEQ ID NO: 27159 - protein, 9 aa, synthetic construct
  REGION 1..9: note = Melanoma inhibitory activity protein 3 (1397-1405)
SAAEEVKTY

SEQ ID NO: 27160 - protein, 9 aa, synthetic construct
  REGION 1..9: note = Transketolase (43-51)
SAAEIMAVL

SEQ ID NO: 27161 - protein, 9 aa, synthetic construct
  REGION 1..9: note = Kinesin-like protein KIFC3 (471-479)
SAAEIYNEV

SEQ ID NO: 27162 - protein, 9 aa, synthetic construct
  REGION 1..9: note = Protein fem-1 homolog C (91-99)
SAAGHLKVV

SEQ ID NO: 27163 - protein, 9 aa, synthetic construct
  REGION 1..9: note = E3 ubiquitin-protein ligase AMFR (606-614)
SADERQRML

SEQ ID NO: 27164 - protein, 11 aa, synthetic construct
  REGION 1..11: note = Laminin subunit beta-3 (706-716)
SADPSGAFRML

SEQ ID NO: 27165 - protein, 9 aa, synthetic construct
  REGION 1..9: note = GRIP and coiled-coil domain-containing protein 2 (1284-1292)
SAEQHQRTL

SEQ ID NO: 27166 - protein, 9 aa, synthetic construct
  REGION 1..9: note = Mortality factor 4-like protein 2 (280-288)
SAEYHRKAL

SEQ ID NO: 27167 - protein, 11 aa, synthetic construct
  REGION 1..11: note = Coiled-coil domain-containing protein 77 (190-200)
SAFKADPKISK

SEQ ID NO: 27168 - protein, 11 aa, synthetic construct
  REGION 1..11: note = Versican core protein (1221-1231)
SAFKPSSAITK

SEQ ID NO: 27169 - protein, 10 aa, synthetic construct
  REGION 1..10: note = Zinc finger protein 703 (400-409)
SAHDPAGPSL

SEQ ID NO: 27170 - protein, 9 aa, synthetic construct
  REGION 1..9: note = Transcription factor 20 (608-616)
SAHEPGGSL

SEQ ID NO: 27171 - protein, 12 aa, synthetic construct
  REGION 1..12: note = Probable cation-transporting ATPase 13A3 (802-813)
SAIDPEAIPVKL

SEQ ID NO: 27172 - protein, 9 aa, synthetic construct
  REGION 1..9: note = Protein AATF (141-149)
SAKTPGFSV

SEQ ID NO: 27173 - protein, 10 aa, synthetic construct
  REGION 1..10: note = Ras-specific guanine nucleotide-releasing factor 1 (254-263)
SALEIAEQLT

SEQ ID NO: 27174 - protein, 12 aa, synthetic construct
  REGION 1..12: note = Fc receptor-like A (117-128)
SALGPPGPNREF

SEQ ID NO: 27175 - protein, 11 aa, synthetic construct
  REGION 1..11: note = Vimentin (42-52)
SALRPSTSRSL

SEQ ID NO: 27176 - protein, 13 aa, synthetic construct
  REGION 1..13: note = Vimentin (42-54)
SALRPSTSRSLYA

SEQ ID NO: 27177 - protein, 11 aa, synthetic construct
  REGION 1..11: note = Actin-related protein 2/3 complex subunit 1A (298-308)
SAMERFRNMDK

SEQ ID NO: 27178 - protein, 9 aa, synthetic construct
  REGION 1..9: note = Fatty acid synthase (2039-2047)
SAMERICEK

SEQ ID NO: 27179 - protein, 10 aa, synthetic construct
  REGION 1..10: note = Cytoplasmic dynein 1 heavy chain 1 (1505-1514)
SAMKLSPYYK

SEQ ID NO: 27180 - protein, 10 aa, synthetic construct
  REGION 1..10: note = Syntenin-1 (23-32)
SANPANPAIL

SEQ ID NO: 27181 - protein, 10 aa, synthetic construct
  REGION 1..10: note = Vacuole membrane protein 1 isoform 8 (83-92)
SAQDFASRAK

SEQ ID NO: 27182 - protein, 10 aa, synthetic construct
  REGION 1..10: note = HLA class I histocompatibility antigen, alpha chain E (339-348)
SAQGSESHSL

SEQ ID NO: 27183 - protein, 9 aa, synthetic construct
  REGION 1..9: note = ATP-dependent RNA helicase DDX54 (145-153)
SAQTGARAL

SEQ ID NO: 27184 - protein, 9 aa, synthetic construct
  REGION 1..9: note = Poly(rC)-binding protein 2 (254-262)
SAQTTSHEL

SEQ ID NO: 27185 - protein, 9 aa, synthetic construct
  REGION 1..9: note = ADP-dependent glucokinase (213-221)
SASGPHSSL

SEQ ID NO: 27186 - protein, 10 aa, synthetic construct
  REGION 1..10: note = Nodal modulator 3 (166-175)
SAVEFRQTGY

SEQ ID NO: 27187 - protein, 10 aa, synthetic construct
  REGION 1..10: note = Histone acetyltransferase type B catalytic subunit (16-25)
SAVEKKLAEY

SEQ ID NO: 27188 - protein, 9 aa, synthetic construct
  REGION 1..9: note = ADP-ribosylation factor-binding protein GGA1 (288-296)
SAVPKVMKV

SEQ ID NO: 27189 - protein, 9 aa, synthetic construct
  REGION 1..9: note = Ankyrin repeat domain-containing protein 20B (272-280)
SAVSIFHEL

SEQ ID NO: 27190 - protein, 9 aa, synthetic construct
  REGION 1..9: note = Long-chain-fatty-acid-CoA ligase 3 (66-74)
SAYRSVNSL

SEQ ID NO: 27191 - protein, 11 aa, synthetic construct
  REGION 1..11: note = Ribulose-phosphate 3-epimerase (186-196)
SEDPRSVINLL

SEQ ID NO: 27192 - protein, 10 aa, synthetic construct
  REGION 1..10: note = WD repeat and FYVE domain-containing protein 1 (43-52)
SEDRTIRVWL

SEQ ID NO: 27193 - protein, 10 aa, synthetic construct
  REGION 1..10: note = Clathrin heavy chain 1 (825-834)
SEDVIKNLIL

SEQ ID NO: 27194 - protein, 10 aa, synthetic construct
  REGION 1..10: note = Microtubule-associated protein 4 (230-239)
SEERPPAQAL

SEQ ID NO: 27195 - protein, 10 aa, synthetic construct
  REGION 1..10: note = Cortactin-binding protein 2 (232-241)
SEFDTEREQL

SEQ ID NO: 27196 - protein, 9 aa, synthetic construct
  REGION 1..9: note = Ubiquitin carboxyl-terminal hydrolase 48 (254-262)
SEFLKEEKL

SEQ ID NO: 27197 - protein, 13 aa, synthetic construct
  REGION 1..13: note = 55 kDa erythrocyte membrane protein (6-18)
SEGESGGSMHTAL

SEQ ID NO: 27198 - protein, 9 aa, synthetic construct
  REGION 1..9: note = Copper transport protein ATOX1 (44-52)
SEHSMDTLL

SEQ ID NO: 27199 - protein, 13 aa, synthetic construct
  REGION 1..13: note = Ventricular zone-expressed PH domain-containing protein homolog 1 (106-118)
SEIDPLGQGNDKL

SEQ ID NO: 27200 - protein, 9 aa, synthetic construct
  REGION 1..9: note = Prolyl 3-hydroxylase OGFOD1 (290-298)
SEILLKEFL

SEQ ID NO: 27201 - protein, 9 aa, synthetic construct
  REGION 1..9: note = Nucleolar protein 10 (225-233)
SEINSLPTI

SEQ ID NO: 27202 - protein, 11 aa, synthetic construct
  REGION 1..11: note = Leucine-rich repeat LGI family member 3 (77-87)
SEIQDGAFSHL

SEQ ID NO: 27203 - protein, 9 aa, synthetic construct
  REGION 1..9: note = Serine-protein kinase ATM (707-715)
SEITNSETL

SEQ ID NO: 27204 - protein, 10 aa, synthetic construct
  REGION 1..10: note = Nuclear pore complex protein Nup50 (255-264)
SEKKTDPSSL

SEQ ID NO: 27205 - protein, 8 aa, synthetic construct
  REGION 1..8: note = Talin-1 (1958-1965)
SEKVSHVL

SEQ ID NO: 27206 - protein, 10 aa, synthetic construct
  REGION 1..10: note = Protein strawberry notch homolog 1 (911-920)
SELDVPVEIL

SEQ ID NO: 27207 - protein, 11 aa, synthetic construct
  REGION 1..11: note = Protein S100-B (31-41)
SELKELINNEL

SEQ ID NO: 27208 - protein, 11 aa, synthetic construct
  REGION 1..11: note = U2 snRNP-associated SURP motif-containing protein (401-411)
SEMSEEKRAKL

SEQ ID NO: 27209 - protein, 9 aa, synthetic construct
  REGION 1..9: note = Protein piccolo (3378-3386)
SENSQHLEL

SEQ ID NO: 27210 - protein, 10 aa, synthetic construct
  REGION 1..10: note = Mitotic checkpoint serine/threonine-protein kinase BUB1 (159-168)
SEPLHNVQVL

SEQ ID NO: 27211 - protein, 11 aa, synthetic construct
  REGION 1..11: note = Gap junction beta-1 protein (253-263)
SEQDGSLKDIL

SEQ ID NO: 27212 - protein, 12 aa, synthetic construct
  REGION 1..12: note = Transformation/transcription domain-associated protein (434-445)
SEQESGNGRDVL

SEQ ID NO: 27213 - protein, 9 aa, synthetic construct
  REGION 1..9: note = Multidrug resistance-associated protein 4 (13-21)
SETPTLQGL

SEQ ID NO: 27214 - protein, 12 aa, synthetic construct
  REGION 1..12: note = Vitamin K epoxide reductase complex subunit 1 (44-55)
SFRKVQEPQGKA

SEQ ID NO: 27215 - protein, 9 aa, synthetic construct
  REGION 1..9: note = POTE ankyrin domain family member F (855-863)
SGDGVTHTV

SEQ ID NO: 27216 - protein, 9 aa, synthetic construct
  REGION 1..9: note = Disabled homolog 2 (538-546)
SGFSQPVIF

SEQ ID NO: 27217 - protein, 14 aa, synthetic construct
  REGION 1..14: note = Heterogeneous nuclear ribonucleoprotein U-like protein 1 (662-675)
SGGGGYSQNRWGNN

SEQ ID NO: 27218 - protein, 15 aa, synthetic construct
  REGION 1..15: note = Prelamin-A/C (483-497)
SGGGSFGDNLVTRSY

SEQ ID NO: 27219 - protein, 14 aa, synthetic construct
  REGION 1..14: note = Keratin, type II cytoskeletal 1 (604-617)
SGGGSSGGSIGGRG

SEQ ID NO: 27220 - protein, 13 aa, synthetic construct
  REGION 1..13: note = Cold-inducible RNA-binding protein (148-160)
SGGYSDRSSGGSY

SEQ ID NO: 27221 - protein, 15 aa, synthetic construct
  REGION 1..15: note = Serine/threonine-protein phosphatase PP1-beta catalytic subunit (311-325)
SGRPVTPPRTANPPK

SEQ ID NO: 27222 - protein, 10 aa, synthetic construct
  REGION 1..10: note = Frataxin, mitochondrial (81-90)
SGTLGHPGSL

SEQ ID NO: 27223 - protein, 13 aa, synthetic construct
  REGION 1..13: note = Caprin-1 (663-675)
SGYQRDGYQQNFK

SEQ ID NO: 27224 - protein, 9 aa, synthetic construct
  REGION 1..9: note = Protein kinase C delta-binding protein (70-78)
SHDTTSNTL

SEQ ID NO: 27225 - protein, 10 aa, synthetic construct
  REGION 1..10: note = E3 ubiquitin-protein ligase TRIM32 (566-575)
SHFFSENEDF

SEQ ID NO: 27226 - protein, 10 aa, synthetic construct
  REGION 1..10: note = ATP-dependent RNA helicase DDX42 (307-316)
SHVRPDRQTL

SEQ ID NO: 27227 - protein, 9 aa, synthetic construct
  REGION 1..9: note = Transmembrane protein 147 (87-95)
SIDSNISLV

SEQ ID NO: 27228 - protein, 9 aa, synthetic construct
  REGION 1..9: note = Neuron navigator 2 (1236-1244)
SIDSNISSK

SEQ ID NO: 27229 - protein, 12 aa, synthetic construct
  REGION 1..12: note = Fructose-bisphosphate aldolase A (46-57)
SIGTENTEENRR

SEQ ID NO: 27230 - protein, 9 aa, synthetic construct
  REGION 1..9: note = Septin-9 (321-329)
SIHFEAYRV

SEQ ID NO: 27231 - protein, 10 aa, synthetic construct
  REGION 1..10: note = Lanosterol 14-alpha demethylase (173-182)
SIIEKETKEY

SEQ ID NO: 27232 - protein, 9 aa, synthetic construct
  REGION 1..9: note = Heterogeneous nuclear ribonucleoprotein K (401-409)
SIIGKGGQR

SEQ ID NO: 27233 - protein, 11 aa, synthetic construct
  REGION 1..11: note = Interleukin-1 receptor accessory protein (317-327)
SIKKVTSEDLK

SEQ ID NO: 27234 - protein, 11 aa, synthetic construct
  REGION 1..11: note = Ubiquitin carboxyl-terminal hydrolase 11 (519-529)
SILDRDDIFVY

SEQ ID NO: 27235 - protein, 11 aa, synthetic construct
  REGION 1..11: note = Mortality factor 4-like protein 1 (192-202)
SILEDYANYKK

SEQ ID NO: 27236 - protein, 13 aa, synthetic construct
  REGION 1..13: note = Protein transport protein Sec31A (332-344)
SIMGGSTDGLRQK

SEQ ID NO: 27237 - protein, 9 aa, synthetic construct
  REGION 1..9: note = Casein kinase I isoform delta (401-409)
SIPFEHHGK

SEQ ID NO: 27238 - protein, 10 aa, synthetic construct
  REGION 1..10: note = Protein maestro (14-23)
SIPTSQPKQK

SEQ ID NO: 27239 - protein, 10 aa, synthetic construct
  REGION 1..10: note = Inosine-5'-monophosphate dehydrogenase 1 (531-540)
SIQDKGSIQK

SEQ ID NO: 27240 - protein, 10 aa, synthetic construct
  REGION 1..10: note = NHP2-like protein 1 (118-127)
SIQQSIERLL

SEQ ID NO: 27241 - protein, 13 aa, synthetic construct
  REGION 1..13: note = ATP synthase F(0) complex subunit B1, mitochondrial (226-238)
SISTQQEKETIAK

SEQ ID NO: 27242 - protein, 12 aa, synthetic construct
  REGION 1..12: note = StAR-related lipid transfer protein 13 (339-350)
SIYDNVPGSHLY

SEQ ID NO: 27243 - protein, 12 aa, synthetic construct
  REGION 1..12: note = Carboxypeptidase Q (211-222)
SIYSPHTGIQEY

SEQ ID NO: 27244 - protein, 13 aa, synthetic construct
  REGION 1..13: note = Keratin, type I cytoskeletal 10 (148-160)
SKELTTEIDNNIE

SEQ ID NO: 27245 - protein, 9 aa, synthetic construct
  REGION 1..9: note = Receptor-interacting serine/threonine-protein kinase 1 (376-384)
SKLQDEANY

SEQ ID NO: 27246 - protein, 13 aa, synthetic construct
  REGION 1..13: note = CDK5 regulatory subunit-associated protein 2 (133-145)
SLAEAGGSEIQRV

SEQ ID NO: 27247 - protein, 9 aa, synthetic construct
  REGION 1..9: note = MICAL-like protein 2 (22-30)
SLAEFSLLK

SEQ ID NO: 27248 - protein, 11 aa, synthetic construct
  REGION 1..11: note = Wiskott-Aldrich syndrome protein family member 2 (67-77)
SLAERVDRLQV

SEQ ID NO: 27249 - protein, 8 aa, synthetic construct
  REGION 1..8: note = Nucleolar protein 11 (286-293)
SLCPDLME

SEQ ID NO: 27250 - protein, 9 aa, synthetic construct
  REGION 1..9: note = Insulin-degrading enzyme (224-232)
SLDDLTNLV

SEQ ID NO: 27251 - protein, 9 aa, synthetic construct
  REGION 1..9: note = Signal peptidase complex subunit 2 (59-67)
SLDDSAKKV

SEQ ID NO: 27252 - protein, 11 aa, synthetic construct
  REGION 1..11: note = Signal peptidase complex subunit 2 (59-69)
SLDDSAKKVLL

SEQ ID NO: 27253 - protein, 9 aa, synthetic construct
  REGION 1..9: note = Sodium/potassium-transporting ATPase subunit alpha-1 (47-55)
SLDELHRKY

SEQ ID NO: 27254 - protein, 9 aa, synthetic construct
  REGION 1..9: note = Transmembrane protein 132B (241-249)
SLDEMVVSV

SEQ ID NO: 27255 - protein, 9 aa, synthetic construct
  REGION 1..9: note = GREB1-like protein (74-82)
SLDFSNNLT

SEQ ID NO: 27256 - protein, 9 aa, synthetic construct
  REGION 1..9: note = 2'-5'-oligoadenylate synthase 2 (123-131)
SLDGFTIQV

SEQ ID NO: 27257 - protein, 9 aa, synthetic construct
  REGION 1..9: note = Angio-associated migratory cell protein (93-101)
SLDPKTNTL

SEQ ID NO: 27258 - protein, 7 aa, synthetic construct
  REGION 1..7: note = Eukaryotic translation initiation factor 3 subunit C-like protein (835-841)
SLDQPTQ

SEQ ID NO: 27259 - protein, 9 aa, synthetic construct
  REGION 1..9: note = Regulator of nonsense transcripts 2 (992-1000)
SLEESIRQV

SEQ ID NO: 27260 - protein, 12 aa, synthetic construct
  REGION 1..12: note = Heterogeneous nuclear ribonucleoprotein M (536-547)
SLERMGLERMGA

SEQ ID NO: 27261 - protein, 13 aa, synthetic construct
  REGION 1..13: note = Heterogeneous nuclear ribonucleoprotein M (536-548)
SLERMGLERMGAN

SEQ ID NO: 27262 - protein, 9 aa, synthetic construct
  REGION 1..9: note = ATP-sensitive inward rectifier potassium channel 10 (186-194)
SLFDQVVKV

SEQ ID NO: 27263 - protein, 12 aa, synthetic construct
  REGION 1..12: note = Inositol 1,4,5-trisphosphate receptor type 3 (365-376)
SLFELDPTTLQK

SEQ ID NO: 27264 - protein, 10 aa, synthetic construct
  REGION 1..10: note = Utrophin (249-258)
SLFEVLPQQV

SEQ ID NO: 27265 - protein, 9 aa, synthetic construct
  REGION 1..9: note = Microtubule-associated tumor suppressor 1 (694-702)
SLFLGSASK

SEQ ID NO: 27266 - protein, 9 aa, synthetic construct
  REGION 1..9: note = V-type proton ATPase 116 kDa subunit a isoform 1 (555-563)
SLFNHIYFK

SEQ ID NO: 27267 - protein, 9 aa, synthetic construct
  REGION 1..9: note = Ventricular zone-expressed PH domain-containing protein homolog 1 (252-260)
SLFPEPLSI

SEQ ID NO: 27268 - protein, 10 aa, synthetic construct
  REGION 1..10: note = Eukaryotic translation initiation factor 3 subunit E (218-227)
SLFVFFNHPK

SEQ ID NO: 27269 - protein, 9 aa, synthetic construct
  REGION 1..9: note = Metalloproteinase inhibitor 3 (15-23)
SLGDWGAEA

SEQ ID NO: 27270 - protein, 9 aa, synthetic construct
  REGION 1..9: note = Ran GTPase-activating protein 1 (102-110)
SLGEGLITA

SEQ ID NO: 27271 - protein, 10 aa, synthetic construct
  REGION 1..10: note = Homeobox protein SEBOX (201-210)
SLGSLSDLIY

SEQ ID NO: 27272 - protein, 9 aa, synthetic construct
  REGION 1..9: note = Nuclear receptor subfamily 4 group A member 1 (492-500)
SLHSLLVDV

SEQ ID NO: 27273 - protein, 9 aa, synthetic construct
  REGION 1..9: note = Carboxypeptidase M (303-311)
SLIEYIKQV

SEQ ID NO: 27274 - protein, 10 aa, synthetic construct
  REGION 1..10: note = Zinc finger FYVE domain-containing protein 16 (160-169)
SLIGLDLSSV

SEQ ID NO: 27275 - protein, 9 aa, synthetic construct
  REGION 1..9: note = Src kinase-associated phosphoprotein 2 (47-55)
SLIKKIKDV

SEQ ID NO: 27276 - protein, 9 aa, synthetic construct
  REGION 1..9: note = Small glutamine-rich tetratricopeptide repeat-containing protein beta (33-41)
SLINNPAFI

SEQ ID NO: 27277 - protein, 9 aa, synthetic construct
  REGION 1..9: note = Anoctamin-4 (154-162)
SLINSDIIF

SEQ ID NO: 27278 - protein, 10 aa, synthetic construct
  REGION 1..10: note = Anoctamin-4 (154-163)
SLINSDIIFV

SEQ ID NO: 27279 - protein, 11 aa, synthetic construct
  REGION 1..11: note = Serine/threonine-protein kinase Sgk1 (451-461)
SLINWDDLINK

SEQ ID NO: 27280 - protein, 11 aa, synthetic construct
  REGION 1..11: note = Probable global transcription activator SNF2L1 (137-147)
SLISAGDYRHR

SEQ ID NO: 27281 - protein, 9 aa, synthetic construct
  REGION 1..9: note = Lambda-crystallin homolog (73-81)
SLISGCPNI

SEQ ID NO: 27282 - protein, 10 aa, synthetic construct
  REGION 1..10: note = Alpha-aminoadipic semialdehyde dehydrogenase (196-205)
SLISVAVTKI

SEQ ID NO: 27283 - protein, 10 aa, synthetic construct
  REGION 1..10: note = Endonuclease G, mitochondrial (288-297)
SLKAITAGSK

SEQ ID NO: 27284 - protein, 9 aa, synthetic construct
  REGION 1..9: note = Cysteine protease ATG4C (177-185)
SLKETIGKY

SEQ ID NO: 27285 - protein, 9 aa, synthetic construct
  REGION 1..9: note = DNA-directed RNA polymerase II subunit RPB11-a (99-107)
SLLEERFRV

SEQ ID NO: 27286 - protein, 9 aa, synthetic construct
  REGION 1..9: note = Nuclear receptor subfamily 4 group A member 3 (230-238)
SLLGESPSL

SEQ ID NO: 27287 - protein, 9 aa, synthetic construct
  REGION 1..9: note = Protein naked cuticle homolog 1 (158-166)
SLLHTIYEV

SEQ ID NO: 27288 - protein, 10 aa, synthetic construct
  REGION 1..10: note = IL6ST nirs variant 1 (26-35)
SLLIAKQNVT

SEQ ID NO: 27289 - protein, 9 aa, synthetic construct
  REGION 1..9: note = Protein transport protein Sec23A (156-164)
SLLPPTALV

SEQ ID NO: 27290 - protein, 10 aa, synthetic construct
  REGION 1..10: note = E3 ubiquitin-protein ligase UBR1 (683-692)
SLMDPNKFLL

SEQ ID NO: 27291 - protein, 12 aa, synthetic construct
  REGION 1..12: note = Abhydrolase domain-containing protein 2 (299-310)
SLMQIDDNVMRK

SEQ ID NO: 27292 - protein, 9 aa, synthetic construct
  REGION 1..9: note = Fatty acid synthase (1570-1578)
SLNFRDIML

SEQ ID NO: 27293 - protein, 9 aa, synthetic construct
  REGION 1..9: note = Putative segment polarity protein dishevelled homolog DVL1P1 (246-254)
SLNIITVTL

SEQ ID NO: 27294 - protein, 15 aa, synthetic construct
  REGION 1..15: note = Integrin alpha-6 (599-613)
SLPEVLPILNSDEPK

SEQ ID NO: 27295 - protein, 12 aa, synthetic construct
  REGION 1..12: note = 60S ribosomal protein L38 (59-70)
SLPPGLAVKELK

SEQ ID NO: 27296 - protein, 9 aa, synthetic construct
  REGION 1..9: note = Transcription cofactor HES-6 (44-52)
SLQELRLLL

SEQ ID NO: 27297 - protein, 10 aa, synthetic construct
  REGION 1..10: note = Anaphase-promoting complex subunit 1 (60-69)
SLQEVTIHEK

SEQ ID NO: 27298 - protein, 9 aa, synthetic construct
  REGION 1..9: note = Nestin (24-32)
SLQKENQEL

SEQ ID NO: 27299 - protein, 11 aa, synthetic construct
  REGION 1..11: note = Uncharacterized protein C17orf98 (105-115)
SLQQVTGHDHY

SEQ ID NO: 27300 - protein, 9 aa, synthetic construct
  REGION 1..9: note = RING finger protein 10 (254-262)
SLSEKTWSK

SEQ ID NO: 27301 - protein, 9 aa, synthetic construct
  REGION 1..9: note = Putative ATP-dependent RNA helicase TDRD12 (1100-1108)
SLSQTPPRV

SEQ ID NO: 27302 - protein, 10 aa, synthetic construct
  REGION 1..10: note = Alpha-crystallin B chain (129-138)
SLSSDGVLTV

SEQ ID NO: 27303 - protein, 9 aa, synthetic construct
  REGION 1..9: note = PWWP domain-containing protein MUM1 (280-288)
SLTAPPAPE

SEQ ID NO: 27304 - protein, 10 aa, synthetic construct
  REGION 1..10: note = Probable ATP-dependent RNA helicase DHX40 (351-360)
SLTIDGIRYV

SEQ ID NO: 27305 - protein, 11 aa, synthetic construct
  REGION 1..11: note = Integrator complex subunit 7 (196-206)
SLVDTPKQIQL

SEQ ID NO: 27306 - protein, 10 aa, synthetic construct
  REGION 1..10: note = Transcobalamin-1 (223-232)
SLVEKILSEK

SEQ ID NO: 27307 - protein, 11 aa, synthetic construct
  REGION 1..11: note = Vacuolar protein sorting-associated protein 41 homolog (618-628)
SLYAEYDRPNL

SEQ ID NO: 27308 - protein, 11 aa, synthetic construct
  REGION 1..11: note = Spermine synthase (309-319)
SLYEEQLGRLY

SEQ ID NO: 27309 - protein, 11 aa, synthetic construct
  REGION 1..11: note = General transcription factor 3C polypeptide 3 (259-269)
SLYEQMGDHKM

SEQ ID NO: 27310 - protein, 9 aa, synthetic construct
  REGION 1..9: note = COP9 signalosome complex subunit 3 (281-289)
SLYKKNIQR

SEQ ID NO: 27311 - protein, 10 aa, synthetic construct
  REGION 1..10: note = P2X purinoceptor 7 (286-295)
SLYPGYNFRY

SEQ ID NO: 27312 - protein, 9 aa, synthetic construct
  REGION 1..9: note = Death-inducer obliterator 1 (1135-1143)
SLYSYFSSR

SEQ ID NO: 27313 - protein, 10 aa, synthetic construct
  REGION 1..10: note = Protein prune homolog 2 (269-278)
SLYTEDMTQK

SEQ ID NO: 27314 - protein, 9 aa, synthetic construct
  REGION 1..9: note = Protein argonaute-2 (566-574)
SMDAHPNRY

SEQ ID NO: 27315 - protein, 9 aa, synthetic construct
  REGION 1..9: note = Protein argonaute-1 (615-623)
SMDAHPSRY

SEQ ID NO: 27316 - protein, 9 aa, synthetic construct
  REGION 1..9: note = 5,6-dihydroxyindole-2-carboxylic acid oxidase (506-514)
SMDEANQPL

SEQ ID NO: 27317 - protein, 10 aa, synthetic construct
  REGION 1..10: note = Kinesin-like protein KIF13A (63-72)
SMDESNTTKY

SEQ ID NO: 27318 - protein, 9 aa, synthetic construct
  REGION 1..9: note = Protein argonaute-4 (609-617)
SMDGHPSRY

SEQ ID NO: 27319 - protein, 9 aa, synthetic construct
  REGION 1..9: note = Serine-protein kinase ATM (2549-2557)
SMDHPHHTL

SEQ ID NO: 27320 - protein, 9 aa, synthetic construct
  REGION 1..9: note = V-type proton ATPase 116 kDa subunit a isoform 3 (340-348)
SMEEGVSAV

SEQ ID NO: 27321 - protein, 12 aa, synthetic construct
  REGION 1..12: note = RNA-binding protein EWS (350-361)
SMFGSPGGLREA

SEQ ID NO: 27322 - protein, 11 aa, synthetic construct
  REGION 1..11: note = Ribosome-binding protein 1 (32-42)
SMKETSYEEAL

SEQ ID NO: 27323 - protein, 10 aa, synthetic construct
  REGION 1..10: note = Caprin-1 (376-385)
SMLDFENQTL

SEQ ID NO: 27324 - protein, 9 aa, synthetic construct
  REGION 1..9: note = Protein GREB1 (500-508)
SMLGEEIQL

SEQ ID NO: 27325 - protein, 9 aa, synthetic construct
  REGION 1..9: note = Cystine/glutamate transporter (330-338)
SMNGGVFAV

SEQ ID NO: 27326 - protein, 10 aa, synthetic construct
  REGION 1..10: note = Myosin-10 (371-380)
SMPENTVAQK

SEQ ID NO: 27327 - protein, 9 aa, synthetic construct
  REGION 1..9: note = T-complex protein 1 subunit alpha (155-163)
SMSSKIIGI

SEQ ID NO: 27328 - protein, 10 aa, synthetic construct
  REGION 1..10: note = Liprin-alpha-1 (1169-1178)
SMSSPSMQPK

SEQ ID NO: 27329 - protein, 9 aa, synthetic construct
  REGION 1..9: note = Protein PAT1 homolog 1 (499-507)
SMYDNLRGK

SEQ ID NO: 27330 - protein, 15 aa, synthetic construct
  REGION 1..15: note = Heterogeneous nuclear ribonucleoprotein A1-like 2 (99-113)
SNFGGGGSYNDFGNY

SEQ ID NO: 27331 - protein, 9 aa, synthetic construct
  REGION 1..9: note = Catenin beta-1 (605-613)
SPIENIQRV

SEQ ID NO: 27332 - protein, 9 aa, synthetic construct
  REGION 1..9: note = Pleckstrin homology-like domain family A member 2 (42-50)
SPRARPKEL

SEQ ID NO: 27333 - protein, 10 aa, synthetic construct
  REGION 1..10: note = Clathrin heavy chain 1 (1427-1436)
SPRLDHTRAV

SEQ ID NO: 27334 - protein, 13 aa, synthetic construct
  REGION 1..13: note = Arginine/serine-rich protein 1 (18-30)
SPSTSRSGGSSRL

SEQ ID NO: 27335 - protein, 9 aa, synthetic construct
  REGION 1..9: note = Disabled homolog 2 (471-479)
SPTGQPTAL

SEQ ID NO: 27336 - protein, 15 aa, synthetic construct
  REGION 1..15: note = Transgelin-2 (185-199)
SQAGMTGYGMPRQIL

SEQ ID NO: 27337 - protein, 9 aa, synthetic construct
  REGION 1..9: note = Transmembrane protein 8A (50-58)
SQAPQRLSF

SEQ ID NO: 27338 - protein, 9 aa, synthetic construct
  REGION 1..9: note = Serine/threonine-protein phosphatase 4 regulatory subunit 2 (5-13)
SQFKGYFIF

SEQ ID NO: 27339 - protein, 12 aa, synthetic construct
  REGION 1..12: note = Copine-8 (260-271)
SQFNVYEVVNPK

SEQ ID NO: 27340 - protein, 10 aa, synthetic construct
  REGION 1..10: note = Transmembrane protein 131 (402-411)
SQFSGKITVK

SEQ ID NO: 27341 - protein, 9 aa, synthetic construct
  REGION 1..9: note = Ragulator complex protein LAMTOR1 (73-81)
SQGMEQHEY

SEQ ID NO: 27342 - protein, 13 aa, synthetic construct
  REGION 1..13: note = Catenin alpha-1 (268-280)
SQHQGGGGGELAY

SEQ ID NO: 27343 - protein, 9 aa, synthetic construct
  REGION 1..9: note = Protein NPAT (417-425)
SQISTSIQK

SEQ ID NO: 27344 - protein, 9 aa, synthetic construct
  REGION 1..9: note = A-kinase anchor protein 9 (687-695)
SQKIETMQF

SEQ ID NO: 27345 - protein, 11 aa, synthetic construct
  REGION 1..11: note = TSC22 domain family protein 1 (1018-1028)
SQLEQENNLLK

SEQ ID NO: 27346 - protein, 9 aa, synthetic construct
  REGION 1..9: note = Tubulin-specific chaperone E (124-132)
SQLSKLQEV

SEQ ID NO: 27347 - protein, 10 aa, synthetic construct
  REGION 1..10: note = Phosphatidylinositol-binding clathrin assembly protein (520-529)
SQNQNLPVAK

SEQ ID NO: 27348 - protein, 10 aa, synthetic construct
  REGION 1..10: note = Heat shock protein HSP 90-alpha (575-584)
SQNRKKLSEL

SEQ ID NO: 27349 - protein, 9 aa, synthetic construct
  REGION 1..9: note = Clathrin interactor 1 (459-467)
SQNTDMVQK

SEQ ID NO: 27350 - protein, 9 aa, synthetic construct
  REGION 1..9: note = Rotatin (918-926)
SQQSSLLTV

SEQ ID NO: 27351 - protein, 15 aa, synthetic construct
  REGION 1..15: note = Cold-inducible RNA-binding protein (146-160)
SQSGGYSDRSSGGSY

SEQ ID NO: 27352 - protein, 8 aa, synthetic construct
  REGION 1..8: note = Neuron navigator 2 (999-1006)
SQVERNSL

SEQ ID NO: 27353 - protein, 10 aa, synthetic construct
  REGION 1..10: note = Microtubule-actin cross-linking factor 1 (2589-2598)
SQVQKELQSI

SEQ ID NO: 27354 - protein, 10 aa, synthetic construct
  REGION 1..10: note = Rho GTPase-activating protein 5 (922-931)
SQYHRQTEVF

SEQ ID NO: 27355 - protein, 10 aa, synthetic construct
  REGION 1..10: note = Histone-lysine N-methyltransferase setd3 (208-217)
SQYKNTARQY

SEQ ID NO: 27356 - protein, 9 aa, synthetic construct
  REGION 1..9: note = Protein unc-45 homolog A (578-586)
SRLEERSVL

SEQ ID NO: 27357 - protein, 17 aa, synthetic construct
  REGION 1..17: note = ELL-associated factor 1 (232-248)
SRPAVANGTSRPQGSNQ

SEQ ID NO: 27358 - protein, 17 aa, synthetic construct
  REGION 1..17: note = Cold-inducible RNA-binding protein (144-160)
SRSQSGGYSDRSSGGSY

SEQ ID NO: 27359 - protein, 9 aa, synthetic construct
  REGION 1..9: note = Phosphatase and actin regulator (216-224)
SSAKPGPAL

SEQ ID NO: 27360 - protein, 10 aa, synthetic construct
  REGION 1..10: note = LIM domain-binding protein 3 (265-274)
SSAPATHTSY

SEQ ID NO: 27361 - protein, 9 aa, synthetic construct
  REGION 1..9: note = Serine incorporator 5 (337-345)
SSDALQGRY

SEQ ID NO: 27362 - protein, 10 aa, synthetic construct
  REGION 1..10: note = F-box-like/WD repeat-containing protein TBL1XR1 (4-13)
SSDEVNFLVY

SEQ ID NO: 27363 - protein, 10 aa, synthetic construct
  REGION 1..10: note = Poly (ADP-ribose) polymerase 1 (4-13)
SSDKLYRVEY

SEQ ID NO: 27364 - protein, 9 aa, synthetic construct
  REGION 1..9: note = ATP-dependent RNA helicase DDX18 (602-610)
SSDSRQFSH

SEQ ID NO: 27365 - protein, 9 aa, synthetic construct
  REGION 1..9: note = Heterogeneous nuclear ribonucleoprotein H2 (441-449)
SSDYQSNLA

SEQ ID NO: 27366 - protein, 11 aa, synthetic construct
  REGION 1..11: note = Tyrosinase (146-156)
SSDYVIPIGTY

SEQ ID NO: 27367 - protein, 9 aa, synthetic construct
  REGION 1..9: note = Nesprin-2 (2105-2113)
SSEAPLVQK

SEQ ID NO: 27368 - protein, 11 aa, synthetic construct
  REGION 1..11: note = Osteopontin (26-36)
SSEEKQLYNKY

SEQ ID NO: 27369 - protein, 9 aa, synthetic construct
  REGION 1..9: note = Carbohydrate sulfotransferase 11 (323-331)
SSEHQTQLY

SEQ ID NO: 27370 - protein, 10 aa, synthetic construct
  REGION 1..10: note = Serine/threonine-protein kinase PLK2 (666-675)
SSELKNRMEY

SEQ ID NO: 27371 - protein, 9 aa, synthetic construct
  REGION 1..9: note = Neuron navigator 2 (1837-1845)
SSFKQAFGK

SEQ ID NO: 27372 - protein, 9 aa, synthetic construct
  REGION 1..9: note = Protein GREB1 (296-304)
SSFRPLLSK

SEQ ID NO: 27373 - protein, 14 aa, synthetic construct
  REGION 1..14: note = Keratin, type I cytoskeletal 10 (370-383)
SSGSVGESSSKGPR

SEQ ID NO: 27374 - protein, 8 aa, synthetic construct
  REGION 1..8: note = Olfactory receptor 52E1 (66-73)
SSIDPGLS

SEQ ID NO: 27375 - protein, 9 aa, synthetic construct
  REGION 1..9: note = E3 ubiquitin-protein ligase HUWE1 (114-122)
SSIEHLTTL

SEQ ID NO: 27376 - protein, 9 aa, synthetic construct
  REGION 1..9: note = Zinc finger FYVE domain-containing protein 16 (841-849)
SSIPSPATL

SEQ ID NO: 27377 - protein, 12 aa, synthetic construct
  REGION 1..12: note = HBS1-like protein (521-532)
SSKLGKNSNFAK

SEQ ID NO: 27378 - protein, 11 aa, synthetic construct
  REGION 1..11: note = Zinc finger protein 43 (404-414)
SSKLTEHKLTH

SEQ ID NO: 27379 - protein, 11 aa, synthetic construct
  REGION 1..11: note = RalBP1-associated Eps domain-containing protein 1 (509-519)
SSLDMNRTFTV

SEQ ID NO: 27380 - protein, 11 aa, synthetic construct
  REGION 1..11: note = Chromodomain-helicase-DNA-binding protein 9 (261-271)
SSLEENLLHQV

SEQ ID NO: 27381 - protein, 11 aa, synthetic construct
  REGION 1..11: note = Spectrin beta chain, non-erythrocytic 1 (1556-1566)
SSLSAEAIRQR

SEQ ID NO: 27382 - protein, 11 aa, synthetic construct
  REGION 1..11: note = Eukaryotic translation initiation factor 3 subunit C-like protein (15-25)
SSLSGEELVTK

SEQ ID NO: 27383 - protein, 10 aa, synthetic construct
  REGION 1..10: note = COMM domain-containing protein 10 (123-132)
SSMGQETVEK

SEQ ID NO: 27384 - protein, 11 aa, synthetic construct
  REGION 1..11: note = Liprin-alpha-1 (1168-1178)
SSMSSPSMQPK

SEQ ID NO: 27385 - protein, 9 aa, synthetic construct
  REGION 1..9: note = Exostosin-2 (52-60)
SSNDWNVEK

SEQ ID NO: 27386 - protein, 14 aa, synthetic construct
  REGION 1..14: note = Membrane magnesium transporter 1 (109-122)
SSNQDALSSNTSLK

SEQ ID NO: 27387 - protein, 17 aa, synthetic construct
  REGION 1..17: note = Vimentin (55-71)
SSPGGVYATRSSAVRLR

SEQ ID NO: 27388 - protein, 9 aa, synthetic construct
  REGION 1..9: note = Coatomer subunit gamma-1 (297-305)
SSPKAALRY

SEQ ID NO: 27389 - protein, 9 aa, synthetic construct
  REGION 1..9: note = RING finger protein 10 (486-494)
SSQQEPITK

SEQ ID NO: 27390 - protein, 9 aa, synthetic construct
  REGION 1..9: note = FERM domain-containing protein 4A (829-837)
SSQYRIKEY

SEQ ID NO: 27391 - protein, 13 aa, synthetic construct
  REGION 1..13: note = Chondroitin sulfate proteoglycan 4 (1608-1620)
SSSAGTDPQLLLY

SEQ ID NO: 27392 - protein, 9 aa, synthetic construct
  REGION 1..9: note = Ankyrin-2 (960-968)
SSSPIHSGF

SEQ ID NO: 27393 - protein, 12 aa, synthetic construct
  REGION 1..12: note = Reticulon-4 (429-440)
SSSPLEASSVNY

SEQ ID NO: 27394 - protein, 9 aa, synthetic construct
  REGION 1..9: note = Histone acetyltransferase KAT6A (999-1007)
SSSPPILTK

SEQ ID NO: 27395 - protein, 9 aa, synthetic construct
  REGION 1..9: note = Heterogeneous nuclear ribonucleoprotein U-like protein 1 (97-105)
SSSRPIVQK

SEQ ID NO: 27396 - protein, 14 aa, synthetic construct
  REGION 1..14: note = Retinoic acid-induced protein 1 (223-236)
SSSVQGGGQGAHSY

SEQ ID NO: 27397 - protein, 12 aa, synthetic construct
  REGION 1..12: note = Helicase-like transcription factor (446-457)
SSVPTTKKKMLK

SEQ ID NO: 27398 - protein, 9 aa, synthetic construct
  REGION 1..9: note = Loss of heterozygosity 12 chromosomal region 1 protein (18-26)
SSVTPSPAK

SEQ ID NO: 27399 - protein, 9 aa, synthetic construct
  REGION 1..9: note = Ral GTPase-activating protein subunit beta (647-655)
SSYDKPITF

SEQ ID NO: 27400 - protein, 9 aa, synthetic construct
  REGION 1..9: note = Protein kinase C and casein kinase substrate in neurons protein 2 (345-353)
SSYEKTQSY

SEQ ID NO: 27401 - protein, 9 aa, synthetic construct
  REGION 1..9: note = CD99 antigen-like protein 2 (60-68)
SSYISYQQK

SEQ ID NO: 27402 - protein, 9 aa, synthetic construct
  REGION 1..9: note = U4/U6 small nuclear ribonucleoprotein Prp31 (226-234)
STAAKIMGV

SEQ ID NO: 27403 - protein, 14 aa, synthetic construct
  REGION 1..14: note = Heterogeneous nuclear ribonucleoprotein H (363-376)
STAGASGGAYEHRY

SEQ ID NO: 27404 - protein, 13 aa, synthetic construct
  REGION 1..13: note = Heterogeneous nuclear ribonucleoprotein H (363-375)
STAGASGGAYGSQ

SEQ ID NO: 27405 - protein, 9 aa, synthetic construct
  REGION 1..9: note = Complement component 1 Q subcomponent-binding protein, mitochondrial (175-183)
STALEHQEY

SEQ ID NO: 27406 - protein, 10 aa, synthetic construct
  REGION 1..10: note = JmjC domain-containing protein 8 (89-98)
STANTYSYHK

SEQ ID NO: 27407 - protein, 12 aa, synthetic construct
  REGION 1..12: note = Transcription initiation factor TFIID subunit 6 (584-595)
STAPSGPGSVQK

SEQ ID NO: 27408 - protein, 10 aa, synthetic construct
  REGION 1..10: note = IQ motif and SEC7 domain-containing protein 2 (10-19)
STASHTLHQY

SEQ ID NO: 27409 - protein, 9 aa, synthetic construct
  REGION 1..9: note = 116 kDa U5 small nuclear ribonucleoprotein component (483-491)
STDDGVQFH

SEQ ID NO: 27410 - protein, 8 aa, synthetic construct
  REGION 1..8: note = Neuropilin-2 (829-836)
STDKEKSW

SEQ ID NO: 27411 - protein, 10 aa, synthetic construct
  REGION 1..10: note = Immunoglobulin superfamily member 3 (124-133)
STDKQYFGSY

SEQ ID NO: 27412 - protein, 10 aa, synthetic construct
  REGION 1..10: note = Transcription initiation factor TFIID subunit 7-like (113-122)
STDPNIVRKK

SEQ ID NO: 27413 - protein, 11 aa, synthetic construct
  REGION 1..11: note = Transcription factor HES-1 (101-111)
STDPSVLGKYR

SEQ ID NO: 27414 - protein, 13 aa, synthetic construct
  REGION 1..13: note = RNA-binding protein FUS (44-56)
STDTSGYGQSSYS

SEQ ID NO: 27415 - protein, 10 aa, synthetic construct
  REGION 1..10: note = Latent-transforming growth factor beta-binding protein 2 (1572-1581)
STEDLPDHDI

SEQ ID NO: 27416 - protein, 11 aa, synthetic construct
  REGION 1..11: note = Baculoviral IAP repeat-containing protein 6 (2019-2029)
STEQLRTIIRY

SEQ ID NO: 27417 - protein, 9 aa, synthetic construct
  REGION 1..9: note = Cathepsin L1 (287-295)
STESDNNKY

SEQ ID NO: 27418 - protein, 14 aa, synthetic construct
  REGION 1..14: note = DNA-dependent protein kinase catalytic subunit (1861-1874)
STFDTQITKKMGYY

SEQ ID NO: 27419 - protein, 11 aa, synthetic construct
  REGION 1..11: note = Zinc finger protein 280B (174-184)
STFEVNSINPK

SEQ ID NO: 27420 - protein, 9 aa, synthetic construct
  REGION 1..9: note = Brain-specific angiogenesis inhibitor 1-associated protein 2-like protein 1 (460-468)
STFKAPASK

SEQ ID NO: 27421 - protein, 10 aa, synthetic construct
  REGION 1..10: note = Sex comb on midleg-like protein 4 (11-20)
STFNHRGSLH

SEQ ID NO: 27422 - protein, 9 aa, synthetic construct
  REGION 1..9: note = Transmembrane emp24 domain-containing protein 3 (107-115)
STFSHKTVY

SEQ ID NO: 27423 - protein, 9 aa, synthetic construct
  REGION 1..9: note = Alstrom syndrome protein 1 (1095-1103)
STFYSQREK

SEQ ID NO: 27424 - protein, 10 aa, synthetic construct
  REGION 1..10: note = Protein FAM91A1 (429-438)
STGEGEAQRY

SEQ ID NO: 27425 - protein, 9 aa, synthetic construct
  REGION 1..9: note = N-acetylglucosamine-1-phosphodiester alpha-N-acetylglucosaminidase (4-12)
STGRWLLLR

SEQ ID NO: 27426 - protein, 9 aa, synthetic construct
  REGION 1..9: note = Vacuolar protein sorting-associated protein 16 homolog (322-330)
STHEFLHEV

SEQ ID NO: 27427 - protein, 9 aa, synthetic construct
  REGION 1..9: note = Bifunctional lysine-specific demethylase and histidyl-hydroxylase MINA (251-259)
STHVTISTY

SEQ ID NO: 27428 - protein, 10 aa, synthetic construct
  REGION 1..10: note = Clathrin interactor 1 (210-219)
STIDDTISKF

SEQ ID NO: 27429 - protein, 9 aa, synthetic construct
  REGION 1..9: note = Prolyl 4-hydroxylase subunit alpha-1 (200-208)
STIDKVSVL

SEQ ID NO: 27430 - protein, 10 aa, synthetic construct
  REGION 1..10: note = EPB41 protein (372-381)
STIGFKLPSY

SEQ ID NO: 27431 - protein, 9 aa, synthetic construct
  REGION 1..9: note = Calcium-independent phospholipase A2-gamma (310-318)
STKQSIANF

SEQ ID NO: 27432 - protein, 9 aa, synthetic construct
  REGION 1..9: note = Kanadaptin (547-555)
STLDGVSRK

SEQ ID NO: 27433 - protein, 10 aa, synthetic construct
  REGION 1..10: note = Serologically defined colon cancer antigen 8 (8-17)
STLEEILGQY

SEQ ID NO: 27434 - protein, 9 aa, synthetic construct
  REGION 1..9: note = Serine-protein kinase ATM (934-942)
STLEPTKSL

SEQ ID NO: 27435 - protein, 11 aa, synthetic construct
  REGION 1..11: note = DNA-directed RNA polymerase I subunit RPA1 (376-386)
STLPGQSLIDK

SEQ ID NO: 27436 - protein, 9 aa, synthetic construct
  REGION 1..9: note = Myb-related protein B (600-608)
STLPKSLSL

SEQ ID NO: 27437 - protein, 10 aa, synthetic construct
  REGION 1..10: note = Zinc finger protein 212 (21-30)
STLPSQATEK

SEQ ID NO: 27438 - protein, 13 aa, synthetic construct
  REGION 1..13: note = Myelin basic protein (20-32)
STMDHARHGFLPR

SEQ ID NO: 27439 - protein, 9 aa, synthetic construct
  REGION 1..9: note = Coatomer subunit gamma-1 (134-142)
STMLQAIER

SEQ ID NO: 27440 - protein, 9 aa, synthetic construct
  REGION 1..9: note = SHC SH2 domain-binding protein 1 (299-307)
STMMAGLLR

SEQ ID NO: 27441 - protein, 9 aa, synthetic construct
  REGION 1..9: note = Forkhead box protein O1 (544-552)
STMPHTSGM

SEQ ID NO: 27442 - protein, 9 aa, synthetic construct
  REGION 1..9: note = Transmembrane protein 248 (87-95)
STMTSGQAR

SEQ ID NO: 27443 - protein, 9 aa, synthetic construct
  REGION 1..9: note = Calcium uptake protein 1, mitochondrial (122-130)
STPDKIFRY

SEQ ID NO: 27444 - protein, 10 aa, synthetic construct
  REGION 1..10: note = C-Jun-amino-terminal kinase-interacting protein 4 (350-359)
STPTKGIENK

SEQ ID NO: 27445 - protein, 9 aa, synthetic construct
  REGION 1..9: note = Transcription elongation factor A protein 1 (135-143)
STSDSVRLK

SEQ ID NO: 27446 - protein, 10 aa, synthetic construct
  REGION 1..10: note = LisH domain-containing protein ARMC9 (382-391)
STSDVVRQYM

SEQ ID NO: 27447 - protein, 11 aa, synthetic construct
  REGION 1..11: note = Endoplasmin (187-197)
STSELIGQFGV

SEQ ID NO: 27448 - protein, 9 aa, synthetic construct
  REGION 1..9: note = Enhancer of mRNA-decapping protein 4 (165-173)
STSERTLLK

SEQ ID NO: 27449 - protein, 9 aa, synthetic construct
  REGION 1..9: note = Versican core protein (1942-1950)
STVSHPIAK

SEQ ID NO: 27450 - protein, 9 aa, synthetic construct
  REGION 1..9: note = E3 ubiquitin-protein ligase ZNRF1 (95-103)
STYAHGNGY

SEQ ID NO: 27451 - protein, 13 aa, synthetic construct
  REGION 1..13: note = Epithelial discoidin domain-containing receptor 1 (213-225)
STYDGHTVGGLQY

SEQ ID NO: 27452 - protein, 10 aa, synthetic construct
  REGION 1..10: note = Regulator of microtubule dynamics protein 1 (239-248)
STYEKALGYF

SEQ ID NO: 27453 - protein, 9 aa, synthetic construct
  REGION 1..9: note = Zinc finger protein 627 (490-498)
STYFRVHEK

SEQ ID NO: 27454 - protein, 11 aa, synthetic construct
  REGION 1..11: note = Heat shock protein HSP 90-alpha (724-734)
STYGWTANMER

SEQ ID NO: 27455 - protein, 9 aa, synthetic construct
  REGION 1..9: note = Phosphomevalonate kinase (66-74)
STYKEAFRK

SEQ ID NO: 27456 - protein, 11 aa, synthetic construct
  REGION 1..11: note = Acid ceramidase (33-43)
STYPPSGPTYR

SEQ ID NO: 27457 - protein, 11 aa, synthetic construct
  REGION 1..11: note = Mitochondrial basic amino acids transporter (140-150)
STYPVDVVKSR

SEQ ID NO: 27458 - protein, 10 aa, synthetic construct
  REGION 1..10: note = Protein tweety homolog 2 (519-528)
SVADEHLRHY

SEQ ID NO: 27459 - protein, 11 aa, synthetic construct
  REGION 1..11: note = BMP-2-inducible protein kinase (599-609)
SVADKEAIANF

SEQ ID NO: 27460 - protein, 9 aa, synthetic construct
  REGION 1..9: note = Adenomatous polyposis coli protein 2 (774-782)
SVASKALQK

SEQ ID NO: 27461 - protein, 11 aa, synthetic construct
  REGION 1..11: note Dolichyl-diphosphooligosaccharide-proteinosyltransferase subunit 2 (312-322)
SVASRATVLQK

SEQ ID NO: 27462 - protein, 10 aa, synthetic construct
  REGION 1..10: note = DNA-directed RNA polymerase III subunit RPC5 (347-356)
SVAVLRGIQK

SEQ ID NO: 27463 - protein, 9 aa, synthetic construct
  REGION 1..9: note = Epididymal secretory protein E1 (29-37)
SVDGVIKEV

SEQ ID NO: 27464 - protein, 11 aa, synthetic construct
  REGION 1..11: note = Chromodomain-helicase-DNA-binding protein 4 (628-638)
SVDKKGHVHYL

SEQ ID NO: 27465 - protein, 10 aa, synthetic construct
  REGION 1..10: note = U3 small nucleolar ribonucleoprotein protein MPP10 (594-603)
SVDQAGKYSK

SEQ ID NO: 27466 - protein, 10 aa, synthetic construct
  REGION 1..10: note = Nucleolar protein 11 (28-37)
SVDRKFISLM

SEQ ID NO: 27467 - protein, 10 aa, synthetic construct
  REGION 1..10: note = Peroxisomal multifunctional enzyme type 2 (75-84)
SVEEGEKVVK

SEQ ID NO: 27468 - protein, 11 aa, synthetic construct
  REGION 1..11: note = Cytochrome c oxidase subunit 7C, mitochondrial (30-40)
SVENKWSLLAK

SEQ ID NO: 27469 - protein, 11 aa, synthetic construct
  REGION 1..11: note = Histone acetyltransferase KAT7 (249-259)
SVFEVDGKKNK

SEQ ID NO: 27470 - protein, 12 aa, synthetic construct
  REGION 1..12: note = Receptor-type tyrosine-protein phosphatase zeta (1032-1043)
SVFGDDNKALSK

SEQ ID NO: 27471 - protein, 13 aa, synthetic construct
  REGION 1..13: note = Calcium-binding mitochondrial carrier protein SCaMC-2 (37-49)
SVFIPSQEFSTYR

SEQ ID NO: 27472 - protein, 10 aa, synthetic construct
  REGION 1..10: note = LIX1-like protein (121-130)
SVFNEHPSRR

SEQ ID NO: 27473 - protein, 9 aa, synthetic construct
  REGION 1..9: note = Ras-associated and pleckstrin homology domains-containing protein 1 (627-635)
SVFSEAWKR

SEQ ID NO: 27474 - protein, 12 aa, synthetic construct
  REGION 1..12: note = Formin-1 (1148-1159)
SVFSEGITSLHR

SEQ ID NO: 27475 - protein, 9 aa, synthetic construct
  REGION 1..9: note = Transcription activator BRG1 (1587-1595)
SVFTSVRQK

SEQ ID NO: 27476 - protein, 11 aa, synthetic construct
  REGION 1..11: note = Ras-related protein Rab-6B (23-33)
SVGKTSLITRF

SEQ ID NO: 27477 - protein, 9 aa, synthetic construct
  REGION 1..9: note = Rho guanine nucleotide exchange factor 17 (885-893)
SVIDTASKY

SEQ ID NO: 27478 - protein, 9 aa, synthetic construct
  REGION 1..9: note = Transmembrane emp24 domain-containing protein 7 (151-159)
SVIDYQTHF

SEQ ID NO: 27479 - protein, 10 aa, synthetic construct
  REGION 1..10: note = BTB/POZ domain-containing protein 9 (367-376)
SVIEGVSRSR

SEQ ID NO: 27480 - protein, 10 aa, synthetic construct
  REGION 1..10: note = Protein dopey-2 (19-28)
SVIEKALRNF

SEQ ID NO: 27481 - protein, 9 aa, synthetic construct
  REGION 1..9: note = Inactive phospholipase C-like protein 1 (372-380)
SVIEVINKF

SEQ ID NO: 27482 - protein, 9 aa, synthetic construct
  REGION 1..9: note = Carbohydrate sulfotransferase 10 (278-286)
SVIGHHETL

SEQ ID NO: 27483 - protein, 9 aa, synthetic construct
  REGION 1..9: note = E3 ubiquitin-protein ligase RBBP6 (1347-1355)
SVIKNVSTK

SEQ ID NO: 27484 - protein, 10 aa, synthetic construct
  REGION 1..10: note = FERM domain-containing protein 6 (60-69)
SVIQNNEHVY

SEQ ID NO: 27485 - protein, 10 aa, synthetic construct
  REGION 1..10: note = Vacuolar protein sorting-associated protein 11 homolog (769-778)
SVIRDYLVQK

SEQ ID NO: 27486 - protein, 10 aa, synthetic construct
  REGION 1..10: note = Choline kinase alpha (114-123)
SVIRGGLSNM

SEQ ID NO: 27487 - protein, 11 aa, synthetic construct
  REGION 1..11: note = Lipid phosphate phosphatase-related protein type 3 (109-119)
SVISDTTKLLK

SEQ ID NO: 27488 - protein, 10 aa, synthetic construct
  REGION 1..10: note = E3 ubiquitin-protein ligase MYCBP2 (613-622)
SVISKDGELY

SEQ ID NO: 27489 - protein, 11 aa, synthetic construct
  REGION 1..11: note = ATPase family AAA domain-containing protein 2 (1033-1043)
SVISKIDLHKY

SEQ ID NO: 27490 - protein, 9 aa, synthetic construct
  REGION 1..9: note = Pro-interleukin-16 (212-220)
SVISNIVLM

SEQ ID NO: 27491 - protein, 10 aa, synthetic construct
  REGION 1..10: note Dolichyl-diphosphooligosaccharide-proteinosyltransferase subunit DAD1 (7-16)
SVISRFLEEY

SEQ ID NO: 27492 - protein, 10 aa, synthetic construct
  REGION 1..10: note = Fanconi anemia group A protein (283-292)
SVISTDPLKR

SEQ ID NO: 27493 - protein, 9 aa, synthetic construct
  REGION 1..9: note = Vacuolar protein sorting-associated protein 13C (3201-3209)
SVITRFNEY

SEQ ID NO: 27494 - protein, 9 aa, synthetic construct
  REGION 1..9: note = Acyl-CoA dehydrogenase family member 9, mitochondrial (237-245)
SVKDKITAF

SEQ ID NO: 27495 - protein, 14 aa, synthetic construct
  REGION 1..14: note = Ran-specific GTPase-activating protein (187-200)
SVKEETKEDAEEKQ

SEQ ID NO: 27496 - protein, 14 aa, synthetic construct
  REGION 1..14: note = 39S ribosomal protein L48, mitochondrial (94-107)
SVKEHTEEDFKGRF

SEQ ID NO: 27497 - protein, 9 aa, synthetic construct
  REGION 1..9: note = CTP synthase 1 (225-233)
SVKEKISMF

SEQ ID NO: 27498 - protein, 9 aa, synthetic construct
  REGION 1..9: note = Amyloid protein-binding protein 2 (95-103)
SVLAYSFSR

SEQ ID NO: 27499 - protein, 11 aa, synthetic construct
  REGION 1..11: note = Cytoplasmic dynein 1 heavy chain 1 (2317-2327)
SVLDDNKLLTL

SEQ ID NO: 27500 - protein, 9 aa, synthetic construct
  REGION 1..9: note = Interferon-induced GTP-binding protein Mx1 (85-93)
SVLEALSGV

SEQ ID NO: 27501 - protein, 12 aa, synthetic construct
  REGION 1..12: note = Protein fem-1 homolog B (414-425)
SVLEIEQSMNRV

SEQ ID NO: 27502 - protein, 9 aa, synthetic construct
  REGION 1..9: note = Zinc finger MYM-type protein 6 (648-656)
SVLKGAVTK

SEQ ID NO: 27503 - protein, 9 aa, synthetic construct
  REGION 1..9: note = Pre-rRNA-processing protein TSR1 homolog (547-555)
SVLNMVVRR

SEQ ID NO: 27504 - protein, 10 aa, synthetic construct
  REGION 1..10: note = Protein tweety homolog 3 (286-295)
SVLSGDILQY

SEQ ID NO: 27505 - protein, 9 aa, synthetic construct
  REGION 1..9: note = Interleukin-1 receptor-associated kinase 1 (94-102)
SVLWPWINR

SEQ ID NO: 27506 - protein, 12 aa, synthetic construct
  REGION 1..12: note = Heat shock 70 kDa protein 14 (206-217)
SVMEVNSGIYRV

SEQ ID NO: 27507 - protein, 11 aa, synthetic construct
  REGION 1..11: note = Synaptonemal complex protein SC65 (327-337)
SVMQQNLVYYR

SEQ ID NO: 27508 - protein, 9 aa, synthetic construct
  REGION 1..9: note = DNA replication licensing factor MCM5 (417-425)
SVMRDPSSR

SEQ ID NO: 27509 - protein, 10 aa, synthetic construct
  REGION 1..10: note = V-type proton ATPase 16 kDa proteolipid subunit (45-54)
SVMRPEQIMK

SEQ ID NO: 27510 - protein, 9 aa, synthetic construct
  REGION 1..9: note = Propionyl-CoA carboxylase beta chain, mitochondrial (34-42)
SVNERIENK

SEQ ID NO: 27511 - protein, 12 aa, synthetic construct
  REGION 1..12: note = A-kinase-interacting protein 1 (106-117)
SVPEEGGATHVY

SEQ ID NO: 27512 - protein, 12 aa, synthetic construct
  REGION 1..12: note = Melanocyte protein PMEL (633-644)
SVPQLPHSSSHW

SEQ ID NO: 27513 - protein, 10 aa, synthetic construct
  REGION 1..10: note = Nuclear distribution protein nudE homolog 1 (211-220)
SVPSTPIAHR

SEQ ID NO: 27514 - protein, 10 aa, synthetic construct
  REGION 1..10: note = Krueppel-like factor 5 (213-222)
SVPTQQGHLY

SEQ ID NO: 27515 - protein, 12 aa, synthetic construct
  REGION 1..12: note = Retinoic acid-induced protein 1 (225-236)
SVQGGGQGAHSY

SEQ ID NO: 27516 - protein, 11 aa, synthetic construct
  REGION 1..11: note = Bcl-2-related protein A1 (43-53)
SVQKEVEKNLK

SEQ ID NO: 27517 - protein, 9 aa, synthetic construct
  REGION 1..9: note = UDP-glucose 4-epimerase (97-105)
SVQKPLDYY

SEQ ID NO: 27518 - protein, 9 aa, synthetic construct
  REGION 1..9: note = 40S ribosomal protein S16 (9-17)
SVQVFGRKK

SEQ ID NO: 27519 - protein, 9 aa, synthetic construct
  REGION 1..9: note = Serine/threonine-protein kinase 4 (109-117)
SVSDIIRLR

SEQ ID NO: 27520 - protein, 9 aa, synthetic construct
  REGION 1..9: note = Zinc transporter ZIP6 (243-251)
SVSEPRKGF

SEQ ID NO: 27521 - protein, 10 aa, synthetic construct
  REGION 1..10: note = MICOS complex subunit MIC60 (113-122)
SVSEVMKESK

SEQ ID NO: 27522 - protein, 12 aa, synthetic construct
  REGION 1..12: note = CDC42 small effector protein 2 (51-62)
SVSSIQNQMQSK

SEQ ID NO: 27523 - protein, 9 aa, synthetic construct
  REGION 1..9: note = Vimentin (5-13)
SVSSSSYRR

SEQ ID NO: 27524 - protein, 9 aa, synthetic construct
  REGION 1..9: note = Shootin-1 (9-17)
SVTKTALNK

SEQ ID NO: 27525 - protein, 11 aa, synthetic construct
  REGION 1..11: note = LON peptidase N-terminal domain and RING finger protein 2 (607-617)
SVVDAIGISRF

SEQ ID NO: 27526 - protein, 9 aa, synthetic construct
  REGION 1..9: note = Phosphatidylinositol 3-kinase regulatory subunit beta (397-405)
SVVDLINHY

SEQ ID NO: 27527 - protein, 9 aa, synthetic construct
  REGION 1..9: note = GRAM domain-containing protein 1A (439-447)
SVVETQTLF

SEQ ID NO: 27528 - protein, 10 aa, synthetic construct
  REGION 1..10: note = Unconventional myosin-VI (74-83)
SVVGGFVSHY

SEQ ID NO: 27529 - protein, 11 aa, synthetic construct
  REGION 1..11: note = Elongator complex protein 1 (1171-1181)
SVVSGSEMSGK

SEQ ID NO: 27530 - protein, 11 aa, synthetic construct
  REGION 1..11: note = DNA dC-dU-editing enzyme APOBEC-3C (46-56)
SVVSWKTGVFR

SEQ ID NO: 27531 - protein, 9 aa, synthetic construct
  REGION 1..9: note = Centrosomal protein of 131 kDa (47-55)
SVVTGSEQK

SEQ ID NO: 27532 - protein, 9 aa, synthetic construct
  REGION 1..9: note = Discoidin domain-containing receptor 2 (215-223)
SVYDGAVGY

SEQ ID NO: 27533 - protein, 10 aa, synthetic construct
  REGION 1..10: note = Exocyst complex component 6B (39-48)
SVYDGEEHGR

SEQ ID NO: 27534 - protein, 13 aa, synthetic construct
  REGION 1..13: note = Serum paraoxonase/arylesterase 2 (334-346)
SVYDGKLLIGTLY

SEQ ID NO: 27535 - protein, 10 aa, synthetic construct
  REGION 1..10: note = DNA-binding protein RFX7 (1307-1316)
SVYEFQTPSY

SEQ ID NO: 27536 - protein, 10 aa, synthetic construct
  REGION 1..10: note = Far upstream element-binding protein 3 (77-86)
SVYGYGVQKR

SEQ ID NO: 27537 - protein, 11 aa, synthetic construct
  REGION 1..11: note = Nuclear cap-binding protein subunit 1 (280-290)
SVYPMPRVIFR

SEQ ID NO: 27538 - protein, 11 aa, synthetic construct
  REGION 1..11: note = Inositol hexakisphosphate and diphosphoinositol-pentakisphosphate kinase 2 (220-230)
SVYSPESNVRK

SEQ ID NO: 27539 - protein, 10 aa, synthetic construct
  REGION 1..10: note = Golgi resident protein GCP60 (519-528)
SVYYRVYYTR

SEQ ID NO: 27540 - protein, 9 aa, synthetic construct
  REGION 1..9: note = T-box transcription factor TBX2 (536-544)
TAAPFPFHL

SEQ ID NO: 27541 - protein, 11 aa, synthetic construct
  REGION 1..11: note = Transducin beta-like protein 3 (197-207)
TADHNLLLYEA

SEQ ID NO: 27542 - protein, 9 aa, synthetic construct
  REGION 1..9: note = Protein bicaudal D homolog 2 (465-473)
TAEVALANL

SEQ ID NO: 27543 - protein, 9 aa, synthetic construct
  REGION 1..9: note = Unconventional myosin-X (353-361)
TALGRSAEL

SEQ ID NO: 27544 - protein, 9 aa, synthetic construct
  REGION 1..9: note = Homeodomain-interacting protein kinase 3 (308-316)
TALKKLKSL

SEQ ID NO: 27545 - protein, 9 aa, synthetic construct
  REGION 1..9: note = Protein S100-A1 (7-15)
TAMETLINV

SEQ ID NO: 27546 - protein, 11 aa, synthetic construct
  REGION 1..11: note = Ankycorbin (72-82)
TAQDTTGHSAL

SEQ ID NO: 27547 - protein, 16 aa, synthetic construct
  REGION 1..16: note = Presequence protease, mitochondrial (707-722)
TAQELANGIPDSGHLY

SEQ ID NO: 27548 - protein, 7 aa, synthetic construct
  REGION 1..7: note = Nuclear pore complex-interacting protein (238-244)
TDNSLSL

SEQ ID NO: 27549 - protein, 10 aa, synthetic construct
  REGION 1..10: note = Interleukin-1 receptor accessory protein (307-316)
TEDETRTQIL

SEQ ID NO: 27550 - protein, 10 aa, synthetic construct
  REGION 1..10: note = Uncharacterized membrane protein C19orf24 (108-117)
TEDPTEMASL

SEQ ID NO: 27551 - protein, 9 aa, synthetic construct
  REGION 1..9: note = Quinone oxidoreductase (182-190)
TEEGQKIVL

SEQ ID NO: 27552 - protein, 10 aa, synthetic construct
  REGION 1..10: note = Proteasome activator complex subunit 3 (220-229)
TEIDEKEYIS

SEQ ID NO: 27553 - protein, 9 aa, synthetic construct
  REGION 1..9: note = Ventricular zone-expressed PH domain-containing protein homolog 1 (7-15)
TEIEFPEKL

SEQ ID NO: 27554 - protein, 9 aa, synthetic construct
  REGION 1..9: note = RNA-binding protein 12 (77-85)
TEMQNMIEL

SEQ ID NO: 27555 - protein, 9 aa, synthetic construct
  REGION 1..9: note = Pre-mRNA-processing-splicing factor 8 (945-953)
TEPPPLLVY

SEQ ID NO: 27556 - protein, 9 aa, synthetic construct
  REGION 1..9: note = Probable N-acetyltransferase 16 (59-67)
TEREFEEVL

SEQ ID NO: 27557 - protein, 9 aa, synthetic construct
  REGION 1..9: note = Major facilitator superfamily domain-containing protein 1 (327-335)
TGKNIIWVL

SEQ ID NO: 27558 - protein, 9 aa, synthetic construct
  REGION 1..9: note = DNA topoisomerase 2-alpha (1397-1405)
THFPDETEI

SEQ ID NO: 27559 - protein, 10 aa, synthetic construct
  REGION 1..10: note = Mothers against decapentaplegic homolog 2 (197-206)
THSIPENTNF

SEQ ID NO: 27560 - protein, 10 aa, synthetic construct
  REGION 1..10: note = Sorting nexin-18 (279-288)
TIDDPTKQTK

SEQ ID NO: 27561 - protein, 11 aa, synthetic construct
  REGION 1..11: note = Plastin-2 (117-127)
TIDERTINKKK

SEQ ID NO: 27562 - protein, 9 aa, synthetic construct
  REGION 1..9: note = MAM and LDL-receptor class A domain-containing protein 1 (1829-1837)
TIEESGLNI

SEQ ID NO: 27563 - protein, 10 aa, synthetic construct
  REGION 1..10: note = NADH-ubiquinone oxidoreductase chain 2 (12-21)
TIFAGTLITA

SEQ ID NO: 27564 - protein, 9 aa, synthetic construct
  REGION 1..9: note = DBH-like monooxygenase protein 1 (50-58)
TIIEFTREL

SEQ ID NO: 27565 - protein, 9 aa, synthetic construct
  REGION 1..9: note = Cytoskeleton-associated protein 5 (365-373)
TILEKFKEK

SEQ ID NO: 27566 - protein, 16 aa, synthetic construct
  REGION 1..16: note = Melanocyte protein PMEL (215-230)
TITDQVPFSVSVSQLR

SEQ ID NO: 27567 - protein, 13 aa, synthetic construct
  REGION 1..13: note = Ornithine aminotransferase, mitochondrial (30-42)
TKKTVQGPPTSDD

SEQ ID NO: 27568 - protein, 13 aa, synthetic construct
  REGION 1..13: note = Catenin delta-1 (790-802)
TKSLDNNYSTPNE

SEQ ID NO: 27569 - protein, 10 aa, synthetic construct
  REGION 1..10: note = Low-density lipoprotein receptor-related protein 1B (701-710)
TLDFHTNTLY

SEQ ID NO: 27570 - protein, 11 aa, synthetic construct
  REGION 1..11: note = KN motif and ankyrin repeat domain-containing protein 1 (702-712)
TLDKQTSTQTV

SEQ ID NO: 27571 - protein, 8 aa, synthetic construct
  REGION 1..8: note = PH and SEC7 domain-containing protein 3 (117-124)
TLDQSLRY

SEQ ID NO: 27572 - protein, 9 aa, synthetic construct
  REGION 1..9: note = Kinesin-like protein KIF20B (1134-1142)
TLDVQIQHV

SEQ ID NO: 27573 - protein, 11 aa, synthetic construct
  REGION 1..11: note = UPF0505 protein C16orf62 (625-635)
TLEDEKRMLSY

SEQ ID NO: 27574 - protein, 11 aa, synthetic construct
  REGION 1..11: note = Syndecan-3 (348-358)
TLEEPKQASVT

SEQ ID NO: 27575 - protein, 10 aa, synthetic construct
  REGION 1..10: note = Biliverdin reductase A (71-80)
TLEERKEDQY

SEQ ID NO: 27576 - protein, 9 aa, synthetic construct
  REGION 1..9: note = Rap guanine nucleotide exchange factor 6 (4-12)
TLFQKLFSK

SEQ ID NO: 27577 - protein, 10 aa, synthetic construct
  REGION 1..10: note = ATP-dependent RNA helicase DHX36 (503-512)
TLHDLLMSQV

SEQ ID NO: 27578 - protein, 10 aa, synthetic construct
  REGION 1..10: note = F-box/WD repeat-containing protein 11 (217-226)
TLIHHNEAVL

SEQ ID NO: 27579 - protein, 10 aa, synthetic construct
  REGION 1..10: note = Plexin-C1 (370-379)
TLIHSDLTSV

SEQ ID NO: 27580 - protein, 11 aa, synthetic construct
  REGION 1..11: note = Tetraspanin-14 (239-249)
TLISDIEAVKA

SEQ ID NO: 27581 - protein, 9 aa, synthetic construct
  REGION 1..9: note = Midasin (462-470)
TLLDKYWTK

SEQ ID NO: 27582 - protein, 11 aa, synthetic construct
  REGION 1..11: note = Inositol-tetrakisphosphate 1-kinase (102-112)
TLLDRSKSYEL

SEQ ID NO: 27583 - protein, 9 aa, synthetic construct
  REGION 1..9: note = Midasin (3030-3038)
TLLEVGQIA

SEQ ID NO: 27584 - protein, 12 aa, synthetic construct
  REGION 1..12: note = NADH-ubiquinone oxidoreductase chain 4L (39-50)
TLMTLNTHSLLA

SEQ ID NO: 27585 - protein, 10 aa, synthetic construct
  REGION 1..10: note = Serine/threonine-protein phosphatase 1 regulatory subunit 10 (169-178)
TLPERPLTEV

SEQ ID NO: 27586 - protein, 9 aa, synthetic construct
  REGION 1..9: note = Sorting nexin-9 (218-226)
TLQDKQNMV

SEQ ID NO: 27587 - protein, 10 aa, synthetic construct
  REGION 1..10: note = Olfactory receptor (79-88)
TLVGNFTIII

SEQ ID NO: 27588 - protein, 9 aa, synthetic construct
  REGION 1..9: note = tRNA-dihydrouridine(20) synthase (NAD(P)+)-like (378-386)
TLWDKSKKL

SEQ ID NO: 27589 - protein, 11 aa, synthetic construct
  REGION 1..11: note = Spatacsin (451-461)
TLWDLETQGMQ

SEQ ID NO: 27590 - protein, 9 aa, synthetic construct
  REGION 1..9: note = E3 SUMO-protein ligase PIAS1 (360-368)
TLYIQMNEK

SEQ ID NO: 27591 - protein, 14 aa, synthetic construct
  REGION 1..14: note = Eukaryotic translation initiation factor 3 subunit D (56-69)
TNKYSSQFGGGSQY

SEQ ID NO: 27592 - protein, 11 aa, synthetic construct
  REGION 1..11: note = ATP-dependent RNA helicase DDX42 (106-116)
TNLTPQQLIDL

SEQ ID NO: 27593 - protein, 9 aa, synthetic construct
  REGION 1..9: note = Calcium permeable stress-gated cation channel 1 (426-434)
TPAIIMNTI

SEQ ID NO: 27594 - protein, 9 aa, synthetic construct
  REGION 1..9: note = Neuron navigator 2 (981-989)
TPASSRKNL

SEQ ID NO: 27595 - protein, 16 aa, synthetic construct
  REGION 1..16: note = Nucleolin (121-136)
TPGKKGAAIPAKGAKN

SEQ ID NO: 27596 - protein, 19 aa, synthetic construct
  REGION 1..19: note = Nucleolin (121-139)
TPGKKGAAIPAKGAKNGKN

SEQ ID NO: 27597 - protein, 12 aa, synthetic construct
  REGION 1..12: note = Chondroitin sulfate proteoglycan 4 (2310-2321)
TPNPALKNGQYW

SEQ ID NO: 27598 - protein, 14 aa, synthetic construct
  REGION 1..14: note = Alpha-adducin (194-207)
TPSFLKKSKKKSDS

SEQ ID NO: 27599 - protein, 9 aa, synthetic construct
  REGION 1..9: note = GPI ethanolamine phosphate transferase 3 (274-282)
TQDLQAKEL

SEQ ID NO: 27600 - protein, 10 aa, synthetic construct
  REGION 1..10: note = Homer protein homolog 3 (100-109)
TQFAEKFQEV

SEQ ID NO: 27601 - protein, 11 aa, synthetic construct
  REGION 1..11: note = Hypoxia-inducible factor 1-alpha (123-133)
TQFELTGHSVF

SEQ ID NO: 27602 - protein, 11 aa, synthetic construct
  REGION 1..11: note = Serine-protein kinase ATM (2268-2278)
TQLPERAIFQI

SEQ ID NO: 27603 - protein, 12 aa, synthetic construct
  REGION 1..12: note = Proteasome subunit beta type-4 (15-26)
TQNPMVTGTSVL

SEQ ID NO: 27604 - protein, 11 aa, synthetic construct
  REGION 1..11: note = von Willebrand factor A domain-containing protein 9 (75-85)
TQNQRSESNRF

SEQ ID NO: 27605 - protein, 13 aa, synthetic construct
  REGION 1..13: note = Macrophage migration inhibitory factor (22-34)
TQQLAQATGKPPQ

SEQ ID NO: 27606 - protein, 9 aa, synthetic construct
  REGION 1..9: note = Gamma-interferon-inducible protein 16 (235-243)
TQTQFFHVK

SEQ ID NO: 27607 - protein, 9 aa, synthetic construct
  REGION 1..9: note = 60S ribosomal protein L14 (89-97)
TRWAKKIEA

SEQ ID NO: 27608 - protein, 9 aa, synthetic construct
  REGION 1..9: note = Cadherin-19 (219-227)
TSAEIRSLY

SEQ ID NO: 27609 - protein, 10 aa, synthetic construct
  REGION 1..10: note = WW domain-containing adapter protein with coiled-coil (338-347)
TSDASSPRSY

SEQ ID NO: 27610 - protein, 9 aa, synthetic construct
  REGION 1..9: note = FAST kinase domain-containing protein 2 (547-555)
TSDDMKNAY

SEQ ID NO: 27611 - protein, 10 aa, synthetic construct
  REGION 1..10: note = Latent-transforming growth factor beta-binding protein 2 (1043-1052)
TSDEKGCQDV

SEQ ID NO: 27612 - protein, 11 aa, synthetic construct
  REGION 1..11: note = Trimethyllysine dioxygenase, mitochondrial (224-234)
TSDFSRGDTAY

SEQ ID NO: 27613 - protein, 11 aa, synthetic construct
  REGION 1..11: note = Cyclic AMP-dependent transcription factor ATF-6 alpha (429-439)
TSDGIIQKNSY

SEQ ID NO: 27614 - protein, 9 aa, synthetic construct
  REGION 1..9: note = L-dopachrome tautomerase (136-144)
TSDQLGYSY

SEQ ID NO: 27615 - protein, 9 aa, synthetic construct
  REGION 1..9: note = Poly (ADP-ribose) polymerase 11 (22-30)
TSDTQWGWF

SEQ ID NO: 27616 - protein, 11 aa, synthetic construct
  REGION 1..11: note = Endoplasmin (188-198)
TSELIGQFGVG

SEQ ID NO: 27617 - protein, 12 aa, synthetic construct
  REGION 1..12: note = Probable ATP-dependent RNA helicase DDX5 (556-567)
TSFRTGNPTGTY

SEQ ID NO: 27618 - protein, 10 aa, synthetic construct
  REGION 1..10: note = YTH domain-containing family protein 2 (706-715)
TSIFDDFSHY

SEQ ID NO: 27619 - protein, 9 aa, synthetic construct
  REGION 1..9: note = KN motif and ankyrin repeat domain-containing protein 4 (11-19)
TSLKSIMKK

SEQ ID NO: 27620 - protein, 11 aa, synthetic construct
  REGION 1..11: note = E3 ubiquitin-protein ligase RNF213 (1201-1211)
TSSNSQRATHY

SEQ ID NO: 27621 - protein, 17 aa, synthetic construct
  REGION 1..17: note = Nestin (511-527)
TSWAGAPVHLGQGQFLK

SEQ ID NO: 27622 - protein, 9 aa, synthetic construct
  REGION 1..9: note = Probable ATP-dependent RNA helicase YTHDC2 (1212-1220)
TTAERVLMK

SEQ ID NO: 27623 - protein, 8 aa, synthetic construct
  REGION 1..8: note = Junction plakoglobin (287-294)
TTDCLQLL

SEQ ID NO: 27624 - protein, 9 aa, synthetic construct
  REGION 1..9: note = Junction plakoglobin (287-295)
TTDCLQLLA

SEQ ID NO: 27625 - protein, 11 aa, synthetic construct
  REGION 1..11: note = Flavin reductaseADPH) (190-200)
TTDEYDGHSTY

SEQ ID NO: 27626 - protein, 9 aa, synthetic construct
  REGION 1..9: note = ATP-dependent 6-phosphofructokinase, platelet type (379-387)
TTDFIYQLY

SEQ ID NO: 27627 - protein, 8 aa, synthetic construct
  REGION 1..8: note = Probable ATP-dependent RNA helicase DDX60-like (990-997)
TTDIIEKY

SEQ ID NO: 27628 - protein, 11 aa, synthetic construct
  REGION 1..11: note = Methyl-CpG-binding domain protein 6 (678-688)
TTDPGASSLGK

SEQ ID NO: 27629 - protein, 10 aa, synthetic construct
  REGION 1..10: note = IQ domain-containing protein G (71-80)
TTDQLSILNY

SEQ ID NO: 27630 - protein, 9 aa, synthetic construct
  REGION 1..9: note = Glutamate receptor ionotropic, kainate 5 (78-86)
TTDTMCQIL

SEQ ID NO: 27631 - protein, 9 aa, synthetic construct
  REGION 1..9: note = Heterogeneous nuclear ribonucleoproteins A2/B1 (20-28)
TTEESLRNY

SEQ ID NO: 27632 - protein, 9 aa, synthetic construct
  REGION 1..9: note = Apoptosis-stimulating of p53 protein 1 (687-695)
TTEQIPSPV

SEQ ID NO: 27633 - protein, 13 aa, synthetic construct
  REGION 1..13: note = Transformer-2 protein homolog beta (29-41)
TTERDLREVFSKY

SEQ ID NO: 27634 - protein, 9 aa, synthetic construct
  REGION 1..9: note = Pre-mRNA-processing-splicing factor 8 (1254-1262)
TTFTKIVNK

SEQ ID NO: 27635 - protein, 11 aa, synthetic construct
  REGION 1..11: note = Suppressor of tumorigenicity 7 protein (228-238)
TTIAEAEKLFK

SEQ ID NO: 27636 - protein, 9 aa, synthetic construct
  REGION 1..9: note = Lysine-specific demethylase 6B (1272-1280)
TTIAKYAQY

SEQ ID NO: 27637 - protein, 12 aa, synthetic construct
  REGION 1..12: note = TOX high mobility group box family member 4 (142-153)
TTIDQSELSSQL

SEQ ID NO: 27638 - protein, 11 aa, synthetic construct
  REGION 1..11: note = Nucleolar protein 10 (56-66)
TTIKVSKDGQY

SEQ ID NO: 27639 - protein, 13 aa, synthetic construct
  REGION 1..13: note = V-type proton ATPase subunit F (43-55)
TTINEIEDTFRQF

SEQ ID NO: 27640 - protein, 10 aa, synthetic construct
  REGION 1..10: note = Large neutral amino acids transporter small subunit 1 (108-117)
TTISKSGGDY

SEQ ID NO: 27641 - protein, 9 aa, synthetic construct
  REGION 1..9: note = WD repeat-containing protein 3 (883-891)
TTISKVSQV

SEQ ID NO: 27642 - protein, 9 aa, synthetic construct
  REGION 1..9: note = Succinyl-CoA ligase (ADP/GDP-forming) subunit alpha, mitochondrial (321-329)
TTIYKEFEK

SEQ ID NO: 27643 - protein, 9 aa, synthetic construct
  REGION 1..9: note = Neurofilament light polypeptide (267-275)
TTKSEMARY

SEQ ID NO: 27644 - protein, 10 aa, synthetic construct
  REGION 1..10: note = Melanoma-associated antigen D1 (152-161)
TTKVGPNATY

SEQ ID NO: 27645 - protein, 11 aa, synthetic construct
  REGION 1..11: note = Glycosylphosphatidylinositol anchor attachment 1 protein (526-536)
TTMVPTAALAK

SEQ ID NO: 27646 - protein, 9 aa, synthetic construct
  REGION 1..9: note = Urocortin-2 (100-108)
TTNARILAR

SEQ ID NO: 27647 - protein, 9 aa, synthetic construct
  REGION 1..9: note = Reticulon-1 (204-212)
TTPVKITLT

SEQ ID NO: 27648 - protein, 11 aa, synthetic construct
  REGION 1..11: note = Probable E3 ubiquitin-protein ligase HERC1 (3302-3312)
TTVDDSIQRKF

SEQ ID NO: 27649 - protein, 12 aa, synthetic construct
  REGION 1..12: note = Ubiquitin carboxyl-terminal hydrolase 19 (1362-1373)
TTVDESQVVTRY

SEQ ID NO: 27650 - protein, 10 aa, synthetic construct
  REGION 1..10: note = 40S ribosomal protein S6 (125-134)
TTVPRRLGPK

SEQ ID NO: 27651 - protein, 9 aa, synthetic construct
  REGION 1..9: note = Aminoacyl tRNA synthase complex-interacting multifunctional protein 2 (206-214)
TVADVVLWS

SEQ ID NO: 27652 - protein, 10 aa, synthetic construct
  REGION 1..10: note = Aminoacyl tRNA synthase complex-interacting multifunctional protein 2 (206-215)
TVADVVLWSV

SEQ ID NO: 27653 - protein, 10 aa, synthetic construct
  REGION 1..10: note = Protein FAM73B (18-27)
TVAEIPVFLY

SEQ ID NO: 27654 - protein, 10 aa, synthetic construct
  REGION 1..10: note = Carboxypeptidase Q (271-280)
TVAEITGSKY

SEQ ID NO: 27655 - protein, 9 aa, synthetic construct
  REGION 1..9: note = Dynein heavy chain 14, axonemal (3163-3171)
TVAEKQLLA

SEQ ID NO: 27656 - protein, 9 aa, synthetic construct
  REGION 1..9: note = Protein phosphatase 1K, mitochondrial (191-199)
TVALLRDGI

SEQ ID NO: 27657 - protein, 9 aa, synthetic construct
  REGION 1..9: note = Abl interactor 2 (96-104)
TVDIHKEKV

SEQ ID NO: 27658 - protein, 9 aa, synthetic construct
  REGION 1..9: note = Volume-regulated anion channel subunit LRRC8B (622-630)
TVEEIISFQ

SEQ ID NO: 27659 - protein, 11 aa, synthetic construct
  REGION 1..11: note = Vimentin (446-456)
TVETRDGQVIN

SEQ ID NO: 27660 - protein, 9 aa, synthetic construct
  REGION 1..9: note = Olfactory receptor 51G2 (211-219)
TVGIDSLLI

SEQ ID NO: 27661 - protein, 12 aa, synthetic construct
  REGION 1..12: note = Exocyst complex component 7 (401-412)
TVHELTSNAILF

SEQ ID NO: 27662 - protein, 9 aa, synthetic construct
  REGION 1..9: note = WD repeat-containing protein 70 (364-372)
TVHPKFHYK

SEQ ID NO: 27663 - protein, 9 aa, synthetic construct
  REGION 1..9: note = Eukaryotic translation initiation factor 3 subunit C-like protein (818-826)
TVHSIISKM

SEQ ID NO: 27664 - protein, 10 aa, synthetic construct
  REGION 1..10: note = Transmembrane emp24 domain-containing protein 3 (153-162)
TVIDSQTHYR

SEQ ID NO: 27665 - protein, 10 aa, synthetic construct
  REGION 1..10: note = 60S ribosomal protein L7-like 1 (171-180)
TVIEEHLGKF

SEQ ID NO: 27666 - protein, 9 aa, synthetic construct
  REGION 1..9: note = Ubiquitin carboxyl-terminal hydrolase 24 (488-496)
TVIENIHTI

SEQ ID NO: 27667 - protein, 9 aa, synthetic construct
  REGION 1..9: note = Integrin alpha-2 (988-996)
TVIIHIPQY

SEQ ID NO: 27668 - protein, 11 aa, synthetic construct
  REGION 1..11: note = Actin filament-associated protein 1-like 1 (208-218)
TVIREDQLLCY

SEQ ID NO: 27669 - protein, 11 aa, synthetic construct
  REGION 1..11: note = Angiomotin (709-719)
TVISHSPNTSY

SEQ ID NO: 27670 - protein, 13 aa, synthetic construct
  REGION 1..13: note = Interferon-induced protein 44 (52-64)
TVIYSEDHIIGAY

SEQ ID NO: 27671 - protein, 9 aa, synthetic construct
  REGION 1..9: note = Structural maintenance of chromosomes flexible hinge domain-containing protein 1 (90-98)
TVKDGVTLY

SEQ ID NO: 27672 - protein, 9 aa, synthetic construct
  REGION 1..9: note = Microtubule-actin cross-linking factor 1 isoform X31 (4329-4337)
TVKDQLNEM

SEQ ID NO: 27673 - protein, 9 aa, synthetic construct
  REGION 1..9: note = DnaJ homolog subfamily B member 1 (332-340)
TVLEQVLPI

SEQ ID NO: 27674 - protein, 9 aa, synthetic construct
  REGION 1..9: note = Prostaglandin E2 receptor EP4 subtype (335-343)
TVLSKAIEK

SEQ ID NO: 27675 - protein, 10 aa, synthetic construct
  REGION 1..10: note = Carboxypeptidase Q (441-450)
TVMDPKQMNV

SEQ ID NO: 27676 - protein, 9 aa, synthetic construct
  REGION 1..9: note = Embryonic stem cell-specific 5-hydroxymethylcytosine-binding protein (101-109)
TVMEKRSFK

SEQ ID NO: 27677 - protein, 12 aa, synthetic construct
  REGION 1..12: note = MICOS complex subunit MIC13 (90-101)
TVMSALSVAPSK

SEQ ID NO: 27678 - protein, 9 aa, synthetic construct
  REGION 1..9: note = Zinc finger protein 3 (182-190)
TVNSNLISH

SEQ ID NO: 27679 - protein, 9 aa, synthetic construct
  REGION 1..9: note = Mucin-3A isoform (865-873)
TVQNTEISI

SEQ ID NO: 27680 - protein, 11 aa, synthetic construct
  REGION 1..11: note = Zinc finger BED domain-containing protein 4 (806-816)
TVTDNASIGKT

SEQ ID NO: 27681 - protein, 12 aa, synthetic construct
  REGION 1..12: note = Transmembrane protein 186 (82-93)
TVVALPPGYYLY

SEQ ID NO: 27682 - protein, 9 aa, synthetic construct
  REGION 1..9: note = RNA-binding protein Musashi homolog 2 (17-25)
TVVEDVKQY

SEQ ID NO: 27683 - protein, 12 aa, synthetic construct
  REGION 1..12: note = Serine/threonine-protein kinase A-Raf (31-42)
TVVTVRDGMSVY

SEQ ID NO: 27684 - protein, 9 aa, synthetic construct
  REGION 1..9: note = Putative oxidoreductase GLYR1 (235-243)
TVWNRTAEK

SEQ ID NO: 27685 - protein, 13 aa, synthetic construct
  REGION 1..13: note = RNA-binding protein 26 (673-685)
TVYNPAALKAAQK

SEQ ID NO: 27686 - protein, 11 aa, synthetic construct
  REGION 1..11: note = Junction plakoglobin (21-31)
TYDSGIHSGAN

SEQ ID NO: 27687 - protein, 16 aa, synthetic construct
  REGION 1..16: note = Caprin-1 (572-587)
TYHGSPDQSHQVTGNH

SEQ ID NO: 27688 - protein, 9 aa, synthetic construct
  REGION 1..9: note = Spartin (153-161)
VAAPASLSL

SEQ ID NO: 27689 - protein, 10 aa, synthetic construct
  REGION 1..10: note = Phosphatidylinositol 3,4,5-trisphosphate 5-phosphatase 2 (908-917)
VAAPPPKNSF

SEQ ID NO: 27690 - protein, 10 aa, synthetic construct
  REGION 1..10: note Dolichyl-diphosphooligosaccharide-proteinosyltransferase subunit 2 (450-459)
VAEPDNKNVY

SEQ ID NO: 27691 - protein, 11 aa, synthetic construct
  REGION 1..11: note = Sodium/iodide cotransporter (484-494)
VALSVNASGLL

SEQ ID NO: 27692 - protein, 9 aa, synthetic construct
  REGION 1..9: note = Transcription elongation factor SPT5 (216-224)
VAPEHVKGY

SEQ ID NO: 27693 - protein, 10 aa, synthetic construct
  REGION 1..10: note = DNA-dependent protein kinase catalytic subunit (2797-2806)
VAQRDPIIAK

SEQ ID NO: 27694 - protein, 9 aa, synthetic construct
  REGION 1..9: note = Tetratricopeptide repeat protein 21B (25-33)
VASEGIKRY

SEQ ID NO: 27695 - protein, 9 aa, synthetic construct
  REGION 1..9: note = Probable E3 ubiquitin-protein ligase HERC1 (1139-1147)
VDLERTIAL

SEQ ID NO: 27696 - protein, 9 aa, synthetic construct
  REGION 1..9: note = Cytoplasmic dynein 1 heavy chain 1 (795-803)
VEERNTISL

SEQ ID NO: 27697 - protein, 11 aa, synthetic construct
  REGION 1..11: note = L-dopachrome tautomerase (152-162)
VEETPGWPTTL

SEQ ID NO: 27698 - protein, 9 aa, synthetic construct
  REGION 1..9: note = Glycogen phosphorylase, brain form (505-513)
VEKIGEEFL

SEQ ID NO: 27699 - protein, 11 aa, synthetic construct
  REGION 1..11: note = Receptor-type tyrosine-protein phosphatase delta (635-645)
VEKQNGIITEY

SEQ ID NO: 27700 - protein, 8 aa, synthetic construct
  REGION 1..8: note = Phosphatidylinositol 3,4,5-trisphosphate-dependent Rac exchanger 1 protein (160-167)
VELNKIPT

SEQ ID NO: 27701 - protein, 9 aa, synthetic construct
  REGION 1..9: note = Prosaposin (299-307)
VEPIKKHEV

SEQ ID NO: 27702 - protein, 10 aa, synthetic construct
  REGION 1..10: note = Coiled-coil domain-containing protein 13 (514-523)
VESALTRPSL

SEQ ID NO: 27703 - protein, 12 aa, synthetic construct
  REGION 1..12: note = Protein ZGRF1 (799-810)
VEVETAREGKQY

SEQ ID NO: 27704 - protein, 11 aa, synthetic construct
  REGION 1..11: note = Proteasome subunit alpha type-1 (104-114)
VFDRPLPVSRL

SEQ ID NO: 27705 - protein, 11 aa, synthetic construct
  REGION 1..11: note = ATP-dependent RNA helicase DDX3X (408-418)
VGSTSENITQK

SEQ ID NO: 27706 - protein, 9 aa, synthetic construct
  REGION 1..9: note = Protocadherin-18 (261-269)
VGTLLLDLN

SEQ ID NO: 27707 - protein, 10 aa, synthetic construct
  REGION 1..10: note = THO complex subunit 4 (113-122)
VHYDRSGRSL

SEQ ID NO: 27708 - protein, 12 aa, synthetic construct
  REGION 1..12: note = Butyrophilin subfamily 3 member A3 secreted isoform (174-185)
VILDPDTANAIL

SEQ ID NO: 27709 - protein, 7 aa, synthetic construct
  REGION 1..7: note = Trafficking protein particle complex subunit 8 (106-112)
VITAGDY

SEQ ID NO: 27710 - protein, 10 aa, synthetic construct
  REGION 1..10: note = P antigen family member 5 (46-55)
VIVQQPTEEK

SEQ ID NO: 27711 - protein, 14 aa, synthetic construct
  REGION 1..14: note = Myosin-10 (20-33)
VIYNPATQADWTAK

SEQ ID NO: 27712 - protein, 11 aa, synthetic construct
  REGION 1..11: note = Protein-methionine sulfoxide oxidase MICAL1 (432-442)
VLAERESLYQL

SEQ ID NO: 27713 - protein, 10 aa, synthetic construct
  REGION 1..10: note = Protocadherin alpha-1 (636-645)
VLDEADLSRY

SEQ ID NO: 27714 - protein, 9 aa, synthetic construct
  REGION 1..9: note = NF-kappa-B inhibitor epsilon (286-294)
VLDIQNNLY

SEQ ID NO: 27715 - protein, 11 aa, synthetic construct
  REGION 1..11: note = Peroxisomal trans-2-enoyl-CoA reductase (146-156)
VLETNLTGTFY

SEQ ID NO: 27716 - protein, 11 aa, synthetic construct
  REGION 1..11: note = Translocon-associated protein subunit alpha (19-29)
VLFRGGPRGLL

SEQ ID NO: 27717 - protein, 9 aa, synthetic construct
  REGION 1..9: note = ETS translocation variant 5 (79-87)
VLHAPPPTK

SEQ ID NO: 27718 - protein, 9 aa, synthetic construct
  REGION 1..9: note = Sorting nexin-14 (176-184)
VLIRRIHKV

SEQ ID NO: 27719 - protein, 12 aa, synthetic construct
  REGION 1..12: note = Transcription initiation factor IIE subunit beta (280-291)
VLKDYSDITSSK

SEQ ID NO: 27720 - protein, 11 aa, synthetic construct
  REGION 1..11: note = Adenosylhomocysteinase 2 (123-133)
VLLAEGRLLNL

SEQ ID NO: 27721 - protein, 11 aa, synthetic construct
  REGION 1..11: note = Splicing factor 3B subunit 2 (163-173)
VLLEQERQQEI

SEQ ID NO: 27722 - protein, 13 aa, synthetic construct
  REGION 1..13: note = Sodium-dependent phosphate transporter 1 (75-87)
VLLGAKVSETIRK

SEQ ID NO: 27723 - protein, 10 aa, synthetic construct
  REGION 1..10: note = HCG2043033, isoform CRA_b (11-20)
VLMGLPLAQA

SEQ ID NO: 27724 - protein, 10 aa, synthetic construct
  REGION 1..10: note = Armadillo repeat-containing X-linked protein 1 (210-219)
VLNILERTND

SEQ ID NO: 27725 - protein, 9 aa, synthetic construct
  REGION 1..9: note = Protein GPR108 (359-367)
VLSDKEKKV

SEQ ID NO: 27726 - protein, 10 aa, synthetic construct
  REGION 1..10: note = Leucine-rich repeat-containing protein 1 (295-304)
VLTENQLLTL

SEQ ID NO: 27727 - protein, 11 aa, synthetic construct
  REGION 1..11: note = 2',3'-cyclic-nucleotide 3'-phosphodiesterase (126-136)
VLVEPKTAWRL

SEQ ID NO: 27728 - protein, 11 aa, synthetic construct
  REGION 1..11: note = Zinc finger CCHC domain-containing protein 14 (120-130)
VLWSDSSITSV

SEQ ID NO: 27729 - protein, 10 aa, synthetic construct
  REGION 1..10: note = ADP/ATP translocase 1 (288-297)
VLYDEIKKYV

SEQ ID NO: 27730 - protein, 12 aa, synthetic construct
  REGION 1..12: note = Sodium/potassium/calcium exchanger 5 (423-434)
VLYELGIIGNNK

SEQ ID NO: 27731 - protein, 11 aa, synthetic construct
  REGION 1..11: note = Cytoplasmic dynein 1 heavy chain 1 (3839-3849)
VLYENPNLKGV

SEQ ID NO: 27732 - protein, 15 aa, synthetic construct
  REGION 1..15: note Dolichyl-diphosphooligosaccharide-proteinosyltransferase subunit 4 (23-37)
VLYHYVAVNNPKKQE

SEQ ID NO: 27733 - protein, 13 aa, synthetic construct
  REGION 1..13: note = Ras-related protein Rab-27A (25-37)
VLYQYTDGKFNSK

SEQ ID NO: 27734 - protein, 8 aa, synthetic construct
  REGION 1..8: note = HLA class I histocompatibility antigen, A-29 alpha chain (3-10)
VMAPRTLL

SEQ ID NO: 27735 - protein, 9 aa, synthetic construct
  REGION 1..9: note = Embryonic stem cell-specific 5-hydroxymethylcytosine-binding protein (102-110)
VMEKRSFKV

SEQ ID NO: 27736 - protein, 11 aa, synthetic construct
  REGION 1..11: note = Ribosomal protein S6 kinase alpha-2 (56-66)
VMFTEEDVKFY

SEQ ID NO: 27737 - protein, 9 aa, synthetic construct
  REGION 1..9: note = Antigen KI-67 (115-123)
VMHTPPVLK

SEQ ID NO: 27738 - protein, 13 aa, synthetic construct
  REGION 1..13: note = Transient receptor potential cation channel subfamily V member 2 (253-265)
VMISDNSAENIAL

SEQ ID NO: 27739 - protein, 9 aa, synthetic construct
  REGION 1..9: note = Signal transducer and activator of transcription 1-alpha/beta (134-142)
VMLDKQKEL

SEQ ID NO: 27740 - protein, 10 aa, synthetic construct
  REGION 1..10: note = Poly(U)-binding-splicing factor PUF60 (175-184)
VMLGGRNIKV

SEQ ID NO: 27741 - protein, 9 aa, synthetic construct
  REGION 1..9: note = Transcriptional coactivator YAP1 (72-80)
VMNPKTANV

SEQ ID NO: 27742 - protein, 9 aa, synthetic construct
  REGION 1..9: note = CD63 antigen (111-119)
VMSEFNNNF

SEQ ID NO: 27743 - protein, 10 aa, synthetic construct
  REGION 1..10: note = Ras-related C3 botulinum toxin substrate 1 (44-53)
VMVDGKPVNL

SEQ ID NO: 27744 - protein, 11 aa, synthetic construct
  REGION 1..11: note = Uncharacterized protein C4orf36 (5-15)
VPRKNTVKTIL

SEQ ID NO: 27745 - protein, 9 aa, synthetic construct
  REGION 1..9: note = Zinc finger protein ZFAT (1182-1190)
VQQASVELA

SEQ ID NO: 27746 - protein, 9 aa, synthetic construct
  REGION 1..9: note = tRNA wybutosine-synthesizing protein 4 (287-295)
VQWDGRLYH

SEQ ID NO: 27747 - protein, 9 aa, synthetic construct
  REGION 1..9: note = Pre-mRNA-processing-splicing factor 8 (1168-1176)
VQWENSFVS

SEQ ID NO: 27748 - protein, 11 aa, synthetic construct
  REGION 1..11: note = Unconventional myosin-X (553-563)
VQYDVRGILEK

SEQ ID NO: 27749 - protein, 18 aa, synthetic construct
  REGION 1..18: note = Probable ATP-dependent RNA helicase DDX5 (550-567)
VSAGIQTSFRTGNPTGTY

SEQ ID NO: 27750 - protein, 9 aa, synthetic construct
  REGION 1..9: note = 60S ribosomal protein L24 (148-156)
VSAPRVGGK

SEQ ID NO: 27751 - protein, 9 aa, synthetic construct
  REGION 1..9: note = NADH dehydrogenase (ubiquinone) iron-sulfur protein 2, mitochondrial (8-16)
VSDGSSRPY

SEQ ID NO: 27752 - protein, 9 aa, synthetic construct
  REGION 1..9: note = Single Ig IL-1-related receptor (387-395)
VSDLGSRNY

SEQ ID NO: 27753 - protein, 9 aa, synthetic construct
  REGION 1..9: note = MAM domain-containingosylphosphatidylinositol anchor protein 1 (140-148)
VSDVRGNFY

SEQ ID NO: 27754 - protein, 11 aa, synthetic construct
  REGION 1..11: note = Protein eva-1 homolog A (27-37)
VSENPERAALY

SEQ ID NO: 27755 - protein, 9 aa, synthetic construct
  REGION 1..9: note = Clustered mitochondria protein homolog (512-520)
VSHPRYLEL

SEQ ID NO: 27756 - protein, 9 aa, synthetic construct
  REGION 1..9: note = ER degradation-enhancing alpha-mannosidase-like protein 2 (270-278)
VSMPVFQSL

SEQ ID NO: 27757 - protein, 11 aa, synthetic construct
  REGION 1..11: note = Transmembrane protein 50A (73-83)
VSNGQVRGDSY

SEQ ID NO: 27758 - protein, 12 aa, synthetic construct
  REGION 1..12: note = Natriuretic peptides A (87-98)
VSPAQRDGGALG

SEQ ID NO: 27759 - protein, 9 aa, synthetic construct
  REGION 1..9: note = Pre-mRNA-processing-splicing factor 8 (2131-2139)
VSPPDNPQV

SEQ ID NO: 27760 - protein, 11 aa, synthetic construct
  REGION 1..11: note = PRO2822 (92-102)
VSQDGLNLLTL

SEQ ID NO: 27761 - protein, 10 aa, synthetic construct
  REGION 1..10: note = PAB-dependent poly(A)-specific ribonuclease subunit PAN3 (183-192)
VSQTPSSGQV

SEQ ID NO: 27762 - protein, 10 aa, synthetic construct
  REGION 1..10: note = Heat shock cognate 71 kDa protein (536-545)
VSSKNSLESY

SEQ ID NO: 27763 - protein, 9 aa, synthetic construct
  REGION 1..9: note = Zinc finger protein with KRAB and SCAN domains 2 (134-142)
VSSPVHREK

SEQ ID NO: 27764 - protein, 11 aa, synthetic construct
  REGION 1..11: note = Complex I assembly factor TMEM126B, mitochondrial (46-56)
VTDKLFVIDAL

SEQ ID NO: 27765 - protein, 9 aa, synthetic construct
  REGION 1..9: note = Uncharacterized protein C11orf63 (295-303)
VTDKTSIQN

SEQ ID NO: 27766 - protein, 9 aa, synthetic construct
  REGION 1..9: note = Receptor-type tyrosine-protein phosphatase zeta (705-713)
VTDLEMPHY

SEQ ID NO: 27767 - protein, 8 aa, synthetic construct
  REGION 1..8: note = F-box/LRR-repeat protein 7 (316-323)
VTDVGIRY

SEQ ID NO: 27768 - protein, 11 aa, synthetic construct
  REGION 1..11: note = Heterogeneous nuclear ribonucleoprotein Q (266-276)
VTEGLTDVILY

SEQ ID NO: 27769 - protein, 8 aa, synthetic construct
  REGION 1..8: note = Filamin-A (2353-2360)
VTEIDQDK

SEQ ID NO: 27770 - protein, 10 aa, synthetic construct
  REGION 1..10: note = 1-acyl-sn-glycerol-3-phosphate acyltransferase gamma (296-305)
VTEIEKGSSY

SEQ ID NO: 27771 - protein, 10 aa, synthetic construct
  REGION 1..10: note = Carbonic anhydrase-related protein (181-190)
VTEILQDIQY

SEQ ID NO: 27772 - protein, 10 aa, synthetic construct
  REGION 1..10: note = Short-chain-specific acyl-CoA dehydrogenase, mitochondrial (369-378)
VTEMPAERHY

SEQ ID NO: 27773 - protein, 9 aa, synthetic construct
  REGION 1..9: note = Tyrosine-protein kinase TXK (10-18)
VTENKITNL

SEQ ID NO: 27774 - protein, 7 aa, synthetic construct
  REGION 1..7: note = Integrin beta-3 (336-342)
VTENVVN

SEQ ID NO: 27775 - protein, 9 aa, synthetic construct
  REGION 1..9: note = Integrin beta-3 (336-344)
VTENVVNLY

SEQ ID NO: 27776 - protein, 12 aa, synthetic construct
  REGION 1..12: note = Integrin beta-3 (336-347)
VTENVVNLYQNY

SEQ ID NO: 27777 - protein, 10 aa, synthetic construct
  REGION 1..10: note = Myosin phosphatase Rho-interacting protein (65-74)
VTEYPVQRNY

SEQ ID NO: 27778 - protein, 9 aa, synthetic construct
  REGION 1..9: note = Lymphocyte antigen 6E (61-69)
VTFGHSLSK

SEQ ID NO: 27779 - protein, 9 aa, synthetic construct
  REGION 1..9: note = OX-2 membraneoprotein (76-84)
VTFSENHGV

SEQ ID NO: 27780 - protein, 10 aa, synthetic construct
  REGION 1..10: note = Annexin A9 (3-12)
VTGGKMAPSL

SEQ ID NO: 27781 - protein, 10 aa, synthetic construct
  REGION 1..10: note = Zinc finger FYVE domain-containing protein 16 (97-106)
VTGLDLLSSV

SEQ ID NO: 27782 - protein, 11 aa, synthetic construct
  REGION 1..11: note = Kinesin-like protein KIF6 (24-34)
VTIDDNKQILK

SEQ ID NO: 27783 - protein, 9 aa, synthetic construct
  REGION 1..9: note = RNA pseudouridylate synthase domain-containing protein 1 (112-120)
VTISHAIGR

SEQ ID NO: 27784 - protein, 9 aa, synthetic construct
  REGION 1..9: note = Endoribonuclease Dicer (827-835)
VTISIELKK

SEQ ID NO: 27785 - protein, 11 aa, synthetic construct
  REGION 1..11: note = FACT complex subunit SPT16 (3-13)
VTLDKDAYYRR

SEQ ID NO: 27786 - protein, 9 aa, synthetic construct
  REGION 1..9: note = Pappalysin-1 (689-697)
VTLEWFPPI

SEQ ID NO: 27787 - protein, 10 aa, synthetic construct
  REGION 1..10: note = Autophagy-related protein 9A (411-420)
VTLLGVTVTV

SEQ ID NO: 27788 - protein, 10 aa, synthetic construct
  REGION 1..10: note = WD repeat-containing protein 70 (23-32)
VTMGFTGFGK

SEQ ID NO: 27789 - protein, 11 aa, synthetic construct
  REGION 1..11: note = Small subunit processome component 20 homolog (830-840)
VTNPDIAAKKK

SEQ ID NO: 27790 - protein, 9 aa, synthetic construct
  REGION 1..9: note = DNA (cytosine-5)-methyltransferase 1 (1422-1430)
VTNPEPMGK

SEQ ID NO: 27791 - protein, 9 aa, synthetic construct
  REGION 1..9: note = Beta-parvin (138-146)
VTQSEIGQK

SEQ ID NO: 27792 - protein, 9 aa, synthetic construct
  REGION 1..9: note = Polymerase delta-interacting protein 3 (410-418)
VTTQPTEFK

SEQ ID NO: 27793 - protein, 10 aa, synthetic construct
  REGION 1..10: note = Polycystin-1 (1443-1452)
VTVTASNNIS

SEQ ID NO: 27794 - protein, 9 aa, synthetic construct
  REGION 1..9: note = LisH domain-containing protein ARMC9 (225-233)
VTYLKRYNK

SEQ ID NO: 27795 - protein, 11 aa, synthetic construct
  REGION 1..11: note = Trafficking protein particle complex subunit 2-like protein (8-18)
VVDEKISAMGK

SEQ ID NO: 27796 - protein, 10 aa, synthetic construct
  REGION 1..10: note = Beta-actin-like protein 2 (10-19)
VVDNGSGMCK

SEQ ID NO: 27797 - protein, 12 aa, synthetic construct
  REGION 1..12: note = Beta-actin-like protein 2 (10-21)
VVDNGSGMCKAG

SEQ ID NO: 27798 - protein, 9 aa, synthetic construct
  REGION 1..9: note = Cytosolic acyl coenzyme A thioester hydrolase (273-281)
VVDSSQKRY

SEQ ID NO: 27799 - protein, 10 aa, synthetic construct
  REGION 1..10: note = Catalase (55-64)
VVFTDEMAHF

SEQ ID NO: 27800 - protein, 11 aa, synthetic construct
  REGION 1..11: note = RAB6A-GEF complex partner protein 2 (239-249)
VVGTLNLGEGT

SEQ ID NO: 27801 - protein, 11 aa, synthetic construct
  REGION 1..11: note = Retroviral-like aspartic protease 1 (242-252)
VVKVANGAEMK

SEQ ID NO: 27802 - protein, 11 aa, synthetic construct
  REGION 1..11: note = Thiosulfate sulfurtransferase (97-107)
VVYDGEHLGSF

SEQ ID NO: 27803 - protein, 9 aa, synthetic construct
  REGION 1..9: note = Keratinocyte-associated transmembrane protein 2 (212-220)
VVYITYHNK

SEQ ID NO: 27804 - protein, 13 aa, synthetic construct
  REGION 1..13: note = HLA class I histocompatibility antigen, B-40 alpha chain (243-255)
WAAVVVPSGEEQR

SEQ ID NO: 27805 - protein, 9 aa, synthetic construct
  REGION 1..9: note = Glycerol kinase (156-164)
WLLDNVRKV

SEQ ID NO: 27806 - protein, 11 aa, synthetic construct
  REGION 1..11: note = Protein transport protein Sec61 subunit alpha isoform 1 (324-334)
WSDTSSGGPAR

SEQ ID NO: 27807 - protein, 10 aa, synthetic construct
  REGION 1..10: note = Ubiquitin carboxyl-terminal hydrolase 48 (533-542)
YAADIFYSRY

SEQ ID NO: 27808 - protein, 9 aa, synthetic construct
  REGION 1..9: note = RNA-binding protein 14 (528-536)
YAAQQHPQA

SEQ ID NO: 27809 - protein, 11 aa, synthetic construct
  REGION 1..11: note = Unconventional myosin-Va (62-72)
YADDPKKYQSY

SEQ ID NO: 27810 - protein, 10 aa, synthetic construct
  REGION 1..10: note = V-type proton ATPase subunit B, kidney isoform (384-393)
YAIGKDVQAM

SEQ ID NO: 27811 - protein, 9 aa, synthetic construct
  REGION 1..9: note = Junction plakoglobin (245-253)
YAITTLHNL

SEQ ID NO: 27812 - protein, 9 aa, synthetic construct
  REGION 1..9: note = Threonine-tRNA ligase, mitochondrial (546-554)
YAKEAQQSL

SEQ ID NO: 27813 - protein, 9 aa, synthetic construct
  REGION 1..9: note = G2/mitotic-specific cyclin-B2 (368-376)
YASSKLLKI

SEQ ID NO: 27814 - protein, 9 aa, synthetic construct
  REGION 1..9: note = Heterogeneous nuclear ribonucleoprotein L (430-438)
YAVDRAITH

SEQ ID NO: 27815 - protein, 11 aa, synthetic construct
  REGION 1..11: note = Protein-methionine sulfoxide oxidase MICAL3 (803-813)
YAYDIEDGKFY

SEQ ID NO: 27816 - protein, 9 aa, synthetic construct
  REGION 1..9: note = Hypoxia-inducible factor 1-alpha (254-262)
YCDERITEL

SEQ ID NO: 27817 - protein, 9 aa, synthetic construct
  REGION 1..9: note = Zinc finger protein 362 (287-295)
YCDKSFRQL

SEQ ID NO: 27818 - protein, 13 aa, synthetic construct
  REGION 1..13: note = Cofilin-1 (85-97)
YDATYETKESKKE

SEQ ID NO: 27819 - protein, 10 aa, synthetic construct
  REGION 1..10: note = Melanoma antigen preferentially expressed in tumors (448-457)
YEDIHGTLHL

SEQ ID NO: 27820 - protein, 9 aa, synthetic construct
  REGION 1..9: note = Transmembrane protein 9B (93-101)
YEERSSVTI

SEQ ID NO: 27821 - protein, 11 aa, synthetic construct
  REGION 1..11: note = Ubiquitin-like protein 5 (60-70)
YEIHDGMNLEL

SEQ ID NO: 27822 - protein, 12 aa, synthetic construct
  REGION 1..12: note = HLA class I histocompatibility antigen, alpha chain E (124-135)
YEQFAYDGKDYL

SEQ ID NO: 27823 - protein, 9 aa, synthetic construct
  REGION 1..9: note = Carbohydrate sulfotransferase 14 (199-207)
YGAEIVRRY

SEQ ID NO: 27824 - protein, 9 aa, synthetic construct
  REGION 1..9: note = RNA-binding protein 14 (474-482)
YGAQASMGL

SEQ ID NO: 27825 - protein, 11 aa, synthetic construct
  REGION 1..11: note = Transcription factor SOX-10 (412-422)
YGHSGQASGLY

SEQ ID NO: 27826 - protein, 12 aa, synthetic construct
  REGION 1..12: note = Heterogeneous nuclear ribonucleoproteins A2/B1 (243-254)
YGSGNYNDFGNY

SEQ ID NO: 27827 - protein, 10 aa, synthetic construct
  REGION 1..10: note = RNMT-activating mini protein (107-116)
YGYNQRPPYG

SEQ ID NO: 27828 - protein, 10 aa, synthetic construct
  REGION 1..10: note = Histone deacetylase complex subunit SAP130 (880-889)
YIDEEGVRYV

SEQ ID NO: 27829 - protein, 11 aa, synthetic construct
  REGION 1..11: note = Cleft lip and palate transmembrane protein 1 (409-419)
YILDNETNFVV

SEQ ID NO: 27830 - protein, 11 aa, synthetic construct
  REGION 1..11: note = Negative elongation factor C/D (47-57)
YIMEPSIFNTL

SEQ ID NO: 27831 - protein, 9 aa, synthetic construct
  REGION 1..9: note = Filamin-B (1580-1588)
YIPDKTGRY

SEQ ID NO: 27832 - protein, 9 aa, synthetic construct
  REGION 1..9: note = Beta-catenin-interacting protein 1 (15-23)
YIQQKVRVL

SEQ ID NO: 27833 - protein, 10 aa, synthetic construct
  REGION 1..10: note = Signal recognition particle 9 kDa protein (18-27)
YLADPMKARV

SEQ ID NO: 27834 - protein, 9 aa, synthetic construct
  REGION 1..9: note = S-phase kinase-associated protein 1 (33-41)
YLDIKGLLD

SEQ ID NO: 27835 - protein, 10 aa, synthetic construct
  REGION 1..10: note = Procollagen-lysine,2-oxoglutarate 5-dioxygenase 3 (199-208)
YLDPGLREKL

SEQ ID NO: 27836 - protein, 10 aa, synthetic construct
  REGION 1..10: note = Protein dpy-30 homolog (56-65)
YLDQTVVPIL

SEQ ID NO: 27837 - protein, 11 aa, synthetic construct
  REGION 1..11: note = Lysyl oxidase homolog 4 (547-557)
YLEDRPLSQLY

SEQ ID NO: 27838 - protein, 12 aa, synthetic construct
  REGION 1..12: note = Ectonucleotide pyrophosphatase/phosphodiesterase family member 1 (319-330)
YLEEPDSSGHSY

SEQ ID NO: 27839 - protein, 9 aa, synthetic construct
  REGION 1..9: note = HLA class I histocompatibility antigen, Cw-8 alpha chain (170-178)
YLENGKKTL

SEQ ID NO: 27840 - protein, 11 aa, synthetic construct
  REGION 1..11: note = Prolyl endopeptidase (353-363)
YLHDVKNILQL

SEQ ID NO: 27841 - protein, 11 aa, synthetic construct
  REGION 1..11: note = Unconventional myosin-Vb (79-89)
YLHEPAVLHNL

SEQ ID NO: 27842 - protein, 11 aa, synthetic construct
  REGION 1..11: note = Dystonin (981-991)
YLINEIDRIRA

SEQ ID NO: 27843 - protein, 11 aa, synthetic construct
  REGION 1..11: note = Tubulin polyglutamylase TTLL5 (191-201)
YLINNPNQISL

SEQ ID NO: 27844 - protein, 12 aa, synthetic construct
  REGION 1..12: note = Vacuolar protein sorting-associated protein 13C (2639-2650)
YLLEGTAETHEL

SEQ ID NO: 27845 - protein, 9 aa, synthetic construct
  REGION 1..9: note = Unconventional myosin-XIX (218-226)
YLLEKTRVA

SEQ ID NO: 27846 - protein, 10 aa, synthetic construct
  REGION 1..10: note = Transforming growth factor-beta receptor-associated protein 1 (431-440)
YLNEVRSTEV

SEQ ID NO: 27847 - protein, 11 aa, synthetic construct
  REGION 1..11: note = CD302 antigen (163-173)
YLSDNHILISA

SEQ ID NO: 27848 - protein, 11 aa, synthetic construct
  REGION 1..11: note = GPI inositol-deacylase (41-51)
YMFEYPEYQKI

SEQ ID NO: 27849 - protein, 11 aa, synthetic construct
  REGION 1..11: note = Methyl-CpG-binding domain protein 4 (530-540)
YPIELHGIGKY

SEQ ID NO: 27850 - protein, 9 aa, synthetic construct
  REGION 1..9: note = TRIO and F-actin-binding protein (394-402)
YQEELSREL

SEQ ID NO: 27851 - protein, 9 aa, synthetic construct
  REGION 1..9: note = ATP synthase-coupling factor 6, mitochondrial (75-83)
YQQELEREL

SEQ ID NO: 27852 - protein, 11 aa, synthetic construct
  REGION 1..11: note = Caprin-1 (665-675)
YQRDGYQQNFK

SEQ ID NO: 27853 - protein, 10 aa, synthetic construct
  REGION 1..10: note = Melanocyte protein PMEL (485-494)
YRYGSFSVTL

SEQ ID NO: 27854 - protein, 10 aa, synthetic construct
  REGION 1..10: note = PDZ and LIM domain protein 2 (315-324)
YSAPATLSSR

SEQ ID NO: 27855 - protein, 15 aa, synthetic construct
  REGION 1..15: note = Interleukin enhancer-binding factor 3 (690-704)
YSDFFTDCYGYHDFG

SEQ ID NO: 27856 - protein, 9 aa, synthetic construct
  REGION 1..9: note = Sphingosine-1-phosphate lyase 1 (366-374)
YSDKKYRNY

SEQ ID NO: 27857 - protein, 17 aa, synthetic construct
  REGION 1..17: note = Cold-inducible RNA-binding protein (151-167)
YSDRSSGGSYRDSYDSY

SEQ ID NO: 27858 - protein, 10 aa, synthetic construct
  REGION 1..10: note = AF4/FMR2 family member 2 (1092-1101)
YSETVELLRY

SEQ ID NO: 27859 - protein, 15 aa, synthetic construct
  REGION 1..15: note = Ribonucleoprotein PTB-binding 1 (601-615)
YSFDYPSDMGPRRLF

SEQ ID NO: 27860 - protein, 15 aa, synthetic construct
  REGION 1..15: note = Heterogeneous nuclear ribonucleoprotein A1 (260-274)
YSGGSRGYGSGGQGY

SEQ ID NO: 27861 - protein, 13 aa, synthetic construct
  REGION 1..13: note = Interleukin enhancer-binding factor 3 (624-636)
YSGSGGRSGGNSY

SEQ ID NO: 27862 - protein, 13 aa, synthetic construct
  REGION 1..13: note = Heterogeneous nuclear ribonucleoprotein D-like (222-234)
YSGYGGYDYTGYN

SEQ ID NO: 27863 - protein, 14 aa, synthetic construct
  REGION 1..14: note = Heterogeneous nuclear ribonucleoprotein D-like (222-235)
YSGYGGYDYTGYNY

SEQ ID NO: 27864 - protein, 14 aa, synthetic construct
  REGION 1..14: note = Caprin-1 (662-675)
YSGYQRDGYQQNFK

SEQ ID NO: 27865 - protein, 8 aa, synthetic construct
  REGION 1..8: note = Transmembrane protein 214 (171-178)
YSLVSREL

SEQ ID NO: 27866 - protein, 19 aa, synthetic construct
  REGION 1..19: note = Cold-inducible RNA-binding protein (142-160)
YSSRSQSGGYSDRSSGGSY

SEQ ID NO: 27867 - protein, 9 aa, synthetic construct
  REGION 1..9: note = Condensin complex subunit 2 (428-436)
YSYFSPRTM

SEQ ID NO: 27868 - protein, 8 aa, synthetic construct
  REGION 1..8: note = CBP80/20-dependent translation initiation factor (506-513)
YTCLRELL

SEQ ID NO: 27869 - protein, 12 aa, synthetic construct
  REGION 1..12: note = Transcription factor SOX-10 (369-380)
YTDQPSTSQIAY

SEQ ID NO: 27870 - protein, 14 aa, synthetic construct
  REGION 1..14: note = Sialidase-1 (400-413)
YTESISVAKISVYG

SEQ ID NO: 27871 - protein, 9 aa, synthetic construct
  REGION 1..9: note = Metalloproteinase inhibitor 3 (48-56)
YTIKQMKMY

SEQ ID NO: 27872 - protein, 9 aa, synthetic construct
  REGION 1..9: note = Nodal modulator 2 (59-67)
YTKHGTLKY

SEQ ID NO: 27873 - protein, 12 aa, synthetic construct
  REGION 1..12: note = Cyclin-dependent kinase 1 (4-15)
YTKIEKIGEGTY

SEQ ID NO: 27874 - protein, 11 aa, synthetic construct
  REGION 1..11: note = Syndecan-3 (347-357)
YTLEEPKQASV

SEQ ID NO: 27875 - protein, 9 aa, synthetic construct
  REGION 1..9: note = Nuclear receptor ROR-beta (229-237)
YTMEELHQL

SEQ ID NO: 27876 - protein, 15 aa, synthetic construct
  REGION 1..15: note = Caprin-1 (651-665)
YTQSQFSAPRDYSGY

SEQ ID NO: 27877 - protein, 9 aa, synthetic construct
  REGION 1..9: note = ATP-binding cassette sub-family B member 8, mitochondrial (162-170)
YTRDHVGSF

SEQ ID NO: 27878 - protein, 9 aa, synthetic construct
  REGION 1..9: note = ATP-dependent 6-phosphofructokinase, platelet type (378-386)
YTTDFIYQL

SEQ ID NO: 27879 - protein, 11 aa, synthetic construct
  REGION 1..11: note = Sulfhydryl oxidase 2 (323-333)
YTVDLESGLHY

SEQ ID NO: 27880 - protein, 9 aa, synthetic construct
  REGION 1..9: note = ER degradation-enhancing alpha-mannosidase-like protein 2 (322-330)
YTVEKREGY

SEQ ID NO: 27881 - protein, 11 aa, synthetic construct
  REGION 1..11: note = Membrane-associated transporter protein (439-449)
YTVPFNLITEY

SEQ ID NO: 27882 - protein, 9 aa, synthetic construct
  REGION 1..9: note Dolichyl-diphosphooligosaccharide-proteinosyltransferase 48 kDa subunit (325-333)
YTVTDLVEY

SEQ ID NO: 27883 - protein, 12 aa, synthetic construct
  REGION 1..12: note = Sulfhydryl oxidase 1 (728-739)
YTYFQAKIRALK

SEQ ID NO: 27884 - protein, 10 aa, synthetic construct
  REGION 1..10: note = Eukaryotic translation initiation factor 3 subunit E (286-295)
YTYKDPITEF

SEQ ID NO: 27885 - protein, 11 aa, synthetic construct
  REGION 1..11: note = ATP-binding cassette sub-family A member 7 (1610-1620)
YVAPANLPALL

SEQ ID NO: 27886 - protein, 11 aa, synthetic construct
  REGION 1..11: note = General transcription factor 3C polypeptide 1 (627-637)
YVDDASWMRYI

SEQ ID NO: 27887 - protein, 9 aa, synthetic construct
  REGION 1..9: note = Spectrin alpha chain, non-erythrocytic 1 (2453-2461)
YVDGKGREL

SEQ ID NO: 27888 - protein, 11 aa, synthetic construct
  REGION 1..11: note = Tribbles homolog 1 (157-167)
YVFFEKDFGDM

SEQ ID NO: 27889 - protein, 9 aa, synthetic construct
  REGION 1..9: note = Kelch domain-containing protein 10 (220-228)
YVFGGTTGY

SEQ ID NO: 27890 - protein, 10 aa, synthetic construct
  REGION 1..10: note = Actin, aortic smooth muscle (55-64)
YVGDEAQSKR

SEQ ID NO: 27891 - protein, 11 aa, synthetic construct
  REGION 1..11: note = Actin, aortic smooth muscle (55-65)
YVGDEAQSKRG

SEQ ID NO: 27892 - protein, 11 aa, synthetic construct
  REGION 1..11: note = E3 ubiquitin-protein ligase HUWE1 (1115-1125)
YVGIATLIANY

SEQ ID NO: 27893 - protein, 10 aa, synthetic construct
  REGION 1..10: note = Ankyrin repeat and SAM domain-containing protein 1A (113-122)
YVHSFLSSGY

SEQ ID NO: 27894 - protein, 12 aa, synthetic construct
  REGION 1..12: note = Cytospin-A (477-488)
YVIDEDVKSGRY

SEQ ID NO: 27895 - protein, 13 aa, synthetic construct
  REGION 1..13: note = Cytospin-A (477-489)
YVIDEDVKSGRYM

SEQ ID NO: 27896 - protein, 9 aa, synthetic construct
  REGION 1..9: note = Kelch-like protein 42 (328-336)
YVIGGYTTR

SEQ ID NO: 27897 - protein, 9 aa, synthetic construct
  REGION 1..9: note = Lysosome-associated membraneoprotein 2 (396-404)
YVIGRRKSY

SEQ ID NO: 27898 - protein, 12 aa, synthetic construct
  REGION 1..12: note = Lysosome-associated membraneoprotein 2 (396-407)
YVIGRRKSYAGY

SEQ ID NO: 27899 - protein, 11 aa, synthetic construct
  REGION 1..11: note = Tyrosinase (149-159)
YVIPIGTYGQM

SEQ ID NO: 27900 - protein, 10 aa, synthetic construct
  REGION 1..10: note = Partner of Y14 and mago (5-14)
YVTDETGGKY

SEQ ID NO: 27901 - protein, 12 aa, synthetic construct
  REGION 1..12: note = Solute carrier family 25 member 33 (176-187)
YVYQTEGIRGFY

SEQ ID NO: 27902 - protein, 10 aa, synthetic construct
  REGION 1..10: note = Plexin-A1 (224-233)
YVYSFRSEQF

SEQ ID NO: 27903 - protein, 9 aa, synthetic construct
  REGION 1..9: note = L-dopachrome tautomerase (190-198)
YYSVRDTLL

SEQ ID NO: 27904 - protein, 10 aa, synthetic construct
  REGION 1..10: note = GTPase Kras (52-61) mod
LLDILDTAGL

SEQ ID NO: 27905 - protein, 9 aa, synthetic construct
  REGION 1..9: note = GTPase Kras (5-13) mod
KLVVVGAGV

SEQ ID NO: 27906 - protein, 10 aa, synthetic construct
  REGION 1..10: note = GTPase Kras (5-14) mod
KLVVVGAAGV

SEQ ID NO: 27907 - protein, 11 aa, synthetic construct
  REGION 1..11: note = GTPase Kras (51-61) mod
CLLDILDTAGL

SEQ ID NO: 27908 - protein, 9 aa, synthetic construct
  REGION 1..9: note = GTPase Kras (51-59)
CLLDILDTA

SEQ ID NO: 27909 - protein, 9 aa, synthetic construct
  REGION 1..9: note = GTPase Kras (5-13) mod
KLVVVGACV

SEQ ID NO: 27910 - protein, 10 aa, synthetic construct
  REGION 1..10: note = GTPase Kras (5-14)
KLVVVGAGGV

SEQ ID NO: 27911 - protein, 10 aa, synthetic construct
  REGION 1..10: note = GTPase Kras (5-14) mod
KLVVVGASGV

SEQ ID NO: 27912 - protein, 10 aa, synthetic construct
  REGION 1..10: note = GTPase Kras (5-14) mod
KLVVVGADGV

SEQ ID NO: 27913 - protein, 10 aa, synthetic construct
  REGION 1..10: note = GTPase Kras (5-14) mod
KLVVVGACGV

SEQ ID NO: 27914 - protein, 9 aa, synthetic construct
  REGION 1..9: note = GTPase Kras (1-9)
MTEYKLVVV

SEQ ID NO: 27915 - protein, 10 aa, synthetic construct
  REGION 1..10: note = GTPase Kras (5-14) mod
KLVVVGAVGV

SEQ ID NO: 27916 - protein, 32 aa, synthetic construct
  REGION 1..32: note = GTPase Kras (1-33) mod
MTEYKLVVVGAAGVGKSALTIQLIQNHFVDEY

SEQ ID NO: 27917 - protein, 32 aa, synthetic construct
  REGION 1..32: note = GTPase Kras (1-33) mod
MTEYKLVVVGASGVGKSALTIQLIQNHFVDEY

SEQ ID NO: 27918 - protein, 32 aa, synthetic construct
  REGION 1..32: note = GTPase Kras (1-33) mod
MTEYKLVVVGAGDVGKSALTIQLIQNHFVDEY

SEQ ID NO: 27919 - protein, 25 aa, synthetic construct
  REGION 1..25: note = GTPase Kras (1-26) mod
MTEYNLVVVGAGGVGKSALTIQLIQ

SEQ ID NO: 27920 - protein, 41 aa, synthetic construct
  REGION 1..41: note = GTPase Kras mod (3-43)
SYRKQVVIDGETCLLDILDTTGQEEYSAMRDQYMRTGEGFL

SEQ ID NO: 27921 - protein, 9 aa, synthetic construct
  REGION 1..9: note = BRAF (597-605) V600E
LATEKSRWS

SEQ ID NO: 27922 - protein, 10 aa, synthetic construct
  REGION 1..10: note = BRAF (597-606) V600E
LATEKSRWSG

SEQ ID NO: 27923 - protein, 10 aa, synthetic construct
  REGION 1..10: note = BRAF(597-606) V600M
LATMKSRWSG

SEQ ID NO: 27924 - protein, 9 aa, synthetic construct
  REGION 1..9: note = p53 wt (65-73)
RMPEAAPPV

SEQ ID NO: 27925 - protein, 9 aa, synthetic construct
  REGION 1..9: note = p53 wt (149-157)
STPPPGTRV

SEQ ID NO: 27926 - protein, 11 aa, synthetic construct
  REGION 1..11: note = p53 wt (187-197)
GLAPPQHLIRV

SEQ ID NO: 27927 - protein, 9 aa, synthetic construct
  REGION 1..9: note = p53 wt (217-225)
VVPYEPPEV

SEQ ID NO: 27928 - protein, 9 aa, synthetic construct
  REGION 1..9: note = p53 wt (264-272)
LLGRNSFEV

SEQ ID NO: 27929 - protein, 9 aa, synthetic construct
  REGION 1..9: note = p53 wt (125134)
TYPALNKMF

SEQ ID NO: 27930 - protein, 9 aa, synthetic construct
  REGION 1..9: note = p53 wt (161169)
AIYKQSQHM

SEQ ID NO: 27931 - protein, 9 aa, synthetic construct
  REGION 1..9: note = p53 wt (204212)
EYLDDRNTF

SEQ ID NO: 27932 - protein, 14 aa, synthetic construct
  REGION 1..14: note = p53 wt (108-122)
GFRLGFLHSGTASV

SEQ ID NO: 27933 - protein, 14 aa, synthetic construct
  REGION 1..14: note = p53 wt (110-124)
RLGFLHSGTASVTC

SEQ ID NO: 27934 - protein, 13 aa, synthetic construct
  REGION 1..13: note = p53 wt (25-35)
LWKLLPENNVLSP

SEQ ID NO: 27935 - protein, 15 aa, synthetic construct
  REGION 1..15: note = p53 wt (108-122)
GFRLGFLHSGTAKSV

SEQ ID NO: 27936 - protein, 14 aa, synthetic construct
  REGION 1..14: note = p53 wt (153-166)
PGTRVRAMAIYKQS

SEQ ID NO: 27937 - protein, 41 aa, synthetic construct
  REGION 1..41: note = BRAF (442-482)
GRRDSSDDWEIPDGQITVGQIIGSGSFGTVYKGKWHGDVAV

SEQ ID NO: 27938 - protein, 41 aa, synthetic construct
  REGION 1..41: note = BRAF (443-483)
RRDSSDDWEIPDGQITVGQRSGSGSFGTVYKGKWHGDVAVK

SEQ ID NO: 27939 - protein, 41 aa, synthetic construct
  REGION 1..41: note = BRAF (444-484)
RDSSDDWEIPDGQITVGQRIESGSFGTVYKGKWHGDVAVKM

SEQ ID NO: 27940 - protein, 41 aa, synthetic construct
  REGION 1..41: note = BRAF (581-621)
NIFLHEDLTVKIGDFGLATVESRWSGSHQFEQLSGSILWMA

SEQ ID NO: 27941 - protein, 41 aa, synthetic construct
  REGION 1..41: note = BRAF (446-486)
SSDDWEIPDGQITVGQRIGSVSFGTVYKGKWHGDVAVKMLN

SEQ ID NO: 27942 - protein, 41 aa, synthetic construct
  REGION 1..41: note = BRAF (577-617)
LKSNNIFLHEDLTVKIGDFGRATVKSRWSGSHQFEQLSGSI

SEQ ID NO: 27943 - protein, 41 aa, synthetic construct
  REGION 1..41: note = BRAF (449-489)
DWEIPDGQITVGQRIGSGSFATVYKGKWHGDVAVKMLNVTA

SEQ ID NO: 27944 - protein, 41 aa, synthetic construct
  REGION 1..41: note = BRAF (449-489)
DWEIPDGQITVGQRIGSGSFRTVYKGKWHGDVAVKMLNVTA

SEQ ID NO: 27945 - protein, 41 aa, synthetic construct
  REGION 1..41: note = BRAF (574-614)
HRDLKSNNIFLHEDLTVKIGGFGLATVKSRWSGSHQFEQLS

SEQ ID NO: 27946 - RNA, 27 nt, synthetic construct
  misc_feature 1..27: note = Melanoma antigen recognized by T-cells 1 (27-35)
  source 1..27: mol_type = other RNA
gccgccggcatcgggatcctgaccgtg

SEQ ID NO: 27947 - RNA, 27 nt, synthetic construct
  misc_feature 1..27: note = Eukaryotic translation initiation factor 4 gamma 1 (1073-1081)
  source 1..27: mol_type = other RNA
gccgcccgccccgcgaccagcaccctg

SEQ ID NO: 27948 - RNA, 33 nt, synthetic construct
  misc_feature 1..33: note = Histone H1.2 (49-59)
  source 1..33: mol_type = other RNA
gccgccagcaaggagcgctccggcgtgagcctg

SEQ ID NO: 27949 - RNA, 30 nt, synthetic construct
  misc_feature 1..30: note = Cyclin-dependent kinase 4 (23-32)
  source 1..30: mol_type = other RNA
gcctgcgacccccacagcggccacttcgtg

SEQ ID NO: 27950 - RNA, 30 nt, synthetic construct
  misc_feature 1..30: note = 40S ribosomal protein S21 (37-46)
  source 1..30: mol_type = other RNA
gccgaggtggacaaggtcaccggccgcttc

SEQ ID NO: 27951 - RNA, 27 nt, synthetic construct
  misc_feature 1..27: note = DNA replication licensing factor MCM4 (694-702)
  source 1..27: mol_type = other RNA
gcccacagcaccatcatgccccgcctg

SEQ ID NO: 27952 - RNA, 27 nt, synthetic construct
  misc_feature 1..27: note = Actin, gamma-enteric smooth muscle (277-285)
  source 1..27: mol_type = other RNA
gccctggcccccagcaccatgaagatc

SEQ ID NO: 27953 - RNA, 30 nt, synthetic construct
  misc_feature 1..30: note = Melanocyte protein PMEL (231-240)
  source 1..30: mol_type = other RNA
gccctggacggcgggaacaagcacttcctc

SEQ ID NO: 27954 - RNA, 27 nt, synthetic construct
  misc_feature 1..27: note = Phospholipid transfer protein (2-10)
  source 1..27: mol_type = other RNA
gccctgttcggcgccctcttcctggcg

SEQ ID NO: 27955 - RNA, 27 nt, synthetic construct
  misc_feature 1..27: note = Vimentin (332-340)
  source 1..27: mol_type = other RNA
gccctgaagggcaccaacgagagcctc

SEQ ID NO: 27956 - RNA, 27 nt, synthetic construct
  misc_feature 1..27: note = Eukaryotic translation initiation factor 3 subunit D (439-447)
  source 1..27: mol_type = other RNA
gccctgctcgccggcagcgagtacctg

SEQ ID NO: 27957 - RNA, 27 nt, synthetic construct
  misc_feature 1..27: note = Melanocyte protein PMEL (24-32)
  source 1..27: mol_type = other RNA
gccctgctcgccgtgggcgcgaccaag

SEQ ID NO: 27958 - RNA, 27 nt, synthetic construct
  misc_feature 1..27: note = Melanoma antigen recognized by T-cells 1 (56-64)
  source 1..27: mol_type = other RNA
gccctgatggacaagagcctccacgtg

SEQ ID NO: 27959 - RNA, 27 nt, synthetic construct
  misc_feature 1..27: note = Melanocyte protein PMEL (94-102)
  source 1..27: mol_type = other RNA
gccctgaacttccccggcagccagaag

SEQ ID NO: 27960 - RNA, 27 nt, synthetic construct
  misc_feature 1..27: note = Melanoma-associated antigen 1 (301-309)
  source 1..27: mol_type = other RNA
gccctgcgcgaggaggaggagggcgtg

SEQ ID NO: 27961 - RNA, 27 nt, synthetic construct
  misc_feature 1..27: note = Fructose-bisphosphate aldolase A (98-106)
  source 1..27: mol_type = other RNA
gccctgagcgaccaccacatctacctc

SEQ ID NO: 27962 - RNA, 36 nt, synthetic construct
  misc_feature 1..36: note = Guanine nucleotide-binding protein G(I)/G(S)/G(T) subunit beta-2 (167-178)
  source 1..36: mol_type = other RNA
gccctgtgggacatcgagaccggccagcagaccgtg

SEQ ID NO: 27963 - RNA, 27 nt, synthetic construct
  misc_feature 1..27: note = ER membrane protein complex subunit 7 (4-12)
  source 1..27: mol_type = other RNA
gccctgtggggcttcttccccgtgctc

SEQ ID NO: 27964 - RNA, 30 nt, synthetic construct
  misc_feature 1..30: note = Melanocyte protein PMEL (184-193)
  source 1..30: mol_type = other RNA
gccatgctgggcacccacaccatggaggtg

SEQ ID NO: 27965 - RNA, 27 nt, synthetic construct
  misc_feature 1..27: note = Actin, cytoplasmic 1 (14-22)
  source 1..27: mol_type = other RNA
gcccccgaggagcacccggtgctgctc

SEQ ID NO: 27966 - RNA, 27 nt, synthetic construct
  misc_feature 1..27: note = High mobility group protein B1 (94-102)
  source 1..27: mol_type = other RNA
gcccccaagcgcccgcccagcgccttc

SEQ ID NO: 27967 - RNA, 27 nt, synthetic construct
  misc_feature 1..27: note = Coiled-coil-helix-coiled-coil-helix domain-containing protein 2 (49-57)
  source 1..27: mol_type = other RNA
gccccccgccagccgggcctgatggcc

SEQ ID NO: 27968 - RNA, 27 nt, synthetic construct
  misc_feature 1..27: note = HLA class II histocompatibility antigen, DP beta 1 chain (9-17)
  source 1..27: mol_type = other RNA
gccccccgcaccgtggccctgaccgcg

SEQ ID NO: 27969 - RNA, 27 nt, synthetic construct
  misc_feature 1..27: note = 60S ribosomal protein L13 (189-197)
  source 1..27: mol_type = other RNA
gcccgcctgttcggcatccgggccaag

SEQ ID NO: 27970 - RNA, 27 nt, synthetic construct
  misc_feature 1..27: note = Thymosin beta-10 (16-24)
  source 1..27: mol_type = other RNA
gccagcttcgacaaggccaagctgaag

SEQ ID NO: 27971 - RNA, 27 nt, synthetic construct
  misc_feature 1..27: note = Guanine nucleotide-binding protein G(s) subunit alpha isoforms short (239-247)
  source 1..27: mol_type = other RNA
gccagctccagctacaacatggtgatc

SEQ ID NO: 27972 - RNA, 24 nt, synthetic construct
  misc_feature 1..24: note = Guanine nucleotide-binding protein subunit beta-2-like 1 (251-258)
  source 1..24: mol_type = other RNA
gccaccggccccagcatcaagatc

SEQ ID NO: 27973 - RNA, 27 nt, synthetic construct
  misc_feature 1..27: note = Bax inhibitor 1 (91-99)
  source 1..27: mol_type = other RNA
gcctacgtgcacatggtcacccacttc

SEQ ID NO: 27974 - RNA, 27 nt, synthetic construct
  misc_feature 1..27: note = Wilms tumor protein (235-243)
  source 1..27: mol_type = other RNA
tgcatgacctggaaccagatgaacctg

SEQ ID NO: 27975 - RNA, 27 nt, synthetic construct
  misc_feature 1..27: note = Melanocyte protein PMEL (647-655)
  source 1..27: mol_type = other RNA
tgccccatcggcgagaacagcccgctg

SEQ ID NO: 27976 - RNA, 48 nt, synthetic construct
  misc_feature 1..48: note = Gamma-secretase C-terminal fragment 59 (562-577)
  source 1..48: mol_type = other RNA
gacgccgagttccgccacgacagcggctacgaggtgcaccaccagaag

SEQ ID NO: 27977 - RNA, 51 nt, synthetic construct
  misc_feature 1..51: note = Gamma-secretase C-terminal fragment 59 (562-578)
  source 1..51: mol_type = other RNA
gacgccgagttccgccacgacagcggctacgaggtgcaccaccagaagctg

SEQ ID NO: 27978 - RNA, 27 nt, synthetic construct
  misc_feature 1..27: note = Thymidylate synthase (254-262)
  source 1..27: mol_type = other RNA
gacgcccacatctacctgaaccacatc

SEQ ID NO: 27979 - RNA, 27 nt, synthetic construct
  misc_feature 1..27: note = 60S ribosomal protein L10 (28-36)
  source 1..27: mol_type = other RNA
gacgccaagatccgcatcttcgacctg

SEQ ID NO: 27980 - RNA, 27 nt, synthetic construct
  misc_feature 1..27: note = Lys-63-specific deubiquitinase BRCC36 (221-229)
  source 1..27: mol_type = other RNA
gacgcctaccgccggatccacagcctg

SEQ ID NO: 27981 - RNA, 27 nt, synthetic construct
  misc_feature 1..27: note = Myelin basic protein (109-117)
  source 1..27: mol_type = other RNA
gacgagaaccccgtggtccacttcttc

SEQ ID NO: 27982 - RNA, 27 nt, synthetic construct
  misc_feature 1..27: note = Vimentin (219-227)
  source 1..27: mol_type = other RNA
gacctggagcgcaaggtggagagcctc

SEQ ID NO: 27983 - RNA, 45 nt, synthetic construct
  misc_feature 1..45: note = HLA class I histocompatibility antigen, A-2 alpha chain (29-43)
  source 1..45: mol_type = other RNA
gacacccagttcgtgcgcttcgacagcgacgccgcctcccagcgg

SEQ ID NO: 27984 - RNA, 54 nt, synthetic construct
  misc_feature 1..54: note = HLA class I histocompatibility antigen, A-2 alpha chain (29-46)
  source 1..54: mol_type = other RNA
gacacccagttcgtgcgcttcgacagcgacgccgcctcccagcggatggagccc

SEQ ID NO: 27985 - RNA, 30 nt, synthetic construct
  misc_feature 1..30: note = Melanoma antigen recognized by T-cells 1 (26-35)
  source 1..30: mol_type = other RNA
gaggccgccggcatcgggatcctgaccgtg

SEQ ID NO: 27986 - RNA, 27 nt, synthetic construct
  misc_feature 1..27: note = Melanoma-associated antigen 1 (161-169)
  source 1..27: mol_type = other RNA
gaggccgaccccaccggccacagctac

SEQ ID NO: 27987 - RNA, 27 nt, synthetic construct
  misc_feature 1..27: note = Ragulator complex protein LAMTOR5 (40-48)
  source 1..27: mol_type = other RNA
gagcacgccggcgtgatcagcgtcctg

SEQ ID NO: 27988 - RNA, 30 nt, synthetic construct
  misc_feature 1..30: note = Mart-1 (26-35)
  source 1..30: mol_type = other RNA
gagctggccggcatcgggatcctcaccgtg

SEQ ID NO: 27989 - RNA, 27 nt, synthetic construct
  misc_feature 1..27: note = 40S ribosomal protein S25 (75-83)
  source 1..27: mol_type = other RNA
gagcgcctgaagatccggggcagcctc

SEQ ID NO: 27990 - RNA, 27 nt, synthetic construct
  misc_feature 1..27: note = Actin, cytoplasmic 1 (364-372)
  source 1..27: mol_type = other RNA
gagagcggcccctccatcgtgcaccgc

SEQ ID NO: 27991 - RNA, 27 nt, synthetic construct
  misc_feature 1..27: note = POTE ankyrin domain family member F (825-833)
  source 1..27: mol_type = other RNA
gagaccttcaacacccccgccatgtac

SEQ ID NO: 27992 - RNA, 30 nt, synthetic construct
  misc_feature 1..30: note = Mortality factor 4-like protein 1 (312-321)
  source 1..30: mol_type = other RNA
gaggtggcccccccggagtaccaccgcaag

SEQ ID NO: 27993 - RNA, 27 nt, synthetic construct
  misc_feature 1..27: note = Melanoma-associated antigen 3 (168-176)
  source 1..27: mol_type = other RNA
gaggtggaccccatcggccacctgtac

SEQ ID NO: 27994 - RNA, 27 nt, synthetic construct
  misc_feature 1..27: note = Heme oxygenase 1 (103-111)
  source 1..27: mol_type = other RNA
gaggtgatcccctacaccccggccatg

SEQ ID NO: 27995 - RNA, 27 nt, synthetic construct
  misc_feature 1..27: note = G2/mitotic-specific cyclin-B1 (18-26)
  source 1..27: mol_type = other RNA
ttcgccttcgtgaccgacaacacctac

SEQ ID NO: 27996 - RNA, 27 nt, synthetic construct
  misc_feature 1..27: note = Proteasome subunit alpha type-5 (154-162)
  source 1..27: mol_type = other RNA
ttccacatggaccccagcggcaccttc

SEQ ID NO: 27997 - RNA, 27 nt, synthetic construct
  misc_feature 1..27: note = Protein THEMIS2 (597-605)
  source 1..27: mol_type = other RNA
ttcatcaaggacggcagctccacctac

SEQ ID NO: 27998 - RNA, 30 nt, synthetic construct
  misc_feature 1..30: note = Vimentin (123-132)
  source 1..30: mol_type = other RNA
ttcctggagcagcagaacaagatcctcctg

SEQ ID NO: 27999 - RNA, 30 nt, synthetic construct
  misc_feature 1..30: note = Fatty acid synthase (2335-2344)
  source 1..30: mol_type = other RNA
ttcctgttcgacggcagccccacctacgtg

SEQ ID NO: 28000 - RNA, 33 nt, synthetic construct
  misc_feature 1..33: note = Fatty acid synthase (2335-2345)
  source 1..33: mol_type = other RNA
ttcctgttcgacggcagccccacctacgtgctc

SEQ ID NO: 28001 - RNA, 27 nt, synthetic construct
  misc_feature 1..27: note = Mammaglobin-A (66-74)
  source 1..27: mol_type = other RNA
ttcctgaaccagaccgacgagaccctc

SEQ ID NO: 28002 - RNA, 27 nt, synthetic construct
  misc_feature 1..27: note = Melanoma-associated antigen 3 (271-279)
  source 1..27: mol_type = other RNA
ttcctgtggggcccccgcgccctcgtg

SEQ ID NO: 28003 - RNA, 27 nt, synthetic construct
  misc_feature 1..27: note = Actin-related protein 2 (27-35)
  source 1..27: mol_type = other RNA
ttccccgagcacatcttcccggccctg

SEQ ID NO: 28004 - RNA, 27 nt, synthetic construct
  misc_feature 1..27: note = 60S ribosomal protein L28 (38-46)
  source 1..27: mol_type = other RNA
ttccgctacaacggcctgatccaccgg

SEQ ID NO: 28005 - RNA, 27 nt, synthetic construct
  misc_feature 1..27: note = 60S acidic ribosomal protein P0 (67-75)
  source 1..27: mol_type = other RNA
ggccacctggagaacaaccccgccctc

SEQ ID NO: 28006 - RNA, 33 nt, synthetic construct
  misc_feature 1..33: note = Cellular tumor antigen p53 (62-72)
  source 1..33: mol_type = other RNA
ggcctggcccccccgcagcacctcatccgcgtg

SEQ ID NO: 28007 - RNA, 27 nt, synthetic construct
  misc_feature 1..27: note = Proteasome subunit beta type-3 (55-63)
  source 1..27: mol_type = other RNA
ggcctggccaccgacgtgcagaccgtc

SEQ ID NO: 28008 - RNA, 27 nt, synthetic construct
  misc_feature 1..27: note = DNA (cytosine-5)-methyltransferase 1 (425-433)
  source 1..27: mol_type = other RNA
ggcctgatcgagaagaacatcgagctc

SEQ ID NO: 28009 - RNA, 27 nt, synthetic construct
  misc_feature 1..27: note = Catenin beta-1 (400-408)
  source 1..27: mol_type = other RNA
ggcctgctcgggaccctggtgcagctg

SEQ ID NO: 28010 - RNA, 27 nt, synthetic construct
  misc_feature 1..27: note = Myosin-9 (338-346)
  source 1..27: mol_type = other RNA
ggcctgctccgcgtgatcagcggggtc

SEQ ID NO: 28011 - RNA, 30 nt, synthetic construct
  misc_feature 1..30: note = Reticulocalbin-2 (4-13)
  source 1..30: mol_type = other RNA
ggcccccgcaccgccgccctggggctcctg

SEQ ID NO: 28012 - RNA, 30 nt, synthetic construct
  misc_feature 1..30: note = Heterogeneous nuclear ribonucleoprotein A1 (339-348)
  source 1..30: mol_type = other RNA
ggcccctacgggggcgggggccagtacttc

SEQ ID NO: 28013 - RNA, 27 nt, synthetic construct
  misc_feature 1..27: note = 60S ribosomal protein L8 (127-135)
  source 1..27: mol_type = other RNA
ggccgcatcgacaagcccatcctgaag

SEQ ID NO: 28014 - RNA, 27 nt, synthetic construct
  misc_feature 1..27: note = Cellular tumor antigen p53 (5-13)
  source 1..27: mol_type = other RNA
ggccgcaacagcttcgaggtgcgggtc

SEQ ID NO: 28015 - RNA, 30 nt, synthetic construct
  misc_feature 1..30: note = Ribonucleoside-diphosphate reductase subunit M2 (238-247)
  source 1..30: mol_type = other RNA
ggcagcttcgcctccatcttctggctgaag

SEQ ID NO: 28016 - RNA, 27 nt, synthetic construct
  misc_feature 1..27: note = Melanocyte protein PMEL (467-475)
  source 1..27: mol_type = other RNA
ggcaccgccaccctgcgcctcgtgaag

SEQ ID NO: 28017 - RNA, 30 nt, synthetic construct
  misc_feature 1..30: note = Melanoma-associated antigen B2 (231-240)
  source 1..30: mol_type = other RNA
ggcgtgtacgacggggaggagcacagcgtc

SEQ ID NO: 28018 - RNA, 27 nt, synthetic construct
  misc_feature 1..27: note = Protein SSX2 (17-25)
  source 1..27: mol_type = other RNA
ggctacgaccagatcatgcccaagaag

SEQ ID NO: 28019 - RNA, 27 nt, synthetic construct
  misc_feature 1..27: note = Proliferating cell nuclear antigen (241-249)
  source 1..27: mol_type = other RNA
atcgccgacatgggccacctgaagtac

SEQ ID NO: 28020 - RNA, 27 nt, synthetic construct
  misc_feature 1..27: note = Receptor tyrosine-protein kinase erbB-2 (654-662)
  source 1..27: mol_type = other RNA
atcatcagcgccgtggtcggcatcctg

SEQ ID NO: 28021 - RNA, 27 nt, synthetic construct
  misc_feature 1..27: note = Heat shock protein HSP 90-beta (496-504)
  source 1..27: mol_type = other RNA
atcctggacaagaaggtggagaaggtc

SEQ ID NO: 28022 - RNA, 27 nt, synthetic construct
  misc_feature 1..27: note = Ornithine decarboxylase (23-31)
  source 1..27: mol_type = other RNA
atcctggaccagaagatcaacgaggtg

SEQ ID NO: 28023 - RNA, 27 nt, synthetic construct
  misc_feature 1..27: note = Ubiquitin-conjugating enzyme E2 E3 (97-105)
  source 1..27: mol_type = other RNA
atcctgggccccccggggagcgtgtac

SEQ ID NO: 28024 - RNA, 27 nt, synthetic construct
  misc_feature 1..27: note = Vimentin (130-138)
  source 1..27: mol_type = other RNA
atcctgctcgccgagctggagcagctg

SEQ ID NO: 28025 - RNA, 27 nt, synthetic construct
  misc_feature 1..27: note = 60S ribosomal protein L19 (137-145)
  source 1..27: mol_type = other RNA
atcctgatggagcacatccacaagctc

SEQ ID NO: 28026 - RNA, 27 nt, synthetic construct
  misc_feature 1..27: note = Small nuclear ribonucleoprotein-associated proteins B and B' (13-21)
  source 1..27: mol_type = other RNA
atcctgcaggacggccgcatcttcatc

SEQ ID NO: 28027 - RNA, 27 nt, synthetic construct
  misc_feature 1..27: note = Elongation factor 2 (161-169)
  source 1..27: mol_type = other RNA
atcctgaccgacatcaccaagggcgtg

SEQ ID NO: 28028 - RNA, 27 nt, synthetic construct
  misc_feature 1..27: note = Melanoma antigen recognized by T-cells 1 (32-40)
  source 1..27: mol_type = other RNA
atcctgaccgtgatcctcggcgtcctg

SEQ ID NO: 28029 - RNA, 27 nt, synthetic construct
  misc_feature 1..27: note = Putative small nuclear ribonucleoprotein G-like protein 15 (68-76)
  source 1..27: mol_type = other RNA
atcatgctggaggccctcgagcgcgtg

SEQ ID NO: 28030 - RNA, 27 nt, synthetic construct
  misc_feature 1..27: note = Serine-tRNA ligase, cytoplasmic (357-365)
  source 1..27: mol_type = other RNA
atcccctaccacatcgtgaacatcgtc

SEQ ID NO: 28031 - RNA, 48 nt, synthetic construct
  misc_feature 1..48: note = Beta-2-microglobulin (21-36)
  source 1..48: mol_type = other RNA
atccagcgcacccccaagatccaggtgtacagccggcacccggccgag

SEQ ID NO: 28032 - RNA, 27 nt, synthetic construct
  misc_feature 1..27: note = ADP/ATP translocase 2 (79-87)
  source 1..27: mol_type = other RNA
atccgctacttccccacccaggccctg

SEQ ID NO: 28033 - RNA, 27 nt, synthetic construct
  misc_feature 1..27: note = Acyl-CoA desaturase (20-28)
  source 1..27: mol_type = other RNA
atcaccgcccccccgagccgcgtgctg

SEQ ID NO: 28034 - RNA, 27 nt, synthetic construct
  misc_feature 1..27: note = Melanocyte protein PMEL (216-224)
  source 1..27: mol_type = other RNA
atcaccgaccaggtgcccttcagcgtc

SEQ ID NO: 28035 - RNA, 27 nt, synthetic construct
  misc_feature 1..27: note = Ubiquitin-60S ribosomal protein L40 (68-76)
  source 1..27: mol_type = other RNA
aaggagagcaccctgcacctcgtgctg

SEQ ID NO: 28036 - RNA, 54 nt, synthetic construct
  misc_feature 1..54: note = Receptor tyrosine-protein kinase erbB-2 (369-386)
  source 1..54: mol_type = other RNA
aagatcttcggcagcctggccttcctccccgagtccttcgacggggacccggcc

SEQ ID NO: 28037 - RNA, 45 nt, synthetic construct
  misc_feature 1..45: note = Protein SSX2 (45-59)
  source 1..45: mol_type = other RNA
aagatcttctacgtgtacatgaagcgcaagtacgaggccatgacc

SEQ ID NO: 28038 - RNA, 30 nt, synthetic construct
  misc_feature 1..30: note = Vimentin (236-245)
  source 1..30: mol_type = other RNA
aagctgcacgaggaggagatccaggagctc

SEQ ID NO: 28039 - RNA, 27 nt, synthetic construct
  misc_feature 1..27: note = Myosin-9 (1843-1851)
  source 1..27: mol_type = other RNA
aagctgaaggacgtgctcctgcaggtc

SEQ ID NO: 28040 - RNA, 30 nt, synthetic construct
  misc_feature 1..30: note = Prelamin-A/C (297-306)
  source 1..30: mol_type = other RNA
aagctgctcgagggcgaggaggagcgcctg

SEQ ID NO: 28041 - RNA, 27 nt, synthetic construct
  misc_feature 1..27: note = Mammaglobin-A (2-10)
  source 1..27: mol_type = other RNA
aagctgctcatggtgctgatgctggcc

SEQ ID NO: 28042 - RNA, 27 nt, synthetic construct
  misc_feature 1..27: note = Heat shock cognate 71 kDa protein (126-134)
  source 1..27: mol_type = other RNA
aagatgaaggagatcgccgaggcctac

SEQ ID NO: 28043 - RNA, 27 nt, synthetic construct
  misc_feature 1..27: note = Melanoma-associated antigen 2 (140-148)
  source 1..27: mol_type = other RNA
aagatggtggagctggtccacttcctc

SEQ ID NO: 28044 - RNA, 27 nt, synthetic construct
  misc_feature 1..27: note = Beta-adrenergic receptor kinase 1 (667-675)
  source 1..27: mol_type = other RNA
aagccccgcagcccggtggtcgagctg

SEQ ID NO: 28045 - RNA, 27 nt, synthetic construct
  misc_feature 1..27: note = Farnesyl pyrophosphate synthase (184-192)
  source 1..27: mol_type = other RNA
aagcgctacaagagcatcgtgaagtac

SEQ ID NO: 28046 - RNA, 27 nt, synthetic construct
  misc_feature 1..27: note = Cellular tumor antigen p53 (139-147)
  source 1..27: mol_type = other RNA
aagacctgccccgtgcagctgtgggtc

SEQ ID NO: 28047 - RNA, 27 nt, synthetic construct
  misc_feature 1..27: note = 40S ribosomal protein S8 (75-83)
  source 1..27: mol_type = other RNA
aagacccgcatcatcgacgtggtctac

SEQ ID NO: 28048 - RNA, 27 nt, synthetic construct
  misc_feature 1..27: note = Melanocyte protein PMEL (161-169)
  source 1..27: mol_type = other RNA
aagacctggggccagtactggcaggtg

SEQ ID NO: 28049 - RNA, 27 nt, synthetic construct
  misc_feature 1..27: note = Melanoma-associated antigen 1 (278-286)
  source 1..27: mol_type = other RNA
aaggtgctggagtacgtcatcaaggtg

SEQ ID NO: 28050 - RNA, 27 nt, synthetic construct
  misc_feature 1..27: note = Glutamate carboxypeptidase 2 (298-306)
  source 1..27: mol_type = other RNA
aagtacgccgacaagatctacagcatc

SEQ ID NO: 28051 - RNA, 27 nt, synthetic construct
  misc_feature 1..27: note = Serine/threonine-protein phosphatase PP1-beta catalytic subunit (112-120)
  source 1..27: mol_type = other RNA
aagtaccccgagaacttcttcctgctc

SEQ ID NO: 28052 - RNA, 30 nt, synthetic construct
  misc_feature 1..30: note = Mammaglobin-A (83-92)
  source 1..30: mol_type = other RNA
ctgatctacgacagctccctctgcgacctg

SEQ ID NO: 28053 - RNA, 27 nt, synthetic construct
  misc_feature 1..27: note = ATP-binding cassette sub-family F member 2 (251-259)
  source 1..27: mol_type = other RNA
ctgctcgacgagcccaccaaccacctg

SEQ ID NO: 28054 - RNA, 27 nt, synthetic construct
  misc_feature 1..27: note = Gamma-interferon-inducible lysosomal thiol reductase (24-32)
  source 1..27: mol_type = other RNA
ctgctcgacgtgcccaccgccgccgtc

SEQ ID NO: 28055 - RNA, 27 nt, synthetic construct
  misc_feature 1..27: note = Cellular tumor antigen p53 (264-272)
  source 1..27: mol_type = other RNA
ctgctcggccgcaacagcttcgaggtg

SEQ ID NO: 28056 - RNA, 30 nt, synthetic construct
  misc_feature 1..30: note = Gamma-interferon-inducible lysosomal thiol reductase (23-32)
  source 1..30: mol_type = other RNA
ctgctcctggacgtgcccaccgccgccgtc

SEQ ID NO: 28057 - RNA, 36 nt, synthetic construct
  misc_feature 1..36: note = Gamma-interferon-inducible lysosomal thiol reductase (15-26)
  source 1..36: mol_type = other RNA
ctgctcctggacgtgcccaccgccgccgtccaggcg

SEQ ID NO: 28058 - RNA, 30 nt, synthetic construct
  misc_feature 1..30: note = Stress-70 protein, mitochondrial (436-445)
  source 1..30: mol_type = other RNA
ctgctcctggacgtgacccccctgagcctc

SEQ ID NO: 28059 - RNA, 27 nt, synthetic construct
  misc_feature 1..27: note = Mucin-1 (12-20)
  source 1..27: mol_type = other RNA
ctgctcctgctgaccgtgctcaccgtc

SEQ ID NO: 28060 - RNA, 27 nt, synthetic construct
  misc_feature 1..27: note = Mammaglobin-A (4-12)
  source 1..27: mol_type = other RNA
ctgatggtgctcatgctggccgccctg

SEQ ID NO: 28061 - RNA, 27 nt, synthetic construct
  misc_feature 1..27: note = Melanocyte protein PMEL (527-535)
  source 1..27: mol_type = other RNA
ctgcccaaggaggcctgcatggagatc

SEQ ID NO: 28062 - RNA, 27 nt, synthetic construct
  misc_feature 1..27: note = Rac GTPase-activating protein 1 (403-411)
  source 1..27: mol_type = other RNA
ctgccccaggccaaccgcgacaccctc

SEQ ID NO: 28063 - RNA, 27 nt, synthetic construct
  misc_feature 1..27: note = Catenin beta-1 (370-378)
  source 1..27: mol_type = other RNA
ctgaccgaccccagccagcgcctcgtg

SEQ ID NO: 28064 - RNA, 27 nt, synthetic construct
  misc_feature 1..27: note = HLA class I histocompatibility antigen, B-39 alpha chain (2-10)
  source 1..27: mol_type = other RNA
ctggtgatggccccccgcaccgtcctc

SEQ ID NO: 28065 - RNA, 27 nt, synthetic construct
  misc_feature 1..27: note = 40S ribosomal protein S16 (40-48)
  source 1..27: mol_type = other RNA
atgatcgagccccgcaccctgcagtac

SEQ ID NO: 28066 - RNA, 27 nt, synthetic construct
  misc_feature 1..27: note = Melanocyte protein PMEL (185-193)
  source 1..27: mol_type = other RNA
atgctgggcacccacaccatggaggtg

SEQ ID NO: 28067 - RNA, 27 nt, synthetic construct
  misc_feature 1..27: note = Tyrosinase (1-9)
  source 1..27: mol_type = other RNA
atgctgctcgccgtgctgtactgcctg

SEQ ID NO: 28068 - RNA, 27 nt, synthetic construct
  misc_feature 1..27: note = HLA class I histocompatibility antigen, alpha chain E (1-9)
  source 1..27: mol_type = other RNA
atggtggacggcaccctgctcctgctg

SEQ ID NO: 28069 - RNA, 27 nt, synthetic construct
  misc_feature 1..27: note = Vimentin (177-185)
  source 1..27: mol_type = other RNA
aacctggccgaggacatcatgcgcctc

SEQ ID NO: 28070 - RNA, 27 nt, synthetic construct
  misc_feature 1..27: note = Bifunctional purine biosynthesis protein PURH (101-109)
  source 1..27: mol_type = other RNA
aacctgtaccccttcgtgaagaccgtc

SEQ ID NO: 28071 - RNA, 48 nt, synthetic construct
  misc_feature 1..48: note = Transferrin receptor protein 1 (215-230)
  source 1..48: mol_type = other RNA
aaccccggcgggtacgtggcctacagcaaggccgcgaccgtcaccggc

SEQ ID NO: 28072 - RNA, 54 nt, synthetic construct
  misc_feature 1..54: note = Transferrin receptor protein 1 (215-232)
  source 1..54: mol_type = other RNA
aaccccggcgggtacgtggcctacagcaaggccgcgaccgtcaccggcaagctg

SEQ ID NO: 28073 - RNA, 30 nt, synthetic construct
  misc_feature 1..30: note = ELAV-like protein 1 (186-195)
  source 1..30: mol_type = other RNA
aaccccaaccagaacaagaacgtggccctg

SEQ ID NO: 28074 - RNA, 27 nt, synthetic construct
  misc_feature 1..27: note = U1 small nuclear ribonucleoprotein A (229-237)
  source 1..27: mol_type = other RNA
aaccagttccccggcttcaaggaggtg

SEQ ID NO: 28075 - RNA, 45 nt, synthetic construct
  misc_feature 1..45: note = Heat shock 70 kDa protein 1-like (170-184)
  source 1..45: mol_type = other RNA
aacgtgctgcgcatcatcaacgagcccaccgccgccgcgatcgcc

SEQ ID NO: 28076 - RNA, 45 nt, synthetic construct
  misc_feature 1..45: note = HLA class II histocompatibility antigen, DR alpha chain (52-66)
  source 1..45: mol_type = other RNA
cagggcgccctggccaacatcgcggtggacaaggccaacctcgag

SEQ ID NO: 28077 - RNA, 27 nt, synthetic construct
  misc_feature 1..27: note = Myosin-9 (478-486)
  source 1..27: mol_type = other RNA
cagctgttcaaccacaccatgttcatc

SEQ ID NO: 28078 - RNA, 27 nt, synthetic construct
  misc_feature 1..27: note = Myosin-9 (163-171)
  source 1..27: mol_type = other RNA
cagctgatggccgagaagctccagctg

SEQ ID NO: 28079 - RNA, 27 nt, synthetic construct
  misc_feature 1..27: note = T-complex protein 1 subunit alpha (187-195)
  source 1..27: mol_type = other RNA
cagccccgctacccggtgaacagcgtc

SEQ ID NO: 28080 - RNA, 30 nt, synthetic construct
  misc_feature 1..30: note = Carcinoembryonic antigen-related cell adhesion molecule 5 (268-277)
  source 1..30: mol_type = other RNA
cagtacagctggttcgtgaacggcaccttc

SEQ ID NO: 28081 - RNA, 27 nt, synthetic construct
  misc_feature 1..27: note = Histone H2AX (78-86)
  source 1..27: mol_type = other RNA
cgcatcatcccccggcacctgcagctc

SEQ ID NO: 28082 - RNA, 27 nt, synthetic construct
  misc_feature 1..27: note = Lamin-B1 (42-50)
  source 1..27: mol_type = other RNA
cgcctggccgtgtacatcgacaaggtc

SEQ ID NO: 28083 - RNA, 27 nt, synthetic construct
  misc_feature 1..27: note = Prelamin-A/C (41-49)
  source 1..27: mol_type = other RNA
cgcctggccgtgtacatcgaccgggtc

SEQ ID NO: 28084 - RNA, 27 nt, synthetic construct
  misc_feature 1..27: note = Melanocyte protein PMEL (626-634)
  source 1..27: mol_type = other RNA
cgcctgatgaagcaggacttcagcgtg

SEQ ID NO: 28085 - RNA, 27 nt, synthetic construct
  misc_feature 1..27: note = 60S acidic ribosomal protein P2 (38-46)
  source 1..27: mol_type = other RNA
cgcctgaacaaggtgatcagcgagctc

SEQ ID NO: 28086 - RNA, 27 nt, synthetic construct
  misc_feature 1..27: note = Vimentin (69-77)
  source 1..27: mol_type = other RNA
cgcctgcggagctccgtgcccggcgtc

SEQ ID NO: 28087 - RNA, 27 nt, synthetic construct
  misc_feature 1..27: note = Wilms tumor protein (126-134)
  source 1..27: mol_type = other RNA
cgcatgttccccaacgccccgtacctg

SEQ ID NO: 28088 - RNA, 27 nt, synthetic construct
  misc_feature 1..27: note = Histone deacetylase 2 variant (122-130)
  source 1..27: mol_type = other RNA
cgcatgctgccccacgccccgggcgtg

SEQ ID NO: 28089 - RNA, 27 nt, synthetic construct
  misc_feature 1..27: note = Cellular tumor antigen p53 (65-73)
  source 1..27: mol_type = other RNA
cgcatgcccgaggccgccccgcccgtg

SEQ ID NO: 28090 - RNA, 27 nt, synthetic construct
  misc_feature 1..27: note = Actin, cytoplasmic 2 (103-111)
  source 1..27: mol_type = other RNA
cgcatgcagaaggagatcaccgccctg

SEQ ID NO: 28091 - RNA, 69 nt, synthetic construct
  misc_feature 1..69: note = Melanoma antigen recognized by T-cells 1 (51-73)
  source 1..69: mol_type = other RNA
cgcaacggctaccgggccctgatggacaagagcctccacgtggggacccagtgcgccctgacccgccgg

SEQ ID NO: 28092 - RNA, 27 nt, synthetic construct
  misc_feature 1..27: note = B-lymphocyte antigen CD20 (222-230)
  source 1..27: mol_type = other RNA
cgccccaagagcaacatcgtgctgctc

SEQ ID NO: 28093 - RNA, 27 nt, synthetic construct
  misc_feature 1..27: note = Actin, aortic smooth muscle (39-47)
  source 1..27: mol_type = other RNA
cgcccccggcaccagggcgtgatggtc

SEQ ID NO: 28094 - RNA, 27 nt, synthetic construct
  misc_feature 1..27: note = Probable global transcription activator SNF2L2 (261-269)
  source 1..27: mol_type = other RNA
cgccccagcggcccggggcccgagctg

SEQ ID NO: 28095 - RNA, 27 nt, synthetic construct
  misc_feature 1..27: note = Myotubularin-related protein 5 (644-652)
  source 1..27: mol_type = other RNA
cgcccctacagcaacgtgtccaacctg

SEQ ID NO: 28096 - RNA, 27 nt, synthetic construct
  misc_feature 1..27: note = Proteasome subunit beta type-1 (127-135)
  source 1..27: mol_type = other RNA
cgccggttcttcccctactacgtgtac

SEQ ID NO: 28097 - RNA, 27 nt, synthetic construct
  misc_feature 1..27: note = 60S ribosomal protein L7a (110-118)
  source 1..27: mol_type = other RNA
cgccggcactggggcgggaacgtgctg

SEQ ID NO: 28098 - RNA, 27 nt, synthetic construct
  misc_feature 1..27: note = Histone H3.3 (53-61)
  source 1..27: mol_type = other RNA
cgccggtaccagaagagcaccgagctg

SEQ ID NO: 28099 - RNA, 27 nt, synthetic construct
  misc_feature 1..27: note = 60S ribosomal protein L24 (23-31)
  source 1..27: mol_type = other RNA
cgcaccgacggcaaggtgttccagttc

SEQ ID NO: 28100 - RNA, 27 nt, synthetic construct
  misc_feature 1..27: note = 40S ribosomal protein S3 (54-62)
  source 1..27: mol_type = other RNA
cgcacccagaacgtgctgggcgagaag

SEQ ID NO: 28101 - RNA, 27 nt, synthetic construct
  misc_feature 1..27: note = HLA class I histocompatibility antigen, Cw-7 alpha chain (2-10)
  source 1..27: mol_type = other RNA
cgcgtgatggccccccgggccctgctc

SEQ ID NO: 28102 - RNA, 30 nt, synthetic construct
  misc_feature 1..30: note = HLA class I histocompatibility antigen, B-15 alpha chain (194-203)
  source 1..30: mol_type = other RNA
cgctacctggagaacggcaaggagaccctc

SEQ ID NO: 28103 - RNA, 27 nt, synthetic construct
  misc_feature 1..27: note = Serine/threonine-protein kinase Sgk1 (208-216)
  source 1..27: mol_type = other RNA
agcgccctgggctacctccactccctg

SEQ ID NO: 28104 - RNA, 27 nt, synthetic construct
  misc_feature 1..27: note = Tyrosinase (192-200)
  source 1..27: mol_type = other RNA
agcgagatctggcgcgacatcgacttc

SEQ ID NO: 28105 - RNA, 27 nt, synthetic construct
  misc_feature 1..27: note = Serine/threonine-protein phosphatase PP1-alpha catalytic subunit (10-18)
  source 1..27: mol_type = other RNA
agcatcatcggccgcctgctcgaggtg

SEQ ID NO: 28106 - RNA, 30 nt, synthetic construct
  misc_feature 1..30: note = Melanocyte protein PMEL (577-586)
  source 1..30: mol_type = other RNA
agcctggccgacaccaactccctcgccgtg

SEQ ID NO: 28107 - RNA, 27 nt, synthetic construct
  misc_feature 1..27: note = Heterogeneous nuclear ribonucleoprotein K (154-162)
  source 1..27: mol_type = other RNA
agcctggccggcgggatcatcggcgtg

SEQ ID NO: 28108 - RNA, 27 nt, synthetic construct
  misc_feature 1..27: note = L-dopachrome tautomerase (288-296)
  source 1..27: mol_type = other RNA
agcctggacgactacaaccacctcgtg

SEQ ID NO: 28109 - RNA, 27 nt, synthetic construct
  misc_feature 1..27: note = Protein flightless-1 homolog (1009-1017)
  source 1..27: mol_type = other RNA
agcctgttccccggcaagctcgaggtg

SEQ ID NO: 28110 - RNA, 27 nt, synthetic construct
  misc_feature 1..27: note = Dual specificity protein phosphatase 5 (337-345)
  source 1..27: mol_type = other RNA
agcctgatcggccacctccagaccctg

SEQ ID NO: 28111 - RNA, 30 nt, synthetic construct
  misc_feature 1..30: note = TSC22 domain family protein 3 (27-36)
  source 1..30: mol_type = other RNA
agcctgctcggcggggacgtggtctccgtg

SEQ ID NO: 28112 - RNA, 27 nt, synthetic construct
  misc_feature 1..27: note = Cancer/testis antigen 1 (157-165)
  source 1..27: mol_type = other RNA
agcctgctcatgtggatcacccagtgc

SEQ ID NO: 28113 - RNA, 27 nt, synthetic construct
  misc_feature 1..27: note = Serine/threonine-protein phosphatase 2A 65 kDa regulatory subunit A alpha isoform (403-411)
  source 1..27: mol_type = other RNA
agcctgctccccgccatcgtggagctg

SEQ ID NO: 28114 - RNA, 33 nt, synthetic construct
  misc_feature 1..33: note = Protein transport protein Sec23B (138-148)
  source 1..33: mol_type = other RNA
agcctgctccccccggacgccctggtgggcctg

SEQ ID NO: 28115 - RNA, 33 nt, synthetic construct
  misc_feature 1..33: note = Protein transport protein Sec23A (156-166)
  source 1..33: mol_type = other RNA
agcctgctccccccgaccgccctggtgggcctg

SEQ ID NO: 28116 - RNA, 27 nt, synthetic construct
  misc_feature 1..27: note = Vimentin (226-234)
  source 1..27: mol_type = other RNA
agcctgcaggaggagatcgccttcctc

SEQ ID NO: 28117 - RNA, 27 nt, synthetic construct
  misc_feature 1..27: note = CD59oprotein (106-114)
  source 1..27: mol_type = other RNA
agcctgtccgagaagaccgtgctcctg

SEQ ID NO: 28118 - RNA, 27 nt, synthetic construct
  misc_feature 1..27: note = Collagen alpha-5(IV) chain (18-26)
  source 1..27: mol_type = other RNA
agcctgtggggccagcccgccgaggcc

SEQ ID NO: 28119 - RNA, 27 nt, synthetic construct
  misc_feature 1..27: note = AT-rich interactive domain-containing protein 3A (372-380)
  source 1..27: mol_type = other RNA
agccccaagctgccggtgtccagcctc

SEQ ID NO: 28120 - RNA, 33 nt, synthetic construct
  misc_feature 1..33: note = Polypyrimidine tract-binding protein 1 (141-151)
  source 1..33: mol_type = other RNA
agccccaaccaggcccgcgcccaggcggccctg

SEQ ID NO: 28121 - RNA, 27 nt, synthetic construct
  misc_feature 1..27: note = Spermine synthase (128-136)
  source 1..27: mol_type = other RNA
agcccctaccagaacatcaagatcctg

SEQ ID NO: 28122 - RNA, 27 nt, synthetic construct
  misc_feature 1..27: note = Eukaryotic translation initiation factor 3 subunit D (61-69)
  source 1..27: mol_type = other RNA
agccagttcggcgggggctcccagtac

SEQ ID NO: 28123 - RNA, 27 nt, synthetic construct
  misc_feature 1..27: note = Ornithine decarboxylase (180-188)
  source 1..27: mol_type = other RNA
agctccgagcagaccttcatgtactac

SEQ ID NO: 28124 - RNA, 27 nt, synthetic construct
  misc_feature 1..27: note = Glutamine-fructose-6-phosphate aminotransferase (isomerizing) 1 (95-103)
  source 1..27: mol_type = other RNA
agcaccgaccacatccccatcctgtac

SEQ ID NO: 28125 - RNA, 30 nt, synthetic construct
  misc_feature 1..30: note = Cellular tumor antigen p53 (149-157)
  source 1..30: mol_type = other RNA
agcacccccccgcccggcgccacccgcgtg

SEQ ID NO: 28126 - RNA, 27 nt, synthetic construct
  misc_feature 1..27: note = Eukaryotic translation initiation factor 3 subunit L (226-234)
  source 1..27: mol_type = other RNA
agcgtgctgaacgtcctccactccctg

SEQ ID NO: 28127 - RNA, 27 nt, synthetic construct
  misc_feature 1..27: note = L-dopachrome tautomerase (180-188)
  source 1..27: mol_type = other RNA
agcgtgtacgacttcttcgtctggctg

SEQ ID NO: 28128 - RNA, 27 nt, synthetic construct
  misc_feature 1..27: note = Mammaglobin-A (32-40)
  source 1..27: mol_type = other RNA
accatcaacccccaggtgagcaagacc

SEQ ID NO: 28129 - RNA, 27 nt, synthetic construct
  misc_feature 1..27: note = L-dopachrome tautomerase (360-368)
  source 1..27: mol_type = other RNA
accctggacagccaggtgatgtccctc

SEQ ID NO: 28130 - RNA, 27 nt, synthetic construct
  misc_feature 1..27: note = Protein BTG2 (101-109)
  source 1..27: mol_type = other RNA
accctgtgggtggacccctacgaggtc

SEQ ID NO: 28131 - RNA, 27 nt, synthetic construct
  misc_feature 1..27: note = DNA-directed RNA polymerase II subunit RPB1 (527-535)
  source 1..27: mol_type = other RNA
accccccagagcaaccgcccggtgatg

SEQ ID NO: 28132 - RNA, 33 nt, synthetic construct
  misc_feature 1..33: note = Heat shock cognate 71 kDa protein (22-32)
  source 1..33: mol_type = other RNA
accgtgttcgacgccaagcgcctgatcggccgg

SEQ ID NO: 28133 - RNA, 27 nt, synthetic construct
  misc_feature 1..27: note = Carcinoembryonic antigen-related cell adhesion molecule 5 (652-660)
  source 1..27: mol_type = other RNA
acctacgcctgcttcgtgagcaacctg

SEQ ID NO: 28134 - RNA, 27 nt, synthetic construct
  misc_feature 1..27: note = Receptor tyrosine-protein kinase erbB-2 (63-71)
  source 1..27: mol_type = other RNA
acctacctgcccaccaacgccagcctc

SEQ ID NO: 28135 - RNA, 24 nt, synthetic construct
  misc_feature 1..24: note = Serine/threonine-protein phosphatase 2A 65 kDa regulatory subunit A alpha isoform (263-270)
  source 1..24: mol_type = other RNA
gtggccgacaagttcaccgagctg

SEQ ID NO: 28136 - RNA, 27 nt, synthetic construct
  misc_feature 1..27: note = Actin, cytoplasmic 2 (76-84)
  source 1..27: mol_type = other RNA
gtggccctggacttcgagcaggagatg

SEQ ID NO: 28137 - RNA, 51 nt, synthetic construct
  misc_feature 1..51: note = HLA class I histocompatibility antigen, A-2 alpha chain (27-43)
  source 1..51: mol_type = other RNA
gtggacgacacccagttcgtccgcttcgacagcgacgccgcctcccagcgg

SEQ ID NO: 28138 - RNA, 57 nt, synthetic construct
  misc_feature 1..57: note = HLA class I histocompatibility antigen, A-2 alpha chain (27-45)
  source 1..57: mol_type = other RNA
gtggacgacacccagttcgtccgcttcgacagcgacgccgcctcccagcggatggag

SEQ ID NO: 28139 - RNA, 60 nt, synthetic construct
  misc_feature 1..60: note = HLA class I histocompatibility antigen, A-2 alpha chain (27-46)
  source 1..60: mol_type = other RNA
gtggacgacacccagttcgtccgcttcgacagcgacgccgcctcccagcggatggagccc

SEQ ID NO: 28140 - RNA, 63 nt, synthetic construct
  misc_feature 1..63: note = HLA class I histocompatibility antigen, A-2 alpha chain (27-47)
  source 1..63: mol_type = other RNA
gtggacgacacccagttcgtccgcttcgacagcgacgccgcctcccagcggatggagccccgc

SEQ ID NO: 28141 - RNA, 27 nt, synthetic construct
  misc_feature 1..27: note = Myeloblastin (169-177)
  source 1..27: mol_type = other RNA
gtgctgcaggagctcaacgtcaccgtg

SEQ ID NO: 28142 - RNA, 30 nt, synthetic construct
  misc_feature 1..30: note = Melanocyte protein PMEL (483-492)
  source 1..30: mol_type = other RNA
gtgctgtaccgctacggcagcttctccgtc

SEQ ID NO: 28143 - RNA, 27 nt, synthetic construct
  misc_feature 1..27: note = HLA class I histocompatibility antigen, Cw-3 alpha chain (3-11)
  source 1..27: mol_type = other RNA
gtgatggccccccgcaccctgatcctc

SEQ ID NO: 28144 - RNA, 27 nt, synthetic construct
  misc_feature 1..27: note = HLA class I histocompatibility antigen, A-2 alpha chain (3-11)
  source 1..27: mol_type = other RNA
gtgatggccccccgcaccctggtcctc

SEQ ID NO: 28145 - RNA, 27 nt, synthetic construct
  misc_feature 1..27: note = Importin subunit alpha-5 (434-442)
  source 1..27: mol_type = other RNA
gtgatggacagcaagatcgtccaggtg

SEQ ID NO: 28146 - RNA, 27 nt, synthetic construct
  misc_feature 1..27: note = 60S acidic ribosomal protein P2 (65-73)
  source 1..27: mol_type = other RNA
gtgcccgccggcggggccgtcgcggtg

SEQ ID NO: 28147 - RNA, 36 nt, synthetic construct
  misc_feature 1..36: note = rRNA 2'-O-methyltransferase fibrillarin (174-185)
  source 1..36: mol_type = other RNA
gtgagcgacatcgtcggccccgacgggctggtgtac

SEQ ID NO: 28148 - RNA, 45 nt, synthetic construct
  misc_feature 1..45: note = Beta-2-microglobulin (84-98)
  source 1..45: mol_type = other RNA
gtgaccctgagccagcccaagatcgtcaagtgggaccgcgacatg

SEQ ID NO: 28149 - RNA, 27 nt, synthetic construct
  misc_feature 1..27: note = L-dopachrome tautomerase (82-90)
  source 1..27: mol_type = other RNA
gtggtcatgggcaccctggtggccctc

SEQ ID NO: 28150 - RNA, 60 nt, synthetic construct
  misc_feature 1..60: note = Cancer/testis antigen 1 (161-180)
  source 1..60: mol_type = other RNA
tggatcacccagtgcttcctgcccgtgttcctcgcccagccgcccagcggccagcgccgg

SEQ ID NO: 28151 - RNA, 48 nt, synthetic construct
  misc_feature 1..48: note = Melanocyte protein PMEL (44-59)
  source 1..48: mol_type = other RNA
tggaaccgccagctgtaccccgagtggaccgaggcccagcggctcgac

SEQ ID NO: 28152 - RNA, 27 nt, synthetic construct
  misc_feature 1..27: note = Elongation factor 2 (265-273)
  source 1..27: mol_type = other RNA
tacttcgaccccgccaacggcaagttc

SEQ ID NO: 28153 - RNA, 27 nt, synthetic construct
  misc_feature 1..27: note = Cyclin-A2 (178-186)
  source 1..27: mol_type = other RNA
taccacgaggacatccacacctacctg

SEQ ID NO: 28154 - RNA, 27 nt, synthetic construct
  misc_feature 1..27: note = DNA (cytosine-5)-methyltransferase 1 (254-262)
  source 1..27: mol_type = other RNA
tacctggacgaccccgacctcaagtac

SEQ ID NO: 28155 - RNA, 27 nt, synthetic construct
  misc_feature 1..27: note = Melanocyte protein PMEL (280-288)
  source 1..27: mol_type = other RNA
tacctggagcccggcccggtgaccgcc

SEQ ID NO: 28156 - RNA, 27 nt, synthetic construct
  misc_feature 1..27: note = Myosin-9 (260-268)
  source 1..27: mol_type = other RNA
tacctgctcgagaagagccgcgccatc

SEQ ID NO: 28157 - RNA, 27 nt, synthetic construct
  misc_feature 1..27: note = Probable ATP-dependent RNA helicase DDX5 (148-156)
  source 1..27: mol_type = other RNA
tacctgctccccgccatcgtgcacatc

SEQ ID NO: 28158 - RNA, 27 nt, synthetic construct
  misc_feature 1..27: note = Carcinoembryonic antigen-related cell adhesion molecule 5 (605-613)
  source 1..27: mol_type = other RNA
tacctgagcggcgccaacctcaacctg

SEQ ID NO: 28159 - RNA, 27 nt, synthetic construct
  misc_feature 1..27: note = Myosin-9 (9-17)
  source 1..27: mol_type = other RNA
tacctgtacgtggacaagaacttcatc

SEQ ID NO: 28160 - RNA, 27 nt, synthetic construct
  misc_feature 1..27: note = Tyrosinase (369-377
  source 1..27: mol_type = other RNA
tacatggacggcaccatgagccaggtg

SEQ ID NO: 28161 - RNA, 27 nt, synthetic construct
  misc_feature 1..27: note = Tyrosinase (369-377)
  source 1..27: mol_type = other RNA
tacatgaacggcaccatgagccaggtg

SEQ ID NO: 28162 - RNA, 27 nt, synthetic construct
  misc_feature 1..27: note = Cellular tumor antigen p53 (103-111)
  source 1..27: mol_type = other RNA
taccagggcagctacgggttccgcctg

SEQ ID NO: 28163 - RNA, 36 nt, synthetic construct
  misc_feature 1..36: note = Cytochrome c oxidase subunit 2 (110-121)
  source 1..36: mol_type = other RNA
tacaccgactacggcgggctgatcttcaacagctac

SEQ ID NO: 28164 - RNA, 27 nt, synthetic construct
  misc_feature 1..27: note = HLA class I histocompatibility antigen, Cw-7 alpha chain (12-20)
  source 1..27: mol_type = other RNA
ttcgcctacgacggcaaggactacatc

SEQ ID NO: 28165 - RNA, 27 nt, synthetic construct
  misc_feature 1..27: note = HLA class I histocompatibility antigen, alpha chain E (137-145)
  source 1..27: mol_type = other RNA
ttcgcctacgacggcaaggactacctg

SEQ ID NO: 28166 - RNA, 27 nt, synthetic construct
  misc_feature 1..27: note = IST1 homolog (326-334)
  source 1..27: mol_type = other RNA
ttcgtgctgcccgagctcccgagcgtc

SEQ ID NO: 28167 - RNA, 30 nt, synthetic construct
  misc_feature 1..30: note = 60S ribosomal protein L35 (19-28)
  source 1..30: mol_type = other RNA
aagcagctggacgacctcaaggtggagctg

SEQ ID NO: 28168 - RNA, 45 nt, synthetic construct
  misc_feature 1..45: note = Triosephosphate isomerase (23-37)
  source 1..45: mol_type = other RNA
ggcgagctgatcgggaccctcaacgccgccaaggtgcccgcggac

SEQ ID NO: 28169 - RNA, 42 nt, synthetic construct
  misc_feature 1..42: note = HLA class II histocompatibility antigen, DR alpha chain (40-53)
  source 1..42: mol_type = other RNA
ctggaggagttcggccgcttcgccagcttcgaggcccagggg

SEQ ID NO: 28170 - RNA, 27 nt, synthetic construct
  misc_feature 1..27: note = Sorting nexin-5 (257-265)
  source 1..27: mol_type = other RNA
gaggagcccaccgtgatcaagaagtac

SEQ ID NO: 28171 - RNA, 30 nt, synthetic construct
  misc_feature 1..30: note = Melanoma-associated antigen 4 (230-239)
  source 1..30: mol_type = other RNA
ggcgtgtacgacgggcgcgagcacaccgtc

SEQ ID NO: 28172 - RNA, 27 nt, synthetic construct
  misc_feature 1..27: note = HLA class I histocompatibility antigen, B-39 alpha chain (3-11)
  source 1..27: mol_type = other RNA
gtgatggccccccgcaccgtcctgctc

SEQ ID NO: 28173 - RNA, 27 nt, synthetic construct
  misc_feature 1..27: note = Ubiquilin-4 (442-450)
  source 1..27: mol_type = other RNA
aacccccgcgccatgcaggccctgctc

SEQ ID NO: 28174 - RNA, 27 nt, synthetic construct
  misc_feature 1..27: note = HLA class I histocompatibility antigen, Cw-7 alpha chain (3-11)
  source 1..27: mol_type = other RNA
gtgatggccccccgcgccctgctcctg

SEQ ID NO: 28175 - RNA, 45 nt, synthetic construct
  misc_feature 1..45: note = Gamma-secretase C-terminal fragment 59 (562-576)
  source 1..45: mol_type = other RNA
gacgccgagttccgccacgacagcggctacgaggtgcaccaccag

SEQ ID NO: 28176 - RNA, 30 nt, synthetic construct
  misc_feature 1..30: note = Gamma-secretase C-terminal fragment 59 (565-574)
  source 1..30: mol_type = other RNA
ttccgccacgacagcggctacgaggtgcac

SEQ ID NO: 28177 - RNA, 27 nt, synthetic construct
  misc_feature 1..27: note = HLA class I histocompatibility antigen, Cw-2 alpha chain (3-11)
  source 1..27: mol_type = other RNA
gtgatggccccccgcaccctgctcctg

SEQ ID NO: 28178 - RNA, 39 nt, synthetic construct
  misc_feature 1..39: note = Gamma-secretase C-terminal fragment 59 (562-574)
  source 1..39: mol_type = other RNA
gacgccgagttccgccacgacagcggctacgaggtgcac

SEQ ID NO: 28179 - RNA, 24 nt, synthetic construct
  misc_feature 1..24: note = Beta-2-microglobulin (91-98)
  source 1..24: mol_type = other RNA
atcgtgaagtgggaccgcgacatg

SEQ ID NO: 28180 - RNA, 42 nt, synthetic construct
  misc_feature 1..42: note = HLA class II histocompatibility antigen, DR alpha chain (50-63)
  source 1..42: mol_type = other RNA
gaggcccagggcgccctggcgaacatcgccgtggacaaggcc

SEQ ID NO: 28181 - RNA, 45 nt, synthetic construct
  misc_feature 1..45: note = Interferon-induced transmembrane protein 1 (69-83)
  source 1..45: mol_type = other RNA
gtgggcgacgtcaccggggcccaggcctacgcgagcaccgccaag

SEQ ID NO: 28182 - RNA, 45 nt, synthetic construct
  misc_feature 1..45: note = Gamma-secretase C-terminal fragment 59 (560-574)
  source 1..45: mol_type = other RNA
ttcgccgaggacgtgggcagcaacaagggggccatcatcggcctg

SEQ ID NO: 28183 - RNA, 33 nt, synthetic construct
  misc_feature 1..33: note = Amyloid beta A4 protein (20-30)
  source 1..33: mol_type = other RNA
ttcgccgaggacgtgggcagcaacaagggggcc

SEQ ID NO: 28184 - RNA, 27 nt, synthetic construct
  misc_feature 1..27: note = Heat shock 70 kDa protein 1-like (395-403)
  source 1..27: mol_type = other RNA
ctgctcgacgtggcccccctgagcctg

SEQ ID NO: 28185 - RNA, 27 nt, synthetic construct
  misc_feature 1..27: note = Heat shock 70 kDa protein 1B (391-399)
  source 1..27: mol_type = other RNA
ctgctcctgctggacgtggcccccctc

SEQ ID NO: 28186 - RNA, 48 nt, synthetic construct
  misc_feature 1..48: note = HLA class I histocompatibility antigen, B-15 alpha chain (53-68)
  source 1..48: mol_type = other RNA
gacgacacccagttcgtgcgcttcgacagcgacgccgcctccccccgg

SEQ ID NO: 28187 - RNA, 48 nt, synthetic construct
  misc_feature 1..48: note = HLA class I histocompatibility antigen, Cw-7 alpha chain (153-168)
  source 1..48: mol_type = other RNA
gacctgcgcagctggaccgccgccgacaccgcggcccagatcacgcag

SEQ ID NO: 28188 - RNA, 45 nt, synthetic construct
  misc_feature 1..45: note = HLA class I histocompatibility antigen, B-15 alpha chain (54-68)
  source 1..45: mol_type = other RNA
gacacccagttcgtgcgcttcgacagcgacgccgcctccccccgg

SEQ ID NO: 28189 - RNA, 51 nt, synthetic construct
  misc_feature 1..51: note = HLA class I histocompatibility antigen, A-2 alpha chain (29-45)
  source 1..51: mol_type = other RNA
gacacccagttcgtgcgcttcgacagcgacgccgcctcccagcggatggag

SEQ ID NO: 28190 - RNA, 36 nt, synthetic construct
  misc_feature 1..36: note = HLA class I histocompatibility antigen, B-15 alpha chain (57-68)
  source 1..36: mol_type = other RNA
ttcgtgcgcttcgacagcgacgccgcctccccccgg

SEQ ID NO: 28191 - RNA, 33 nt, synthetic construct
  misc_feature 1..33: note = HLA class I histocompatibility antigen, A-1 alpha chain (32-42)
  source 1..33: mol_type = other RNA
ttcgtgcgcttcgacagcgacgccgcctcccag

SEQ ID NO: 28192 - RNA, 45 nt, synthetic construct
  misc_feature 1..45: note = HLA class I histocompatibility antigen, B-15 alpha chain (154-168)
  source 1..45: mol_type = other RNA
ctgagctcctggaccgccgccgacaccgcggcccagatcacgcag

SEQ ID NO: 28193 - RNA, 51 nt, synthetic construct
  misc_feature 1..51: note = HLA class I histocompatibility antigen, B-15 alpha chain (52-68)
  source 1..51: mol_type = other RNA
gtggacgacacccagttcgtccgcttcgacagcgacgccgcctccccccgg

SEQ ID NO: 28194 - RNA, 27 nt, synthetic construct
  misc_feature 1..27: note = Vimentin (116-124)
  source 1..27: mol_type = other RNA
aactacatcgacaaggtgcgcttcctg

SEQ ID NO: 28195 - RNA, 27 nt, synthetic construct
  misc_feature 1..27: note = G antigen 12H (9-17)
  source 1..27: mol_type = other RNA
tactactggccccgcccgcggcgctac

SEQ ID NO: 28196 - RNA, 27 nt, synthetic construct
  misc_feature 1..27: note = Transaldolase (168-176)
  source 1..27: mol_type = other RNA
ctgctcttcagcttcgcccaggccgtg

SEQ ID NO: 28197 - RNA, 51 nt, synthetic construct
  misc_feature 1..51: note = T cell receptor beta chain (42-57)
  source 1..51: mol_type = other RNA
tgcaagcccatcagcggccacaactccctgttccagtggtaccgccagacc

SEQ ID NO: 28198 - RNA, 27 nt, synthetic construct
  misc_feature 1..27: note = Putative pre-mRNA-splicing factor ATP-dependent RNA helicase DHX16 (410-418)
  source 1..27: mol_type = other RNA
gccgccatcgcgaaccaccaggtgctg

SEQ ID NO: 28199 - RNA, 27 nt, synthetic construct
  misc_feature 1..27: note = 14-3-3 protein gamma (25-33)
  source 1..27: mol_type = other RNA
gccgccatgaagaacgtgaccgagctg

SEQ ID NO: 28200 - RNA, 27 nt, synthetic construct
  misc_feature 1..27: note = Serine/threonine-protein kinase SMG1 (111-119)
  source 1..27: mol_type = other RNA
gccctgaacaacctcctgcacagcctg

SEQ ID NO: 28201 - RNA, 27 nt, synthetic construct
  misc_feature 1..27: note = Cyclin-L1 (148-156)
  source 1..27: mol_type = other RNA
gacgtgatcaacgtcttccaccacctg

SEQ ID NO: 28202 - RNA, 27 nt, synthetic construct
  misc_feature 1..27: note = Fructose-bisphosphate aldolase A (15-23)
  source 1..27: mol_type = other RNA
gagctgagcgacatcgcccaccgcatc

SEQ ID NO: 28203 - RNA, 27 nt, synthetic construct
  misc_feature 1..27: note = Glyceraldehyde-3-phosphate dehydrogenase (173-181)
  source 1..27: mol_type = other RNA
ggcctgatgaccaccgtgcacgccatc

SEQ ID NO: 28204 - RNA, 27 nt, synthetic construct
  misc_feature 1..27: note = Elongation of very long chain fatty acids protein 1 (135-143)
  source 1..27: mol_type = other RNA
ggccaggtgaccttcctgcacgtcttc

SEQ ID NO: 28205 - RNA, 27 nt, synthetic construct
  misc_feature 1..27: note = Microtubule-associated protein RP/EB family member 2 (234-242)
  source 1..27: mol_type = other RNA
cagctgaacgagcaggtgcacagcctc

SEQ ID NO: 28206 - RNA, 27 nt, synthetic construct
  misc_feature 1..27: note = T-complex protein 1 subunit epsilon (79-87)
  source 1..27: mol_type = other RNA
agcatgatggacgtggaccaccagatc

SEQ ID NO: 28207 - RNA, 27 nt, synthetic construct
  misc_feature 1..27: note = Sphingolipid delta(4)-desaturase DES1 (83-91)
  source 1..27: mol_type = other RNA
agcatgaccctggccatccacgagatc

SEQ ID NO: 28208 - RNA, 27 nt, synthetic construct
  misc_feature 1..27: note = Elongation of very long chain fatty acids protein 5 (171-179)
  source 1..27: mol_type = other RNA
accctgaacagcttcatccacgtgctc

SEQ ID NO: 28209 - RNA, 27 nt, synthetic construct
  misc_feature 1..27: note = ORM1-like protein 2 (50-58)
  source 1..27: mol_type = other RNA
accctgaccaacgtgatccacaacctc

SEQ ID NO: 28210 - RNA, 30 nt, synthetic construct
  misc_feature 1..30: note = Baculoviral IAP repeat-containing protein 7 (280-289)
  source 1..30: mol_type = other RNA
cagctgtgccccatctgccgcgccccggtg

SEQ ID NO: 28211 - RNA, 30 nt, synthetic construct
  misc_feature 1..30: note = E3 ubiquitin-protein ligase TRIM68 (55-64)
  source 1..30: mol_type = other RNA
tacacctgccccctgtgccgcgccccggtg

SEQ ID NO: 28212 - RNA, 33 nt, synthetic construct
  misc_feature 1..33: note = Putative HTLV-1-related endogenous sequence (14-24)
  source 1..33: mol_type = other RNA
cccacccgcgccccgagcggcccccggcccccc

SEQ ID NO: 28213 - RNA, 33 nt, synthetic construct
  misc_feature 1..33: note = Putative HTLV-1-related endogenous sequence (117-127)
  source 1..33: mol_type = other RNA
cgccggcgcgagggccccgaccggagcccgcgc

SEQ ID NO: 28214 - RNA, 27 nt, synthetic construct
  misc_feature 1..27: note = Myelin basic protein (175-183)
  source 1..27: mol_type = other RNA
ggcaccctgagcaagatcttcaagctc

SEQ ID NO: 28215 - RNA, 27 nt, synthetic construct
  misc_feature 1..27: note = Myelin proteolipid protein (45-53)
  source 1..27: mol_type = other RNA
aagctgatcgagacctacttcagcaag

SEQ ID NO: 28216 - RNA, 27 nt, synthetic construct
  misc_feature 1..27: note = Gamma-secretase C-terminal fragment 59 (563-571)
  source 1..27: mol_type = other RNA
gccgagttccgccacgacagcggctac

SEQ ID NO: 28217 - RNA, 27 nt, synthetic construct
  misc_feature 1..27: note = SAM and SH3 domain-containing protein 1 (305-313)
  source 1..27: mol_type = other RNA
gccctgtacagcggcgtgcacaagaag

SEQ ID NO: 28218 - RNA, 30 nt, synthetic construct
  misc_feature 1..30: note = E3 ubiquitin-protein ligase SIAH1 (6-15)
  source 1..30: mol_type = other RNA
gccaccgccctgcccaccggcacgagcaag

SEQ ID NO: 28219 - RNA, 27 nt, synthetic construct
  misc_feature 1..27: note = Muscleblind-like protein 2 (359-367)
  source 1..27: mol_type = other RNA
gccaccgccaaccagatcatcctgaag

SEQ ID NO: 28220 - RNA, 27 nt, synthetic construct
  misc_feature 1..27: note = Annexin A1 (63-71)
  source 1..27: mol_type = other RNA
gccaccatcatcgacatcctgaccaag

SEQ ID NO: 28221 - RNA, 27 nt, synthetic construct
  misc_feature 1..27: note = Nuclear ubiquitous casein and cyclin-dependent kinase substrate 1 (176-184)
  source 1..27: mol_type = other RNA
gccaccgtgacccccagcccggtcaag

SEQ ID NO: 28222 - RNA, 27 nt, synthetic construct
  misc_feature 1..27: note = Pleiotropic regulator 1 (118-126)
  source 1..27: mol_type = other RNA
gccgtggccctgcccctccagaccaag

SEQ ID NO: 28223 - RNA, 36 nt, synthetic construct
  misc_feature 1..36: note = NADH dehydrogenase (ubiquinone) 1 alpha subcomplex subunit 3 (29-40)
  source 1..36: mol_type = other RNA
gccgtgatcctgcccccgctcagcccctacttcaag

SEQ ID NO: 28224 - RNA, 27 nt, synthetic construct
  misc_feature 1..27: note = CD99 antigen (177-185)
  source 1..27: mol_type = other RNA
gccgtgcagcgcaccctgctcgagaag

SEQ ID NO: 28225 - RNA, 27 nt, synthetic construct
  misc_feature 1..27: note = Guanine nucleotide-binding protein G(o) subunit alpha (93-101)
  source 1..27: mol_type = other RNA
gccgtgaccgacgtcatcatcgccaag

SEQ ID NO: 28226 - RNA, 42 nt, synthetic construct
  misc_feature 1..42: note = Calsyntenin-1 (56-69)
  source 1..42: mol_type = other RNA
gaccccccgctgatcgccctcgacaaggacgcccccctgcgc

SEQ ID NO: 28227 - RNA, 27 nt, synthetic construct
  misc_feature 1..27: note = GPI transamidase component PIG-T (161-169)
  source 1..27: mol_type = other RNA
gacaccgaccactacttcctgcgctac

SEQ ID NO: 28228 - RNA, 42 nt, synthetic construct
  misc_feature 1..42: note = Perilipin-3 (222-235)
  source 1..42: mol_type = other RNA
gacgtggccagcgtccagcagcagcgccaggagcagtcctac

SEQ ID NO: 28229 - RNA, 27 nt, synthetic construct
  misc_feature 1..27: note = WD40 repeat-containing protein SMU1 (9-17)
  source 1..27: mol_type = other RNA
gacgtgatccgcctgatcatgcagtac

SEQ ID NO: 28230 - RNA, 30 nt, synthetic construct
  misc_feature 1..30: note = Protein S100-B (35-44)
  source 1..30: mol_type = other RNA
gagctgatcaacaacgagctcagccacttc

SEQ ID NO: 28231 - RNA, 33 nt, synthetic construct
  misc_feature 1..33: note = Annexin A11 (430-440)
  source 1..33: mol_type = other RNA
gagaccgacctgctcgacatccgcagcgagtac

SEQ ID NO: 28232 - RNA, 27 nt, synthetic construct
  misc_feature 1..27: note = Histone H2B type 2-F (66-74)
  source 1..27: mol_type = other RNA
ttcgtgaacgacatcttcgagcgcatc

SEQ ID NO: 28233 - RNA, 24 nt, synthetic construct
  misc_feature 1..24: note = Calmodulin (145-152)
  source 1..24: mol_type = other RNA
ttcgtgcagatgatgaccgccaag

SEQ ID NO: 28234 - RNA, 42 nt, synthetic construct
  misc_feature 1..42: note = Phosphoinositide-3-kinase-interacting protein 1 (30-43)
  source 1..42: mol_type = other RNA
ggccacctgtaccgcgaggaccagaccagccccgccccgggg

SEQ ID NO: 28235 - RNA, 27 nt, synthetic construct
  misc_feature 1..27: note = THO complex subunit 4 (147-155)
  source 1..27: mol_type = other RNA
ggcaccgccgacgtgcacttcgagcgc

SEQ ID NO: 28236 - RNA, 27 nt, synthetic construct
  misc_feature 1..27: note = Neuroblast differentiation-associated protein AHNAK (1210-1218)
  source 1..27: mol_type = other RNA
ggcaccttcgggggcctggggagcaag

SEQ ID NO: 28237 - RNA, 27 nt, synthetic construct
  misc_feature 1..27: note = Phosphoserine aminotransferase (119-127)
  source 1..27: mol_type = other RNA
ggcaccatcaacatcgtgcaccccaag

SEQ ID NO: 28238 - RNA, 27 nt, synthetic construct
  misc_feature 1..27: note = Histone deacetylase 7 (159-167)
  source 1..27: mol_type = other RNA
cacagcgagcgccacgtgctgctctac

SEQ ID NO: 28239 - RNA, 27 nt, synthetic construct
  misc_feature 1..27: note = Gelsolin (48-56)
  source 1..27: mol_type = other RNA
atcatctacaagggcgggaccagccgc

SEQ ID NO: 28240 - RNA, 30 nt, synthetic construct
  misc_feature 1..30: note = Tight junction protein ZO-1 (562-571)
  source 1..30: mol_type = other RNA
atccccaacaagaaccgcgccgagcagctg

SEQ ID NO: 28241 - RNA, 39 nt, synthetic construct
  misc_feature 1..39: note = Calmodulin (126-138)
  source 1..39: mol_type = other RNA
atccgcgaggccgacatcgacggcgacgggcaggtgaac

SEQ ID NO: 28242 - RNA, 51 nt, synthetic construct
  misc_feature 1..51: note = POTE ankyrin domain family member F (1057-1073)
  source 1..51: mol_type = other RNA
atcagcaagcaggagtacgacgagtccggccccagcatcgtgcaccgcaag

SEQ ID NO: 28243 - RNA, 27 nt, synthetic construct
  misc_feature 1..27: note = NADH dehydrogenase (ubiquinone) iron-sulfur protein 7, mitochondrial (66-74)
  source 1..27: mol_type = other RNA
atcgtggccggcaccctgaccaacaag

SEQ ID NO: 28244 - RNA, 27 nt, synthetic construct
  misc_feature 1..27: note = LIM domain transcription factor LMO4 (29-37)
  source 1..27: mol_type = other RNA
aagatcgccgaccgcttcctgctctac

SEQ ID NO: 28245 - RNA, 30 nt, synthetic construct
  misc_feature 1..30: note = Spectrin beta chain, non-erythrocytic 1 (1939-1948)
  source 1..30: mol_type = other RNA
aagccccgcgacgtgagctccgtcgagctg

SEQ ID NO: 28246 - RNA, 27 nt, synthetic construct
  misc_feature 1..27: note = NADH dehydrogenase (ubiquinone) 1 subunit C2 (106-114)
  source 1..27: mol_type = other RNA
aagacctacggcgagatcttcgagaag

SEQ ID NO: 28247 - RNA, 45 nt, synthetic construct
  misc_feature 1..45: note = Testican-2 (317-331)
  source 1..45: mol_type = other RNA
ctggagcgcatccagatccaggaggccgccaagaagaagcccggc

SEQ ID NO: 28248 - RNA, 27 nt, synthetic construct
  misc_feature 1..27: note = Alpha-adducin (37-45)
  source 1..27: mol_type = other RNA
ctgaccgaccgcgagctcgaggagtac

SEQ ID NO: 28249 - RNA, 30 nt, synthetic construct
  misc_feature 1..30: note = V-type proton ATPase subunit F (46-55)
  source 1..30: mol_type = other RNA
aacgagatcgaggacaccttccgccagttc

SEQ ID NO: 28250 - RNA, 24 nt, synthetic construct
  misc_feature 1..24: note = 40S ribosomal protein SA (149-156)
  source 1..24: mol_type = other RNA
aacaccgacagccccctgcgctac

SEQ ID NO: 28251 - RNA, 27 nt, synthetic construct
  misc_feature 1..27: note = Bcl-2-associated transcription factor 1 (428-436)
  source 1..27: mol_type = other RNA
aacaccgaggaggagggcctgaagtac

SEQ ID NO: 28252 - RNA, 33 nt, synthetic construct
  misc_feature 1..33: note = ATP synthase-coupling factor 6, mitochondrial (98-108)
  source 1..33: mol_type = other RNA
cccaagttcgaggtgatcgagaagccgcaggcc

SEQ ID NO: 28253 - RNA, 39 nt, synthetic construct
  misc_feature 1..39: note = Phosphatidylethanolamine-binding protein 1 (2-14)
  source 1..39: mol_type = other RNA
cccgtggacctgagcaagtggtccggcccgctcagcctg

SEQ ID NO: 28254 - RNA, 27 nt, synthetic construct
  misc_feature 1..27: note = 40S ribosomal protein S29 (5-13)
  source 1..27: mol_type = other RNA
cagctgtactggagccacccccgcaag

SEQ ID NO: 28255 - RNA, 30 nt, synthetic construct
  misc_feature 1..30: note = Septin-2 (291-300)
  source 1..30: mol_type = other RNA
cgcctgtacccctggggcgtggtcgaggtg

SEQ ID NO: 28256 - RNA, 27 nt, synthetic construct
  misc_feature 1..27: note = Methyl-CpG-binding domain protein 3 (74-82)
  source 1..27: mol_type = other RNA
agcatcttcaagcagcccgtgaccaag

SEQ ID NO: 28257 - RNA, 27 nt, synthetic construct
  misc_feature 1..27: note = Transformation/transcription domain-associated protein (1806-1814)
  source 1..27: mol_type = other RNA
agcatcacctccgtgttcatcaccaag

SEQ ID NO: 28258 - RNA, 30 nt, synthetic construct
  misc_feature 1..30: note = Transcription factor HES-1 (101-110)
  source 1..30: mol_type = other RNA
agcaccgacccctccgtgctgggcaagtac

SEQ ID NO: 28259 - RNA, 27 nt, synthetic construct
  misc_feature 1..27: note = Protein transport protein Sec23B (115-123)
  source 1..27: mol_type = other RNA
agcaccatcgagtacgtgatccagcgc

SEQ ID NO: 28260 - RNA, 33 nt, synthetic construct
  misc_feature 1..33: note = Paralemmin-2 (155-165)
  source 1..33: mol_type = other RNA
agcaccatcggccccgagggggtgcaccagaag

SEQ ID NO: 28261 - RNA, 30 nt, synthetic construct
  misc_feature 1..30: note = Sodium/potassium-transporting ATPase subunit alpha-3 (946-955)
  source 1..30: mol_type = other RNA
agcgtgttccagcagggcatgaagaacaag

SEQ ID NO: 28262 - RNA, 33 nt, synthetic construct
  misc_feature 1..33: note = Stathmin (31-41)
  source 1..33: mol_type = other RNA
agcgtgcccgagttcccgctgtccccccccaag

SEQ ID NO: 28263 - RNA, 27 nt, synthetic construct
  misc_feature 1..27: note = Heterogeneous nuclear ribonucleoprotein L-like (68-76)
  source 1..27: mol_type = other RNA
agcgtgtcccccgtcgtgcacgtgcgc

SEQ ID NO: 28264 - RNA, 24 nt, synthetic construct
  misc_feature 1..24: note = Nodal modulator 3 (247-254)
  source 1..24: mol_type = other RNA
accgccatccgccaccacgtgctg

SEQ ID NO: 28265 - RNA, 33 nt, synthetic construct
  misc_feature 1..33: note = Interferon-induced GTP-binding protein Mx2 (194-204)
  source 1..33: mol_type = other RNA
accatcatcgacctgcccggcatcacccgcgtg

SEQ ID NO: 28266 - RNA, 27 nt, synthetic construct
  misc_feature 1..27: note = Neuronal membraneoprotein M6-b (264-272)
  source 1..27: mol_type = other RNA
accacctacaactacgccgtgctgaag

SEQ ID NO: 28267 - RNA, 27 nt, synthetic construct
  misc_feature 1..27: note = Contactin-1 (759-767)
  source 1..27: mol_type = other RNA
gtgaccaaccccgacaccggccgctac

SEQ ID NO: 28268 - RNA, 24 nt, synthetic construct
  misc_feature 1..24: note = Cytosolic non-specific dipeptidase (468-475)
  source 1..24: mol_type = other RNA
tacgaggtgagccagctgaaggac

SEQ ID NO: 28269 - RNA, 27 nt, synthetic construct
  misc_feature 1..27: note = Septin-2 (121-129)
  source 1..27: mol_type = other RNA
tacatcgacgagcagttcgagcgctac

SEQ ID NO: 28270 - RNA, 30 nt, synthetic construct
  misc_feature 1..30: note = Noelin-2 (405-414)
  source 1..30: mol_type = other RNA
tacaccgacgtgcccttccacaaccagtac

SEQ ID NO: 28271 - RNA, 33 nt, synthetic construct
  misc_feature 1..33: note = Serine/threonine-protein kinase DCLK1 (176-186)
  source 1..33: mol_type = other RNA
tacaccgagcgcgacgccagcggcatgctgtac

SEQ ID NO: 28272 - RNA, 24 nt, synthetic construct
  misc_feature 1..24: note = U2 small nuclear ribonucleoprotein B'' (205-212)
  source 1..24: mol_type = other RNA
gacgccctgcagggcttcaagatc

SEQ ID NO: 28273 - RNA, 45 nt, synthetic construct
  misc_feature 1..45: note = Melanocyte protein PMEL (45-59)
  source 1..45: mol_type = other RNA
aaccgccagctgtaccccgagtggaccgaggcccagcggctcgac

SEQ ID NO: 28274 - RNA, 27 nt, synthetic construct
  misc_feature 1..27: note = Nuclear autoantigenic sperm protein (281-289)
  source 1..27: mol_type = other RNA
gtgctgaacgagcaggtcaaggaggcc

SEQ ID NO: 28275 - RNA, 27 nt, synthetic construct
  misc_feature 1..27: note = 60S ribosomal protein L5 (218-226)
  source 1..27: mol_type = other RNA
gcctacaagaagcagttcagccagtac

SEQ ID NO: 28276 - RNA, 27 nt, synthetic construct
  misc_feature 1..27: note = Endoplasmic reticulum-Golgi intermediate compartment protein 1 (258-266)
  source 1..27: mol_type = other RNA
gccatcatcggcgggaccttcaccgtg

SEQ ID NO: 28277 - RNA, 27 nt, synthetic construct
  misc_feature 1..27: note = Programmed cell death protein 4 (283-291)
  source 1..27: mol_type = other RNA
gccctggacaaggccaccgtgctcctg

SEQ ID NO: 28278 - RNA, 27 nt, synthetic construct
  misc_feature 1..27: note = Endoplasmin (381-389)
  source 1..27: mol_type = other RNA
gccctgaaggacaagatcgagaaggcc

SEQ ID NO: 28279 - RNA, 27 nt, synthetic construct
  misc_feature 1..27: note = Glyceraldehyde-3-phosphate dehydrogenase (302-310)
  source 1..27: mol_type = other RNA
gccctgaacgaccacttcgtgaagctc

SEQ ID NO: 28280 - RNA, 27 nt, synthetic construct
  misc_feature 1..27: note = Eukaryotic translation initiation factor 3 subunit F (349-357)
  source 1..27: mol_type = other RNA
gccctgaacgagaagctcgtgaacctg

SEQ ID NO: 28281 - RNA, 27 nt, synthetic construct
  misc_feature 1..27: note = Cofilin-1 (6-14)
  source 1..27: mol_type = other RNA
gccgtgagcgacggcgtcatcaaggtg

SEQ ID NO: 28282 - RNA, 27 nt, synthetic construct
  misc_feature 1..27: note = Actin, cytoplasmic 2 (21-29)
  source 1..27: mol_type = other RNA
ttcgccggcgacgacgccccccgcgcg

SEQ ID NO: 28283 - RNA, 30 nt, synthetic construct
  misc_feature 1..30: note = Pyruvate kinase PKM (12-21)
  source 1..30: mol_type = other RNA
ttcatccagacccagcagctgcacgccgcc

SEQ ID NO: 28284 - RNA, 30 nt, synthetic construct
  misc_feature 1..30: note Dolichyl-diphosphooligosaccharide-proteinosyltransferase subunit STT3A (59-68)
  source 1..30: mol_type = other RNA
ttcctggccgaggagggcttctacaagttc

SEQ ID NO: 28285 - RNA, 30 nt, synthetic construct
  misc_feature 1..30: note = 5'(3')-deoxyribonucleotidase, cytosolic type (71-80)
  source 1..30: mol_type = other RNA
ttcctggacctcgagcccatcccgggcgcc

SEQ ID NO: 28286 - RNA, 24 nt, synthetic construct
  misc_feature 1..24: note = CKLF-like MARVEL transmembrane domain-containing protein 6 (79-86)
  source 1..24: mol_type = other RNA
ttcctgctcagcctgctgatcctc

SEQ ID NO: 28287 - RNA, 27 nt, synthetic construct
  misc_feature 1..27: note = Cleavage and polyadenylation specificity factor subunit 1 (185-193)
  source 1..27: mol_type = other RNA
ttcctgcccagctacatcatcgacgtg

SEQ ID NO: 28288 - RNA, 24 nt, synthetic construct
  misc_feature 1..24: note = Neutral amino acid transporter B(0) (89-96)
  source 1..24: mol_type = other RNA
ttcgtgttccccggcgagctgctc

SEQ ID NO: 28289 - RNA, 30 nt, synthetic construct
  misc_feature 1..30: note = Glyceraldehyde-3-phosphate dehydrogenase (169-178)
  source 1..30: mol_type = other RNA
ggcatcgtggaggggctgatgaccaccgtc

SEQ ID NO: 28290 - RNA, 27 nt, synthetic construct
  misc_feature 1..27: note = Protein PRRC1 (212-220)
  source 1..27: mol_type = other RNA
ggcatctgggggttcatcaagggcgtg

SEQ ID NO: 28291 - RNA, 27 nt, synthetic construct
  misc_feature 1..27: note = Probable ATP-dependent RNA helicase DDX49 (311-319)
  source 1..27: mol_type = other RNA
ggcctggacatccccaccgtgcaggtc

SEQ ID NO: 28292 - RNA, 24 nt, synthetic construct
  misc_feature 1..24: note = Nuclear pore complex protein Nup160 (1223-1230)
  source 1..24: mol_type = other RNA
ggcctgttcgacaccgccatcagc

SEQ ID NO: 28293 - RNA, 39 nt, synthetic construct
  misc_feature 1..39: note = ATP synthase subunit beta, mitochondrial (203-215)
  source 1..39: mol_type = other RNA
ggcctgttcgggggcgccggggtgggcaagaccgtcctc

SEQ ID NO: 28294 - RNA, 27 nt, synthetic construct
  misc_feature 1..27: note = Signal peptidase complex subunit 2 (79-87)
  source 1..27: mol_type = other RNA
ggcctgatcgacgggcgcctcaccatc

SEQ ID NO: 28295 - RNA, 33 nt, synthetic construct
  misc_feature 1..33: note = Pyruvate kinase PKM (122-132)
  source 1..33: mol_type = other RNA
ggcctgatcaaggggagcggcaccgccgaggtg

SEQ ID NO: 28296 - RNA, 30 nt, synthetic construct
  misc_feature 1..30: note = Protein kinase C iota type (241-250)
  source 1..30: mol_type = other RNA
ggcctgcaggacttcgacctcctgcgcgtg

SEQ ID NO: 28297 - RNA, 27 nt, synthetic construct
  misc_feature 1..27: note = Histone acetyltransferase p300 (2240-2248)
  source 1..27: mol_type = other RNA
ggccagatcgggcagctgccccaggcc

SEQ ID NO: 28298 - RNA, 27 nt, synthetic construct
  misc_feature 1..27: note = Histone H2A type 1-A (107-115)
  source 1..27: mol_type = other RNA
ggcgtgctgcccaacatccaggccgtc

SEQ ID NO: 28299 - RNA, 30 nt, synthetic construct
  misc_feature 1..30: note = Small nuclear ribonucleoprotein G (67-76)
  source 1..30: mol_type = other RNA
atcatcatgctggaggccctcgagcgcgtg

SEQ ID NO: 28300 - RNA, 27 nt, synthetic construct
  misc_feature 1..27: note = Heat shock 70 kDa protein 1-like (174-182)
  source 1..27: mol_type = other RNA
atcatcaacgagcccaccgccgccgcg

SEQ ID NO: 28301 - RNA, 27 nt, synthetic construct
  misc_feature 1..27: note = Glyceraldehyde-3-phosphate dehydrogenase (206-214)
  source 1..27: mol_type = other RNA
atcatccccgccagcaccggcgccgcg

SEQ ID NO: 28302 - RNA, 36 nt, synthetic construct
  misc_feature 1..36: note = Nucleosome assembly protein 1-like 1 (319-330)
  source 1..36: mol_type = other RNA
atcctggccgccgacttcgagatcggccacttcctc

SEQ ID NO: 28303 - RNA, 27 nt, synthetic construct
  misc_feature 1..27: note = Glyceraldehyde-3-phosphate dehydrogenase (273-281)
  source 1..27: mol_type = other RNA
atcctgggctacaccgagcaccaggtg

SEQ ID NO: 28304 - RNA, 27 nt, synthetic construct
  misc_feature 1..27: note = 40S ribosomal protein S11 (72-80)
  source 1..27: mol_type = other RNA
atcctgagcggcgtggtcaccaagatg

SEQ ID NO: 28305 - RNA, 27 nt, synthetic construct
  misc_feature 1..27: note = Structural maintenance of chromosomes protein 3 (436-444)
  source 1..27: mol_type = other RNA
aagctggaccaggacctcaacgaggtg

SEQ ID NO: 28306 - RNA, 39 nt, synthetic construct
  misc_feature 1..39: note = Centrin-2 (111-123)
  source 1..39: mol_type = other RNA
aagctgttcgacgacgacgagaccggcaagatcagcttc

SEQ ID NO: 28307 - RNA, 33 nt, synthetic construct
  misc_feature 1..33: note = GTP-binding nuclear protein Ran (167-177)
  source 1..33: mol_type = other RNA
aagctgatcggcgaccccaacctcgagttcgtg

SEQ ID NO: 28308 - RNA, 33 nt, synthetic construct
  misc_feature 1..33: note = 40S ribosomal protein S3a (227-237)
  source 1..33: mol_type = other RNA
aagctgatggagctccacggcgaggggagctcc

SEQ ID NO: 28309 - RNA, 30 nt, synthetic construct
  misc_feature 1..30: note = ATP-dependent RNA helicase A (696-705)
  source 1..30: mol_type = other RNA
aaggtgttcgaccccgtcccggtgggcgtg

SEQ ID NO: 28310 - RNA, 24 nt, synthetic construct
  misc_feature 1..24: note = Gamma-interferon-inducible lysosomal thiol reductase (27-34)
  source 1..24: mol_type = other RNA
ctgctcgacgtgcccaccgccgcc

SEQ ID NO: 28311 - RNA, 27 nt, synthetic construct
  misc_feature 1..27: note = Heat shock cognate 71 kDa protein (393-401)
  source 1..27: mol_type = other RNA
ctgctcgacgtgacccccctgagcctg

SEQ ID NO: 28312 - RNA, 24 nt, synthetic construct
  misc_feature 1..24: note = T-complex protein 1 subunit eta (68-75)
  source 1..24: mol_type = other RNA
ctgctcgacgtggtccaccccgcc

SEQ ID NO: 28313 - RNA, 27 nt, synthetic construct
  misc_feature 1..27: note = T-complex protein 1 subunit eta (68-76)
  source 1..27: mol_type = other RNA
ctgctcgacgtggtccaccccgccgcc

SEQ ID NO: 28314 - RNA, 27 nt, synthetic construct
  misc_feature 1..27: note = Transmembrane emp24 domain-containing protein 10 (23-31)
  source 1..27: mol_type = other RNA
ctgctcggcccccgcctggtgctggcc

SEQ ID NO: 28315 - RNA, 33 nt, synthetic construct
  misc_feature 1..33: note = Glyceraldehyde-3-phosphate dehydrogenase (174-184)
  source 1..33: mol_type = other RNA
ctgatgaccaccgtgcacgccatcacggccacc

SEQ ID NO: 28316 - RNA, 27 nt, synthetic construct
  misc_feature 1..27: note = Proteasome-associated protein ECM29 homolog (162-170)
  source 1..27: mol_type = other RNA
aacctggccgagaagcccaagaccgtg

SEQ ID NO: 28317 - RNA, 27 nt, synthetic construct
  misc_feature 1..27: note = GPN-loop GTPase 1 (42-50)
  source 1..27: mol_type = other RNA
aacctggaccccgccgtgcacgaggtc

SEQ ID NO: 28318 - RNA, 27 nt, synthetic construct
  misc_feature 1..27: note = 60S ribosomal protein L10a (143-151)
  source 1..27: mol_type = other RNA
aacatggtggccaaggtcgacgaggtg

SEQ ID NO: 28319 - RNA, 27 nt, synthetic construct
  misc_feature 1..27: note = Heterogeneous nuclear ribonucleoproteins C1/C2 (142-150)
  source 1..27: mol_type = other RNA
cgcgtgcccccgcccccccccatcgcc

SEQ ID NO: 28320 - RNA, 24 nt, synthetic construct
  misc_feature 1..24: note = Hydroxymethylglutaryl-CoA synthase, cytoplasmic (447-454)
  source 1..24: mol_type = other RNA
agcctgttcgagggcacctggtac

SEQ ID NO: 28321 - RNA, 27 nt, synthetic construct
  misc_feature 1..27: note = Hydroxymethylglutaryl-CoA synthase, cytoplasmic (482-490)
  source 1..27: mol_type = other RNA
agcctgttcgagggcacctggtacctc

SEQ ID NO: 28322 - RNA, 21 nt, synthetic construct
  misc_feature 1..21: note = Sterol O-acyltransferase 1 (127-133)
  source 1..21: mol_type = other RNA
agcctgctcgacgagctgctg

SEQ ID NO: 28323 - RNA, 27 nt, synthetic construct
  misc_feature 1..27: note = Tuberin (526-534)
  source 1..27: mol_type = other RNA
agcctgctcgacatcatcgagaaggtg

SEQ ID NO: 28324 - RNA, 27 nt, synthetic construct
  misc_feature 1..27: note = Eukaryotic translation elongation factor 1 epsilon-1 (8-16)
  source 1..27: mol_type = other RNA
agcctgctcgagaagtccctgggcctg

SEQ ID NO: 28325 - RNA, 27 nt, synthetic construct
  misc_feature 1..27: note = Neuroblast differentiation-associated protein AHNAK (2580-2588)
  source 1..27: mol_type = other RNA
agcatgcccgacttcgacctgcacctc

SEQ ID NO: 28326 - RNA, 27 nt, synthetic construct
  misc_feature 1..27: note = Phosphoinositide 3-kinase regulatory subunit 4 (906-914)
  source 1..27: mol_type = other RNA
agccaggtgcccgaggtcaccaccgtg

SEQ ID NO: 28327 - RNA, 36 nt, synthetic construct
  misc_feature 1..36: note = Annexin A2 (184-195)
  source 1..36: mol_type = other RNA
agcgtgatcgactacgagctgatcgaccaggacgcc

SEQ ID NO: 28328 - RNA, 33 nt, synthetic construct
  misc_feature 1..33: note = U2 small nuclear ribonucleoprotein A' (213-223)
  source 1..33: mol_type = other RNA
accctggccgaggtggagcgcctcaagggcctg

SEQ ID NO: 28329 - RNA, 27 nt, synthetic construct
  misc_feature 1..27: note = Serine/threonine-protein kinase SIK1 (473-481)
  source 1..27: mol_type = other RNA
accctggccgaggtgagcacccgcctc

SEQ ID NO: 28330 - RNA, 27 nt, synthetic construct
  misc_feature 1..27: note = G2/mitotic-specific cyclin-B1 (321-329)
  source 1..27: mol_type = other RNA
accctggccaagtacctcatggagctg

SEQ ID NO: 28331 - RNA, 33 nt, synthetic construct
  misc_feature 1..33: note = Nucleolin (501-511)
  source 1..33: mol_type = other RNA
accctgcaggaggtgttcgagaaggccaccttc

SEQ ID NO: 28332 - RNA, 30 nt, synthetic construct
  misc_feature 1..30: note = L-lactate dehydrogenase B chain (323-332)
  source 1..30: mol_type = other RNA
accctgtgggacatccagaaggacctcaag

SEQ ID NO: 28333 - RNA, 27 nt, synthetic construct
  misc_feature 1..27: note = L-lactate dehydrogenase A chain (322-330)
  source 1..27: mol_type = other RNA
accctgtggggcatccagaaggagctc

SEQ ID NO: 28334 - RNA, 27 nt, synthetic construct
  misc_feature 1..27: note = Aladin (17-25)
  source 1..27: mol_type = other RNA
accctgtacgagcacaacaacgagctc

SEQ ID NO: 28335 - RNA, 33 nt, synthetic construct
  misc_feature 1..33: note = Microtubule-associated protein 4 (335-345)
  source 1..33: mol_type = other RNA
gtgctgcccaccgagaccgaggtcgccccggcc

SEQ ID NO: 28336 - RNA, 27 nt, synthetic construct
  misc_feature 1..27: note = Peroxiredoxin-5, mitochondrial (184-192)
  source 1..27: mol_type = other RNA
gtggtccaggacggcatcgtgaaggcc

SEQ ID NO: 28337 - RNA, 30 nt, synthetic construct
  misc_feature 1..30: note = HLA class I histocompatibility antigen, B-7 alpha chain (140-149)
  source 1..30: mol_type = other RNA
tacgcctacgacggcaaggactacatcgcc

SEQ ID NO: 28338 - RNA, 21 nt, synthetic construct
  misc_feature 1..21: note = Carbamoyl-phosphate synthase (ammonia), mitochondrial (389-395)
  source 1..21: mol_type = other RNA
tacctgttcgacagcttcttc

SEQ ID NO: 28339 - RNA, 24 nt, synthetic construct
  misc_feature 1..24: note = Bax inhibitor 1 (140-147)
  source 1..24: mol_type = other RNA
tacctgttcctcggcgggatcctg

SEQ ID NO: 28340 - RNA, 30 nt, synthetic construct
  misc_feature 1..30: note = Coiled-coil domain-containing protein 12 (62-71)
  source 1..30: mol_type = other RNA
tacgtgcccgaggacgaggacctgaagaag

SEQ ID NO: 28341 - RNA, 24 nt, synthetic construct
  misc_feature 1..24: note = Small nuclear ribonucleoprotein-associated proteins B and B' (18-25)
  source 1..24: mol_type = other RNA
cgcatcttcatcggcaccttcaag

SEQ ID NO: 28342 - RNA, 54 nt, synthetic construct
  misc_feature 1..54: note = ATP synthase-coupling factor 6, mitochondrial (91-108)
  source 1..54: mol_type = other RNA
cccaccttcaagttcgaggacccgaagttcgaggtgatcgagaagccccaggcc

SEQ ID NO: 28343 - RNA, 27 nt, synthetic construct
  misc_feature 1..27: note = Kinectin (794-802)
  source 1..27: mol_type = other RNA
agcctggtggaggagctcaagaaggtc

SEQ ID NO: 28344 - RNA, 27 nt, synthetic construct
  misc_feature 1..27: note = Kinectin (600-608)
  source 1..27: mol_type = other RNA
gtgctggccgaggagctccacaaggtc

SEQ ID NO: 28345 - RNA, 33 nt, synthetic construct
  misc_feature 1..33: note = HLA class I histocompatibility antigen, B-15 alpha chain (193-203)
  source 1..33: mol_type = other RNA
cgccggtacctggagaacggcaaggagaccctc

SEQ ID NO: 28346 - RNA, 27 nt, synthetic construct
  misc_feature 1..27: note = Keratin, type I cytoskeletal 18 (307-315)
  source 1..27: mol_type = other RNA
gccctgctcaacatcaaggtgaagctg

SEQ ID NO: 28347 - RNA, 30 nt, synthetic construct
  misc_feature 1..30: note = Heat shock protein HSP 90-beta (346-355)
  source 1..30: mol_type = other RNA
gccgaggacaaggagaactacaagaagttc

SEQ ID NO: 28348 - RNA, 27 nt, synthetic construct
  misc_feature 1..27: note = 40S ribosomal protein S5 (12-20)
  source 1..27: mol_type = other RNA
gccgagacccccgacatcaagctgttc

SEQ ID NO: 28349 - RNA, 36 nt, synthetic construct
  misc_feature 1..36: note = Ribonucleoside-diphosphate reductase subunit M2 (165-176)
  source 1..36: mol_type = other RNA
gaggaggtggacctgagcaaggacatccagcactgg

SEQ ID NO: 28350 - RNA, 30 nt, synthetic construct
  misc_feature 1..30: note = Nucleosome assembly protein 1-like 4 (86-95)
  source 1..30: mol_type = other RNA
gaggaggtgcacgacctggagcgcaagtac

SEQ ID NO: 28351 - RNA, 27 nt, synthetic construct
  misc_feature 1..27: note = U4/U6 small nuclear ribonucleoprotein Prp31 (105-113)
  source 1..27: mol_type = other RNA
aacgagctgaacatcatccacaagttc

SEQ ID NO: 28352 - RNA, 36 nt, synthetic construct
  misc_feature 1..36: note = ELAV-like protein 3 (161-172)
  source 1..36: mol_type = other RNA
ttcatccgcttcgacaagcggatcgaggccgaggag

SEQ ID NO: 28353 - RNA, 30 nt, synthetic construct
  misc_feature 1..30: note = ELAV-like protein 3 (29-38)
  source 1..30: mol_type = other RNA
aagaccaacctgatcgtgaactacctcccc

SEQ ID NO: 28354 - RNA, 27 nt, synthetic construct
  misc_feature 1..27: note = Minor histocompatibility protein HA-1 (137-145)
  source 1..27: mol_type = other RNA
gtgctgcacgacgacctcctggaggcc

SEQ ID NO: 28355 - RNA, 42 nt, synthetic construct
  misc_feature 1..42: note = Glyceraldehyde-3-phosphate dehydrogenase (26-39)
  source 1..42: mol_type = other RNA
ggcaaggtggacatcgtcgccatcaacgaccccttcatcgac

SEQ ID NO: 28356 - RNA, 42 nt, synthetic construct
  misc_feature 1..42: note = Low affinity immunoglobulin epsilon Fc receptor (10-23)
  source 1..42: mol_type = other RNA
atcagccaggagctggaggagctccgcgccgagcagcagcgg

SEQ ID NO: 28357 - RNA, 27 nt, synthetic construct
  misc_feature 1..27: note = 26S proteasome non-ATPase regulatory subunit 2 (299-307)
  source 1..27: mol_type = other RNA
ggccgccacggggtgttcctggagctc

SEQ ID NO: 28358 - RNA, 27 nt, synthetic construct
  misc_feature 1..27: note = ATP-dependent RNA helicase DDX3X (234-242)
  source 1..27: mol_type = other RNA
ttcctgctccccatcctgagccagatc

SEQ ID NO: 28359 - RNA, 27 nt, synthetic construct
  misc_feature 1..27: note = Putative homeodomain transcription factor 2 (652-660)
  source 1..27: mol_type = other RNA
gcccagctgctccacgtgcacgagatc

SEQ ID NO: 28360 - RNA, 27 nt, synthetic construct
  misc_feature 1..27: note = Transcription factor BTF3 (47-55)
  source 1..27: mol_type = other RNA
gagaccatcatgaaccaggagaagctg

SEQ ID NO: 28361 - RNA, 27 nt, synthetic construct
  misc_feature 1..27: note = Ribosome biogenesis protein BRX1 homolog (141-149)
  source 1..27: mol_type = other RNA
ttcctggtgcagaacatccacaccctc

SEQ ID NO: 28362 - RNA, 27 nt, synthetic construct
  misc_feature 1..27: note = Microtubule-actin cross-linking factor 1, isoforms 1/2/3/5 (2558-2566)
  source 1..27: mol_type = other RNA
caggccatcaagaacggccaggccctg

SEQ ID NO: 28363 - RNA, 39 nt, synthetic construct
  misc_feature 1..39: note = HLA class I histocompatibility antigen, B-8 alpha chain (111-123)
  source 1..39: mol_type = other RNA
cagagcgaggccggctcccacaccctgcagagcatgtac

SEQ ID NO: 28364 - RNA, 27 nt, synthetic construct
  misc_feature 1..27: note = Dynamin-2 (390-398)
  source 1..27: mol_type = other RNA
tacgccatcaagaacatccacggcgtg

SEQ ID NO: 28365 - RNA, 27 nt, synthetic construct
  misc_feature 1..27: note = ELAV-like protein 4 (96-104)
  source 1..27: mol_type = other RNA
gaccccaaggacgccgagaaggccatc

SEQ ID NO: 28366 - RNA, 27 nt, synthetic construct
  misc_feature 1..27: note = ELAV-like protein 4 (318-326)
  source 1..27: mol_type = other RNA
ggccccttcggggccgtgaacaacgtc

SEQ ID NO: 28367 - RNA, 27 nt, synthetic construct
  misc_feature 1..27: note = ELAV-like protein 4 (197-205)
  source 1..27: mol_type = other RNA
aagcccagcggcgccaccgagccgatc

SEQ ID NO: 28368 - RNA, 27 nt, synthetic construct
  misc_feature 1..27: note = ELAV-like protein 4 (265-273)
  source 1..27: mol_type = other RNA
cccccgagcgcctgctccccccgcttc

SEQ ID NO: 28369 - RNA, 27 nt, synthetic construct
  misc_feature 1..27: note = ELAV-like protein 4 (270-278)
  source 1..27: mol_type = other RNA
agcccccgcttctccccgatcaccatc

SEQ ID NO: 28370 - RNA, 36 nt, synthetic construct
  misc_feature 1..36: note = ATP-dependent RNA helicase DDX3Y (176-187)
  source 1..36: mol_type = other RNA
cacatcgagaacttcagcgacatcgacatgggcgag

SEQ ID NO: 28371 - RNA, 27 nt, synthetic construct
  misc_feature 1..27: note = Histone demethylase UTY (719-727)
  source 1..27: mol_type = other RNA
ctgctcatcgccgacaacccccagctg

SEQ ID NO: 28372 - RNA, 27 nt, synthetic construct
  misc_feature 1..27: note = Pumilio homolog 3 (149-157)
  source 1..27: mol_type = other RNA
cgcaccctggacaaggtgctcgaggtc

SEQ ID NO: 28373 - RNA, 27 nt, synthetic construct
  misc_feature 1..27: note = Histone H4 (83-91)
  source 1..27: mol_type = other RNA
accgccatggacgtggtctacgccctg

SEQ ID NO: 28374 - RNA, 27 nt, synthetic construct
  misc_feature 1..27: note = Histone H3.2 (119-127)
  source 1..27: mol_type = other RNA
accatcatgcccaaggacatccagctg

SEQ ID NO: 28375 - RNA, 39 nt, synthetic construct
  misc_feature 1..39: note = Protein S100-A9 (67-79)
  source 1..39: mol_type = other RNA
gacaccaacgccgacaagcagctgagcttcgaggagttc

SEQ ID NO: 28376 - RNA, 48 nt, synthetic construct
  misc_feature 1..48: note = Annexin A2 (209-224)
  source 1..48: mol_type = other RNA
gacgtgcccaagtggatcagcatcatgaccgagcgctccgtcccgcac

SEQ ID NO: 28377 - RNA, 39 nt, synthetic construct
  misc_feature 1..39: note = Glyceraldehyde-3-phosphate dehydrogenase (269-281)
  source 1..39: mol_type = other RNA
atcagctggtacgacaacgagttcggctactccaaccgc

SEQ ID NO: 28378 - RNA, 54 nt, synthetic construct
  misc_feature 1..54: note = Macrophage migration inhibitory factor (3-20)
  source 1..54: mol_type = other RNA
atcgtgaacaccaacgtcccccgcgccagcgtgccggacggcttcctgtccgag

SEQ ID NO: 28379 - RNA, 27 nt, synthetic construct
  misc_feature 1..27: note = Hemoglobin subunit alpha (41-49)
  source 1..27: mol_type = other RNA
ctgcgcgtggaccccgtcaacttcaag

SEQ ID NO: 28380 - RNA, 54 nt, synthetic construct
  misc_feature 1..54: note = 40S ribosomal protein S17 (118-135)
  source 1..54: mol_type = other RNA
caggtgacccagcccaccgtcggcatgaacttcaagacgccgcgcgggcccgtg

SEQ ID NO: 28381 - RNA, 48 nt, synthetic construct
  misc_feature 1..48: note = Collagen alpha-1(I) chain (857-872)
  source 1..48: mol_type = other RNA
cgcctgcccatcatcgacgtggccccgctcgacgtcggcgcccccgac

SEQ ID NO: 28382 - RNA, 48 nt, synthetic construct
  misc_feature 1..48: note = Collagen alpha-2(I) chain (949-964)
  source 1..48: mol_type = other RNA
cgccccaaggactacgaggtggacgccaccctgaagagcctcaacaac

SEQ ID NO: 28383 - RNA, 33 nt, synthetic construct
  misc_feature 1..33: note = T-complex protein 1 subunit theta (369-379)
  source 1..33: mol_type = other RNA
gccgaggccttcgaggcgatcccccgcgccctg

SEQ ID NO: 28384 - RNA, 27 nt, synthetic construct
  misc_feature 1..27: note = Cullin-1 (484-492)
  source 1..27: mol_type = other RNA
gccgaggccagcatgatctccaagctg

SEQ ID NO: 28385 - RNA, 27 nt, synthetic construct
  misc_feature 1..27: note = DNA replication licensing factor MCM7 (328-336)
  source 1..27: mol_type = other RNA
gccgaggaggacttctacgagaagctg

SEQ ID NO: 28386 - RNA, 30 nt, synthetic construct
  misc_feature 1..30: note = BolA-like protein 2 (61-70)
  source 1..30: mol_type = other RNA
gccgaggagctgccccacatccacgccttc

SEQ ID NO: 28387 - RNA, 27 nt, synthetic construct
  misc_feature 1..27: note = DNA topoisomerase 2-beta (526-534)
  source 1..27: mol_type = other RNA
gccgagatcaacaacatcatcaagatc

SEQ ID NO: 28388 - RNA, 30 nt, synthetic construct
  misc_feature 1..30: note = Cofilin-1 (150-159)
  source 1..30: mol_type = other RNA
gccgagaagctgggcgggagcgccgtgatc

SEQ ID NO: 28389 - RNA, 27 nt, synthetic construct
  misc_feature 1..27: note = Proteasome subunit alpha type-4 (137-145)
  source 1..27: mol_type = other RNA
gccgagaaggtggagatcgccaccctg

SEQ ID NO: 28390 - RNA, 27 nt, synthetic construct
  misc_feature 1..27: note = Bifunctional glutamate/proline-tRNA ligase (1393-1401)
  source 1..27: mol_type = other RNA
gccgagaacgaggccgagaccaagctg

SEQ ID NO: 28391 - RNA, 30 nt, synthetic construct
  misc_feature 1..30: note = Sodium/potassium-transporting ATPase subunit alpha-1 (677-686)
  source 1..30: mol_type = other RNA
gccgagaacggcttcctgcccatccacctc

SEQ ID NO: 28392 - RNA, 30 nt, synthetic construct
  misc_feature 1..30: note = Eukaryotic translation initiation factor 4 gamma 1 (1531-1540)
  source 1..30: mol_type = other RNA
gccgagcagcagggcaagggggtggccctg

SEQ ID NO: 28393 - RNA, 36 nt, synthetic construct
  misc_feature 1..36: note = T-complex protein 1 subunit eta (76-87)
  source 1..36: mol_type = other RNA
gccgaggtgggcgacgggaccaccagcgtcacgctg

SEQ ID NO: 28394 - RNA, 27 nt, synthetic construct
  misc_feature 1..27: note = MICOS complex subunit MIC60 (166-174)
  source 1..27: mol_type = other RNA
ggcgaggggaagcccaccccggccctg

SEQ ID NO: 28395 - RNA, 33 nt, synthetic construct
  misc_feature 1..33: note = Peptidyl-prolyl cis-trans isomerase A (80-90)
  source 1..33: mol_type = other RNA
ggcgagaagttcgaggacgagaacttcatcctg

SEQ ID NO: 28396 - RNA, 27 nt, synthetic construct
  misc_feature 1..27: note = NADH dehydrogenase (ubiquinone) 1 beta subcomplex subunit 7 (127-135)
  source 1..27: mol_type = other RNA
ggcgaggtggaccccaaggtcgccctg

SEQ ID NO: 28397 - RNA, 30 nt, synthetic construct
  misc_feature 1..30: note = G2/mitotic-specific cyclin-B1 (62-71)
  source 1..30: mol_type = other RNA
ggcgaggtggacgtcgagcagcacaccctg

SEQ ID NO: 28398 - RNA, 42 nt, synthetic construct
  misc_feature 1..42: note = Zinc finger MYM-type protein 2 (207-220)
  source 1..42: mol_type = other RNA
ggcgagtacctgcccagcaagggggccggcaacaacgtgctc

SEQ ID NO: 28399 - RNA, 30 nt, synthetic construct
  misc_feature 1..30: note = Transforming protein RhoA (46-55)
  source 1..30: mol_type = other RNA
atcgaggtggacggcaagcaggtcgagctg

SEQ ID NO: 28400 - RNA, 33 nt, synthetic construct
  misc_feature 1..33: note = 40S ribosomal protein S17 (96-106)
  source 1..33: mol_type = other RNA
atcgaggtggaccccgacaccaaggagatgctg

SEQ ID NO: 28401 - RNA, 30 nt, synthetic construct
  misc_feature 1..30: note = Putative endoplasmin-like protein (341-350)
  source 1..30: mol_type = other RNA
aaggaggacgaggacgacaagaccgtgctg

SEQ ID NO: 28402 - RNA, 30 nt, synthetic construct
  misc_feature 1..30: note = Plasminogen activator inhibitor 1 RNA-binding protein (182-191)
  source 1..30: mol_type = other RNA
aaggaggagggccccaaggagatgaccctg

SEQ ID NO: 28403 - RNA, 27 nt, synthetic construct
  misc_feature 1..27: note = Uncharacterized protein C20orf24 (7-15)
  source 1..27: mol_type = other RNA
aaggaggagcccccgcagccccagctg

SEQ ID NO: 28404 - RNA, 30 nt, synthetic construct
  misc_feature 1..30: note = Importin subunit beta-1 (183-192)
  source 1..30: mol_type = other RNA
aaggaggagcccagcaacaacgtgaagctg

SEQ ID NO: 28405 - RNA, 33 nt, synthetic construct
  misc_feature 1..33: note = Heat shock protein HSP 90-beta (452-462)
  source 1..33: mol_type = other RNA
aaggagttcgacggcaagagcctggtgtccgtc

SEQ ID NO: 28406 - RNA, 27 nt, synthetic construct
  misc_feature 1..27: note = Melanoma-associated antigen D2 (337-345)
  source 1..27: mol_type = other RNA
aaggagatcgacaagaacgaccacctg

SEQ ID NO: 28407 - RNA, 30 nt, synthetic construct
  misc_feature 1..30: note = Protein Spindly (380-389)
  source 1..30: mol_type = other RNA
aaggagatcgagagcaccaagggcgagctg

SEQ ID NO: 28408 - RNA, 30 nt, synthetic construct
  misc_feature 1..30: note = Coatomer subunit epsilon (241-250)
  source 1..30: mol_type = other RNA
aaggagaacgacttcgaccgcctggtgctc

SEQ ID NO: 28409 - RNA, 27 nt, synthetic construct
  misc_feature 1..27: note = Targeting protein for Xklp2 (238-246)
  source 1..27: mol_type = other RNA
aaggaggtgaacttcaccagcgagctg

SEQ ID NO: 28410 - RNA, 27 nt, synthetic construct
  misc_feature 1..27: note = H/ACA ribonucleoprotein complex subunit 4 (151-159)
  source 1..27: mol_type = other RNA
aaggagtacgtgggcatcgtccgcctg

SEQ ID NO: 28411 - RNA, 30 nt, synthetic construct
  misc_feature 1..30: note = H/ACA ribonucleoprotein complex subunit 3 (8-17)
  source 1..30: mol_type = other RNA
aacgagcagggcgaccgcgtgtacaccctg

SEQ ID NO: 28412 - RNA, 30 nt, synthetic construct
  misc_feature 1..30: note = Cerebellar degeneration-related protein 2 (148-157)
  source 1..30: mol_type = other RNA
cgcgagctggaggagaccaaccagaagctc

SEQ ID NO: 28413 - RNA, 27 nt, synthetic construct
  misc_feature 1..27: note = Exocyst complex component 2 (640-648)
  source 1..27: mol_type = other RNA
cgcctgttcgagaactacatcgagctc

SEQ ID NO: 28414 - RNA, 27 nt, synthetic construct
  misc_feature 1..27: note = 1-phosphatidylinositol 3-phosphate 5-kinase (1841-1849)
  source 1..27: mol_type = other RNA
agcgaggaggacttcatccgctccctg

SEQ ID NO: 28415 - RNA, 30 nt, synthetic construct
  misc_feature 1..30: note = Hydroxymethylglutaryl-CoA synthase, cytoplasmic (246-255)
  source 1..30: mol_type = other RNA
agcgagtaccccatcgtggacggcaagctg

SEQ ID NO: 28416 - RNA, 33 nt, synthetic construct
  misc_feature 1..33: note = Proteasome activator complex subunit 3 (220-230)
  source 1..33: mol_type = other RNA
accgagatcgacgagaaggagtacatcagcctg

SEQ ID NO: 28417 - RNA, 45 nt, synthetic construct
  misc_feature 1..45: note = HLA class I histocompatibility antigen, B-15 alpha chain (240-254)
  source 1..45: mol_type = other RNA
acctggcagcgcgacggcgaggaccagacccaggacacggagctg

SEQ ID NO: 28418 - RNA, 30 nt, synthetic construct
  misc_feature 1..30: note = Nuclear pore complex protein Nup205 (350-359)
  source 1..30: mol_type = other RNA
gtggaggacgaccgcaccctgcagagcctc

SEQ ID NO: 28419 - RNA, 30 nt, synthetic construct
  misc_feature 1..30: note = Septin-2 (86-95)
  source 1..30: mol_type = other RNA
gtggagatcgaggagcgcggcgtcaagctg

SEQ ID NO: 28420 - RNA, 27 nt, synthetic construct
  misc_feature 1..27: note = Hemoglobin subunit alpha (25-33)
  source 1..27: mol_type = other RNA
tacggcgccgaggccctggagcgcatg

SEQ ID NO: 28421 - RNA, 42 nt, synthetic construct
  misc_feature 1..42: note = HLA class I histocompatibility antigen, A-1 alpha chain (29-42)
  source 1..42: mol_type = other RNA
gacacccagttcgtgcgcttcgacagcgacgccgcctcccag

SEQ ID NO: 28422 - RNA, 27 nt, synthetic construct
  misc_feature 1..27: note = Neutral amino acid transporter B(0) (533-541)
  source 1..27: mol_type = other RNA
gtggccagcgagaaggagtccgtcatg

SEQ ID NO: 28423 - RNA, 27 nt, synthetic construct
  misc_feature 1..27: note = Lysosomal protective protein (20-28)
  source 1..27: mol_type = other RNA
atccgcgccgcccccccgcccctgttc

SEQ ID NO: 28424 - RNA, 27 nt, synthetic construct
  misc_feature 1..27: note = Serine/threonine-protein kinase 38-like (444-452)
  source 1..27: mol_type = other RNA
aagcgcttcgagggcctgacccagcgg

SEQ ID NO: 28425 - RNA, 48 nt, synthetic construct
  misc_feature 1..48: note = Alpha-1B-glycoprotein (173-188)
  source 1..48: mol_type = other RNA
gcccccgtggagctgatcctcagcgacgagaccctgccggcccccgag

SEQ ID NO: 28426 - RNA, 39 nt, synthetic construct
  misc_feature 1..39: note = Neuropilin-2 (696-708)
  source 1..39: mol_type = other RNA
gagggccagtacgcccgcctgatcagccccccggtgcac

SEQ ID NO: 28427 - RNA, 45 nt, synthetic construct
  misc_feature 1..45: note = Calreticulin (106-120)
  source 1..45: mol_type = other RNA
ggcgggggctacgtgaagctgttccccaacagcctcgaccagacc

SEQ ID NO: 28428 - RNA, 57 nt, synthetic construct
  misc_feature 1..57: note = Annexin A2 (50-68)
  source 1..57: mol_type = other RNA
ggcgtggacgaggtcaccatcgtgaacatcctgaccaaccgcagcaacgcccagcgg

SEQ ID NO: 28429 - RNA, 45 nt, synthetic construct
  misc_feature 1..45: note = Filamin-A (2114-2128)
  source 1..45: mol_type = other RNA
aaccccgccgagttcgtggtcaacaccagcaacgccggcgcgggg

SEQ ID NO: 28430 - RNA, 51 nt, synthetic construct
  misc_feature 1..51: note = Syntenin-1 (25-41)
  source 1..51: mol_type = other RNA
aaccccgccaacccggccatcctgagcgaggcgtccgcccccatcccccac

SEQ ID NO: 28431 - RNA, 42 nt, synthetic construct
  misc_feature 1..42: note = Transferrin receptor protein 1 (680-693)
  source 1..42: mol_type = other RNA
cgcgtggagtaccacttcctgagcccctacgtctccccgaag

SEQ ID NO: 28432 - RNA, 39 nt, synthetic construct
  misc_feature 1..39: note = Cathepsin D (230-242)
  source 1..39: mol_type = other RNA
agcttctacctgtcccgcgaccccgacgcccagccgggc

SEQ ID NO: 28433 - RNA, 63 nt, synthetic construct
  misc_feature 1..63: note = HLA class I histocompatibility antigen, B-51 alpha chain (27-47)
  source 1..63: mol_type = other RNA
gtggacgacacccagttcgtccgcttcgacagcgacgccgcctccccccggaccgagccgcgc

SEQ ID NO: 28434 - RNA, 51 nt, synthetic construct
  misc_feature 1..51: note = Profilin-1 (35-51)
  source 1..51: mol_type = other RNA
gtgcccggcaagaccttcgtcaacatcaccccggccgaggtgggggtgctg

SEQ ID NO: 28435 - RNA, 27 nt, synthetic construct
  misc_feature 1..27: note = Lymphocyte-specific protein 1 (197-205)
  source 1..27: mol_type = other RNA
aagctgatcgaccgcaccgagagcctc

SEQ ID NO: 28436 - RNA, 27 nt, synthetic construct
  misc_feature 1..27: note = Synemin (426-434)
  source 1..27: mol_type = other RNA
cgcaccttcagccccacctacggcctg

SEQ ID NO: 28437 - RNA, 27 nt, synthetic construct
  misc_feature 1..27: note = Insulin receptor substrate 2 (1097-1105)
  source 1..27: mol_type = other RNA
cgcgtggccagccccacctccggcgtc

SEQ ID NO: 28438 - RNA, 27 nt, synthetic construct
  misc_feature 1..27: note = ETS translocation variant 5 (45-53)
  source 1..27: mol_type = other RNA
gagctgttccaggacctcagccagctg

SEQ ID NO: 28439 - RNA, 27 nt, synthetic construct
  misc_feature 1..27: note = E3 ubiquitin-protein ligase Mdm2 (53-61)
  source 1..27: mol_type = other RNA
gtgctgttctacctcggccagtacatc

SEQ ID NO: 28440 - RNA, 27 nt, synthetic construct
  misc_feature 1..27: note = U1 small nuclear ribonucleoprotein 70 kDa (423-431)
  source 1..27: mol_type = other RNA
tacctggcccccgagaacggctacctc

SEQ ID NO: 28441 - RNA, 27 nt, synthetic construct
  misc_feature 1..27: note = Coatomer subunit gamma-1 (147-155)
  source 1..27: mol_type = other RNA
gccatcgtggacaaggtccccagcgtg

SEQ ID NO: 28442 - RNA, 27 nt, synthetic construct
  misc_feature 1..27: note = T-complex protein 1 subunit gamma (129-137)
  source 1..27: mol_type = other RNA
gccctggacgacatgatcagcaccctc

SEQ ID NO: 28443 - RNA, 27 nt, synthetic construct
  misc_feature 1..27: note = DCN1-like protein 1 (94-102)
  source 1..27: mol_type = other RNA
gccctggaccccgccagcatctccgtg

SEQ ID NO: 28444 - RNA, 27 nt, synthetic construct
  misc_feature 1..27: note = U3 small nucleolar ribonucleoprotein protein IMP3 (78-86)
  source 1..27: mol_type = other RNA
gccctgctcgacaagctgtacgccctg

SEQ ID NO: 28445 - RNA, 27 nt, synthetic construct
  misc_feature 1..27: note = Nuclear pore complex protein Nup205 (318-326)
  source 1..27: mol_type = other RNA
gccctgctcgaccgcatcgtgagcgtc

SEQ ID NO: 28446 - RNA, 27 nt, synthetic construct
  misc_feature 1..27: note = Phosphoglycerate kinase 1 (354-362)
  source 1..27: mol_type = other RNA
gccctgatggacgaggtggtcaaggcc

SEQ ID NO: 28447 - RNA, 27 nt, synthetic construct
  misc_feature 1..27: note = Diphthamide biosynthesis protein 1 (138-146)
  source 1..27: mol_type = other RNA
gcccaggacttccgcgtgctgtacgtc

SEQ ID NO: 28448 - RNA, 27 nt, synthetic construct
  misc_feature 1..27: note = Methionine aminopeptidase 2 (433-441)
  source 1..27: mol_type = other RNA
gcccagttcgagcacaccatcctgctc

SEQ ID NO: 28449 - RNA, 27 nt, synthetic construct
  misc_feature 1..27: note = GTP-binding nuclear protein Ran (215-223)
  source 1..27: mol_type = other RNA
gcccagtacgagcacgacctggaggtg

SEQ ID NO: 28450 - RNA, 33 nt, synthetic construct
  misc_feature 1..33: note = 60S acidic ribosomal protein P0 (108-118)
  source 1..33: mol_type = other RNA
ttcctggccgaccccagcgccttcgtggcggcc

SEQ ID NO: 28451 - RNA, 33 nt, synthetic construct
  misc_feature 1..33: note = 60S ribosomal protein L10a (110-120)
  source 1..33: mol_type = other RNA
ttcctggccagcgagtccctcatcaagcagatc

SEQ ID NO: 28452 - RNA, 27 nt, synthetic construct
  misc_feature 1..27: note = Dipeptidyl peptidase 9 (806-814)
  source 1..27: mol_type = other RNA
ttcctggacgagaacgtgcacttcttc

SEQ ID NO: 28453 - RNA, 27 nt, synthetic construct
  misc_feature 1..27: note = ATP-binding cassette sub-family F member 2 (539-547)
  source 1..27: mol_type = other RNA
ttcctggacgagcccaccaaccacctc

SEQ ID NO: 28454 - RNA, 27 nt, synthetic construct
  misc_feature 1..27: note = Chloride intracellular channel protein 4 (178-186)
  source 1..27: mol_type = other RNA
ttcctggacggcaacgagatgaccctc

SEQ ID NO: 28455 - RNA, 27 nt, synthetic construct
  misc_feature 1..27: note = 3-hydroxy-3-methylglutaryl-coenzyme A reductase (113-121)
  source 1..27: mol_type = other RNA
ttcctggacaaggagctcaccggcctg

SEQ ID NO: 28456 - RNA, 27 nt, synthetic construct
  misc_feature 1..27: note = Acyl-protein thioesterase 2 (218-226)
  source 1..27: mol_type = other RNA
ttcctggagaagctcctgcccccggtg

SEQ ID NO: 28457 - RNA, 27 nt, synthetic construct
  misc_feature 1..27: note = Macrophage migration inhibitory factor (17-25)
  source 1..27: mol_type = other RNA
ttcctgagcgagctcacccagcagctg

SEQ ID NO: 28458 - RNA, 27 nt, synthetic construct
  misc_feature 1..27: note = 26S proteasome non-ATPase regulatory subunit 14 (61-69)
  source 1..27: mol_type = other RNA
ttcgtggacgactacaccgtccgcgtg

SEQ ID NO: 28459 - RNA, 30 nt, synthetic construct
  misc_feature 1..30: note = Golgi-specific brefeldin A-resistance guanine nucleotide exchange factor 1 (1053-1062)
  source 1..30: mol_type = other RNA
ttcgtggaccccaacggcaagatcagcctg

SEQ ID NO: 28460 - RNA, 27 nt, synthetic construct
  misc_feature 1..27: note = E3 ubiquitin-protein ligase BRE1A (401-409)
  source 1..27: mol_type = other RNA
cacctggacgaggcccgcaccctcctg

SEQ ID NO: 28461 - RNA, 27 nt, synthetic construct
  misc_feature 1..27: note = Abl interactor 2 (89-97)
  source 1..27: mol_type = other RNA
atcctggacgacatcggccacggggtg

SEQ ID NO: 28462 - RNA, 27 nt, synthetic construct
  misc_feature 1..27: note = Nuclear pore complex protein Nup88 (183-191)
  source 1..27: mol_type = other RNA
atcctggacccccacgtggtcctcctg

SEQ ID NO: 28463 - RNA, 27 nt, synthetic construct
  misc_feature 1..27: note = Thioredoxin-like protein 4A (40-48)
  source 1..27: mol_type = other RNA
aagatggacgaggtgctgtacagcatc

SEQ ID NO: 28464 - RNA, 27 nt, synthetic construct
  misc_feature 1..27: note = Protein BTG2 (73-81)
  source 1..27: mol_type = other RNA
aagatggaccccatcatcagccgcgtg

SEQ ID NO: 28465 - RNA, 27 nt, synthetic construct
  misc_feature 1..27: note = Elongation factor 2 (159-167)
  source 1..27: mol_type = other RNA
aagatggaccgcgccctgctcgagctg

SEQ ID NO: 28466 - RNA, 24 nt, synthetic construct
  misc_feature 1..24: note = Transmembrane emp24 domain-containing protein 2 (42-49)
  source 1..24: mol_type = other RNA
aagatgggcctgatcttcgaggtg

SEQ ID NO: 28467 - RNA, 24 nt, synthetic construct
  misc_feature 1..24: note = 60S ribosomal protein L19 (119-126)
  source 1..24: mol_type = other RNA
ctgatggagcacatccacaagctc

SEQ ID NO: 28468 - RNA, 27 nt, synthetic construct
  misc_feature 1..27: note = Glycogen phosphorylase, muscle form (271-279)
  source 1..27: mol_type = other RNA
aacctggccgagaacatcagccgcgtg

SEQ ID NO: 28469 - RNA, 27 nt, synthetic construct
  misc_feature 1..27: note = Junction plakoglobin (5-13)
  source 1..27: mol_type = other RNA
aacctgatggagcagcccatcaaggtg

SEQ ID NO: 28470 - RNA, 30 nt, synthetic construct
  misc_feature 1..30: note Dolichyl-diphosphooligosaccharide-proteinosyltransferase subunit 2 (51-60)
  source 1..30: mol_type = other RNA
cgcctggacgagctcggcggggtgtacctg

SEQ ID NO: 28471 - RNA, 27 nt, synthetic construct
  misc_feature 1..27: note = Putative eukaryotic translation initiation factor 2 subunit 3-like protein (17-25)
  source 1..27: mol_type = other RNA
cgccaggacctgaccaccctcgacgtg

SEQ ID NO: 28472 - RNA, 27 nt, synthetic construct
  misc_feature 1..27: note = Serine/threonine-protein kinase/endoribonuclease IRE1 (37-45)
  source 1..27: mol_type = other RNA
accctggacggcagcctccacgccgtg

SEQ ID NO: 28473 - RNA, 33 nt, synthetic construct
  misc_feature 1..33: note = Interferon-induced GTP-binding protein Mx1 (175-185)
  source 1..33: mol_type = other RNA
accctgatcgacctccccggcatcacccgcgtg

SEQ ID NO: 28474 - RNA, 27 nt, synthetic construct
  misc_feature 1..27: note = Mitotic spindle-associated MMXD complex subunit MIP18 (97-105)
  source 1..27: mol_type = other RNA
accctgatcggcctcagcatcaaggtg

SEQ ID NO: 28475 - RNA, 27 nt, synthetic construct
  misc_feature 1..27: note = Sulfiredoxin-1 (114-122)
  source 1..27: mol_type = other RNA
accctgagcgacctccgcgtgtacctg

SEQ ID NO: 28476 - RNA, 30 nt, synthetic construct
  misc_feature 1..30: note = Nucleolar GTP-binding protein 1 (322-331)
  source 1..30: mol_type = other RNA
accctgaccgaggagggcgtgatcaaggtc

SEQ ID NO: 28477 - RNA, 27 nt, synthetic construct
  misc_feature 1..27: note = 10 kDa heat shock protein, mitochondrial (81-89)
  source 1..27: mol_type = other RNA
gtgctggacgacaaggactacttcctc

SEQ ID NO: 28478 - RNA, 27 nt, synthetic construct
  misc_feature 1..27: note = Anoctamin-6 (137-145)
  source 1..27: mol_type = other RNA
gtgctggacgacaagctcgtcttcgtg

SEQ ID NO: 28479 - RNA, 27 nt, synthetic construct
  misc_feature 1..27: note = Nucleolar pre-ribosomal-associated protein 1 (1314-1322)
  source 1..27: mol_type = other RNA
gtgctggaccagaagatcctcctgctg

SEQ ID NO: 28480 - RNA, 33 nt, synthetic construct
  misc_feature 1..33: note = RNA-binding protein 34 (333-343)
  source 1..33: mol_type = other RNA
gtgctgttcgagaacaccgacagcgtccacctc

SEQ ID NO: 28481 - RNA, 27 nt, synthetic construct
  misc_feature 1..27: note = Eukaryotic translation initiation factor 4 gamma 1 (680-688)
  source 1..27: mol_type = other RNA
gtgctgatgaccgaggacatcaagctc

SEQ ID NO: 28482 - RNA, 33 nt, synthetic construct
  misc_feature 1..33: note = Phosphoglycerate kinase 1 (407-417)
  source 1..33: mol_type = other RNA
gtgctgcccggcgtcgacgccctcagcaacatc

SEQ ID NO: 28483 - RNA, 30 nt, synthetic construct
  misc_feature 1..30: note = S-adenosylmethionine synthase isoform type-2 (235-244)
  source 1..30: mol_type = other RNA
tacctggacgaggacaccatctaccacctc

SEQ ID NO: 28484 - RNA, 27 nt, synthetic construct
  misc_feature 1..27: note = Transmembrane protein 209 (409-417)
  source 1..27: mol_type = other RNA
tacctgttcgagcgcatcaaggagctc

SEQ ID NO: 28485 - RNA, 30 nt, synthetic construct
  misc_feature 1..30: note = HLA class I histocompatibility antigen, B-13 alpha chain (26-35)
  source 1..30: mol_type = other RNA
tacgtggacgacacccagttcgtccgcttc

SEQ ID NO: 28486 - RNA, 36 nt, synthetic construct
  misc_feature 1..36: note = Melanoma antigen recognized by T-cells 1 (100-111)
  source 1..36: mol_type = other RNA
gcccccccggcctacgagaagctgagcgcggagcag

SEQ ID NO: 28487 - RNA, 45 nt, synthetic construct
  misc_feature 1..45: note = Melanoma antigen recognized by T-cells 1 (100-114)
  source 1..45: mol_type = other RNA
gcccccccggcctacgagaagctgagcgcggagcagtcccccccc

SEQ ID NO: 28488 - RNA, 48 nt, synthetic construct
  misc_feature 1..48: note = Melanoma antigen recognized by T-cells 1 (100-115)
  source 1..48: mol_type = other RNA
gcccccccggcctacgagaagctgagcgcggagcagtccccccccccc

SEQ ID NO: 28489 - RNA, 51 nt, synthetic construct
  misc_feature 1..51: note = Melanoma antigen recognized by T-cells 1 (100-116)
  source 1..51: mol_type = other RNA
gcccccccggcctacgagaagctgagcgcggagcagtccccccccccctac

SEQ ID NO: 28490 - RNA, 36 nt, synthetic construct
  misc_feature 1..36: note = Melanoma antigen recognized by T-cells 1 (99-110)
  source 1..36: mol_type = other RNA
aacgcccccccggcctacgagaagctgagcgcggag

SEQ ID NO: 28491 - RNA, 60 nt, synthetic construct
  misc_feature 1..60: note = Melanoma antigen recognized by T-cells 1 (97-116)
  source 1..60: mol_type = other RNA
gtgcccaacgccccgcccgcctacgagaagctgagcgcggagcagtccccccccccgtac

SEQ ID NO: 28492 - RNA, 48 nt, synthetic construct
  misc_feature 1..48: note = Gamma-secretase C-terminal fragment 59 (581-596)
  source 1..48: mol_type = other RNA
ttcgccgaggacgtgggcagcaacaagggggccatcatcggcctgatg

SEQ ID NO: 28493 - RNA, 27 nt, synthetic construct
  misc_feature 1..27: note = Ubiquitin carboxyl-terminal hydrolase 11 (583-591)
  source 1..27: mol_type = other RNA
ttcacctgggagggcctgtacaacgtg

SEQ ID NO: 28494 - RNA, 30 nt, synthetic construct
  misc_feature 1..30: note = Ataxin-10 (324-333)
  source 1..30: mol_type = other RNA
caggtgttccccggcctgctcgagcgcgtc

SEQ ID NO: 28495 - RNA, 27 nt, synthetic construct
  misc_feature 1..27: note = Vacuolar protein sorting-associated protein 13B (29-37)
  source 1..27: mol_type = other RNA
agcctgtggggcggggacgtggtcctc

SEQ ID NO: 28496 - RNA, 30 nt, synthetic construct
  misc_feature 1..30: note = Farnesyl pyrophosphate synthase (238-247)
  source 1..30: mol_type = other RNA
tacctggacctcttcggcgaccccagcgtg

SEQ ID NO: 28497 - RNA, 27 nt, synthetic construct
  misc_feature 1..27: note = Suppressor of SWI4 1 homolog (26-34)
  source 1..27: mol_type = other RNA
gccgccaacccccacagcttcgtgttc

SEQ ID NO: 28498 - RNA, 33 nt, synthetic construct
  misc_feature 1..33: note = Golgin subfamily A member 7 (65-75)
  source 1..33: mol_type = other RNA
gccgaggccgagaagctgggcgggcagagctac

SEQ ID NO: 28499 - RNA, 27 nt, synthetic construct
  misc_feature 1..27: note = DNA replication licensing factor MCM4 (741-749)
  source 1..27: mol_type = other RNA
gccgaggcccacgcgaaggtgcgcctg

SEQ ID NO: 28500 - RNA, 27 nt, synthetic construct
  misc_feature 1..27: note = Stomatin-like protein 2, mitochondrial (255-263)
  source 1..27: mol_type = other RNA
gccgaggccatccgcatcctggcggcc

SEQ ID NO: 28501 - RNA, 27 nt, synthetic construct
  misc_feature 1..27: note = Nuclear pore complex protein Nup107 (415-423)
  source 1..27: mol_type = other RNA
gccgaggacgagctgttcaaccgctac

SEQ ID NO: 28502 - RNA, 33 nt, synthetic construct
  misc_feature 1..33: note = N-alpha-acetyltransferase 10 (45-55)
  source 1..33: mol_type = other RNA
gccgaggacgagaacggcaagatcgtggggtac

SEQ ID NO: 28503 - RNA, 33 nt, synthetic construct
  misc_feature 1..33: note = Cytochrome c oxidase subunit 6B1 (2-12)
  source 1..33: mol_type = other RNA
gccgaggacatggagaccaagatcaagaactac

SEQ ID NO: 28504 - RNA, 27 nt, synthetic construct
  misc_feature 1..27: note = General transcription factor II-I repeat domain-containing protein 2B (397-405)
  source 1..27: mol_type = other RNA
gccgagttcatcaagttcaccgtgatc

SEQ ID NO: 28505 - RNA, 27 nt, synthetic construct
  misc_feature 1..27: note = Heterogeneous nuclear ribonucleoprotein A0 (110-118)
  source 1..27: mol_type = other RNA
gccgagggcgacctgatcgagcacttc

SEQ ID NO: 28506 - RNA, 33 nt, synthetic construct
  misc_feature 1..33: note = 60S ribosomal protein L8 (33-43)
  source 1..33: mol_type = other RNA
gccgagggcatccacaccgggcagttcgtgtac

SEQ ID NO: 28507 - RNA, 27 nt, synthetic construct
  misc_feature 1..27: note = Condensin complex subunit 3 (712-720)
  source 1..27: mol_type = other RNA
gccgagggcctggccaagctcatgttc

SEQ ID NO: 28508 - RNA, 27 nt, synthetic construct
  misc_feature 1..27: note = T-complex protein 1 subunit gamma (109-117)
  source 1..27: mol_type = other RNA
gccgagcacttcctggagcagcagatg

SEQ ID NO: 28509 - RNA, 30 nt, synthetic construct
  misc_feature 1..30: note = Spectrin beta chain, non-erythrocytic 1 (1958-1967)
  source 1..30: mol_type = other RNA
gccgagatcgacgcccgcaacgacagcttc

SEQ ID NO: 28510 - RNA, 27 nt, synthetic construct
  misc_feature 1..27: note = Regulation of nuclear pre-mRNA domain-containing protein 1A (232-240)
  source 1..27: mol_type = other RNA
gccgagatcgacgaccgcaagcagctg

SEQ ID NO: 28511 - RNA, 30 nt, synthetic construct
  misc_feature 1..30: note = 40S ribosomal protein SA (218-227)
  source 1..30: mol_type = other RNA
gccgagaaggccgtgaccaaggaggagttc

SEQ ID NO: 28512 - RNA, 27 nt, synthetic construct
  misc_feature 1..27: note = Helicase SRCAP (394-402)
  source 1..27: mol_type = other RNA
gccgagagcctgcagcccaagggctac

SEQ ID NO: 28513 - RNA, 27 nt, synthetic construct
  misc_feature 1..27: note = Spartin (569-577)
  source 1..27: mol_type = other RNA
gccgagaccgtgcagaccgtccgctac

SEQ ID NO: 28514 - RNA, 27 nt, synthetic construct
  misc_feature 1..27: note = Uncharacterized protein ZMYM6NB (44-52)
  source 1..27: mol_type = other RNA
gccgaggtgttccccctgaaggtcttc

SEQ ID NO: 28515 - RNA, 30 nt, synthetic construct
  misc_feature 1..30: note = CLIP-associating protein 1 (357-366)
  source 1..30: mol_type = other RNA
gccgagtacgacaacttcttccagcacctg

SEQ ID NO: 28516 - RNA, 27 nt, synthetic construct
  misc_feature 1..27: note = Alpha-actinin-4 (306-314)
  source 1..27: mol_type = other RNA
gccatcgaccagctgcacctcgagtac

SEQ ID NO: 28517 - RNA, 27 nt, synthetic construct
  misc_feature 1..27: note = Nucleolar protein 58 (12-20)
  source 1..27: mol_type = other RNA
gccatcttcaaggtgctgaacgagaag

SEQ ID NO: 28518 - RNA, 30 nt, synthetic construct
  misc_feature 1..30: note = Serine/threonine-protein kinase Kist (151-160)
  source 1..30: mol_type = other RNA
gccatcatcgaccacatcttcgccagcaag

SEQ ID NO: 28519 - RNA, 30 nt, synthetic construct
  misc_feature 1..30: note = Transcription factor Sp2 (106-115)
  source 1..30: mol_type = other RNA
gccatccagaaccccaccatgatcaacaag

SEQ ID NO: 28520 - RNA, 27 nt, synthetic construct
  misc_feature 1..27: note = Apolipoprotein L1 (142-150)
  source 1..27: mol_type = other RNA
gccctggccgacggcgtgcagaaggtc

SEQ ID NO: 28521 - RNA, 27 nt, synthetic construct
  misc_feature 1..27: note = Tankyrase-2 (1234-1242)
  source 1..27: mol_type = other RNA
gccctggccgagtacgtgatctaccgc

SEQ ID NO: 28522 - RNA, 27 nt, synthetic construct
  misc_feature 1..27: note = Uncharacterized protein C19orf43 (126-134)
  source 1..27: mol_type = other RNA
gccctgaagaccggcatcgtggccaag

SEQ ID NO: 28523 - RNA, 30 nt, synthetic construct
  misc_feature 1..30: note = Heat shock protein HSP 90-alpha (740-749)
  source 1..30: mol_type = other RNA
gccctgcgcgacaacagcaccatgggctac

SEQ ID NO: 28524 - RNA, 27 nt, synthetic construct
  misc_feature 1..27: note = X-ray repair cross-complementing protein 5 (376-384)
  source 1..27: mol_type = other RNA
gccctgagctccctcatccacgccctg

SEQ ID NO: 28525 - RNA, 30 nt, synthetic construct
  misc_feature 1..30: note = Nucleolar protein 7 (190-199)
  source 1..30: mol_type = other RNA
gcccaggccttcatccacaacagcctgtac

SEQ ID NO: 28526 - RNA, 27 nt, synthetic construct
  misc_feature 1..27: note = U5 small nuclear ribonucleoprotein 200 kDa helicase (1246-1254)
  source 1..27: mol_type = other RNA
gcccaggacgagcacctgatcaccttc

SEQ ID NO: 28527 - RNA, 27 nt, synthetic construct
  misc_feature 1..27: note = 15 kDa selenoprotein (78-86)
  source 1..27: mol_type = other RNA
gcccagttcgagaccaagaagctgtac

SEQ ID NO: 28528 - RNA, 30 nt, synthetic construct
  misc_feature 1..30: note = Prelamin-A/C (169-178)
  source 1..30: mol_type = other RNA
gcccagcacgaggaccaggtggagcagtac

SEQ ID NO: 28529 - RNA, 27 nt, synthetic construct
  misc_feature 1..27: note = Ribosomal RNA processing protein 1 homolog B (90-98)
  source 1..27: mol_type = other RNA
gcccagcacctgttcatccagaccttc

SEQ ID NO: 28530 - RNA, 27 nt, synthetic construct
  misc_feature 1..27: note = 116 kDa U5 small nuclear ribonucleoprotein component (574-582)
  source 1..27: mol_type = other RNA
gcccagatcttccgccccctgaagttc

SEQ ID NO: 28531 - RNA, 27 nt, synthetic construct
  misc_feature 1..27: note = Paraneoplastic antigen Ma1 (246-254)
  source 1..27: mol_type = other RNA
gcccagatcaagttcctgaacacctac

SEQ ID NO: 28532 - RNA, 30 nt, synthetic construct
  misc_feature 1..30: note = Retinoic acid-induced protein 1 (1522-1531)
  source 1..30: mol_type = other RNA
gcccagaagcagcccggccacaccaactac

SEQ ID NO: 28533 - RNA, 27 nt, synthetic construct
  misc_feature 1..27: note = ADP-ribosylation factor GTPase-activating protein 2 (233-241)
  source 1..27: mol_type = other RNA
gcccagaaggtgagctcccagagcttc

SEQ ID NO: 28534 - RNA, 27 nt, synthetic construct
  misc_feature 1..27: note = Nucleolar protein 56 (144-152)
  source 1..27: mol_type = other RNA
gcccagctgggcctcgggcacagctac

SEQ ID NO: 28535 - RNA, 27 nt, synthetic construct
  misc_feature 1..27: note = Catenin beta-1 (481-489)
  source 1..27: mol_type = other RNA
gcccagaacgccgtgcgcctgcactac

SEQ ID NO: 28536 - RNA, 33 nt, synthetic construct
  misc_feature 1..33: note = nuclear pore complex protein Nup98 isoform 2 proprotein (110-120)
  source 1..33: mol_type = other RNA
gcccagaacaagcccaccggcttcgggaacttc

SEQ ID NO: 28537 - RNA, 33 nt, synthetic construct
  misc_feature 1..33: note = RNA-binding protein 14 (530-540)
  source 1..33: mol_type = other RNA
gcccagcagcacccccaggccgcggccagctac

SEQ ID NO: 28538 - RNA, 27 nt, synthetic construct
  misc_feature 1..27: note = Eukaryotic initiation factor 4A-I (113-121)
  source 1..27: mol_type = other RNA
gcccagcagatccagaaggtggtcatg

SEQ ID NO: 28539 - RNA, 27 nt, synthetic construct
  misc_feature 1..27: note = Septin-7 (21-29)
  source 1..27: mol_type = other RNA
gcccagcagaagaacctggagggctac

SEQ ID NO: 28540 - RNA, 27 nt, synthetic construct
  misc_feature 1..27: note = Protein polybromo-1 (234-242)
  source 1..27: mol_type = other RNA
gcccagcgcatccagaacggcagctac

SEQ ID NO: 28541 - RNA, 30 nt, synthetic construct
  misc_feature 1..30: note = Annexin A2 (66-75)
  source 1..30: mol_type = other RNA
gcccagcgccaggacatcgccttcgcgtac

SEQ ID NO: 28542 - RNA, 30 nt, synthetic construct
  misc_feature 1..30: note = Annexin A4 (49-58)
  source 1..30: mol_type = other RNA
gcccagcgccaggagatccggaccgcctac

SEQ ID NO: 28543 - RNA, 30 nt, synthetic construct
  misc_feature 1..30: note = Centromere protein F (348-357)
  source 1..30: mol_type = other RNA
gcccagtacgaccaggccagcaccaagtac

SEQ ID NO: 28544 - RNA, 33 nt, synthetic construct
  misc_feature 1..33: note = 60S ribosomal protein L22-like 1 (118-128)
  source 1..33: mol_type = other RNA
gccagcgacaaggagacctacgagctgcgctac

SEQ ID NO: 28545 - RNA, 30 nt, synthetic construct
  misc_feature 1..30: note = Histone H2B type 1-A (76-85)
  source 1..30: mol_type = other RNA
gccagcgaggcctcccgcctggcgcactac

SEQ ID NO: 28546 - RNA, 30 nt, synthetic construct
  misc_feature 1..30: note = ADP-dependent glucokinase (24-33)
  source 1..30: mol_type = other RNA
gccagcgagttccccggcgcccagcactac

SEQ ID NO: 28547 - RNA, 27 nt, synthetic construct
  misc_feature 1..27: note = Heterogeneous nuclear ribonucleoprotein U (205-213)
  source 1..27: mol_type = other RNA
gccagctacggcgtgtccaaggggaag

SEQ ID NO: 28548 - RNA, 30 nt, synthetic construct
  misc_feature 1..30: note = High affinity cAMP-specific 3',5'-cyclic phosphodiesterase 7A (294-303)
  source 1..30: mol_type = other RNA
gccaccgacatcagccgccagaacgagtac

SEQ ID NO: 28549 - RNA, 27 nt, synthetic construct
  misc_feature 1..27: note = E3 ubiquitin-protein ligase UBR2 (31-39)
  source 1..27: mol_type = other RNA
gccaccgacctgacccgcgaggtgtac

SEQ ID NO: 28550 - RNA, 27 nt, synthetic construct
  misc_feature 1..27: note = m7GpppX diphosphatase (135-143)
  source 1..27: mol_type = other RNA
gccaccgagaagcacctgcagaagtac

SEQ ID NO: 28551 - RNA, 33 nt, synthetic construct
  misc_feature 1..33: note = Microtubule-actin cross-linking factor 1, isoforms 1/2/3/5 (326-336)
  source 1..33: mol_type = other RNA
gccaccgaggtggacagccgctggcaggagtac

SEQ ID NO: 28552 - RNA, 27 nt, synthetic construct
  misc_feature 1..27: note = YTH domain-containing protein 1 (92-100)
  source 1..27: mol_type = other RNA
gccaccgagtacaagaacgaggagtac

SEQ ID NO: 28553 - RNA, 27 nt, synthetic construct
  misc_feature 1..27: note = Eukaryotic translation initiation factor 5A-1 (146-154)
  source 1..27: mol_type = other RNA
gccgtggccatcaaggcgatggccaag

SEQ ID NO: 28554 - RNA, 30 nt, synthetic construct
  misc_feature 1..30: note = Activating transcription factor 7-interacting protein 1 (621-630)
  source 1..30: mol_type = other RNA
gccgtgttcgacaagaccctggccgagctc

SEQ ID NO: 28555 - RNA, 27 nt, synthetic construct
  misc_feature 1..27: note = Transmembrane protein 258 (16-24)
  source 1..27: mol_type = other RNA
gccgtgttcccccacctgaccgtcgtg

SEQ ID NO: 28556 - RNA, 33 nt, synthetic construct
  misc_feature 1..33: note = U3 small nucleolar RNA-associated protein 6 homolog (467-477)
  source 1..33: mol_type = other RNA
gccgtgatcggcgccgacagcgtcaccctgaag

SEQ ID NO: 28557 - RNA, 27 nt, synthetic construct
  misc_feature 1..27: note = Nucleolar RNA helicase 2 (357-365)
  source 1..27: mol_type = other RNA
gccgtgatcggcgacgtcatccgcgtg

SEQ ID NO: 28558 - RNA, 30 nt, synthetic construct
  misc_feature 1..30: note = Nucleosome assembly protein 1-like 1 (107-116)
  source 1..30: mol_type = other RNA
gccgtgctgtaccagcccctcttcgacaag

SEQ ID NO: 28559 - RNA, 30 nt, synthetic construct
  misc_feature 1..30: note = MICOS complex subunit MIC60 (247-256)
  source 1..30: mol_type = other RNA
gccgtgaacgcccacagcaacatcctgaag

SEQ ID NO: 28560 - RNA, 27 nt, synthetic construct
  misc_feature 1..27: note = Elongation of very long chain fatty acids protein 5 (276-284)
  source 1..27: mol_type = other RNA
gccgtgaacggccacaccaacagcttc

SEQ ID NO: 28561 - RNA, 27 nt, synthetic construct
  misc_feature 1..27: note = DNA-directed RNA polymerase II subunit RPB7 (87-95)
  source 1..27: mol_type = other RNA
gccgtggtcacccaggtgaacaaggtg

SEQ ID NO: 28562 - RNA, 27 nt, synthetic construct
  misc_feature 1..27: note = RRP12-like protein (704-712)
  source 1..27: mol_type = other RNA
gacgaggccgccatcagcaagctgtac

SEQ ID NO: 28563 - RNA, 33 nt, synthetic construct
  misc_feature 1..33: note = 26S protease regulatory subunit 6B (265-275)
  source 1..33: mol_type = other RNA
gacgagatcgacgccatcgccaccaagcgcttc

SEQ ID NO: 28564 - RNA, 33 nt, synthetic construct
  misc_feature 1..33: note = 26S protease regulatory subunit 7 (275-285)
  source 1..33: mol_type = other RNA
gacgagatcgacgccatcggcggggcccgcttc

SEQ ID NO: 28565 - RNA, 33 nt, synthetic construct
  misc_feature 1..33: note = 26S protease regulatory subunit 4 (285-295)
  source 1..33: mol_type = other RNA
gacgagatcgacgccatcggcaccaagcgctac

SEQ ID NO: 28566 - RNA, 27 nt, synthetic construct
  misc_feature 1..27: note = Nucleolar protein 11 (17-25)
  source 1..27: mol_type = other RNA
gacgagaacagcgtgatcaagtccttc

SEQ ID NO: 28567 - RNA, 27 nt, synthetic construct
  misc_feature 1..27: note = Prothymosin alpha (16-24)
  source 1..27: mol_type = other RNA
gacctgaaggagaagaaggaggtggtc

SEQ ID NO: 28568 - RNA, 30 nt, synthetic construct
  misc_feature 1..30: note = Vezatin (553-562)
  source 1..30: mol_type = other RNA
gacagcgacttccgcaaggacgacttctac

SEQ ID NO: 28569 - RNA, 27 nt, synthetic construct
  misc_feature 1..27: note = Protein AF-10 (379-387)
  source 1..27: mol_type = other RNA
gacagcgacctgcgcaacgactcctac

SEQ ID NO: 28570 - RNA, 27 nt, synthetic construct
  misc_feature 1..27: note = Negative elongation factor C/D (348-356)
  source 1..27: mol_type = other RNA
gacaccgacatcagcctgatccgctac

SEQ ID NO: 28571 - RNA, 27 nt, synthetic construct
  misc_feature 1..27: note = Transcription factor E2F1 (237-245)
  source 1..27: mol_type = other RNA
gacaccgacagccagcgcctggcctac

SEQ ID NO: 28572 - RNA, 27 nt, synthetic construct
  misc_feature 1..27: note = RNA-binding protein 6 (398-406)
  source 1..27: mol_type = other RNA
gacaccgactaccgcagcatggagtac

SEQ ID NO: 28573 - RNA, 30 nt, synthetic construct
  misc_feature 1..30: note = Eukaryotic translation initiation factor 4 gamma 3 (1509-1518)
  source 1..30: mol_type = other RNA
gacaccgagaaggagctgcaggccctctac

SEQ ID NO: 28574 - RNA, 33 nt, synthetic construct
  misc_feature 1..33: note = Next to BRCA1 gene 1 protein (720-730)
  source 1..33: mol_type = other RNA
gacaccagccgccccctgggcgactccatgtac

SEQ ID NO: 28575 - RNA, 27 nt, synthetic construct
  misc_feature 1..27: note = Mitochondrial import receptor subunit TOM7 homolog (7-15)
  source 1..27: mol_type = other RNA
gaggccaagcagcgcctgcagcagctc

SEQ ID NO: 28576 - RNA, 30 nt, synthetic construct
  misc_feature 1..30: note = Heterogeneous nuclear ribonucleoprotein U-like protein 1 (585-594)
  source 1..30: mol_type = other RNA
gaggaggccgacaagctggtgcgccagtac

SEQ ID NO: 28577 - RNA, 27 nt, synthetic construct
  misc_feature 1..27: note = Poly (ADP-ribose) polymerase 1 (809-817)
  source 1..27: mol_type = other RNA
gaggaggccgagatcatccgcaagtac

SEQ ID NO: 28578 - RNA, 30 nt, synthetic construct
  misc_feature 1..30: note = RB1 protein (1-10)
  source 1..30: mol_type = other RNA
gaggaggagcgcctgagcatccagaacttc

SEQ ID NO: 28579 - RNA, 30 nt, synthetic construct
  misc_feature 1..30: note = Eukaryotic translation initiation factor 3 subunit C (81-90)
  source 1..30: mol_type = other RNA
gaggagttcgagctgctcggcaaggcctac

SEQ ID NO: 28580 - RNA, 27 nt, synthetic construct
  misc_feature 1..27: note = Condensin-2 complex subunit G2 (490-498)
  source 1..27: mol_type = other RNA
gaggagggcgccgtggacaagagctac

SEQ ID NO: 28581 - RNA, 30 nt, synthetic construct
  misc_feature 1..30: note = Prelamin-A/C (53-62)
  source 1..30: mol_type = other RNA
gaggagctggacttccagaagaacatctac

SEQ ID NO: 28582 - RNA, 27 nt, synthetic construct
  misc_feature 1..27: note = Signal transducer and activator of transcription 1-alpha/beta (281-289)
  source 1..27: mol_type = other RNA
gaggagctggagcagaagtacacctac

SEQ ID NO: 28583 - RNA, 27 nt, synthetic construct
  misc_feature 1..27: note = Poly (ADP-ribose) polymerase 1 (168-176)
  source 1..27: mol_type = other RNA
gaggagctgggcttccgccccgagtac

SEQ ID NO: 28584 - RNA, 27 nt, synthetic construct
  misc_feature 1..27: note = BolA-like protein 2 (62-70)
  source 1..27: mol_type = other RNA
gaggagctgccccacatccacgccttc

SEQ ID NO: 28585 - RNA, 27 nt, synthetic construct
  misc_feature 1..27: note = Signal transducer and activator of transcription 3 (285-293)
  source 1..27: mol_type = other RNA
gaggagctgcagcagaaggtgagctac

SEQ ID NO: 28586 - RNA, 30 nt, synthetic construct
  misc_feature 1..30: note = Ataxin-2-like protein (284-293)
  source 1..30: mol_type = other RNA
gaggagaactacggcgtgaagaccacctac

SEQ ID NO: 28587 - RNA, 27 nt, synthetic construct
  misc_feature 1..27: note = G patch domain-containing protein 4 (16-24)
  source 1..27: mol_type = other RNA
gaggagcagctgctcaagcacggctgg

SEQ ID NO: 28588 - RNA, 30 nt, synthetic construct
  misc_feature 1..30: note = Golgi resident protein GCP60 (489-498)
  source 1..30: mol_type = other RNA
gaggaggtgtacgccggcagccaccagtac

SEQ ID NO: 28589 - RNA, 27 nt, synthetic construct
  misc_feature 1..27: note = AP-1 complex subunit sigma-3 (146-154)
  source 1..27: mol_type = other RNA
gaggagtacatgaacaagcccaccttc

SEQ ID NO: 28590 - RNA, 27 nt, synthetic construct
  misc_feature 1..27: note = Transferrin receptor protein 1 (575-583)
  source 1..27: mol_type = other RNA
gagctgatcgagcgcatccccgagctc

SEQ ID NO: 28591 - RNA, 27 nt, synthetic construct
  misc_feature 1..27: note = Cleavage stimulation factor subunit 3 (52-60)
  source 1..27: mol_type = other RNA
gagaccgccctgctcgtggaccgctac

SEQ ID NO: 28592 - RNA, 33 nt, synthetic construct
  misc_feature 1..33: note = ATP-dependent RNA helicase DDX24 (571-581)
  source 1..33: mol_type = other RNA
gagaccgacgagaaggacttctacctgtactac

SEQ ID NO: 28593 - RNA, 30 nt, synthetic construct
  misc_feature 1..30: note = Mediator of RNA polymerase II transcription subunit 23 (175-184)
  source 1..30: mol_type = other RNA
gagaccgaccacatcaaccagatcggctac

SEQ ID NO: 28594 - RNA, 30 nt, synthetic construct
  misc_feature 1..30: note = Sorting and assembly machinery component 50 homolog (206-215)
  source 1..30: mol_type = other RNA
gagaccgaccgcggcatgagcgccgagtac

SEQ ID NO: 28595 - RNA, 33 nt, synthetic construct
  misc_feature 1..33: note = Protein polybromo-1 (1182-1192)
  source 1..33: mol_type = other RNA
gagaccgagcacgagcccaccaagatgttctac

SEQ ID NO: 28596 - RNA, 33 nt, synthetic construct
  misc_feature 1..33: note = Protein LAP2 (803-813)
  source 1..33: mol_type = other RNA
gagaccgagcacctggagaacggcaacaagtac

SEQ ID NO: 28597 - RNA, 27 nt, synthetic construct
  misc_feature 1..27: note = Spectrin beta chain, erythrocytic (299-307)
  source 1..27: mol_type = other RNA
gagaccgagaagatgatcgagaagtac

SEQ ID NO: 28598 - RNA, 30 nt, synthetic construct
  misc_feature 1..30: note = E3 ubiquitin-protein ligase RBBP6 (790-799)
  source 1..30: mol_type = other RNA
gagaccgagcgcgagtacttcaaccggtac

SEQ ID NO: 28599 - RNA, 27 nt, synthetic construct
  misc_feature 1..27: note = Putative eukaryotic translation initiation factor 2 subunit 3-like protein (322-330)
  source 1..27: mol_type = other RNA
ttcgccgagcacaacgacctgcagtac

SEQ ID NO: 28600 - RNA, 27 nt, synthetic construct
  misc_feature 1..27: note = 40S ribosomal protein S18 (28-36)
  source 1..27: mol_type = other RNA
ttcgccatcaccgccatcaagggcgtg

SEQ ID NO: 28601 - RNA, 27 nt, synthetic construct
  misc_feature 1..27: note = Keratinocyte-associated protein 2 (110-118)
  source 1..27: mol_type = other RNA
ttcgccagcggcctgatccaccgcgtg

SEQ ID NO: 28602 - RNA, 27 nt, synthetic construct
  misc_feature 1..27: note Dolichyl-diphosphooligosaccharide-proteinosyltransferase subunit DAD1 (99-107)
  source 1..27: mol_type = other RNA
ttcgccagcaccatcctgcacctcgtg

SEQ ID NO: 28603 - RNA, 27 nt, synthetic construct
  misc_feature 1..27: note = Minor histocompatibility antigen H13 (236-244)
  source 1..27: mol_type = other RNA
ttcgaggcccccatcaagctggtgttc

SEQ ID NO: 28604 - RNA, 27 nt, synthetic construct
  misc_feature 1..27: note = Catenin alpha-2 (609-617)
  source 1..27: mol_type = other RNA
ttcatcgacgccagccgcctggtgtac

SEQ ID NO: 28605 - RNA, 33 nt, synthetic construct
  misc_feature 1..33: note = TBC1 domain family member 31 (560-570)
  source 1..33: mol_type = other RNA
ttcatcgaccacgacatcaccagccagctgtac

SEQ ID NO: 28606 - RNA, 27 nt, synthetic construct
  misc_feature 1..27: note = Poly (ADP-ribose) polymerase 4 (797-805)
  source 1..27: mol_type = other RNA
ttcatcttcagcgacacccacgagctg

SEQ ID NO: 28607 - RNA, 33 nt, synthetic construct
  misc_feature 1..33: note = Basic leucine zipper and W2 domain-containing protein 1 (53-63)
  source 1..33: mol_type = other RNA
ttcctggacgccagcggcgccaagctcgactac

SEQ ID NO: 28608 - RNA, 30 nt, synthetic construct
  misc_feature 1..30: note = Neutral alpha-glucosidase AB (604-613)
  source 1..30: mol_type = other RNA
ttcctggacgacggccacaccttcaactac

SEQ ID NO: 28609 - RNA, 30 nt, synthetic construct
  misc_feature 1..30: note = RuvB-like 2 (433-442)
  source 1..30: mol_type = other RNA
ttcctggacgagagccgctccacccagtac

SEQ ID NO: 28610 - RNA, 27 nt, synthetic construct
  misc_feature 1..27: note = Signal transducer and activator of transcription 1-alpha/beta (14-22)
  source 1..27: mol_type = other RNA
ttcctggagcaggtgcaccagctctac

SEQ ID NO: 28611 - RNA, 27 nt, synthetic construct
  misc_feature 1..27: note = Protein MCM10 homolog (333-341)
  source 1..27: mol_type = other RNA
ttcctgttcggcgaggtgcacaaggcc

SEQ ID NO: 28612 - RNA, 30 nt, synthetic construct
  misc_feature 1..30: note = Hemoglobin subunit alpha (5-14)
  source 1..30: mol_type = other RNA
ttcctgagcttccccaccaccaagacgtac

SEQ ID NO: 28613 - RNA, 27 nt, synthetic construct
  misc_feature 1..27: note = Plexin-C1 (1065-1073)
  source 1..27: mol_type = other RNA
ttcctggtgaccgtcatccacaccctc

SEQ ID NO: 28614 - RNA, 27 nt, synthetic construct
  misc_feature 1..27: note = DNA repair protein XRCC1 (161-169)
  source 1..27: mol_type = other RNA
ttccagaaccccttccgcagcgagctg

SEQ ID NO: 28615 - RNA, 27 nt, synthetic construct
  misc_feature 1..27: note = Protein AATF (298-306)
  source 1..27: mol_type = other RNA
ttccagtaccccgacacccgctacctg

SEQ ID NO: 28616 - RNA, 27 nt, synthetic construct
  misc_feature 1..27: note = Short transient receptor potential channel 4-associated protein (457-465)
  source 1..27: mol_type = other RNA
ttcagcgaccaccacgagaacaagtac

SEQ ID NO: 28617 - RNA, 27 nt, synthetic construct
  misc_feature 1..27: note = Cell cycle progression protein 1 (186-194)
  source 1..27: mol_type = other RNA
ttcagcgactacctgcacccccagtac

SEQ ID NO: 28618 - RNA, 27 nt, synthetic construct
  misc_feature 1..27: note = Dihydrofolate reductase, mitochondrial (149-157)
  source 1..27: mol_type = other RNA
ttcagcgagatcgacctggagaagtac

SEQ ID NO: 28619 - RNA, 30 nt, synthetic construct
  misc_feature 1..30: note = Splicing factor 3A subunit 3 (130-139)
  source 1..30: mol_type = other RNA
ttcaccgacgaggagggctacgggcgctac

SEQ ID NO: 28620 - RNA, 30 nt, synthetic construct
  misc_feature 1..30: note = Bifunctional glutamate/proline-tRNA ligase (48-57)
  source 1..30: mol_type = other RNA
ttcaccgacgtgaacagcatcctgcgctac

SEQ ID NO: 28621 - RNA, 33 nt, synthetic construct
  misc_feature 1..33: note = RNMT-activating mini protein (19-29)
  source 1..33: mol_type = other RNA
ttcaccgagaacgacaaggagtaccaggagtac

SEQ ID NO: 28622 - RNA, 27 nt, synthetic construct
  misc_feature 1..27: note = ATP-dependent RNA helicase DDX24 (801-809)
  source 1..27: mol_type = other RNA
ttcaccgagagccagaagaccaagtac

SEQ ID NO: 28623 - RNA, 27 nt, synthetic construct
  misc_feature 1..27: note = Eukaryotic translation initiation factor 4 gamma 1 (1377-1385)
  source 1..27: mol_type = other RNA
ttcgtggccgagcagaaggtcgagtac

SEQ ID NO: 28624 - RNA, 27 nt, synthetic construct
  misc_feature 1..27: note = Coatomer subunit delta (9-17)
  source 1..27: mol_type = other RNA
ttcgtggagaccgagagcgtccgctac

SEQ ID NO: 28625 - RNA, 27 nt, synthetic construct
  misc_feature 1..27: note = Coatomer subunit alpha (641-649)
  source 1..27: mol_type = other RNA
ttcgtgaaggacgagaagacccgcttc

SEQ ID NO: 28626 - RNA, 27 nt, synthetic construct
  misc_feature 1..27: note = Mothers against decapentaplegic homolog 9 (418-426)
  source 1..27: mol_type = other RNA
ttcgtgaagggctggggggccgagtac

SEQ ID NO: 28627 - RNA, 30 nt, synthetic construct
  misc_feature 1..30: note = Ubiquitin-like protein FUBI (4-13)
  source 1..30: mol_type = other RNA
ttcgtgcgcgcccaggagctgcacaccttc

SEQ ID NO: 28628 - RNA, 27 nt, synthetic construct
  misc_feature 1..27: note = Lysine-tRNA ligase (119-127)
  source 1..27: mol_type = other RNA
ggcgaggacccctacccgcacaagttc

SEQ ID NO: 28629 - RNA, 27 nt, synthetic construct
  misc_feature 1..27: note = Cytochrome c oxidase subunit 6A1, mitochondrial (7-15)
  source 1..27: mol_type = other RNA
ggcgaggaggggagcgcccgcatgtgg

SEQ ID NO: 28630 - RNA, 27 nt, synthetic construct
  misc_feature 1..27: note = Polycomb protein SUZ12 (549-557)
  source 1..27: mol_type = other RNA
ggcgaggtggagcagcagcgcacctac

SEQ ID NO: 28631 - RNA, 30 nt, synthetic construct
  misc_feature 1..30: note = SNARE-associated protein Snapin (127-136)
  source 1..30: mol_type = other RNA
ggcatctaccccccggggagccccggcaag

SEQ ID NO: 28632 - RNA, 33 nt, synthetic construct
  misc_feature 1..33: note = Ataxin-10 (379-389)
  source 1..33: mol_type = other RNA
ggcctggccgacgccagcctcctgaagaaggtg

SEQ ID NO: 28633 - RNA, 27 nt, synthetic construct
  misc_feature 1..27: note = Signal recognition particle 54 kDa protein (302-310)
  source 1..27: mol_type = other RNA
ggcctgatcgacaaggtgaacgagctc

SEQ ID NO: 28634 - RNA, 27 nt, synthetic construct
  misc_feature 1..27: note = Probable JmjC domain-containing histone demethylation protein 2C (846-854)
  source 1..27: mol_type = other RNA
ggccaggcccaccccagcgcctcctac

SEQ ID NO: 28635 - RNA, 27 nt, synthetic construct
  misc_feature 1..27: note = Putative ATP-dependent RNA helicase DDX11-like protein 8 (825-833)
  source 1..27: mol_type = other RNA
ggccaggcccccccggggaaggccctg

SEQ ID NO: 28636 - RNA, 27 nt, synthetic construct
  misc_feature 1..27: note = General transcription factor 3C polypeptide 1 (604-612)
  source 1..27: mol_type = other RNA
ggccaggacaagccccacgagacctac

SEQ ID NO: 28637 - RNA, 30 nt, synthetic construct
  misc_feature 1..30: note = Tonsoku-like protein (670-679)
  source 1..30: mol_type = other RNA
ggccaggacccccacagctcccaggccttc

SEQ ID NO: 28638 - RNA, 27 nt, synthetic construct
  misc_feature 1..27: note = Nuclear pore complex protein Nup214 (1208-1216)
  source 1..27: mol_type = other RNA
ggccagttcagcaagcccttctccttc

SEQ ID NO: 28639 - RNA, 33 nt, synthetic construct
  misc_feature 1..33: note = ATP-dependent 6-phosphofructokinase, platelet type (125-135)
  source 1..33: mol_type = other RNA
ggccagatcgacaaggaggccgtgcagaagtac

SEQ ID NO: 28640 - RNA, 27 nt, synthetic construct
  misc_feature 1..27: note = Alpha-endosulfine (45-53)
  source 1..27: mol_type = other RNA
ggccagaagcccgggggcagcgacttc

SEQ ID NO: 28641 - RNA, 27 nt, synthetic construct
  misc_feature 1..27: note = Heterogeneous nuclear ribonucleoprotein U (812-820)
  source 1..27: mol_type = other RNA
ggccagaagccctggagccagcactac

SEQ ID NO: 28642 - RNA, 33 nt, synthetic construct
  misc_feature 1..33: note = 60S ribosomal protein L26 (64-74)
  source 1..33: mol_type = other RNA
ggccagcagatcgggaaggtggtccaggtgtac

SEQ ID NO: 28643 - RNA, 30 nt, synthetic construct
  misc_feature 1..30: note = 60S ribosomal protein L8 (3-12)
  source 1..30: mol_type = other RNA
ggccagcgcaagggggccggcagcgtgttc

SEQ ID NO: 28644 - RNA, 27 nt, synthetic construct
  misc_feature 1..27: note = 60S ribosomal protein L28 (69-77)
  source 1..27: mol_type = other RNA
ggccagcgcaagcccgccaccagctac

SEQ ID NO: 28645 - RNA, 27 nt, synthetic construct
  misc_feature 1..27: note = DNA mismatch repair protein Msh2 (157-165)
  source 1..27: mol_type = other RNA
ggccagcgccaggtgggggtcggctac

SEQ ID NO: 28646 - RNA, 27 nt, synthetic construct
  misc_feature 1..27: note = Chromodomain-helicase-DNA-binding protein 8 (210-218)
  source 1..27: mol_type = other RNA
ggccagagcaaggccgtgaaggtctac

SEQ ID NO: 28647 - RNA, 27 nt, synthetic construct
  misc_feature 1..27: note = Cell division cycle protein 27 homolog (325-333)
  source 1..27: mol_type = other RNA
ggccagaccgggaccaagagcgtgttc

SEQ ID NO: 28648 - RNA, 27 nt, synthetic construct
  misc_feature 1..27: note = Transmembrane protein 43 (137-145)
  source 1..27: mol_type = other RNA
ggccaggtgaagaaggagacccgctac

SEQ ID NO: 28649 - RNA, 27 nt, synthetic construct
  misc_feature 1..27: note = Clathrin heavy chain 1 (496-504)
  source 1..27: mol_type = other RNA
ggccaggtgcagaagatcgtcctgtac

SEQ ID NO: 28650 - RNA, 30 nt, synthetic construct
  misc_feature 1..30: note = Disintegrin and metalloproteinase domain-containing protein 10 (19-28)
  source 1..30: mol_type = other RNA
ggccagtacgggaaccccctgaacaagtac

SEQ ID NO: 28651 - RNA, 33 nt, synthetic construct
  misc_feature 1..33: note = Protein transport protein Sec23B (560-570)
  source 1..33: mol_type = other RNA
ggccagtacaacaaggaggaccccaccagcttc

SEQ ID NO: 28652 - RNA, 27 nt, synthetic construct
  misc_feature 1..27: note = Protein CASP (561-569)
  source 1..27: mol_type = other RNA
ggcagcgacgacaccgagctgcgctac

SEQ ID NO: 28653 - RNA, 30 nt, synthetic construct
  misc_feature 1..30: note = Gem-associated protein 5 (444-453)
  source 1..30: mol_type = other RNA
ggcaccgacgacgggaaggtgggcctgtac

SEQ ID NO: 28654 - RNA, 27 nt, synthetic construct
  misc_feature 1..27: note = Ribosomal biogenesis protein LAS1L (107-115)
  source 1..27: mol_type = other RNA
ggcaccgacgagctgcgcctcctgtac

SEQ ID NO: 28655 - RNA, 27 nt, synthetic construct
  misc_feature 1..27: note = WD repeat-containing protein 34 (398-406)
  source 1..27: mol_type = other RNA
ggcaccgacgggcacgtgcacctgtac

SEQ ID NO: 28656 - RNA, 33 nt, synthetic construct
  misc_feature 1..33: note = DnaJ homolog subfamily B member 4 (38-48)
  source 1..33: mol_type = other RNA
ggcaccgacgggcagggcgggaccttccgctac

SEQ ID NO: 28657 - RNA, 27 nt, synthetic construct
  misc_feature 1..27: note = Tyrosine-protein kinase Fyn (31-39)
  source 1..27: mol_type = other RNA
ggcaccgaccccaccccgcagcactac

SEQ ID NO: 28658 - RNA, 27 nt, synthetic construct
  misc_feature 1..27: note = Activating signal cointegrator 1 (235-243)
  source 1..27: mol_type = other RNA
ggcaccctgaaccagcccctcaccaag

SEQ ID NO: 28659 - RNA, 27 nt, synthetic construct
  misc_feature 1..27: note = Putative mitochondrial import inner membrane translocase subunit Tim23B (113-121)
  source 1..27: mol_type = other RNA
ggcaccatgaccgggatgctgtacaag

SEQ ID NO: 28660 - RNA, 30 nt, synthetic construct
  misc_feature 1..30: note = Peroxisomal acyl-coenzyme A oxidase 1 (263-272)
  source 1..30: mol_type = other RNA
ggcacctacgtgaagcccctgagcaacaag

SEQ ID NO: 28661 - RNA, 27 nt, synthetic construct
  misc_feature 1..27: note = HLA class II histocompatibility antigen, DO alpha chain (37-45)
  source 1..27: mol_type = other RNA
ggcacctacgtgagctccgtcccccgc

SEQ ID NO: 28662 - RNA, 27 nt, synthetic construct
  misc_feature 1..27: note = Poly (ADP-ribose) polymerase 14 (924-932)
  source 1..27: mol_type = other RNA
ggcgtgttcgggttccccctgggccgc

SEQ ID NO: 28663 - RNA, 30 nt, synthetic construct
  misc_feature 1..30: note = Cytosolic non-specific dipeptidase (106-115)
  source 1..30: mol_type = other RNA
ggcgtgtacgggggcagcgtccacgaggcc

SEQ ID NO: 28664 - RNA, 30 nt, synthetic construct
  misc_feature 1..30: note = Mediator of RNA polymerase II transcription subunit 18 (127-136)
  source 1..30: mol_type = other RNA
cacgagttcgtggccaagggccacctgttc

SEQ ID NO: 28665 - RNA, 30 nt, synthetic construct
  misc_feature 1..30: note = 60S ribosomal protein L7 (192-201)
  source 1..30: mol_type = other RNA
cacgagatctacaccgtgggcaagcgcttc

SEQ ID NO: 28666 - RNA, 27 nt, synthetic construct
  misc_feature 1..27: note = Coatomer subunit alpha (103-111)
  source 1..27: mol_type = other RNA
cacgagtacccctggatcctgagcgcc

SEQ ID NO: 28667 - RNA, 30 nt, synthetic construct
  misc_feature 1..30: note = Zinc finger protein 548 (24-33)
  source 1..30: mol_type = other RNA
cacctggacgaggcccagcgcctcctgtac

SEQ ID NO: 28668 - RNA, 27 nt, synthetic construct
  misc_feature 1..27: note = Protein FAM32A (95-103)
  source 1..27: mol_type = other RNA
cacctggacaccctcaccgagcactac

SEQ ID NO: 28669 - RNA, 27 nt, synthetic construct
  misc_feature 1..27: note = Heat shock protein HSP 90-alpha A2 (189-197)
  source 1..27: mol_type = other RNA
cacctgaaggaggaccagaccgagtac

SEQ ID NO: 28670 - RNA, 27 nt, synthetic construct
  misc_feature 1..27: note = Myc-associated zinc finger protein (411-419)
  source 1..27: mol_type = other RNA
cacctgaacagccacgtgcgccaggtc

SEQ ID NO: 28671 - RNA, 27 nt, synthetic construct
  misc_feature 1..27: note = Heterogeneous nuclear ribonucleoproteins A2/B1 (127-135)
  source 1..27: mol_type = other RNA
cacctgcgcgactacttcgaggagtac

SEQ ID NO: 28672 - RNA, 27 nt, synthetic construct
  misc_feature 1..27: note = V-type proton ATPase 116 kDa subunit a isoform 4 (722-730)
  source 1..27: mol_type = other RNA
caccaggccatccacaccatcgagtac

SEQ ID NO: 28673 - RNA, 27 nt, synthetic construct
  misc_feature 1..27: note = Elongation of very long chain fatty acids protein 5 (137-145)
  source 1..27: mol_type = other RNA
caccagatcaccgtgctgcacgtctac

SEQ ID NO: 28674 - RNA, 27 nt, synthetic construct
  misc_feature 1..27: note = Zinc finger protein 770 (99-107)
  source 1..27: mol_type = other RNA
caccagcagctgcacaacgagacctac

SEQ ID NO: 28675 - RNA, 27 nt, synthetic construct
  misc_feature 1..27: note = Protein SSXT (207-215)
  source 1..27: mol_type = other RNA
caccagcagcccccgagccagcagtac

SEQ ID NO: 28676 - RNA, 27 nt, synthetic construct
  misc_feature 1..27: note = Zinc finger and BTB domain-containing protein 43 (140-148)
  source 1..27: mol_type = other RNA
caccagagcccctccagctccagctac

SEQ ID NO: 28677 - RNA, 27 nt, synthetic construct
  misc_feature 1..27: note = Signal transducing adapter molecule 2 (410-418)
  source 1..27: mol_type = other RNA
caccaggtgaccgtcgcccagagctac

SEQ ID NO: 28678 - RNA, 27 nt, synthetic construct
  misc_feature 1..27: note = Cirhin (556-564)
  source 1..27: mol_type = other RNA
cacagcgaccagcaggtgttcgagtac

SEQ ID NO: 28679 - RNA, 30 nt, synthetic construct
  misc_feature 1..30: note = Catenin beta-1 (645-654)
  source 1..30: mol_type = other RNA
cacagccgcaacgagggcgtggccacctac

SEQ ID NO: 28680 - RNA, 30 nt, synthetic construct
  misc_feature 1..30: note = U3 small nucleolar RNA-associated protein 6 homolog (267-276)
  source 1..30: mol_type = other RNA
cacaccgacgaccccctgacctgggactac

SEQ ID NO: 28681 - RNA, 27 nt, synthetic construct
  misc_feature 1..27: note = DTW domain-containing protein 1 (175-183)
  source 1..27: mol_type = other RNA
cacaccgacatcctgaaggagaagtac

SEQ ID NO: 28682 - RNA, 30 nt, synthetic construct
  misc_feature 1..30: note = Bone morphogenetic protein receptor type-2 (316-325)
  source 1..30: mol_type = other RNA
cacaccgagctgccccgcggcgaccactac

SEQ ID NO: 28683 - RNA, 27 nt, synthetic construct
  misc_feature 1..27: note = Dedicator of cytokinesis protein 7 (913-921)
  source 1..27: mol_type = other RNA
atcgccagcgacatcgtgtcccgcttc

SEQ ID NO: 28684 - RNA, 27 nt, synthetic construct
  misc_feature 1..27: note = Filamin-A (898-906)
  source 1..27: mol_type = other RNA
atcatcgaccaccacgacaacacctac

SEQ ID NO: 28685 - RNA, 27 nt, synthetic construct
  misc_feature 1..27: note = SUMO-activating enzyme subunit 1 (309-317)
  source 1..27: mol_type = other RNA
atcctggcccaggagatcgtgaaggcc

SEQ ID NO: 28686 - RNA, 30 nt, synthetic construct
  misc_feature 1..30: note = Superkiller viralicidic activity 2-like 2 (470-479)
  source 1..30: mol_type = other RNA
atcctgttcagcgagggcctcatcaaggcc

SEQ ID NO: 28687 - RNA, 27 nt, synthetic construct
  misc_feature 1..27: note = 60S ribosomal protein L15 (133-141)
  source 1..27: mol_type = other RNA
atcctgatcgaccccttccacaaggcc

SEQ ID NO: 28688 - RNA, 27 nt, synthetic construct
  misc_feature 1..27: note = Transcription elongation factor SPT6 (1267-1275)
  source 1..27: mol_type = other RNA
atcatgaagatcgacatcgagaagttc

SEQ ID NO: 28689 - RNA, 27 nt, synthetic construct
  misc_feature 1..27: note = X-ray repair cross-complementing protein 5 (528-536)
  source 1..27: mol_type = other RNA
atccccctgagcaagatcaagaccctc

SEQ ID NO: 28690 - RNA, 27 nt, synthetic construct
  misc_feature 1..27: note = Eukaryotic translation initiation factor 3 subunit C (783-791)
  source 1..27: mol_type = other RNA
atccaggaggagagcctgcgcacctac

SEQ ID NO: 28691 - RNA, 27 nt, synthetic construct
  misc_feature 1..27: note = 60S ribosomal protein L18a (95-103)
  source 1..27: mol_type = other RNA
atccagatcatgaaggtggaggagatc

SEQ ID NO: 28692 - RNA, 27 nt, synthetic construct
  misc_feature 1..27: note = Catalase (398-406)
  source 1..27: mol_type = other RNA
atccagaagaaggccgtgaagaacttc

SEQ ID NO: 28693 - RNA, 27 nt, synthetic construct
  misc_feature 1..27: note = Tuftelin-interacting protein 11 (336-344)
  source 1..27: mol_type = other RNA
atccagaacgaccgccagctgcagtac

SEQ ID NO: 28694 - RNA, 27 nt, synthetic construct
  misc_feature 1..27: note = Hepatoma-derived growth factor-related protein 2 (84-92)
  source 1..27: mol_type = other RNA
atccagaacaacccccacgccagctac

SEQ ID NO: 28695 - RNA, 27 nt, synthetic construct
  misc_feature 1..27: note = Putative annexin A2-like protein (319-327)
  source 1..27: mol_type = other RNA
atccagcaggacaccaagggcgactac

SEQ ID NO: 28696 - RNA, 27 nt, synthetic construct
  misc_feature 1..27: note = Interferon-induced GTP-binding protein Mx1 (206-214)
  source 1..27: mol_type = other RNA
atccagcgccaggagaccatcagcctg

SEQ ID NO: 28697 - RNA, 27 nt, synthetic construct
  misc_feature 1..27: note = Protein transport protein Sec16A (1602-1610)
  source 1..27: mol_type = other RNA
atccagcgcaccgaggcctacgagtac

SEQ ID NO: 28698 - RNA, 27 nt, synthetic construct
  misc_feature 1..27: note = Transcription elongation factor SPT5 (984-992)
  source 1..27: mol_type = other RNA
atccaggtgaaggtccgcgacacctac

SEQ ID NO: 28699 - RNA, 33 nt, synthetic construct
  misc_feature 1..33: note = Splicing factor 3B subunit 4 (6-16)
  source 1..33: mol_type = other RNA
atcagcgagcgcaaccaggacgccaccgtgtac

SEQ ID NO: 28700 - RNA, 27 nt, synthetic construct
  misc_feature 1..27: note = 40S ribosomal protein S16 (87-95)
  source 1..27: mol_type = other RNA
atcagcaaggccctggtggcctactac

SEQ ID NO: 28701 - RNA, 27 nt, synthetic construct
  misc_feature 1..27: note = Serine/threonine-protein kinase 17B (51-59)
  source 1..27: mol_type = other RNA
atcagcaagtccaccggccaggagtac

SEQ ID NO: 28702 - RNA, 27 nt, synthetic construct
  misc_feature 1..27: note = Pre-mRNA-splicing factor CWC22 homolog (146-154)
  source 1..27: mol_type = other RNA
atcaccgacaagaacagcctggcctac

SEQ ID NO: 28703 - RNA, 30 nt, synthetic construct
  misc_feature 1..30: note = Serine/threonine-protein kinase mTOR (664-673)
  source 1..30: mol_type = other RNA
atcaccgaccccgacccggacatccgctac

SEQ ID NO: 28704 - RNA, 30 nt, synthetic construct
  misc_feature 1..30: note = AAC42003.1 (85-94)
  source 1..30: mol_type = other RNA
atcaccgacagcgccggccacatcctgtac

SEQ ID NO: 28705 - RNA, 27 nt, synthetic construct
  misc_feature 1..27: note = E3 ubiquitin-protein ligase RNF213 (4163-4171)
  source 1..27: mol_type = other RNA
atcaccgaggacaagaccgagctgtac

SEQ ID NO: 28706 - RNA, 27 nt, synthetic construct
  misc_feature 1..27: note = RNA polymerase I-specific transcription initiation factor RRN3 (516-524)
  source 1..27: mol_type = other RNA
atcaccaacaagtaccagctggtgttc

SEQ ID NO: 28707 - RNA, 27 nt, synthetic construct
  misc_feature 1..27: note = Nuclear receptor corepressor 2 (1441-1449)
  source 1..27: mol_type = other RNA
atcacccagggcacccccctgaagtac

SEQ ID NO: 28708 - RNA, 33 nt, synthetic construct
  misc_feature 1..33: note = HLA class II histocompatibility antigen, DQ alpha 1 chain (3-13)
  source 1..33: mol_type = other RNA
atcgtggccgaccacgtcgccagctacggcgtg

SEQ ID NO: 28709 - RNA, 27 nt, synthetic construct
  misc_feature 1..27: note = Putative eukaryotic translation initiation factor 2 subunit 3-like protein (59-67)
  source 1..27: mol_type = other RNA
aaggccatcagcggcgtgcacaccgtc

SEQ ID NO: 28710 - RNA, 27 nt, synthetic construct
  misc_feature 1..27: note = Nuclear pore membraneoprotein 210 (219-227)
  source 1..27: mol_type = other RNA
aaggcccgcatccaggaggccgtgtac

SEQ ID NO: 28711 - RNA, 27 nt, synthetic construct
  misc_feature 1..27: note = Heat shock protein HSP 90-beta (452-460)
  source 1..27: mol_type = other RNA
aaggagttcgacggcaagagcctggtg

SEQ ID NO: 28712 - RNA, 27 nt, synthetic construct
  misc_feature 1..27: note = NADH dehydrogenase (ubiquinone) 1 beta subcomplex subunit 10 (121-129)
  source 1..27: mol_type = other RNA
aaggaggtggagcagttcacccaggtc

SEQ ID NO: 28713 - RNA, 27 nt, synthetic construct
  misc_feature 1..27: note = Lysine-specific histone demethylase 1A (454-462)
  source 1..27: mol_type = other RNA
aagatcaaggagctgcaccagcagtac

SEQ ID NO: 28714 - RNA, 27 nt, synthetic construct
  misc_feature 1..27: note = Thioredoxin-interacting protein (6-14)
  source 1..27: mol_type = other RNA
aagatcaagagcttcgaggtggtcttc

SEQ ID NO: 28715 - RNA, 27 nt, synthetic construct
  misc_feature 1..27: note = 60S ribosomal protein L27 (67-75)
  source 1..27: mol_type = other RNA
aagatcaagagcttcgtgaaggtctac

SEQ ID NO: 28716 - RNA, 27 nt, synthetic construct
  misc_feature 1..27: note = 60S ribosomal protein L5 (117-125)
  source 1..27: mol_type = other RNA
aagatctacgagggccaggtggaggtc

SEQ ID NO: 28717 - RNA, 30 nt, synthetic construct
  misc_feature 1..30: note = Putative elongation factor 1-alpha-like 3 (386-395)
  source 1..30: mol_type = other RNA
aagctggaggacggccccaagttcctcaag

SEQ ID NO: 28718 - RNA, 30 nt, synthetic construct
  misc_feature 1..30: note = Long-chain-fatty-acid-CoA ligase 4 (40-49)
  source 1..30: mol_type = other RNA
aagctgttcgaccacgccgtgagcaagttc

SEQ ID NO: 28719 - RNA, 27 nt, synthetic construct
  misc_feature 1..27: note = Signal recognition particle receptor subunit alpha (81-89)
  source 1..27: mol_type = other RNA
aagctgatcgacgacgtgcaccgcctc

SEQ ID NO: 28720 - RNA, 33 nt, synthetic construct
  misc_feature 1..33: note = Embryonic stem cell-specific 5-hydroxymethylcytosine-binding protein (239-249)
  source 1..33: mol_type = other RNA
aagctgatccaccccaccgagaacatcaccttc

SEQ ID NO: 28721 - RNA, 27 nt, synthetic construct
  misc_feature 1..27: note Dolichyl-diphosphooligosaccharide-proteinosyltransferase subunit DAD1 (25-33)
  source 1..27: mol_type = other RNA
aagctgctcgacgcctacctgctgtac

SEQ ID NO: 28722 - RNA, 30 nt, synthetic construct
  misc_feature 1..30: note = DNA-directed RNA polymerases I, II, and III subunit RPABC5 (58-67)
  source 1..30: mol_type = other RNA
aagctgctcaactacgcccccctggagaag

SEQ ID NO: 28723 - RNA, 27 nt, synthetic construct
  misc_feature 1..27: note = Dystonin (4751-4759)
  source 1..27: mol_type = other RNA
aagctgagcgacctcgacaacaagctg

SEQ ID NO: 28724 - RNA, 30 nt, synthetic construct
  misc_feature 1..30: note = 60S ribosomal protein L23a (115-124)
  source 1..30: mol_type = other RNA
aagctgtacgacatcgacgtggccaaggtc

SEQ ID NO: 28725 - RNA, 30 nt, synthetic construct
  misc_feature 1..30: note = ATP-citrate synthase (650-659)
  source 1..30: mol_type = other RNA
aagctgtaccgccccggcagcgtggcctac

SEQ ID NO: 28726 - RNA, 27 nt, synthetic construct
  misc_feature 1..27: note = Protein quaking (81-89)
  source 1..27: mol_type = other RNA
aagctgtacgtgcccgtcaaggagtac

SEQ ID NO: 28727 - RNA, 27 nt, synthetic construct
  misc_feature 1..27: note = Homocysteine-responsive endoplasmic reticulum-resident ubiquitin-like domain member 1 protein (92-100)
  source 1..27: mol_type = other RNA
aagatgcccgagatcaacgccaaggtg

SEQ ID NO: 28728 - RNA, 27 nt, synthetic construct
  misc_feature 1..27: note = Transducin-like enhancer protein 2 (76-84)
  source 1..27: mol_type = other RNA
aagcaggccgagatcgtgaagcgcctg

SEQ ID NO: 28729 - RNA, 27 nt, synthetic construct
  misc_feature 1..27: note = Gamma-interferon-inducible protein 16 (309-317)
  source 1..27: mol_type = other RNA
aagcaggccagcggcaacatcgtgtac

SEQ ID NO: 28730 - RNA, 30 nt, synthetic construct
  misc_feature 1..30: note = Cytoplasmic dynein 1 heavy chain 1 (1181-1190)
  source 1..30: mol_type = other RNA
aagcagttcgagaagcaggtggagctgtac

SEQ ID NO: 28731 - RNA, 30 nt, synthetic construct
  misc_feature 1..30: note = Staphylococcal nuclease domain-containing protein 1 (869-878)
  source 1..30: mol_type = other RNA
aagcagttccagaaggtgatcaccgagtac

SEQ ID NO: 28732 - RNA, 30 nt, synthetic construct
  misc_feature 1..30: note = Cytoplasmic dynein 1 heavy chain 1 (652-661)
  source 1..30: mol_type = other RNA
aagcagatcgaccgccagctgaccgcctac

SEQ ID NO: 28733 - RNA, 27 nt, synthetic construct
  misc_feature 1..27: note = Thioredoxin (3-11)
  source 1..27: mol_type = other RNA
aagcagatcgagagcaagaccgccttc

SEQ ID NO: 28734 - RNA, 27 nt, synthetic construct
  misc_feature 1..27: note = Ribonucleoside-diphosphate reductase large subunit (529-537)
  source 1..27: mol_type = other RNA
aagcagatcttcgagaccatctactac

SEQ ID NO: 28735 - RNA, 27 nt, synthetic construct
  misc_feature 1..27: note = ADP/ATP translocase 2 (43-51)
  source 1..27: mol_type = other RNA
aagcagatcaccgccgacaagcagtac

SEQ ID NO: 28736 - RNA, 30 nt, synthetic construct
  misc_feature 1..30: note = Lamin-B receptor (234-243)
  source 1..30: mol_type = other RNA
aagcagaaggaccccagcctgctcaacttc

SEQ ID NO: 28737 - RNA, 30 nt, synthetic construct
  misc_feature 1..30: note = Asparagine synthetase (glutamine-hydrolyzing) (272-281)
  source 1..30: mol_type = other RNA
aagcagctgaaggaggcccaggtgcagtac

SEQ ID NO: 28738 - RNA, 33 nt, synthetic construct
  misc_feature 1..33: note = Heterogeneous nuclear ribonucleoprotein L (455-465)
  source 1..33: mol_type = other RNA
aagcagcccgccatcatgccgggccagagctac

SEQ ID NO: 28739 - RNA, 30 nt, synthetic construct
  misc_feature 1..30: note = Caprin-1 (536-545)
  source 1..30: mol_type = other RNA
aagcagcagaaccagtaccaggccagctac

SEQ ID NO: 28740 - RNA, 27 nt, synthetic construct
  misc_feature 1..27: note = DNA-dependent protein kinase catalytic subunit (2970-2978)
  source 1..27: mol_type = other RNA
aagcagtacgacgaggccctgaacaag

SEQ ID NO: 28741 - RNA, 30 nt, synthetic construct
  misc_feature 1..30: note = Alpha-actinin-4 (691-700)
  source 1..30: mol_type = other RNA
aagcagtacgagcgcagcatcgtggactac

SEQ ID NO: 28742 - RNA, 27 nt, synthetic construct
  misc_feature 1..27: note = RAC-beta serine/threonine-protein kinase (30-38)
  source 1..27: mol_type = other RNA
aagagcgacggctccttcatcgggtac

SEQ ID NO: 28743 - RNA, 27 nt, synthetic construct
  misc_feature 1..27: note = Replication factor C subunit 1 (870-878)
  source 1..27: mol_type = other RNA
aagagcgacctgttcttccacgactac

SEQ ID NO: 28744 - RNA, 30 nt, synthetic construct
  misc_feature 1..30: note = Pre-mRNA-processing factor 40 homolog A (164-173)
  source 1..30: mol_type = other RNA
aagagcgactccggcaagccctactactac

SEQ ID NO: 28745 - RNA, 27 nt, synthetic construct
  misc_feature 1..27: note = Helicase-like transcription factor (499-507)
  source 1..27: mol_type = other RNA
aagagcgacgtgcacctgaacttctac

SEQ ID NO: 28746 - RNA, 27 nt, synthetic construct
  misc_feature 1..27: note = Pre-mRNA-splicing factor RBM22 (109-117)
  source 1..27: mol_type = other RNA
aagagcgacgtgaacaaggagtactac

SEQ ID NO: 28747 - RNA, 27 nt, synthetic construct
  misc_feature 1..27: note = Kinesin-like protein KIF18A (241-249)
  source 1..27: mol_type = other RNA
aagaccgccagcatcaaccagaacgtg

SEQ ID NO: 28748 - RNA, 30 nt, synthetic construct
  misc_feature 1..30: note = Vacuolar protein sorting-associated protein 13A (1399-1408)
  source 1..30: mol_type = other RNA
aagaccgacgacctgaccatggtgctctac

SEQ ID NO: 28749 - RNA, 27 nt, synthetic construct
  misc_feature 1..27: note = Chromodomain-helicase-DNA-binding protein 8 (165-173)
  source 1..27: mol_type = other RNA
aagaccgacgagagcctgaccaagtac

SEQ ID NO: 28750 - RNA, 27 nt, synthetic construct
  misc_feature 1..27: note = Raftlin (114-122)
  source 1..27: mol_type = other RNA
aagaccgacctgcacaacgagggctac

SEQ ID NO: 28751 - RNA, 27 nt, synthetic construct
  misc_feature 1..27: note = Coiled-coil domain-containing protein 94 (90-98)
  source 1..27: mol_type = other RNA
aagaccgaccccgagaacaccgactac

SEQ ID NO: 28752 - RNA, 33 nt, synthetic construct
  misc_feature 1..33: note = Signal-induced proliferation-associated 1-like protein 2 (436-446)
  source 1..33: mol_type = other RNA
aagaccgacagcaccggcacgcactccctgtac

SEQ ID NO: 28753 - RNA, 33 nt, synthetic construct
  misc_feature 1..33: note = Pre-mRNA-processing-splicing factor 8 (341-351)
  source 1..33: mol_type = other RNA
aagaccgaggaccccgacctgccggccttctac

SEQ ID NO: 28754 - RNA, 33 nt, synthetic construct
  misc_feature 1..33: note = Serine/arginine-rich splicing factor 3 (23-33)
  source 1..33: mol_type = other RNA
aagaccgagctggagcgcgccttcggctactac

SEQ ID NO: 28755 - RNA, 30 nt, synthetic construct
  misc_feature 1..30: note = T-complex protein 1 subunit zeta-2 (196-205)
  source 1..30: mol_type = other RNA
aagaccgaggtgaacagcggcttcttctac

SEQ ID NO: 28756 - RNA, 27 nt, synthetic construct
  misc_feature 1..27: note = Periphilin-1 (297-305)
  source 1..27: mol_type = other RNA
aagaccaaggagatcgagcaggtgtac

SEQ ID NO: 28757 - RNA, 30 nt, synthetic construct
  misc_feature 1..30: note = Metastasis-associated protein MTA2 (311-320)
  source 1..30: mol_type = other RNA
aagaccaccgaccgctacatccagcagaag

SEQ ID NO: 28758 - RNA, 27 nt, synthetic construct
  misc_feature 1..27: note = Spatacsin (1273-1281)
  source 1..27: mol_type = other RNA
aaggtggccaacatcatcctgagctac

SEQ ID NO: 28759 - RNA, 27 nt, synthetic construct
  misc_feature 1..27: note = Heterogeneous nuclear ribonucleoprotein A/B (227-235)
  source 1..27: mol_type = other RNA
aaggtggcccagcccaaggaggtctac

SEQ ID NO: 28760 - RNA, 27 nt, synthetic construct
  misc_feature 1..27: note = Protein RRP5 homolog (1680-1688)
  source 1..27: mol_type = other RNA
aaggtgttcgagcgcgccgtccagtac

SEQ ID NO: 28761 - RNA, 27 nt, synthetic construct
  misc_feature 1..27: note = 60 kDa heat shock protein, mitochondrial (344-352)
  source 1..27: mol_type = other RNA
aaggtgggcgaggtcatcgtgaccaag

SEQ ID NO: 28762 - RNA, 27 nt, synthetic construct
  misc_feature 1..27: note = Protein transport protein Sec61 subunit beta (67-75)
  source 1..27: mol_type = other RNA
aaggtgggccccgtcccggtgctggtg

SEQ ID NO: 28763 - RNA, 27 nt, synthetic construct
  misc_feature 1..27: note = 40S ribosomal protein S19 (29-37)
  source 1..27: mol_type = other RNA
aaggtgcccgagtgggtcgacaccgtg

SEQ ID NO: 28764 - RNA, 27 nt, synthetic construct
  misc_feature 1..27: note = Protein DEK (315-323)
  source 1..27: mol_type = other RNA
aaggtgtacgagaactaccccacctac

SEQ ID NO: 28765 - RNA, 27 nt, synthetic construct
  misc_feature 1..27: note = Cyclin-dependent kinases regulatory subunit 2 (11-19)
  source 1..27: mol_type = other RNA
aagtacttcgacgagcactacgagtac

SEQ ID NO: 28766 - RNA, 27 nt, synthetic construct
  misc_feature 1..27: note = Protein disulfide-isomerase A3 (16-24)
  source 1..27: mol_type = other RNA
ctggccgccgcgcgcctcgccgccgcc

SEQ ID NO: 28767 - RNA, 27 nt, synthetic construct
  misc_feature 1..27: note = Heterogeneous nuclear ribonucleoprotein R (193-201)
  source 1..27: mol_type = other RNA
ctggagtacgaggaccacaagagcgcc

SEQ ID NO: 28768 - RNA, 27 nt, synthetic construct
  misc_feature 1..27: note = Lamina-associated polypeptide 2, isoform alpha (313-321)
  source 1..27: mol_type = other RNA
ctgatcaaggagaccaccacgggctac

SEQ ID NO: 28769 - RNA, 27 nt, synthetic construct
  misc_feature 1..27: note = 60S ribosomal protein L28 (17-25)
  source 1..27: mol_type = other RNA
ctgatcaagcgcaacaagcagacctac

SEQ ID NO: 28770 - RNA, 27 nt, synthetic construct
  misc_feature 1..27: note = ATP synthase F(0) complex subunit C1, mitochondrial (21-29)
  source 1..27: mol_type = other RNA
ctgatccgccccgtgagcgcctccttc

SEQ ID NO: 28771 - RNA, 27 nt, synthetic construct
  misc_feature 1..27: note = Cytospin-A (469-477)
  source 1..27: mol_type = other RNA
ctgctcgacgagcaccacatcagctac

SEQ ID NO: 28772 - RNA, 30 nt, synthetic construct
  misc_feature 1..30: note = Zinc finger protein 557 (59-68)
  source 1..30: mol_type = other RNA
ctgctcgaccccgcccagcgcaccctgtac

SEQ ID NO: 28773 - RNA, 30 nt, synthetic construct
  misc_feature 1..30: note = Clathrin heavy chain 1 (421-430)
  source 1..30: mol_type = other RNA
ctgctcgaccagggccagctgaacaagtac

SEQ ID NO: 28774 - RNA, 30 nt, synthetic construct
  misc_feature 1..30: note = Zinc finger protein 669 (106-115)
  source 1..30: mol_type = other RNA
ctgctcgacagctcccagaagaacctgtac

SEQ ID NO: 28775 - RNA, 30 nt, synthetic construct
  misc_feature 1..30: note = WD repeat-containing protein 6 (358-367)
  source 1..30: mol_type = other RNA
ctgctcgaggacaagcacttccagagctac

SEQ ID NO: 28776 - RNA, 27 nt, synthetic construct
  misc_feature 1..27: note = Signal transducer and activator of transcription 6 (56-64)
  source 1..27: mol_type = other RNA
ctgctcagcgacaccgtgcagcacctg

SEQ ID NO: 28777 - RNA, 27 nt, synthetic construct
  misc_feature 1..27: note = Antigen peptide transporter 1 (684-692)
  source 1..27: mol_type = other RNA
ctgctctacgagagccccgagcgctac

SEQ ID NO: 28778 - RNA, 27 nt, synthetic construct
  misc_feature 1..27: note = Retinoic acid receptor RXR-gamma (423-431)
  source 1..27: mol_type = other RNA
ctgcccgccctccgcagcatcggcctg

SEQ ID NO: 28779 - RNA, 27 nt, synthetic construct
  misc_feature 1..27: note = Eukaryotic translation initiation factor 2-alpha kinase 1 (221-229)
  source 1..27: mol_type = other RNA
ctgcagcaccccaacatcgtgggctac

SEQ ID NO: 28780 - RNA, 27 nt, synthetic construct
  misc_feature 1..27: note = CDK5 regulatory subunit-associated protein 2 (355-363)
  source 1..27: mol_type = other RNA
ctgcagaaggcccagacccaggagttc

SEQ ID NO: 28781 - RNA, 27 nt, synthetic construct
  misc_feature 1..27: note = Trifunctional purine biosynthetic protein adenosine-3 (429-437)
  source 1..27: mol_type = other RNA
ctgcagcagccccgcagcctcacctac

SEQ ID NO: 28782 - RNA, 27 nt, synthetic construct
  misc_feature 1..27: note = Farnesyl pyrophosphate synthase (341-349)
  source 1..27: mol_type = other RNA
ctgcagcgcgccacccccgagcagtac

SEQ ID NO: 28783 - RNA, 27 nt, synthetic construct
  misc_feature 1..27: note = R3H domain-containing protein 4 (70-78)
  source 1..27: mol_type = other RNA
ctgcagcgcctcgagaacacccagtac

SEQ ID NO: 28784 - RNA, 27 nt, synthetic construct
  misc_feature 1..27: note = WD repeat-containing protein 27 (15-23)
  source 1..27: mol_type = other RNA
ctgagcgacatcgtgatcgagaagtac

SEQ ID NO: 28785 - RNA, 27 nt, synthetic construct
  misc_feature 1..27: note = UAP56-interacting factor (99-107)
  source 1..27: mol_type = other RNA
ctgagcgacaagaacatcgagcagtac

SEQ ID NO: 28786 - RNA, 27 nt, synthetic construct
  misc_feature 1..27: note = Histone acetyltransferase KAT8 (325-333)
  source 1..27: mol_type = other RNA
ctgagcgacctcggcaagctgtcctac

SEQ ID NO: 28787 - RNA, 30 nt, synthetic construct
  misc_feature 1..30: note = Probable tRNA N6-adenosine threonylcarbamoyltransferase (315-324)
  source 1..30: mol_type = other RNA
ctgagcgactccggcgtgacccagcgctac

SEQ ID NO: 28788 - RNA, 30 nt, synthetic construct
  misc_feature 1..30: note = Deoxynucleotidyltransferase terminal-interacting protein 2 (252-261)
  source 1..30: mol_type = other RNA
ctgagcgagatcaacaagcccaacttctac

SEQ ID NO: 28789 - RNA, 33 nt, synthetic construct
  misc_feature 1..33: note = Serpin B8 (74-84)
  source 1..33: mol_type = other RNA
ctgagcgaggtgaaccgcaccggcacccagtac

SEQ ID NO: 28790 - RNA, 27 nt, synthetic construct
  misc_feature 1..27: note = ATP synthase subunit alpha, mitochondrial (160-168)
  source 1..27: mol_type = other RNA
ctgaccgacgccgacgccatgaagtac

SEQ ID NO: 28791 - RNA, 27 nt, synthetic construct
  misc_feature 1..27: note = 1,4-alpha-glucan-branching enzyme (569-577)
  source 1..27: mol_type = other RNA
ctgaccgacgacgacctcctgcgctac

SEQ ID NO: 28792 - RNA, 30 nt, synthetic construct
  misc_feature 1..30: note = 26S proteasome non-ATPase regulatory subunit 2 (391-400)
  source 1..30: mol_type = other RNA
ctgaccgacgacggcaacaagtggctctac

SEQ ID NO: 28793 - RNA, 27 nt, synthetic construct
  misc_feature 1..27: note = Phosphatidylinositol 4,5-bisphosphate 3-kinase catalytic subunit alpha isoform (623-631)
  source 1..27: mol_type = other RNA
ctgaccgacgacaagctcagccagtac

SEQ ID NO: 28794 - RNA, 27 nt, synthetic construct
  misc_feature 1..27: note = Probable threonine-tRNA ligase 2, cytoplasmic (435-443)
  source 1..27: mol_type = other RNA
ctgaccgacttcatccgcgaggagtac

SEQ ID NO: 28795 - RNA, 30 nt, synthetic construct
  misc_feature 1..30: note = Coiled-coil domain-containing protein 127 (209-218)
  source 1..30: mol_type = other RNA
ctgaccgacatcttccagcacgacacctac

SEQ ID NO: 28796 - RNA, 30 nt, synthetic construct
  misc_feature 1..30: note = Elongation factor 2 (162-171)
  source 1..30: mol_type = other RNA
ctgaccgacatcaccaagggcgtgcagtac

SEQ ID NO: 28797 - RNA, 30 nt, synthetic construct
  misc_feature 1..30: note = Tuberin (146-155)
  source 1..30: mol_type = other RNA
ctgaccgacaacggccgccacatcacctac

SEQ ID NO: 28798 - RNA, 27 nt, synthetic construct
  misc_feature 1..27: note = Glucosylceramidase (252-260)
  source 1..27: mol_type = other RNA
ctgaccgaccccgaggccgccaagtac

SEQ ID NO: 28799 - RNA, 30 nt, synthetic construct
  misc_feature 1..30: note = ATPase family AAA domain-containing protein 5 (1663-1672)
  source 1..30: mol_type = other RNA
ctgaccgacgtgcgcgagcagaacaagtac

SEQ ID NO: 28800 - RNA, 27 nt, synthetic construct
  misc_feature 1..27: note = Casein kinase II subunit alpha (128-136)
  source 1..27: mol_type = other RNA
ctgaccgactacgacatccgcttctac

SEQ ID NO: 28801 - RNA, 30 nt, synthetic construct
  misc_feature 1..30: note = Gamma-tubulin complex component 2 (88-97)
  source 1..30: mol_type = other RNA
ctgaccgaggacaaggagaccctccagtac

SEQ ID NO: 28802 - RNA, 27 nt, synthetic construct
  misc_feature 1..27: note = Integrator complex subunit 11 (242-250)
  source 1..27: mol_type = other RNA
ctgaccgagaaggccaaccactactac

SEQ ID NO: 28803 - RNA, 27 nt, synthetic construct
  misc_feature 1..27: note = Pogo transposable element with KRAB domain (64-72)
  source 1..27: mol_type = other RNA
ctgaccgagcagcagaaggccctctac

SEQ ID NO: 28804 - RNA, 30 nt, synthetic construct
  misc_feature 1..30: note = Nuclear factor erythroid 2-related factor 2 (197-206)
  source 1..30: mol_type = other RNA
ctgaccgaggtggacaactaccacttctac

SEQ ID NO: 28805 - RNA, 33 nt, synthetic construct
  misc_feature 1..33: note = Serpin B9 (74-84)
  source 1..33: mol_type = other RNA
ctgaccgaggtgaacaaggccggcacccagtac

SEQ ID NO: 28806 - RNA, 27 nt, synthetic construct
  misc_feature 1..27: note = Folliculin-interacting protein 2 (997-1005)
  source 1..27: mol_type = other RNA
ctggtggccgacctcgtccacaccgtg

SEQ ID NO: 28807 - RNA, 27 nt, synthetic construct
  misc_feature 1..27: note = Pogo transposable element with KRAB domain (261-269)
  source 1..27: mol_type = other RNA
ctggtggaccagcgcgtcgccgagtac

SEQ ID NO: 28808 - RNA, 30 nt, synthetic construct
  misc_feature 1..30: note = Exportin-5 (20-29)
  source 1..30: mol_type = other RNA
atgatggaccccaacagcacccagcgctac

SEQ ID NO: 28809 - RNA, 30 nt, synthetic construct
  misc_feature 1..30: note = Protein transport protein Sec61 subunit gamma (5-14)
  source 1..30: mol_type = other RNA
atgcagttcgtggagcccagccgccagttc

SEQ ID NO: 28810 - RNA, 27 nt, synthetic construct
  misc_feature 1..27: note = Catenin beta-1 (662-670)
  source 1..27: mol_type = other RNA
atgagcgaggacaagccccaggactac

SEQ ID NO: 28811 - RNA, 27 nt, synthetic construct
  misc_feature 1..27: note = Brefeldin A-inhibited guanine nucleotide-exchange protein 1 (574-582)
  source 1..27: mol_type = other RNA
aacgccgccaacatcttcgagcgcctg

SEQ ID NO: 28812 - RNA, 33 nt, synthetic construct
  misc_feature 1..33: note = Charged multivesicular body protein 5 (63-73)
  source 1..33: mol_type = other RNA
aacgagatccaggaggccctgagccgctcctac

SEQ ID NO: 28813 - RNA, 27 nt, synthetic construct
  misc_feature 1..27: note = Clathrin heavy chain 1 (935-943)
  source 1..27: mol_type = other RNA
aacgagaacagcctgttcaagtccctc

SEQ ID NO: 28814 - RNA, 27 nt, synthetic construct
  misc_feature 1..27: note = Calpain small subunit 1 (93-101)
  source 1..27: mol_type = other RNA
aacgagagcgaggaggtgcgccagttc

SEQ ID NO: 28815 - RNA, 27 nt, synthetic construct
  misc_feature 1..27: note = PR domain zinc finger protein 15 (791-799)
  source 1..27: mol_type = other RNA
aacgaggtggacggcgagtaccgctac

SEQ ID NO: 28816 - RNA, 33 nt, synthetic construct
  misc_feature 1..33: note = Nucleolar pre-ribosomal-associated protein 1 (127-137)
  source 1..33: mol_type = other RNA
aacgaggtggaccccggcgactggcagaagttc

SEQ ID NO: 28817 - RNA, 27 nt, synthetic construct
  misc_feature 1..27: note = DnaJ homolog subfamily C member 11 (261-269)
  source 1..27: mol_type = other RNA
aacctggacaagaacaccgtgggctac

SEQ ID NO: 28818 - RNA, 27 nt, synthetic construct
  misc_feature 1..27: note = Ubiquitin-conjugating enzyme E2 variant 3 (190-198)
  source 1..27: mol_type = other RNA
aacctggacagccagcgcctccagtac

SEQ ID NO: 28819 - RNA, 27 nt, synthetic construct
  misc_feature 1..27: note = Clathrin heavy chain 1 (74-82)
  source 1..27: mol_type = other RNA
aaccccgccagcaaggtgatcgccctg

SEQ ID NO: 28820 - RNA, 27 nt, synthetic construct
  misc_feature 1..27: note = Spermatid perinuclear RNA-binding protein (397-405)
  source 1..27: mol_type = other RNA
aaccagatccgccccggcctgcagtac

SEQ ID NO: 28821 - RNA, 27 nt, synthetic construct
  misc_feature 1..27: note = Dystonin (3331-3339)
  source 1..27: mol_type = other RNA
aaccagaagcccccgagcgccgagttc

SEQ ID NO: 28822 - RNA, 27 nt, synthetic construct
  misc_feature 1..27: note = Microtubule-actin cross-linking factor 1, isoforms 1/2/3/5 (5369-5377)
  source 1..27: mol_type = other RNA
aaccagaagcccccgagcgccgagtac

SEQ ID NO: 28823 - RNA, 27 nt, synthetic construct
  misc_feature 1..27: note = Cytosolic carboxypeptidase 1 (749-757)
  source 1..27: mol_type = other RNA
aacagcgacatcaactccaaccactac

SEQ ID NO: 28824 - RNA, 30 nt, synthetic construct
  misc_feature 1..30: note = DNA repair protein RAD51 homolog 1 (99-108)
  source 1..30: mol_type = other RNA
aacaccgaccaccagacccagctgctctac

SEQ ID NO: 28825 - RNA, 27 nt, synthetic construct
  misc_feature 1..27: note = Eukaryotic translation initiation factor 3 subunit C-like protein (462-470)
  source 1..27: mol_type = other RNA
aacaccgacccccacagccaggagtac

SEQ ID NO: 28826 - RNA, 30 nt, synthetic construct
  misc_feature 1..30: note = Methionine aminopeptidase 1 (74-83)
  source 1..30: mol_type = other RNA
aacaccgacccctgggccggctaccgctac

SEQ ID NO: 28827 - RNA, 27 nt, synthetic construct
  misc_feature 1..27: note = Tyrosine-protein phosphatase non-receptor type 11 (414-422)
  source 1..27: mol_type = other RNA
aacaccgagcgcaccgtgtggcagtac

SEQ ID NO: 28828 - RNA, 27 nt, synthetic construct
  misc_feature 1..27: note = Protein UXT (66-74)
  source 1..27: mol_type = other RNA
aacgtgatcgagcgcctgcaggaggcc

SEQ ID NO: 28829 - RNA, 27 nt, synthetic construct
  misc_feature 1..27: note = Nardilysin (107-115)
  source 1..27: mol_type = other RNA
cccagcgacccgaagcagtaccgctac

SEQ ID NO: 28830 - RNA, 33 nt, synthetic construct
  misc_feature 1..33: note = Mediator of RNA polymerase II transcription subunit 13 (1456-1466)
  source 1..33: mol_type = other RNA
cccaccgacggcgacagccacgccgtgacctac

SEQ ID NO: 28831 - RNA, 27 nt, synthetic construct
  misc_feature 1..27: note = Absent in melanoma 1 protein (1215-1223)
  source 1..27: mol_type = other RNA
cccaccgacccgaaggtggtcgtgtac

SEQ ID NO: 28832 - RNA, 33 nt, synthetic construct
  misc_feature 1..33: note = Ubiquitin carboxyl-terminal hydrolase 22 (453-463)
  source 1..33: mol_type = other RNA
cccaccgacagcctgaacaacgacaacaagtac

SEQ ID NO: 28833 - RNA, 33 nt, synthetic construct
  misc_feature 1..33: note = ADP-sugar pyrophosphatase (6-16)
  source 1..33: mol_type = other RNA
cccaccgagagctcccagaacggcaagcagtac

SEQ ID NO: 28834 - RNA, 27 nt, synthetic construct
  misc_feature 1..27: note = Vimentin (311-319)
  source 1..27: mol_type = other RNA
caggccaagcaggagagcaccgagtac

SEQ ID NO: 28835 - RNA, 33 nt, synthetic construct
  misc_feature 1..33: note = Nuclear autoantigenic sperm protein (67-77)
  source 1..33: mol_type = other RNA
caggaggccgccagcctgctcggcaagaagtac

SEQ ID NO: 28836 - RNA, 27 nt, synthetic construct
  misc_feature 1..27: note = Ras GTPase-activating protein-binding protein 1 (243-251)
  source 1..27: mol_type = other RNA
caggaggacctgcgcaccttcagctgg

SEQ ID NO: 28837 - RNA, 30 nt, synthetic construct
  misc_feature 1..30: note = Nuclear pore complex protein Nup155 (718-727)
  source 1..30: mol_type = other RNA
caggagttcctggaccgcaacagccagttc

SEQ ID NO: 28838 - RNA, 27 nt, synthetic construct
  misc_feature 1..27: note = Cytosolic non-specific dipeptidase (28-36)
  source 1..27: mol_type = other RNA
caggagatccccgtgaacgtccgcttc

SEQ ID NO: 28839 - RNA, 27 nt, synthetic construct
  misc_feature 1..27: note = Putative ATP-dependent RNA helicase DDX11-like protein 8 (240-248)
  source 1..27: mol_type = other RNA
cagctggcccagttcgtgcacgaggtc

SEQ ID NO: 28840 - RNA, 30 nt, synthetic construct
  misc_feature 1..30: note = Zinc finger protein 550 (19-28)
  source 1..30: mol_type = other RNA
cagctggacctcgcccagcgcaccctgtac

SEQ ID NO: 28841 - RNA, 30 nt, synthetic construct
  misc_feature 1..30: note = Zinc finger protein 674 (24-33)
  source 1..30: mol_type = other RNA
cagctggacagcgcccagaagaacctctac

SEQ ID NO: 28842 - RNA, 27 nt, synthetic construct
  misc_feature 1..27: note = Proteasome activator complex subunit 3 (33-41)
  source 1..27: mol_type = other RNA
cagctggtggacatcatcgagaaggtc

SEQ ID NO: 28843 - RNA, 27 nt, synthetic construct
  misc_feature 1..27: note = Nucleoporin NUP188 homolog (1544-1552)
  source 1..27: mol_type = other RNA
cagcaggccctgcacaccgtgcagtac

SEQ ID NO: 28844 - RNA, 27 nt, synthetic construct
  misc_feature 1..27: note = Homocysteine-responsive endoplasmic reticulum-resident ubiquitin-like domain member 1 protein (174-182)
  source 1..27: mol_type = other RNA
cagcagatctacgcccgccagtactac

SEQ ID NO: 28845 - RNA, 27 nt, synthetic construct
  misc_feature 1..27: note = Signal recognition particle subunit SRP72 (107-115)
  source 1..27: mol_type = other RNA
cagaccgacaagctgaaggagctctac

SEQ ID NO: 28846 - RNA, 27 nt, synthetic construct
  misc_feature 1..27: note = Oxysterol-binding protein-related protein 8 (674-682)
  source 1..27: mol_type = other RNA
cagaccgaggccacccaggagaagtac

SEQ ID NO: 28847 - RNA, 27 nt, synthetic construct
  misc_feature 1..27: note = Probable cation-transporting ATPase 13A3 (131-139)
  source 1..27: mol_type = other RNA
cagaccgagagccagcagatccgctac

SEQ ID NO: 28848 - RNA, 27 nt, synthetic construct
  misc_feature 1..27: note = Band 4.1-like protein 2 (42-50)
  source 1..27: mol_type = other RNA
cagaccgagaccaagacgatcacctac

SEQ ID NO: 28849 - RNA, 27 nt, synthetic construct
  misc_feature 1..27: note = 26S proteasome non-ATPase regulatory subunit 13 (164-172)
  source 1..27: mol_type = other RNA
cagaccatcggcaaccacgccagctac

SEQ ID NO: 28850 - RNA, 33 nt, synthetic construct
  misc_feature 1..33: note = 60S ribosomal protein L28 (23-33)
  source 1..33: mol_type = other RNA
cagacctacagcaccgagcccaacaacctgaag

SEQ ID NO: 28851 - RNA, 33 nt, synthetic construct
  misc_feature 1..33: note = Cytochrome b-c1 complex subunit 9 (34-44)
  source 1..33: mol_type = other RNA
cgcgccttcgaccagggcgccgacgcgatctac

SEQ ID NO: 28852 - RNA, 27 nt, synthetic construct
  misc_feature 1..27: note = Mitotic checkpoint protein BUB3 (186-194)
  source 1..27: mol_type = other RNA
cgcgccttccccaacaagcagggctac

SEQ ID NO: 28853 - RNA, 30 nt, synthetic construct
  misc_feature 1..30: note = X-ray repair cross-complementing protein 5 (296-305)
  source 1..30: mol_type = other RNA
cgcgccaacccccaggtgggcgtcgccttc

SEQ ID NO: 28854 - RNA, 33 nt, synthetic construct
  misc_feature 1..33: note = Exocyst complex component 4 (551-561)
  source 1..33: mol_type = other RNA
cgcgaggccgacctggacttcgcccggcagtac

SEQ ID NO: 28855 - RNA, 30 nt, synthetic construct
  misc_feature 1..30: note = Signal peptidase complex subunit 2 (185-194)
  source 1..30: mol_type = other RNA
cgcgaggccgagttcaccaagagcatcgcc

SEQ ID NO: 28856 - RNA, 27 nt, synthetic construct
  misc_feature 1..27: note = Patatin-like phospholipase domain-containing protein 2 (30-38)
  source 1..27: mol_type = other RNA
cgcgagcacgcccccttcctggtggcc

SEQ ID NO: 28857 - RNA, 24 nt, synthetic construct
  misc_feature 1..24: note = Tubulin beta-4A chain (2-9)
  source 1..24: mol_type = other RNA
cgcgagatcgtgcacctgcaggcc

SEQ ID NO: 28858 - RNA, 27 nt, synthetic construct
  misc_feature 1..27: note = ATP-binding cassette sub-family F member 3 (425-433)
  source 1..27: mol_type = other RNA
cgcgagtacgaggcccagcagcagtac

SEQ ID NO: 28859 - RNA, 27 nt, synthetic construct
  misc_feature 1..27: note = Pre-mRNA-splicing factor ATP-dependent RNA helicase DHX15 (399-407)
  source 1..27: mol_type = other RNA
cgcatcttcgagcccccgccccccaag

SEQ ID NO: 28860 - RNA, 30 nt, synthetic construct
  misc_feature 1..30: note = Actin-related protein 2/3 complex subunit 2 (9-18)
  source 1..30: mol_type = other RNA
cgcatcatcgaggagaccctggccctcaag

SEQ ID NO: 28861 - RNA, 27 nt, synthetic construct
  misc_feature 1..27: note = Protein FAM60A (102-110)
  source 1..27: mol_type = other RNA
cgcatcaagagcaaccagatctccaag

SEQ ID NO: 28862 - RNA, 30 nt, synthetic construct
  misc_feature 1..30: note = Chromobox protein homolog 6 (91-100)
  source 1..30: mol_type = other RNA
cgcatcagcgacgtgcacttctccgtcaag

SEQ ID NO: 28863 - RNA, 30 nt, synthetic construct
  misc_feature 1..30: note = Splicing factor 3B subunit 1 (276-285)
  source 1..30: mol_type = other RNA
cgcatctacaacgacgacaagaacacctac

SEQ ID NO: 28864 - RNA, 27 nt, synthetic construct
  misc_feature 1..27: note = FAS-associated factor 2 (75-83)
  source 1..27: mol_type = other RNA
cgcatctacagctacgtggtctcccgg

SEQ ID NO: 28865 - RNA, 27 nt, synthetic construct
  misc_feature 1..27: note = 26S proteasome non-ATPase regulatory subunit 3 (107-115)
  source 1..27: mol_type = other RNA
cgcctgaaccactacgtgctctacaag

SEQ ID NO: 28866 - RNA, 33 nt, synthetic construct
  misc_feature 1..33: note = Cell division cycle protein 27 homolog (214-224)
  source 1..33: mol_type = other RNA
cgcctgaacctcgagagctccaacagcaagtac

SEQ ID NO: 28867 - RNA, 30 nt, synthetic construct
  misc_feature 1..30: note = Histone deacetylase 9 (670-679)
  source 1..30: mol_type = other RNA
cgcctgcaggagaccggcctcctgaacaag

SEQ ID NO: 28868 - RNA, 33 nt, synthetic construct
  misc_feature 1..33: note = F-box only protein 5 (140-150)
  source 1..33: mol_type = other RNA
cgcctgtacgaggacagcggctactccagcttc

SEQ ID NO: 28869 - RNA, 30 nt, synthetic construct
  misc_feature 1..30: note = ATP-binding cassette sub-family D member 1 (172-181)
  source 1..30: mol_type = other RNA
cgcctgtacttcagccagcagacctactac

SEQ ID NO: 28870 - RNA, 30 nt, synthetic construct
  misc_feature 1..30: note = V-type proton ATPase subunit d 1 (169-178)
  source 1..30: mol_type = other RNA
cgcctgtaccccgagggcctcgcccagctg

SEQ ID NO: 28871 - RNA, 27 nt, synthetic construct
  misc_feature 1..27: note = Vimentin (13-21)
  source 1..27: mol_type = other RNA
cgcatgttcggcgggcccggcaccgcc

SEQ ID NO: 28872 - RNA, 33 nt, synthetic construct
  misc_feature 1..33: note = Enhancer of rudimentary homolog (42-52)
  source 1..33: mol_type = other RNA
cgcatgaaccccaacagcccgtccatcacctac

SEQ ID NO: 28873 - RNA, 30 nt, synthetic construct
  misc_feature 1..30: note = ATP synthase subunit epsilon-like protein, mitochondrial (6-15)
  source 1..30: mol_type = other RNA
cgccaggccggcctgagctacatccggtac

SEQ ID NO: 28874 - RNA, 27 nt, synthetic construct
  misc_feature 1..27: note = Polyadenylate-binding protein 1 (374-382)
  source 1..27: mol_type = other RNA
cgccaggcccacctgaccaaccagtac

SEQ ID NO: 28875 - RNA, 30 nt, synthetic construct
  misc_feature 1..30: note = Vimentin (310-319)
  source 1..30: mol_type = other RNA
cgccaggccaagcaggagagcaccgagtac

SEQ ID NO: 28876 - RNA, 27 nt, synthetic construct
  misc_feature 1..27: note = Caprin-1 (297-305)
  source 1..27: mol_type = other RNA
cgccagttcatggccgagacccagttc

SEQ ID NO: 28877 - RNA, 30 nt, synthetic construct
  misc_feature 1..30: note = Splicing factor 3B subunit 1 (517-526)
  source 1..30: mol_type = other RNA
cgccagatcaccgacaaggcccgggagttc

SEQ ID NO: 28878 - RNA, 27 nt, synthetic construct
  misc_feature 1..27: note = Protein OS-9 (639-647)
  source 1..27: mol_type = other RNA
cgccagaaggagctggagagcaactac

SEQ ID NO: 28879 - RNA, 30 nt, synthetic construct
  misc_feature 1..30: note = Interferon-induced, double-stranded RNA-activated protein kinase (18-27)
  source 1..30: mol_type = other RNA
cgccagaagcagggcgtggtcctgaagtac

SEQ ID NO: 28880 - RNA, 30 nt, synthetic construct
  misc_feature 1..30: note = Alpha-taxilin (77-86)
  source 1..30: mol_type = other RNA
cgccagctggaggacatcctcagcacctac

SEQ ID NO: 28881 - RNA, 33 nt, synthetic construct
  misc_feature 1..33: note = Prelamin-A/C (390-400)
  source 1..33: mol_type = other RNA
cgccagaacggcgacgaccccctgctcacctac

SEQ ID NO: 28882 - RNA, 33 nt, synthetic construct
  misc_feature 1..33: note = Spectrin beta chain, non-erythrocytic 1 (1161-1171)
  source 1..33: mol_type = other RNA
cgccagaacctgctcagccagtcccacgcctac

SEQ ID NO: 28883 - RNA, 30 nt, synthetic construct
  misc_feature 1..30: note = Tetratricopeptide repeat protein 9C (19-28)
  source 1..30: mol_type = other RNA
cgccagcccgacaacgccaaggccctgtac

SEQ ID NO: 28884 - RNA, 27 nt, synthetic construct
  misc_feature 1..27: note = Eukaryotic translation initiation factor 3 subunit C (905-913)
  source 1..27: mol_type = other RNA
cgccagcagcagagccagaccgcctac

SEQ ID NO: 28885 - RNA, 33 nt, synthetic construct
  misc_feature 1..33: note = ATP-dependent RNA helicase DDX3X (603-613)
  source 1..33: mol_type = other RNA
cgccagagctccggcgccagctccagctccttc

SEQ ID NO: 28886 - RNA, 27 nt, synthetic construct
  misc_feature 1..27: note = 40S ribosomal protein S29 (44-52)
  source 1..27: mol_type = other RNA
cgccagtacgccaaggacatcggcttc

SEQ ID NO: 28887 - RNA, 33 nt, synthetic construct
  misc_feature 1..33: note = Transmembrane emp24 domain-containing protein 4 (33-43)
  source 1..33: mol_type = other RNA
cgccagtacggcagcgaggggcggttcaccttc

SEQ ID NO: 28888 - RNA, 27 nt, synthetic construct
  misc_feature 1..27: note = Non-receptor tyrosine-protein kinase TYK2 (521-529)
  source 1..27: mol_type = other RNA
cgcagcttcccctccgtgcgggagctg

SEQ ID NO: 28889 - RNA, 27 nt, synthetic construct
  misc_feature 1..27: note = E3 ubiquitin-protein ligase AMFR (229-237)
  source 1..27: mol_type = other RNA
cgcaccgcccacgtgatcctgcggtac

SEQ ID NO: 28890 - RNA, 27 nt, synthetic construct
  misc_feature 1..27: note = Proteasome subunit alpha type-2 (113-121)
  source 1..27: mol_type = other RNA
cgcgtggccagcgtcatgcaggagtac

SEQ ID NO: 28891 - RNA, 30 nt, synthetic construct
  misc_feature 1..30: note = Calmodulin (91-100)
  source 1..30: mol_type = other RNA
cgcgtgttcgacaaggacggcaacgggtac

SEQ ID NO: 28892 - RNA, 30 nt, synthetic construct
  misc_feature 1..30: note = Nucleolysin TIA-1 isoform p40 (244-253)
  source 1..30: mol_type = other RNA
cgcgtgttccccgacaagggctacagcttc

SEQ ID NO: 28893 - RNA, 30 nt, synthetic construct
  misc_feature 1..30: note = Nucleolysin TIAR (213-222)
  source 1..30: mol_type = other RNA
cgcgtgttccccgagaagggctacagcttc

SEQ ID NO: 28894 - RNA, 30 nt, synthetic construct
  misc_feature 1..30: note = Kinesin-like protein KIF20A (466-475)
  source 1..30: mol_type = other RNA
cgcgtgttccagggcttcttcaccgggcgg

SEQ ID NO: 28895 - RNA, 33 nt, synthetic construct
  misc_feature 1..33: note = Fatty acid synthase (1694-1704)
  source 1..33: mol_type = other RNA
cgcgtgttcaccaccgtcggcagcgccgagaag

SEQ ID NO: 28896 - RNA, 33 nt, synthetic construct
  misc_feature 1..33: note = Non-specific lipid-transfer protein (13-23)
  source 1..33: mol_type = other RNA
cgcgtgttcgtcgtgggcgtggggatgaccaag

SEQ ID NO: 28897 - RNA, 33 nt, synthetic construct
  misc_feature 1..33: note = 26S protease regulatory subunit 7 (239-249)
  source 1..33: mol_type = other RNA
cgcgtgatcggcagcgagctggtccagaagtac

SEQ ID NO: 28898 - RNA, 30 nt, synthetic construct
  misc_feature 1..30: note = Ectonucleoside triphosphate diphosphohydrolase 1 (97-106)
  source 1..30: mol_type = other RNA
cgcgtgaagggccccgggatcagcaagttc

SEQ ID NO: 28899 - RNA, 27 nt, synthetic construct
  misc_feature 1..27: note = FACT complex subunit SSRP1 (316-324)
  source 1..27: mol_type = other RNA
cgcgtgatgaaggccctggtcaaccgg

SEQ ID NO: 28900 - RNA, 27 nt, synthetic construct
  misc_feature 1..27: note = DNA replication licensing factor MCM4 (387-395)
  source 1..27: mol_type = other RNA
cgcgtgaacgtcaccggcatctaccgg

SEQ ID NO: 28901 - RNA, 27 nt, synthetic construct
  misc_feature 1..27: note = Double-stranded RNA-binding protein Staufen homolog 1 (457-465)
  source 1..27: mol_type = other RNA
cgcgtgcagggcttccaggtcgagtac

SEQ ID NO: 28902 - RNA, 27 nt, synthetic construct
  misc_feature 1..27: note = Serine/threonine-protein phosphatase 6 regulatory subunit 3 (45-53)
  source 1..27: mol_type = other RNA
cgcgtgagcgacatcaacttcaccctg

SEQ ID NO: 28903 - RNA, 30 nt, synthetic construct
  misc_feature 1..30: note = SUMO-specific isopeptidase USPL1 (717-726)
  source 1..30: mol_type = other RNA
cgcgtgaccagccaggtctccaacctgaag

SEQ ID NO: 28904 - RNA, 27 nt, synthetic construct
  misc_feature 1..27: note = 5'-nucleotidase domain-containing protein 1 (141-149)
  source 1..27: mol_type = other RNA
cgcgtggtcgactacctgaccaagctc

SEQ ID NO: 28905 - RNA, 27 nt, synthetic construct
  misc_feature 1..27: note = Serine/arginine-rich splicing factor 6 (3-11)
  source 1..27: mol_type = other RNA
cgcgtgtacatcggccggctgagctac

SEQ ID NO: 28906 - RNA, 27 nt, synthetic construct
  misc_feature 1..27: note = Serine/threonine-protein kinase SMG1 (36-44)
  source 1..27: mol_type = other RNA
agcgccgaccccgacaacctgaagtac

SEQ ID NO: 28907 - RNA, 27 nt, synthetic construct
  misc_feature 1..27: note = Serine/threonine-protein kinase 17A (293-301)
  source 1..27: mol_type = other RNA
agcgccgtggacttcatccgcaccctg

SEQ ID NO: 28908 - RNA, 30 nt, synthetic construct
  misc_feature 1..30: note = A-kinase anchor protein 2 (685-694)
  source 1..30: mol_type = other RNA
agcgaggccgccgagctgcgctccaccgcg

SEQ ID NO: 28909 - RNA, 27 nt, synthetic construct
  misc_feature 1..27: note = Zinc finger protein Rlf (1399-1407)
  source 1..27: mol_type = other RNA
agcgaggccggctccgccgcgcgcttc

SEQ ID NO: 28910 - RNA, 27 nt, synthetic construct
  misc_feature 1..27: note = Histone-lysine N-methyltransferase SETD2 (461-469)
  source 1..27: mol_type = other RNA
agcgaggaggagtacaagaagacctac

SEQ ID NO: 28911 - RNA, 27 nt, synthetic construct
  misc_feature 1..27: note = U5 small nuclear ribonucleoprotein 200 kDa helicase (1010-1018)
  source 1..27: mol_type = other RNA
agcgagatcgagctgttccgcgtgttc

SEQ ID NO: 28912 - RNA, 30 nt, synthetic construct
  misc_feature 1..30: note = Nesprin-2 (320-329)
  source 1..30: mol_type = other RNA
agcgagaacgacacctacttcaagaagtac

SEQ ID NO: 28913 - RNA, 30 nt, synthetic construct
  misc_feature 1..30: note = Uncharacterized protein C14orf119 (121-130)
  source 1..30: mol_type = other RNA
agcgagcccgacttcgtggccaagttctac

SEQ ID NO: 28914 - RNA, 33 nt, synthetic construct
  misc_feature 1..33: note = Fructose-bisphosphate aldolase A (408-418)
  source 1..33: mol_type = other RNA
agcgagtccctgttcgtgagcaaccacgcctac

SEQ ID NO: 28915 - RNA, 27 nt, synthetic construct
  misc_feature 1..27: note = Cyclin-G-associated kinase (305-313)
  source 1..27: mol_type = other RNA
agcatcgccgaggtggtccaccagctg

SEQ ID NO: 28916 - RNA, 27 nt, synthetic construct
  misc_feature 1..27: note = 26S proteasome non-ATPase regulatory subunit 3 (418-426)
  source 1..27: mol_type = other RNA
agcctggccgacatcgcccagaagctc

SEQ ID NO: 28917 - RNA, 30 nt, synthetic construct
  misc_feature 1..30: note = Peroxisomal membrane protein 2 (66-75)
  source 1..30: mol_type = other RNA
agcctggacgtgggcgggcccctccgctac

SEQ ID NO: 28918 - RNA, 27 nt, synthetic construct
  misc_feature 1..27: note = Nucleoporin GLE1 (288-296)
  source 1..27: mol_type = other RNA
agcctgatctccggcatcatccgcgcc

SEQ ID NO: 28919 - RNA, 27 nt, synthetic construct
  misc_feature 1..27: note = Nucleolar protein 7 (197-205)
  source 1..27: mol_type = other RNA
agcctgtacggccccgggaccaaccgc

SEQ ID NO: 28920 - RNA, 27 nt, synthetic construct
  misc_feature 1..27: note = Nuclear pore complex protein Nup93 (787-795)
  source 1..27: mol_type = other RNA
agccaggcccgcaccctgatcaccttc

SEQ ID NO: 28921 - RNA, 27 nt, synthetic construct
  misc_feature 1..27: note = 60S ribosomal export protein NMD3 (228-236)
  source 1..27: mol_type = other RNA
agccaggacatccactccaacacctac

SEQ ID NO: 28922 - RNA, 27 nt, synthetic construct
  misc_feature 1..27: note = 14 kDa phosphohistidine phosphatase (83-91)
  source 1..27: mol_type = other RNA
agccaggacaagaagatccacgtgtac

SEQ ID NO: 28923 - RNA, 27 nt, synthetic construct
  misc_feature 1..27: note = MKI67 FHA domain-interacting nucleolar phosphoprotein (66-74)
  source 1..27: mol_type = other RNA
agccagttcggcaccgtgacccgcttc

SEQ ID NO: 28924 - RNA, 30 nt, synthetic construct
  misc_feature 1..30: note = Kinesin-associated protein 3 (208-217)
  source 1..30: mol_type = other RNA
agccagttccacggcctgatcacccactac

SEQ ID NO: 28925 - RNA, 27 nt, synthetic construct
  misc_feature 1..27: note = Heterogeneous nuclear ribonucleoprotein U (697-705)
  source 1..27: mol_type = other RNA
agccagcactaccaccagggctactac

SEQ ID NO: 28926 - RNA, 33 nt, synthetic construct
  misc_feature 1..33: note = U4/U6 small nuclear ribonucleoprotein Prp4 (224-234)
  source 1..33: mol_type = other RNA
agccagatcggcgacgaccgccccatctcctac

SEQ ID NO: 28927 - RNA, 27 nt, synthetic construct
  misc_feature 1..27: note = DCN1-like protein 1 (7-15)
  source 1..27: mol_type = other RNA
agccagaaggacaaggtgcgccagttc

SEQ ID NO: 28928 - RNA, 27 nt, synthetic construct
  misc_feature 1..27: note = General transcription factor 3C polypeptide 1 (1442-1450)
  source 1..27: mol_type = other RNA
agccagatgaagtcctaccagagcttc

SEQ ID NO: 28929 - RNA, 27 nt, synthetic construct
  misc_feature 1..27: note = Transmembrane emp24 domain-containing protein 3 (196-204)
  source 1..27: mol_type = other RNA
agccaggtgctgctcctgaagtccttc

SEQ ID NO: 28930 - RNA, 27 nt, synthetic construct
  misc_feature 1..27: note = E3 ubiquitin-protein ligase MARCH7 (122-130)
  source 1..27: mol_type = other RNA
agccaggtgccccgctccagctccatg

SEQ ID NO: 28931 - RNA, 27 nt, synthetic construct
  misc_feature 1..27: note = Midasin (130-138)
  source 1..27: mol_type = other RNA
agctccgacgccaaccccgtgcgctac

SEQ ID NO: 28932 - RNA, 27 nt, synthetic construct
  misc_feature 1..27: note = Arf-GAP with coiled-coil, ANK repeat and PH domain-containing protein 2 (251-259)
  source 1..27: mol_type = other RNA
agctccgacgacagcaagctggagtac

SEQ ID NO: 28933 - RNA, 30 nt, synthetic construct
  misc_feature 1..30: note = Zinc finger protein 330 (258-267)
  source 1..30: mol_type = other RNA
agctccgacaagtacggcgacaccagctac

SEQ ID NO: 28934 - RNA, 30 nt, synthetic construct
  misc_feature 1..30: note = Protein FAM208B (1580-1589)
  source 1..30: mol_type = other RNA
agctccgacaacgccaccctgacccactac

SEQ ID NO: 28935 - RNA, 27 nt, synthetic construct
  misc_feature 1..27: note = Heat shock 70 kDa protein 14 (75-83)
  source 1..27: mol_type = other RNA
agctccgacccccaggcccagaagtac

SEQ ID NO: 28936 - RNA, 27 nt, synthetic construct
  misc_feature 1..27: note = Spectrin beta chain, non-erythrocytic 1 (769-777)
  source 1..27: mol_type = other RNA
agctccgacgtgggccacgacgagtac

SEQ ID NO: 28937 - RNA, 27 nt, synthetic construct
  misc_feature 1..27: note = Signal transducer and activator of transcription 3 (613-621)
  source 1..27: mol_type = other RNA
agctccaaggagggcggggtgaccttc

SEQ ID NO: 28938 - RNA, 30 nt, synthetic construct
  misc_feature 1..30: note = COP9 signalosome complex subunit 6 (241-250)
  source 1..30: mol_type = other RNA
agcaccgacaagttcaagaccgacttctac

SEQ ID NO: 28939 - RNA, 27 nt, synthetic construct
  misc_feature 1..27: note = Axin-1 (71-79)
  source 1..27: mol_type = other RNA
agcaccgacccccgcccggcctcctac

SEQ ID NO: 28940 - RNA, 33 nt, synthetic construct
  misc_feature 1..33: note = Proteasome subunit beta type-8 (261-271)
  source 1..33: mol_type = other RNA
agcaccgacgtgtccgacctgctccaccagtac

SEQ ID NO: 28941 - RNA, 27 nt, synthetic construct
  misc_feature 1..27: note = Dedicator of cytokinesis protein 11 (109-117)
  source 1..27: mol_type = other RNA
agcaccgactggcacgtggtcaactac

SEQ ID NO: 28942 - RNA, 27 nt, synthetic construct
  misc_feature 1..27: note = Mitochondrial Rho GTPase 2 (298-306)
  source 1..27: mol_type = other RNA
agcaccgagctgaaccacctcggctac

SEQ ID NO: 28943 - RNA, 27 nt, synthetic construct
  misc_feature 1..27: note = Cirhin (419-427)
  source 1..27: mol_type = other RNA
agcaccgtgtcccgcttcttcctgtac

SEQ ID NO: 28944 - RNA, 27 nt, synthetic construct
  misc_feature 1..27: note = Cysteine-rich PDZ-binding protein (64-72)
  source 1..27: mol_type = other RNA
agcgtgcaccagcccggctcccactac

SEQ ID NO: 28945 - RNA, 33 nt, synthetic construct
  misc_feature 1..33: note = Exosome complex exonuclease RRP44 (580-590)
  source 1..33: mol_type = other RNA
agcgtgatcaactccaaggccagcctgacctac

SEQ ID NO: 28946 - RNA, 27 nt, synthetic construct
  misc_feature 1..27: note = Collagen type IV alpha-3-binding protein (484-492)
  source 1..27: mol_type = other RNA
agcgtgatccgcaagatccccgccctg

SEQ ID NO: 28947 - RNA, 27 nt, synthetic construct
  misc_feature 1..27: note = Vigilin (74-82)
  source 1..27: mol_type = other RNA
agcgtgatcacccaggtcttccacgtg

SEQ ID NO: 28948 - RNA, 27 nt, synthetic construct
  misc_feature 1..27: note = WD repeat-containing protein 1 (458-466)
  source 1..27: mol_type = other RNA
agcgtgaaggagtggaccatcacctac

SEQ ID NO: 28949 - RNA, 27 nt, synthetic construct
  misc_feature 1..27: note = Cytoplasmic FMR1-interacting protein 1 (214-222)
  source 1..27: mol_type = other RNA
agcgtgaagaacgaccactccgcctac

SEQ ID NO: 28950 - RNA, 27 nt, synthetic construct
  misc_feature 1..27: note = Ribosomal biogenesis protein LAS1L (538-546)
  source 1..27: mol_type = other RNA
agcgtgaagcccgcctccagctccttc

SEQ ID NO: 28951 - RNA, 30 nt, synthetic construct
  misc_feature 1..30: note = Eukaryotic translation initiation factor 3 subunit I (39-48)
  source 1..30: mol_type = other RNA
agcgtgaacggcgagcgcctggggacctac

SEQ ID NO: 28952 - RNA, 33 nt, synthetic construct
  misc_feature 1..33: note = Bone morphogenetic protein receptor type-2 (815-825)
  source 1..33: mol_type = other RNA
agcgtgaactcccacgccgccaccacccagtac

SEQ ID NO: 28953 - RNA, 27 nt, synthetic construct
  misc_feature 1..27: note = Epidermal growth factor receptor substrate 15 (746-754)
  source 1..27: mol_type = other RNA
agcgtgtccaacgtcgtgatcaccaag

SEQ ID NO: 28954 - RNA, 33 nt, synthetic construct
  misc_feature 1..33: note = E3 ubiquitin-protein ligase Topors (191-201)
  source 1..33: mol_type = other RNA
agcgtgtactcccccagcggcccggtcaaccgc

SEQ ID NO: 28955 - RNA, 33 nt, synthetic construct
  misc_feature 1..33: note = Tubulin beta chain (48-58)
  source 1..33: mol_type = other RNA
agcgtgtactacaacgaggccaccggcgggaag

SEQ ID NO: 28956 - RNA, 27 nt, synthetic construct
  misc_feature 1..27: note = Cohesin subunit SA-2 (881-889)
  source 1..27: mol_type = other RNA
accgccgccgacatcttcaagcagtac

SEQ ID NO: 28957 - RNA, 27 nt, synthetic construct
  misc_feature 1..27: note = Phosphatidylinositol 3,4,5-trisphosphate-dependent Rac exchanger 1 protein (345-353)
  source 1..27: mol_type = other RNA
accgccgactaccacagcaacggctac

SEQ ID NO: 28958 - RNA, 27 nt, synthetic construct
  misc_feature 1..27: note = Phospholipid-transporting ATPase IG (35-43)
  source 1..27: mol_type = other RNA
accgaggcctacatcgcccagcgcttc

SEQ ID NO: 28959 - RNA, 30 nt, synthetic construct
  misc_feature 1..30: note = RNMT-activating mini protein (20-29)
  source 1..30: mol_type = other RNA
accgagaacgacaaggagtaccaggagtac

SEQ ID NO: 28960 - RNA, 27 nt, synthetic construct
  misc_feature 1..27: note = Vacuolar protein sorting-associated protein 26A (225-233)
  source 1..27: mol_type = other RNA
accgagaccgagacgatcgccaagtac

SEQ ID NO: 28961 - RNA, 27 nt, synthetic construct
  misc_feature 1..27: note = Ribosomal RNA processing protein 1 homolog B (77-85)
  source 1..27: mol_type = other RNA
accatcgcccagctggtgcacgccgtc

SEQ ID NO: 28962 - RNA, 27 nt, synthetic construct
  misc_feature 1..27: note = Heterogeneous nuclear ribonucleoproteins A2/B1 (164-172)
  source 1..27: mol_type = other RNA
accatcaacggccacaacgccgaggtg

SEQ ID NO: 28963 - RNA, 27 nt, synthetic construct
  misc_feature 1..27: note = Transformation/transcription domain-associated protein (378-386)
  source 1..27: mol_type = other RNA
accctggccgacctcgtgcaccacgtc

SEQ ID NO: 28964 - RNA, 30 nt, synthetic construct
  misc_feature 1..30: note = Syntaxin-binding protein 3 (187-196)
  source 1..30: mol_type = other RNA
accctggacgagaaccccggcgtgcgctac

SEQ ID NO: 28965 - RNA, 27 nt, synthetic construct
  misc_feature 1..27: note = Centrosomal protein CEP57L1 (127-135)
  source 1..27: mol_type = other RNA
accctgctcgagaagcagctggagtac

SEQ ID NO: 28966 - RNA, 33 nt, synthetic construct
  misc_feature 1..33: note = Pleckstrin homology domain-containing family B member 2 (103-113)
  source 1..33: mol_type = other RNA
accctgcaggacagccgcaccaacacggcctac

SEQ ID NO: 28967 - RNA, 27 nt, synthetic construct
  misc_feature 1..27: note = Zinc finger protein 706 (46-54)
  source 1..27: mol_type = other RNA
acccagatgcccgacccgaagaccttc

SEQ ID NO: 28968 - RNA, 27 nt, synthetic construct
  misc_feature 1..27: note = SWI/SNF-related matrix-associated actin-dependent regulator of chromatin subfamily D member 2 (452-460)
  source 1..27: mol_type = other RNA
acccagcgcgacttcatgctgagcttc

SEQ ID NO: 28969 - RNA, 27 nt, synthetic construct
  misc_feature 1..27: note = V-type proton ATPase subunit E 2 (48-56)
  source 1..27: mol_type = other RNA
acccagcgcctgaagatcatggagtac

SEQ ID NO: 28970 - RNA, 27 nt, synthetic construct
  misc_feature 1..27: note = DNA replication licensing factor MCM7 (654-662)
  source 1..27: mol_type = other RNA
acccagcgccccgccgacgtgatcttc

SEQ ID NO: 28971 - RNA, 30 nt, synthetic construct
  misc_feature 1..30: note = 40S ribosomal protein S13 (18-27)
  source 1..30: mol_type = other RNA
accagcgacgacgtgaaggagcagatctac

SEQ ID NO: 28972 - RNA, 27 nt, synthetic construct
  misc_feature 1..27: note = Cation-independent mannose-6-phosphate receptor (877-885)
  source 1..27: mol_type = other RNA
accagcgacggccgccagaccacgtac

SEQ ID NO: 28973 - RNA, 33 nt, synthetic construct
  misc_feature 1..33: note = Bifunctional glutamate/proline-tRNA ligase (269-279)
  source 1..33: mol_type = other RNA
accagcgaccacttcgagaccatcatgaagtac

SEQ ID NO: 28974 - RNA, 30 nt, synthetic construct
  misc_feature 1..30: note = Nucleoporin Nup37 (108-117)
  source 1..30: mol_type = other RNA
accagcgacctgcaggacaagaacgagtac

SEQ ID NO: 28975 - RNA, 33 nt, synthetic construct
  misc_feature 1..33: note = RNA polymerase II elongation factor ELL (458-468)
  source 1..33: mol_type = other RNA
accagcgagacccccgactacctgctcaagtac

SEQ ID NO: 28976 - RNA, 33 nt, synthetic construct
  misc_feature 1..33: note = Heterogeneous nuclear ribonucleoprotein F (256-266)
  source 1..33: mol_type = other RNA
accaccgacctgttcggccgcgacctcagctac

SEQ ID NO: 28977 - RNA, 27 nt, synthetic construct
  misc_feature 1..27: note = Tetratricopeptide repeat protein 13 (710-718)
  source 1..27: mol_type = other RNA
accaccgaggagcgcacgcagctgtac

SEQ ID NO: 28978 - RNA, 30 nt, synthetic construct
  misc_feature 1..30: note = Heterogeneous nuclear ribonucleoproteins A2/B1 (20-29)
  source 1..30: mol_type = other RNA
accaccgaggagagcctgcgcaactactac

SEQ ID NO: 28979 - RNA, 27 nt, synthetic construct
  misc_feature 1..27: note = Tapasin (372-380)
  source 1..27: mol_type = other RNA
accaccgagcagcacggcgcccgctac

SEQ ID NO: 28980 - RNA, 30 nt, synthetic construct
  misc_feature 1..30: note = Condensin-2 complex subunit D3 (675-684)
  source 1..30: mol_type = other RNA
accaccgagagccaggagctgtcccgctac

SEQ ID NO: 28981 - RNA, 27 nt, synthetic construct
  misc_feature 1..27: note = Endoplasmic reticulum-Golgi intermediate compartment protein 3 (40-48)
  source 1..27: mol_type = other RNA
accaccgaggtgcaccccgagctgtac

SEQ ID NO: 28982 - RNA, 27 nt, synthetic construct
  misc_feature 1..27: note = Coatomer subunit gamma-1 (759-767)
  source 1..27: mol_type = other RNA
accgtggccgaccacatccagaaggtc

SEQ ID NO: 28983 - RNA, 27 nt, synthetic construct
  misc_feature 1..27: note = Threonine-tRNA ligase, cytoplasmic (150-158)
  source 1..27: mol_type = other RNA
accgtgatcgccaaggtcaacaacgtg

SEQ ID NO: 28984 - RNA, 27 nt, synthetic construct
  misc_feature 1..27: note = Transmembrane emp24 domain-containing protein 3 (153-161)
  source 1..27: mol_type = other RNA
accgtgatcgacagccagacccactac

SEQ ID NO: 28985 - RNA, 30 nt, synthetic construct
  misc_feature 1..30: note = Importin subunit alpha-5 (433-442)
  source 1..30: mol_type = other RNA
accgtgatggacagcaagatcgtccaggtg

SEQ ID NO: 28986 - RNA, 27 nt, synthetic construct
  misc_feature 1..27: note = Sodium/potassium-transporting ATPase subunit alpha-3 (268-276)
  source 1..27: mol_type = other RNA
accgtgatgggccgcatcgccaccctg

SEQ ID NO: 28987 - RNA, 27 nt, synthetic construct
  misc_feature 1..27: note = Band 4.1-like protein 2 (777-785)
  source 1..27: mol_type = other RNA
gtggaggaggagccccgcccggccgcc

SEQ ID NO: 28988 - RNA, 27 nt, synthetic construct
  misc_feature 1..27: note = 26S protease regulatory subunit 4 (176-184)
  source 1..27: mol_type = other RNA
gtggagaaggccccccaggagacctac

SEQ ID NO: 28989 - RNA, 27 nt, synthetic construct
  misc_feature 1..27: note = Choline/ethanolaminephosphotransferase 1 (268-276)
  source 1..27: mol_type = other RNA
gtgatcttcaccggcggggtcggcaag

SEQ ID NO: 28990 - RNA, 27 nt, synthetic construct
  misc_feature 1..27: note = 28S ribosomal protein S17, mitochondrial (34-42)
  source 1..27: mol_type = other RNA
gtgctggacccctacctcctgaagtac

SEQ ID NO: 28991 - RNA, 30 nt, synthetic construct
  misc_feature 1..30: note = Protein Niban (367-376)
  source 1..30: mol_type = other RNA
gtgctgttcgagaaggaggtcaacgaggtg

SEQ ID NO: 28992 - RNA, 27 nt, synthetic construct
  misc_feature 1..27: note = Caprin-1 (232-240)
  source 1..27: mol_type = other RNA
gtgctgaaggagatcgtcgagcgcgtg

SEQ ID NO: 28993 - RNA, 27 nt, synthetic construct
  misc_feature 1..27: note = Ribonucleoside-diphosphate reductase large subunit (245-253)
  source 1..27: mol_type = other RNA
gtgctgaaggagaagatcgccaagtac

SEQ ID NO: 28994 - RNA, 33 nt, synthetic construct
  misc_feature 1..33: note = Histone H4 (22-32)
  source 1..33: mol_type = other RNA
gtgctgcgcgacaacatccagggcatcaccaag

SEQ ID NO: 28995 - RNA, 27 nt, synthetic construct
  misc_feature 1..27: note = Cytoplasmic dynein 1 heavy chain 1 (3839-3847)
  source 1..27: mol_type = other RNA
gtgctgtacgagaaccccaacctcaag

SEQ ID NO: 28996 - RNA, 27 nt, synthetic construct
  misc_feature 1..27: note = Ubiquitin carboxyl-terminal hydrolase 7 (195-203)
  source 1..27: mol_type = other RNA
gtgcaggccgacgccccccacggcgtc

SEQ ID NO: 28997 - RNA, 30 nt, synthetic construct
  misc_feature 1..30: note = E3 ubiquitin-protein ligase RNF19A (143-152)
  source 1..30: mol_type = other RNA
gtgcaggccgacgtccagaaggagcgctac

SEQ ID NO: 28998 - RNA, 27 nt, synthetic construct
  misc_feature 1..27: note = Interleukin enhancer-binding factor 2 (97-105)
  source 1..27: mol_type = other RNA
gtgcagatcgaggaggtccgccaggtg

SEQ ID NO: 28999 - RNA, 33 nt, synthetic construct
  misc_feature 1..33: note = Proteasome subunit alpha type-2 (102-112)
  source 1..33: mol_type = other RNA
gtgcagcgcgtcgccagcgtgatgcaggagtac

SEQ ID NO: 29000 - RNA, 27 nt, synthetic construct
  misc_feature 1..27: note = Transitional endoplasmic reticulum ATPase (747-755)
  source 1..27: mol_type = other RNA
gtgagcgacaacgacatccgcaagtac

SEQ ID NO: 29001 - RNA, 27 nt, synthetic construct
  misc_feature 1..27: note = Nuclear factor NF-kappa-B p100 subunit (317-325)
  source 1..27: mol_type = other RNA
gtgagcgactccaagcagttcacctac

SEQ ID NO: 29002 - RNA, 30 nt, synthetic construct
  misc_feature 1..30: note = Nuclear factor NF-kappa-B p100 subunit (317-326)
  source 1..30: mol_type = other RNA
gtgagcgactccaagcagttcacctactac

SEQ ID NO: 29003 - RNA, 33 nt, synthetic construct
  misc_feature 1..33: note = Phospholipase D2 (65-75)
  source 1..33: mol_type = other RNA
gtgaccgcccaggtcgtgggcaccgagcgctac

SEQ ID NO: 29004 - RNA, 27 nt, synthetic construct
  misc_feature 1..27: note = Acidic fibroblast growth factor intracellular-binding protein (29-37)
  source 1..27: mol_type = other RNA
gtgaccgacgccgtcgccctgcgcgtg

SEQ ID NO: 29005 - RNA, 30 nt, synthetic construct
  misc_feature 1..30: note = Alanine-tRNA ligase, cytoplasmic (480-489)
  source 1..30: mol_type = other RNA
gtgaccgacgacagccccaagtacaactac

SEQ ID NO: 29006 - RNA, 33 nt, synthetic construct
  misc_feature 1..33: note = Histone-lysine N-methyltransferase 2C (1500-1510)
  source 1..33: mol_type = other RNA
gtgaccgacggcgccatcctggggaagctctac

SEQ ID NO: 29007 - RNA, 30 nt, synthetic construct
  misc_feature 1..30: note = Attractin (145-154)
  source 1..30: mol_type = other RNA
gtgaccgacggccccgggaactacaagtac

SEQ ID NO: 29008 - RNA, 30 nt, synthetic construct
  misc_feature 1..30: note = Proteasome-associated protein ECM29 homolog (1150-1159)
  source 1..30: mol_type = other RNA
gtgaccgacaagagcatggtcgacaagtac

SEQ ID NO: 29009 - RNA, 30 nt, synthetic construct
  misc_feature 1..30: note = Histone-lysine N-methyltransferase, H3 lysine-79 specific (77-86)
  source 1..30: mol_type = other RNA
gtgaccgaccccgagaagctgaacaactac

SEQ ID NO: 29010 - RNA, 27 nt, synthetic construct
  misc_feature 1..27: note = Dynamin-1-like protein (55-63)
  source 1..27: mol_type = other RNA
gtgaccgacagcatccgcgacgagtac

SEQ ID NO: 29011 - RNA, 30 nt, synthetic construct
  misc_feature 1..30: note = Pyridine nucleotide-disulfide oxidoreductase domain-containing protein 1 (98-107)
  source 1..30: mol_type = other RNA
gtgaccgaggacggcaaccagcacgtctac

SEQ ID NO: 29012 - RNA, 27 nt, synthetic construct
  misc_feature 1..27: note = Filamin-A (2353-2361)
  source 1..27: mol_type = other RNA
gtgaccgagatcgaccaggacaagtac

SEQ ID NO: 29013 - RNA, 33 nt, synthetic construct
  misc_feature 1..33: note = Staphylococcal nuclease domain-containing protein 1 (687-697)
  source 1..33: mol_type = other RNA
gtgaccgagatcaccgacgacctgcacttctac

SEQ ID NO: 29014 - RNA, 27 nt, synthetic construct
  misc_feature 1..27: note = E3 ubiquitin-protein ligase RNF213 (4915-4923)
  source 1..27: mol_type = other RNA
gtgaccgagctgcacgtcatcagctac

SEQ ID NO: 29015 - RNA, 27 nt, synthetic construct
  misc_feature 1..27: note = Eukaryotic translation initiation factor 3 subunit C-like protein (23-31)
  source 1..27: mol_type = other RNA
gtgaccaagcccgtcggcgggaactac

SEQ ID NO: 29016 - RNA, 30 nt, synthetic construct
  misc_feature 1..30: note = Heterogeneous nuclear ribonucleoprotein U (696-705)
  source 1..30: mol_type = other RNA
tggagccagcactaccaccagggctactac

SEQ ID NO: 29017 - RNA, 30 nt, synthetic construct
  misc_feature 1..30: note = Chromodomain-helicase-DNA-binding protein 7 (859-868)
  source 1..30: mol_type = other RNA
tggaccgacatcctgagccacggccgctac

SEQ ID NO: 29018 - RNA, 27 nt, synthetic construct
  misc_feature 1..27: note = Polypyrimidine tract-binding protein 3 (269-277)
  source 1..27: mol_type = other RNA
tacgccgaccccgtgaacgcccactac

SEQ ID NO: 29019 - RNA, 27 nt, synthetic construct
  misc_feature 1..27: note = HLA class I histocompatibility antigen, B-15 alpha chain (140-148)
  source 1..27: mol_type = other RNA
tacgcctacgacggcaaggactacatc

SEQ ID NO: 29020 - RNA, 33 nt, synthetic construct
  misc_feature 1..33: note = HLA class I histocompatibility antigen, B-52 alpha chain (140-150)
  source 1..33: mol_type = other RNA
tacgcctacgacggcaaggactacatcgccctg

SEQ ID NO: 29021 - RNA, 27 nt, synthetic construct
  misc_feature 1..27: note = Cell division cycle-associated 7-like protein (433-441)
  source 1..27: mol_type = other RNA
tacggctacgacaacgtgaaggagtac

SEQ ID NO: 29022 - RNA, 33 nt, synthetic construct
  misc_feature 1..33: note = Mediator of RNA polymerase II transcription subunit 10 (70-80)
  source 1..33: mol_type = other RNA
tacatcgaccagggccgcaacccccagctgtac

SEQ ID NO: 29023 - RNA, 27 nt, synthetic construct
  misc_feature 1..27: note = Septin-7 (132-140)
  source 1..27: mol_type = other RNA
tacatcgacagcaagttcgaggactac

SEQ ID NO: 29024 - RNA, 27 nt, synthetic construct
  misc_feature 1..27: note = Hypoxia-inducible factor 1-alpha (111-119)
  source 1..27: mol_type = other RNA
tacatcagcgacaacgtgaacaagtac

SEQ ID NO: 29025 - RNA, 30 nt, synthetic construct
  misc_feature 1..30: note = Ubiquitin carboxyl-terminal hydrolase 22 (118-127)
  source 1..30: mol_type = other RNA
tacatctacgacaaggacatggagatcatc

SEQ ID NO: 29026 - RNA, 30 nt, synthetic construct
  misc_feature 1..30: note = Metastasis-associated protein MTA3 (123-132)
  source 1..30: mol_type = other RNA
tacctggacaaggaggacaccttcttctac

SEQ ID NO: 29027 - RNA, 27 nt, synthetic construct
  misc_feature 1..27: note = Oxysterol-binding protein-related protein 3 (75-83)
  source 1..27: mol_type = other RNA
tacctggacaagggcatcctcaagtac

SEQ ID NO: 29028 - RNA, 30 nt, synthetic construct
  misc_feature 1..30: note = tRNA (adenine(58)-N(1))-methyltransferase non-catalytic subunit TRM6 (53-62)
  source 1..30: mol_type = other RNA
tacctggacaacgtgatcggccacagctac

SEQ ID NO: 29029 - RNA, 27 nt, synthetic construct
  misc_feature 1..27: note = Nucleolar complex protein 4 homolog (174-182)
  source 1..27: mol_type = other RNA
tacctggactacgacgacacccgctac

SEQ ID NO: 29030 - RNA, 27 nt, synthetic construct
  misc_feature 1..27: note = Signal transducer and activator of transcription 3 (14-22)
  source 1..27: mol_type = other RNA
tacctggagcagctccaccagctgtac

SEQ ID NO: 29031 - RNA, 27 nt, synthetic construct
  misc_feature 1..27: note = Dystonin (981-989)
  source 1..27: mol_type = other RNA
tacctgatcaacgagatcgaccgcatc

SEQ ID NO: 29032 - RNA, 27 nt, synthetic construct
  misc_feature 1..27: note = Geminin (150-158)
  source 1..27: mol_type = other RNA
tacatggccgagctgatcgagcgcctc

SEQ ID NO: 29033 - RNA, 27 nt, synthetic construct
  misc_feature 1..27: note = Thymidylate synthase (235-243)
  source 1..27: mol_type = other RNA
tacatgatcgcccacatcaccggcctg

SEQ ID NO: 29034 - RNA, 33 nt, synthetic construct
  misc_feature 1..33: note = Chromodomain-helicase-DNA-binding protein 1-like (712-722)
  source 1..33: mol_type = other RNA
taccaggaccccgacgccaccagcctgaagtac

SEQ ID NO: 29035 - RNA, 27 nt, synthetic construct
  misc_feature 1..27: note = Up-regulated during skeletal muscle growth protein 5 (10-18)
  source 1..27: mol_type = other RNA
taccagttcaccggcatcaagaagtac

SEQ ID NO: 29036 - RNA, 27 nt, synthetic construct
  misc_feature 1..27: note = Integrator complex subunit 3 (156-164)
  source 1..27: mol_type = other RNA
taccagaagcagcccaagatcggctac

SEQ ID NO: 29037 - RNA, 27 nt, synthetic construct
  misc_feature 1..27: note = Pre-mRNA-processing-splicing factor 8 (2326-2334)
  source 1..27: mol_type = other RNA
tacagcgccgaccgcgaggacctgtac

SEQ ID NO: 29038 - RNA, 27 nt, synthetic construct
  misc_feature 1..27: note = Mitogen-activated protein kinase 6 (427-435)
  source 1..27: mol_type = other RNA
tacagcgaccaccacgagaacaagtac

SEQ ID NO: 29039 - RNA, 30 nt, synthetic construct
  misc_feature 1..30: note = RNA binding motif protein, X-linked-like-1 (272-281)
  source 1..30: mol_type = other RNA
tacagcgaccacccctccggcgggagctac

SEQ ID NO: 29040 - RNA, 30 nt, synthetic construct
  misc_feature 1..30: note = Cyclin-dependent kinases regulatory subunit 2 (8-17)
  source 1..30: mol_type = other RNA
tacagcgacaagtacttcgacgagcactac

SEQ ID NO: 29041 - RNA, 27 nt, synthetic construct
  misc_feature 1..27: note = Serine/threonine-protein kinase PLK1 (417-425)
  source 1..27: mol_type = other RNA
tacagcgacaagtacggcctggggtac

SEQ ID NO: 29042 - RNA, 27 nt, synthetic construct
  misc_feature 1..27: note = Glycoprotein endo-alpha-1,2-mannosidase-like protein (102-110)
  source 1..27: mol_type = other RNA
tacagcgacctgcacgccttctactac

SEQ ID NO: 29043 - RNA, 30 nt, synthetic construct
  misc_feature 1..30: note = Cold-inducible RNA-binding protein (151-160)
  source 1..30: mol_type = other RNA
tacagcgaccgctccagcggcgggtcctac

SEQ ID NO: 29044 - RNA, 30 nt, synthetic construct
  misc_feature 1..30: note = DNA mismatch repair protein Msh6 (469-478)
  source 1..30: mol_type = other RNA
tacagcgactccctggtgcagaagggctac

SEQ ID NO: 29045 - RNA, 30 nt, synthetic construct
  misc_feature 1..30: note = Serine hydroxymethyltransferase, cytosolic (73-82)
  source 1..30: mol_type = other RNA
tacagcgagggctaccccgggcagcgctac

SEQ ID NO: 29046 - RNA, 33 nt, synthetic construct
  misc_feature 1..33: note = Store-operated calcium entry-associated regulatory factor (204-214)
  source 1..33: mol_type = other RNA
tacagcgagtaccccccgttctcccaccgctac

SEQ ID NO: 29047 - RNA, 33 nt, synthetic construct
  misc_feature 1..33: note = FACT complex subunit SPT16 (18-28)
  source 1..33: mol_type = other RNA
tacagcaactggcgcaagggcgaggacgagtac

SEQ ID NO: 29048 - RNA, 27 nt, synthetic construct
  misc_feature 1..27: note = Histone-lysine N-methyltransferase EZH1 (729-737)
  source 1..27: mol_type = other RNA
tacagccaggccgacgccctgaagtac

SEQ ID NO: 29049 - RNA, 27 nt, synthetic construct
  misc_feature 1..27: note = RNA binding motif protein, X-linked-like-1 (327-335)
  source 1..27: mol_type = other RNA
tacagctccagccgctccgacctgtac

SEQ ID NO: 29050 - RNA, 33 nt, synthetic construct
  misc_feature 1..33: note = Eukaryotic translation initiation factor 3 subunit I (38-48)
  source 1..33: mol_type = other RNA
tacagcgtgaacggcgagcgcctggggacctac

SEQ ID NO: 29051 - RNA, 33 nt, synthetic construct
  misc_feature 1..33: note = Trafficking protein particle complex subunit 4 (75-85)
  source 1..33: mol_type = other RNA
tacaccgccgacggcaaggaggtgctggagtac

SEQ ID NO: 29052 - RNA, 24 nt, synthetic construct
  misc_feature 1..24: note = DnaJ homolog subfamily C member 3 (284-291)
  source 1..24: mol_type = other RNA
tacaccgacgccaccagcaagtac

SEQ ID NO: 29053 - RNA, 27 nt, synthetic construct
  misc_feature 1..27: note = Meckelin (401-409)
  source 1..27: mol_type = other RNA
tacaccgacgagaaccagcaccagtac

SEQ ID NO: 29054 - RNA, 30 nt, synthetic construct
  misc_feature 1..30: note = Serine/threonine-protein kinase pim-2 (194-203)
  source 1..30: mol_type = other RNA
tacaccgacttcgacggcacccgcgtgtac

SEQ ID NO: 29055 - RNA, 30 nt, synthetic construct
  misc_feature 1..30: note = RNA-binding protein 7 (219-228)
  source 1..30: mol_type = other RNA
tacaccgaccacggcagcgaccaccactac

SEQ ID NO: 29056 - RNA, 33 nt, synthetic construct
  misc_feature 1..33: note = Glutathione S-transferase Mu 2 (23-33)
  source 1..33: mol_type = other RNA
tacaccgacagctcctacgaggagaagaagtac

SEQ ID NO: 29057 - RNA, 30 nt, synthetic construct
  misc_feature 1..30: note = Protein patched homolog 1 (564-573)
  source 1..30: mol_type = other RNA
tacaccgacacccacgacaacacgcgctac

SEQ ID NO: 29058 - RNA, 33 nt, synthetic construct
  misc_feature 1..33: note = ARF GTPase-activating protein GIT2 (492-502)
  source 1..33: mol_type = other RNA
tacaccgacaccagcaaccactccagcctgaag

SEQ ID NO: 29059 - RNA, 24 nt, synthetic construct
  misc_feature 1..24: note = Thioredoxin-related transmembrane protein 2 (199-206)
  source 1..24: mol_type = other RNA
tacaccgacgtgagcacccgctac

SEQ ID NO: 29060 - RNA, 30 nt, synthetic construct
  misc_feature 1..30: note = Zinc finger CCCH domain-containing protein 18 (65-74)
  source 1..30: mol_type = other RNA
tacaccgagaccgagccctaccacaactac

SEQ ID NO: 29061 - RNA, 27 nt, synthetic construct
  misc_feature 1..27: note = Probable ATP-dependent RNA helicase DDX47 (236-244)
  source 1..27: mol_type = other RNA
tactacatcttcatccccagcaagttc

SEQ ID NO: 29062 - RNA, 27 nt, synthetic construct
  misc_feature 1..27: note = ORM1-like protein 2 (59-67)
  source 1..27: mol_type = other RNA
gccacctacgtgttcctgcacaccgtc

SEQ ID NO: 29063 - RNA, 27 nt, synthetic construct
  misc_feature 1..27: note = Eukaryotic translation initiation factor 2 subunit 3 (202-210)
  source 1..27: mol_type = other RNA
gagcagtacgagcagatcctggccttc

SEQ ID NO: 29064 - RNA, 27 nt, synthetic construct
  misc_feature 1..27: note = Tapasin (354-362)
  source 1..27: mol_type = other RNA
caccacagcgacggctccgtgagcctg

SEQ ID NO: 29065 - RNA, 27 nt, synthetic construct
  misc_feature 1..27: note = Cyclin-dependent kinases regulatory subunit 2 (59-67)
  source 1..27: mol_type = other RNA
atccacgagcccgagccgcacatcctg

SEQ ID NO: 29066 - RNA, 27 nt, synthetic construct
  misc_feature 1..27: note = Prelamin-A/C (341-349)
  source 1..27: mol_type = other RNA
aaggccggccaggtggtcaccatctgg

SEQ ID NO: 29067 - RNA, 27 nt, synthetic construct
  misc_feature 1..27: note = AP-1 complex subunit beta-1 (249-257)
  source 1..27: mol_type = other RNA
agccacgccaactccgccgtggtcctg

SEQ ID NO: 29068 - RNA, 27 nt, synthetic construct
  misc_feature 1..27: note = Proliferating cell nuclear antigen (152-160)
  source 1..27: mol_type = other RNA
agccacatcggcgacgccgtggtcatc

SEQ ID NO: 29069 - RNA, 27 nt, synthetic construct
  misc_feature 1..27: note = Ubiquitin-60S ribosomal protein L40 (70-78)
  source 1..27: mol_type = other RNA
agcaccctgcacctcgtgctgcgcctg

SEQ ID NO: 29070 - RNA, 30 nt, synthetic construct
  misc_feature 1..30: note = HLA class I histocompatibility antigen, B-15 alpha chain (162-171)
  source 1..30: mol_type = other RNA
accgccgcccagatcacccagcgcaagtgg

SEQ ID NO: 29071 - RNA, 27 nt, synthetic construct
  misc_feature 1..27: note = Septin-6 (73-81)
  source 1..27: mol_type = other RNA
acccacacccagcccggcgtgcagctg

SEQ ID NO: 29072 - RNA, 27 nt, synthetic construct
  misc_feature 1..27: note = DNA topoisomerase 2-alpha (684-692)
  source 1..27: mol_type = other RNA
tacctgtacggccagaccaccacgtac

SEQ ID NO: 29073 - RNA, 30 nt, synthetic construct
  misc_feature 1..30: note = Coilin (257-266)
  source 1..30: mol_type = other RNA
atcagcgacggcccctccaaggtgaccctg

SEQ ID NO: 29074 - RNA, 27 nt, synthetic construct
  misc_feature 1..27: note = Cancer/testis antigen 1 (155-163)
  source 1..27: mol_type = other RNA
cagctgagcctcctgatgtggatcacc

SEQ ID NO: 29075 - RNA, 27 nt, synthetic construct
  misc_feature 1..27: note = ATPase family AAA domain-containing protein 2 (1274-1282)
  source 1..27: mol_type = other RNA
gccagctccagccagatcatccacatc

SEQ ID NO: 29076 - RNA, 27 nt, synthetic construct
  misc_feature 1..27: note = Guanine nucleotide-binding protein G(I)/G(S)/G(T) subunit beta-2 (91-99)
  source 1..27: mol_type = other RNA
cacgccatccccctgcgcagctcctgg

SEQ ID NO: 29077 - RNA, 27 nt, synthetic construct
  misc_feature 1..27: note = Acyl-CoA desaturase (115-123)
  source 1..27: mol_type = other RNA
atcaccgccggcgcccaccgcctgtgg

SEQ ID NO: 29078 - RNA, 27 nt, synthetic construct
  misc_feature 1..27: note = Choline-phosphate cytidylyltransferase A (201-209)
  source 1..27: mol_type = other RNA
agcacctccgacatcatcacccgcatc

SEQ ID NO: 29079 - RNA, 27 nt, synthetic construct
  misc_feature 1..27: note = Serine/threonine-protein kinase pim-1 (191-199)
  source 1..27: mol_type = other RNA
gccctgctcaaggacaccgtgtacacc

SEQ ID NO: 29080 - RNA, 27 nt, synthetic construct
  misc_feature 1..27: note = Death-associated protein kinase 2 (1-9)
  source 1..27: mol_type = other RNA
atgctgctcgacaagaacatccccatc

SEQ ID NO: 29081 - RNA, 27 nt, synthetic construct
  misc_feature 1..27: note = HLA class I histocompatibility antigen, B-15 alpha chain (163-171)
  source 1..27: mol_type = other RNA
gccgcccagatcacccagcgcaagtgg

SEQ ID NO: 29082 - RNA, 27 nt, synthetic construct
  misc_feature 1..27: note = Transcription termination factor 2 (113-121)
  source 1..27: mol_type = other RNA
gagaccttccaccacagctccaactgg

SEQ ID NO: 29083 - RNA, 27 nt, synthetic construct
  misc_feature 1..27: note = Filamin-A (352-360)
  source 1..27: mol_type = other RNA
ggcacccacaaggtgaccgtcctgttc

SEQ ID NO: 29084 - RNA, 27 nt, synthetic construct
  misc_feature 1..27: note = Filamin-A (452-460)
  source 1..27: mol_type = other RNA
ggcgtgcacaccgtccacgtgaccttc

SEQ ID NO: 29085 - RNA, 57 nt, synthetic construct
  misc_feature 1..57: note = C-1-tetrahydrofolate synthase, cytoplasmic (72-90)
  source 1..57: mol_type = other RNA
cacggcaacagctccatcatcgccgaccagatcgccctgaagctcgtggggcccgag

SEQ ID NO: 29086 - RNA, 57 nt, synthetic construct
  misc_feature 1..57: note = Major histocompatibility complex class I-related gene protein (3-21)
  source 1..57: mol_type = other RNA
cacagcctgcgctacttccggctcggcgtgtccgaccccatccgcggggtcccggag

SEQ ID NO: 29087 - RNA, 30 nt, synthetic construct
  misc_feature 1..30: note = Delta(24)-sterol reductase (310-319)
  source 1..30: mol_type = other RNA
cacaccttccagaacgacatccacgtgtac

SEQ ID NO: 29088 - RNA, 24 nt, synthetic construct
  misc_feature 1..24: note = Protein SET (64-71)
  source 1..24: mol_type = other RNA
atcgccaagatccccaacttctgg

SEQ ID NO: 29089 - RNA, 27 nt, synthetic construct
  misc_feature 1..27: note = Eukaryotic translation initiation factor 3 subunit C-like protein (385-393)
  source 1..27: mol_type = other RNA
atcagcaagcagttccaccaccagctg

SEQ ID NO: 29090 - RNA, 27 nt, synthetic construct
  misc_feature 1..27: note = Constitutive coactivator of PPAR-gamma-like protein 1 (982-990)
  source 1..27: mol_type = other RNA
atcagcacccccgtgatccgcaccttc

SEQ ID NO: 29091 - RNA, 27 nt, synthetic construct
  misc_feature 1..27: note = T-complex protein 1 subunit gamma (160-168)
  source 1..27: mol_type = other RNA
atcaccaccaaggccatcagccgctgg

SEQ ID NO: 29092 - RNA, 27 nt, synthetic construct
  misc_feature 1..27: note = DNA replication complex GINS protein PSF1 (5-13)
  source 1..27: mol_type = other RNA
aaggccatggagctgatccgcgagctc

SEQ ID NO: 29093 - RNA, 27 nt, synthetic construct
  misc_feature 1..27: note = 60S ribosomal protein L18a (2-10)
  source 1..27: mol_type = other RNA
aaggccagcggcaccctgcgcgagtac

SEQ ID NO: 29094 - RNA, 27 nt, synthetic construct
  misc_feature 1..27: note = 14-3-3 protein gamma (152-160)
  source 1..27: mol_type = other RNA
aaggcctacagcgaggcccacgagatc

SEQ ID NO: 29095 - RNA, 27 nt, synthetic construct
  misc_feature 1..27: note = AP-1 complex subunit mu-2 (348-356)
  source 1..27: mol_type = other RNA
aagagcttccccggcgggaaggagtac

SEQ ID NO: 29096 - RNA, 30 nt, synthetic construct
  misc_feature 1..30: note = Dolichol-phosphate mannosyltransferase subunit 1 (42-51)
  source 1..30: mol_type = other RNA
aagagcttctccgagagcggcatcaactac

SEQ ID NO: 29097 - RNA, 30 nt, synthetic construct
  misc_feature 1..30: note = Heterogeneous nuclear ribonucleoprotein M (203-212)
  source 1..30: mol_type = other RNA
aagagccgcggcatcgggaccgtgaccttc

SEQ ID NO: 29098 - RNA, 27 nt, synthetic construct
  misc_feature 1..27: note = Plastin-3 (40-48)
  source 1..27: mol_type = other RNA
aagagctccgacatcgccaagaccttc

SEQ ID NO: 29099 - RNA, 27 nt, synthetic construct
  misc_feature 1..27: note = THO complex subunit 2 (398-406)
  source 1..27: mol_type = other RNA
aagaccttcccctaccagcaccgctac

SEQ ID NO: 29100 - RNA, 27 nt, synthetic construct
  misc_feature 1..27: note = Guanine nucleotide-binding protein subunit beta-2-like 1 (127-135)
  source 1..27: mol_type = other RNA
aagaccatcaagctgtggaacaccctc

SEQ ID NO: 29101 - RNA, 27 nt, synthetic construct
  misc_feature 1..27: note = 60S ribosomal protein L4 (163-171)
  source 1..27: mol_type = other RNA
aagaccaaggaggccgtgctgctcctg

SEQ ID NO: 29102 - RNA, 27 nt, synthetic construct
  misc_feature 1..27: note = Ribonucleoside-diphosphate reductase large subunit (52-60)
  source 1..27: mol_type = other RNA
aagaccctggagcgcagctacctcctg

SEQ ID NO: 29103 - RNA, 30 nt, synthetic construct
  misc_feature 1..30: note = Hexokinase-2 (777-786)
  source 1..30: mol_type = other RNA
aagacccgcggcatcttcgagaccaagttc

SEQ ID NO: 29104 - RNA, 27 nt, synthetic construct
  misc_feature 1..27: note = Ribosome-binding protein 1 (145-153)
  source 1..27: mol_type = other RNA
aaggtggccaaggtcgagcccgccgtg

SEQ ID NO: 29105 - RNA, 27 nt, synthetic construct
  misc_feature 1..27: note = Proteasome subunit beta type-5 (92-100)
  source 1..27: mol_type = other RNA
aaggtgatcgagatcaacccctacctg

SEQ ID NO: 29106 - RNA, 27 nt, synthetic construct
  misc_feature 1..27: note = Anaphase-promoting complex subunit 2 (557-565)
  source 1..27: mol_type = other RNA
aaggtgcgcgaccagcagctggtctac

SEQ ID NO: 29107 - RNA, 57 nt, synthetic construct
  misc_feature 1..57: note = Protein-tyrosine kinase 2-beta (528-546)
  source 1..57: mol_type = other RNA
caggaggagaagagcctggaccccatggtgtacatgaacgacacctccccgctcacc

SEQ ID NO: 29108 - RNA, 27 nt, synthetic construct
  misc_feature 1..27: note = Vigilin (54-62)
  source 1..27: mol_type = other RNA
cgcgccaagcccgagtaccacaagttc

SEQ ID NO: 29109 - RNA, 24 nt, synthetic construct
  misc_feature 1..24: note = NEDD8 ultimate buster 1 (113-120)
  source 1..24: mol_type = other RNA
cgcagcaagatcgccgagaccttc

SEQ ID NO: 29110 - RNA, 27 nt, synthetic construct
  misc_feature 1..27: note = Pleiotropic regulator 1 (309-317)
  source 1..27: mol_type = other RNA
cgcaccaaggccagcgtgcacaccctg

SEQ ID NO: 29111 - RNA, 27 nt, synthetic construct
  misc_feature 1..27: note = Baculoviral IAP repeat-containing protein 6 (597-605)
  source 1..27: mol_type = other RNA
cgcaccctgcccgtgctcctgctgtac

SEQ ID NO: 29112 - RNA, 27 nt, synthetic construct
  misc_feature 1..27: note = E3 ubiquitin-protein ligase CBL-B (66-74)
  source 1..27: mol_type = other RNA
cgcaccgtggagaagacctggaagctg

SEQ ID NO: 29113 - RNA, 30 nt, synthetic construct
  misc_feature 1..30: note = Basigin (137-146)
  source 1..30: mol_type = other RNA
cgcgtgcggagccacctggccgccctctgg

SEQ ID NO: 29114 - RNA, 36 nt, synthetic construct
  misc_feature 1..36: note = Phosphatidylinositol 4-kinase type 2-beta (74-85)
  source 1..36: mol_type = other RNA
agccgctccagctccgccgagctggaccggagccgc

SEQ ID NO: 29115 - RNA, 27 nt, synthetic construct
  misc_feature 1..27: note = Histone-binding protein RBBP7 (376-384)
  source 1..27: mol_type = other RNA
accgccaagatcagcgacttctcctgg

SEQ ID NO: 29116 - RNA, 27 nt, synthetic construct
  misc_feature 1..27: note = Junction plakoglobin (207-215)
  source 1..27: mol_type = other RNA
accaccagccgcgtgctgaaggtcctc

SEQ ID NO: 29117 - RNA, 27 nt, synthetic construct
  misc_feature 1..27: note = High mobility group protein B3 (123-131)
  source 1..27: mol_type = other RNA
gtggccaagaagctgggcgagatgtgg

SEQ ID NO: 29118 - RNA, 33 nt, synthetic construct
  misc_feature 1..33: note = Heterogeneous nuclear ribonucleoprotein U-like protein 1 (427-437)
  source 1..33: mol_type = other RNA
gtgggcctgcccgccgccgggaagaccacctgg

SEQ ID NO: 29119 - RNA, 27 nt, synthetic construct
  misc_feature 1..27: note = Phosphoglycerate kinase 1 (328-336)
  source 1..27: mol_type = other RNA
gtgacccgcgccaagcagatcgtctgg

SEQ ID NO: 29120 - RNA, 27 nt, synthetic construct
  misc_feature 1..27: note = Transcription elongation factor SPT5 (976-984)
  source 1..27: mol_type = other RNA
gtgaccaccgacatccaggtcaaggtg

SEQ ID NO: 29121 - RNA, 57 nt, synthetic construct
  misc_feature 1..57: note = Lymphocyte antigen 75 (1307-1325)
  source 1..57: mol_type = other RNA
tacatggccagctgggtgatgctgggcatcacctaccgcaacaagtccctcatgtgg

SEQ ID NO: 29122 - RNA, 27 nt, synthetic construct
  misc_feature 1..27: note = Guanine nucleotide-binding protein subunit beta-2-like 1 (302-310)
  source 1..27: mol_type = other RNA
tacaccgacaacctggtgcgcgtctgg

SEQ ID NO: 29123 - RNA, 27 nt, synthetic construct
  misc_feature 1..27: note = 40S ribosomal protein S21 (75-83)
  source 1..27: mol_type = other RNA
gccgacggcatcgtgagcaagaacttc

SEQ ID NO: 29124 - RNA, 30 nt, synthetic construct
  misc_feature 1..30: note = Pleiotropic regulator 1 (471-480)
  source 1..30: mol_type = other RNA
gccgaggccgacaagaccatcaaggtgtac

SEQ ID NO: 29125 - RNA, 27 nt, synthetic construct
  misc_feature 1..27: note = Putative RRN3-like protein RRN3P1 (4-12)
  source 1..27: mol_type = other RNA
gccgaggccttcctggagcacctctgg

SEQ ID NO: 29126 - RNA, 33 nt, synthetic construct
  misc_feature 1..33: note = Chloride intracellular channel protein 1 (157-167)
  source 1..33: mol_type = other RNA
gccgaggacgagggcgtgagccagcgcaagttc

SEQ ID NO: 29127 - RNA, 33 nt, synthetic construct
  misc_feature 1..33: note = Heat shock protein HSP 90-beta (346-356)
  source 1..33: mol_type = other RNA
gccgaggacaaggagaactacaagaagttctac

SEQ ID NO: 29128 - RNA, 33 nt, synthetic construct
  misc_feature 1..33: note = Transmembrane emp24 domain-containing protein 3 (50-60)
  source 1..33: mol_type = other RNA
gccgaggacctgaacagccgcgtgtcctactgg

SEQ ID NO: 29129 - RNA, 33 nt, synthetic construct
  misc_feature 1..33: note = Transmembrane emp24 domain-containing protein 7 (170-180)
  source 1..33: mol_type = other RNA
gccgaggacctgaacacccgcgtggcctactgg

SEQ ID NO: 29130 - RNA, 30 nt, synthetic construct
  misc_feature 1..30: note = Plasminogen activator inhibitor 1 RNA-binding protein (236-245)
  source 1..30: mol_type = other RNA
gccgaggacagcgtgatggaccaccacttc

SEQ ID NO: 29131 - RNA, 30 nt, synthetic construct
  misc_feature 1..30: note = Eukaryotic translation elongation factor 1 epsilon-1 (65-74)
  source 1..30: mol_type = other RNA
gccgaggagaaggccatcgtgcagcagtgg

SEQ ID NO: 29132 - RNA, 27 nt, synthetic construct
  misc_feature 1..27: note = Transcription elongation factor SPT6 (985-993)
  source 1..27: mol_type = other RNA
gccgaggagctggagcgccagggctac

SEQ ID NO: 29133 - RNA, 30 nt, synthetic construct
  misc_feature 1..30: note = G patch domain-containing protein 4 (15-24)
  source 1..30: mol_type = other RNA
gccgaggagcagctgctcaagcacggctgg

SEQ ID NO: 29134 - RNA, 30 nt, synthetic construct
  misc_feature 1..30: note = General transcription factor 3C polypeptide 1 (182-191)
  source 1..30: mol_type = other RNA
gccgaggagagcgacctgtcccgccagtac

SEQ ID NO: 29135 - RNA, 30 nt, synthetic construct
  misc_feature 1..30: note = Myosin light polypeptide 6 (10-19)
  source 1..30: mol_type = other RNA
gccgagttcaaggaggccttccagctgttc

SEQ ID NO: 29136 - RNA, 30 nt, synthetic construct
  misc_feature 1..30: note = Signal peptidase complex subunit 2 (187-196)
  source 1..30: mol_type = other RNA
gccgagttcaccaagagcatcgccaagttc

SEQ ID NO: 29137 - RNA, 27 nt, synthetic construct
  misc_feature 1..27: note = 60S ribosomal protein L8 (33-41)
  source 1..27: mol_type = other RNA
gccgagggcatccacaccgggcagttc

SEQ ID NO: 29138 - RNA, 33 nt, synthetic construct
  misc_feature 1..33: note = Proteasome inhibitor PI31 subunit (114-124)
  source 1..33: mol_type = other RNA
gccgagcacctgggcgacttccaccgcacctac

SEQ ID NO: 29139 - RNA, 27 nt, synthetic construct
  misc_feature 1..27: note = Kinesin-like protein KIF20B (872-880)
  source 1..27: mol_type = other RNA
gccgagatcgaggacatccgcgtgctg

SEQ ID NO: 29140 - RNA, 30 nt, synthetic construct
  misc_feature 1..30: note = rRNA-processing protein FCF1 homolog (108-117)
  source 1..30: mol_type = other RNA
gccgagatcgagaagctgggccagaagtac

SEQ ID NO: 29141 - RNA, 36 nt, synthetic construct
  misc_feature 1..36: note = Cyclin-dependent kinase 6 (17-28)
  source 1..36: mol_type = other RNA
gccgagatcggcgagggggcctacggcaaggtgttc

SEQ ID NO: 29142 - RNA, 33 nt, synthetic construct
  misc_feature 1..33: note = Delta(24)-sterol reductase (227-237)
  source 1..33: mol_type = other RNA
gccgagatccgcatcatccccgccaagaagtac

SEQ ID NO: 29143 - RNA, 33 nt, synthetic construct
  misc_feature 1..33: note = Filamin A (105-115)
  source 1..33: mol_type = other RNA
gccgagatcgtggagggcgagaaccacacctac

SEQ ID NO: 29144 - RNA, 30 nt, synthetic construct
  misc_feature 1..30: note = Replication protein A 32 kDa subunit (83-92)
  source 1..30: mol_type = other RNA
gccgagaaggcccccaccaacatcgtgtac

SEQ ID NO: 29145 - RNA, 30 nt, synthetic construct
  misc_feature 1..30: note = ATP-dependent RNA helicase DHX8 (57-66)
  source 1..30: mol_type = other RNA
gccgagaagaacaccaccttcgacacgttc

SEQ ID NO: 29146 - RNA, 33 nt, synthetic construct
  misc_feature 1..33: note = Cysteine andine-rich protein 1 (129-139)
  source 1..33: mol_type = other RNA
gccgagaaggtgatcggcgccgggaagagctgg

SEQ ID NO: 29147 - RNA, 30 nt, synthetic construct
  misc_feature 1..30: note = ER membrane protein complex subunit 2 (162-171)
  source 1..30: mol_type = other RNA
gccgagctgtacatcaacgagcacgactac

SEQ ID NO: 29148 - RNA, 30 nt, synthetic construct
  misc_feature 1..30: note = Catenin beta-1 (478-487)
  source 1..30: mol_type = other RNA
gccgagatggcccagaacgcggtgcgcctg

SEQ ID NO: 29149 - RNA, 27 nt, synthetic construct
  misc_feature 1..27: note = Cleavage stimulation factor subunit 1 (217-225)
  source 1..27: mol_type = other RNA
gccgagatgctgcgcagcatctccttc

SEQ ID NO: 29150 - RNA, 27 nt, synthetic construct
  misc_feature 1..27: note = DNA-dependent protein kinase catalytic subunit (193-201)
  source 1..27: mol_type = other RNA
gccgagaacctgttccgcgccttcctc

SEQ ID NO: 29151 - RNA, 33 nt, synthetic construct
  misc_feature 1..33: note = Proteasome subunit beta type-1 (211-221)
  source 1..33: mol_type = other RNA
gccgagcgcgacgtgtacaccggcgacgccctg

SEQ ID NO: 29152 - RNA, 27 nt, synthetic construct
  misc_feature 1..27: note = Exportin-2 (513-521)
  source 1..27: mol_type = other RNA
gccgagagcatcgtggtccacacctac

SEQ ID NO: 29153 - RNA, 27 nt, synthetic construct
  misc_feature 1..27: note = Full=Zinc finger CCCH domain-containing protein 16 (227-235)
  source 1..27: mol_type = other RNA
gccgaggtggccgcggagaagagcttc

SEQ ID NO: 29154 - RNA, 33 nt, synthetic construct
  misc_feature 1..33: note = Targeting protein for Xklp2 (638-648)
  source 1..33: mol_type = other RNA
gccgaggtggaggcccagaaggcgcagcagctg

SEQ ID NO: 29155 - RNA, 27 nt, synthetic construct
  misc_feature 1..27: note = Transmembrane emp24 domain-containing protein 3 (92-100)
  source 1..27: mol_type = other RNA
gccgaggtgaagggcgtctaccagttc

SEQ ID NO: 29156 - RNA, 30 nt, synthetic construct
  misc_feature 1..30: note = DNA-dependent protein kinase catalytic subunit (2320-2329)
  source 1..30: mol_type = other RNA
gccgaggtgctgggcctcatcctgcgctac

SEQ ID NO: 29157 - RNA, 30 nt, synthetic construct
  misc_feature 1..30: note = Spectrin beta chain, non-erythrocytic 1 (1304-1313)
  source 1..30: mol_type = other RNA
gacgaggcccgcaacctgcacagcaagtgg

SEQ ID NO: 29158 - RNA, 27 nt, synthetic construct
  misc_feature 1..27: note = Protein KIAA0100 (696-704)
  source 1..27: mol_type = other RNA
gacgaggccgtgggcgtccagaagtgg

SEQ ID NO: 29159 - RNA, 30 nt, synthetic construct
  misc_feature 1..30: note = Transcription elongation factor SPT6 (573-582)
  source 1..30: mol_type = other RNA
gacgagttcagccaccaggtgcaggagtgg

SEQ ID NO: 29160 - RNA, 27 nt, synthetic construct
  misc_feature 1..27: note = Heat shock protein HSP 90-alpha (288-296)
  source 1..27: mol_type = other RNA
gacgagatggtgagcctgaaggactac

SEQ ID NO: 29161 - RNA, 30 nt, synthetic construct
  misc_feature 1..30: note = Cyclin-dependent kinase inhibitor 3 (22-31)
  source 1..30: mol_type = other RNA
gacgagcagacccccatccacatcagctgg

SEQ ID NO: 29162 - RNA, 27 nt, synthetic construct
  misc_feature 1..27: note = Spectrin beta chain, non-erythrocytic 1 (741-749)
  source 1..27: mol_type = other RNA
gaggaggccagcctgctccaccagttc

SEQ ID NO: 29163 - RNA, 33 nt, synthetic construct
  misc_feature 1..33: note = Eukaryotic translation initiation factor 3 subunit M (11-21)
  source 1..33: mol_type = other RNA
gaggaggaccaggccgccgagctgcgcgcgtac

SEQ ID NO: 29164 - RNA, 27 nt, synthetic construct
  misc_feature 1..27: note = Protein transport protein Sec23B (521-529)
  source 1..27: mol_type = other RNA
gaggagggccccgacgtgctgcgctgg

SEQ ID NO: 29165 - RNA, 33 nt, synthetic construct
  misc_feature 1..33: note = 40S ribosomal protein S17 (36-46)
  source 1..33: mol_type = other RNA
gaggagatcgccatcatccccagcaagaagctg

SEQ ID NO: 29166 - RNA, 30 nt, synthetic construct
  misc_feature 1..30: note = Sigma non-opioid intracellular receptor 1 (40-49)
  source 1..30: mol_type = other RNA
gaggagatcgcccagctggcccgccagtac

SEQ ID NO: 29167 - RNA, 33 nt, synthetic construct
  misc_feature 1..33: note = DNA repair protein RAD50 (1002-1012)
  source 1..33: mol_type = other RNA
gaggagatcaacaagatcatccgcgacctgtgg

SEQ ID NO: 29168 - RNA, 27 nt, synthetic construct
  misc_feature 1..27: note = Targeting protein for Xklp2 (351-359)
  source 1..27: mol_type = other RNA
gaggagctggagaagctccagcagtac

SEQ ID NO: 29169 - RNA, 27 nt, synthetic construct
  misc_feature 1..27: note = 26S proteasome non-ATPase regulatory subunit 13 (26-34)
  source 1..27: mol_type = other RNA
gaggagctgtacaccaagaagctctgg

SEQ ID NO: 29170 - RNA, 36 nt, synthetic construct
  misc_feature 1..36: note = Nuclear pore complex protein Nup153 (1104-1115)
  source 1..36: mol_type = other RNA
gaggagatgcccgccaccaagggcgggttcagcttc

SEQ ID NO: 29171 - RNA, 33 nt, synthetic construct
  misc_feature 1..33: note = Eukaryotic initiation factor 4A-I (396-406)
  source 1..33: mol_type = other RNA
gaggagatgcccctgaacgtggccgacctcatc

SEQ ID NO: 29172 - RNA, 27 nt, synthetic construct
  misc_feature 1..27: note = General transcription factor 3C polypeptide 1 (183-191)
  source 1..27: mol_type = other RNA
gaggagagcgacctgtcccgccagtac

SEQ ID NO: 29173 - RNA, 30 nt, synthetic construct
  misc_feature 1..30: note = Protein SCO1 homolog, mitochondrial (121-130)
  source 1..30: mol_type = other RNA
gaggaggtggaccaggtcgcccgcgcctac

SEQ ID NO: 29174 - RNA, 30 nt, synthetic construct
  misc_feature 1..30: note = F-box/LRR-repeat protein 3 (394-403)
  source 1..30: mol_type = other RNA
gaggaggtgctgatccccgaccagaagtac

SEQ ID NO: 29175 - RNA, 27 nt, synthetic construct
  misc_feature 1..27: note = von Willebrand factor (1339-1347)
  source 1..27: mol_type = other RNA
gagctgcgccggatcgccagccaggtg

SEQ ID NO: 29176 - RNA, 15 nt, synthetic construct
  misc_feature 1..15: note = DNA nucleotidylexotransferase (64-68)
  source 1..15: mol_type = other RNA
ttccgccggggcaag

SEQ ID NO: 29177 - RNA, 27 nt, synthetic construct
  misc_feature 1..27: note = Spectrin beta chain, non-erythrocytic 1 (1059-1067)
  source 1..27: mol_type = other RNA
ggcgaggccagcaagctgcagcagttc

SEQ ID NO: 29178 - RNA, 30 nt, synthetic construct
  misc_feature 1..30: note = Endothelial differentiation-related factor 1 (35-44)
  source 1..30: mol_type = other RNA
ggcgaggacgtggagaccagcaagaagtgg

SEQ ID NO: 29179 - RNA, 27 nt, synthetic construct
  misc_feature 1..27: note = Serine/arginine-rich splicing factor 9 (175-183)
  source 1..27: mol_type = other RNA
ggcgagaccagctacatccgcgtgtac

SEQ ID NO: 29180 - RNA, 33 nt, synthetic construct
  misc_feature 1..33: note = Peroxiredoxin-5, mitochondrial (36-46)
  source 1..33: mol_type = other RNA
ggcgagtgggccagcgggggcgtgcgctccttc

SEQ ID NO: 29181 - RNA, 27 nt, synthetic construct
  misc_feature 1..27: note = Probable E3 ubiquitin-protein ligase makorin-2 (170-178)
  source 1..27: mol_type = other RNA
cacgagatggagaaggccttcgccttc

SEQ ID NO: 29182 - RNA, 30 nt, synthetic construct
  misc_feature 1..30: note = Antigen KI-67 (54-63)
  source 1..30: mol_type = other RNA
cacgagcaggaggccatcctgcacaacttc

SEQ ID NO: 29183 - RNA, 30 nt, synthetic construct
  misc_feature 1..30: note = Mediator of RNA polymerase II transcription subunit 17 (187-196)
  source 1..30: mol_type = other RNA
atcgaggacccccagatccaggcccactgg

SEQ ID NO: 29184 - RNA, 27 nt, synthetic construct
  misc_feature 1..27: note = Actin, aortic smooth muscle (73-81)
  source 1..27: mol_type = other RNA
atcgagcacggcatcatcaccaactgg

SEQ ID NO: 29185 - RNA, 33 nt, synthetic construct
  misc_feature 1..33: note = DNA topoisomerase 2-alpha (921-931)
  source 1..33: mol_type = other RNA
atcgagatcagcgagctgcccgtgcgcacctgg

SEQ ID NO: 29186 - RNA, 27 nt, synthetic construct
  misc_feature 1..27: note = Non-canonical poly(A) RNA polymerase PAPD5 (227-235)
  source 1..27: mol_type = other RNA
atcgagagcgtgatcaaggagctgtgg

SEQ ID NO: 29187 - RNA, 45 nt, synthetic construct
  misc_feature 1..45: note = Interleukin-9 receptor (168-182)
  source 1..45: mol_type = other RNA
atcagccccgccctggagccgatgaccaccctcctgtcctacgag

SEQ ID NO: 29188 - RNA, 30 nt, synthetic construct
  misc_feature 1..30: note = T-complex protein 1 subunit gamma (6-15)
  source 1..30: mol_type = other RNA
ctggagatcaagaagatcggcgacgagtac

SEQ ID NO: 29189 - RNA, 33 nt, synthetic construct
  misc_feature 1..33: note = Trafficking protein particle complex subunit 5 (105-115)
  source 1..33: mol_type = other RNA
ctggagcaggccaacgacgacgcccgcaccttc

SEQ ID NO: 29190 - RNA, 30 nt, synthetic construct
  misc_feature 1..30: note = Eukaryotic translation initiation factor 3 subunit D (314-323)
  source 1..30: mol_type = other RNA
atggaggccacctacatcaaccacaacttc

SEQ ID NO: 29191 - RNA, 30 nt, synthetic construct
  misc_feature 1..30: note = Magnesium transporter protein 1 (242-251)
  source 1..30: mol_type = other RNA
atggagttcctgttcaacaagaccggctgg

SEQ ID NO: 29192 - RNA, 27 nt, synthetic construct
  misc_feature 1..27: note = Transforming acidic coiled-coil-containing protein 3 (718-726)
  source 1..27: mol_type = other RNA
atggagaagagcttctccgacctgttc

SEQ ID NO: 29193 - RNA, 30 nt, synthetic construct
  misc_feature 1..30: note = Membrane-associated tyrosine- and threonine-specific cdc2-inhibitory kinase (234-243)
  source 1..30: mol_type = other RNA
atggagctgccccacggcggggagggctgg

SEQ ID NO: 29194 - RNA, 27 nt, synthetic construct
  misc_feature 1..27: note = AAC83183.1 (92-100)
  source 1..27: mol_type = other RNA
atggagagcctgaccaagcacctcttc

SEQ ID NO: 29195 - RNA, 30 nt, synthetic construct
  misc_feature 1..30: note = 60S ribosomal protein L4 (212-221)
  source 1..30: mol_type = other RNA
aacgaggacaacggcatcatcaaggccttc

SEQ ID NO: 29196 - RNA, 33 nt, synthetic construct
  misc_feature 1..33: note = Protein transport protein Sec23B (420-430)
  source 1..33: mol_type = other RNA
aacgagctgggcgtggggggcaccagccagtgg

SEQ ID NO: 29197 - RNA, 30 nt, synthetic construct
  misc_feature 1..30: note = Long-chain-fatty-acid-CoA ligase 4 (65-74)
  source 1..30: mol_type = other RNA
aacgagatgcagcccaacggcaaggtgttc

SEQ ID NO: 29198 - RNA, 30 nt, synthetic construct
  misc_feature 1..30: note = Mortality factor 4-like protein 1 (215-224)
  source 1..30: mol_type = other RNA
aacgaggtggtcgccggcatcaaggagtac

SEQ ID NO: 29199 - RNA, 24 nt, synthetic construct
  misc_feature 1..24: note = Ig kappa chain C region (1-8)
  source 1..24: mol_type = other RNA
aacatcgtgatgacccagagcccc

SEQ ID NO: 29200 - RNA, 27 nt, synthetic construct
  misc_feature 1..27: note = Multifunctional protein ADE2 (69-77)
  source 1..27: mol_type = other RNA
caggaggccggcatcaagaccgccttc

SEQ ID NO: 29201 - RNA, 33 nt, synthetic construct
  misc_feature 1..33: note = Guanine nucleotide-binding protein G(s) subunit alpha isoforms short (257-267)
  source 1..33: mol_type = other RNA
caggaggccctgaacctcttcaagagcatctgg

SEQ ID NO: 29202 - RNA, 33 nt, synthetic construct
  misc_feature 1..33: note = Spectrin beta chain, non-erythrocytic 1 (1864-1874)
  source 1..33: mol_type = other RNA
caggaggacgccgcccgcctgcaggcggcctac

SEQ ID NO: 29203 - RNA, 30 nt, synthetic construct
  misc_feature 1..30: note = Annexin A2 (138-147)
  source 1..30: mol_type = other RNA
caggagctgcaggagatcaaccgcgtgtac

SEQ ID NO: 29204 - RNA, 30 nt, synthetic construct
  misc_feature 1..30: note = TPT1-like protein (84-93)
  source 1..30: mol_type = other RNA
caggagaccagcttcaccaaggaggcctac

SEQ ID NO: 29205 - RNA, 33 nt, synthetic construct
  misc_feature 1..33: note = AP-5 complex subunit zeta-1 (14-24)
  source 1..33: mol_type = other RNA
cgcgagatccaggacgaggagctgaagaagttc

SEQ ID NO: 29206 - RNA, 33 nt, synthetic construct
  misc_feature 1..33: note = Eukaryotic translation initiation factor 3 subunit C-like protein (201-211)
  source 1..33: mol_type = other RNA
agcgaggccccctccggcgagagccgcaagttc

SEQ ID NO: 29207 - RNA, 27 nt, synthetic construct
  misc_feature 1..27: note = Histone H2B type 1-A (77-85)
  source 1..27: mol_type = other RNA
agcgaggcctcccgcctggcccactac

SEQ ID NO: 29208 - RNA, 36 nt, synthetic construct
  misc_feature 1..36: note = Protein transport protein Sec31A (233-244)
  source 1..36: mol_type = other RNA
agcgaggacgaccgcctgcccgtgatccagatgtgg

SEQ ID NO: 29209 - RNA, 27 nt, synthetic construct
  misc_feature 1..27: note = DnaJ homolog subfamily C member 7 (393-401)
  source 1..27: mol_type = other RNA
agcgaggacgagatcaagaaggcctac

SEQ ID NO: 29210 - RNA, 27 nt, synthetic construct
  misc_feature 1..27: note = WD repeat-containing protein 82 (86-94)
  source 1..27: mol_type = other RNA
agcgaggacggcaagatccacgtgtgg

SEQ ID NO: 29211 - RNA, 30 nt, synthetic construct
  misc_feature 1..30: note = Poly (ADP-ribose) polymerase 1 (808-817)
  source 1..30: mol_type = other RNA
agcgaggaggccgagatcatccgcaagtac

SEQ ID NO: 29212 - RNA, 27 nt, synthetic construct
  misc_feature 1..27: note = Polypyrimidine tract-binding protein 1 (485-493)
  source 1..27: mol_type = other RNA
agcgaggaggacctgaaggtgctcttc

SEQ ID NO: 29213 - RNA, 36 nt, synthetic construct
  misc_feature 1..36: note = Eukaryotic translation initiation factor 3 subunit M (10-21)
  source 1..36: mol_type = other RNA
agcgaggaggaccaggccgccgagctgcgcgcgtac

SEQ ID NO: 29214 - RNA, 27 nt, synthetic construct
  misc_feature 1..27: note = General transcription factor 3C polypeptide 1 (415-423)
  source 1..27: mol_type = other RNA
agcgaggagggcctgctccgcctgtac

SEQ ID NO: 29215 - RNA, 30 nt, synthetic construct
  misc_feature 1..30: note = Disco-interacting protein 2 homolog A (29-38)
  source 1..30: mol_type = other RNA
agcgagggcgacatcacccagaaggggtac

SEQ ID NO: 29216 - RNA, 27 nt, synthetic construct
  misc_feature 1..27: note = DNA replication licensing factor MCM5 (690-698)
  source 1..27: mol_type = other RNA
agcgagcactccatcatcaaggacttc

SEQ ID NO: 29217 - RNA, 27 nt, synthetic construct
  misc_feature 1..27: note = Disks large homolog 1 (143-151)
  source 1..27: mol_type = other RNA
agcgagatcgagaacgtgcacggcttc

SEQ ID NO: 29218 - RNA, 33 nt, synthetic construct
  misc_feature 1..33: note = Protein SET (61-71)
  source 1..33: mol_type = other RNA
agcgagctgatcgccaagatccccaacttctgg

SEQ ID NO: 29219 - RNA, 27 nt, synthetic construct
  misc_feature 1..27: note = Uncharacterized protein C14orf119 (121-129)
  source 1..27: mol_type = other RNA
agcgagcccgacttcgtggccaagttc

SEQ ID NO: 29220 - RNA, 27 nt, synthetic construct
  misc_feature 1..27: note = Ubiquitin-conjugating enzyme E2 J1 (204-212)
  source 1..27: mol_type = other RNA
agcgagtccgacctgaaccacagcttc

SEQ ID NO: 29221 - RNA, 27 nt, synthetic construct
  misc_feature 1..27: note = Nucleolar transcription factor 1 (275-283)
  source 1..27: mol_type = other RNA
agcgagtccgagctgacccgcctcctg

SEQ ID NO: 29222 - RNA, 27 nt, synthetic construct
  misc_feature 1..27: note = Citrate synthase, mitochondrial (120-128)
  source 1..27: mol_type = other RNA
agcgagtccaacttcgcccgcgcctac

SEQ ID NO: 29223 - RNA, 27 nt, synthetic construct
  misc_feature 1..27: note = GMP reductase 2 (46-54)
  source 1..27: mol_type = other RNA
agcgaggtggacctgacccgctccttc

SEQ ID NO: 29224 - RNA, 39 nt, synthetic construct
  misc_feature 1..39: note = Single Ig IL-1-related receptor (383-395)
  source 1..39: mol_type = other RNA
agcgaggtggacgtctccgacctgggcagccgcaactac

SEQ ID NO: 29225 - RNA, 27 nt, synthetic construct
  misc_feature 1..27: note = Sulfhydryl oxidase 1 (223-231)
  source 1..27: mol_type = other RNA
accgaggccaacgtggtccgcaagttc

SEQ ID NO: 29226 - RNA, 30 nt, synthetic construct
  misc_feature 1..30: note = Cyclin-D1-binding protein 1 (44-53)
  source 1..30: mol_type = other RNA
accgaggagttcaaccgcgagatgttctgg

SEQ ID NO: 29227 - RNA, 30 nt, synthetic construct
  misc_feature 1..30: note = Staphylococcal nuclease domain-containing protein 1 (663-672)
  source 1..30: mol_type = other RNA
accgagatcaccgacgacctgcacttctac

SEQ ID NO: 29228 - RNA, 27 nt, synthetic construct
  misc_feature 1..27: note = Eukaryotic translation initiation factor 3 subunit M (142-150)
  source 1..27: mol_type = other RNA
accgagctggaccaggtgcgcaagtgg

SEQ ID NO: 29229 - RNA, 30 nt, synthetic construct
  misc_feature 1..30: note = Serine/arginine-rich splicing factor 3 (24-33)
  source 1..30: mol_type = other RNA
accgagctggagcgcgccttcggctactac

SEQ ID NO: 29230 - RNA, 33 nt, synthetic construct
  misc_feature 1..33: note = HLA class II histocompatibility antigen, DRB1-15 beta chain (46-56)
  source 1..33: mol_type = other RNA
accgagctgggccgccccgacgccgagtactgg

SEQ ID NO: 29231 - RNA, 27 nt, synthetic construct
  misc_feature 1..27: note = Pre-mRNA-splicing factor ISY1 homolog (37-45)
  source 1..27: mol_type = other RNA
accgagctgcccaaggccgagaagtgg

SEQ ID NO: 29232 - RNA, 33 nt, synthetic construct
  misc_feature 1..33: note = Coatomer subunit delta (46-56)
  source 1..33: mol_type = other RNA
accgagatggacagccacgaggagaaggtgttc

SEQ ID NO: 29233 - RNA, 27 nt, synthetic construct
  misc_feature 1..27: note = CUGBP Elav-like family member 1 (120-128)
  source 1..27: mol_type = other RNA
accgagaacgacatccgcgtgatgttc

SEQ ID NO: 29234 - RNA, 27 nt, synthetic construct
  misc_feature 1..27: note = Gamma-secretase subunit PEN-2 (48-56)
  source 1..27: mol_type = other RNA
accgagcagagccagatcaagggctac

SEQ ID NO: 29235 - RNA, 33 nt, synthetic construct
  misc_feature 1..33: note = Gamma-secretase subunit PEN-2 (48-58)
  source 1..33: mol_type = other RNA
accgagcagagccagatcaagggctacgtgtgg

SEQ ID NO: 29236 - RNA, 27 nt, synthetic construct
  misc_feature 1..27: note = Tyrosine-protein kinase BAZ1B (274-282)
  source 1..27: mol_type = other RNA
gtggaggacgagctggtcaagaagtac

SEQ ID NO: 29237 - RNA, 27 nt, synthetic construct
  misc_feature 1..27: note = Vigilin (405-413)
  source 1..27: mol_type = other RNA
gtggagatcaacatcgaccacaagttc

SEQ ID NO: 29238 - RNA, 33 nt, synthetic construct
  misc_feature 1..33: note = Influenza virus NS1A-binding protein (576-586)
  source 1..33: mol_type = other RNA
gtggagatgtacgaccccacccgcaacgagtgg

SEQ ID NO: 29239 - RNA, 30 nt, synthetic construct
  misc_feature 1..30: note = Target of rapamycin complex subunit LST8 (298-307)
  source 1..30: mol_type = other RNA
gtggagaccggcgagatcaagcgcgagtac

SEQ ID NO: 29240 - RNA, 30 nt, synthetic construct
  misc_feature 1..30: note = Methionine aminopeptidase 2 (311-320)
  source 1..30: mol_type = other RNA
tacgaggtggagatcgacggcaagacctac

SEQ ID NO: 29241 - RNA, 42 nt, synthetic construct
  misc_feature 1..42: note = Gamma-secretase C-terminal fragment 59 (565-578)
  source 1..42: mol_type = other RNA
ttccgccacgacagcggctacgaggtgcaccaccagaagctg

SEQ ID NO: 29242 - RNA, 27 nt, synthetic construct
  misc_feature 1..27: note = Disintegrin and metalloproteinase domain-containing protein 10 (19-27)
  source 1..27: mol_type = other RNA
ggccagtacgggaaccccctgaacaag

SEQ ID NO: 29243 - RNA, 24 nt, synthetic construct
  misc_feature 1..24: note = Beta-2-microglobulin (21-28)
  source 1..24: mol_type = other RNA
atccagcgcacccccaagatccag

SEQ ID NO: 29244 - RNA, 30 nt, synthetic construct
  misc_feature 1..30: note = Beta-2-microglobulin (21-30)
  source 1..30: mol_type = other RNA
atccagcgcacccccaagatccaggtgtac

SEQ ID NO: 29245 - RNA, 27 nt, synthetic construct
  misc_feature 1..27: note = Splicing factor 3B subunit 2 (36-44)
  source 1..27: mol_type = other RNA
cgccagaccggcatcgtgctgaaccgg

SEQ ID NO: 29246 - RNA, 27 nt, synthetic construct
  misc_feature 1..27: note = Importin subunit alpha-1 (377-385)
  source 1..27: mol_type = other RNA
ggcctggtgcccttcctcgtcagcgtg

SEQ ID NO: 29247 - RNA, 27 nt, synthetic construct
  misc_feature 1..27: note = Neutral alpha-glucosidase AB (3-11)
  source 1..27: mol_type = other RNA
gccgtggccgcggtcgccgcccgccgg

SEQ ID NO: 29248 - RNA, 30 nt, synthetic construct
  misc_feature 1..30: note = 60S ribosomal protein L15 (131-140)
  source 1..30: mol_type = other RNA
gaggtgatcctgatcgaccccttccacaag

SEQ ID NO: 29249 - RNA, 30 nt, synthetic construct
  misc_feature 1..30: note = Cullin-4A (5-14)
  source 1..30: mol_type = other RNA
gccccccgcaagggcagcttctccgccctg

SEQ ID NO: 29250 - RNA, 30 nt, synthetic construct
  misc_feature 1..30: note = Fatty acid synthase (1169-1178)
  source 1..30: mol_type = other RNA
atcccccgcgacccgagccagcaggagctg

SEQ ID NO: 29251 - RNA, 30 nt, synthetic construct
  misc_feature 1..30: note = Carbonic anhydrase 9 (397-406)
  source 1..30: mol_type = other RNA
agcccccgcgccgccgagccggtgcagctg

SEQ ID NO: 29252 - RNA, 27 nt, synthetic construct
  misc_feature 1..27: note = BTB/POZ domain-containing adapter for CUL3-mediated RhoA degradation protein 3 (28-36)
  source 1..27: mol_type = other RNA
agcccctccagcaagtacgtgaagctg

SEQ ID NO: 29253 - RNA, 27 nt, synthetic construct
  misc_feature 1..27: note = Melanoma-associated antigen 10 (254-262)
  source 1..27: mol_type = other RNA
ggcctgtacgacgggatggagcacctc

SEQ ID NO: 29254 - RNA, 27 nt, synthetic construct
  misc_feature 1..27: note = 26S proteasome non-ATPase regulatory subunit 6 (103-111)
  source 1..27: mol_type = other RNA
gccatgatggccaaggcggagtacctg

SEQ ID NO: 29255 - RNA, 27 nt, synthetic construct
  misc_feature 1..27: note = 40S ribosomal protein S26 (107-115)
  source 1..27: mol_type = other RNA
gccccccgcccgccccccaagcccatg

SEQ ID NO: 29256 - RNA, 27 nt, synthetic construct
  misc_feature 1..27: note = Elongation factor 2 (286-294)
  source 1..27: mol_type = other RNA
gcctacctgcccgtgaacgagagcttc

SEQ ID NO: 29257 - RNA, 27 nt, synthetic construct
  misc_feature 1..27: note = Long-chain-fatty-acid-CoA ligase 3 (326-334)
  source 1..27: mol_type = other RNA
ggctacctgcccctcgcccacgtgctg

SEQ ID NO: 29258 - RNA, 27 nt, synthetic construct
  misc_feature 1..27: note = m7GpppX diphosphatase (268-276)
  source 1..27: mol_type = other RNA
cactacctgcccagctactaccacctc

SEQ ID NO: 29259 - RNA, 27 nt, synthetic construct
  misc_feature 1..27: note = N6-adenosine-methyltransferase subunit METTL14 (99-107)
  source 1..27: mol_type = other RNA
atctacaaggacagctccaccttcctg

SEQ ID NO: 29260 - RNA, 27 nt, synthetic construct
  misc_feature 1..27: note = Ubiquitin-conjugating enzyme E2 H (17-25)
  source 1..27: mol_type = other RNA
aagctgatcgagagcaagcacgaggtg

SEQ ID NO: 29261 - RNA, 27 nt, synthetic construct
  misc_feature 1..27: note = Adenylosuccinate synthetase isozyme 2 (347-355)
  source 1..27: mol_type = other RNA
aagtacgcccacatgatcaacggcttc

SEQ ID NO: 29262 - RNA, 27 nt, synthetic construct
  misc_feature 1..27: note = Serine/threonine-protein phosphatase 2A 56 kDa regulatory subunit epsilon isoform (174-182)
  source 1..27: mol_type = other RNA
aagtacatcgaccagaagttcgtgctg

SEQ ID NO: 29263 - RNA, 27 nt, synthetic construct
  misc_feature 1..27: note = Actin-binding protein IPP (238-246)
  source 1..27: mol_type = other RNA
aagtacatcgagggcgtgagcgacttc

SEQ ID NO: 29264 - RNA, 27 nt, synthetic construct
  misc_feature 1..27: note = Mitogen-activated protein kinase 4 (138-146)
  source 1..27: mol_type = other RNA
aagtacatccacagcgccaacgtgctg

SEQ ID NO: 29265 - RNA, 27 nt, synthetic construct
  misc_feature 1..27: note = Tyrosine-protein phosphatase non-receptor type 23 (70-78)
  source 1..27: mol_type = other RNA
aagtacctgggccagctccactacctg

SEQ ID NO: 29266 - RNA, 30 nt, synthetic construct
  misc_feature 1..30: note = Mitochondrial carrier homolog 1 (280-289)
  source 1..30: mol_type = other RNA
aagtacctgagcgtgcagggccagctcttc

SEQ ID NO: 29267 - RNA, 27 nt, synthetic construct
  misc_feature 1..27: note = Caprin-1 (98-106)
  source 1..27: mol_type = other RNA
aagtaccaggaggtgaccaacaacctg

SEQ ID NO: 29268 - RNA, 27 nt, synthetic construct
  misc_feature 1..27: note = Mitochondrial carrier homolog 1 (168-176)
  source 1..27: mol_type = other RNA
aagtacagcggcgtgctgtccagcatc

SEQ ID NO: 29269 - RNA, 27 nt, synthetic construct
  misc_feature 1..27: note = Microspherule protein 1 (251-259)
  source 1..27: mol_type = other RNA
ctgtacgaccccgtgatcagcaagctc

SEQ ID NO: 29270 - RNA, 27 nt, synthetic construct
  misc_feature 1..27: note = Splicing factor 3B subunit 3 (988-996)
  source 1..27: mol_type = other RNA
aactacatcagcggcatccagaccatc

SEQ ID NO: 29271 - RNA, 27 nt, synthetic construct
  misc_feature 1..27: note = Vimentin (357-365)
  source 1..27: mol_type = other RNA
aactaccaggacaccatcggccgcctg

SEQ ID NO: 29272 - RNA, 27 nt, synthetic construct
  misc_feature 1..27: note = Stomatin-like protein 2, mitochondrial (236-244)
  source 1..27: mol_type = other RNA
cagtacgtgagcgccttctccaagctg

SEQ ID NO: 29273 - RNA, 30 nt, synthetic construct
  misc_feature 1..30: note = Actin, cytoplasmic 2 (85-94)
  source 1..30: mol_type = other RNA
cgcgtggcccccgaggagcacccggtcctg

SEQ ID NO: 29274 - RNA, 27 nt, synthetic construct
  misc_feature 1..27: note = Casein kinase I isoform delta (178-186)
  source 1..27: mol_type = other RNA
cgctacgccagcatcaacacccacctg

SEQ ID NO: 29275 - RNA, 27 nt, synthetic construct
  misc_feature 1..27: note Dolichyl-diphosphooligosaccharide-proteinosyltransferase subunit 2 (218-226)
  source 1..27: mol_type = other RNA
cgctacatcgccaacaccgtggagctg

SEQ ID NO: 29276 - RNA, 27 nt, synthetic construct
  misc_feature 1..27: note = Signal transducer and activator of transcription 3 (13-21)
  source 1..27: mol_type = other RNA
cgctacctggagcagctccaccagctg

SEQ ID NO: 29277 - RNA, 27 nt, synthetic construct
  misc_feature 1..27: note = Protein kish-A (2-10)
  source 1..27: mol_type = other RNA
agcgccatcttcaacttccagtccctg

SEQ ID NO: 29278 - RNA, 27 nt, synthetic construct
  misc_feature 1..27: note = Seipin (55-63)
  source 1..27: mol_type = other RNA
agctacatgcccaccgtgtcccacctg

SEQ ID NO: 29279 - RNA, 27 nt, synthetic construct
  misc_feature 1..27: note CMP-N-acetylneuraminate-beta-galactosamide-alpha-2,3-sialyl transf erase 2 (239-247)
  source 1..27: mol_type = other RNA
acctacgcccccgtgaagagcttcctg

SEQ ID NO: 29280 - RNA, 27 nt, synthetic construct
  misc_feature 1..27: note = Cleft lip and palate transmembrane protein 1 (545-553)
  source 1..27: mol_type = other RNA
acctacaaggccctgaacaccttcatc

SEQ ID NO: 29281 - RNA, 27 nt, synthetic construct
  misc_feature 1..27: note = Proteasome subunit beta type-6 (94-102)
  source 1..27: mol_type = other RNA
acctaccagctgggcttccacagcatc

SEQ ID NO: 29282 - RNA, 27 nt, synthetic construct
  misc_feature 1..27: note = RNA-binding protein 42 (91-99)
  source 1..27: mol_type = other RNA
acctaccagcaggtgcagcagaccctg

SEQ ID NO: 29283 - RNA, 27 nt, synthetic construct
  misc_feature 1..27: note = DNA replication licensing factor MCM7 (231-239)
  source 1..27: mol_type = other RNA
acctacaccagcgcccgcacgctgctc

SEQ ID NO: 29284 - RNA, 27 nt, synthetic construct
  misc_feature 1..27: note = Alpha-enolase (18-26)
  source 1..27: mol_type = other RNA
gtgtaccacaacctgaagaacgtcatc

SEQ ID NO: 29285 - RNA, 27 nt, synthetic construct
  misc_feature 1..27: note = Unconventional myosin-Ic (350-358)
  source 1..27: mol_type = other RNA
gtgtacagccgcaccttcacctggctg

SEQ ID NO: 29286 - RNA, 33 nt, synthetic construct
  misc_feature 1..33: note = THO complex subunit 5 homolog (420-430)
  source 1..33: mol_type = other RNA
taccagttcgacaaggtgggcatcctgaccctc

SEQ ID NO: 29287 - RNA, 27 nt, synthetic construct
  misc_feature 1..27: note = Splicing factor 3B subunit 3 (1166-1174)
  source 1..27: mol_type = other RNA
tactacttccccgtgaagaacgtcatc

SEQ ID NO: 29288 - RNA, 27 nt, synthetic construct
  misc_feature 1..27: note = Solute carrier family 35 member B1 (27-35)
  source 1..27: mol_type = other RNA
tactacggcatcctgcaggagaagatc

SEQ ID NO: 29289 - RNA, 24 nt, synthetic construct
  misc_feature 1..24: note = Transformation/transcription domain-associated protein (1974-1981)
  source 1..24: mol_type = other RNA
tactaccccgtgcgccaccacctg

SEQ ID NO: 29290 - RNA, 48 nt, synthetic construct
  misc_feature 1..48: note = Gamma-secretase C-terminal fragment 59 (563-578)
  source 1..48: mol_type = other RNA
gccgagttccgccacgacagcggctacgaggtgcaccaccagaagctg

SEQ ID NO: 29291 - RNA, 30 nt, synthetic construct
  misc_feature 1..30: note = Ribosome-binding protein 1 (168-177)
  source 1..30: mol_type = other RNA
gccatcctggagaccgcccccaaggaggtg

SEQ ID NO: 29292 - RNA, 27 nt, synthetic construct
  misc_feature 1..27: note = Sarcoplasmic/endoplasmic reticulum calcium ATPase 1 (206-214)
  source 1..27: mol_type = other RNA
gccatcgtgcgcagcctgccctccgtc

SEQ ID NO: 29293 - RNA, 27 nt, synthetic construct
  misc_feature 1..27: note = ATP-dependent RNA helicase DDX50 (247-255)
  source 1..27: mol_type = other RNA
gccctggccgcggccctcgcccacatc

SEQ ID NO: 29294 - RNA, 30 nt, synthetic construct
  misc_feature 1..30: note = Splicing factor, proline- and glutamine-rich (343-352)
  source 1..30: mol_type = other RNA
gccctggccgagatcgcgaaggccgagctc

SEQ ID NO: 29295 - RNA, 36 nt, synthetic construct
  misc_feature 1..36: note = DDB1- and CUL4-associated factor 11 (187-198)
  source 1..36: mol_type = other RNA
gccctggccggccaccaggacgggatcaccttcatc

SEQ ID NO: 29296 - RNA, 27 nt, synthetic construct
  misc_feature 1..27: note = EH domain-containing protein 1 (502-510)
  source 1..27: mol_type = other RNA
gccctggccaaccacctcatcaaggtg

SEQ ID NO: 29297 - RNA, 27 nt, synthetic construct
  misc_feature 1..27: note = COP9 signalosome complex subunit 7a (30-38)
  source 1..27: mol_type = other RNA
gccctggccaccctcatccaccaggtg

SEQ ID NO: 29298 - RNA, 27 nt, synthetic construct
  misc_feature 1..27: note = Cullin-2 (304-312)
  source 1..27: mol_type = other RNA
gccctggacaaggccctcaccagcgtg

SEQ ID NO: 29299 - RNA, 27 nt, synthetic construct
  misc_feature 1..27: note = Glutathione S-transferase A4 (73-81)
  source 1..27: mol_type = other RNA
gccctggaggagaagatccccaacatc

SEQ ID NO: 29300 - RNA, 27 nt, synthetic construct
  misc_feature 1..27: note = WD repeat-containing protein 19 (108-116)
  source 1..27: mol_type = other RNA
gccctgttcgagggcaaggtgcagctc

SEQ ID NO: 29301 - RNA, 27 nt, synthetic construct
  misc_feature 1..27: note = H/ACA ribonucleoprotein complex subunit 4 (179-187)
  source 1..27: mol_type = other RNA
gccctgttccagcgccccccgctcatc

SEQ ID NO: 29302 - RNA, 27 nt, synthetic construct
  misc_feature 1..27: note = Serine palmitoyltransferase 2 (292-300)
  source 1..27: mol_type = other RNA
gccctgggccccaccgggcgcggcgtg

SEQ ID NO: 29303 - RNA, 33 nt, synthetic construct
  misc_feature 1..33: note = Syntaxin-binding protein 3 (373-383)
  source 1..33: mol_type = other RNA
gccctgggcaccgacgccgaggggcagaaggtg

SEQ ID NO: 29304 - RNA, 27 nt, synthetic construct
  misc_feature 1..27: note = Apoptosis-associated speck-like protein containing a CARD (118-126)
  source 1..27: mol_type = other RNA
gccctgatcgcccgcgtgaccaacgtc

SEQ ID NO: 29305 - RNA, 27 nt, synthetic construct
  misc_feature 1..27: note = DNA damage-inducible transcript 3 protein (158-166)
  source 1..27: mol_type = other RNA
gccctgatcgaccgcatggtgaacctc

SEQ ID NO: 29306 - RNA, 33 nt, synthetic construct
  misc_feature 1..33: note = Erlin-2 (214-224)
  source 1..33: mol_type = other RNA
gccctgatcgaggccgagaaggtggcgcaggtc

SEQ ID NO: 29307 - RNA, 27 nt, synthetic construct
  misc_feature 1..27: note = DNA polymerase alpha subunit B (22-30)
  source 1..27: mol_type = other RNA
gccctgatcgagaagctcgtggagctg

SEQ ID NO: 29308 - RNA, 27 nt, synthetic construct
  misc_feature 1..27: note = Thyroid adenoma-associated protein (142-150)
  source 1..27: mol_type = other RNA
gccctgatcacccgcatcttcggcgtg

SEQ ID NO: 29309 - RNA, 27 nt, synthetic construct
  misc_feature 1..27: note = Proliferating cell nuclear antigen (18-26)
  source 1..27: mol_type = other RNA
gccctgaaggacctcatcaacgaggcc

SEQ ID NO: 29310 - RNA, 33 nt, synthetic construct
  misc_feature 1..33: note = Eukaryotic translation initiation factor 3 subunit D (439-449)
  source 1..33: mol_type = other RNA
gccctgctcgccggcagcgagtacctgaagctg

SEQ ID NO: 29311 - RNA, 27 nt, synthetic construct
  misc_feature 1..27: note = AP-3 complex subunit delta-1 (461-469)
  source 1..27: mol_type = other RNA
gccctgctcgacagcgcccacctgctg

SEQ ID NO: 29312 - RNA, 36 nt, synthetic construct
  misc_feature 1..36: note = Extended synaptotagmin-2 (137-148)
  source 1..36: mol_type = other RNA
gccctgctcgaggacgaggagcgcgtggtccggctg

SEQ ID NO: 29313 - RNA, 27 nt, synthetic construct
  misc_feature 1..27: note = Transportin-1 (689-697)
  source 1..27: mol_type = other RNA
gccctgctcggcgacctgaccaaggcc

SEQ ID NO: 29314 - RNA, 27 nt, synthetic construct
  misc_feature 1..27: note = NudC domain-containing protein 3 (12-20)
  source 1..27: mol_type = other RNA
gccctgctcggcatcctgcagcacgtg

SEQ ID NO: 29315 - RNA, 27 nt, synthetic construct
  misc_feature 1..27: note = ATP synthase subunit beta, mitochondrial (320-328)
  source 1..27: mol_type = other RNA
gccctgctcggccgcatccccagcgcc

SEQ ID NO: 29316 - RNA, 27 nt, synthetic construct
  misc_feature 1..27: note = Ubiquitin carboxyl-terminal hydrolase 35 (288-296)
  source 1..27: mol_type = other RNA
gccctgctcaagggcctggccgcggtg

SEQ ID NO: 29317 - RNA, 27 nt, synthetic construct
  misc_feature 1..27: note = Proline and serine-rich protein 1 (900-908)
  source 1..27: mol_type = other RNA
gccctgctccagcaggtgcacagcgcc

SEQ ID NO: 29318 - RNA, 27 nt, synthetic construct
  misc_feature 1..27: note = Lysine-specific histone demethylase 1A (418-426)
  source 1..27: mol_type = other RNA
gccctgctcagcggcctgcgcgaggcc

SEQ ID NO: 29319 - RNA, 33 nt, synthetic construct
  misc_feature 1..33: note = Hsp90 co-chaperone Cdc37 (204-214)
  source 1..33: mol_type = other RNA
gccctgatggagcaggtggcccaccagaccatc

SEQ ID NO: 29320 - RNA, 33 nt, synthetic construct
  misc_feature 1..33: note = Ubiquitin-conjugating enzyme E2 S (128-138)
  source 1..33: mol_type = other RNA
gccctgaacgaggaggccggccgcctcctgctg

SEQ ID NO: 29321 - RNA, 27 nt, synthetic construct
  misc_feature 1..27: note = Talin-1 (777-785)
  source 1..27: mol_type = other RNA
gccctgaacgagctcctgcagcacgtg

SEQ ID NO: 29322 - RNA, 27 nt, synthetic construct
  misc_feature 1..27: note = Kinetochore protein NDC80 homolog (274-282)
  source 1..27: mol_type = other RNA
gccctgaacgagcagatcgcccgcctc

SEQ ID NO: 29323 - RNA, 27 nt, synthetic construct
  misc_feature 1..27: note = Influenza virus NS1A-binding protein (460-468)
  source 1..27: mol_type = other RNA
gccctgaacggcaagctctacatcgtg

SEQ ID NO: 29324 - RNA, 27 nt, synthetic construct
  misc_feature 1..27: note = Integrator complex subunit 4 (235-243)
  source 1..27: mol_type = other RNA
gccctgcaggagaagctctggaacgtg

SEQ ID NO: 29325 - RNA, 27 nt, synthetic construct
  misc_feature 1..27: note = BRISC complex subunit Abro1 (215-223)
  source 1..27: mol_type = other RNA
gccctgcaggagaaggtgcaggccgtc

SEQ ID NO: 29326 - RNA, 27 nt, synthetic construct
  misc_feature 1..27: note = Enhancer of filamentation 1 (806-814)
  source 1..27: mol_type = other RNA
gccctgcaggagatggtgcaccaggtc

SEQ ID NO: 29327 - RNA, 27 nt, synthetic construct
  misc_feature 1..27: note = Alpha-taxilin (67-75)
  source 1..27: mol_type = other RNA
gccctgcgcgacgtgagcgaggagctc

SEQ ID NO: 29328 - RNA, 27 nt, synthetic construct
  misc_feature 1..27: note = SET and MYND domain-containing protein 4 (220-228)
  source 1..27: mol_type = other RNA
gccctgcgcgaggagaacgagcagctc

SEQ ID NO: 29329 - RNA, 27 nt, synthetic construct
  misc_feature 1..27: note = Leucine-rich PPR motif-containing protein, mitochondrial (676-684)
  source 1..27: mol_type = other RNA
gccctgcgcggcgagatcgagaccgtg

SEQ ID NO: 29330 - RNA, 27 nt, synthetic construct
  misc_feature 1..27: note = HAUS augmin-like complex subunit 1 (219-227)
  source 1..27: mol_type = other RNA
gccctgagcgagaagctcgcccgcctg

SEQ ID NO: 29331 - RNA, 30 nt, synthetic construct
  misc_feature 1..30: note = T-complex protein 1 subunit zeta (162-171)
  source 1..30: mol_type = other RNA
gccctgagcaaggagggcatcgtggccctc

SEQ ID NO: 29332 - RNA, 27 nt, synthetic construct
  misc_feature 1..27: note = Coatomer subunit gamma-1 (159-167)
  source 1..27: mol_type = other RNA
gccctggtgagctccctccacctgctg

SEQ ID NO: 29333 - RNA, 30 nt, synthetic construct
  misc_feature 1..30: note = Guanine nucleotide-binding protein G(s) subunit alpha isoforms short (142-151)
  source 1..30: mol_type = other RNA
gccctgtgggaggacgagggcgtgcgcgcc

SEQ ID NO: 29334 - RNA, 27 nt, synthetic construct
  misc_feature 1..27: note = FERM, RhoGEF and pleckstrin domain-containing protein 2 (602-610)
  source 1..27: mol_type = other RNA
gccctgtgggagggccccagcaaggcc

SEQ ID NO: 29335 - RNA, 27 nt, synthetic construct
  misc_feature 1..27: note = Mannose-1-phosphate guanyltransferase alpha (254-262)
  source 1..27: mol_type = other RNA
gccctgtacgccagccgcctctacctg

SEQ ID NO: 29336 - RNA, 27 nt, synthetic construct
  misc_feature 1..27: note = Structural maintenance of chromosomes flexible hinge domain-containing protein 1 (656-664)
  source 1..27: mol_type = other RNA
gccctgtacgacgaggtgcgcaccgtc

SEQ ID NO: 29337 - RNA, 27 nt, synthetic construct
  misc_feature 1..27: note = Asparagine synthetase (glutamine-hydrolyzing) (131-139)
  source 1..27: mol_type = other RNA
gccctgtacgacaacgtggagaagctc

SEQ ID NO: 29338 - RNA, 27 nt, synthetic construct
  misc_feature 1..27: note = A-kinase anchor protein 11 (579-587)
  source 1..27: mol_type = other RNA
gccctgtaccacctcgccatcaagctg

SEQ ID NO: 29339 - RNA, 30 nt, synthetic construct
  misc_feature 1..30: note = tRNA-splicing ligase RtcB homolog (146-155)
  source 1..30: mol_type = other RNA
gccatgttcgaccacatccccgtgggcgtc

SEQ ID NO: 29340 - RNA, 27 nt, synthetic construct
  misc_feature 1..27: note = Sister chromatid cohesion protein PDS5 homolog A (534-542)
  source 1..27: mol_type = other RNA
gccatgttcggcaagctgatgaccatc

SEQ ID NO: 29341 - RNA, 27 nt, synthetic construct
  misc_feature 1..27: note = Autophagy-related protein 101 (20-28)
  source 1..27: mol_type = other RNA
gccatgctggccgtgctccacaccgtc

SEQ ID NO: 29342 - RNA, 33 nt, synthetic construct
  misc_feature 1..33: note = ATP-binding cassette sub-family F member 1 (296-306)
  source 1..33: mol_type = other RNA
gccatgctggagaacgccagcgacatcaagctc

SEQ ID NO: 29343 - RNA, 27 nt, synthetic construct
  misc_feature 1..27: note = Ankyrin repeat and KH domain-containing protein 1 (1231-1239)
  source 1..27: mol_type = other RNA
gccatgaacggccacgtgcccgccgtc

SEQ ID NO: 29344 - RNA, 27 nt, synthetic construct
  misc_feature 1..27: note = Phosphopantothenoylcysteine decarboxylase (65-73)
  source 1..27: mol_type = other RNA
gccatgtgggagcaccccatcaccgcc

SEQ ID NO: 29345 - RNA, 30 nt, synthetic construct
  misc_feature 1..30: note = Bifunctional methylenetetrahydrofolate dehydrogenase/cyclohydrolase, mitochondrial (270-279)
  source 1..30: mol_type = other RNA
gccgtgatcgacgtcggcatcaaccgcgtg

SEQ ID NO: 29346 - RNA, 27 nt, synthetic construct
  misc_feature 1..27: note = Leucine-rich repeat flightless-interacting protein 2 (349-357)
  source 1..27: mol_type = other RNA
gacctgaaggaccagatccaggacgtg

SEQ ID NO: 29347 - RNA, 27 nt, synthetic construct
  misc_feature 1..27: note = ADP-ribosylation factor GTPase-activating protein 3 (152-160)
  source 1..27: mol_type = other RNA
ttcgccagccacgtgtcccccgaggtc

SEQ ID NO: 29348 - RNA, 30 nt, synthetic construct
  misc_feature 1..30: note = Plexin-B2 (141-150)
  source 1..30: mol_type = other RNA
ttcatcttcgacgtgcacgtccacgaggtg

SEQ ID NO: 29349 - RNA, 30 nt, synthetic construct
  misc_feature 1..30: note = Ankyrin repeat and LEM domain-containing protein 2 (100-109)
  source 1..30: mol_type = other RNA
ttcatcttcgagaagaagctggcccaggcc

SEQ ID NO: 29350 - RNA, 30 nt, synthetic construct
  misc_feature 1..30: note = Signal transducer and activator of transcription 5B (332-341)
  source 1..30: mol_type = other RNA
ttcatcatcgagaagcagcccccgcaggtg

SEQ ID NO: 29351 - RNA, 27 nt, synthetic construct
  misc_feature 1..27: note = DNA-directed RNA polymerase I subunit RPA2 (31-39)
  source 1..27: mol_type = other RNA
ttcatcatcaacggcatcgagaaggtg

SEQ ID NO: 29352 - RNA, 30 nt, synthetic construct
  misc_feature 1..30: note = Son of sevenless homolog 1 (444-453)
  source 1..30: mol_type = other RNA
ttcatcatggagggcaccctgacccgcgtg

SEQ ID NO: 29353 - RNA, 27 nt, synthetic construct
  misc_feature 1..27: note = Formin-like protein 1 (47-55)
  source 1..27: mol_type = other RNA
ttcatcaacatcgtggtccacagcgtg

SEQ ID NO: 29354 - RNA, 27 nt, synthetic construct
  misc_feature 1..27: note = Exocyst complex component 4 (169-177)
  source 1..27: mol_type = other RNA
ttcatccaggagatcgagcacgccctg

SEQ ID NO: 29355 - RNA, 27 nt, synthetic construct
  misc_feature 1..27: note = 26S proteasome non-ATPase regulatory subunit 13 (63-71)
  source 1..27: mol_type = other RNA
ttcatcagcgagttcgagcaccgcgtg

SEQ ID NO: 29356 - RNA, 27 nt, synthetic construct
  misc_feature 1..27: note = Dystonin (4051-4059)
  source 1..27: mol_type = other RNA
ttcatctgggagaacatccacaccctg

SEQ ID NO: 29357 - RNA, 30 nt, synthetic construct
  misc_feature 1..30: note = Cytoskeleton-associated protein 5 (478-487)
  source 1..30: mol_type = other RNA
ttcctggccgacgtggacaagctcaagctg

SEQ ID NO: 29358 - RNA, 30 nt, synthetic construct
  misc_feature 1..30: note = DNA dC-dU-editing enzyme APOBEC-3F (106-115)
  source 1..30: mol_type = other RNA
ttcctggccgagcaccccaacgtgaccctc

SEQ ID NO: 29359 - RNA, 33 nt, synthetic construct
  misc_feature 1..33: note = General transcription factor 3C polypeptide 2 (609-619)
  source 1..33: mol_type = other RNA
ttcctggcccacgaccaggccgtgcgcaccctc

SEQ ID NO: 29360 - RNA, 27 nt, synthetic construct
  misc_feature 1..27: note = DCC-interacting protein 13-alpha (225-233)
  source 1..27: mol_type = other RNA
ttcctggccaacatcggcaccagcgtg

SEQ ID NO: 29361 - RNA, 27 nt, synthetic construct
  misc_feature 1..27: note = Nucleoside diphosphate kinase 3 (25-33)
  source 1..27: mol_type = other RNA
ttcctggccgtgaagcccgacggcgtc

SEQ ID NO: 29362 - RNA, 27 nt, synthetic construct
  misc_feature 1..27: note = Basic leucine zipper and W2 domain-containing protein 1 (57-65)
  source 1..27: mol_type = other RNA
ttcctggacgccagcggcgccaagctc

SEQ ID NO: 29363 - RNA, 27 nt, synthetic construct
  misc_feature 1..27: note = Probable JmjC domain-containing histone demethylation protein 2C (60-68)
  source 1..27: mol_type = other RNA
ttcctggacgacgtggtccacagcctc

SEQ ID NO: 29364 - RNA, 27 nt, synthetic construct
  misc_feature 1..27: note = Dipeptidyl peptidase 8 (72-80)
  source 1..27: mol_type = other RNA
ttcctggacgagaacgtgcacttcgcc

SEQ ID NO: 29365 - RNA, 27 nt, synthetic construct
  misc_feature 1..27: note = Myotubularin (308-316)
  source 1..27: mol_type = other RNA
ttcctggacatccacaacatccacgtg

SEQ ID NO: 29366 - RNA, 27 nt, synthetic construct
  misc_feature 1..27: note = Ubiquitin fusion degradation protein 1 homolog (168-176)
  source 1..27: mol_type = other RNA
ttcctggacatcaccaaccccaaggcc

SEQ ID NO: 29367 - RNA, 27 nt, synthetic construct
  misc_feature 1..27: note = RHO/RAC effector protein (1023-1031)
  source 1..27: mol_type = other RNA
ttcctggacaagaacgaccacagcctc

SEQ ID NO: 29368 - RNA, 27 nt, synthetic construct
  misc_feature 1..27: note = Epidermal growth factor receptor substrate 15-like 1 (67-75)
  source 1..27: mol_type = other RNA
ttcctggacaagcagggcttctacgtg

SEQ ID NO: 29369 - RNA, 27 nt, synthetic construct
  misc_feature 1..27: note = Serine/threonine-protein kinase N1 (458-466)
  source 1..27: mol_type = other RNA
ttcctggacaacgagcgccacgaggtg

SEQ ID NO: 29370 - RNA, 33 nt, synthetic construct
  misc_feature 1..33: note = Sphingomyelin phosphodiesterase 4 (86-96)
  source 1..33: mol_type = other RNA
ttcctggaccccggcgggccgatgatgaagctc

SEQ ID NO: 29371 - RNA, 30 nt, synthetic construct
  misc_feature 1..30: note = Probable dolichyl pyrophosphate Glc1Man9GlcNAc2 alpha-1,3-glucosyltransferase (305-314)
  source 1..30: mol_type = other RNA
ttcctggaccccaacaacatcccgaaggcc

SEQ ID NO: 29372 - RNA, 27 nt, synthetic construct
  misc_feature 1..27: note = trabeculin-alpha (1734-1742)
  source 1..27: mol_type = other RNA
ttcctggaccagcacggccacaacctc

SEQ ID NO: 29373 - RNA, 27 nt, synthetic construct
  misc_feature 1..27: note = Gamma-tubulin complex component 5 (53-61)
  source 1..27: mol_type = other RNA
ttcctggacgtgaacagccacaagatc

SEQ ID NO: 29374 - RNA, 27 nt, synthetic construct
  misc_feature 1..27: note = Bromodomain adjacent to zinc finger domain protein 2A (750-758)
  source 1..27: mol_type = other RNA
ttcctggagcccgtgaacccgcgcctc

SEQ ID NO: 29375 - RNA, 27 nt, synthetic construct
  misc_feature 1..27: note = Serine/threonine-protein phosphatase 4 regulatory subunit 3A (581-589)
  source 1..27: mol_type = other RNA
ttcctgttcgagcccgtggtcaaggcc

SEQ ID NO: 29376 - RNA, 27 nt, synthetic construct
  misc_feature 1..27: note = Protein yippee-like 5 (43-51)
  source 1..27: mol_type = other RNA
ttcctgttcaacaaggtggtcaacctc

SEQ ID NO: 29377 - RNA, 27 nt, synthetic construct
  misc_feature 1..27: note = Protein TASOR (98-106)
  source 1..27: mol_type = other RNA
ttcctgttccaggagccccgcagcatc

SEQ ID NO: 29378 - RNA, 27 nt, synthetic construct
  misc_feature 1..27: note = Protein FAM177A1 (116-124)
  source 1..27: mol_type = other RNA
ttcctgggcgagaagatcgccagcgtg

SEQ ID NO: 29379 - RNA, 27 nt, synthetic construct
  misc_feature 1..27: note = Meckelin (880-888)
  source 1..27: mol_type = other RNA
ttcctgggcagcttcatcgaccacgtg

SEQ ID NO: 29380 - RNA, 30 nt, synthetic construct
  misc_feature 1..30: note = 60S ribosomal protein L34 (95-104)
  source 1..30: mol_type = other RNA
ttcctgatcgaggagcagaagatcgtggtc

SEQ ID NO: 29381 - RNA, 30 nt, synthetic construct
  misc_feature 1..30: note = TBCC domain-containing protein 1 (214-223)
  source 1..30: mol_type = other RNA
ttcctgatcgagggcaccatcagccgcgcc

SEQ ID NO: 29382 - RNA, 27 nt, synthetic construct
  misc_feature 1..27: note = T-complex protein 1 subunit beta (218-226)
  source 1..27: mol_type = other RNA
ttcctgctcgacaagaagatcggcgtg

SEQ ID NO: 29383 - RNA, 33 nt, synthetic construct
  misc_feature 1..33: note = Plectin (3718-3728)
  source 1..33: mol_type = other RNA
ttcctgctcgaccccgtgaagggcgagcgcctg

SEQ ID NO: 29384 - RNA, 27 nt, synthetic construct
  misc_feature 1..27: note = GDP-mannose 4,6 dehydratase (9-17)
  source 1..27: mol_type = other RNA
ttcctgctcgagaagggctacgaggtg

SEQ ID NO: 29385 - RNA, 27 nt, synthetic construct
  misc_feature 1..27: note = Protein arginine N-methyltransferase 3 (423-431)
  source 1..27: mol_type = other RNA
ttcctgctcgagaagcccttcagcgtg

SEQ ID NO: 29386 - RNA, 27 nt, synthetic construct
  misc_feature 1..27: note = Unconventional myosin-If (148-156)
  source 1..27: mol_type = other RNA
ttcctgctcgagaagagccgcgtggtc

SEQ ID NO: 29387 - RNA, 27 nt, synthetic construct
  misc_feature 1..27: note = TBC1 domain family member 9B (187-195)
  source 1..27: mol_type = other RNA
ttcctgctcggcaaggaggtgagcctg

SEQ ID NO: 29388 - RNA, 33 nt, synthetic construct
  misc_feature 1..33: note = Poly (ADP-ribose) polymerase 10 (535-545)
  source 1..33: mol_type = other RNA
ttcctgctcggccccgaggggcagcacctgctg

SEQ ID NO: 29389 - RNA, 30 nt, synthetic construct
  misc_feature 1..30: note = Transport and Golgi organization protein 6 homolog (990-999)
  source 1..30: mol_type = other RNA
ttcctgctcggcagcgtggtccacgaggtg

SEQ ID NO: 29390 - RNA, 27 nt, synthetic construct
  misc_feature 1..27: note = Protein transport protein Sec24A (394-402)
  source 1..27: mol_type = other RNA
ttcctgctccacatccagcagcaggtg

SEQ ID NO: 29391 - RNA, 30 nt, synthetic construct
  misc_feature 1..30: note = GMP synthase (glutamine-hydrolyzing) (510-519)
  source 1..30: mol_type = other RNA
ttcctgctccccatcaagaccgtgggcgtc

SEQ ID NO: 29392 - RNA, 27 nt, synthetic construct
  misc_feature 1..27: note = Nuclear pore complex protein Nup133 (610-618)
  source 1..27: mol_type = other RNA
ttcctgatggacttcatccaccaggtg

SEQ ID NO: 29393 - RNA, 33 nt, synthetic construct
  misc_feature 1..33: note = SHC SH2 domain-binding protein 1 (439-449)
  source 1..33: mol_type = other RNA
ttcctgatgaagaacagcgacctctacggcgcc

SEQ ID NO: 29394 - RNA, 27 nt, synthetic construct
  misc_feature 1..27: note = 3-hydroxyacyl-CoA dehydrogenase type-2 (245-253)
  source 1..27: mol_type = other RNA
ttcctgaacggcgaggtgatccgcctc

SEQ ID NO: 29395 - RNA, 27 nt, synthetic construct
  misc_feature 1..27: note = Translation initiation factor eIF-2B subunit delta (300-308)
  source 1..27: mol_type = other RNA
ttcctgaacaaggagatcaccagcgtg

SEQ ID NO: 29396 - RNA, 27 nt, synthetic construct
  misc_feature 1..27: note = Ubiquitin-associated protein 2-like (434-442)
  source 1..27: mol_type = other RNA
ttcctgcaggagaagagccccgccgtg

SEQ ID NO: 29397 - RNA, 30 nt, synthetic construct
  misc_feature 1..30: note = DNA dC-dU-editing enzyme APOBEC-3B (104-113)
  source 1..30: mol_type = other RNA
ttcctgcaggagaacacccacgtgcgcctc

SEQ ID NO: 29398 - RNA, 27 nt, synthetic construct
  misc_feature 1..27: note = Glutathione S-transferase A4 (87-95)
  source 1..27: mol_type = other RNA
ttcctgcaggagtacaccgtgaagctc

SEQ ID NO: 29399 - RNA, 27 nt, synthetic construct
  misc_feature 1..27: note = Proteasome activator complex subunit 4 (673-681)
  source 1..27: mol_type = other RNA
ttcctgcagcccgagctcgtgaagctg

SEQ ID NO: 29400 - RNA, 27 nt, synthetic construct
  misc_feature 1..27: note = cAMP-dependent protein kinase type I-alpha regulatory subunit (49-57)
  source 1..27: mol_type = other RNA
ttcctgcgcgagtacttcgagcggctc

SEQ ID NO: 29401 - RNA, 33 nt, synthetic construct
  misc_feature 1..33: note = 6-phosphofructo-2-kinase/fructose-2,6-bisphosphatase 4 (83-93)
  source 1..33: mol_type = other RNA
ttcctgagcgaggagggcgggcacgtggccgtc

SEQ ID NO: 29402 - RNA, 30 nt, synthetic construct
  misc_feature 1..30: note = DNA dC-dU-editing enzyme APOBEC-3B (107-116)
  source 1..30: mol_type = other RNA
ttcctgagcgagcaccccaacgtgaccctc

SEQ ID NO: 29403 - RNA, 33 nt, synthetic construct
  misc_feature 1..33: note = Lysine-tRNA ligase (585-595)
  source 1..33: mol_type = other RNA
ttcctgaccgacagcaacaacatcaaggaggtg

SEQ ID NO: 29404 - RNA, 27 nt, synthetic construct
  misc_feature 1..27: note = Calcium and integrin-binding protein 1 (21-29)
  source 1..27: mol_type = other RNA
ttcctgaccaagcaggagatcctcctg

SEQ ID NO: 29405 - RNA, 27 nt, synthetic construct
  misc_feature 1..27: note = Zinc transporter ZIP6 (435-443)
  source 1..27: mol_type = other RNA
ttcctggtggagcacgtcctcaccctg

SEQ ID NO: 29406 - RNA, 27 nt, synthetic construct
  misc_feature 1..27: note = DDB1- and CUL4-associated factor 15 (73-81)
  source 1..27: mol_type = other RNA
ttcctgtacgccggccacatcttcctc

SEQ ID NO: 29407 - RNA, 27 nt, synthetic construct
  misc_feature 1..27: note = DNA topoisomerase 2-beta (701-709)
  source 1..27: mol_type = other RNA
ttcctgtacgacgacaaccagcgcgtg

SEQ ID NO: 29408 - RNA, 30 nt, synthetic construct
  misc_feature 1..30: note = Alpha-ketoglutarate-dependent dioxygenase FTO (206-215)
  source 1..30: mol_type = other RNA
ttcatggacccccagaagatgccgtacctg

SEQ ID NO: 29409 - RNA, 30 nt, synthetic construct
  misc_feature 1..30: note = Serine/threonine-protein phosphatase 6 catalytic subunit (244-253)
  source 1..30: mol_type = other RNA
ttcatgttcgacgagaagctggtgaccgtc

SEQ ID NO: 29410 - RNA, 27 nt, synthetic construct
  misc_feature 1..27: note = U4/U6 small nuclear ribonucleoprotein Prp3 (195-203)
  source 1..27: mol_type = other RNA
ttcatgaacgacgccatcgagaaggcc

SEQ ID NO: 29411 - RNA, 27 nt, synthetic construct
  misc_feature 1..27: note = Putative helicase MOV-10 (35-43)
  source 1..27: mol_type = other RNA
ttcgtggacggcctgaccttcaaggtc

SEQ ID NO: 29412 - RNA, 30 nt, synthetic construct
  misc_feature 1..30: note = Ubiquitin carboxyl-terminal hydrolase 10 (604-613)
  source 1..30: mol_type = other RNA
ggcatcttcgggggccacatccgcagcgtg

SEQ ID NO: 29413 - RNA, 33 nt, synthetic construct
  misc_feature 1..33: note = D13S824E locus (103-113)
  source 1..33: mol_type = other RNA
ggcatcctgaccaaggagctcctgcacagcgtg

SEQ ID NO: 29414 - RNA, 27 nt, synthetic construct
  misc_feature 1..27: note = CAD protein (445-453)
  source 1..27: mol_type = other RNA
ggcctggccgacaaggtgtacttcctc

SEQ ID NO: 29415 - RNA, 33 nt, synthetic construct
  misc_feature 1..33: note = Threonine-tRNA ligase, cytoplasmic (145-155)
  source 1..33: mol_type = other RNA
ggcctggccgacaacaccgtgatcgccaaggtc

SEQ ID NO: 29416 - RNA, 27 nt, synthetic construct
  misc_feature 1..27: note = Importin-4 (306-314)
  source 1..27: mol_type = other RNA
ggcctggccccccacctcgagcagatc

SEQ ID NO: 29417 - RNA, 27 nt, synthetic construct
  misc_feature 1..27: note = Filamin-B (1451-1459)
  source 1..27: mol_type = other RNA
ggcctggcccccctcgaggtgcgcgtc

SEQ ID NO: 29418 - RNA, 30 nt, synthetic construct
  misc_feature 1..30: note = Putative helicase MOV-10 (451-460)
  source 1..30: mol_type = other RNA
ggcctggacgacatcaaggacctcaaggtg

SEQ ID NO: 29419 - RNA, 27 nt, synthetic construct
  misc_feature 1..27: note = Probable helicase with zinc finger domain (341-349)
  source 1..27: mol_type = other RNA
ggcctggaccactacgtgtacaaggtc

SEQ ID NO: 29420 - RNA, 30 nt, synthetic construct
  misc_feature 1..30: note = Rho GTPase-activating protein 12 (126-135)
  source 1..30: mol_type = other RNA
ggcctggacatcgacgggatctaccgcgtg

SEQ ID NO: 29421 - RNA, 30 nt, synthetic construct
  misc_feature 1..30: note = Proline-rich protein 12 (188-197)
  source 1..30: mol_type = other RNA
ggcctggaccccaacaagccgcccgagctc

SEQ ID NO: 29422 - RNA, 30 nt, synthetic construct
  misc_feature 1..30: note = WD repeat-containing protein 70 (189-198)
  source 1..30: mol_type = other RNA
ggcctggaccccagcggggcccgcctcgtg

SEQ ID NO: 29423 - RNA, 27 nt, synthetic construct
  misc_feature 1..27: note = Hexokinase-1 (818-826)
  source 1..27: mol_type = other RNA
ggcctggaccgcctcaacgtgaccgtc

SEQ ID NO: 29424 - RNA, 27 nt, synthetic construct
  misc_feature 1..27: note = Cleavage stimulation factor subunit 3 (220-228)
  source 1..27: mol_type = other RNA
ggcctggaccgcaacgcccccagcgtg

SEQ ID NO: 29425 - RNA, 27 nt, synthetic construct
  misc_feature 1..27: note = Nischarin (1238-1246)
  source 1..27: mol_type = other RNA
ggcctgttcgaccagcacttccgcctc

SEQ ID NO: 29426 - RNA, 27 nt, synthetic construct
  misc_feature 1..27: note = Targeting protein for Xklp2 (12-20)
  source 1..27: mol_type = other RNA
ggcctgttccaggggaagacccccctc

SEQ ID NO: 29427 - RNA, 27 nt, synthetic construct
  misc_feature 1..27: note = Protein SPT2 homolog (93-101)
  source 1..27: mol_type = other RNA
ggcctggggcccccgggccgcagcgtg

SEQ ID NO: 29428 - RNA, 24 nt, synthetic construct
  misc_feature 1..24: note = Bardet-Biedl syndrome 1 protein (382-389)
  source 1..24: mol_type = other RNA
ggcctggggcccaccttcaagctc

SEQ ID NO: 29429 - RNA, 27 nt, synthetic construct
  misc_feature 1..27: note = Microtubule-actin cross-linking factor 1, isoforms 1/2/3/5 (195-203)
  source 1..27: mol_type = other RNA
ggcctgatcgaccgccaggtgaccgtc

SEQ ID NO: 29430 - RNA, 30 nt, synthetic construct
  misc_feature 1..30: note = Ubiquitin-like domain-containing CTD phosphatase 1 (225-234)
  source 1..30: mol_type = other RNA
ggcctgatcgacgtgaagcccctcggggtc

SEQ ID NO: 29431 - RNA, 27 nt, synthetic construct
  misc_feature 1..27: note = Programmed cell death protein 5 (91-99)
  source 1..27: mol_type = other RNA
ggcctgatcgagatcctcaagaaggtg

SEQ ID NO: 29432 - RNA, 33 nt, synthetic construct
  misc_feature 1..33: note = Na(+)/H(+) exchange regulatory cofactor NHE-RF1 (122-132)
  source 1..33: mol_type = other RNA
ggcctgctcgccggggaccgcctggtggaggtc

SEQ ID NO: 29433 - RNA, 27 nt, synthetic construct
  misc_feature 1..27: note = Trifunctional purine biosynthetic protein adenosine-3 (685-693)
  source 1..27: mol_type = other RNA
ggcctgctcgagaacatcccccgcgtg

SEQ ID NO: 29434 - RNA, 30 nt, synthetic construct
  misc_feature 1..30: note = Hom s 1 (11-20)
  source 1..30: mol_type = other RNA
ggcctgctcgagaccaccgtgcagaaggtc

SEQ ID NO: 29435 - RNA, 27 nt, synthetic construct
  misc_feature 1..27: note = Tumor necrosis factor receptor superfamily member 10B (362-370)
  source 1..27: mol_type = other RNA
ggcctgatggacaacgagatcaaggtg

SEQ ID NO: 29436 - RNA, 27 nt, synthetic construct
  misc_feature 1..27: note = Glucocorticoid modulatory element-binding protein 1 (312-320)
  source 1..27: mol_type = other RNA
ggcctgatggacaccgtgaagaaggtc

SEQ ID NO: 29437 - RNA, 30 nt, synthetic construct
  misc_feature 1..30: note = Hydroxyacyl-coenzyme A dehydrogenase, mitochondrial (36-45)
  source 1..30: mol_type = other RNA
ggcctgatgggggccggcatcgcccaggtg

SEQ ID NO: 29438 - RNA, 27 nt, synthetic construct
  misc_feature 1..27: note = Myocyte-specific enhancer factor 2A (27-35)
  source 1..27: mol_type = other RNA
ggcctgatgaagaaggcctacgagctc

SEQ ID NO: 29439 - RNA, 27 nt, synthetic construct
  misc_feature 1..27: note = Kinetochore protein NDC80 homolog (330-338)
  source 1..27: mol_type = other RNA
ggcctgaacgaggagatcgcccgcgtg

SEQ ID NO: 29440 - RNA, 30 nt, synthetic construct
  misc_feature 1..30: note = Zinc finger protein 106 (808-817)
  source 1..30: mol_type = other RNA
ggcctgccccgcttcgggatcgagatggtg

SEQ ID NO: 29441 - RNA, 27 nt, synthetic construct
  misc_feature 1..27: note = Signal recognition particle subunit SRP72 (170-178)
  source 1..27: mol_type = other RNA
ggcctgcaggaggggacccacgagctc

SEQ ID NO: 29442 - RNA, 30 nt, synthetic construct
  misc_feature 1..30: note = Rho GTPase-activating protein 35 (1277-1286)
  source 1..30: mol_type = other RNA
ggcctgagcaccgaggggatctaccgcgtg

SEQ ID NO: 29443 - RNA, 30 nt, synthetic construct
  misc_feature 1..30: note = Probable RNA-binding protein 23 (209-218)
  source 1..30: mol_type = other RNA
ggcctgaccgggcagcgcctcctgggcgtg

SEQ ID NO: 29444 - RNA, 27 nt, synthetic construct
  misc_feature 1..27: note = Anamorsin (27-35)
  source 1..27: mol_type = other RNA
ggcctggtggacaagctccaggccctg

SEQ ID NO: 29445 - RNA, 27 nt, synthetic construct
  misc_feature 1..27: note = Anaphase-promoting complex subunit 1 (56-64)
  source 1..27: mol_type = other RNA
ggcctggtggggagcctccaggaggtc

SEQ ID NO: 29446 - RNA, 27 nt, synthetic construct
  misc_feature 1..27: note = Intraflagellar transport protein 172 homolog (410-418)
  source 1..27: mol_type = other RNA
ggcctgtgggaggaggcctaccgcgtg

SEQ ID NO: 29447 - RNA, 33 nt, synthetic construct
  misc_feature 1..33: note = Protein PRRC2B (1324-1334)
  source 1..33: mol_type = other RNA
ggcctgtgggggcccgaggaggagccgcacctc

SEQ ID NO: 29448 - RNA, 27 nt, synthetic construct
  misc_feature 1..27: note = TRPM8 channel-associated factor 1 (327-335)
  source 1..27: mol_type = other RNA
ggcctgtgggggcccgtgcacgagctc

SEQ ID NO: 29449 - RNA, 30 nt, synthetic construct
  misc_feature 1..30: note = tRNA (adenine(58)-N(1))-methyltransferase non-catalytic subunit TRM6 (83-92)
  source 1..30: mol_type = other RNA
ggcctgtacgagttccccctcaacaaggtg

SEQ ID NO: 29450 - RNA, 27 nt, synthetic construct
  misc_feature 1..27: note = Long-chain-fatty-acid-CoA ligase 3 (310-318)
  source 1..27: mol_type = other RNA
ggcatggccgagcgcatccccgagctg

SEQ ID NO: 29451 - RNA, 33 nt, synthetic construct
  misc_feature 1..33: note = DNA damage-binding protein 1 (56-66)
  source 1..33: mol_type = other RNA
ggcatgtacgggaagatcgccgtgatggagctg

SEQ ID NO: 29452 - RNA, 27 nt, synthetic construct
  misc_feature 1..27: note = ORM1-like protein 3 (59-67)
  source 1..27: mol_type = other RNA
ggcatgtacatcttcctgcacaccgtg

SEQ ID NO: 29453 - RNA, 33 nt, synthetic construct
  misc_feature 1..33: note = WD repeat-containing protein 18 (99-109)
  source 1..33: mol_type = other RNA
ggcgtggccgagagcatccacctgtgggaggtc

SEQ ID NO: 29454 - RNA, 33 nt, synthetic construct
  misc_feature 1..33: note = Putative eukaryotic translation initiation factor 2 subunit 3-like protein (277-287)
  source 1..33: mol_type = other RNA
ggcgtggccgggggcagcatcctgaagggggtc

SEQ ID NO: 29455 - RNA, 27 nt, synthetic construct
  misc_feature 1..27: note = Chitinase domain-containing protein 1 (236-244)
  source 1..27: mol_type = other RNA
cacctggccgaggccctccaccaggcg

SEQ ID NO: 29456 - RNA, 27 nt, synthetic construct
  misc_feature 1..27: note = E3 ubiquitin-protein ligase BRE1A (291-299)
  source 1..27: mol_type = other RNA
cacctggccgaggtgctcgagcgcgtc

SEQ ID NO: 29457 - RNA, 27 nt, synthetic construct
  misc_feature 1..27: note = Protein VPRBP (425-433)
  source 1..27: mol_type = other RNA
cacctggccatcaagctcgagcaggtg

SEQ ID NO: 29458 - RNA, 27 nt, synthetic construct
  misc_feature 1..27: note = E3 ubiquitin-protein ligase TRIM22 (73-81)
  source 1..27: mol_type = other RNA
cacctggccaacatcgtggagcgcgtc

SEQ ID NO: 29459 - RNA, 27 nt, synthetic construct
  misc_feature 1..27: note = Tetratricopeptide repeat protein 17 (671-679)
  source 1..27: mol_type = other RNA
cacctggacgccaccaagctcctgctg

SEQ ID NO: 29460 - RNA, 27 nt, synthetic construct
  misc_feature 1..27: note = Ninein (404-412)
  source 1..27: mol_type = other RNA
cacctgctcgagcgcgtggaccaggtc

SEQ ID NO: 29461 - RNA, 27 nt, synthetic construct
  misc_feature 1..27: note = Golgin subfamily A member 4 (1695-1703)
  source 1..27: mol_type = other RNA
cacctgagcgagctcaacaccaagctg

SEQ ID NO: 29462 - RNA, 27 nt, synthetic construct
  misc_feature 1..27: note = Lysine-tRNA ligase (148-156)
  source 1..27: mol_type = other RNA
cacctgaccgacatcaccctcaaggtg

SEQ ID NO: 29463 - RNA, 27 nt, synthetic construct
  misc_feature 1..27: note = Multiple C2 and transmembrane domain-containing protein 1 (245-253)
  source 1..27: mol_type = other RNA
cacctgtggcgcggcatcgtgagcatc

SEQ ID NO: 29464 - RNA, 27 nt, synthetic construct
  misc_feature 1..27: note = Nucleoside diphosphate-linked moiety X motif 19 (348-356)
  source 1..27: mol_type = other RNA
cacctgtacgacatccacgtgaccgtc

SEQ ID NO: 29465 - RNA, 27 nt, synthetic construct
  misc_feature 1..27: note = Probable helicase senataxin (435-443)
  source 1..27: mol_type = other RNA
cacctgtacagcgaggtgaaggaggtc

SEQ ID NO: 29466 - RNA, 30 nt, synthetic construct
  misc_feature 1..30: note = Folliculin-interacting protein 1 (827-836)
  source 1..30: mol_type = other RNA
atcatcgccgacatggacaagtggaccgtg

SEQ ID NO: 29467 - RNA, 33 nt, synthetic construct
  misc_feature 1..33: note = Cofilin-1 (47-57)
  source 1..33: mol_type = other RNA
atcatcctggaggagggcaaggagatcctcgtg

SEQ ID NO: 29468 - RNA, 27 nt, synthetic construct
  misc_feature 1..27: note = Ras GTPase-activating-like protein IQGAP1 (1071-1079)
  source 1..27: mol_type = other RNA
atcctggcccccgtggtcaaggagatc

SEQ ID NO: 29469 - RNA, 27 nt, synthetic construct
  misc_feature 1..27: note = 26S proteasome non-ATPase regulatory subunit 1 (736-744)
  source 1..27: mol_type = other RNA
atcctggacgccggcgggcacaacgtg

SEQ ID NO: 29470 - RNA, 33 nt, synthetic construct
  misc_feature 1..33: note = 26S proteasome non-ATPase regulatory subunit 1 (736-746)
  source 1..33: mol_type = other RNA
atcctggacgccggcgggcacaacgtgaccatc

SEQ ID NO: 29471 - RNA, 27 nt, synthetic construct
  misc_feature 1..27: note = F-box only protein 8 (162-170)
  source 1..27: mol_type = other RNA
atcctggacgacagccccaaggagatc

SEQ ID NO: 29472 - RNA, 33 nt, synthetic construct
  misc_feature 1..33: note = Melanoma inhibitory activity protein 3 (156-166)
  source 1..33: mol_type = other RNA
atcctggacgacaccgccaagaacctccgcgtg

SEQ ID NO: 29473 - RNA, 27 nt, synthetic construct
  misc_feature 1..27: note = IQ domain-containing protein D (55-63)
  source 1..27: mol_type = other RNA
atcctggacgaggccatctacaaggtg

SEQ ID NO: 29474 - RNA, 27 nt, synthetic construct
  misc_feature 1..27: note = Axin-1 (508-516)
  source 1..27: mol_type = other RNA
atcctggacgagcacgtgcagcgcgtc

SEQ ID NO: 29475 - RNA, 33 nt, synthetic construct
  misc_feature 1..33: note = Dihydroxyacetone phosphate acyltransferase (106-116)
  source 1..33: mol_type = other RNA
atcctggacgagatgagccacaagctccgcctg

SEQ ID NO: 29476 - RNA, 27 nt, synthetic construct
  misc_feature 1..27: note = Protein DBF4 homolog A (461-469)
  source 1..27: mol_type = other RNA
atcctggacatcagcgagcacaccctc

SEQ ID NO: 29477 - RNA, 27 nt, synthetic construct
  misc_feature 1..27: note = F-box only protein 25 (65-73)
  source 1..27: mol_type = other RNA
atcctggacaagatcgtgcagaaggtc

SEQ ID NO: 29478 - RNA, 27 nt, synthetic construct
  misc_feature 1..27: note = Hermansky-Pudlak syndrome 5 protein (446-454)
  source 1..27: mol_type = other RNA
atcctggacagcggcatctaccgcatc

SEQ ID NO: 29479 - RNA, 30 nt, synthetic construct
  misc_feature 1..30: note = Cofilin-1 (48-57)
  source 1..30: mol_type = other RNA
atcctggaggagggcaaggagatcctcgtg

SEQ ID NO: 29480 - RNA, 27 nt, synthetic construct
  misc_feature 1..27: note = Heat shock protein HSP 90-alpha (394-402)
  source 1..27: mol_type = other RNA
atcctggagaagaaggtggagaaggtc

SEQ ID NO: 29481 - RNA, 27 nt, synthetic construct
  misc_feature 1..27: note = Guanine nucleotide-binding protein subunit beta-5 (320-328)
  source 1..27: mol_type = other RNA
atcctgttcggccacgagaaccgcgtg

SEQ ID NO: 29482 - RNA, 27 nt, synthetic construct
  misc_feature 1..27: note = Cytosolic phospholipase A2 (399-407)
  source 1..27: mol_type = other RNA
atcctgttcaaccgcgtgctcggcgtc

SEQ ID NO: 29483 - RNA, 27 nt, synthetic construct
  misc_feature 1..27: note = 60S acidic ribosomal protein P1 (15-23)
  source 1..27: mol_type = other RNA
atcctgcacgacgacgaggtgaccgtc

SEQ ID NO: 29484 - RNA, 27 nt, synthetic construct
  misc_feature 1..27: note = ATP-binding cassette sub-family B member 7, mitochondrial (22-30)
  source 1..27: mol_type = other RNA
atcctgatccgccccctcgtgagcgtc

SEQ ID NO: 29485 - RNA, 33 nt, synthetic construct
  misc_feature 1..33: note = Dual specificity mitogen-activated protein kinase kinase 7 (249-259)
  source 1..33: mol_type = other RNA
atcctgctcgacgagcgcggccagatcaagctg

SEQ ID NO: 29486 - RNA, 30 nt, synthetic construct
  misc_feature 1..30: note = Lon protease homolog 2, peroxisomal (293-302)
  source 1..30: mol_type = other RNA
atcctgctcgacaacgaccactacgccatg

SEQ ID NO: 29487 - RNA, 27 nt, synthetic construct
  misc_feature 1..27: note = Protein virilizer homolog (532-540)
  source 1..27: mol_type = other RNA
atcctgctcgaccagaccgtgcgcgtc

SEQ ID NO: 29488 - RNA, 27 nt, synthetic construct
  misc_feature 1..27: note = Histone-lysine N-methyltransferase SETD1A (58-66)
  source 1..27: mol_type = other RNA
atcctgctcgagcacaactacgccctg

SEQ ID NO: 29489 - RNA, 33 nt, synthetic construct
  misc_feature 1..33: note = Beta-adrenergic receptor kinase 1 (32-42)
  source 1..33: mol_type = other RNA
atcctgctccccgagccgagcatccgctccgtg

SEQ ID NO: 29490 - RNA, 27 nt, synthetic construct
  misc_feature 1..27: note = Endosomal/lysomomal potassium channel TMEM175 (218-226)
  source 1..27: mol_type = other RNA
atcctgctcccctacgtgagcaaggtc

SEQ ID NO: 29491 - RNA, 33 nt, synthetic construct
  misc_feature 1..33: note = Serine/threonine-protein kinase TAO2 (157-167)
  source 1..33: mol_type = other RNA
atcctgctcagcgagcccggcctggtgaagctg

SEQ ID NO: 29492 - RNA, 33 nt, synthetic construct
  misc_feature 1..33: note = 60S ribosomal protein L19 (118-128)
  source 1..33: mol_type = other RNA
atcctgatggagcacatccacaagctcaaggcc

SEQ ID NO: 29493 - RNA, 27 nt, synthetic construct
  misc_feature 1..27: note = Pre-mRNA-splicing factor ATP-dependent RNA helicase DHX15 (271-279)
  source 1..27: mol_type = other RNA
atcctgatgggcgtgctcaaggaggtc

SEQ ID NO: 29494 - RNA, 27 nt, synthetic construct
  misc_feature 1..27: note = Cohesin subunit SA-2 (794-802)
  source 1..27: mol_type = other RNA
atcctgatgatcttcagccaccagatc

SEQ ID NO: 29495 - RNA, 27 nt, synthetic construct
  misc_feature 1..27: note = Epidermal growth factor receptor substrate 15 (67-75)
  source 1..27: mol_type = other RNA
atcctgaacaagcaggagttcttcgtg

SEQ ID NO: 29496 - RNA, 27 nt, synthetic construct
  misc_feature 1..27: note = Cell division control protein 6 homolog (354-362)
  source 1..27: mol_type = other RNA
atcctgcaggaccgcctcaaccaggtg

SEQ ID NO: 29497 - RNA, 27 nt, synthetic construct
  misc_feature 1..27: note = AT-rich interactive domain-containing protein 4B (796-804)
  source 1..27: mol_type = other RNA
atcctgcaggagaagctccaggagatc

SEQ ID NO: 29498 - RNA, 27 nt, synthetic construct
  misc_feature 1..27: note = Transcription activator BRG1 (366-374)
  source 1..27: mol_type = other RNA
atcctgcaggagcgcgagtaccggctc

SEQ ID NO: 29499 - RNA, 27 nt, synthetic construct
  misc_feature 1..27: note = Putative eukaryotic translation initiation factor 2 subunit 3-like protein (187-195)
  source 1..27: mol_type = other RNA
atcctgcagaacaagatcgacctcgtg

SEQ ID NO: 29500 - RNA, 27 nt, synthetic construct
  misc_feature 1..27: note = Ankyrin repeat and SOCS box protein 3 (486-494)
  source 1..27: mol_type = other RNA
atcctgcagcagcacatcgccaccgtg

SEQ ID NO: 29501 - RNA, 27 nt, synthetic construct
  misc_feature 1..27: note = Poly (ADP-ribose) polymerase 1 (712-720)
  source 1..27: mol_type = other RNA
atcctgagcgaggtgcagcaggccgtc

SEQ ID NO: 29502 - RNA, 27 nt, synthetic construct
  misc_feature 1..27: note = Ribonucleases P/MRP protein subunit POP1 (442-450)
  source 1..27: mol_type = other RNA
atcctgaccgaggccatcaaggccgcg

SEQ ID NO: 29503 - RNA, 27 nt, synthetic construct
  misc_feature 1..27: note = Translin-associated protein X (86-94)
  source 1..27: mol_type = other RNA
atcctgaccgagagcgagatcaagctc

SEQ ID NO: 29504 - RNA, 27 nt, synthetic construct
  misc_feature 1..27: note = Phosphotriesterase-related protein (316-324)
  source 1..27: mol_type = other RNA
atcctgaccaacgtggtccccaagatg

SEQ ID NO: 29505 - RNA, 27 nt, synthetic construct
  misc_feature 1..27: note = T-complex protein 1 subunit eta (186-194)
  source 1..27: mol_type = other RNA
atcctgtacgacaagctcgagaagatc

SEQ ID NO: 29506 - RNA, 27 nt, synthetic construct
  misc_feature 1..27: note = Methionine adenosyltransferase 2 subunit beta (184-192)
  source 1..27: mol_type = other RNA
atcctgtacggcgaggtggagaagctc

SEQ ID NO: 29507 - RNA, 27 nt, synthetic construct
  misc_feature 1..27: note = Chromosome transmission fidelity protein 8 homolog (58-66)
  source 1..27: mol_type = other RNA
atcctgtacggcaagatcatccacctc

SEQ ID NO: 29508 - RNA, 33 nt, synthetic construct
  misc_feature 1..33: note = Catenin alpha-1 (549-559)
  source 1..33: mol_type = other RNA
atcatggcccagctgccccaggagcagaaggcc

SEQ ID NO: 29509 - RNA, 27 nt, synthetic construct
  misc_feature 1..27: note = Ras GTPase-activating-like protein IQGAP1 (1079-1087)
  source 1..27: mol_type = other RNA
atcatggacgacaagagcctgaacatc

SEQ ID NO: 29510 - RNA, 27 nt, synthetic construct
  misc_feature 1..27: note = Staphylococcal nuclease domain-containing protein 1 (665-673)
  source 1..27: mol_type = other RNA
atcaccgacgacctgcacttctacgtg

SEQ ID NO: 29511 - RNA, 27 nt, synthetic construct
  misc_feature 1..27: note = Splicing factor 3A subunit 1 (52-60)
  source 1..27: mol_type = other RNA
atcgtggacaagaccgccagcttcgtc

SEQ ID NO: 29512 - RNA, 33 nt, synthetic construct
  misc_feature 1..33: note = Probable JmjC domain-containing histone demethylation protein 2C (2276-2286)
  source 1..33: mol_type = other RNA
atcgtgctgcccgccggcgccctccaccaggtc

SEQ ID NO: 29513 - RNA, 27 nt, synthetic construct
  misc_feature 1..27: note = Aurora kinase B (242-250)
  source 1..27: mol_type = other RNA
aagatcgccgacttcggctggagcgtg

SEQ ID NO: 29514 - RNA, 30 nt, synthetic construct
  misc_feature 1..30: note = DNA topoisomerase 2-alpha (83-92)
  source 1..30: mol_type = other RNA
aagatcttcgacgagatcctggtgaacgcc

SEQ ID NO: 29515 - RNA, 30 nt, synthetic construct
  misc_feature 1..30: note = Vam6/Vps39-like protein (471-480)
  source 1..30: mol_type = other RNA
aagatcttcaccgaggacctgcccgaggtg

SEQ ID NO: 29516 - RNA, 30 nt, synthetic construct
  misc_feature 1..30: note = B-Raf serine/threonine-protein (638-647)
  source 1..30: mol_type = other RNA
aagatcggcgacttcgggctggccaccgtg

SEQ ID NO: 29517 - RNA, 27 nt, synthetic construct
  misc_feature 1..27: note = Kelch-like protein 13 (131-139)
  source 1..27: mol_type = other RNA
aagatcatcgacttcatctacaccgcc

SEQ ID NO: 29518 - RNA, 27 nt, synthetic construct
  misc_feature 1..27: note = Interleukin-6 receptor subunit beta (362-370)
  source 1..27: mol_type = other RNA
aagatcctggactacgaggtgaccctc

SEQ ID NO: 29519 - RNA, 27 nt, synthetic construct
  misc_feature 1..27: note = Ankyrin repeat domain-containing protein 17 (748-756)
  source 1..27: mol_type = other RNA
aagatcctggaggagctccagaaggtg

SEQ ID NO: 29520 - RNA, 27 nt, synthetic construct
  misc_feature 1..27: note = Protein IWS1 homolog (639-647)
  source 1..27: mol_type = other RNA
aagatcctgcaggagctccccagcgtg

SEQ ID NO: 29521 - RNA, 27 nt, synthetic construct
  misc_feature 1..27: note = G2/M phase-specific E3 ubiquitin-protein ligase (105-113)
  source 1..27: mol_type = other RNA
aagatcctgagcgagctcttcaccgtg

SEQ ID NO: 29522 - RNA, 27 nt, synthetic construct
  misc_feature 1..27: note = Adenomatous polyposis coli protein (1645-1653)
  source 1..27: mol_type = other RNA
aagatcatggaccaggtgcagcaggcc

SEQ ID NO: 29523 - RNA, 33 nt, synthetic construct
  misc_feature 1..33: note = Flotillin-2 (57-67)
  source 1..33: mol_type = other RNA
aagatcatgaccgagaaggagctgctcgccgtg

SEQ ID NO: 29524 - RNA, 27 nt, synthetic construct
  misc_feature 1..27: note = Calpastatin (416-424)
  source 1..27: mol_type = other RNA
aagctggccgccgcgatcagcgaggtg

SEQ ID NO: 29525 - RNA, 33 nt, synthetic construct
  misc_feature 1..33: note = Transitional endoplasmic reticulum ATPase (17-27)
  source 1..33: mol_type = other RNA
aagctggccgacgacgtggacctcgagcaggtc

SEQ ID NO: 29526 - RNA, 30 nt, synthetic construct
  misc_feature 1..30: note = Cyclin-dependent kinase 9 (164-173)
  source 1..30: mol_type = other RNA
aagctggccgacttcggcctcgcccgcgcg

SEQ ID NO: 29527 - RNA, 30 nt, synthetic construct
  misc_feature 1..30: note = E3 ubiquitin-protein ligase listerin (404-413)
  source 1..30: mol_type = other RNA
aagctggccgacatcagcatcaactacgtg

SEQ ID NO: 29528 - RNA, 27 nt, synthetic construct
  misc_feature 1..27: note = Guanosine-3',5'-bis(diphosphate) 3'-pyrophosphohydrolase MESH1 (119-127)
  source 1..27: mol_type = other RNA
aagctggccgacaagctctacaacctg

SEQ ID NO: 29529 - RNA, 27 nt, synthetic construct
  misc_feature 1..27: note = Protein PRR14L (1063-1071)
  source 1..27: mol_type = other RNA
aagctggccgagggcgtgctcgacgtc

SEQ ID NO: 29530 - RNA, 27 nt, synthetic construct
  misc_feature 1..27: note = MAP kinase-activated protein kinase 5 (452-460)
  source 1..27: mol_type = other RNA
aagctggccgagatcgtgaagcaggtc

SEQ ID NO: 29531 - RNA, 27 nt, synthetic construct
  misc_feature 1..27: note = Nck-associated protein 1 (12-20)
  source 1..27: mol_type = other RNA
aagctggccgagaagctcaccatcctg

SEQ ID NO: 29532 - RNA, 30 nt, synthetic construct
  misc_feature 1..30: note = Nuclear poreoprotein p62 (435-444)
  source 1..30: mol_type = other RNA
aagctggccgagaacatcgacgcccagctc

SEQ ID NO: 29533 - RNA, 27 nt, synthetic construct
  misc_feature 1..27: note = FACT complex subunit SPT16 (216-224)
  source 1..27: mol_type = other RNA
aagctggccgagagcgtggagaaggcc

SEQ ID NO: 29534 - RNA, 27 nt, synthetic construct
  misc_feature 1..27: note = Transcription factor BTF3 (54-62)
  source 1..27: mol_type = other RNA
aagctggccaagctccaggcccaggtg

SEQ ID NO: 29535 - RNA, 27 nt, synthetic construct
  misc_feature 1..27: note = DNA excision repair protein ERCC-6-like (655-663)
  source 1..27: mol_type = other RNA
aagctggacgagcacatcgcctacctc

SEQ ID NO: 29536 - RNA, 33 nt, synthetic construct
  misc_feature 1..33: note = DNA topoisomerase 2-alpha (278-288)
  source 1..33: mol_type = other RNA
aagctggacgagaccggcaacagcctcaaggtg

SEQ ID NO: 29537 - RNA, 33 nt, synthetic construct
  misc_feature 1..33: note = Kelch repeat and BTB domain-containing protein 4 (508-518)
  source 1..33: mol_type = other RNA
aagctggaccccgccaccagcgccgtgaccgtc

SEQ ID NO: 29538 - RNA, 27 nt, synthetic construct
  misc_feature 1..27: note = N-acetylneuraminate lyase (77-85)
  source 1..27: mol_type = other RNA
aagctggaccaggtgatcatccacgtc

SEQ ID NO: 29539 - RNA, 27 nt, synthetic construct
  misc_feature 1..27: note = DENN domain-containing protein 4C (705-713)
  source 1..27: mol_type = other RNA
aagctgttcgaccgcccccaggagctc

SEQ ID NO: 29540 - RNA, 33 nt, synthetic construct
  misc_feature 1..33: note = DENN domain-containing protein 4C (705-715)
  source 1..33: mol_type = other RNA
aagctgttcgaccgcccccaggagctcaagctg

SEQ ID NO: 29541 - RNA, 27 nt, synthetic construct
  misc_feature 1..27: note = Fatty acyl-CoA reductase 2 (63-71)
  source 1..27: mol_type = other RNA
aagctgttcgagaaggtgaaggaggtc

SEQ ID NO: 29542 - RNA, 27 nt, synthetic construct
  misc_feature 1..27: note = Putative homeodomain transcription factor 2 (586-594)
  source 1..27: mol_type = other RNA
aagctgttcggccacctcaccagcgcc

SEQ ID NO: 29543 - RNA, 27 nt, synthetic construct
  misc_feature 1..27: note = 28S ribosomal protein S33, mitochondrial (35-43)
  source 1..27: mol_type = other RNA
aagctgttcagcgagctccccctggcc

SEQ ID NO: 29544 - RNA, 27 nt, synthetic construct
  misc_feature 1..27: note = Hom s 1 (129-137)
  source 1..27: mol_type = other RNA
aagctgggcctcaagcccctggaggtg

SEQ ID NO: 29545 - RNA, 27 nt, synthetic construct
  misc_feature 1..27: note = AP-1 complex subunit beta-1 (147-155)
  source 1..27: mol_type = other RNA
aagctgcacgacatcaacgcccagctc

SEQ ID NO: 29546 - RNA, 30 nt, synthetic construct
  misc_feature 1..30: note = Guanine nucleotide-binding protein subunit beta-5 (32-41)
  source 1..30: mol_type = other RNA
aagctgcacgacgtggagctccaccaggtc

SEQ ID NO: 29547 - RNA, 27 nt, synthetic construct
  misc_feature 1..27: note = RNA-binding protein 4B (59-67)
  source 1..27: mol_type = other RNA
aagctgcacggcgtgaacatcaacgtc

SEQ ID NO: 29548 - RNA, 30 nt, synthetic construct
  misc_feature 1..30: note = Zinc finger protein 143 (59-68)
  source 1..30: mol_type = other RNA
aagctgatcgacggccaggtgatccagctc

SEQ ID NO: 29549 - RNA, 27 nt, synthetic construct
  misc_feature 1..27: note = cAMP-responsive element modulator (103-111)
  source 1..27: mol_type = other RNA
aagctgatcgaggagctcgagaccctg

SEQ ID NO: 29550 - RNA, 30 nt, synthetic construct
  misc_feature 1..30: note = Elongation factor 2 (314-323)
  source 1..30: mol_type = other RNA
aagctgatcgagaagctcgacatcaagctg

SEQ ID NO: 29551 - RNA, 27 nt, synthetic construct
  misc_feature 1..27: note = WD repeat-containing protein 43 (416-424)
  source 1..27: mol_type = other RNA
aagctgatcctcctgatcacccaggtg

SEQ ID NO: 29552 - RNA, 27 nt, synthetic construct
  misc_feature 1..27: note = CTD small phosphatase-like protein 2 (434-442)
  source 1..27: mol_type = other RNA
aagctgatccccttcctcgagaagctg

SEQ ID NO: 29553 - RNA, 27 nt, synthetic construct
  misc_feature 1..27: note = Ras-related GTP-binding protein C (235-243)
  source 1..27: mol_type = other RNA
aagctgatcccccagctcccgaccctg

SEQ ID NO: 29554 - RNA, 27 nt, synthetic construct
  misc_feature 1..27: note = DNA repair and recombination protein RAD54B (649-657)
  source 1..27: mol_type = other RNA
aagctgctcgccgtgatccacgagctg

SEQ ID NO: 29555 - RNA, 39 nt, synthetic construct
  misc_feature 1..39: note = HIV Tat-specific factor 1 (199-211)
  source 1..39: mol_type = other RNA
aagctgctcgacgaggacgagatccgcggctacaagctg

SEQ ID NO: 29556 - RNA, 33 nt, synthetic construct
  misc_feature 1..33: note = Negative elongation factor A (255-265)
  source 1..33: mol_type = other RNA
aagctgctcgacatcagcgagctggacatggtg

SEQ ID NO: 29557 - RNA, 27 nt, synthetic construct
  misc_feature 1..27: note = Integrator complex subunit 4 (341-349)
  source 1..27: mol_type = other RNA
aagctgctcgacctgatgccccgcctg

SEQ ID NO: 29558 - RNA, 33 nt, synthetic construct
  misc_feature 1..33: note = Rho-associated protein kinase 1 (1093-1103)
  source 1..33: mol_type = other RNA
aagctgctcgacctgagcgactccaccagcgtg

SEQ ID NO: 29559 - RNA, 27 nt, synthetic construct
  misc_feature 1..27: note = E3 ISG15-protein ligase HERC5 (795-803)
  source 1..27: mol_type = other RNA
aagctgctcgaccagatgcccagcctg

SEQ ID NO: 29560 - RNA, 27 nt, synthetic construct
  misc_feature 1..27: note = T-complex protein 1 subunit eta (55-63)
  source 1..27: mol_type = other RNA
aagctgctcgacgtggtccaccccgcc

SEQ ID NO: 29561 - RNA, 27 nt, synthetic construct
  misc_feature 1..27: note = Renal cancer differentiation gene 1 protein (69-77)
  source 1..27: mol_type = other RNA
aagctgctcgaggccaccagcgccgtg

SEQ ID NO: 29562 - RNA, 30 nt, synthetic construct
  misc_feature 1..30: note = E3 ubiquitin-protein ligase UBR4 (335-344)
  source 1..30: mol_type = other RNA
aagctgctcgaggagcagggcatcttcctg

SEQ ID NO: 29563 - RNA, 36 nt, synthetic construct
  misc_feature 1..36: note = Prolyl 4-hydroxylase subunit alpha-1 (230-241)
  source 1..36: mol_type = other RNA
aagctgctcgagctggaccccgagcaccagcgcgcc

SEQ ID NO: 29564 - RNA, 30 nt, synthetic construct
  misc_feature 1..30: note = Archaemetzincin-2 (125-134)
  source 1..30: mol_type = other RNA
aagctgctcgagcccgtgccggtcagcgtg

SEQ ID NO: 29565 - RNA, 27 nt, synthetic construct
  misc_feature 1..27: note = EH domain-binding protein 1 (684-692)
  source 1..27: mol_type = other RNA
aagctgctcgaggtgcagccccaggtc

SEQ ID NO: 29566 - RNA, 27 nt, synthetic construct
  misc_feature 1..27: note = Hyaluronan mediated motility receptor (233-241)
  source 1..27: mol_type = other RNA
aagctgctcgagtacatcgaggagatc

SEQ ID NO: 29567 - RNA, 27 nt, synthetic construct
  misc_feature 1..27: note = Conserved oligomeric Golgi complex subunit 5 (336-344)
  source 1..27: mol_type = other RNA
aagctgatggaccacatctacgccgtg

SEQ ID NO: 29568 - RNA, 30 nt, synthetic construct
  misc_feature 1..30: note = Proliferating cell nuclear antigen (117-126)
  source 1..30: mol_type = other RNA
aagctgatggacctcgacgtggagcagctg

SEQ ID NO: 29569 - RNA, 27 nt, synthetic construct
  misc_feature 1..27: note Dolichyl-diphosphooligosaccharide-proteinosyltransferase subunit STT3A (289-297)
  source 1..27: mol_type = other RNA
aagctgaacccccagcagttcgaggtg

SEQ ID NO: 29570 - RNA, 27 nt, synthetic construct
  misc_feature 1..27: note = Ribosomal L1 domain-containing protein 1 (242-250)
  source 1..27: mol_type = other RNA
aagctgcccgagaagtgggagagcgtg

SEQ ID NO: 29571 - RNA, 27 nt, synthetic construct
  misc_feature 1..27: note = Regulator of G-protein signaling 10 (129-137)
  source 1..27: mol_type = other RNA
aagctgcaggaccagatcttcaacctc

SEQ ID NO: 29572 - RNA, 27 nt, synthetic construct
  misc_feature 1..27: note = Nesprin-2 (2292-2300)
  source 1..27: mol_type = other RNA
aagctgcaggagctcgagaaccgcctg

SEQ ID NO: 29573 - RNA, 27 nt, synthetic construct
  misc_feature 1..27: note = Signal transducer and activator of transcription 1-alpha/beta (350-358)
  source 1..27: mol_type = other RNA
aagctgcaggagctcaactacaacctg

SEQ ID NO: 29574 - RNA, 27 nt, synthetic construct
  misc_feature 1..27: note = Protein Jade-2 (282-290)
  source 1..27: mol_type = other RNA
aagctgcaggagcagatcttccacctc

SEQ ID NO: 29575 - RNA, 27 nt, synthetic construct
  misc_feature 1..27: note = DNA-directed RNA polymerase II subunit RPB3 (255-263)
  source 1..27: mol_type = other RNA
aagctgagcgacctccagacccagctg

SEQ ID NO: 29576 - RNA, 27 nt, synthetic construct
  misc_feature 1..27: note = Probable tRNA N6-adenosine threonylcarbamoyltransferase (189-197)
  source 1..27: mol_type = other RNA
aagctggtggagctcccctacaccgtc

SEQ ID NO: 29577 - RNA, 27 nt, synthetic construct
  misc_feature 1..27: note = Electron transfer flavoprotein subunit beta (147-155)
  source 1..27: mol_type = other RNA
aagctggtgaaggaggtcatcgccgtg

SEQ ID NO: 29578 - RNA, 27 nt, synthetic construct
  misc_feature 1..27: note = Protein Mis18-alpha (218-226)
  source 1..27: mol_type = other RNA
aagctgtgggaggccgagagcaagctc

SEQ ID NO: 29579 - RNA, 27 nt, synthetic construct
  misc_feature 1..27: note = Phosphatidylinositol 4-kinase beta (788-796)
  source 1..27: mol_type = other RNA
aagctgtacgacggcttccagtacctc

SEQ ID NO: 29580 - RNA, 27 nt, synthetic construct
  misc_feature 1..27: note = Cytochrome P450 20A1 (274-282)
  source 1..27: mol_type = other RNA
aagctgtacgaggagatcaaccaggtg

SEQ ID NO: 29581 - RNA, 27 nt, synthetic construct
  misc_feature 1..27: note = Delta(24)-sterol reductase (287-295)
  source 1..27: mol_type = other RNA
aagctgtacgagcagcaccacgtggtc

SEQ ID NO: 29582 - RNA, 30 nt, synthetic construct
  misc_feature 1..30: note = Ectopic P granules protein 5 homolog (225-234)
  source 1..30: mol_type = other RNA
aagctgtacccccagctcccggccgagatc

SEQ ID NO: 29583 - RNA, 27 nt, synthetic construct
  misc_feature 1..27: note = CCAAT/enhancer-binding protein zeta (211-219)
  source 1..27: mol_type = other RNA
aagctgtaccagcacgagatcaacctc

SEQ ID NO: 29584 - RNA, 39 nt, synthetic construct
  misc_feature 1..39: note = Stathmin (95-107)
  source 1..39: mol_type = other RNA
aagatggccgaggagaagctgacccacaagatggaggcc

SEQ ID NO: 29585 - RNA, 27 nt, synthetic construct
  misc_feature 1..27: note = MORF4 family-associated protein 1-like 1 (109-117)
  source 1..27: mol_type = other RNA
aagatggccgagatgctggtggagctc

SEQ ID NO: 29586 - RNA, 27 nt, synthetic construct
  misc_feature 1..27: note = ATP-binding cassette sub-family F member 3 (459-467)
  source 1..27: mol_type = other RNA
aagatgctggagaagctccccgagctg

SEQ ID NO: 29587 - RNA, 27 nt, synthetic construct
  misc_feature 1..27: note = Nodal modulator 3 (261-269)
  source 1..27: mol_type = other RNA
aagatgatggacgtgaccgtcaccatc

SEQ ID NO: 29588 - RNA, 27 nt, synthetic construct
  misc_feature 1..27: note = Proteasome subunit beta type-2 (37-45)
  source 1..27: mol_type = other RNA
aagatgagcgagaagatcctgctcctg

SEQ ID NO: 29589 - RNA, 30 nt, synthetic construct
  misc_feature 1..30: note = cAMP-dependent protein kinase type I-beta regulatory subunit (244-253)
  source 1..30: mol_type = other RNA
aagatgtacgaggagttcctgagcaaggtg

SEQ ID NO: 29590 - RNA, 27 nt, synthetic construct
  misc_feature 1..27: note = Rap1 GTPase-GDP dissociation stimulator 1 (67-75)
  source 1..27: mol_type = other RNA
aaggtggccaacatcatcgccgaggtc

SEQ ID NO: 29591 - RNA, 27 nt, synthetic construct
  misc_feature 1..27: note = Myosin light polypeptide 6 (69-77)
  source 1..27: mol_type = other RNA
aaggtgctggacttcgagcacttcctc

SEQ ID NO: 29592 - RNA, 27 nt, synthetic construct
  misc_feature 1..27: note = Probable E3 ubiquitin-protein ligase HERC4 (595-603)
  source 1..27: mol_type = other RNA
aaggtgctggagatcctccaccgcgtc

SEQ ID NO: 29593 - RNA, 33 nt, synthetic construct
  misc_feature 1..33: note = Protein SON (298-308)
  source 1..33: mol_type = other RNA
aaggtgctggagcccagcgagaccctcgtcgtg

SEQ ID NO: 29594 - RNA, 27 nt, synthetic construct
  misc_feature 1..27: note = Proteasome activator complex subunit 2 (145-153)
  source 1..27: mol_type = other RNA
aaggtgctggagcgcgtcaacgccgtg

SEQ ID NO: 29595 - RNA, 27 nt, synthetic construct
  misc_feature 1..27: note = CCR4-NOT transcription complex subunit 1 (128-136)
  source 1..27: mol_type = other RNA
aaggtgctgggcatcgtcgtgggggtg

SEQ ID NO: 29596 - RNA, 27 nt, synthetic construct
  misc_feature 1..27: note = Amyloid beta A4 protein (9-17)
  source 1..27: mol_type = other RNA
ctgctcgccgcctggaccgcgcgcgcc

SEQ ID NO: 29597 - RNA, 27 nt, synthetic construct
  misc_feature 1..27: note = DNA fragmentation factor subunit beta (69-77)
  source 1..27: mol_type = other RNA
ctgctcgccgacctgctgcacaacgtg

SEQ ID NO: 29598 - RNA, 27 nt, synthetic construct
  misc_feature 1..27: note = CREB-binding protein (653-661)
  source 1..27: mol_type = other RNA
ctgctcgccgagaagatctacaagatc

SEQ ID NO: 29599 - RNA, 27 nt, synthetic construct
  misc_feature 1..27: note = Nuclear autoantigenic sperm protein (243-251)
  source 1..27: mol_type = other RNA
ctgctcgccgagacccactaccagctg

SEQ ID NO: 29600 - RNA, 33 nt, synthetic construct
  misc_feature 1..33: note = SCAN domain-containing protein 1 (194-204)
  source 1..33: mol_type = other RNA
ctgctcgccatcctgcccgaggccgcgcgcgcc

SEQ ID NO: 29601 - RNA, 27 nt, synthetic construct
  misc_feature 1..27: note = Cyclin-dependent kinase inhibitor 1C (103-111)
  source 1..27: mol_type = other RNA
ctgctcgccccccgcccggtggccgtc

SEQ ID NO: 29602 - RNA, 27 nt, synthetic construct
  misc_feature 1..27: note = Protein quaking (40-48)
  source 1..27: mol_type = other RNA
ctgctcgacgaggagatcagccgcgtg

SEQ ID NO: 29603 - RNA, 24 nt, synthetic construct
  misc_feature 1..24: note = T-complex protein 1 subunit beta (219-226)
  source 1..24: mol_type = other RNA
ctgctcgacaagaagatcggcgtg

SEQ ID NO: 29604 - RNA, 33 nt, synthetic construct
  misc_feature 1..33: note = ERI1 exoribonuclease 3 (155-165)
  source 1..33: mol_type = other RNA
ctgctcgaccccaacgtgaagagcatcttcgtc

SEQ ID NO: 29605 - RNA, 27 nt, synthetic construct
  misc_feature 1..27: note = Talin-1 (1761-1769)
  source 1..27: mol_type = other RNA
ctgctcgaccagaccaagaccctggcc

SEQ ID NO: 29606 - RNA, 27 nt, synthetic construct
  misc_feature 1..27: note = Cyclin-I (72-80)
  source 1..27: mol_type = other RNA
ctgctcgaccgcttcctggccaccgtg

SEQ ID NO: 29607 - RNA, 27 nt, synthetic construct
  misc_feature 1..27: note = Tight junction protein ZO-2 (821-829)
  source 1..27: mol_type = other RNA
ctgctcgacgtgacccccaaggccgtc

SEQ ID NO: 29608 - RNA, 27 nt, synthetic construct
  misc_feature 1..27: note = Exocyst complex component 4 (7-15)
  source 1..27: mol_type = other RNA
ctgctcttcgacaagttcaacgccgtg

SEQ ID NO: 29609 - RNA, 27 nt, synthetic construct
  misc_feature 1..27: note = Heterogeneous nuclear ribonucleoprotein M (229-237)
  source 1..27: mol_type = other RNA
ctgctcttcgaccgccccatgcacgtg

SEQ ID NO: 29610 - RNA, 30 nt, synthetic construct
  misc_feature 1..30: note = DNA-directed RNA polymerase II subunit RPB11-b1 (11-20)
  source 1..30: mol_type = other RNA
ctgctcttcgagggcgagaagatcaccatc

SEQ ID NO: 29611 - RNA, 27 nt, synthetic construct
  misc_feature 1..27: note = Conserved oligomeric Golgi complex subunit 4 (51-59)
  source 1..27: mol_type = other RNA
ctgctcttcgagggcatcgcccgcatc

SEQ ID NO: 29612 - RNA, 27 nt, synthetic construct
  misc_feature 1..27: note = Cip1-interacting zinc finger protein (83-91)
  source 1..27: mol_type = other RNA
ctgctcggccccccgcccgtgggggtc

SEQ ID NO: 29613 - RNA, 24 nt, synthetic construct
  misc_feature 1..24: note = Neuferricin (59-66)
  source 1..24: mol_type = other RNA
ctgctcggccgcgtgtacgacgtc

SEQ ID NO: 29614 - RNA, 33 nt, synthetic construct
  misc_feature 1..33: note = Cyclin-dependent kinase 1 (134-144)
  source 1..33: mol_type = other RNA
ctgctcatcgacgacaagggcaccatcaagctg

SEQ ID NO: 29615 - RNA, 27 nt, synthetic construct
  misc_feature 1..27: note = Nuclear pore complex protein Nup205 (248-256)
  source 1..27: mol_type = other RNA
ctgctcatcggccacctggagcgcgtg

SEQ ID NO: 29616 - RNA, 27 nt, synthetic construct
  misc_feature 1..27: note = RCC1 and BTB domain-containing protein 1 (125-133)
  source 1..27: mol_type = other RNA
ctgctcatcaagcaggtggtcgaggtg

SEQ ID NO: 29617 - RNA, 36 nt, synthetic construct
  misc_feature 1..36: note = Histone H2B type 2-F (101-112)
  source 1..36: mol_type = other RNA
ctgctcctgcccggcgagctggccaagcacgccgtg

SEQ ID NO: 29618 - RNA, 27 nt, synthetic construct
  misc_feature 1..27: note = Eukaryotic translation initiation factor 3 subunit H (242-250)
  source 1..27: mol_type = other RNA
ctgctcatggaccgcgtggacgagatg

SEQ ID NO: 29619 - RNA, 27 nt, synthetic construct
  misc_feature 1..27: note = CDK5 regulatory subunit-associated protein 2 (1394-1402)
  source 1..27: mol_type = other RNA
ctgctcatggagcacatccaggagatc

SEQ ID NO: 29620 - RNA, 27 nt, synthetic construct
  misc_feature 1..27: note = Zinc finger SWIM domain-containing protein 1 (234-242)
  source 1..27: mol_type = other RNA
ctgctcaacgaccgcatctggctggcc

SEQ ID NO: 29621 - RNA, 27 nt, synthetic construct
  misc_feature 1..27: note = DNA-directed RNA polymerase II subunit RPB4 (32-40)
  source 1..27: mol_type = other RNA
ctgctcaacagcgaggtgcacatgctg

SEQ ID NO: 29622 - RNA, 27 nt, synthetic construct
  misc_feature 1..27: note = Rho guanine nucleotide exchange factor 2 (627-635)
  source 1..27: mol_type = other RNA
ctgctccaggacgccatccgcgaggtg

SEQ ID NO: 29623 - RNA, 27 nt, synthetic construct
  misc_feature 1..27: note = Vam6/Vps39-like protein (218-226)
  source 1..27: mol_type = other RNA
ctgctccaggacaagcagttcgagctg

SEQ ID NO: 29624 - RNA, 27 nt, synthetic construct
  misc_feature 1..27: note = E3 ubiquitin-protein ligase TRIM37 (221-229)
  source 1..27: mol_type = other RNA
ctgctccaggaggtggagcaccagctg

SEQ ID NO: 29625 - RNA, 27 nt, synthetic construct
  misc_feature 1..27: note = DEP domain-containing protein 1A (20-28)
  source 1..27: mol_type = other RNA
ctgctccagccccacctggagcgcgtg

SEQ ID NO: 29626 - RNA, 27 nt, synthetic construct
  misc_feature 1..27: note = Small nuclear ribonucleoprotein Sm D1 (38-46)
  source 1..27: mol_type = other RNA
ctgctcgtggacgtcgagcccaaggtg

SEQ ID NO: 29627 - RNA, 30 nt, synthetic construct
  misc_feature 1..30: note = Lipopolysaccharide-responsive and beige-like anchor protein (407-416)
  source 1..30: mol_type = other RNA
ctgctctacgacggcaagctgagctccgcc

SEQ ID NO: 29628 - RNA, 33 nt, synthetic construct
  misc_feature 1..33: note = Electron transfer flavoprotein subunit alpha, mitochondrial (184-194)
  source 1..33: mol_type = other RNA
ctgctctacgacctggccgaccagctgcacgcc

SEQ ID NO: 29629 - RNA, 27 nt, synthetic construct
  misc_feature 1..27: note = Solute carrier family 43 member 3 (191-199)
  source 1..27: mol_type = other RNA
ctgctctacgagaagggcatcagcctg

SEQ ID NO: 29630 - RNA, 30 nt, synthetic construct
  misc_feature 1..30: note = Integrin alpha-4 (42-51)
  source 1..30: mol_type = other RNA
ctgctctaccagggcccccacaacaccctg

SEQ ID NO: 29631 - RNA, 30 nt, synthetic construct
  misc_feature 1..30: note = Uridine-cytidine kinase-like 1 (470-479)
  source 1..30: mol_type = other RNA
ctgatggccgagatgggcgtgcacagcgtc

SEQ ID NO: 29632 - RNA, 27 nt, synthetic construct
  misc_feature 1..27: note = KH domain-containing, RNA-binding, signal transduction-associated protein 1 (243-251)
  source 1..27: mol_type = other RNA
ctgatggcccacgccatggaggaggtg

SEQ ID NO: 29633 - RNA, 27 nt, synthetic construct
  misc_feature 1..27: note = Rho guanine nucleotide exchange factor 18 (267-275)
  source 1..27: mol_type = other RNA
ctgatgcagaccgaggtgcaccacgtc

SEQ ID NO: 29634 - RNA, 27 nt, synthetic construct
  misc_feature 1..27: note = Steroid receptor RNA activator 1 (183-191)
  source 1..27: mol_type = other RNA
ctgatggtggaccacgtcaccgaggtg

SEQ ID NO: 29635 - RNA, 30 nt, synthetic construct
  misc_feature 1..30: note = Cytochrome c oxidase subunit 7C, mitochondrial (54-63)
  source 1..30: mol_type = other RNA
ctggtggtccgccaccagctcctgaagacc

SEQ ID NO: 29636 - RNA, 27 nt, synthetic construct
  misc_feature 1..27: note = EH domain-containing protein 1 (385-393)
  source 1..27: mol_type = other RNA
atgctggccaacgacatcgcccgcctc

SEQ ID NO: 29637 - RNA, 27 nt, synthetic construct
  misc_feature 1..27: note = Ubiquitin carboxyl-terminal hydrolase 11 (568-576)
  source 1..27: mol_type = other RNA
atgctgttcggccaccccctcctggtg

SEQ ID NO: 29638 - RNA, 27 nt, synthetic construct
  misc_feature 1..27: note = Flotillin-1 (356-364)
  source 1..27: mol_type = other RNA
atgctgctcgagaagctgccccaggtg

SEQ ID NO: 29639 - RNA, 27 nt, synthetic construct
  misc_feature 1..27: note = Breast cancer type 1 susceptibility protein (1657-1665)
  source 1..27: mol_type = other RNA
atgctgaacgagcacgacttcgaggtg

SEQ ID NO: 29640 - RNA, 27 nt, synthetic construct
  misc_feature 1..27: note = trim5alpha (75-83)
  source 1..27: mol_type = other RNA
aacatcgtggagaagctgcgcgaggtc

SEQ ID NO: 29641 - RNA, 27 nt, synthetic construct
  misc_feature 1..27: note = E3 ubiquitin-protein ligase TRIM22 (76-84)
  source 1..27: mol_type = other RNA
aacatcgtggagcgcgtcaaggaggtg

SEQ ID NO: 29642 - RNA, 27 nt, synthetic construct
  misc_feature 1..27: note = Ral GTPase-activating protein subunit beta (190-198)
  source 1..27: mol_type = other RNA
aacctggccgagaagctcatcggcgtg

SEQ ID NO: 29643 - RNA, 27 nt, synthetic construct
  misc_feature 1..27: note = F-box only protein 22 (24-32)
  source 1..27: mol_type = other RNA
aacctggccgaggtggtcgagcgcgtg

SEQ ID NO: 29644 - RNA, 27 nt, synthetic construct
  misc_feature 1..27: note = Glycerol-3-phosphate dehydrogenase, mitochondrial (146-154)
  source 1..27: mol_type = other RNA
aacctgctcgagatcgccccccacctg

SEQ ID NO: 29645 - RNA, 27 nt, synthetic construct
  misc_feature 1..27: note = Propionyl-CoA carboxylase beta chain, mitochondrial (27-35)
  source 1..27: mol_type = other RNA
aacatggtggacatcatccacagcgtc

SEQ ID NO: 29646 - RNA, 27 nt, synthetic construct
  misc_feature 1..27: note = Transcription elongation factor SPT5 (558-566)
  source 1..27: mol_type = other RNA
aacatgtacggcaaggtggtcaccgtg

SEQ ID NO: 29647 - RNA, 30 nt, synthetic construct
  misc_feature 1..30: note = Utrophin (2315-2324)
  source 1..30: mol_type = other RNA
aaccagtgggacggcacccagcacggggtg

SEQ ID NO: 29648 - RNA, 39 nt, synthetic construct
  misc_feature 1..39: note = Melanocyte protein PMEL (45-57)
  source 1..39: mol_type = other RNA
aaccgccagctgtaccccgagtggaccgaggcccagcgg

SEQ ID NO: 29649 - RNA, 27 nt, synthetic construct
  misc_feature 1..27: note = 60S ribosomal protein L35 (20-28)
  source 1..27: mol_type = other RNA
cagctggacgacctcaaggtggagctg

SEQ ID NO: 29650 - RNA, 27 nt, synthetic construct
  misc_feature 1..27: note = SNARE-associated protein Snapin (39-47)
  source 1..27: mol_type = other RNA
cagctggacagccacgtgcacgccgtc

SEQ ID NO: 29651 - RNA, 27 nt, synthetic construct
  misc_feature 1..27: note = Testis-expressed sequence 10 protein (575-583)
  source 1..27: mol_type = other RNA
cagctgatcgacatcatccacaccgcc

SEQ ID NO: 29652 - RNA, 27 nt, synthetic construct
  misc_feature 1..27: note = SEC14-like protein 1 (559-567)
  source 1..27: mol_type = other RNA
cagctgatcgacaaggtgtggcagctc

SEQ ID NO: 29653 - RNA, 27 nt, synthetic construct
  misc_feature 1..27: note = Ethylmalonyl-CoA decarboxylase (79-87)
  source 1..27: mol_type = other RNA
cagctgctcgagaaggtgatcgagctg

SEQ ID NO: 29654 - RNA, 27 nt, synthetic construct
  misc_feature 1..27: note = HEAT repeat-containing protein 2 (843-851)
  source 1..27: mol_type = other RNA
cagctgctccagcacgtgcaggccgtc

SEQ ID NO: 29655 - RNA, 27 nt, synthetic construct
  misc_feature 1..27: note = 60S ribosomal protein L6 (267-275)
  source 1..27: mol_type = other RNA
cagctgcagggctacctccgcagcgtg

SEQ ID NO: 29656 - RNA, 27 nt, synthetic construct
  misc_feature 1..27: note = Mitochondrial dynamics protein MID51 (384-392)
  source 1..27: mol_type = other RNA
cagctgaccaacgtgatcctccacctg

SEQ ID NO: 29657 - RNA, 27 nt, synthetic construct
  misc_feature 1..27: note = Casein kinase I isoform delta (111-119)
  source 1..27: mol_type = other RNA
cagatgatcagccgcatcgagtacatc

SEQ ID NO: 29658 - RNA, 33 nt, synthetic construct
  misc_feature 1..33: note = Zinc finger protein 131 (113-123)
  source 1..33: mol_type = other RNA
cagatgctggaggccatcaaggccctcgaggtg

SEQ ID NO: 29659 - RNA, 27 nt, synthetic construct
  misc_feature 1..27: note = 40S ribosomal protein S8 (77-85)
  source 1..27: mol_type = other RNA
cgcatcatcgacgtggtctacaacgcc

SEQ ID NO: 29660 - RNA, 33 nt, synthetic construct
  misc_feature 1..33: note = CCR4-NOT transcription complex subunit 1 (459-469)
  source 1..33: mol_type = other RNA
cgcctggccgaggtgggccagtacgagcaggtc

SEQ ID NO: 29661 - RNA, 27 nt, synthetic construct
  misc_feature 1..27: note = DNA replication licensing factor MCM7 (164-172)
  source 1..27: mol_type = other RNA
cgcctggcccagcacatcacctacgtg

SEQ ID NO: 29662 - RNA, 27 nt, synthetic construct
  misc_feature 1..27: note = Vacuolar protein sorting-associated protein 53 homolog (74-82)
  source 1..27: mol_type = other RNA
cgcctggacgacaacatccggaccgtg

SEQ ID NO: 29663 - RNA, 33 nt, synthetic construct
  misc_feature 1..33: note = Putative sodium-coupled neutral amino acid transporter 10 (413-423)
  source 1..33: mol_type = other RNA
cgcctgggcgaggccgaggggctcatgaaggtg

SEQ ID NO: 29664 - RNA, 30 nt, synthetic construct
  misc_feature 1..30: note = Protein quaking (39-48)
  source 1..30: mol_type = other RNA
cgcctgctcgacgaggagatcagccgggtg

SEQ ID NO: 29665 - RNA, 27 nt, synthetic construct
  misc_feature 1..27: note = CLIP-associating protein 1 (367-375)
  source 1..27: mol_type = other RNA
cgcctgctcgacggcgccttcaagctg

SEQ ID NO: 29666 - RNA, 27 nt, synthetic construct
  misc_feature 1..27: note = KN motif and ankyrin repeat domain-containing protein 2 (654-662)
  source 1..27: mol_type = other RNA
cgcctgctcgactacgtggtcaacatc

SEQ ID NO: 29667 - RNA, 33 nt, synthetic construct
  misc_feature 1..33: note = Pyridoxal-dependent decarboxylase domain-containing protein 1 (630-640)
  source 1..33: mol_type = other RNA
cgcctgctcgaggagggcgtgctgcggcagatc

SEQ ID NO: 29668 - RNA, 27 nt, synthetic construct
  misc_feature 1..27: note = Pinin (207-215)
  source 1..27: mol_type = other RNA
cgcctgctcgagcagaaggtggagctg

SEQ ID NO: 29669 - RNA, 27 nt, synthetic construct
  misc_feature 1..27: note = E3 ubiquitin-protein ligase RNF213 (4648-4656)
  source 1..27: mol_type = other RNA
cgcctgctccaggagcagcaccagctg

SEQ ID NO: 29670 - RNA, 27 nt, synthetic construct
  misc_feature 1..27: note = V-type proton ATPase subunit H (382-390)
  source 1..27: mol_type = other RNA
cgcctgaacgagaagaactacgagctc

SEQ ID NO: 29671 - RNA, 27 nt, synthetic construct
  misc_feature 1..27: note = Cytospin-A (639-647)
  source 1..27: mol_type = other RNA
cgcctgcaggacgccatcgccaaggtg

SEQ ID NO: 29672 - RNA, 30 nt, synthetic construct
  misc_feature 1..30: note = Ubiquitin-conjugating enzyme E2 A (15-24)
  source 1..30: mol_type = other RNA
cgcctgcaggaggaccccccggccggcgtg

SEQ ID NO: 29673 - RNA, 30 nt, synthetic construct
  misc_feature 1..30: note = Ubiquitin-conjugating enzyme E2 B (15-24)
  source 1..30: mol_type = other RNA
cgcctgcaggaggaccccccggtgggcgtc

SEQ ID NO: 29674 - RNA, 27 nt, synthetic construct
  misc_feature 1..27: note = Inhibitor of nuclear factor kappa-B kinase-interacting protein (38-46)
  source 1..27: mol_type = other RNA
cgcctgcaggaggagatcaacgaggtg

SEQ ID NO: 29675 - RNA, 27 nt, synthetic construct
  misc_feature 1..27: note = Double-strand-break repair protein rad21 homolog (450-458)
  source 1..27: mol_type = other RNA
cgcctgcaggagagcgtgatggaggcc

SEQ ID NO: 29676 - RNA, 30 nt, synthetic construct
  misc_feature 1..30: note = SHC SH2 domain-binding protein 1 (594-603)
  source 1..30: mol_type = other RNA
cgcctgagcgagctcggcatcacccaggcc

SEQ ID NO: 29677 - RNA, 27 nt, synthetic construct
  misc_feature 1..27: note = PRA1 family protein 3 (178-186)
  source 1..27: mol_type = other RNA
cgcctgaccgactacatcagcaaggtg

SEQ ID NO: 29678 - RNA, 27 nt, synthetic construct
  misc_feature 1..27: note = Eukaryotic translation initiation factor 3 subunit H (165-173)
  source 1..27: mol_type = other RNA
cgcctgacccccaagctcatggaggtg

SEQ ID NO: 29679 - RNA, 33 nt, synthetic construct
  misc_feature 1..33: note = Proliferating cell nuclear antigen (5-15)
  source 1..33: mol_type = other RNA
cgcctggtgcagggcagcatcctcaagaaggtc

SEQ ID NO: 29680 - RNA, 27 nt, synthetic construct
  misc_feature 1..27: note = DEP domain-containing protein 1B (15-23)
  source 1..27: mol_type = other RNA
cgcctgtggaacgagaccgtggagctc

SEQ ID NO: 29681 - RNA, 27 nt, synthetic construct
  misc_feature 1..27: note = DNA damage-binding protein 1 (134-142)
  source 1..27: mol_type = other RNA
cgcctgtacgacggcctcttcaaggtg

SEQ ID NO: 29682 - RNA, 36 nt, synthetic construct
  misc_feature 1..36: note = ATP-binding cassette sub-family B member 10, mitochondrial (542-553)
  source 1..36: mol_type = other RNA
cgcctgtacgaccccgccagcggcaccatctccctc

SEQ ID NO: 29683 - RNA, 27 nt, synthetic construct
  misc_feature 1..27: note = Serine/threonine-protein kinase Kist (287-295)
  source 1..27: mol_type = other RNA
cgcatgttcgacggcaagttcgtggtc

SEQ ID NO: 29684 - RNA, 30 nt, synthetic construct
  misc_feature 1..30: note = Serine/threonine-protein kinase Kist (287-296)
  source 1..30: mol_type = other RNA
cgcatgttcgacggcaagttcgtggtcgcc

SEQ ID NO: 29685 - RNA, 36 nt, synthetic construct
  misc_feature 1..36: note = Melanocyte protein PMEL (46-57)
  source 1..36: mol_type = other RNA
cgccagctgtaccccgagtggaccgaggcccagcgg

SEQ ID NO: 29686 - RNA, 42 nt, synthetic construct
  misc_feature 1..42: note = Melanocyte protein PMEL (46-59)
  source 1..42: mol_type = other RNA
cgccagctgtaccccgagtggaccgaggcccagcggctcgac

SEQ ID NO: 29687 - RNA, 54 nt, synthetic construct
  misc_feature 1..54: note = Melanocyte protein PMEL (40-57)
  source 1..54: mol_type = other RNA
cgcaccaaggcctggaaccggcagctgtaccccgagtggaccgaggcccagcgc

SEQ ID NO: 29688 - RNA, 33 nt, synthetic construct
  misc_feature 1..33: note = Aurora kinase B (360-370)
  source 1..33: mol_type = other RNA
cgcgtgctgcccccgagcgccctccagtccgtc

SEQ ID NO: 29689 - RNA, 27 nt, synthetic construct
  misc_feature 1..27: note = SHC-transforming protein 1 (255-263)
  source 1..27: mol_type = other RNA
cgcgtgcccccgcccccccagagcgtc

SEQ ID NO: 29690 - RNA, 27 nt, synthetic construct
  misc_feature 1..27: note = Serine/threonine-protein phosphatase PP1-gamma catalytic subunit (7-15)
  source 1..27: mol_type = other RNA
agcatcatccagcgcctgctcgaggtg

SEQ ID NO: 29691 - RNA, 27 nt, synthetic construct
  misc_feature 1..27: note = Eukaryotic translation initiation factor 2 subunit 1 (110-118)
  source 1..27: mol_type = other RNA
agcatcctgcgccacgtggccgaggtc

SEQ ID NO: 29692 - RNA, 27 nt, synthetic construct
  misc_feature 1..27: note = Anaphase-promoting complex subunit 7 (276-284)
  source 1..27: mol_type = other RNA
agcctggccgacctctacttccgcgcc

SEQ ID NO: 29693 - RNA, 27 nt, synthetic construct
  misc_feature 1..27: note = TATA-binding protein-associated factor 172 (784-792)
  source 1..27: mol_type = other RNA
agcctggccgacgtgcacatcgaggtc

SEQ ID NO: 29694 - RNA, 27 nt, synthetic construct
  misc_feature 1..27: note = 2'-5'-oligoadenylate synthase 3 (247-255)
  source 1..27: mol_type = other RNA
agcctggccgagggcctccgcaccgtg

SEQ ID NO: 29695 - RNA, 27 nt, synthetic construct
  misc_feature 1..27: note = LisH domain-containing protein ARMC9 (400-408)
  source 1..27: mol_type = other RNA
agcctggccgagggccgcctctacctg

SEQ ID NO: 29696 - RNA, 27 nt, synthetic construct
  misc_feature 1..27: note = Ankyrin repeat and SOCS box protein 6 (353-361)
  source 1..27: mol_type = other RNA
agcctggccgagaagatccaggccctc

SEQ ID NO: 29697 - RNA, 30 nt, synthetic construct
  misc_feature 1..30: note = DNA polymerase epsilon catalytic subunit A (943-952)
  source 1..30: mol_type = other RNA
agcctggccgagctcaagggcttcgaggtg

SEQ ID NO: 29698 - RNA, 27 nt, synthetic construct
  misc_feature 1..27: note = Sestrin-1 (129-137)
  source 1..27: mol_type = other RNA
agcctggccgagctcgtgcacgccgtc

SEQ ID NO: 29699 - RNA, 30 nt, synthetic construct
  misc_feature 1..30: note = V-type proton ATPase catalytic subunit A (500-509)
  source 1..30: mol_type = other RNA
agcctggccgagaccgacaagatcaccctc

SEQ ID NO: 29700 - RNA, 27 nt, synthetic construct
  misc_feature 1..27: note = Trinucleotide repeat-containing gene 6A protein (198-206)
  source 1..27: mol_type = other RNA
agcctggcccacgagctctggaaggtg

SEQ ID NO: 29701 - RNA, 27 nt, synthetic construct
  misc_feature 1..27: note = TNFAIP3-interacting protein 2 (146-154)
  source 1..27: mol_type = other RNA
agcctggccaacgagacccaccagctc

SEQ ID NO: 29702 - RNA, 27 nt, synthetic construct
  misc_feature 1..27: note = Phosphatidylinositol 3-kinase regulatory subunit gamma (63-71)
  source 1..27: mol_type = other RNA
agcctggcccagtacaaccccaagctc

SEQ ID NO: 29703 - RNA, 27 nt, synthetic construct
  misc_feature 1..27: note = Baculoviral IAP repeat-containing protein 6 (1230-1238)
  source 1..27: mol_type = other RNA
agcctggcctccctcctggccaaggtg

SEQ ID NO: 29704 - RNA, 27 nt, synthetic construct
  misc_feature 1..27: note = TELO2-interacting protein 1 homolog (380-388)
  source 1..27: mol_type = other RNA
agcctggccacctccctcccccgcctg

SEQ ID NO: 29705 - RNA, 27 nt, synthetic construct
  misc_feature 1..27: note = Leucine-rich repeat and coiled-coil domain-containing protein 1 (37-45)
  source 1..27: mol_type = other RNA
agcctggactccaccctccacgccgtg

SEQ ID NO: 29706 - RNA, 30 nt, synthetic construct
  misc_feature 1..30: note = Transmembrane emp24 domain-containing protein 9 (130-139)
  source 1..30: mol_type = other RNA
agcctgttcgccggcgggatgctccgcgtg

SEQ ID NO: 29707 - RNA, 30 nt, synthetic construct
  misc_feature 1..30: note = F-box/LRR-repeat protein 5 (73-82)
  source 1..30: mol_type = other RNA
agcctgttcgagaagggcctcaagaacgtg

SEQ ID NO: 29708 - RNA, 27 nt, synthetic construct
  misc_feature 1..27: note = Programmed cell death 6-interacting protein (103-111)
  source 1..27: mol_type = other RNA
agcctgttcggcgggtccgtgaagctc

SEQ ID NO: 29709 - RNA, 30 nt, synthetic construct
  misc_feature 1..30: note = Ribosome production factor 1 (265-274)
  source 1..30: mol_type = other RNA
agcctgttcccccacaacccgcagttcatc

SEQ ID NO: 29710 - RNA, 27 nt, synthetic construct
  misc_feature 1..27: note = Exostosin-2 (478-486)
  source 1..27: mol_type = other RNA
agcctgttccgcgtgatcaccgaggtc

SEQ ID NO: 29711 - RNA, 24 nt, synthetic construct
  misc_feature 1..24: note = Bloom syndrome protein (853-860)
  source 1..24: mol_type = other RNA
agcctgggcaaggtgttcggggtc

SEQ ID NO: 29712 - RNA, 27 nt, synthetic construct
  misc_feature 1..27: note = U1 small nuclear ribonucleoprotein C (24-32)
  source 1..27: mol_type = other RNA
agcctgatcgacaagaccaccgccgcc

SEQ ID NO: 29713 - RNA, 27 nt, synthetic construct
  misc_feature 1..27: note = AAC41999.1 (170-178)
  source 1..27: mol_type = other RNA
agcctgatcgagaagatccccaccgcc

SEQ ID NO: 29714 - RNA, 27 nt, synthetic construct
  misc_feature 1..27: note = Transcription factor RFX3 (374-382)
  source 1..27: mol_type = other RNA
agcctgatcgagaagctctggcagacc

SEQ ID NO: 29715 - RNA, 27 nt, synthetic construct
  misc_feature 1..27: note = Importin subunit alpha-1 (490-498)
  source 1..27: mol_type = other RNA
agcctgatcgagaagtacttctccgtg

SEQ ID NO: 29716 - RNA, 27 nt, synthetic construct
  misc_feature 1..27: note = Ubiquitin carboxyl-terminal hydrolase 34 (1442-1450)
  source 1..27: mol_type = other RNA
agcctgatccagcgcctcatgtccgtg

SEQ ID NO: 29717 - RNA, 27 nt, synthetic construct
  misc_feature 1..27: note = Polymerase I and transcript release factor (56-64)
  source 1..27: mol_type = other RNA
agcctgctcgacaagatcatcggcgcc

SEQ ID NO: 29718 - RNA, 30 nt, synthetic construct
  misc_feature 1..30: note = Rho guanine nucleotide exchange factor 18 (642-651)
  source 1..30: mol_type = other RNA
agcctgctcgagaagcagcagatctacctg

SEQ ID NO: 29719 - RNA, 27 nt, synthetic construct
  misc_feature 1..27: note = Mediator of RNA polymerase II transcription subunit 12 (1224-1232)
  source 1..27: mol_type = other RNA
agcctgctcgagaacatcgccaaggcc

SEQ ID NO: 29720 - RNA, 27 nt, synthetic construct
  misc_feature 1..27: note = Heterogeneous nuclear ribonucleoprotein C-like 1 (196-204)
  source 1..27: mol_type = other RNA
agcctgctcgagaacctggagaagatc

SEQ ID NO: 29721 - RNA, 27 nt, synthetic construct
  misc_feature 1..27: note = Serine/threonine-protein kinase ATR (549-557)
  source 1..27: mol_type = other RNA
agcctgctcgagtccgtgcagaagctg

SEQ ID NO: 29722 - RNA, 33 nt, synthetic construct
  misc_feature 1..33: note = Neurochondrin (337-347)
  source 1..33: mol_type = other RNA
agcctgctcaaggagccccagaaggtgcagctg

SEQ ID NO: 29723 - RNA, 30 nt, synthetic construct
  misc_feature 1..30: note = Adrenocortical dysplasia protein homolog (124-133)
  source 1..30: mol_type = other RNA
agcctgctccccaccgagcagccgcgcctg

SEQ ID NO: 29724 - RNA, 27 nt, synthetic construct
  misc_feature 1..27: note = Ran GTPase-activating protein 1 (579-587)
  source 1..27: mol_type = other RNA
agcctgctccagaccctgtacaaggtg

SEQ ID NO: 29725 - RNA, 27 nt, synthetic construct
  misc_feature 1..27: note = Arfaptin-2 (71-79)
  source 1..27: mol_type = other RNA
agcctgctccagacccagcacgccctg

SEQ ID NO: 29726 - RNA, 30 nt, synthetic construct
  misc_feature 1..30: note = Pericentrin (1754-1763)
  source 1..30: mol_type = other RNA
agcctgatgggccccgtggtccacgaggtg

SEQ ID NO: 29727 - RNA, 27 nt, synthetic construct
  misc_feature 1..27: note = Hermansky-Pudlak syndrome 4 protein (573-581)
  source 1..27: mol_type = other RNA
agcctgaacggcctcgaggtgcacctg

SEQ ID NO: 29728 - RNA, 27 nt, synthetic construct
  misc_feature 1..27: note = Choline/ethanolamine kinase (86-94)
  source 1..27: mol_type = other RNA
agcctgcccgaccacctcccgtccgtg

SEQ ID NO: 29729 - RNA, 27 nt, synthetic construct
  misc_feature 1..27: note = WD repeat-containing protein 3 (348-356)
  source 1..27: mol_type = other RNA
agcctgcaggacgagatccagcgcgtg

SEQ ID NO: 29730 - RNA, 27 nt, synthetic construct
  misc_feature 1..27: note = Peroxisomal membrane protein 4 (59-67)
  source 1..27: mol_type = other RNA
agcctgcaggagaagctctgggccatc

SEQ ID NO: 29731 - RNA, 27 nt, synthetic construct
  misc_feature 1..27: note = Dynactin subunit 1 (1169-1177)
  source 1..27: mol_type = other RNA
agcctgtccgacaccgtggagaagctc

SEQ ID NO: 29732 - RNA, 27 nt, synthetic construct
  misc_feature 1..27: note = AP-3 complex subunit mu-1 (219-227)
  source 1..27: mol_type = other RNA
agcctgtccttcatgaacccccgcctc

SEQ ID NO: 29733 - RNA, 27 nt, synthetic construct
  misc_feature 1..27: note = Alsin (755-763)
  source 1..27: mol_type = other RNA
agcctgtccagcttcctccacggcgtg

SEQ ID NO: 29734 - RNA, 27 nt, synthetic construct
  misc_feature 1..27: note = Eukaryotic translation initiation factor 3 subunit F (301-309)
  source 1..27: mol_type = other RNA
agcctggtgaaccaggtccccaagatc

SEQ ID NO: 29735 - RNA, 27 nt, synthetic construct
  misc_feature 1..27: note = FACT complex subunit SSRP1 (309-317)
  source 1..27: mol_type = other RNA
agcctgtacgagatggtgtcccgcgtc

SEQ ID NO: 29736 - RNA, 27 nt, synthetic construct
  misc_feature 1..27: note = Mediator of RNA polymerase II transcription subunit 12 (1349-1357)
  source 1..27: mol_type = other RNA
agcctgtactcccaggtgcaccagatc

SEQ ID NO: 29737 - RNA, 27 nt, synthetic construct
  misc_feature 1..27: note = RNA-binding protein 28 (53-61)
  source 1..27: mol_type = other RNA
agcatgctggaggacgtgcagcgcgcc

SEQ ID NO: 29738 - RNA, 27 nt, synthetic construct
  misc_feature 1..27: note = Zinc finger MYM-type protein 3 (1346-1354)
  source 1..27: mol_type = other RNA
agcatgctgaaccgcatcctcgccgtg

SEQ ID NO: 29739 - RNA, 27 nt, synthetic construct
  misc_feature 1..27: note = RNA polymerase II-associated protein 1 (1333-1341)
  source 1..27: mol_type = other RNA
agcatgctgcagaagacctggctcctg

SEQ ID NO: 29740 - RNA, 27 nt, synthetic construct
  misc_feature 1..27: note = General transcription factor 3C polypeptide 5 (74-82)
  source 1..27: mol_type = other RNA
agcatgtacgacaaggtgctgatgctc

SEQ ID NO: 29741 - RNA, 27 nt, synthetic construct
  misc_feature 1..27: note = EH domain-containing protein 4 (482-490)
  source 1..27: mol_type = other RNA
agcgtgctgggcaagatctggaagctc

SEQ ID NO: 29742 - RNA, 27 nt, synthetic construct
  misc_feature 1..27: note = Huntingtin (111-119)
  source 1..27: mol_type = other RNA
accctggccgccgcggtgcccaagatc

SEQ ID NO: 29743 - RNA, 27 nt, synthetic construct
  misc_feature 1..27: note = Set1/Ash2 histone methyltransferase complex subunit ASH2 (512-520)
  source 1..27: mol_type = other RNA
accctggccgacgtgctctaccacgtc

SEQ ID NO: 29744 - RNA, 30 nt, synthetic construct
  misc_feature 1..30: note = Non-POU domain-containing octamer-binding protein (31-40)
  source 1..30: mol_type = other RNA
accctggccgagatcgccaaggtggagctc

SEQ ID NO: 29745 - RNA, 27 nt, synthetic construct
  misc_feature 1..27: note = Ancient ubiquitous protein 1 (365-373)
  source 1..27: mol_type = other RNA
accctggcccagcgcgtgaaggaggtc

SEQ ID NO: 29746 - RNA, 27 nt, synthetic construct
  misc_feature 1..27: note = Pre-mRNA-processing factor 40 homolog A (170-178)
  source 1..27: mol_type = other RNA
accctggacgccggcaacatcaagctc

SEQ ID NO: 29747 - RNA, 27 nt, synthetic construct
  misc_feature 1..27: note = Coiled-coil domain-containing protein 93 (524-532)
  source 1..27: mol_type = other RNA
accctggacgacaagaaggtgtacctc

SEQ ID NO: 29748 - RNA, 27 nt, synthetic construct
  misc_feature 1..27: note = Probable ATP-dependent RNA helicase DDX27 (87-95)
  source 1..27: mol_type = other RNA
accctggacgagaagatcgagaaggtg

SEQ ID NO: 29749 - RNA, 27 nt, synthetic construct
  misc_feature 1..27: note = Nuclear respiratory factor 1 (118-126)
  source 1..27: mol_type = other RNA
accctggacgagtacaccacgcgcgtg

SEQ ID NO: 29750 - RNA, 27 nt, synthetic construct
  misc_feature 1..27: note = Fanconi anemia group D2 protein (847-855)
  source 1..27: mol_type = other RNA
accctggacatcaccccccacacggtg

SEQ ID NO: 29751 - RNA, 27 nt, synthetic construct
  misc_feature 1..27: note = E3 ubiquitin-protein ligase UHRF1 (57-65)
  source 1..27: mol_type = other RNA
accctgttcgactacgaggtgcgcctc

SEQ ID NO: 29752 - RNA, 27 nt, synthetic construct
  misc_feature 1..27: note = Staphylococcal nuclease domain-containing protein 1 (582-590)
  source 1..27: mol_type = other RNA
accctgttcaccaaggagctcgtgctg

SEQ ID NO: 29753 - RNA, 33 nt, synthetic construct
  misc_feature 1..33: note = Dynamin-2 (133-143)
  source 1..33: mol_type = other RNA
accctgatcgacctccccggcatcaccaaggtg

SEQ ID NO: 29754 - RNA, 27 nt, synthetic construct
  misc_feature 1..27: note = Cyclic AMP-dependent transcription factor ATF-1 (254-262)
  source 1..27: mol_type = other RNA
accctgatcgaggagctcaagaccctg

SEQ ID NO: 29755 - RNA, 30 nt, synthetic construct
  misc_feature 1..30: note = Cleavage and polyadenylation specificity factor subunit 1 (348-357)
  source 1..30: mol_type = other RNA
accctgatcaccgacggcatgcgcagcgtg

SEQ ID NO: 29756 - RNA, 27 nt, synthetic construct
  misc_feature 1..27: note = Negative elongation factor C/D (294-302)
  source 1..27: mol_type = other RNA
accctgctcgaccgcatggtgcacctg

SEQ ID NO: 29757 - RNA, 30 nt, synthetic construct
  misc_feature 1..30: note = HEAT repeat-containing protein 5B (1620-1629)
  source 1..30: mol_type = other RNA
accctgctcgacagcccctacgcccgcgtg

SEQ ID NO: 29758 - RNA, 30 nt, synthetic construct
  misc_feature 1..30: note = NmrA-like family domain-containing protein 1 (23-32)
  source 1..30: mol_type = other RNA
accctgctcgaggacggcaccttcaaggtg

SEQ ID NO: 29759 - RNA, 27 nt, synthetic construct
  misc_feature 1..27: note = Tetratricopeptide repeat protein 21B (311-319)
  source 1..27: mol_type = other RNA
accctgctcgagcgcgccttcagcctg

SEQ ID NO: 29760 - RNA, 27 nt, synthetic construct
  misc_feature 1..27: note = Cell division cycle protein 27 homolog (544-552)
  source 1..27: mol_type = other RNA
accctgctcggccacgagttcgtgctg

SEQ ID NO: 29761 - RNA, 27 nt, synthetic construct
  misc_feature 1..27: note = Coatomer subunit alpha (88-96)
  source 1..27: mol_type = other RNA
accctgctcggccacctggactacatc

SEQ ID NO: 29762 - RNA, 27 nt, synthetic construct
  misc_feature 1..27: note = Inositol 1,4,5-trisphosphate receptor type 1 (2386-2394)
  source 1..27: mol_type = other RNA
accctgctcaacgtgatcaagagcgtc

SEQ ID NO: 29763 - RNA, 27 nt, synthetic construct
  misc_feature 1..27: note = Perilipin-2 (327-335)
  source 1..27: mol_type = other RNA
accctgctcagcaacatccagggcgtg

SEQ ID NO: 29764 - RNA, 27 nt, synthetic construct
  misc_feature 1..27: note = V-type proton ATPase subunit C 1 (184-192)
  source 1..27: mol_type = other RNA
accctgctcgtggtcgtgcccaagctg

SEQ ID NO: 29765 - RNA, 27 nt, synthetic construct
  misc_feature 1..27: note = Protein NOXP20 (254-262)
  source 1..27: mol_type = other RNA
accctgatggagcgcaccgtgagcctc

SEQ ID NO: 29766 - RNA, 27 nt, synthetic construct
  misc_feature 1..27: note = CAD protein (639-647)
  source 1..27: mol_type = other RNA
accctgaacgaccgcgagtaccagctc

SEQ ID NO: 29767 - RNA, 27 nt, synthetic construct
  misc_feature 1..27: note = Short transient receptor potential channel 1 (45-53)
  source 1..27: mol_type = other RNA
accctgaacgagaagctcttcctgctg

SEQ ID NO: 29768 - RNA, 27 nt, synthetic construct
  misc_feature 1..27: note = Pinin (7-15)
  source 1..27: mol_type = other RNA
accctgcaggagcagctcgagaaggcc

SEQ ID NO: 29769 - RNA, 27 nt, synthetic construct
  misc_feature 1..27: note = Mitochondrial import receptor subunit TOM22 homolog (35-43)
  source 1..27: mol_type = other RNA
accctgagcgagcgcctctggggcctg

SEQ ID NO: 29770 - RNA, 27 nt, synthetic construct
  misc_feature 1..27: note = AP-3 complex subunit mu-2 (219-227)
  source 1..27: mol_type = other RNA
accctgagcttcatgaacccccgcctc

SEQ ID NO: 29771 - RNA, 27 nt, synthetic construct
  misc_feature 1..27: note = Splicing factor 3B subunit 3 (165-173)
  source 1..27: mol_type = other RNA
accctggtgtaccacgtcgtgggcgtg

SEQ ID NO: 29772 - RNA, 33 nt, synthetic construct
  misc_feature 1..33: note = Malate dehydrogenase, mitochondrial (54-64)
  source 1..33: mol_type = other RNA
accctgtacgacatcgcccacacccccggcgtg

SEQ ID NO: 29773 - RNA, 27 nt, synthetic construct
  misc_feature 1..27: note = 60S ribosomal protein L10a (9-17)
  source 1..27: mol_type = other RNA
accctgtacgaggccgtgcgcgaggtc

SEQ ID NO: 29774 - RNA, 33 nt, synthetic construct
  misc_feature 1..33: note = Quinone oxidoreductase (225-235)
  source 1..33: mol_type = other RNA
accatggccaaggagagctccatcatcggcgtg

SEQ ID NO: 29775 - RNA, 27 nt, synthetic construct
  misc_feature 1..27: note = Dual specificity protein phosphatase 14 (92-100)
  source 1..27: mol_type = other RNA
accgtggccgacaagatccacagcgtc

SEQ ID NO: 29776 - RNA, 27 nt, synthetic construct
  misc_feature 1..27: note = EH domain-containing protein 1 (479-487)
  source 1..27: mol_type = other RNA
accgtgctgggcaagatctggaagctc

SEQ ID NO: 29777 - RNA, 27 nt, synthetic construct
  misc_feature 1..27: note = Cell division cycle and apoptosis regulator protein 1 (1120-1128)
  source 1..27: mol_type = other RNA
accgtgatggacgagatccacaccgtc

SEQ ID NO: 29778 - RNA, 27 nt, synthetic construct
  misc_feature 1..27: note = Protein PAT1 homolog 1 (459-467)
  source 1..27: mol_type = other RNA
gtgatcatcgagaagacctacagcctg

SEQ ID NO: 29779 - RNA, 30 nt, synthetic construct
  misc_feature 1..30: note = Tropomyosin alpha-4 chain (134-143)
  source 1..30: mol_type = other RNA
gtgatcctggagggcgagctcgagcgcgcc

SEQ ID NO: 29780 - RNA, 27 nt, synthetic construct
  misc_feature 1..27: note = 40S ribosomal protein S15a (6-14)
  source 1..27: mol_type = other RNA
gtgctggccgacgccctcaagagcatc

SEQ ID NO: 29781 - RNA, 27 nt, synthetic construct
  misc_feature 1..27: note = Prefoldin subunit 4 (107-115)
  source 1..27: mol_type = other RNA
gtgctggccgacctcaaggtccagctg

SEQ ID NO: 29782 - RNA, 27 nt, synthetic construct
  misc_feature 1..27: note = Neurobeachin-like protein 2 (65-73)
  source 1..27: mol_type = other RNA
gtgctggccgagcagctccaccaggcc

SEQ ID NO: 29783 - RNA, 30 nt, synthetic construct
  misc_feature 1..30: note = E3 ubiquitin-protein ligase RNF130 (74-83)
  source 1..30: mol_type = other RNA
gtgctggcccccctcccgctgcacggcgtc

SEQ ID NO: 29784 - RNA, 27 nt, synthetic construct
  misc_feature 1..27: note = Calmodulin-regulated spectrin-associated protein 1 (1065-1073)
  source 1..27: mol_type = other RNA
gtgctggacgccagcgtcaaggaggtg

SEQ ID NO: 29785 - RNA, 27 nt, synthetic construct
  misc_feature 1..27: note = HEAT repeat-containing protein 3 (702-710)
  source 1..27: mol_type = other RNA
gtgctggacaacgtcaagatgaacctc

SEQ ID NO: 29786 - RNA, 27 nt, synthetic construct
  misc_feature 1..27: note = Carbohydrate sulfotransferase 14 (134-142)
  source 1..27: mol_type = other RNA
gtgctggacagcgtcgacgtgcgcctc

SEQ ID NO: 29787 - RNA, 30 nt, synthetic construct
  misc_feature 1..30: note = Cytosolic carboxypeptidase 1 (592-601)
  source 1..30: mol_type = other RNA
gtgctgttcgagggccgcaccgtccagctc

SEQ ID NO: 29788 - RNA, 27 nt, synthetic construct
  misc_feature 1..27: note = Isochorismatase domain-containing protein 1 (143-151)
  source 1..27: mol_type = other RNA
gtgctgttcggcgtcgagacccacgtg

SEQ ID NO: 29789 - RNA, 27 nt, synthetic construct
  misc_feature 1..27: note = Rab GTPase-activating protein 1-like (129-137)
  source 1..27: mol_type = other RNA
gtgctgttcaacaagctcacctacctg

SEQ ID NO: 29790 - RNA, 27 nt, synthetic construct
  misc_feature 1..27: note = Sorting nexin-5 (197-205)
  source 1..27: mol_type = other RNA
gtgctgttcaccggcgtcaaggaggtg

SEQ ID NO: 29791 - RNA, 33 nt, synthetic construct
  misc_feature 1..33: note = Centrosomal protein of 76 kDa (112-122)
  source 1..33: mol_type = other RNA
gtgctgggcgggaaggccttcctcgagcacctg

SEQ ID NO: 29792 - RNA, 27 nt, synthetic construct
  misc_feature 1..27: note = Exportin-1 (784-792)
  source 1..27: mol_type = other RNA
gtgctgatcgactaccagcgcaacgtc

SEQ ID NO: 29793 - RNA, 27 nt, synthetic construct
  misc_feature 1..27: note = ORM1-like protein 3 (134-142)
  source 1..27: mol_type = other RNA
gtgctgatccccaagctcccgcagctg

SEQ ID NO: 29794 - RNA, 27 nt, synthetic construct
  misc_feature 1..27: note = von Willebrand factor A domain-containing protein 8 (511-519)
  source 1..27: mol_type = other RNA
gtgctgctcgacggcatccaccgcgtc

SEQ ID NO: 29795 - RNA, 36 nt, synthetic construct
  misc_feature 1..36: note = Asparagine synthetase (glutamine-hydrolyzing) (41-52)
  source 1..36: mol_type = other RNA
gtgctgctcgacaccgccaacaagaaggtcttcctg

SEQ ID NO: 29796 - RNA, 39 nt, synthetic construct
  misc_feature 1..39: note = Ras-related protein Rab-5A (24-36)
  source 1..39: mol_type = other RNA
gtgctgctcggcgagagcgccgtcgggaagtccagcctg

SEQ ID NO: 29797 - RNA, 27 nt, synthetic construct
  misc_feature 1..27: note = MAU2 chromatid cohesion factor homolog (356-364)
  source 1..27: mol_type = other RNA
gtgctgctcggccacatcttctacgtc

SEQ ID NO: 29798 - RNA, 27 nt, synthetic construct
  misc_feature 1..27: note = Kelch-like protein 24 (404-412)
  source 1..27: mol_type = other RNA
gtgctgctcggcaaggtctacgtggtg

SEQ ID NO: 29799 - RNA, 30 nt, synthetic construct
  misc_feature 1..30: note = Protein FAM171B (19-28)
  source 1..30: mol_type = other RNA
gtgctgctcaaggcccgcctggtccccgcc

SEQ ID NO: 29800 - RNA, 33 nt, synthetic construct
  misc_feature 1..33: note = Anamorsin (98-108)
  source 1..33: mol_type = other RNA
gtgctgctcagcgactccaacctgcacgacgcc

SEQ ID NO: 29801 - RNA, 27 nt, synthetic construct
  misc_feature 1..27: note = Protein yippee-like 1 (66-74)
  source 1..27: mol_type = other RNA
gtgctgctcaccggcctgcacgccgtc

SEQ ID NO: 29802 - RNA, 27 nt, synthetic construct
  misc_feature 1..27: note = Inhibitor of nuclear factor kappa-B kinase subunit alpha (271-279)
  source 1..27: mol_type = other RNA
gtgctgatggaccacatcctcaacctg

SEQ ID NO: 29803 - RNA, 27 nt, synthetic construct
  misc_feature 1..27: note = Probable ATP-dependent RNA helicase DDX56 (130-138)
  source 1..27: mol_type = other RNA
gtgctgatggagaagcccgacgtcgtg

SEQ ID NO: 29804 - RNA, 27 nt, synthetic construct
  misc_feature 1..27: note = Uncharacterized protein C18orf8 (434-442)
  source 1..27: mol_type = other RNA
gtgctgatggagtacatccgcagcctc

SEQ ID NO: 29805 - RNA, 27 nt, synthetic construct
  misc_feature 1..27: note = Protein LLP homolog (39-47)
  source 1..27: mol_type = other RNA
gtgctgatgaaggacgtccaggagatc

SEQ ID NO: 29806 - RNA, 30 nt, synthetic construct
  misc_feature 1..30: note = Cyclin-dependent kinase 1 (69-78)
  source 1..30: mol_type = other RNA
gtgctgatgcaggacagccgcctctacctg

SEQ ID NO: 29807 - RNA, 27 nt, synthetic construct
  misc_feature 1..27: note = AP-2 complex subunit sigma (90-98)
  source 1..27: mol_type = other RNA
gtgctgaacgagtacttccacaacgtc

SEQ ID NO: 29808 - RNA, 27 nt, synthetic construct
  misc_feature 1..27: note = Maestro heat-like repeat-containing protein family member 1 (1078-1086)
  source 1..27: mol_type = other RNA
gtgctgcaggagaaggtccccgagatc

SEQ ID NO: 29809 - RNA, 30 nt, synthetic construct
  misc_feature 1..30: note = Nucleolar protein 9 (544-553)
  source 1..30: mol_type = other RNA
gtgctgcagaacctcaagggccagtacgtc

SEQ ID NO: 29810 - RNA, 27 nt, synthetic construct
  misc_feature 1..27: note = High mobility group protein 20A (167-175)
  source 1..27: mol_type = other RNA
gtgctgcagcagcacctcgagaccctg

SEQ ID NO: 29811 - RNA, 27 nt, synthetic construct
  misc_feature 1..27: note = HLA class II histocompatibility antigen, DR beta 3 chain (2-10)
  source 1..27: mol_type = other RNA
gtgctgagctcccgcctcgccttcgcc

SEQ ID NO: 29812 - RNA, 27 nt, synthetic construct
  misc_feature 1..27: note = Importin-9 (169-177)
  source 1..27: mol_type = other RNA
gtgctgaccgagttcacccgcgaggtc

SEQ ID NO: 29813 - RNA, 27 nt, synthetic construct
  misc_feature 1..27: note = Protein asunder homolog (229-237)
  source 1..27: mol_type = other RNA
gtgctgaccagcgaggtccactccgtg

SEQ ID NO: 29814 - RNA, 27 nt, synthetic construct
  misc_feature 1..27: note = ELAV-like protein 1 (137-145)
  source 1..27: mol_type = other RNA
gtgctggtcgaccagaccaccggcctc

SEQ ID NO: 29815 - RNA, 27 nt, synthetic construct
  misc_feature 1..27: note = Ribonuclease UK114 (25-33)
  source 1..27: mol_type = other RNA
gtgctggtcgaccgcaccatctacatc

SEQ ID NO: 29816 - RNA, 33 nt, synthetic construct
  misc_feature 1..33: note = Zinc finger BED domain-containing protein 1 (374-384)
  source 1..33: mol_type = other RNA
gtgctggtcgaggacagcaacaaccaccacctc

SEQ ID NO: 29817 - RNA, 27 nt, synthetic construct
  misc_feature 1..27: note = Tyrosine-protein kinase JAK1 (997-1005)
  source 1..27: mol_type = other RNA
gtgctggtcgagagcgagcaccaggtg

SEQ ID NO: 29818 - RNA, 27 nt, synthetic construct
  misc_feature 1..27: note = Signal transducer and activator of transcription 1-alpha/beta (300-308)
  source 1..27: mol_type = other RNA
gtgctgtgggaccgcaccttcagcctc

SEQ ID NO: 29819 - RNA, 27 nt, synthetic construct
  misc_feature 1..27: note = Mediator of RNA polymerase II transcription subunit 12 (571-579)
  source 1..27: mol_type = other RNA
gtgctgtacgaccagccccgccacgtc

SEQ ID NO: 29820 - RNA, 27 nt, synthetic construct
  misc_feature 1..27: note = Putative RNA-binding protein 15 (219-227)
  source 1..27: mol_type = other RNA
gtgctgtacgaccgccccctcaagatc

SEQ ID NO: 29821 - RNA, 27 nt, synthetic construct
  misc_feature 1..27: note = AKT-interacting protein (200-208)
  source 1..27: mol_type = other RNA
gtgctgtacgagaaggacatccagctc

SEQ ID NO: 29822 - RNA, 27 nt, synthetic construct
  misc_feature 1..27: note = Werner syndrome ATP-dependent helicase (1155-1163)
  source 1..27: mol_type = other RNA
gtgctgtacggcaagctcgtcgaggcc

SEQ ID NO: 29823 - RNA, 27 nt, synthetic construct
  misc_feature 1..27: note = Set1/Ash2 histone methyltransferase complex subunit ASH2 (516-524)
  source 1..27: mol_type = other RNA
gtgctgtaccacgtcgagaccgaggtg

SEQ ID NO: 29824 - RNA, 30 nt, synthetic construct
  misc_feature 1..30: note = Protein downstream neighbor of Son (395-404)
  source 1..30: mol_type = other RNA
gtgctgtacccccacgagccgaccgccgtc

SEQ ID NO: 29825 - RNA, 27 nt, synthetic construct
  misc_feature 1..27: note = Protein artemis (131-139)
  source 1..27: mol_type = other RNA
gtgctgtacaccggcgacttccgcctc

SEQ ID NO: 29826 - RNA, 27 nt, synthetic construct
  misc_feature 1..27: note = Anaphase-promoting complex subunit 1 (498-506)
  source 1..27: mol_type = other RNA
gtgctgtacaccggcgtcgtgcgcgtg

SEQ ID NO: 29827 - RNA, 30 nt, synthetic construct
  misc_feature 1..30: note = Adenosylhomocysteinase 2 (277-286)
  source 1..30: mol_type = other RNA
gtgatgttcggcgggaagcaggtcgtggtg

SEQ ID NO: 29828 - RNA, 27 nt, synthetic construct
  misc_feature 1..27: note = Ligand-dependent nuclear receptor-interacting factor 1 (358-366)
  source 1..27: mol_type = other RNA
gtgatgttcaacggcaaggtctacctg

SEQ ID NO: 29829 - RNA, 24 nt, synthetic construct
  misc_feature 1..24: note = Kelch-like protein 8 (201-208)
  source 1..24: mol_type = other RNA
gtgatgggcaagatcttcgccgtc

SEQ ID NO: 29830 - RNA, 30 nt, synthetic construct
  misc_feature 1..30: note = Adenosylhomocysteinase (209-218)
  source 1..30: mol_type = other RNA
gtgatgatcgccggcaaggtcgccgtggtg

SEQ ID NO: 29831 - RNA, 27 nt, synthetic construct
  misc_feature 1..27: note = Cullin-2 (25-33)
  source 1..27: mol_type = other RNA
gtgatgctggagtacgtcgagcgcgcc

SEQ ID NO: 29832 - RNA, 27 nt, synthetic construct
  misc_feature 1..27: note = DNA-directed RNA polymerases I, II, and III subunit RPABC3 (55-63)
  source 1..27: mol_type = other RNA
gtgatgtacggcaaggtctaccgcatc

SEQ ID NO: 29833 - RNA, 27 nt, synthetic construct
  misc_feature 1..27: note = Cytoskeleton-associated protein 5 (1001-1009)
  source 1..27: mol_type = other RNA
tggctggccgagaagctccccaccctg

SEQ ID NO: 29834 - RNA, 27 nt, synthetic construct
  misc_feature 1..27: note = Transcription factor 25 (392-400)
  source 1..27: mol_type = other RNA
tggctggaggagaacgtgcacgaggtc

SEQ ID NO: 29835 - RNA, 33 nt, synthetic construct
  misc_feature 1..33: note = Nuclear migration protein nudC (184-194)
  source 1..33: mol_type = other RNA
tggctgatcgaggacggcaaggtggtcaccgtg

SEQ ID NO: 29836 - RNA, 27 nt, synthetic construct
  misc_feature 1..27: note = Serine/threonine-protein phosphatase 2A 65 kDa regulatory subunit A alpha isoform isoform X1 (271-279)
  source 1..27: mol_type = other RNA
tggctggtggaccacgtctacgccatc

SEQ ID NO: 29837 - RNA, 42 nt, synthetic construct
  misc_feature 1..42: note = Melanocyte protein PMEL (44-57)
  source 1..42: mol_type = other RNA
tggaaccgccagctgtaccccgagtggaccgaggcccagcgg

SEQ ID NO: 29838 - RNA, 30 nt, synthetic construct
  misc_feature 1..30: note = Helicase-like transcription factor (121-130)
  source 1..30: mol_type = other RNA
tacatcatggacaacaagctggcccagatc

SEQ ID NO: 29839 - RNA, 27 nt, synthetic construct
  misc_feature 1..27: note = Unconventional myosin-If (18-26)
  source 1..27: mol_type = other RNA
tacatcatgagctacatctcccgcgtg

SEQ ID NO: 29840 - RNA, 27 nt, synthetic construct
  misc_feature 1..27: note = CCR4-NOT transcription complex subunit 1 (237-245)
  source 1..27: mol_type = other RNA
tacctggcccccttcctccgcaacgtg

SEQ ID NO: 29841 - RNA, 27 nt, synthetic construct
  misc_feature 1..27: note = COP9 signalosome complex subunit 1 (357-365)
  source 1..27: mol_type = other RNA
tacctggccccccacgtgcgcaccctc

SEQ ID NO: 29842 - RNA, 27 nt, synthetic construct
  misc_feature 1..27: note = Nucleoprotein TPR (422-430)
  source 1..27: mol_type = other RNA
tacctggacgagatcgtgaaggaggtc

SEQ ID NO: 29843 - RNA, 27 nt, synthetic construct
  misc_feature 1..27: note = Tuberin (190-198)
  source 1..27: mol_type = other RNA
tacctggacgagtacatcgcccgcatg

SEQ ID NO: 29844 - RNA, 27 nt, synthetic construct
  misc_feature 1..27: note = Neutral alpha-glucosidase C (478-486)
  source 1..27: mol_type = other RNA
tacctggacttcaccaaccccaaggtg

SEQ ID NO: 29845 - RNA, 27 nt, synthetic construct
  misc_feature 1..27: note = Protein flightless-1 homolog (154-162)
  source 1..27: mol_type = other RNA
tacctggacctcagcgagaaccgcctg

SEQ ID NO: 29846 - RNA, 27 nt, synthetic construct
  misc_feature 1..27: note = UPF0585 protein C16orf13 (21-29)
  source 1..27: mol_type = other RNA
tacctggaccccgcccagcgcggcgtg

SEQ ID NO: 29847 - RNA, 27 nt, synthetic construct
  misc_feature 1..27: note = BTB/POZ domain-containing protein KCTD3 (224-232)
  source 1..27: mol_type = other RNA
tacctggactggaccatcgagcgcgtg

SEQ ID NO: 29848 - RNA, 27 nt, synthetic construct
  misc_feature 1..27: note = DBF4-type zinc finger-containing protein 2 (1397-1405)
  source 1..27: mol_type = other RNA
tacctggaggacaagagctacaagctc

SEQ ID NO: 29849 - RNA, 27 nt, synthetic construct
  misc_feature 1..27: note = NADH dehydrogenase (ubiquinone) iron-sulfur protein 8, mitochondrial (74-82)
  source 1..27: mol_type = other RNA
tacctgttccgcgagcccgccaccatc

SEQ ID NO: 29850 - RNA, 27 nt, synthetic construct
  misc_feature 1..27: note = Protein unc-50 homolog (55-63)
  source 1..27: mol_type = other RNA
tacctgttcaccagcccccagcgcgtg

SEQ ID NO: 29851 - RNA, 27 nt, synthetic construct
  misc_feature 1..27: note = Vacuole membrane protein 1 (137-145)
  source 1..27: mol_type = other RNA
tacctgggcccccacatcgccagcgtg

SEQ ID NO: 29852 - RNA, 24 nt, synthetic construct
  misc_feature 1..24: note = SUMO-activating enzyme subunit 2 (164-171)
  source 1..24: mol_type = other RNA
tacctgggccaggtgaccaccatc

SEQ ID NO: 29853 - RNA, 27 nt, synthetic construct
  misc_feature 1..27: note = Mitotic checkpoint serine/threonine-protein kinase BUB1 beta (141-149)
  source 1..27: mol_type = other RNA
tacctgcacaaccagggcatcggggtg

SEQ ID NO: 29854 - RNA, 33 nt, synthetic construct
  misc_feature 1..33: note = EKC/KEOPS complex subunit TPRKB (121-131)
  source 1..33: mol_type = other RNA
tacctgatcagccaggtggagggccaccaggtc

SEQ ID NO: 29855 - RNA, 27 nt, synthetic construct
  misc_feature 1..27: note = Myosin-10 (264-272)
  source 1..27: mol_type = other RNA
tacctgctcgagaagagccgcgccgtg

SEQ ID NO: 29856 - RNA, 33 nt, synthetic construct
  misc_feature 1..33: note = Cyclin-D1-binding protein 1 (104-114)
  source 1..33: mol_type = other RNA
tacctgctccccaaggaccagggcatcaccctg

SEQ ID NO: 29857 - RNA, 30 nt, synthetic construct
  misc_feature 1..30: note = PRKC apoptosis WT1 regulator protein (215-224)
  source 1..30: mol_type = other RNA
tacctgctccaggagcccccgcgcaccgtg

SEQ ID NO: 29858 - RNA, 27 nt, synthetic construct
  misc_feature 1..27: note = Probable methyltransferase TARBP1 (286-294)
  source 1..27: mol_type = other RNA
tacctgctccagcgcgccgtggaggtc

SEQ ID NO: 29859 - RNA, 30 nt, synthetic construct
  misc_feature 1..30: note = E3 ubiquitin-protein ligase HUWE1 (1351-1360)
  source 1..30: mol_type = other RNA
tacctgctcacccaccccccgcccatcatg

SEQ ID NO: 29860 - RNA, 30 nt, synthetic construct
  misc_feature 1..30: note = 26S proteasome non-ATPase regulatory subunit 8 (142-151)
  source 1..30: mol_type = other RNA
tacctgatggagggcagctacaacaaggtg

SEQ ID NO: 29861 - RNA, 27 nt, synthetic construct
  misc_feature 1..27: note = Leucine-tRNA ligase, cytoplasmic (901-909)
  source 1..27: mol_type = other RNA
tacctgatggaggtgacccacgacctc

SEQ ID NO: 29862 - RNA, 27 nt, synthetic construct
  misc_feature 1..27: note = Striatin-interacting protein 2 (207-215)
  source 1..27: mol_type = other RNA
tacctgatggtggagaacatccgcctc

SEQ ID NO: 29863 - RNA, 27 nt, synthetic construct
  misc_feature 1..27: note = Zinc finger protein Pegasus (211-219)
  source 1..27: mol_type = other RNA
tacctgaacgacttcacccacgagatc

SEQ ID NO: 29864 - RNA, 27 nt, synthetic construct
  misc_feature 1..27: note = A-kinase anchor protein 10, mitochondrial (504-512)
  source 1..27: mol_type = other RNA
tacctgaacgacctcatccacagcgtg

SEQ ID NO: 29865 - RNA, 27 nt, synthetic construct
  misc_feature 1..27: note = RNA polymerase II subunit A C-terminal domain phosphatase (611-619)
  source 1..27: mol_type = other RNA
tacctgaacaaggagatcgaggaggcc

SEQ ID NO: 29866 - RNA, 27 nt, synthetic construct
  misc_feature 1..27: note = DNA repair protein complementing XP-G cells (242-250)
  source 1..27: mol_type = other RNA
tacctgaaccagcacatcgagcacgtg

SEQ ID NO: 29867 - RNA, 33 nt, synthetic construct
  misc_feature 1..33: note = Protein phosphatase 1G (74-84)
  source 1..33: mol_type = other RNA
tacctgcccgacatcatcaaggaccagaaggcc

SEQ ID NO: 29868 - RNA, 27 nt, synthetic construct
  misc_feature 1..27: note = Interleukin-1 receptor-associated kinase-like 2 (381-389)
  source 1..27: mol_type = other RNA
tacctgcccgaggacttcatccgcgtg

SEQ ID NO: 29869 - RNA, 27 nt, synthetic construct
  misc_feature 1..27: note = Dual specificity protein kinase CLK2 (259-267)
  source 1..27: mol_type = other RNA
tacctgccctacccgatccaccaggtg

SEQ ID NO: 29870 - RNA, 27 nt, synthetic construct
  misc_feature 1..27: note = Sterol regulatory element-binding protein 2 (379-387)
  source 1..27: mol_type = other RNA
tacctgcagcaggtgaaccacaagctc

SEQ ID NO: 29871 - RNA, 27 nt, synthetic construct
  misc_feature 1..27: note = Actin-related protein 2/3 complex subunit 4 (8-16)
  source 1..27: mol_type = other RNA
tacctgagcgccgtgcgcgccaccctc

SEQ ID NO: 29872 - RNA, 27 nt, synthetic construct
  misc_feature 1..27: note = Hsp90 co-chaperone Cdc37 (174-182)
  source 1..27: mol_type = other RNA
tacctgagcgacaacgtgcacctcgtc

SEQ ID NO: 29873 - RNA, 27 nt, synthetic construct
  misc_feature 1..27: note = Replication factor C subunit 5 (157-165)
  source 1..27: mol_type = other RNA
tacctgagcaagatcatccccgccctc

SEQ ID NO: 29874 - RNA, 27 nt, synthetic construct
  misc_feature 1..27: note = SLC45A3-BRAF fusion protein (236-244)
  source 1..27: mol_type = other RNA
tacctgagccccgacctctccaaggtg

SEQ ID NO: 29875 - RNA, 27 nt, synthetic construct
  misc_feature 1..27: note = THO complex subunit 5 homolog (225-233)
  source 1..27: mol_type = other RNA
tacctgagctccctccagccccgcctg

SEQ ID NO: 29876 - RNA, 27 nt, synthetic construct
  misc_feature 1..27: note = Histone deacetylase 3 (183-191)
  source 1..27: mol_type = other RNA
tacctgaccgaccgcgtgatgaccgtc

SEQ ID NO: 29877 - RNA, 30 nt, synthetic construct
  misc_feature 1..30: note = 40S ribosomal protein S10 (70-79)
  source 1..30: mol_type = other RNA
tacctgaccaacgagggcatccagtacctc

SEQ ID NO: 29878 - RNA, 27 nt, synthetic construct
  misc_feature 1..27: note = Heat shock protein HSP 90-alpha (142-150)
  source 1..27: mol_type = other RNA
tacctggtggccgagaaggtcaccgtg

SEQ ID NO: 29879 - RNA, 27 nt, synthetic construct
  misc_feature 1..27: note = Protein unc-93 homolog B1 (246-254)
  source 1..27: mol_type = other RNA
tacctgtacgacctcaaccacaccctg

SEQ ID NO: 29880 - RNA, 27 nt, synthetic construct
  misc_feature 1..27: note = Sodium- and chloride-dependent taurine transporter (277-285)
  source 1..27: mol_type = other RNA
tacctgtaccccgacatcacccgcctc

SEQ ID NO: 29881 - RNA, 27 nt, synthetic construct
  misc_feature 1..27: note = Cullin-7 (1355-1363)
  source 1..27: mol_type = other RNA
tacatggccgaccgcctgctcggcgtg

SEQ ID NO: 29882 - RNA, 27 nt, synthetic construct
  misc_feature 1..27: note = Kinetochore-associated protein 1 (1575-1583)
  source 1..27: mol_type = other RNA
tacatgctggagcacgtgatcaccctc

SEQ ID NO: 29883 - RNA, 27 nt, synthetic construct
  misc_feature 1..27: note = Elongation of very long chain fatty acids protein 1 (200-208)
  source 1..27: mol_type = other RNA
taccagtaccccgtgatcatccacctg

SEQ ID NO: 29884 - RNA, 27 nt, synthetic construct
  misc_feature 1..27: note = Histone deacetylase 1 (188-196)
  source 1..27: mol_type = other RNA
tacaccaccgaccgcgtgatgacggtc

SEQ ID NO: 29885 - RNA, 30 nt, synthetic construct
  misc_feature 1..30: note = Syntaxin-binding protein 5 (234-243)
  source 1..30: mol_type = other RNA
tacacctacgacgaggccatccacagcgtg

SEQ ID NO: 29886 - RNA, 27 nt, synthetic construct
  misc_feature 1..27: note = Speriolin-like protein (56-64)
  source 1..27: mol_type = other RNA
tacgtgttccccggcgtcacccgcctg

SEQ ID NO: 29887 - RNA, 33 nt, synthetic construct
  misc_feature 1..33: note = Plectin (3961-3971)
  source 1..33: mol_type = other RNA
tacgtgatcgaccccatcaagggcctgaagctc

SEQ ID NO: 29888 - RNA, 27 nt, synthetic construct
  misc_feature 1..27: note = Erythroid differentiation-related factor 1 (607-615)
  source 1..27: mol_type = other RNA
tacgtgctggagggcctcaagagcgtc

SEQ ID NO: 29889 - RNA, 27 nt, synthetic construct
  misc_feature 1..27: note = Translation initiation factor eIF-2B subunit delta (413-421)
  source 1..27: mol_type = other RNA
tacgtgctgcccgaggtcagcaaggtg

SEQ ID NO: 29890 - RNA, 45 nt, synthetic construct
  misc_feature 1..45: note = Vimentin (452-466)
  source 1..45: mol_type = other RNA
ggccaggtgatcaacgagaccagccagcaccacgacgacctggag

SEQ ID NO: 29891 - RNA, 27 nt, synthetic construct
  misc_feature 1..27: note = Ubiquitin-conjugating enzyme E2 J2 (121-129)
  source 1..27: mol_type = other RNA
ttcatggtggagaagggccccaccctg

SEQ ID NO: 29892 - RNA, 27 nt, synthetic construct
  misc_feature 1..27: note = 26S proteasome non-ATPase regulatory subunit 3 (216-224)
  source 1..27: mol_type = other RNA
cgcgtgtacgagttcctggacaagctc

SEQ ID NO: 29893 - RNA, 27 nt, synthetic construct
  misc_feature 1..27: note = E3 ubiquitin-protein ligase Hakai (341-349)
  source 1..27: mol_type = other RNA
gcccccccgcccccccccccgcccccc

SEQ ID NO: 29894 - RNA, 27 nt, synthetic construct
  misc_feature 1..27: note = Farnesyl pyrophosphate synthase (36-44)
  source 1..27: mol_type = other RNA
gcccgcctgaaggaggtgctcgagtac

SEQ ID NO: 29895 - RNA, 27 nt, synthetic construct
  misc_feature 1..27: note = Annexin A5 (92-100)
  source 1..27: mol_type = other RNA
gacgcctacgagctgaagcacgccctc

SEQ ID NO: 29896 - RNA, 27 nt, synthetic construct
  misc_feature 1..27: note = cAMP-dependent protein kinase catalytic subunit alpha (34-42)
  source 1..27: mol_type = other RNA
gaccagttcgagcgcatcaagaccctg

SEQ ID NO: 29897 - RNA, 27 nt, synthetic construct
  misc_feature 1..27: note = Cytochrome c (90-98)
  source 1..27: mol_type = other RNA
gaggagcgcgccgacctgatcgcctac

SEQ ID NO: 29898 - RNA, 27 nt, synthetic construct
  misc_feature 1..27: note = T-complex protein 1 subunit theta (418-426)
  source 1..27: mol_type = other RNA
gagctggccaagcagatcaccagctac

SEQ ID NO: 29899 - RNA, 27 nt, synthetic construct
  misc_feature 1..27: note = COMM domain-containing protein 2 (116-124)
  source 1..27: mol_type = other RNA
gagctggcccccagcctcccgtcctac

SEQ ID NO: 29900 - RNA, 27 nt, synthetic construct
  misc_feature 1..27: note = Akirin-1 (166-174)
  source 1..27: mol_type = other RNA
gagcagtacgagagcttcgtgaagttc

SEQ ID NO: 29901 - RNA, 24 nt, synthetic construct
  misc_feature 1..24: note = U5 small nuclear ribonucleoprotein 200 kDa helicase (1231-1238)
  source 1..24: mol_type = other RNA
gaggtgatcctgcaccacgagtac

SEQ ID NO: 29902 - RNA, 27 nt, synthetic construct
  misc_feature 1..27: note = ORM1-like protein 1 (9-17)
  source 1..27: mol_type = other RNA
gaggtgaaccccaacacccgcgtcatg

SEQ ID NO: 29903 - RNA, 27 nt, synthetic construct
  misc_feature 1..27: note = Proteasome subunit alpha type-5 (125-133)
  source 1..27: mol_type = other RNA
gaggtgtaccacaagagcatgaccctg

SEQ ID NO: 29904 - RNA, 27 nt, synthetic construct
  misc_feature 1..27: note = Transcription factor 25 (248-256)
  source 1..27: mol_type = other RNA
ttcgccttcgagcacagcgaggagtac

SEQ ID NO: 29905 - RNA, 27 nt, synthetic construct
  misc_feature 1..27: note = Septin-6 (154-162)
  source 1..27: mol_type = other RNA
ttcatcgcccccaccggccacagcctg

SEQ ID NO: 29906 - RNA, 27 nt, synthetic construct
  misc_feature 1..27: note = Sodium channel and clathrin linker 1 (55-63)
  source 1..27: mol_type = other RNA
ttcctggcccccctcgtgaccgagtac

SEQ ID NO: 29907 - RNA, 27 nt, synthetic construct
  misc_feature 1..27: note = Tetratricopeptide repeat protein 14 (257-265)
  source 1..27: mol_type = other RNA
ttcgtgaaccccggcgtcgtggagttc

SEQ ID NO: 29908 - RNA, 27 nt, synthetic construct
  misc_feature 1..27: note = Structural maintenance of chromosomes protein 4 (524-532)
  source 1..27: mol_type = other RNA
ggccgcatccccgggatctacggccgg

SEQ ID NO: 29909 - RNA, 30 nt, synthetic construct
  misc_feature 1..30: note = BCL-6 corepressor (860-869)
  source 1..30: mol_type = other RNA
ggccgcatcagcgacttccacgagacctac

SEQ ID NO: 29910 - RNA, 27 nt, synthetic construct
  misc_feature 1..27: note = NEDD8-activating enzyme E1 regulatory subunit (434-442)
  source 1..27: mol_type = other RNA
ggccgctaccccggggtgagcaactac

SEQ ID NO: 29911 - RNA, 27 nt, synthetic construct
  misc_feature 1..27: note = RANBP2-like and GRIP domain-containing protein 2 (188-196)
  source 1..27: mol_type = other RNA
cacgaggccgagcgcaacatcgccctg

SEQ ID NO: 29912 - RNA, 27 nt, synthetic construct
  misc_feature 1..27: note = Heterogeneous nuclear ribonucleoprotein L (348-356)
  source 1..27: mol_type = other RNA
caccccccgcccccccccccgcccccc

SEQ ID NO: 29913 - RNA, 30 nt, synthetic construct
  misc_feature 1..30: note = Nodal modulator 3 (227-236)
  source 1..30: mol_type = other RNA
caccgcttcgagcaggccttctacacctac

SEQ ID NO: 29914 - RNA, 27 nt, synthetic construct
  misc_feature 1..27: note = Mediator of RNA polymerase II transcription subunit 19 (27-35)
  source 1..27: mol_type = other RNA
aagcccccgcccccccccccgcccccc

SEQ ID NO: 29915 - RNA, 27 nt, synthetic construct
  misc_feature 1..27: note = Afadin (1323-1331)
  source 1..27: mol_type = other RNA
ctgcccccgcccccccccccgcccccc

SEQ ID NO: 29916 - RNA, 27 nt, synthetic construct
  misc_feature 1..27: note = Tubulin beta-2A chain (233-241)
  source 1..27: mol_type = other RNA
ctgcgcttccccggccagctcaacgcc

SEQ ID NO: 29917 - RNA, 27 nt, synthetic construct
  misc_feature 1..27: note = Keratinocyte-associated protein 2 (1-9)
  source 1..27: mol_type = other RNA
atggtggtcggcaccgggaccagcctg

SEQ ID NO: 29918 - RNA, 27 nt, synthetic construct
  misc_feature 1..27: note = Heat shock protein HSP 90-beta (28-36)
  source 1..27: mol_type = other RNA
aacccccaggagcgcaccctgaccctc

SEQ ID NO: 29919 - RNA, 27 nt, synthetic construct
  misc_feature 1..27: note = N-alpha-acetyltransferase 50 (23-31)
  source 1..27: mol_type = other RNA
aaccaggtgatcttccccgtcagctac

SEQ ID NO: 29920 - RNA, 27 nt, synthetic construct
  misc_feature 1..27: note = Origin recognition complex subunit 1 (665-673)
  source 1..27: mol_type = other RNA
aaccgcgtgagctcccggctgggcctc

SEQ ID NO: 29921 - RNA, 27 nt, synthetic construct
  misc_feature 1..27: note = Alanine-tRNA ligase, cytoplasmic (55-63)
  source 1..27: mol_type = other RNA
aacaccatcgaccccagccacccgatg

SEQ ID NO: 29922 - RNA, 27 nt, synthetic construct
  misc_feature 1..27: note = Histone H4 (34-42)
  source 1..27: mol_type = other RNA
aacgtgatccgcgacgccgtcacctac

SEQ ID NO: 29923 - RNA, 27 nt, synthetic construct
  misc_feature 1..27: note = Anaphase-promoting complex subunit 7 (184-192)
  source 1..27: mol_type = other RNA
caggagcgccccagcgtgacctcctac

SEQ ID NO: 29924 - RNA, 27 nt, synthetic construct
  misc_feature 1..27: note = Syntaxin-binding protein 2 (143-151)
  source 1..27: mol_type = other RNA
agcctggacgccccccactccacctac

SEQ ID NO: 29925 - RNA, 27 nt, synthetic construct
  misc_feature 1..27: note = Fructose-bisphosphate aldolase A (356-364)
  source 1..27: mol_type = other RNA
agcctgttcgtgtccaaccacgcctac

SEQ ID NO: 29926 - RNA, 27 nt, synthetic construct
  misc_feature 1..27: note = Abl interactor 1 (398-406)
  source 1..27: mol_type = other RNA
agccccccgcccccccccccgcccccc

SEQ ID NO: 29927 - RNA, 27 nt, synthetic construct
  misc_feature 1..27: note = T-complex protein 1 subunit eta (208-216)
  source 1..27: mol_type = other RNA
agccagctggtggccggcgtcgccttc

SEQ ID NO: 29928 - RNA, 27 nt, synthetic construct
  misc_feature 1..27: note = FERM domain-containing protein 4A (824-832)
  source 1..27: mol_type = other RNA
agccagtcccagcccagctcccagtac

SEQ ID NO: 29929 - RNA, 27 nt, synthetic construct
  misc_feature 1..27: note = 60S ribosome subunit biogenesis protein NIP7 homolog (126-134)
  source 1..27: mol_type = other RNA
agccagtaccagggcgtggtcgtgtac

SEQ ID NO: 29930 - RNA, 24 nt, synthetic construct
  misc_feature 1..24: note = Dolichol-phosphate mannosyltransferase subunit 3 (78-85)
  source 1..24: mol_type = other RNA
gtgggctaccgcgtcgccaccttc

SEQ ID NO: 29931 - RNA, 27 nt, synthetic construct
  misc_feature 1..27: note = Protein enabled homolog (379-387)
  source 1..27: mol_type = other RNA
gtgcccccgcccccccccccgcccccc

SEQ ID NO: 29932 - RNA, 27 nt, synthetic construct
  misc_feature 1..27: note = Endoplasmin (727-735)
  source 1..27: mol_type = other RNA
tacctgctccccgacaccaaggcctac

SEQ ID NO: 29933 - RNA, 27 nt, synthetic construct
  misc_feature 1..27: note = Elongation factor 2 (489-497)
  source 1..27: mol_type = other RNA
gagcacgcccacaacatgcgcgtgatg

SEQ ID NO: 29934 - RNA, 27 nt, synthetic construct
  misc_feature 1..27: note = T-complex protein 1 subunit eta (282-290)
  source 1..27: mol_type = other RNA
caccacagcggcgccaaggtggtcctg

SEQ ID NO: 29935 - RNA, 30 nt, synthetic construct
  misc_feature 1..30: note = 60S ribosomal protein L8 (49-58)
  source 1..30: mol_type = other RNA
atccacgaccccggccgcggggccccgctg

SEQ ID NO: 29936 - RNA, 33 nt, synthetic construct
  misc_feature 1..33: note = Heat shock protein HSP 90-beta (441-451)
  source 1..33: mol_type = other RNA
atccacgaggacagcaccaaccgccggcgcctg

SEQ ID NO: 29937 - RNA, 27 nt, synthetic construct
  misc_feature 1..27: note = F-actin-capping protein subunit beta (235-243)
  source 1..27: mol_type = other RNA
aagaccaaggacatcgtgaacggcctg

SEQ ID NO: 29938 - RNA, 27 nt, synthetic construct
  misc_feature 1..27: note = Transcription activator BRG1 (899-907)
  source 1..27: mol_type = other RNA
acccactacgtggccccccgccggctg

SEQ ID NO: 29939 - RNA, 27 nt, synthetic construct
  misc_feature 1..27: note = Actin-related protein 2 (378-386)
  source 1..27: mol_type = other RNA
taccaggagaagggcgtgcgcgtcctg

SEQ ID NO: 29940 - RNA, 27 nt, synthetic construct
  misc_feature 1..27: note = Centromere protein W (77-85)
  source 1..27: mol_type = other RNA
gccgccgcgaaggtgatcctgaagaag

SEQ ID NO: 29941 - RNA, 27 nt, synthetic construct
  misc_feature 1..27: note = Histone H1.1 (63-71)
  source 1..27: mol_type = other RNA
gccgccctgaagaaggcgctcgccgcc

SEQ ID NO: 29942 - RNA, 27 nt, synthetic construct
  misc_feature 1..27: note = MICOS complex subunit MIC60 (93-101)
  source 1..27: mol_type = other RNA
gccgcctacaacgtgcccctgccgaag

SEQ ID NO: 29943 - RNA, 30 nt, synthetic construct
  misc_feature 1..30: note = Crooked neck-like protein 1 (493-502)
  source 1..30: mol_type = other RNA
gccgaggccgaggcggtgcgcgaggtctac

SEQ ID NO: 29944 - RNA, 27 nt, synthetic construct
  misc_feature 1..27: note = Dystonin (6939-6947)
  source 1..27: mol_type = other RNA
gccgaggccgagcagaccctgcgcttc

SEQ ID NO: 29945 - RNA, 27 nt, synthetic construct
  misc_feature 1..27: note = Exportin-T (39-47)
  source 1..27: mol_type = other RNA
gccgaggccctggcgcagcgcacctac

SEQ ID NO: 29946 - RNA, 27 nt, synthetic construct
  misc_feature 1..27: note = DNA replication licensing factor MCM5 (620-628)
  source 1..27: mol_type = other RNA
gccgaggccctgagcaagatgaagctc

SEQ ID NO: 29947 - RNA, 27 nt, synthetic construct
  misc_feature 1..27: note = Chondroitin sulfate glucuronyltransferase (568-576)
  source 1..27: mol_type = other RNA
gccgaggcccccagccaggtgcgcctg

SEQ ID NO: 29948 - RNA, 27 nt, synthetic construct
  misc_feature 1..27: note = 78 kDa glucose-regulated protein (157-165)
  source 1..27: mol_type = other RNA
gccgaggcctacctgggcaagaaggtg

SEQ ID NO: 29949 - RNA, 30 nt, synthetic construct
  misc_feature 1..30: note = X-ray repair cross-complementing protein 6 (224-233)
  source 1..30: mol_type = other RNA
gccgaggacgaggacctgcgcgtgcacttc

SEQ ID NO: 29950 - RNA, 27 nt, synthetic construct
  misc_feature 1..27: note = WD and tetratricopeptide repeats protein 1 (45-53)
  source 1..27: mol_type = other RNA
gccgaggacggcctgatccgccagtac

SEQ ID NO: 29951 - RNA, 30 nt, synthetic construct
  misc_feature 1..30: note = DNA replication licensing factor MCM3 (278-287)
  source 1..30: mol_type = other RNA
gccgaggacatcgccaagatcaagaagttc

SEQ ID NO: 29952 - RNA, 30 nt, synthetic construct
  misc_feature 1..30: note = Transmembrane emp24 domain-containing protein 3 (50-59)
  source 1..30: mol_type = other RNA
gccgaggacctgaacagccgcgtgtcctac

SEQ ID NO: 29953 - RNA, 30 nt, synthetic construct
  misc_feature 1..30: note = Transmembrane emp24 domain-containing protein 7 (179-188)
  source 1..30: mol_type = other RNA
gccgaggacctgaacacccgcgtggcctac

SEQ ID NO: 29954 - RNA, 33 nt, synthetic construct
  misc_feature 1..33: note = Retinoblastoma-like protein 1 (193-203)
  source 1..33: mol_type = other RNA
gccgaggaggagatcggcaccccccgcaagttc

SEQ ID NO: 29955 - RNA, 27 nt, synthetic construct
  misc_feature 1..27: note = Clathrin heavy chain 1 (360-368)
  source 1..27: mol_type = other RNA
gccgaggagctgttcgcccgcaagttc

SEQ ID NO: 29956 - RNA, 27 nt, synthetic construct
  misc_feature 1..27: note = Alpha-2-macroglobulin receptor-associated protein (250-258)
  source 1..27: mol_type = other RNA
gccgagttcgaggagccccgcgtgatc

SEQ ID NO: 29957 - RNA, 27 nt, synthetic construct
  misc_feature 1..27: note = Immunoglobulin-binding protein 1 (122-130)
  source 1..27: mol_type = other RNA
gccgagttcgagctgcccaagaccatg

SEQ ID NO: 29958 - RNA, 27 nt, synthetic construct
  misc_feature 1..27: note = Myeloid leukemia factor 2 (224-232)
  source 1..27: mol_type = other RNA
gccgagggccccccgcgcctggccatc

SEQ ID NO: 29959 - RNA, 33 nt, synthetic construct
  misc_feature 1..33: note = Histone-lysine N-methyltransferase NSD3 (1027-1037)
  source 1..33: mol_type = other RNA
gccgagggccagaccagcatcaacaagaccttc

SEQ ID NO: 29960 - RNA, 27 nt, synthetic construct
  misc_feature 1..27: note = Plectin (1687-1695)
  source 1..27: mol_type = other RNA
gccgagggcaccgcccagcagcgcctg

SEQ ID NO: 29961 - RNA, 27 nt, synthetic construct
  misc_feature 1..27: note = RNA-binding protein 34 (222-230)
  source 1..27: mol_type = other RNA
gccgagggcaccctgagcaagaagctc

SEQ ID NO: 29962 - RNA, 27 nt, synthetic construct
  misc_feature 1..27: note = Perilipin-2 (303-311)
  source 1..27: mol_type = other RNA
gccgagcacatcgagagccgcaccctg

SEQ ID NO: 29963 - RNA, 27 nt, synthetic construct
  misc_feature 1..27: note = Secernin-1 (219-227)
  source 1..27: mol_type = other RNA
gccgagcaccccgagctgcgcagctac

SEQ ID NO: 29964 - RNA, 30 nt, synthetic construct
  misc_feature 1..30: note = DNA dC-dU-editing enzyme APOBEC-3D (121-130)
  source 1..30: mol_type = other RNA
gccgagcaccccaacgtgaccctgaccatc

SEQ ID NO: 29965 - RNA, 27 nt, synthetic construct
  misc_feature 1..27: note = Vacuolar protein sorting-associated protein 13A (547-555)
  source 1..27: mol_type = other RNA
gccgagcacagcaccgtgatcaccttc

SEQ ID NO: 29966 - RNA, 27 nt, synthetic construct
  misc_feature 1..27: note = Syntaxin-18 (279-287)
  source 1..27: mol_type = other RNA
gccgagatcgacagcatccaccagctg

SEQ ID NO: 29967 - RNA, 30 nt, synthetic construct
  misc_feature 1..30: note = Nesprin-2 (1575-1584)
  source 1..30: mol_type = other RNA
gccgagatcgagatcgtgaaggaggagttc

SEQ ID NO: 29968 - RNA, 33 nt, synthetic construct
  misc_feature 1..33: note = WD repeat-containing protein 91 (30-40)
  source 1..33: mol_type = other RNA
gccgagatcaaggccgacaaggagaagggcttc

SEQ ID NO: 29969 - RNA, 27 nt, synthetic construct
  misc_feature 1..27: note = Tubulin-specific chaperone A (54-62)
  source 1..27: mol_type = other RNA
gccgagatcctgcaggagagccgcatg

SEQ ID NO: 29970 - RNA, 33 nt, synthetic construct
  misc_feature 1..33: note = MAP3K12-binding inhibitory protein 1 (172-182)
  source 1..33: mol_type = other RNA
gccgagatcaacgagaacaacgtgcgcgagttc

SEQ ID NO: 29971 - RNA, 30 nt, synthetic construct
  misc_feature 1..30: note = Myosin light polypeptide 6 (107-116)
  source 1..30: mol_type = other RNA
gccgagatccgccacgtgctggtcaccctc

SEQ ID NO: 29972 - RNA, 27 nt, synthetic construct
  misc_feature 1..27: note = BAG64702.1 (1-9)
  source 1..27: mol_type = other RNA
gccgagatcaccgacaagctgggcctc

SEQ ID NO: 29973 - RNA, 27 nt, synthetic construct
  misc_feature 1..27: note = Nuclear migration protein nudC (2-10)
  source 1..27: mol_type = other RNA
gccgagaagctgatcacccagaccttc

SEQ ID NO: 29974 - RNA, 30 nt, synthetic construct
  misc_feature 1..30: note = Spectrin alpha chain, non-erythrocytic 1 (381-390)
  source 1..30: mol_type = other RNA
gccgagctggaccgccagatcaagagcttc

SEQ ID NO: 29975 - RNA, 30 nt, synthetic construct
  misc_feature 1..30: note = Transcriptional regulator ATRX (1293-1302)
  source 1..30: mol_type = other RNA
gccgagctggaggagaaccagcgcagctac

SEQ ID NO: 29976 - RNA, 27 nt, synthetic construct
  misc_feature 1..27: note Dolichyl-diphosphooligosaccharide-proteinosyltransferase subunit 2 (288-296)
  source 1..27: mol_type = other RNA
gccgagctgaccccccaccagaccttc

SEQ ID NO: 29977 - RNA, 27 nt, synthetic construct
  misc_feature 1..27: note = Nuclear receptor corepressor 1 (522-530)
  source 1..27: mol_type = other RNA
gccgagaacgaccccacccgccagtac

SEQ ID NO: 29978 - RNA, 27 nt, synthetic construct
  misc_feature 1..27: note = General transcription factor 3C polypeptide 1 (42-50)
  source 1..27: mol_type = other RNA
gccgagaacggcctgaccgtgcgcctc

SEQ ID NO: 29979 - RNA, 33 nt, synthetic construct
  misc_feature 1..33: note = Eukaryotic translation initiation factor 4 gamma 1 (544-554)
  source 1..33: mol_type = other RNA
gccgagaacatccagcccggcgagcagaagtac

SEQ ID NO: 29980 - RNA, 27 nt, synthetic construct
  misc_feature 1..27: note = Glycogen phosphorylase, muscle form (273-281)
  source 1..27: mol_type = other RNA
gccgagaacatcagccgcgtgctgtac

SEQ ID NO: 29981 - RNA, 27 nt, synthetic construct
  misc_feature 1..27: note = X-ray repair cross-complementing protein 5 (48-56)
  source 1..27: mol_type = other RNA
gccgagaacaaggacgagatcgccctg

SEQ ID NO: 29982 - RNA, 27 nt, synthetic construct
  misc_feature 1..27: note = Protein kinase C delta type (405-413)
  source 1..27: mol_type = other RNA
gccgagaaccccttcctgacccacctc

SEQ ID NO: 29983 - RNA, 30 nt, synthetic construct
  misc_feature 1..30: note = ATP-dependent RNA helicase DDX42 (93-102)
  source 1..30: mol_type = other RNA
gccgagaacagccccacccgccagcagttc

SEQ ID NO: 29984 - RNA, 27 nt, synthetic construct
  misc_feature 1..27: note = E3 ubiquitin-protein ligase TTC3 (1392-1400)
  source 1..27: mol_type = other RNA
gccgagaacgtggccggccaccagatc

SEQ ID NO: 29985 - RNA, 27 nt, synthetic construct
  misc_feature 1..27: note = RAB6A-GEF complex partner protein 1 (906-914)
  source 1..27: mol_type = other RNA
gccgagaacgtgcccgccagcaagttc

SEQ ID NO: 29986 - RNA, 33 nt, synthetic construct
  misc_feature 1..33: note = Vigilin (1010-1020)
  source 1..33: mol_type = other RNA
gccgagcaggaggaccgcgccctgcggagcttc

SEQ ID NO: 29987 - RNA, 27 nt, synthetic construct
  misc_feature 1..27: note = Plectin (2014-2022)
  source 1..27: mol_type = other RNA
gccgagcaggagagcgcccgccagctg

SEQ ID NO: 29988 - RNA, 33 nt, synthetic construct
  misc_feature 1..33: note = B-cell receptor-associated protein 31 (21-31)
  source 1..33: mol_type = other RNA
gccgagagcgcctccgaggcggccaagaagtac

SEQ ID NO: 29989 - RNA, 27 nt, synthetic construct
  misc_feature 1..27: note = T-complex protein 1 subunit beta (113-121)
  source 1..27: mol_type = other RNA
gccgagagcctgatcgccaagaagatc

SEQ ID NO: 29990 - RNA, 27 nt, synthetic construct
  misc_feature 1..27: note = Sphingomyelin phosphodiesterase 4 (513-521)
  source 1..27: mol_type = other RNA
gccgagagccccgccggccactccttc

SEQ ID NO: 29991 - RNA, 27 nt, synthetic construct
  misc_feature 1..27: note = Protein THEMIS2 (120-128)
  source 1..27: mol_type = other RNA
gccgagagccccgagcgcgtgctgctc

SEQ ID NO: 29992 - RNA, 33 nt, synthetic construct
  misc_feature 1..33: note = Chitinase domain-containing protein 1 (57-67)
  source 1..33: mol_type = other RNA
gccgagagcgtggtcctggagcaccgctcctac

SEQ ID NO: 29993 - RNA, 27 nt, synthetic construct
  misc_feature 1..27: note = Poly(A)-specific ribonuclease PARN (455-463)
  source 1..27: mol_type = other RNA
gccgagagctaccgcatccagacctac

SEQ ID NO: 29994 - RNA, 30 nt, synthetic construct
  misc_feature 1..30: note = Translation initiation factor eIF-2B subunit epsilon (406-415)
  source 1..30: mol_type = other RNA
gccgaggtgggcgccgcggggaagggctac

SEQ ID NO: 29995 - RNA, 33 nt, synthetic construct
  misc_feature 1..33: note = RNA-binding protein 8A (78-88)
  source 1..33: mol_type = other RNA
gccgagtacggcgagatcaagaacatccacctg

SEQ ID NO: 29996 - RNA, 27 nt, synthetic construct
  misc_feature 1..27: note = Histone deacetylase 1 (239-247)
  source 1..27: mol_type = other RNA
gccatcttcaagcccgtgatgagcaag

SEQ ID NO: 29997 - RNA, 27 nt, synthetic construct
  misc_feature 1..27: note = Pre-mRNA-processing factor 6 (764-772)
  source 1..27: mol_type = other RNA
gccatcctggagaagagccgcctcaag

SEQ ID NO: 29998 - RNA, 33 nt, synthetic construct
  misc_feature 1..33: note = Serine/threonine-protein phosphatase 2A 65 kDa regulatory subunit A alpha isoform (457-467)
  source 1..33: mol_type = other RNA
gccatccgcgaggccgcgaccagcaacctgaag

SEQ ID NO: 29999 - RNA, 27 nt, synthetic construct
  misc_feature 1..27: note = Cleavage and polyadenylation specificity factor subunit 7 (346-354)
  source 1..27: mol_type = other RNA
gccatcagctccagcgccatctccaag

SEQ ID NO: 30000 - RNA, 27 nt, synthetic construct
  misc_feature 1..27: note = 39S ribosomal protein L20, mitochondrial (106-114)
  source 1..27: mol_type = other RNA
gccatctacgagcccaagaccttcaag

SEQ ID NO: 30001 - RNA, 27 nt, synthetic construct
  misc_feature 1..27: note = Melanoma-associated antigen F1 (61-69)
  source 1..27: mol_type = other RNA
gccctggccgcgaaggccctcgcccgc

SEQ ID NO: 30002 - RNA, 27 nt, synthetic construct
  misc_feature 1..27: note = Proteasome subunit alpha type-4 (120-128)
  source 1..27: mol_type = other RNA
gccctggccatcaaggtgctcaacaag

SEQ ID NO: 30003 - RNA, 27 nt, synthetic construct
  misc_feature 1..27: note = Lysine-specific demethylase 2B (171-179)
  source 1..27: mol_type = other RNA
gccctggccaacaagcccctccgccgg

SEQ ID NO: 30004 - RNA, 27 nt, synthetic construct
  misc_feature 1..27: note = Eukaryotic translation initiation factor 3 subunit C-like protein (251-259)
  source 1..27: mol_type = other RNA
gccctggccagccgcttcctcaagaag

SEQ ID NO: 30005 - RNA, 27 nt, synthetic construct
  misc_feature 1..27: note = Translation factor GUF1, mitochondrial (274-282)
  source 1..27: mol_type = other RNA
gccctgttcgacggcgtggtcagcaag

SEQ ID NO: 30006 - RNA, 27 nt, synthetic construct
  misc_feature 1..27: note = V-type proton ATPase subunit E 1 (214-222)
  source 1..27: mol_type = other RNA
gccctgttcggcgccaacgcgaaccgc

SEQ ID NO: 30007 - RNA, 30 nt, synthetic construct
  misc_feature 1..30: note = Sorting nexin-5 (315-324)
  source 1..30: mol_type = other RNA
gccctgatcgactacgagaacagcaacaag

SEQ ID NO: 30008 - RNA, 30 nt, synthetic construct
  misc_feature 1..30: note = T-complex protein 1 subunit zeta (279-288)
  source 1..30: mol_type = other RNA
gccctgatcaagcacaagcccagcgtgaag

SEQ ID NO: 30009 - RNA, 30 nt, synthetic construct
  misc_feature 1..30: note = 60S ribosomal protein L9 (159-168)
  source 1..30: mol_type = other RNA
gccctgatccagcaggccaccaccgtgaag

SEQ ID NO: 30010 - RNA, 30 nt, synthetic construct
  misc_feature 1..30: note = Actin-related protein 2/3 complex subunit 5 (58-67)
  source 1..30: mol_type = other RNA
gccctgaagaaccccccgatcaacaccaag

SEQ ID NO: 30011 - RNA, 30 nt, synthetic construct
  misc_feature 1..30: note = 40S ribosomal protein S15a (10-19)
  source 1..30: mol_type = other RNA
gccctgaagagcatcaacaacgccgagaag

SEQ ID NO: 30012 - RNA, 27 nt, synthetic construct
  misc_feature 1..27: note = Eukaryotic translation initiation factor 4 gamma 1 (785-793)
  source 1..27: mol_type = other RNA
gccctgaaggtgcccaccaccgagaag

SEQ ID NO: 30013 - RNA, 33 nt, synthetic construct
  misc_feature 1..33: note = Prefoldin subunit 6 (48-58)
  source 1..33: mol_type = other RNA
gccctgctcgacggcagcaacgtggtcttcaag

SEQ ID NO: 30014 - RNA, 27 nt, synthetic construct
  misc_feature 1..27: note = Serine hydroxymethyltransferase, mitochondrial (340-348)
  source 1..27: mol_type = other RNA
gccctgctcgagcgcggctacagcctg

SEQ ID NO: 30015 - RNA, 27 nt, synthetic construct
  misc_feature 1..27: note = Interferon alpha-inducible protein 6 (113-121)
  source 1..27: mol_type = other RNA
gccctgatgggctacgccacccacaag

SEQ ID NO: 30016 - RNA, 27 nt, synthetic construct
  misc_feature 1..27: note = Engulfment and cell motility protein 2 (573-581)
  source 1..27: mol_type = other RNA
gccctgaaccacaaggtgctccactac

SEQ ID NO: 30017 - RNA, 27 nt, synthetic construct
  misc_feature 1..27: note = 60S ribosomal protein L4 (132-140)
  source 1..27: mol_type = other RNA
gccctgcccgccctcgtgatgagcaag

SEQ ID NO: 30018 - RNA, 27 nt, synthetic construct
  misc_feature 1..27: note = AT-rich interactive domain-containing protein 4B (407-415)
  source 1..27: mol_type = other RNA
gccctgcccgagaaggtggtcaacaag

SEQ ID NO: 30019 - RNA, 30 nt, synthetic construct
  misc_feature 1..30: note = m7GpppX diphosphatase (320-329)
  source 1..30: mol_type = other RNA
gccctgcgcgccgacgaccccctcctgaag

SEQ ID NO: 30020 - RNA, 27 nt, synthetic construct
  misc_feature 1..27: note = Probable helicase senataxin (1619-1627)
  source 1..27: mol_type = other RNA
gccctgagcccctccctcaagaacaag

SEQ ID NO: 30021 - RNA, 27 nt, synthetic construct
  misc_feature 1..27: note = Transcription initiation factor IIE subunit beta (16-24)
  source 1..27: mol_type = other RNA
gccctgagcacccccgtggtcgagaag

SEQ ID NO: 30022 - RNA, 30 nt, synthetic construct
  misc_feature 1..30: note = Nuclear receptor corepressor 1 (607-616)
  source 1..30: mol_type = other RNA
gccctggtgagcacccccgtccgcaccaag

SEQ ID NO: 30023 - RNA, 27 nt, synthetic construct
  misc_feature 1..27: note = F-box only protein 21 (373-381)
  source 1..27: mol_type = other RNA
gccctgtacggcgtggtcaacgtgaag

SEQ ID NO: 30024 - RNA, 33 nt, synthetic construct
  misc_feature 1..33: note = Cytochrome c oxidase subunit 7A-related protein, mitochondrial (104-114)
  source 1..33: mol_type = other RNA
gccctgtacatggccagccagcccaagaacaag

SEQ ID NO: 30025 - RNA, 27 nt, synthetic construct
  misc_feature 1..27: note = Anaphase-promoting complex subunit 1 (1587-1595)
  source 1..27: mol_type = other RNA
gccctgtacccccacttcccggcccac

SEQ ID NO: 30026 - RNA, 27 nt, synthetic construct
  misc_feature 1..27: note = Nucleosome assembly protein 1-like 4 (97-105)
  source 1..27: mol_type = other RNA
gccctgtaccagcccctcttcgacaag

SEQ ID NO: 30027 - RNA, 27 nt, synthetic construct
  misc_feature 1..27: note = Mitochondrial ubiquitin ligase activator of NFKB 1 (24-32)
  source 1..27: mol_type = other RNA
gccctgtacagcgtgtaccgccagaag

SEQ ID NO: 30028 - RNA, 27 nt, synthetic construct
  misc_feature 1..27: note = Pyruvate kinase PKM (21-29)
  source 1..27: mol_type = other RNA
gccatggccgacaccttcctggagcac

SEQ ID NO: 30029 - RNA, 27 nt, synthetic construct
  misc_feature 1..27: note = Baculoviral IAP repeat-containing protein 6 (2448-2456)
  source 1..27: mol_type = other RNA
gccatgaagcccaagccgctgagcgtg

SEQ ID NO: 30030 - RNA, 33 nt, synthetic construct
  misc_feature 1..33: note = NAD(P)H dehydrogenase (quinone) 1 (128-138)
  source 1..33: mol_type = other RNA
gccatgtacgacaagggccccttccgcagcaag

SEQ ID NO: 30031 - RNA, 24 nt, synthetic construct
  misc_feature 1..24: note = Lysine-specific demethylase 5D (795-802)
  source 1..24: mol_type = other RNA
gccaacaaggtgcgcgtcgccctg

SEQ ID NO: 30032 - RNA, 27 nt, synthetic construct
  misc_feature 1..27: note = Major facilitator superfamily domain-containing protein 12 (11-19)
  source 1..27: mol_type = other RNA
gcccccagcccgcgccccctgtccctc

SEQ ID NO: 30033 - RNA, 27 nt, synthetic construct
  misc_feature 1..27: note = THO complex subunit 4 (51-59)
  source 1..27: mol_type = other RNA
gccccctacagccgcccgaagcagctg

SEQ ID NO: 30034 - RNA, 27 nt, synthetic construct
  misc_feature 1..27: note = 40S ribosomal protein S3 (44-52)
  source 1..27: mol_type = other RNA
gcccaggccgagagcctgcgctacaag

SEQ ID NO: 30035 - RNA, 33 nt, synthetic construct
  misc_feature 1..33: note = Hydroxymethylglutaryl-CoA synthase, cytoplasmic (393-403)
  source 1..33: mol_type = other RNA
gcccagtacagcccccagcagctggccggcaag

SEQ ID NO: 30036 - RNA, 30 nt, synthetic construct
  misc_feature 1..30: note = Nucleolar protein 58 (344-353)
  source 1..30: mol_type = other RNA
gccagcctggtgggccagacctcccccaag

SEQ ID NO: 30037 - RNA, 27 nt, synthetic construct
  misc_feature 1..27: note = Casein kinase II subunit beta (204-212)
  source 1..27: mol_type = other RNA
gccagcaacttcaagtcccccgtgaag

SEQ ID NO: 30038 - RNA, 27 nt, synthetic construct
  misc_feature 1..27: note = Sec1 family domain-containing protein 1 (482-490)
  source 1..27: mol_type = other RNA
gccagctacggctccaccaccacgaag

SEQ ID NO: 30039 - RNA, 33 nt, synthetic construct
  misc_feature 1..33: note = Actin, cytoplasmic 2 (19-29)
  source 1..33: mol_type = other RNA
gccaccgccgcgagctccagctccctggagaag

SEQ ID NO: 30040 - RNA, 30 nt, synthetic construct
  misc_feature 1..30: note = Receptor expression-enhancing protein 3 (130-139)
  source 1..30: mol_type = other RNA
gccaccgccgcggtgaccgccgccgtcaag

SEQ ID NO: 30041 - RNA, 27 nt, synthetic construct
  misc_feature 1..27: note = Mediator of RNA polymerase II transcription subunit 12 (294-302)
  source 1..27: mol_type = other RNA
gccaccgccggcttcaccatcgggcgc

SEQ ID NO: 30042 - RNA, 27 nt, synthetic construct
  misc_feature 1..27: note = Kinetochore protein Nuf2 (353-361)
  source 1..27: mol_type = other RNA
gccaccgcccagttcaagatcaacaag

SEQ ID NO: 30043 - RNA, 27 nt, synthetic construct
  misc_feature 1..27: note = E3 ubiquitin-protein ligase makorin-1 (117-125)
  source 1..27: mol_type = other RNA
gccaccgccaccgagctgacgaccaag

SEQ ID NO: 30044 - RNA, 27 nt, synthetic construct
  misc_feature 1..27: note = Adenomatous polyposis coli protein (1083-1091)
  source 1..27: mol_type = other RNA
gccaccgacatccccagctcccagaag

SEQ ID NO: 30045 - RNA, 27 nt, synthetic construct
  misc_feature 1..27: note = Myosin-9 (540-548)
  source 1..27: mol_type = other RNA
gccaccgacaagagcttcgtggagaag

SEQ ID NO: 30046 - RNA, 27 nt, synthetic construct
  misc_feature 1..27: note = Probable ATP-dependent RNA helicase DHX37 (603-611)
  source 1..27: mol_type = other RNA
gccaccttccccgtggccccgcgctac

SEQ ID NO: 30047 - RNA, 33 nt, synthetic construct
  misc_feature 1..33: note = Protein transport protein Sec31A (61-71)
  source 1..33: mol_type = other RNA
gccaccttcagctccagccaccgctaccacaag

SEQ ID NO: 30048 - RNA, 27 nt, synthetic construct
  misc_feature 1..27: note = Exosome complex component RRP41 (79-87)
  source 1..27: mol_type = other RNA
gccaccttcagcaccggcgagcgcaag

SEQ ID NO: 30049 - RNA, 30 nt, synthetic construct
  misc_feature 1..30: note = Angio-associated migratory cell protein (18-27)
  source 1..30: mol_type = other RNA
gccaccggcgacatgagcgggctgctcaag

SEQ ID NO: 30050 - RNA, 27 nt, synthetic construct
  misc_feature 1..27: note = Trans-3-hydroxy-L-proline dehydratase (302-310)
  source 1..27: mol_type = other RNA
gccaccggcagcgtgttcaccgggaag

SEQ ID NO: 30051 - RNA, 27 nt, synthetic construct
  misc_feature 1..27: note = Lamina-associated polypeptide 2, isoform alpha (583-591)
  source 1..27: mol_type = other RNA
gccacccacaccgccttcgtggcgaag

SEQ ID NO: 30052 - RNA, 27 nt, synthetic construct
  misc_feature 1..27: note = Helicase with zinc finger domain 2 (1314-1322)
  source 1..27: mol_type = other RNA
gccaccatcaccaaggtgctgcagaag

SEQ ID NO: 30053 - RNA, 27 nt, synthetic construct
  misc_feature 1..27: note = Hexokinase-2 (388-396)
  source 1..27: mol_type = other RNA
gccaccctggccgcggtgctccagcgc

SEQ ID NO: 30054 - RNA, 30 nt, synthetic construct
  misc_feature 1..30: note = Fanconi anemia group I protein (1123-1132)
  source 1..30: mol_type = other RNA
gccaccctgcccaaccagccggtggagaag

SEQ ID NO: 30055 - RNA, 27 nt, synthetic construct
  misc_feature 1..27: note = Pescadillo homolog (14-22)
  source 1..27: mol_type = other RNA
gccaccaactacatcacccgcaacaag

SEQ ID NO: 30056 - RNA, 27 nt, synthetic construct
  misc_feature 1..27: note = Nucleolar and spindle-associated protein 1 (346-354)
  source 1..27: mol_type = other RNA
gccacccagacccccgtgagcaacaag

SEQ ID NO: 30057 - RNA, 27 nt, synthetic construct
  misc_feature 1..27: note = Retinoblastoma-associated protein (27-35)
  source 1..27: mol_type = other RNA
gccaccagcgccttccagacccagaag

SEQ ID NO: 30058 - RNA, 27 nt, synthetic construct
  misc_feature 1..27: note = DNA repair protein XRCC2 (193-201)
  source 1..27: mol_type = other RNA
gccaccacccagacgatcatgcagaag

SEQ ID NO: 30059 - RNA, 30 nt, synthetic construct
  misc_feature 1..30: note = Derlin-1 (21-30)
  source 1..30: mol_type = other RNA
gccaccgtggccgtccccctggtgggcaag

SEQ ID NO: 30060 - RNA, 27 nt, synthetic construct
  misc_feature 1..27: note = Pre-mRNA-processing-splicing factor 8 (765-773)
  source 1..27: mol_type = other RNA
gccaccgtggacaagaccgtctgcaag

SEQ ID NO: 30061 - RNA, 30 nt, synthetic construct
  misc_feature 1..30: note = Importin subunit beta-1 (862-871)
  source 1..30: mol_type = other RNA
gccacctgggccaccaaggagctgcgcaag

SEQ ID NO: 30062 - RNA, 30 nt, synthetic construct
  misc_feature 1..30: note = 60S ribosomal protein L13 (23-32)
  source 1..30: mol_type = other RNA
gccacctggttcaaccagcccgcccgcaag

SEQ ID NO: 30063 - RNA, 30 nt, synthetic construct
  misc_feature 1..30: note = DNA (cytosine-5)-methyltransferase 3A (168-177)
  source 1..30: mol_type = other RNA
gccacctacaacaagcagcccatgtaccgc

SEQ ID NO: 30064 - RNA, 27 nt, synthetic construct
  misc_feature 1..27: note = Putative rhophilin-2-like protein RHPN2P1 (502-510)
  source 1..27: mol_type = other RNA
gccacctacagcgtgggcatgcagaag

SEQ ID NO: 30065 - RNA, 30 nt, synthetic construct
  misc_feature 1..30: note = TRAF2 and NCK-interacting protein kinase (83-92)
  source 1..30: mol_type = other RNA
gccacctactacggcgccttcatcaagaag

SEQ ID NO: 30066 - RNA, 27 nt, synthetic construct
  misc_feature 1..27: note = T-complex protein 1 subunit gamma (73-81)
  source 1..27: mol_type = other RNA
gccgtggcccacgcgctgaccgagaag

SEQ ID NO: 30067 - RNA, 30 nt, synthetic construct
  misc_feature 1..30: note = WD repeat-containing protein 3 (14-23)
  source 1..30: mol_type = other RNA
gccgtgttcggcgtcatcgggagccagaag

SEQ ID NO: 30068 - RNA, 33 nt, synthetic construct
  misc_feature 1..33: note = Importin subunit alpha-1 (338-348)
  source 1..33: mol_type = other RNA
gccgtgttccccagcctgctcaccaacccgaag

SEQ ID NO: 30069 - RNA, 30 nt, synthetic construct
  misc_feature 1..30: note = Nucleoside diphosphate kinase 6 (39-48)
  source 1..30: mol_type = other RNA
gccgtgcaccagcagatcctgagcaacaag

SEQ ID NO: 30070 - RNA, 27 nt, synthetic construct
  misc_feature 1..27: note = Methylsterol monooxygenase 1 (15-23)
  source 1..27: mol_type = other RNA
gccgtgatcgaggacacctggcactac

SEQ ID NO: 30071 - RNA, 33 nt, synthetic construct
  misc_feature 1..33: note = Protein HIRA (394-404)
  source 1..33: mol_type = other RNA
gccgtgatcgagaaccccgagatgctgaagtac

SEQ ID NO: 30072 - RNA, 27 nt, synthetic construct
  misc_feature 1..27: note = Probable phospholipid-transporting ATPase IF (301-309)
  source 1..27: mol_type = other RNA
gccgtgatcagcaccatcctgaagtac

SEQ ID NO: 30073 - RNA, 27 nt, synthetic construct
  misc_feature 1..27: note = Integrator complex subunit 12 (240-248)
  source 1..27: mol_type = other RNA
gccgtgaaggaccccctggtcaagaag

SEQ ID NO: 30074 - RNA, 27 nt, synthetic construct
  misc_feature 1..27: note = Nuclear pore complex protein Nup160 (1177-1185)
  source 1..27: mol_type = other RNA
gccgtgctgggcaaggggcaccagtac

SEQ ID NO: 30075 - RNA, 27 nt, synthetic construct
  misc_feature 1..27: note = Cyclin-I (179-187)
  source 1..27: mol_type = other RNA
gccgtgctgaccaagcagctcctgcac

SEQ ID NO: 30076 - RNA, 30 nt, synthetic construct
  misc_feature 1..30: note = Signal peptidase complex catalytic subunit SEC11C (180-189)
  source 1..30: mol_type = other RNA
gccgtgatgggcgcctacgtcctgctcaag

SEQ ID NO: 30077 - RNA, 30 nt, synthetic construct
  misc_feature 1..30: note = Structural maintenance of chromosomes protein 4 (1190-1199)
  source 1..30: mol_type = other RNA
gccgtgaaccccaaggagatcgccagcaag

SEQ ID NO: 30078 - RNA, 27 nt, synthetic construct
  misc_feature 1..27: note = Sororin (53-61)
  source 1..27: mol_type = other RNA
gccgtgcgcaagcccatcgtcctgaag

SEQ ID NO: 30079 - RNA, 27 nt, synthetic construct
  misc_feature 1..27: note = Histone H2B type 1-K (118-126)
  source 1..27: mol_type = other RNA
gccgtgaccaagtacaccagcgccaag

SEQ ID NO: 30080 - RNA, 33 nt, synthetic construct
  misc_feature 1..33: note = Nuclear pore complex protein Nup160 (1113-1123)
  source 1..33: mol_type = other RNA
gccgtgtacgaccgccccggcgccagcccgaag

SEQ ID NO: 30081 - RNA, 27 nt, synthetic construct
  misc_feature 1..27: note = Integrator complex subunit 8 (269-277)
  source 1..27: mol_type = other RNA
gccgtgtacgagaacgcccgcgagaag

SEQ ID NO: 30082 - RNA, 27 nt, synthetic construct
  misc_feature 1..27: note = Toll-interacting protein (84-92)
  source 1..27: mol_type = other RNA
gccgtgtacgagacccccaccgcccac

SEQ ID NO: 30083 - RNA, 33 nt, synthetic construct
  misc_feature 1..33: note = Ras GTPase-activating protein-binding protein 1 (54-64)
  source 1..33: mol_type = other RNA
gccgtgtacggccagaaggagatccaccgcaag

SEQ ID NO: 30084 - RNA, 27 nt, synthetic construct
  misc_feature 1..27: note = Amyloid protein-binding protein 2 (337-345)
  source 1..27: mol_type = other RNA
gcctacagctcctacgtgcaccagtac

SEQ ID NO: 30085 - RNA, 27 nt, synthetic construct
  misc_feature 1..27: note = 182 kDa tankyrase-1-binding protein (415-423)
  source 1..27: mol_type = other RNA
gacgcccacctgcgccccaccagcctc

SEQ ID NO: 30086 - RNA, 24 nt, synthetic construct
  misc_feature 1..24: note = Cytoplasmic FMR1-interacting protein 2 (285-292)
  source 1..24: mol_type = other RNA
gacgccaagaagcgcatcaacctg

SEQ ID NO: 30087 - RNA, 27 nt, synthetic construct
  misc_feature 1..27: note = Heat shock protein 105 kDa (255-263)
  source 1..27: mol_type = other RNA
gacgccaagagcaagatccgcgccctg

SEQ ID NO: 30088 - RNA, 27 nt, synthetic construct
  misc_feature 1..27: note = Chromodomain-helicase-DNA-binding protein 2 (106-114)
  source 1..27: mol_type = other RNA
gacgaggccctgatcggcaagaagttc

SEQ ID NO: 30089 - RNA, 30 nt, synthetic construct
  misc_feature 1..30: note = Pre-mRNA-processing-splicing factor 8 (1104-1113)
  source 1..30: mol_type = other RNA
gacgaggcccgcgacctgatccagcggtac

SEQ ID NO: 30090 - RNA, 30 nt, synthetic construct
  misc_feature 1..30: note = EH domain-containing protein 4 (201-210)
  source 1..30: mol_type = other RNA
gacgagttcagcgaggccatcaaggccttc

SEQ ID NO: 30091 - RNA, 33 nt, synthetic construct
  misc_feature 1..33: note = 26S protease regulatory subunit 10B (247-257)
  source 1..33: mol_type = other RNA
gacgagatcgacgccatcggcgggcgccggttc

SEQ ID NO: 30092 - RNA, 30 nt, synthetic construct
  misc_feature 1..30: note = U4/U6 small nuclear ribonucleoprotein Prp31 (322-331)
  source 1..30: mol_type = other RNA
gacgagatcgagcgcaagttcgacaagtgg

SEQ ID NO: 30093 - RNA, 27 nt, synthetic construct
  misc_feature 1..27: note = Zinc finger MYND domain-containing protein 11 (348-356)
  source 1..27: mol_type = other RNA
gacgagctggagctccaccagcgcttc

SEQ ID NO: 30094 - RNA, 30 nt, synthetic construct
  misc_feature 1..30: note = General transcription factor IIH subunit 5 (24-33)
  source 1..30: mol_type = other RNA
gacgagagcaacgccctgggcaagaagttc

SEQ ID NO: 30095 - RNA, 27 nt, synthetic construct
  misc_feature 1..27: note = Ubiquitin carboxyl-terminal hydrolase 19 (1197-1205)
  source 1..27: mol_type = other RNA
gacgagagccaggtggtcacccgctac

SEQ ID NO: 30096 - RNA, 27 nt, synthetic construct
  misc_feature 1..27: note = Serrate RNA effector molecule homolog (164-172)
  source 1..27: mol_type = other RNA
gacgagaccgaggccgtgaagcgctac

SEQ ID NO: 30097 - RNA, 30 nt, synthetic construct
  misc_feature 1..30: note = 60S ribosomal protein L26 (53-62)
  source 1..30: mol_type = other RNA
gacgaggtgcaggtcgtgcgcggccactac

SEQ ID NO: 30098 - RNA, 27 nt, synthetic construct
  misc_feature 1..27: note = Ras GTPase-activating protein-binding protein 2 (60-68)
  source 1..27: mol_type = other RNA
gacatccaccacaaggtgctgagcctc

SEQ ID NO: 30099 - RNA, 27 nt, synthetic construct
  misc_feature 1..27: note = Heat shock 70 kDa protein 4 (255-263)
  source 1..27: mol_type = other RNA
gacatcaagagcaagatccgcgccctg

SEQ ID NO: 30100 - RNA, 27 nt, synthetic construct
  misc_feature 1..27: note = Heterogeneous nuclear ribonucleoprotein F (196-204)
  source 1..27: mol_type = other RNA
gaccccccgctgaagttcatgagcgtg

SEQ ID NO: 30101 - RNA, 27 nt, synthetic construct
  misc_feature 1..27: note = Cullin-1 (348-356)
  source 1..27: mol_type = other RNA
gacgtgcacaagaagtacaacgccctg

SEQ ID NO: 30102 - RNA, 27 nt, synthetic construct
  misc_feature 1..27: note = Spectrin alpha chain, non-erythrocytic 1 (50-58)
  source 1..27: mol_type = other RNA
gacgtgaaggccaagctgcacgagctc

SEQ ID NO: 30103 - RNA, 27 nt, synthetic construct
  misc_feature 1..27: note = Coatomer subunit beta (34-42)
  source 1..27: mol_type = other RNA
gacgtgaagagcaagaccgaggccctg

SEQ ID NO: 30104 - RNA, 24 nt, synthetic construct
  misc_feature 1..24: note = Pumilio homolog 3 (320-327)
  source 1..24: mol_type = other RNA
gaggccgtgatcaagcacagcctg

SEQ ID NO: 30105 - RNA, 30 nt, synthetic construct
  misc_feature 1..30: note = NADH dehydrogenase (ubiquinone) 1 alpha subcomplex subunit 13 (122-131)
  source 1..30: mol_type = other RNA
gaggaggccctgcacgccagccacggcttc

SEQ ID NO: 30106 - RNA, 27 nt, synthetic construct
  misc_feature 1..27: note = DDB1- and CUL4-associated factor 10 (132-140)
  source 1..27: mol_type = other RNA
gaggaggccaacgtgggccgcgggtac

SEQ ID NO: 30107 - RNA, 33 nt, synthetic construct
  misc_feature 1..33: note = 15 kDa selenoprotein (76-86)
  source 1..33: mol_type = other RNA
gaggaggcccagttcgagaccaagaagctgtac

SEQ ID NO: 30108 - RNA, 30 nt, synthetic construct
  misc_feature 1..30: note = Negative elongation factor E (10-19)
  source 1..30: mol_type = other RNA
gaggaggaggaggccctgcagaagaagttc

SEQ ID NO: 30109 - RNA, 27 nt, synthetic construct
  misc_feature 1..27: note = 60S ribosomal protein L13 (171-179)
  source 1..27: mol_type = other RNA
gaggaggagaagaacttcaaggccttc

SEQ ID NO: 30110 - RNA, 30 nt, synthetic construct
  misc_feature 1..30: note = Coiled-coil domain-containing protein 66 (780-789)
  source 1..30: mol_type = other RNA
gaggaggagcccctgaacatccacagcttc

SEQ ID NO: 30111 - RNA, 27 nt, synthetic construct
  misc_feature 1..27: note = HLA class II histocompatibility antigen, DR alpha chain (41-49)
  source 1..27: mol_type = other RNA
gaggagttcggccgcttcgccagcttc

SEQ ID NO: 30112 - RNA, 30 nt, synthetic construct
  misc_feature 1..30: note = E3 ubiquitin-protein ligase MGRN1 (140-149)
  source 1..30: mol_type = other RNA
gaggagttcctgaacggccgcgccgtgtac

SEQ ID NO: 30113 - RNA, 27 nt, synthetic construct
  misc_feature 1..27: note = Cullin-4A (269-277)
  source 1..27: mol_type = other RNA
gaggagggcgaccgcgtgatcacctac

SEQ ID NO: 30114 - RNA, 27 nt, synthetic construct
  misc_feature 1..27: note = WD repeat-containing protein 36 (776-784)
  source 1..27: mol_type = other RNA
gaggagggcctggtgaacaacaagtac

SEQ ID NO: 30115 - RNA, 30 nt, synthetic construct
  misc_feature 1..30: note = A-kinase anchor protein 2 (256-265)
  source 1..30: mol_type = other RNA
gaggagcacctggagagccacaagaagtac

SEQ ID NO: 30116 - RNA, 27 nt, synthetic construct
  misc_feature 1..27: note = Unconventional myosin-Ie (749-757)
  source 1..27: mol_type = other RNA
gaggagcaccccgagctgcagcagttc

SEQ ID NO: 30117 - RNA, 27 nt, synthetic construct
  misc_feature 1..27: note = Vimentin (229-237)
  source 1..27: mol_type = other RNA
gaggagatcgccttcctgaagaagctc

SEQ ID NO: 30118 - RNA, 30 nt, synthetic construct
  misc_feature 1..30: note = PH domain leucine-rich repeat-containing protein phosphatase 1 (287-296)
  source 1..30: mol_type = other RNA
gaggagatcgacctgagcggcaacaagctc

SEQ ID NO: 30119 - RNA, 24 nt, synthetic construct
  misc_feature 1..24: note = Probable ATP-dependent RNA helicase DDX56 (421-428)
  source 1..24: mol_type = other RNA
gaggagatcgagggcttccgctac

SEQ ID NO: 30120 - RNA, 27 nt, synthetic construct
  misc_feature 1..27: note = Paxillin (389-397)
  source 1..27: mol_type = other RNA
gaggagatcggcagccgcaacttcttc

SEQ ID NO: 30121 - RNA, 27 nt, synthetic construct
  misc_feature 1..27: note = Retinoblastoma-like protein 1 (195-203)
  source 1..27: mol_type = other RNA
gaggagatcggcaccccccgcaagttc

SEQ ID NO: 30122 - RNA, 30 nt, synthetic construct
  misc_feature 1..30: note = Bloom syndrome protein (942-951)
  source 1..30: mol_type = other RNA
gaggagatccccgtgagctcccactacttc

SEQ ID NO: 30123 - RNA, 30 nt, synthetic construct
  misc_feature 1..30: note = Kinesin-like protein KIF21A (473-482)
  source 1..30: mol_type = other RNA
gaggagatcagcaacatgatccactcctac

SEQ ID NO: 30124 - RNA, 33 nt, synthetic construct
  misc_feature 1..33: note = Thioredoxin-related transmembrane protein 2 (148-158)
  source 1..33: mol_type = other RNA
gaggagctggagcgcgacaagcgggtgacctgg

SEQ ID NO: 30125 - RNA, 24 nt, synthetic construct
  misc_feature 1..24: note = Clathrin heavy chain 1 (361-368)
  source 1..24: mol_type = other RNA
gaggagctgttcgcccgcaagttc

SEQ ID NO: 30126 - RNA, 27 nt, synthetic construct
  misc_feature 1..27: note = 2',3'-cyclic-nucleotide 3'-phosphodiesterase (191-199)
  source 1..27: mol_type = other RNA
gaggagctgggcaaccacaaggccttc

SEQ ID NO: 30127 - RNA, 27 nt, synthetic construct
  misc_feature 1..27: note = Protein FAM192A (107-115)
  source 1..27: mol_type = other RNA
gaggagctgaaggagctcaaggagtac

SEQ ID NO: 30128 - RNA, 30 nt, synthetic construct
  misc_feature 1..30: note = Proteasome subunit beta type-4 (119-128)
  source 1..30: mol_type = other RNA
gaggagctgctcggcgacgggcacagctac

SEQ ID NO: 30129 - RNA, 30 nt, synthetic construct
  misc_feature 1..30: note = Sorting nexin-14 (340-349)
  source 1..30: mol_type = other RNA
gaggagctgcagaagatctacaagacctac

SEQ ID NO: 30130 - RNA, 27 nt, synthetic construct
  misc_feature 1..27: note = Krueppel-like factor 6 (124-132)
  source 1..27: mol_type = other RNA
gaggagctgagccccaccgccaagttc

SEQ ID NO: 30131 - RNA, 33 nt, synthetic construct
  misc_feature 1..33: note = Eukaryotic initiation factor 4A-I (239-249)
  source 1..33: mol_type = other RNA
gaggagctgaccctcgagggcatccgccagttc

SEQ ID NO: 30132 - RNA, 30 nt, synthetic construct
  misc_feature 1..30: note = Coiled-coil domain-containing protein 93 (132-141)
  source 1..30: mol_type = other RNA
gaggagatgggcgactacatccgcagctac

SEQ ID NO: 30133 - RNA, 30 nt, synthetic construct
  misc_feature 1..30: note = Nuclear pore complex protein Nup153 (1104-1113)
  source 1..30: mol_type = other RNA
gaggagatgcccgccaccaagggcgggttc

SEQ ID NO: 30134 - RNA, 30 nt, synthetic construct
  misc_feature 1..30: note = Folliculin-interacting protein 1 (434-443)
  source 1..30: mol_type = other RNA
gaggagaacgccgtggacgtcaagcagtac

SEQ ID NO: 30135 - RNA, 27 nt, synthetic construct
  misc_feature 1..27: note = Tropomodulin-3 (310-318)
  source 1..27: mol_type = other RNA
gaggagaacaccaacatcctgaagttc

SEQ ID NO: 30136 - RNA, 27 nt, synthetic construct
  misc_feature 1..27: note = G2/mitotic-specific cyclin-B1 (183-191)
  source 1..27: mol_type = other RNA
gaggagcaggccgtgcgccccaagtac

SEQ ID NO: 30137 - RNA, 27 nt, synthetic construct
  misc_feature 1..27: note = Targeting protein for Xklp2 (170-178)
  source 1..27: mol_type = other RNA
gaggagcaggagctggagaagagcatg

SEQ ID NO: 30138 - RNA, 27 nt, synthetic construct
  misc_feature 1..27: note = Nuclear receptor-binding protein (235-243)
  source 1..27: mol_type = other RNA
gaggagcagaagaacctgcacttcttc

SEQ ID NO: 30139 - RNA, 30 nt, synthetic construct
  misc_feature 1..30: note = Cyclin-G-associated kinase (740-749)
  source 1..30: mol_type = other RNA
gaggagcagcaggacatcctgagcaagttc

SEQ ID NO: 30140 - RNA, 30 nt, synthetic construct
  misc_feature 1..30: note = Nitrogen permease regulator 2-like protein (336-345)
  source 1..30: mol_type = other RNA
gaggagcagagccaccccgcccgcctgtac

SEQ ID NO: 30141 - RNA, 27 nt, synthetic construct
  misc_feature 1..27: note = OTU domain-containing protein 5 (177-185)
  source 1..27: mol_type = other RNA
gaggagcaggtggcccgcgagagctac

SEQ ID NO: 30142 - RNA, 27 nt, synthetic construct
  misc_feature 1..27: note = Histone-binding protein RBBP4 (13-21)
  source 1..27: mol_type = other RNA
gaggagcgcgtgatcaacgaggagtac

SEQ ID NO: 30143 - RNA, 27 nt, synthetic construct
  misc_feature 1..27: note = Sorting nexin-24 (11-19)
  source 1..27: mol_type = other RNA
gaggagagcgacctggagcgcggctac

SEQ ID NO: 30144 - RNA, 27 nt, synthetic construct
  misc_feature 1..27: note = Poly(rC)-binding protein 2 (41-49)
  source 1..27: mol_type = other RNA
gaggagagcggcgcccgcatcaacatc

SEQ ID NO: 30145 - RNA, 27 nt, synthetic construct
  misc_feature 1..27: note = Vacuolar fusion protein CCZ1 homolog (215-223)
  source 1..27: mol_type = other RNA
gaggagagcctgaacatcgtgaagtac

SEQ ID NO: 30146 - RNA, 30 nt, synthetic construct
  misc_feature 1..30: note = ATP-dependent RNA helicase DDX19B (301-310)
  source 1..30: mol_type = other RNA
gaggagaccctggacaccatcaagcagtac

SEQ ID NO: 30147 - RNA, 30 nt, synthetic construct
  misc_feature 1..30: note = Elongation factor 1-gamma (325-334)
  source 1..30: mol_type = other RNA
gaggagacccagaccctggtgcgcgagtac

SEQ ID NO: 30148 - RNA, 30 nt, synthetic construct
  misc_feature 1..30: note = Adenylate cyclase type 3 (1088-1097)
  source 1..30: mol_type = other RNA
gaggagacccaggtgatcctgcgcgagtac

SEQ ID NO: 30149 - RNA, 30 nt, synthetic construct
  misc_feature 1..30: note = Cleavage and polyadenylation specificity factor subunit 1 (1111-1120)
  source 1..30: mol_type = other RNA
gaggagaccgtgagcggcctgaaggggtac

SEQ ID NO: 30150 - RNA, 30 nt, synthetic construct
  misc_feature 1..30: note = MICOS complex subunit MIC19 (168-177)
  source 1..30: mol_type = other RNA
gaggaggtggaggccaagttcaagcgctac

SEQ ID NO: 30151 - RNA, 24 nt, synthetic construct
  misc_feature 1..24: note = G patch domain-containing protein 4 (211-218)
  source 1..24: mol_type = other RNA
gaggaggtggagagccgcgcctac

SEQ ID NO: 30152 - RNA, 30 nt, synthetic construct
  misc_feature 1..30: note = Chromodomain-helicase-DNA-binding protein 1-like (214-223)
  source 1..30: mol_type = other RNA
gaggaggtgggcgacttcatccagcgctac

SEQ ID NO: 30153 - RNA, 27 nt, synthetic construct
  misc_feature 1..27: note = Ferritin light chain (137-145)
  source 1..27: mol_type = other RNA
gaggaggtgaagctgatcaagaagatg

SEQ ID NO: 30154 - RNA, 27 nt, synthetic construct
  misc_feature 1..27: note = Alanine-tRNA ligase, cytoplasmic (378-386)
  source 1..27: mol_type = other RNA
gaggaggtgcagttcctgaagaccctc

SEQ ID NO: 30155 - RNA, 30 nt, synthetic construct
  misc_feature 1..30: note = Glutaredoxin-3 (139-148)
  source 1..30: mol_type = other RNA
gaggaggtgcgccagggcctgaaggcctac

SEQ ID NO: 30156 - RNA, 24 nt, synthetic construct
  misc_feature 1..24: note = Pre-B-cell leukemia transcription factor 3 (11-18)
  source 1..24: mol_type = other RNA
gagatcaaggagaagaccggcctg

SEQ ID NO: 30157 - RNA, 27 nt, synthetic construct
  misc_feature 1..27: note = AP-2 complex subunit alpha-1 (29-37)
  source 1..27: mol_type = other RNA
gagatcaagcgcatcaacaaggagctg

SEQ ID NO: 30158 - RNA, 27 nt, synthetic construct
  misc_feature 1..27: note = 40S ribosomal protein S24 (39-47)
  source 1..27: mol_type = other RNA
gagatccgcgagaagctggccaagatg

SEQ ID NO: 30159 - RNA, 27 nt, synthetic construct
  misc_feature 1..27: note = Crooked neck-like protein 1 (571-579)
  source 1..27: mol_type = other RNA
gagatccgccagaagaacctgagcctc

SEQ ID NO: 30160 - RNA, 27 nt, synthetic construct
  misc_feature 1..27: note = Enhancer of mRNA-decapping protein 3 (285-293)
  source 1..27: mol_type = other RNA
gagctgcacaagaagctcctgagcgtg

SEQ ID NO: 30161 - RNA, 27 nt, synthetic construct
  misc_feature 1..27: note = Alpha-2-macroglobulin receptor-associated protein (20-28)
  source 1..27: mol_type = other RNA
gagctgaaggagaagctccgcagcatc

SEQ ID NO: 30162 - RNA, 24 nt, synthetic construct
  misc_feature 1..24: note = Neuroblastoma-amplified sequence (1048-1055)
  source 1..24: mol_type = other RNA
gagctgctcgagaagcacggcctg

SEQ ID NO: 30163 - RNA, 27 nt, synthetic construct
  misc_feature 1..27: note = Heat shock protein HSP 90-beta (529-537)
  source 1..27: mol_type = other RNA
gagcgcatcatgaaggcccaggccctg

SEQ ID NO: 30164 - RNA, 27 nt, synthetic construct
  misc_feature 1..27: note = Protein phosphatase 1 regulatory subunit 7 (95-103)
  source 1..27: mol_type = other RNA
gaggtgctgaagaaggtcaagaccctc

SEQ ID NO: 30165 - RNA, 24 nt, synthetic construct
  misc_feature 1..24: note = Heterogeneous nuclear ribonucleoprotein M (130-137)
  source 1..24: mol_type = other RNA
gaggtgctgaacaagcacagcctc

SEQ ID NO: 30166 - RNA, 27 nt, synthetic construct
  misc_feature 1..27: note = Exosome component 10 (254-262)
  source 1..27: mol_type = other RNA
ttcgcccacccctaccagtacgagctg

SEQ ID NO: 30167 - RNA, 27 nt, synthetic construct
  misc_feature 1..27: note = Long-chain-fatty-acid-CoA ligase 3 (551-559)
  source 1..27: mol_type = other RNA
ttcgaggacgagaacggccagcgctgg

SEQ ID NO: 30168 - RNA, 30 nt, synthetic construct
  misc_feature 1..30: note = X-ray repair cross-complementing protein 6 (478-487)
  source 1..30: mol_type = other RNA
ttcgagaaccccgtgctgcagcagcacttc

SEQ ID NO: 30169 - RNA, 27 nt, synthetic construct
  misc_feature 1..27: note = Cyclin-dependent kinase 14 (275-283)
  source 1..27: mol_type = other RNA
ttcggcctggcccgcgccaagagcgtg

SEQ ID NO: 30170 - RNA, 27 nt, synthetic construct
  misc_feature 1..27: note = Translocation protein SEC62 (278-286)
  source 1..27: mol_type = other RNA
ttccgccccctgtacacccacgagtac

SEQ ID NO: 30171 - RNA, 24 nt, synthetic construct
  misc_feature 1..24: note = Myosin-9 (831-838)
  source 1..24: mol_type = other RNA
ttcaccaaggtgaagcccctgctc

SEQ ID NO: 30172 - RNA, 27 nt, synthetic construct
  misc_feature 1..27: note = Gamma-interferon-inducible protein 16 (533-541)
  source 1..27: mol_type = other RNA
ttcgtgtacgagcccaaggagcagaag

SEQ ID NO: 30173 - RNA, 30 nt, synthetic construct
  misc_feature 1..30: note = Constitutive coactivator of peroxisome proliferator-activated receptor gamma (663-672)
  source 1..30: mol_type = other RNA
ttcgtgtaccccggcaacccgctgcgccac

SEQ ID NO: 30174 - RNA, 27 nt, synthetic construct
  misc_feature 1..27: note = Serine/threonine-protein phosphatase 2A 65 kDa regulatory subunit A alpha isoform (190-198)
  source 1..27: mol_type = other RNA
ggcgagttcgccaaggtgctggagctc

SEQ ID NO: 30175 - RNA, 33 nt, synthetic construct
  misc_feature 1..33: note = DNA replication licensing factor MCM5 (552-562)
  source 1..33: mol_type = other RNA
ggcgagatcgacctggccaagctcaagaagttc

SEQ ID NO: 30176 - RNA, 27 nt, synthetic construct
  misc_feature 1..27: note = Serine/threonine-protein phosphatase PP1-beta catalytic subunit (216-224)
  source 1..27: mol_type = other RNA
ggcgagaacgaccgcggggtgagcttc

SEQ ID NO: 30177 - RNA, 30 nt, synthetic construct
  misc_feature 1..30: note = HLA class I histocompatibility antigen, B-7 alpha chain (42-51)
  source 1..30: mol_type = other RNA
ggcgagccccgcttcatcagcgtggggtac

SEQ ID NO: 30178 - RNA, 30 nt, synthetic construct
  misc_feature 1..30: note = Protein SCAF11 (201-210)
  source 1..30: mol_type = other RNA
ggcgagagctccttcacctaccgcgcctac

SEQ ID NO: 30179 - RNA, 27 nt, synthetic construct
  misc_feature 1..27: note = Rho GTPase-activating protein 21 (129-137)
  source 1..27: mol_type = other RNA
ggcgagagcgtgatcgggaagacctac

SEQ ID NO: 30180 - RNA, 33 nt, synthetic construct
  misc_feature 1..33: note = Arfaptin-1 (19-29)
  source 1..33: mol_type = other RNA
ggcgaggtggacgacagccgcgagcactccttc

SEQ ID NO: 30181 - RNA, 27 nt, synthetic construct
  misc_feature 1..27: note = AP-2 complex subunit mu (12-20)
  source 1..27: mol_type = other RNA
ggcgaggtgctgatcagccgcgtctac

SEQ ID NO: 30182 - RNA, 27 nt, synthetic construct
  misc_feature 1..27: note = Endoplasmic reticulum-Golgi intermediate compartment protein 3 (255-263)
  source 1..27: mol_type = other RNA
ggcgaggtgctgcgcaccaaccagttc

SEQ ID NO: 30183 - RNA, 30 nt, synthetic construct
  misc_feature 1..30: note = Proline and serine-rich protein 1 (157-166)
  source 1..30: mol_type = other RNA
ggcatcttccccgggaccccgctgaagaag

SEQ ID NO: 30184 - RNA, 30 nt, synthetic construct
  misc_feature 1..30: note = Ubiquitin carboxyl-terminal hydrolase 36 (460-469)
  source 1..30: mol_type = other RNA
ggcatcatcagctcccccctgaccgggaag

SEQ ID NO: 30185 - RNA, 27 nt, synthetic construct
  misc_feature 1..27: note = Alpha-2-macroglobulin receptor-associated protein (145-153)
  source 1..27: mol_type = other RNA
ggcctggacgacccccgcctcgagaag

SEQ ID NO: 30186 - RNA, 33 nt, synthetic construct
  misc_feature 1..33: note = Targeting protein for Xklp2 (12-22)
  source 1..33: mol_type = other RNA
ggcctgttccaggggaagacccccctccgcaag

SEQ ID NO: 30187 - RNA, 30 nt, synthetic construct
  misc_feature 1..30: note = Glutathione S-transferase kappa 1 (142-151)
  source 1..30: mol_type = other RNA
ggcctgctcgagaagatcgccacccccaag

SEQ ID NO: 30188 - RNA, 27 nt, synthetic construct
  misc_feature 1..27: note = Kelch repeat and BTB domain-containing protein 7 (280-288)
  source 1..27: mol_type = other RNA
ggcctgctcaccaagcccatcgtgaag

SEQ ID NO: 30189 - RNA, 27 nt, synthetic construct
  misc_feature 1..27: note = Microtubule-associated protein 4 (735-743)
  source 1..27: mol_type = other RNA
ggcctgaacaagaagcccatgagcctc

SEQ ID NO: 30190 - RNA, 27 nt, synthetic construct
  misc_feature 1..27: note = Epidermal growth factor receptor substrate 15-like 1 (46-54)
  source 1..27: mol_type = other RNA
ggcctgagcgacatcatcctcgggaag

SEQ ID NO: 30191 - RNA, 27 nt, synthetic construct
  misc_feature 1..27: note = Calcium homeostasis endoplasmic reticulum protein (680-688)
  source 1..27: mol_type = other RNA
ggcctgtacgagttcttccgcgccaag

SEQ ID NO: 30192 - RNA, 27 nt, synthetic construct
  misc_feature 1..27: note = Cyclin-dependent kinase 9 (136-144)
  source 1..27: mol_type = other RNA
ggcctgtactacatccaccgcaacaag

SEQ ID NO: 30193 - RNA, 30 nt, synthetic construct
  misc_feature 1..30: note = 26S proteasome non-ATPase regulatory subunit 8 (146-155)
  source 1..30: mol_type = other RNA
ggcagctacaacaaggtgttcctggccaag

SEQ ID NO: 30194 - RNA, 27 nt, synthetic construct
  misc_feature 1..27: note = RNA polymerase II-associated protein 3 (188-196)
  source 1..27: mol_type = other RNA
ggcagctactccaaggccttcgcccgc

SEQ ID NO: 30195 - RNA, 30 nt, synthetic construct
  misc_feature 1..30: note = Zinc finger E-box-binding homeobox 1 (190-199)
  source 1..30: mol_type = other RNA
ggcagctactccagccacatctccagcaag

SEQ ID NO: 30196 - RNA, 27 nt, synthetic construct
  misc_feature 1..27: note = Dynein light chain 1, cytoplasmic (63-71)
  source 1..27: mol_type = other RNA
ggcagctacgtgacccacgagaccaag

SEQ ID NO: 30197 - RNA, 30 nt, synthetic construct
  misc_feature 1..30: note = 39S ribosomal protein L2, mitochondrial (222-231)
  source 1..30: mol_type = other RNA
ggcaccgccatcatccagctgcccagcaag

SEQ ID NO: 30198 - RNA, 27 nt, synthetic construct
  misc_feature 1..27: note = Fidgetin-like protein 1 (444-452)
  source 1..27: mol_type = other RNA
ggcaccgggaagaccctgatcggcaag

SEQ ID NO: 30199 - RNA, 27 nt, synthetic construct
  misc_feature 1..27: note = ATP-binding cassette sub-family F member 3 (103-111)
  source 1..27: mol_type = other RNA
ggcaccaagctgcccgggctcctgaag

SEQ ID NO: 30200 - RNA, 27 nt, synthetic construct
  misc_feature 1..27: note = WD repeat-containing protein 46 (390-398)
  source 1..27: mol_type = other RNA
ggcacctaccagcccctgagcacccgc

SEQ ID NO: 30201 - RNA, 27 nt, synthetic construct
  misc_feature 1..27: note = Protein quaking (198-206)
  source 1..27: mol_type = other RNA
ggcacctaccgcgacgccaacatcaag

SEQ ID NO: 30202 - RNA, 27 nt, synthetic construct
  misc_feature 1..27: note = Rho-associated protein kinase 1 (285-293)
  source 1..27: mol_type = other RNA
ggcacctacagcaagatcatgaaccac

SEQ ID NO: 30203 - RNA, 27 nt, synthetic construct
  misc_feature 1..27: note = Protein phosphatase 1 regulatory subunit 7 (159-167)
  source 1..27: mol_type = other RNA
ggcgtggacaagctgacccgcctcaag

SEQ ID NO: 30204 - RNA, 27 nt, synthetic construct
  misc_feature 1..27: note = Profilin-1 (118-126)
  source 1..27: mol_type = other RNA
ggcgtgcacgggggcctgatcaacaag

SEQ ID NO: 30205 - RNA, 33 nt, synthetic construct
  misc_feature 1..33: note = Exosome complex component RRP40 (136-146)
  source 1..33: mol_type = other RNA
ggcgtgatcgggcaggacggcctgctcttcaag

SEQ ID NO: 30206 - RNA, 27 nt, synthetic construct
  misc_feature 1..27: note = Ubiquinol-cytochrome-c reductase complex assembly factor 1 (118-126)
  source 1..27: mol_type = other RNA
ggcgtgaacccctacatcctgaagaag

SEQ ID NO: 30207 - RNA, 27 nt, synthetic construct
  misc_feature 1..27: note = Eukaryotic translation initiation factor 3 subunit C-like protein (190-198)
  source 1..27: mol_type = other RNA
ggcgtgagcgccgccaccttcctgaag

SEQ ID NO: 30208 - RNA, 27 nt, synthetic construct
  misc_feature 1..27: note = Antizyme inhibitor 1 (319-327)
  source 1..27: mol_type = other RNA
ggcgtgtacgggagcttcgcctccaag

SEQ ID NO: 30209 - RNA, 30 nt, synthetic construct
  misc_feature 1..30: note = Nuclear pore complex protein Nup160 (105-114)
  source 1..30: mol_type = other RNA
ggcgtgtacgtcagcgagacccagaaccgc

SEQ ID NO: 30210 - RNA, 27 nt, synthetic construct
  misc_feature 1..27: note = Alanine-tRNA ligase, cytoplasmic (301-309)
  source 1..27: mol_type = other RNA
cacgcccgcaccatcaccgtggccctg

SEQ ID NO: 30211 - RNA, 27 nt, synthetic construct
  misc_feature 1..27: note = Transketolase (243-251)
  source 1..27: mol_type = other RNA
cacgccagcgaccgcatcatcgccctg

SEQ ID NO: 30212 - RNA, 27 nt, synthetic construct
  misc_feature 1..27: note = Stathmin (64-72)
  source 1..27: mol_type = other RNA
cacgaggccgaggtgctgaagcagctc

SEQ ID NO: 30213 - RNA, 27 nt, synthetic construct
  misc_feature 1..27: note = WD repeat-containing protein 6 (315-323)
  source 1..27: mol_type = other RNA
cacgagggcgagatcctgcaggccttc

SEQ ID NO: 30214 - RNA, 33 nt, synthetic construct
  misc_feature 1..33: note = Carbohydrate sulfotransferase 10 (215-225)
  source 1..33: mol_type = other RNA
cacgagatcgcccccggcatcatccgcaagtac

SEQ ID NO: 30215 - RNA, 27 nt, synthetic construct
  misc_feature 1..27: note = Nardilysin (1054-1062)
  source 1..27: mol_type = other RNA
cacgagatcgaggccctgaagagcttc

SEQ ID NO: 30216 - RNA, 24 nt, synthetic construct
  misc_feature 1..24: note = LanC-like protein 1 (89-96)
  source 1..24: mol_type = other RNA
cacggctacgtgaagcagagcctg

SEQ ID NO: 30217 - RNA, 27 nt, synthetic construct
  misc_feature 1..27: note = Histone H2A.V (87-95)
  source 1..27: mol_type = other RNA
cacatccacaagagcctgatcggcaag

SEQ ID NO: 30218 - RNA, 27 nt, synthetic construct
  misc_feature 1..27: note = E3 ubiquitin-protein ligase TRIP12 (1751-1759)
  source 1..27: mol_type = other RNA
cacctggaggacatcgtgcgccagaag

SEQ ID NO: 30219 - RNA, 27 nt, synthetic construct
  misc_feature 1..27: note = Unconventional myosin-VI (430-438)
  source 1..27: mol_type = other RNA
cacctgttcgaccacgtggtcaaccgc

SEQ ID NO: 30220 - RNA, 27 nt, synthetic construct
  misc_feature 1..27: note = Nardilysin (708-716)
  source 1..27: mol_type = other RNA
cacctgatcagccccctcatccagaag

SEQ ID NO: 30221 - RNA, 33 nt, synthetic construct
  misc_feature 1..33: note = Hermansky-Pudlak syndrome 5 protein (400-410)
  source 1..33: mol_type = other RNA
cacctgaagagccagctcgaccacggcacctac

SEQ ID NO: 30222 - RNA, 27 nt, synthetic construct
  misc_feature 1..27: note = Integrin-linked protein kinase (248-256)
  source 1..27: mol_type = other RNA
cacaccctggagcccctcatcccgcgc

SEQ ID NO: 30223 - RNA, 30 nt, synthetic construct
  misc_feature 1..30: note = Serine/threonine-protein kinase WNK1 (339-348)
  source 1..30: mol_type = other RNA
cacacccgcacccccccgatcatccaccgg

SEQ ID NO: 30224 - RNA, 27 nt, synthetic construct
  misc_feature 1..27: note = Centromere protein M (122-130)
  source 1..27: mol_type = other RNA
cacacctaccagagccccctgctctac

SEQ ID NO: 30225 - RNA, 30 nt, synthetic construct
  misc_feature 1..30: note = T-complex protein 1 subunit epsilon (135-144)
  source 1..30: mol_type = other RNA
cacgtgatcgagaccctgatcggcaagaag

SEQ ID NO: 30226 - RNA, 27 nt, synthetic construct
  misc_feature 1..27: note = Gamma-interferon-inducible protein 16 (241-249)
  source 1..27: mol_type = other RNA
cacgtgaaggtcctgaacaccagcctc

SEQ ID NO: 30227 - RNA, 27 nt, synthetic construct
  misc_feature 1..27: note = Ankyrin repeat family A protein 2 (113-121)
  source 1..27: mol_type = other RNA
cacgtgtacacccccagcaccacgaag

SEQ ID NO: 30228 - RNA, 30 nt, synthetic construct
  misc_feature 1..30: note = Little elongation complex subunit 1 (1936-1945)
  source 1..30: mol_type = other RNA
cacgtgtacgtcggcaacatcagcaagaag

SEQ ID NO: 30229 - RNA, 33 nt, synthetic construct
  misc_feature 1..33: note = Deoxynucleoside triphosphate triphosphohydrolase SAMHD1 (397-407)
  source 1..33: mol_type = other RNA
atcgagatcaccggcgccgggggcaagaagtac

SEQ ID NO: 30230 - RNA, 27 nt, synthetic construct
  misc_feature 1..27: note = Lanosterol 14-alpha demethylase (175-183)
  source 1..27: mol_type = other RNA
atcgagaaggagaccaaggagtacttc

SEQ ID NO: 30231 - RNA, 27 nt, synthetic construct
  misc_feature 1..27: note = NADH dehydrogenase (ubiquinone) 1 beta subcomplex subunit 4 (60-68)
  source 1..27: mol_type = other RNA
atcgagaaccccgccctgctccgctgg

SEQ ID NO: 30232 - RNA, 27 nt, synthetic construct
  misc_feature 1..27: note = Constitutive coactivator of PPAR-gamma-like protein 1 (325-333)
  source 1..27: mol_type = other RNA
atcggctactacagcgccacctccaag

SEQ ID NO: 30233 - RNA, 27 nt, synthetic construct
  misc_feature 1..27: note = T-complex protein 1 subunit gamma (155-163)
  source 1..27: mol_type = other RNA
atcatcaacagctccatcaccaccaag

SEQ ID NO: 30234 - RNA, 27 nt, synthetic construct
  misc_feature 1..27: note = TFIIH basal transcription factor complex helicase XPD subunit (533-541)
  source 1..27: mol_type = other RNA
atcctggagaacatccagcgcaacaag

SEQ ID NO: 30235 - RNA, 27 nt, synthetic construct
  misc_feature 1..27: note = Thymidine kinase, cytosolic (24-32)
  source 1..27: mol_type = other RNA
atcctgggccccatgttcagcgggaag

SEQ ID NO: 30236 - RNA, 27 nt, synthetic construct
  misc_feature 1..27: note = Pre-mRNA-processing-splicing factor 8 (2105-2113)
  source 1..27: mol_type = other RNA
atcctgcccaagaacgtgctcaagaag

SEQ ID NO: 30237 - RNA, 30 nt, synthetic construct
  misc_feature 1..30: note = BAG35700.1 (99-108)
  source 1..30: mol_type = other RNA
atcctgcgcgacggcatcaccgccgggaag

SEQ ID NO: 30238 - RNA, 27 nt, synthetic construct
  misc_feature 1..27: note = Trifunctional purine biosynthetic protein adenosine-3 (190-198)
  source 1..27: mol_type = other RNA
atcctgagcggccccttcgtgcagaag

SEQ ID NO: 30239 - RNA, 27 nt, synthetic construct
  misc_feature 1..27: note = Actin, gamma-enteric smooth muscle (150-158)
  source 1..27: mol_type = other RNA
atcctgaccgagcgcggctacagcttc

SEQ ID NO: 30240 - RNA, 27 nt, synthetic construct
  misc_feature 1..27: note = Ornithine decarboxylase (218-226)
  source 1..27: mol_type = other RNA
atcctgtacgaccacgcccacgtgaag

SEQ ID NO: 30241 - RNA, 27 nt, synthetic construct
  misc_feature 1..27: note = Peroxiredoxin-6 (147-155)
  source 1..27: mol_type = other RNA
atcctgtaccccgccaccaccggccgc

SEQ ID NO: 30242 - RNA, 27 nt, synthetic construct
  misc_feature 1..27: note = LYR motif-containing protein 1 (79-87)
  source 1..27: mol_type = other RNA
atcccctacccgcgccccatccacctg

SEQ ID NO: 30243 - RNA, 27 nt, synthetic construct
  misc_feature 1..27: note = SWI/SNF complex subunit SMARCC2 (39-47)
  source 1..27: mol_type = other RNA
atccaggccgagcccccgaccaacaag

SEQ ID NO: 30244 - RNA, 30 nt, synthetic construct
  misc_feature 1..30: note = Lysine-specific histone demethylase 1B (637-646)
  source 1..30: mol_type = other RNA
atccagttcaaccccccgctgagcgagaag

SEQ ID NO: 30245 - RNA, 27 nt, synthetic construct
  misc_feature 1..27: note = Induced myeloid leukemia cell differentiation protein Mcl-1 (115-123)
  source 1..27: mol_type = other RNA
atcagcttcggcgccttcgtggccaag

SEQ ID NO: 30246 - RNA, 27 nt, synthetic construct
  misc_feature 1..27: note = 3-hydroxy-3-methylglutaryl-coenzyme A reductase (354-362)
  source 1..27: mol_type = other RNA
atcaccagccccgtggtcacccagaag

SEQ ID NO: 30247 - RNA, 27 nt, synthetic construct
  misc_feature 1..27: note = Pre-mRNA-processing factor 40 homolog A (229-237)
  source 1..27: mol_type = other RNA
atcgtggccggcagcctgatcaccaag

SEQ ID NO: 30248 - RNA, 27 nt, synthetic construct
  misc_feature 1..27: note = V-type proton ATPase 16 kDa proteolipid subunit (147-155)
  source 1..27: mol_type = other RNA
atcgtggccctgatcctcagcaccaag

SEQ ID NO: 30249 - RNA, 27 nt, synthetic construct
  misc_feature 1..27: note = HLA class II histocompatibility antigen, DP alpha 1 chain (238-246)
  source 1..27: mol_type = other RNA
atcgtgggcaccgtcctgatcatcaag

SEQ ID NO: 30250 - RNA, 33 nt, synthetic construct
  misc_feature 1..33: note = ATP synthase subunit g, mitochondrial (56-66)
  source 1..33: mol_type = other RNA
atcgtgaacagcgcccagaccggctccttcaag

SEQ ID NO: 30251 - RNA, 30 nt, synthetic construct
  misc_feature 1..30: note = Interferon regulatory factor 9 (119-128)
  source 1..30: mol_type = other RNA
atcgtgagcggccagcccgggacccagaag

SEQ ID NO: 30252 - RNA, 30 nt, synthetic construct
  misc_feature 1..30: note = Cleavage and polyadenylation specificity factor subunit 2 (17-26)
  source 1..30: mol_type = other RNA
atcgtgtacgccgtcgacttcaaccacaag

SEQ ID NO: 30253 - RNA, 27 nt, synthetic construct
  misc_feature 1..27: note = Serine palmitoyltransferase 2 (237-245)
  source 1..27: mol_type = other RNA
atcgtgtacggccagccccgcacccgg

SEQ ID NO: 30254 - RNA, 27 nt, synthetic construct
  misc_feature 1..27: note = Sentrin-specific protease 6 (648-656)
  source 1..27: mol_type = other RNA
atcgtgtaccccccgccccccgccaag

SEQ ID NO: 30255 - RNA, 30 nt, synthetic construct
  misc_feature 1..30: note = Elongation factor 1-gamma (428-437)
  source 1..30: mol_type = other RNA
aaggccttcaaccagggcaagatcttcaag

SEQ ID NO: 30256 - RNA, 27 nt, synthetic construct
  misc_feature 1..27: note = Tyrosine-protein kinase BAZ1B (885-893)
  source 1..27: mol_type = other RNA
aaggccttccaggagggcatcgccaag

SEQ ID NO: 30257 - RNA, 30 nt, synthetic construct
  misc_feature 1..30: note = Zinc finger CCCH domain-containing protein 4 (890-899)
  source 1..30: mol_type = other RNA
aaggccaaggagcccccgttcgtgcgcaag

SEQ ID NO: 30258 - RNA, 27 nt, synthetic construct
  misc_feature 1..27: note = Squalene monooxygenase (318-326)
  source 1..27: mol_type = other RNA
aaggccaaccacgccgagctgatcctc

SEQ ID NO: 30259 - RNA, 27 nt, synthetic construct
  misc_feature 1..27: note = RNA cytidine acetyltransferase (367-375)
  source 1..27: mol_type = other RNA
aaggccagcgaggtgttcctgcagcgc

SEQ ID NO: 30260 - RNA, 27 nt, synthetic construct
  misc_feature 1..27: note = Ribonuclease inhibitor (226-234)
  source 1..27: mol_type = other RNA
aaggccagcctgcgcgagctcgccctg

SEQ ID NO: 30261 - RNA, 27 nt, synthetic construct
  misc_feature 1..27: note = UDP-glucose:glycoprotein glucosyltransferase 2 (5-13)
  source 1..27: mol_type = other RNA
aaggccaccaacgtggtccgcctgctc

SEQ ID NO: 30262 - RNA, 27 nt, synthetic construct
  misc_feature 1..27: note = Bifunctional apoptosis regulator (261-269)
  source 1..27: mol_type = other RNA
aaggccgtgaaccccggccgcagcctg

SEQ ID NO: 30263 - RNA, 27 nt, synthetic construct
  misc_feature 1..27: note = SWI/SNF-related matrix-associated actin-dependent regulator of chromatin subfamily E member 1 (113-121)
  source 1..27: mol_type = other RNA
aaggcctaccacaacagccccgcctac

SEQ ID NO: 30264 - RNA, 27 nt, synthetic construct
  misc_feature 1..27: note = Zinc finger protein 302 (72-80)
  source 1..27: mol_type = other RNA
aaggcctaccccttcccgctgagccac

SEQ ID NO: 30265 - RNA, 27 nt, synthetic construct
  misc_feature 1..27: note = Phosphatidylinositol 4-phosphate 5-kinase type-1 alpha (187-195)
  source 1..27: mol_type = other RNA
aaggaggccgagttcctgcagaagctc

SEQ ID NO: 30266 - RNA, 33 nt, synthetic construct
  misc_feature 1..33: note = Transmembrane emp24 domain-containing protein 10 (87-97)
  source 1..33: mol_type = other RNA
aaggaggacgccaccaagggcaagttcgccttc

SEQ ID NO: 30267 - RNA, 27 nt, synthetic construct
  misc_feature 1..27: note = COP9 signalosome complex subunit 6 (78-86)
  source 1..27: mol_type = other RNA
aaggaggagcagttcaagcaggtgttc

SEQ ID NO: 30268 - RNA, 27 nt, synthetic construct
  misc_feature 1..27: note = Septin-7 (100-108)
  source 1..27: mol_type = other RNA
aaggagggcggggtgcagctgctcctg

SEQ ID NO: 30269 - RNA, 30 nt, synthetic construct
  misc_feature 1..30: note = Phosphatidylinositol-binding clathrin assembly protein (231-240)
  source 1..30: mol_type = other RNA
aaggagggcctggacatctacaagaagttc

SEQ ID NO: 30270 - RNA, 33 nt, synthetic construct
  misc_feature 1..33: note = Adenosylhomocysteinase 2 (20-30)
  source 1..33: mol_type = other RNA
aaggagatcgaggacgccgagaagtacagcttc

SEQ ID NO: 30271 - RNA, 27 nt, synthetic construct
  misc_feature 1..27: note = Heat shock protein HSP 90-alpha A2 (41-49)
  source 1..27: mol_type = other RNA
aaggagatcttcctgcgcgagctcatc

SEQ ID NO: 30272 - RNA, 30 nt, synthetic construct
  misc_feature 1..30: note = Putative homeodomain transcription factor 2 (737-746)
  source 1..30: mol_type = other RNA
aaggagctggacagccccttccgcctctac

SEQ ID NO: 30273 - RNA, 30 nt, synthetic construct
  misc_feature 1..30: note = DnaJ homolog subfamily B member 14 (282-291)
  source 1..30: mol_type = other RNA
aaggagctggagcgcctcaccagcctgtac

SEQ ID NO: 30274 - RNA, 27 nt, synthetic construct
  misc_feature 1..27: note = Ezrin (61-69)
  source 1..27: mol_type = other RNA
aaggagaaccccctgcagttcaagttc

SEQ ID NO: 30275 - RNA, 30 nt, synthetic construct
  misc_feature 1..30: note = Integrator complex subunit 11 (493-502)
  source 1..30: mol_type = other RNA
aaggagcaggagaccgccctgcgcgtgtac

SEQ ID NO: 30276 - RNA, 27 nt, synthetic construct
  misc_feature 1..27: note = Hypoxia-inducible factor 1-alpha (32-40)
  source 1..27: mol_type = other RNA
aaggagagcgaggtgttctacgagctg

SEQ ID NO: 30277 - RNA, 27 nt, synthetic construct
  misc_feature 1..27: note = Moesin (72-80)
  source 1..27: mol_type = other RNA
aaggagagccccctgctcttcaagttc

SEQ ID NO: 30278 - RNA, 27 nt, synthetic construct
  misc_feature 1..27: note = Transcription elongation factor B polypeptide 2 (19-27)
  source 1..27: mol_type = other RNA
aaggagagctccaccgtgttcgagctg

SEQ ID NO: 30279 - RNA, 27 nt, synthetic construct
  misc_feature 1..27: note = CCAAT/enhancer-binding protein zeta (652-660)
  source 1..27: mol_type = other RNA
aaggagaccgagatcgtgaagaagctg

SEQ ID NO: 30280 - RNA, 27 nt, synthetic construct
  misc_feature 1..27: note = Small kinetochore-associated protein (78-86)
  source 1..27: mol_type = other RNA
aaggaggtggacgtcagcaagcagctg

SEQ ID NO: 30281 - RNA, 27 nt, synthetic construct
  misc_feature 1..27: note = RANBP2-like and GRIP domain-containing protein 1 (31-39)
  source 1..27: mol_type = other RNA
aaggagtacgacctggccaagaagtac

SEQ ID NO: 30282 - RNA, 27 nt, synthetic construct
  misc_feature 1..27: note = Mitochondrial fission 1 protein (85-93)
  source 1..27: mol_type = other RNA
aaggagtacgagaaggccctgaagtac

SEQ ID NO: 30283 - RNA, 27 nt, synthetic construct
  misc_feature 1..27: note = Spliceosome RNA helicase DDX39B (131-139)
  source 1..27: mol_type = other RNA
aaggagtacgagcgcttcagcaagtac

SEQ ID NO: 30284 - RNA, 27 nt, synthetic construct
  misc_feature 1..27: note = Activating signal cointegrator 1 complex subunit 2 (170-178)
  source 1..27: mol_type = other RNA
aagggcaacagccccctgctccagaag

SEQ ID NO: 30285 - RNA, 27 nt, synthetic construct
  misc_feature 1..27: note = Fibroblast growth factor receptor 1 (669-677)
  source 1..27: mol_type = other RNA
aagatcgccgacttcggcctggcccgc

SEQ ID NO: 30286 - RNA, 30 nt, synthetic construct
  misc_feature 1..30: note = Kinetochore protein Nuf2 (447-456)
  source 1..30: mol_type = other RNA
aagatcgacgagaagaccgccgagctgaag

SEQ ID NO: 30287 - RNA, 27 nt, synthetic construct
  misc_feature 1..27: note = 60S ribosomal protein L7-like 1 (114-122)
  source 1..27: mol_type = other RNA
aagatcttcagcggcgtgttcgtcaag

SEQ ID NO: 30288 - RNA, 27 nt, synthetic construct
  misc_feature 1..27: note = Tyrosine-protein kinase JAK2 (842-850)
  source 1..27: mol_type = other RNA
aagatcggcgacttcgggctgaccaag

SEQ ID NO: 30289 - RNA, 27 nt, synthetic construct
  misc_feature 1..27: note = Replication factor C subunit 1 (306-314)
  source 1..27: mol_type = other RNA
aagatcggcgaggtgagctcccccaag

SEQ ID NO: 30290 - RNA, 27 nt, synthetic construct
  misc_feature 1..27: note = Replication factor C subunit 2 (176-184)
  source 1..27: mol_type = other RNA
aagatcatcgagcccatccagagccgc

SEQ ID NO: 30291 - RNA, 30 nt, synthetic construct
  misc_feature 1..30: note = T-complex protein 1 subunit eta (48-57)
  source 1..30: mol_type = other RNA
aagatcaaggagatcgccgtgaccgtcaag

SEQ ID NO: 30292 - RNA, 27 nt, synthetic construct
  misc_feature 1..27: note = 40S ribosomal protein S18 (78-86)
  source 1..27: mol_type = other RNA
aagatccccgactggttcctgaaccgc

SEQ ID NO: 30293 - RNA, 27 nt, synthetic construct
  misc_feature 1..27: note = SAGA-associated factor 29 (50-58)
  source 1..27: mol_type = other RNA
aagatcagcccctactaccgcaccaag

SEQ ID NO: 30294 - RNA, 27 nt, synthetic construct
  misc_feature 1..27: note = B-cell linker protein (6-14)
  source 1..27: mol_type = other RNA
aagatcaccgtgcccgccagccagaag

SEQ ID NO: 30295 - RNA, 30 nt, synthetic construct
  misc_feature 1..30: note = COMM domain-containing protein 2 (42-51)
  source 1..30: mol_type = other RNA
aagatctacgagggcgccgcccgcaagctg

SEQ ID NO: 30296 - RNA, 24 nt, synthetic construct
  misc_feature 1..24: note = SWI/SNF-related matrix-associated actin-dependent regulator of chromatin subfamily A member 5 (411-418)
  source 1..24: mol_type = other RNA
aagatctacgtgggcctgagcaag

SEQ ID NO: 30297 - RNA, 27 nt, synthetic construct
  misc_feature 1..27: note = Cyclin-dependent kinase 4 (81-89)
  source 1..27: mol_type = other RNA
aagctggccgacttcggcctcgcccgc

SEQ ID NO: 30298 - RNA, 27 nt, synthetic construct
  misc_feature 1..27: note = DNA-dependent protein kinase catalytic subunit (1617-1625)
  source 1..27: mol_type = other RNA
aagctggccaccaccatcctccagcac

SEQ ID NO: 30299 - RNA, 27 nt, synthetic construct
  misc_feature 1..27: note = Myc proto-oncogene protein (341-349)
  source 1..27: mol_type = other RNA
aagctggacagcgtgcgcgtcctccgg

SEQ ID NO: 30300 - RNA, 33 nt, synthetic construct
  misc_feature 1..33: note = Translationally-controlled tumor protein (102-112)
  source 1..33: mol_type = other RNA
aagctggaggagcagcgccccgagcgggtgaag

SEQ ID NO: 30301 - RNA, 33 nt, synthetic construct
  misc_feature 1..33: note = Cleavage stimulation factor subunit 1 (198-208)
  source 1..33: mol_type = other RNA
aagctgttcgactacagcaagccctccgccaag

SEQ ID NO: 30302 - RNA, 27 nt, synthetic construct
  misc_feature 1..27: note = Baculoviral IAP repeat-containing protein 2 (45-53)
  source 1..27: mol_type = other RNA
aagctgggcgacagccccatccagaag

SEQ ID NO: 30303 - RNA, 27 nt, synthetic construct
  misc_feature 1..27: note = Nucleolar protein 58 (93-101)
  source 1..27: mol_type = other RNA
aagctgggcggggtgatcaaggagaag

SEQ ID NO: 30304 - RNA, 30 nt, synthetic construct
  misc_feature 1..30: note = Serine/threonine-protein kinase Chk1 (461-470)
  source 1..30: mol_type = other RNA
aagctgatcgacatcgtgagctcccagaag

SEQ ID NO: 30305 - RNA, 27 nt, synthetic construct
  misc_feature 1..27: note = SHC SH2 domain-binding protein 1 (262-270)
  source 1..27: mol_type = other RNA
aagctgatcgagaaccccctcctgcgc

SEQ ID NO: 30306 - RNA, 33 nt, synthetic construct
  misc_feature 1..33: note = 40S ribosomal protein S9 (30-40)
  source 1..33: mol_type = other RNA
aagctgatcggcgagtacgggctccgcaacaag

SEQ ID NO: 30307 - RNA, 33 nt, synthetic construct
  misc_feature 1..33: note = 60S ribosomal protein L19 (24-34)
  source 1..33: mol_type = other RNA
aagctgatcaaggacggcctcatcatccgcaag

SEQ ID NO: 30308 - RNA, 33 nt, synthetic construct
  misc_feature 1..33: note = Myc proto-oncogene protein (413-423)
  source 1..33: mol_type = other RNA
aagctgatcagcgaggaggacctcctgcgcaag

SEQ ID NO: 30309 - RNA, 30 nt, synthetic construct
  misc_feature 1..30: note = 60S ribosomal protein L4 (173-182)
  source 1..30: mol_type = other RNA
aagctgaaggcctggaacgacatcaagaag

SEQ ID NO: 30310 - RNA, 27 nt, synthetic construct
  misc_feature 1..27: note = Galactosylgalactosylxylosylprotein 3-beta-glucuronosyltransferase 3 (4-12)
  source 1..27: mol_type = other RNA
aagctgaagaacgtgttcctcgcctac

SEQ ID NO: 30311 - RNA, 27 nt, synthetic construct
  misc_feature 1..27: note = BRISC and BRCA1-A complex member 1 (297-305)
  source 1..27: mol_type = other RNA
aagctgctcgcccaccccctgcagcgc

SEQ ID NO: 30312 - RNA, 30 nt, synthetic construct
  misc_feature 1..30: note = SWI/SNF-related matrix-associated actin-dependent regulator of chromatin subfamily D member 3 (176-185)
  source 1..30: mol_type = other RNA
aagctgctcgacgaccccagcaagcagaag

SEQ ID NO: 30313 - RNA, 27 nt, synthetic construct
  misc_feature 1..27: note = Tyrosine-tRNA ligase, cytoplasmic (319-327)
  source 1..27: mol_type = other RNA
aagctgctcgaccccatccgcgagaag

SEQ ID NO: 30314 - RNA, 33 nt, synthetic construct
  misc_feature 1..33: note = T-complex protein 1 subunit eta (55-65)
  source 1..33: mol_type = other RNA
aagctgctcgacgtggtccaccccgccgccaag

SEQ ID NO: 30315 - RNA, 33 nt, synthetic construct
  misc_feature 1..33: note = 40S ribosomal protein S16 (49-59)
  source 1..33: mol_type = other RNA
aagctgctcgagcccgtgctgctgctcggcaag

SEQ ID NO: 30316 - RNA, 27 nt, synthetic construct
  misc_feature 1..27: note = Prefoldin subunit 6 (58-66)
  source 1..27: mol_type = other RNA
aagctgctcggccccgtgctggtcaag

SEQ ID NO: 30317 - RNA, 30 nt, synthetic construct
  misc_feature 1..30: note = Nucleolar protein 7 (112-121)
  source 1..30: mol_type = other RNA
aagctgctccccgacaccatcctggagaag

SEQ ID NO: 30318 - RNA, 27 nt, synthetic construct
  misc_feature 1..27: note = Target of rapamycin complex 2 subunit MAPKAP1 (222-230)
  source 1..27: mol_type = other RNA
aagctgaacgacaacgtgagcgcctac

SEQ ID NO: 30319 - RNA, 27 nt, synthetic construct
  misc_feature 1..27: note = 116 kDa U5 small nuclear ribonucleoprotein component (409-417)
  source 1..27: mol_type = other RNA
aagctgaacatccgccccctcctgcgg

SEQ ID NO: 30320 - RNA, 30 nt, synthetic construct
  misc_feature 1..30: note = 60S ribosomal protein L4 (327-336)
  source 1..30: mol_type = other RNA
aagctgaacccctacgccaagaccatgcgc

SEQ ID NO: 30321 - RNA, 27 nt, synthetic construct
  misc_feature 1..27: note = Activator of 90 kDa heat shock protein ATPase homolog 1 (10-18)
  source 1..27: mol_type = other RNA
aagctgaactggaccggcaccagcaag

SEQ ID NO: 30322 - RNA, 27 nt, synthetic construct
  misc_feature 1..27: note = U5 small nuclear ribonucleoprotein 200 kDa helicase (885-893)
  source 1..27: mol_type = other RNA
aagctgcccgaggaggtggtcaagaag

SEQ ID NO: 30323 - RNA, 27 nt, synthetic construct
  misc_feature 1..27: note = Class E basic helix-loop-helix protein 40 (51-59)
  source 1..27: mol_type = other RNA
aagctgccccaccgcctcatcgagaag

SEQ ID NO: 30324 - RNA, 30 nt, synthetic construct
  misc_feature 1..30: note = 60S ribosomal protein L27a (116-125)
  source 1..30: mol_type = other RNA
aagctgcccaagcagccggtgatcgtcaag

SEQ ID NO: 30325 - RNA, 30 nt, synthetic construct
  misc_feature 1..30: note = Hematopoietic SH2 domain-containing protein (6-15)
  source 1..30: mol_type = other RNA
aagctgcccctcccgctgcccccccgcctg

SEQ ID NO: 30326 - RNA, 27 nt, synthetic construct
  misc_feature 1..27: note = EH domain-containing protein 1 (475-483)
  source 1..27: mol_type = other RNA
aagctgcccaacaccgtgctcggcaag

SEQ ID NO: 30327 - RNA, 27 nt, synthetic construct
  misc_feature 1..27: note = Protein SET (75-83)
  source 1..27: mol_type = other RNA
aagctgcgccagcccttcttccagaag

SEQ ID NO: 30328 - RNA, 27 nt, synthetic construct
  misc_feature 1..27: note = Phosphatidylethanolamine-binding protein 1 (88-96)
  source 1..27: mol_type = other RNA
aagctgtacgagcagctcagcggcaag

SEQ ID NO: 30329 - RNA, 27 nt, synthetic construct
  misc_feature 1..27: note = Cilia- and flagella-associated protein 20 (182-190)
  source 1..27: mol_type = other RNA
aagctgtacctccccgtgcagaacaag

SEQ ID NO: 30330 - RNA, 27 nt, synthetic construct
  misc_feature 1..27: note = Polyribonucleotide 5'-hydroxyl-kinase Clp1 (198-206)
  source 1..27: mol_type = other RNA
aagctgtacaacaagatcaccagccgc

SEQ ID NO: 30331 - RNA, 27 nt, synthetic construct
  misc_feature 1..27: note = DnaJ homolog subfamily B member 14 (36-44)
  source 1..27: mol_type = other RNA
aagctgtaccccctcccgagcgcccgc

SEQ ID NO: 30332 - RNA, 27 nt, synthetic construct
  misc_feature 1..27: note = Elongator complex protein 3 (316-324)
  source 1..27: mol_type = other RNA
aagctgtaccccaccctcgtgatccgc

SEQ ID NO: 30333 - RNA, 33 nt, synthetic construct
  misc_feature 1..33: note = Nodal modulator 2 (57-67)
  source 1..33: mol_type = other RNA
aagctgtacaccaagcacggcaccctcaagtac

SEQ ID NO: 30334 - RNA, 30 nt, synthetic construct
  misc_feature 1..30: note = Midasin (592-601)
  source 1..30: mol_type = other RNA
aagatggccgaggtgatcggcagcaagctg

SEQ ID NO: 30335 - RNA, 27 nt, synthetic construct
  misc_feature 1..27: note = BCL-6 corepressor (460-468)
  source 1..27: mol_type = other RNA
aagatggcccccaccgtgctggtccac

SEQ ID NO: 30336 - RNA, 27 nt, synthetic construct
  misc_feature 1..27: note = Low density lipoprotein receptor adapter protein 1 (123-131)
  source 1..27: mol_type = other RNA
aagatgcacgacaaggtgttcgcctac

SEQ ID NO: 30337 - RNA, 33 nt, synthetic construct
  misc_feature 1..33: note = Protein FAM136A (128-138)
  source 1..33: mol_type = other RNA
aagatgaaggaggccctgctcagcatcggcaag

SEQ ID NO: 30338 - RNA, 27 nt, synthetic construct
  misc_feature 1..27: note = Protein LAP2 (174-182)
  source 1..27: mol_type = other RNA
aagatgctgcccaagaccatgaaccgc

SEQ ID NO: 30339 - RNA, 33 nt, synthetic construct
  misc_feature 1..33: note = Selenoprotein T (32-42)
  source 1..33: mol_type = other RNA
aagatgcagtacgccaccggccccctgctcaag

SEQ ID NO: 30340 - RNA, 27 nt, synthetic construct
  misc_feature 1..27: note = Enhancer of rudimentary homolog (34-42)
  source 1..27: mol_type = other RNA
aagatgtacgaggagcacctgaagcgc

SEQ ID NO: 30341 - RNA, 30 nt, synthetic construct
  misc_feature 1..30: note = cAMP-dependent protein kinase catalytic subunit beta (71-80)
  source 1..30: mol_type = other RNA
aagcagatcgagcacaccctgaacgagaag

SEQ ID NO: 30342 - RNA, 30 nt, synthetic construct
  misc_feature 1..30: note = Pumilio homolog 3 (310-319)
  source 1..30: mol_type = other RNA
aagcagatcctgacccccatggcccagaag

SEQ ID NO: 30343 - RNA, 33 nt, synthetic construct
  misc_feature 1..33: note = Small EDRK-rich factor 2 (37-47)
  source 1..33: mol_type = other RNA
aagcagcgcgacagcgagatcatgcagcagaag

SEQ ID NO: 30344 - RNA, 33 nt, synthetic construct
  misc_feature 1..33: note = T-complex protein 1 subunit theta (98-108)
  source 1..33: mol_type = other RNA
aagcagtacggcaacgaggtgttcctggccaag

SEQ ID NO: 30345 - RNA, 27 nt, synthetic construct
  misc_feature 1..27: note = 60S ribosomal protein L10a (47-55)
  source 1..27: mol_type = other RNA
aagcgcttcagcggcaccgtgcggctg

SEQ ID NO: 30346 - RNA, 27 nt, synthetic construct
  misc_feature 1..27: note = A-kinase anchor protein 13 (266-274)
  source 1..27: mol_type = other RNA
aagcgccaggaggtgatctacgagctg

SEQ ID NO: 30347 - RNA, 27 nt, synthetic construct
  misc_feature 1..27: note = DNA replication licensing factor MCM4 (216-224)
  source 1..27: mol_type = other RNA
aagagcttcgacaagaacctgtaccgc

SEQ ID NO: 30348 - RNA, 30 nt, synthetic construct
  misc_feature 1..30: note = Renin receptor (255-264)
  source 1..30: mol_type = other RNA
aagagcttcgacacctccctgatccgcaag

SEQ ID NO: 30349 - RNA, 27 nt, synthetic construct
  misc_feature 1..27: note = Chromosome alignment-maintaining phosphoprotein 1 (334-342)
  source 1..27: mol_type = other RNA
aagagcggccccccggagctgcgcaag

SEQ ID NO: 30350 - RNA, 27 nt, synthetic construct
  misc_feature 1..27: note = Aurora kinase B (125-133)
  source 1..27: mol_type = other RNA
aagagccacttcatcgtggccctgaag

SEQ ID NO: 30351 - RNA, 30 nt, synthetic construct
  misc_feature 1..30: note = Cytoplasmic FMR1-interacting protein 2 (777-786)
  source 1..30: mol_type = other RNA
aagagcctggaccaggccatctcccgcttc

SEQ ID NO: 30352 - RNA, 30 nt, synthetic construct
  misc_feature 1..30: note = WD repeat-containing protein 36 (360-369)
  source 1..30: mol_type = other RNA
aagagcctgggccacgggctcatcaacaag

SEQ ID NO: 30353 - RNA, 27 nt, synthetic construct
  misc_feature 1..27: note = Mediator of RNA polymerase II transcription subunit 27 (195-203)
  source 1..27: mol_type = other RNA
aagagcaactaccaggtgttccagaag

SEQ ID NO: 30354 - RNA, 27 nt, synthetic construct
  misc_feature 1..27: note = Transport and Golgi organization protein 6 homolog (711-719)
  source 1..27: mol_type = other RNA
aagagctccgacttcgccgtgctgaag

SEQ ID NO: 30355 - RNA, 27 nt, synthetic construct
  misc_feature 1..27: note = Histone H3.3 (57-65)
  source 1..27: mol_type = other RNA
aagagcaccgagctgctcatccgcaag

SEQ ID NO: 30356 - RNA, 27 nt, synthetic construct
  misc_feature 1..27: note = Nucleolar protein 7 (170-178)
  source 1..27: mol_type = other RNA
aagagctacctggccgtgcgcctcaag

SEQ ID NO: 30357 - RNA, 27 nt, synthetic construct
  misc_feature 1..27: note = 116 kDa U5 small nuclear ribonucleoprotein component (612-620)
  source 1..27: mol_type = other RNA
aagagctacccctccctgaccaccaag

SEQ ID NO: 30358 - RNA, 30 nt, synthetic construct
  misc_feature 1..30: note = Pre-mRNA-processing-splicing factor 8 (1792-1801)
  source 1..30: mol_type = other RNA
aagaccttcgagggcaacctgaccacgaag

SEQ ID NO: 30359 - RNA, 27 nt, synthetic construct
  misc_feature 1..27: note = Zinc finger and BTB domain-containing protein 40 (1053-1061)
  source 1..27: mol_type = other RNA
aagaccttccccaacaccatcgagcac

SEQ ID NO: 30360 - RNA, 27 nt, synthetic construct
  misc_feature 1..27: note = Protein FAM3C (112-120)
  source 1..27: mol_type = other RNA
aagaccggcgaggtgctggacaccaag

SEQ ID NO: 30361 - RNA, 30 nt, synthetic construct
  misc_feature 1..30: note = Pseudouridylate synthase 7 homolog (77-86)
  source 1..30: mol_type = other RNA
aagaccaaggaccccaccgccgccctgcgc

SEQ ID NO: 30362 - RNA, 30 nt, synthetic construct
  misc_feature 1..30: note = 60S ribosomal protein L4 (163-172)
  source 1..30: mol_type = other RNA
aagaccaaggaggccgtgctgctcctgaag

SEQ ID NO: 30363 - RNA, 30 nt, synthetic construct
  misc_feature 1..30: note = Cyclin-dependent kinase 11A (11-20)
  source 1..30: mol_type = other RNA
aagaccctggacgagatcctccaggagaag

SEQ ID NO: 30364 - RNA, 33 nt, synthetic construct
  misc_feature 1..33: note = RNA cytidine acetyltransferase (184-194)
  source 1..33: mol_type = other RNA
aagaccctggaccaggccaaggccgtgctcaag

SEQ ID NO: 30365 - RNA, 27 nt, synthetic construct
  misc_feature 1..27: note = Huntingtin (1402-1410)
  source 1..27: mol_type = other RNA
aagaccaacctgaccagcgtgacgaag

SEQ ID NO: 30366 - RNA, 27 nt, synthetic construct
  misc_feature 1..27: note = Actin-related protein 2/3 complex subunit 2 (214-222)
  source 1..27: mol_type = other RNA
aagaccagcgacttcctgaaggtgctc

SEQ ID NO: 30367 - RNA, 27 nt, synthetic construct
  misc_feature 1..27: note = Cyclin-dependent kinase 11B (551-559)
  source 1..27: mol_type = other RNA
aagaccagcaacctgctcctgtcccac

SEQ ID NO: 30368 - RNA, 27 nt, synthetic construct
  misc_feature 1..27: note = 26S proteasome non-ATPase regulatory subunit 1 (302-310)
  source 1..27: mol_type = other RNA
aagaccagctccgccttcgtgggcaag

SEQ ID NO: 30369 - RNA, 27 nt, synthetic construct
  misc_feature 1..27: note = Zinc finger FYVE domain-containing protein 16 (1328-1336)
  source 1..27: mol_type = other RNA
aagaccagctccggcttcctggccaag

SEQ ID NO: 30370 - RNA, 33 nt, synthetic construct
  misc_feature 1..33: note = Cyclic AMP-dependent transcription factor ATF-6 beta (655-665)
  source 1..33: mol_type = other RNA
aagaccagcaccgtgcccccgtccctgcgcaag

SEQ ID NO: 30371 - RNA, 27 nt, synthetic construct
  misc_feature 1..27: note = Bridging integrator 3 (67-75)
  source 1..27: mol_type = other RNA
aagaccgtgatcgagcccctgaagaag

SEQ ID NO: 30372 - RNA, 30 nt, synthetic construct
  misc_feature 1..30: note = DNA damage-binding protein 1 (191-200)
  source 1..30: mol_type = other RNA
aagacctacgaggtgagcctgcgcgagaag

SEQ ID NO: 30373 - RNA, 33 nt, synthetic construct
  misc_feature 1..33: note = 26S proteasome non-ATPase regulatory subunit 11 (175-185)
  source 1..33: mol_type = other RNA
aagacctaccacgccctgagcaacctccccaag

SEQ ID NO: 30374 - RNA, 33 nt, synthetic construct
  misc_feature 1..33: note = High mobility group protein B1 (76-86)
  source 1..33: mol_type = other RNA
aagacctacatccccccgaagggcgagaccaag

SEQ ID NO: 30375 - RNA, 33 nt, synthetic construct
  misc_feature 1..33: note = DNA-directed RNA polymerase II subunit RPB1 (697-707)
  source 1..33: mol_type = other RNA
aagacctaccaggacatccagaacaccatcaag

SEQ ID NO: 30376 - RNA, 27 nt, synthetic construct
  misc_feature 1..27: note = Interferon-induced, double-stranded RNA-activated protein kinase (291-299)
  source 1..27: mol_type = other RNA
aagacctacgtgatcaagcgcgtcaag

SEQ ID NO: 30377 - RNA, 27 nt, synthetic construct
  misc_feature 1..27: note = T-complex protein 1 subunit theta (296-304)
  source 1..27: mol_type = other RNA
aaggtggccgacatggccctgcactac

SEQ ID NO: 30378 - RNA, 30 nt, synthetic construct
  misc_feature 1..30: note = RNA-binding protein 43 (71-80)
  source 1..30: mol_type = other RNA
aaggtggccgagaacgtcatccgccagaag

SEQ ID NO: 30379 - RNA, 27 nt, synthetic construct
  misc_feature 1..27: note = Serine/threonine-protein kinase Chk2 (245-253)
  source 1..27: mol_type = other RNA
aaggtggccatcaagatcatcagcaag

SEQ ID NO: 30380 - RNA, 30 nt, synthetic construct
  misc_feature 1..30: note = 60S ribosomal protein L7a (11-20)
  source 1..30: mol_type = other RNA
aaggtggcccccgccccggcggtcgtgaag

SEQ ID NO: 30381 - RNA, 33 nt, synthetic construct
  misc_feature 1..33: note = 60S ribosomal protein L7a (11-21)
  source 1..33: mol_type = other RNA
aaggtggcccccgccccggcggtcgtgaagaag

SEQ ID NO: 30382 - RNA, 30 nt, synthetic construct
  misc_feature 1..30: note = Heat shock cognate 71 kDa protein (601-610)
  source 1..30: mol_type = other RNA
aaggtgtgcaaccccatcatcaccaagctg

SEQ ID NO: 30383 - RNA, 30 nt, synthetic construct
  misc_feature 1..30: note = 60S ribosomal protein L13a (103-112)
  source 1..30: mol_type = other RNA
aaggtgttcgacggcatccccccgccctac

SEQ ID NO: 30384 - RNA, 30 nt, synthetic construct
  misc_feature 1..30: note = GMP synthase (glutamine-hydrolyzing) (207-216)
  source 1..30: mol_type = other RNA
aaggtgttcggcgggaccgtccacaagaag

SEQ ID NO: 30385 - RNA, 27 nt, synthetic construct
  misc_feature 1..27: note = Cytoskeleton-associated protein 5 (96-104)
  source 1..27: mol_type = other RNA
aaggtgttcaaccagcccaaggccaag

SEQ ID NO: 30386 - RNA, 30 nt, synthetic construct
  misc_feature 1..30: note = Thioredoxin (64-73)
  source 1..30: mol_type = other RNA
aaggtgggcgagttcagcggggccaacaag

SEQ ID NO: 30387 - RNA, 27 nt, synthetic construct
  misc_feature 1..27: note = 28S ribosomal protein S17, mitochondrial (90-98)
  source 1..27: mol_type = other RNA
aaggtgatcgaccccgtcaccggcaag

SEQ ID NO: 30388 - RNA, 27 nt, synthetic construct
  misc_feature 1..27: note = Serine hydroxymethyltransferase, mitochondrial (238-246)
  source 1..27: mol_type = other RNA
aaggtgatccccagcccgttcaagcac

SEQ ID NO: 30389 - RNA, 30 nt, synthetic construct
  misc_feature 1..30: note = Structural maintenance of chromosomes protein 4 (512-521)
  source 1..30: mol_type = other RNA
aaggtgctggacgccatcatccaggagaag

SEQ ID NO: 30390 - RNA, 30 nt, synthetic construct
  misc_feature 1..30: note = Eukaryotic translation initiation factor 3 subunit L (292-301)
  source 1..30: mol_type = other RNA
aaggtgctggagaacatcgagctcaacaag

SEQ ID NO: 30391 - RNA, 33 nt, synthetic construct
  misc_feature 1..33: note = G2/mitotic-specific cyclin-B2 (318-328)
  source 1..33: mol_type = other RNA
aaggtgctgggccaggggaagtggaacctcaag

SEQ ID NO: 30392 - RNA, 27 nt, synthetic construct
  misc_feature 1..27: note = Tryptophan-tRNA ligase, mitochondrial (333-341)
  source 1..27: mol_type = other RNA
aaggtgctgcagatcggcagcgccaag

SEQ ID NO: 30393 - RNA, 30 nt, synthetic construct
  misc_feature 1..30: note = Septin-7 (185-194)
  source 1..30: mol_type = other RNA
aaggtgaacatcatccccctgatcgccaag

SEQ ID NO: 30394 - RNA, 30 nt, synthetic construct
  misc_feature 1..30: note = Septin-2 (174-183)
  source 1..30: mol_type = other RNA
aaggtgaacatcgtccccgtgatcgccaag

SEQ ID NO: 30395 - RNA, 27 nt, synthetic construct
  misc_feature 1..27: note = Transferrin receptor protein 1 (495-503)
  source 1..27: mol_type = other RNA
aaggtgagcgcctcccccctgctctac

SEQ ID NO: 30396 - RNA, 27 nt, synthetic construct
  misc_feature 1..27: note = B-lymphocyte antigen CD19 (291-299)
  source 1..27: mol_type = other RNA
aaggtgagcgccgtcaccctggcctac

SEQ ID NO: 30397 - RNA, 27 nt, synthetic construct
  misc_feature 1..27: note = Astrotactin-2 (149-157)
  source 1..27: mol_type = other RNA
aaggtgagcgactacatcctgcagcac

SEQ ID NO: 30398 - RNA, 27 nt, synthetic construct
  misc_feature 1..27: note = Thioredoxin-related transmembrane protein 2 (207-215)
  source 1..27: mol_type = other RNA
aaggtgagcacctcccccctgaccaag

SEQ ID NO: 30399 - RNA, 30 nt, synthetic construct
  misc_feature 1..30: note = Rab GDP dissociation inhibitor beta (23-32)
  source 1..30: mol_type = other RNA
aaggtgaccgagggcagcttcgtctacaag

SEQ ID NO: 30400 - RNA, 27 nt, synthetic construct
  misc_feature 1..27: note = Unconventional myosin-Id (707-715)
  source 1..27: mol_type = other RNA
aaggtgtggcgcggcaccctggcccgg

SEQ ID NO: 30401 - RNA, 27 nt, synthetic construct
  misc_feature 1..27: note = Nipped-B-like protein (52-60)
  source 1..27: mol_type = other RNA
aaggtgtacgacaaggccatcaaccgc

SEQ ID NO: 30402 - RNA, 33 nt, synthetic construct
  misc_feature 1..33: note = 78 kDa glucose-regulated protein (446-456)
  source 1..33: mol_type = other RNA
aaggtgtacgagggcgagcgccccctgaccaag

SEQ ID NO: 30403 - RNA, 27 nt, synthetic construct
  misc_feature 1..27: note = Eukaryotic translation initiation factor 3 subunit L (70-78)
  source 1..27: mol_type = other RNA
aaggtgtacgagctgcaggccagccgc

SEQ ID NO: 30404 - RNA, 27 nt, synthetic construct
  misc_feature 1..27: note = E3 ubiquitin-protein ligase RAD18 (115-123)
  source 1..27: mol_type = other RNA
aaggtgtacacccccgtcgccagccgc

SEQ ID NO: 30405 - RNA, 30 nt, synthetic construct
  misc_feature 1..30: note = Motile sperm domain-containing protein 2 (172-181)
  source 1..30: mol_type = other RNA
aaggtgtactaccccaagtacctgagcaag

SEQ ID NO: 30406 - RNA, 30 nt, synthetic construct
  misc_feature 1..30: note = Ubiquitin-associated protein 2-like (87-96)
  source 1..30: mol_type = other RNA
ctggagggcaaccccgacacccacagctgg

SEQ ID NO: 30407 - RNA, 27 nt, synthetic construct
  misc_feature 1..27: note = Microtubule-associated protein RP/EB family member 1 (67-75)
  source 1..27: mol_type = other RNA
ctggagcacgagtacatccagaacttc

SEQ ID NO: 30408 - RNA, 24 nt, synthetic construct
  misc_feature 1..24: note = Hyaluronan mediated motility receptor (121-128)
  source 1..24: mol_type = other RNA
ctggagaagcagctcatcgagctg

SEQ ID NO: 30409 - RNA, 30 nt, synthetic construct
  misc_feature 1..30: note = DNA replication licensing factor MCM2 (790-799)
  source 1..30: mol_type = other RNA
ctggagagcttcatcgacacccagaagttc

SEQ ID NO: 30410 - RNA, 30 nt, synthetic construct
  misc_feature 1..30: note = Guanine nucleotide-binding protein G(s) subunit alpha isoforms short (286-295)
  source 1..30: mol_type = other RNA
ctgctcgccgagaaggtgctggccggcaag

SEQ ID NO: 30411 - RNA, 33 nt, synthetic construct
  misc_feature 1..33: note = Eukaryotic translation initiation factor 3 subunit C-like protein (634-644)
  source 1..33: mol_type = other RNA
ctgctcgacatccagagctccggccgcgccaag

SEQ ID NO: 30412 - RNA, 27 nt, synthetic construct
  misc_feature 1..27: note = Prelamin-A/C (140-148)
  source 1..27: mol_type = other RNA
ctgctcaacagcaaggaggccgccctg

SEQ ID NO: 30413 - RNA, 33 nt, synthetic construct
  misc_feature 1..33: note = T-complex protein 1 subunit beta (109-119)
  source 1..33: mol_type = other RNA
ctgctccgcgaggccgagagcctgatcgccaag

SEQ ID NO: 30414 - RNA, 33 nt, synthetic construct
  misc_feature 1..33: note = Methionine synthase reductase (6-16)
  source 1..33: mol_type = other RNA
ctgctctacgccacccagcagggccaggccaag

SEQ ID NO: 30415 - RNA, 30 nt, synthetic construct
  misc_feature 1..30: note = Replication factor C subunit 5 (57-66)
  source 1..30: mol_type = other RNA
ctgctctacggccccccggggaccggcaag

SEQ ID NO: 30416 - RNA, 27 nt, synthetic construct
  misc_feature 1..27: note = Leucine-rich repeat-containing protein 58 (83-91)
  source 1..27: mol_type = other RNA
ctgccccacaaccgcctcgtgagcctg

SEQ ID NO: 30417 - RNA, 27 nt, synthetic construct
  misc_feature 1..27: note = Ribosomal RNA processing protein 1 homolog B (585-593)
  source 1..27: mol_type = other RNA
ctgcccagccagaagaccgcctccctc

SEQ ID NO: 30418 - RNA, 27 nt, synthetic construct
  misc_feature 1..27: note = Proteasome assembly chaperone 2 (40-48)
  source 1..27: mol_type = other RNA
ctgcccagccgcaagctcgtggccctg

SEQ ID NO: 30419 - RNA, 27 nt, synthetic construct
  misc_feature 1..27: note = Squalene monooxygenase (548-556)
  source 1..27: mol_type = other RNA
ctgagctccggcgccgtgctctacaag

SEQ ID NO: 30420 - RNA, 27 nt, synthetic construct
  misc_feature 1..27: note = Neuroguidin (201-209)
  source 1..27: mol_type = other RNA
ctgagctccagcgtgatccgcgagctc

SEQ ID NO: 30421 - RNA, 27 nt, synthetic construct
  misc_feature 1..27: note = 60S ribosomal protein L34 (11-19)
  source 1..27: mol_type = other RNA
ctgagctacaacaccgcctccaacaag

SEQ ID NO: 30422 - RNA, 30 nt, synthetic construct
  misc_feature 1..30: note = Importin subunit alpha-1 (344-353)
  source 1..30: mol_type = other RNA
ctgaccaaccccaagaccaacatccagaag

SEQ ID NO: 30423 - RNA, 30 nt, synthetic construct
  misc_feature 1..30: note = 40S ribosomal protein S7 (131-140)
  source 1..30: mol_type = other RNA
ctggtgttccccagcgagatcgtcggcaag

SEQ ID NO: 30424 - RNA, 27 nt, synthetic construct
  misc_feature 1..27: note = Filamin-A (1766-1774)
  source 1..27: mol_type = other RNA
ctggtgatccccttcaccatcaagaag

SEQ ID NO: 30425 - RNA, 27 nt, synthetic construct
  misc_feature 1..27: note = PRELI domain containing protein 3B (186-194)
  source 1..27: mol_type = other RNA
atggccgccgcggccttcgccgagaag

SEQ ID NO: 30426 - RNA, 27 nt, synthetic construct
  misc_feature 1..27: note = Cyclin-T1 (410-418)
  source 1..27: mol_type = other RNA
atggaggccaacgtgaagagccagtac

SEQ ID NO: 30427 - RNA, 27 nt, synthetic construct
  misc_feature 1..27: note = Transformation/transcription domain-associated protein (1736-1744)
  source 1..27: mol_type = other RNA
atggaggaggagatccccaagaactac

SEQ ID NO: 30428 - RNA, 27 nt, synthetic construct
  misc_feature 1..27: note = Nucleolar protein 58 (64-72)
  source 1..27: mol_type = other RNA
atggagggcaagatcaacaagcagctg

SEQ ID NO: 30429 - RNA, 27 nt, synthetic construct
  misc_feature 1..27: note = Ribonucleoside-diphosphate reductase subunit M2 (228-236)
  source 1..27: mol_type = other RNA
atggagaacatccacagcgagatgtac

SEQ ID NO: 30430 - RNA, 30 nt, synthetic construct
  misc_feature 1..30: note Dolichyl-diphosphooligosaccharide-proteinosyltransferase 48 kDa subunit (18-27)
  source 1..30: mol_type = other RNA
atggagcccagcaccgccgcccgcgcgtgg

SEQ ID NO: 30431 - RNA, 33 nt, synthetic construct
  misc_feature 1..33: note = Large proline-rich protein BAG6 (929-939)
  source 1..33: mol_type = other RNA
atgcccgtgggcccggacgccatcctgcgctac

SEQ ID NO: 30432 - RNA, 27 nt, synthetic construct
  misc_feature 1..27: note = 60S ribosomal protein L26 (30-38)
  source 1..27: mol_type = other RNA
atgagctcccccctgagcaaggagctc

SEQ ID NO: 30433 - RNA, 27 nt, synthetic construct
  misc_feature 1..27: note = Histone deacetylase 1 (37-45)
  source 1..27: mol_type = other RNA
atgacccacaacctgctcctgaactac

SEQ ID NO: 30434 - RNA, 27 nt, synthetic construct
  misc_feature 1..27: note = Myosin-7B (138-146)
  source 1..27: mol_type = other RNA
aacgaggccagcgtgctgcacaacctc

SEQ ID NO: 30435 - RNA, 27 nt, synthetic construct
  misc_feature 1..27: note = DnaJ homolog subfamily B member 5 (16-24)
  source 1..27: mol_type = other RNA
aacgaggacgagatcaagaaggcctac

SEQ ID NO: 30436 - RNA, 27 nt, synthetic construct
  misc_feature 1..27: note = Nuclear factor interleukin-3-regulated protein (343-351)
  source 1..27: mol_type = other RNA
aacgagttcgaggccacccagaagctg

SEQ ID NO: 30437 - RNA, 27 nt, synthetic construct
  misc_feature 1..27: note = Ras-related protein Rab-7a (184-192)
  source 1..27: mol_type = other RNA
aacgagttccccgagccgatcaagctg

SEQ ID NO: 30438 - RNA, 30 nt, synthetic construct
  misc_feature 1..30: note = Kinetochore protein NDC80 homolog (555-564)
  source 1..30: mol_type = other RNA
aacgagctggacgccgtgcagcgcgagtac

SEQ ID NO: 30439 - RNA, 27 nt, synthetic construct
  misc_feature 1..27: note = Putative eukaryotic translation initiation factor 2 subunit 3-like protein (71-79)
  source 1..27: mol_type = other RNA
aacgagctggagcgcaacatcaccatc

SEQ ID NO: 30440 - RNA, 27 nt, synthetic construct
  misc_feature 1..27: note = Fizzy-related protein homolog (412-420)
  source 1..27: mol_type = other RNA
aacgagctggtgagcacccacggctac

SEQ ID NO: 30441 - RNA, 27 nt, synthetic construct
  misc_feature 1..27: note = Mediator of RNA polymerase II transcription subunit 23 (148-156)
  source 1..27: mol_type = other RNA
aacgagaacgacatcatcacccacttc

SEQ ID NO: 30442 - RNA, 27 nt, synthetic construct
  misc_feature 1..27: note = CUGBP Elav-like family member 2 (120-128)
  source 1..27: mol_type = other RNA
aacgagaacgacatccgcgtgatgttc

SEQ ID NO: 30443 - RNA, 27 nt, synthetic construct
  misc_feature 1..27: note = Serine/threonine-protein kinase PAK 2 (445-453)
  source 1..27: mol_type = other RNA
aacgagaaccccctgcgcgccctctac

SEQ ID NO: 30444 - RNA, 27 nt, synthetic construct
  misc_feature 1..27: note = Serine/threonine/tyrosine-interacting-like protein 1 (124-132)
  source 1..27: mol_type = other RNA
aacgagcagaccctgcagcgcagctgg

SEQ ID NO: 30445 - RNA, 27 nt, synthetic construct
  misc_feature 1..27: note = Monocarboxylate transporter 7 (57-65)
  source 1..27: mol_type = other RNA
aacgagagcaactcccgcatcagctgg

SEQ ID NO: 30446 - RNA, 27 nt, synthetic construct
  misc_feature 1..27: note = Oxysterol-binding protein-related protein 9 (671-679)
  source 1..27: mol_type = other RNA
aacgagtacgagagccgctccctgtgg

SEQ ID NO: 30447 - RNA, 27 nt, synthetic construct
  misc_feature 1..27: note = DnaJ homolog subfamily A member 1 (120-128)
  source 1..27: mol_type = other RNA
aacggcgccacccgcaagctggccctc

SEQ ID NO: 30448 - RNA, 27 nt, synthetic construct
  misc_feature 1..27: note = Lysine-specific histone demethylase 1A (474-482)
  source 1..27: mol_type = other RNA
aacctgaaggagaagatcaaggagctc

SEQ ID NO: 30449 - RNA, 27 nt, synthetic construct
  misc_feature 1..27: note = Histone-binding protein RBBP4 (245-253)
  source 1..27: mol_type = other RNA
aacctgaagctcaagctgcacagcttc

SEQ ID NO: 30450 - RNA, 27 nt, synthetic construct
  misc_feature 1..27: note = AP-3 complex subunit delta-1 (372-380)
  source 1..27: mol_type = other RNA
aacctgatggagatcgtgaagaagctc

SEQ ID NO: 30451 - RNA, 24 nt, synthetic construct
  misc_feature 1..24: note = Serine/threonine-protein phosphatase 2A 65 kDa regulatory subunit A beta isoform isoform b (350-357)
  source 1..24: mol_type = other RNA
aaccagcacgtgaagagcgccctg

SEQ ID NO: 30452 - RNA, 27 nt, synthetic construct
  misc_feature 1..27: note = Copine-8 (263-271)
  source 1..27: mol_type = other RNA
aacgtgtacgaggtcgtgaaccccaag

SEQ ID NO: 30453 - RNA, 30 nt, synthetic construct
  misc_feature 1..30: note = Polypyrimidine tract-binding protein 1 (440-449)
  source 1..30: mol_type = other RNA
caggaggaccagggcctgaccaaggactac

SEQ ID NO: 30454 - RNA, 30 nt, synthetic construct
  misc_feature 1..30: note = Forkhead box protein K2 (318-327)
  source 1..30: mol_type = other RNA
caggaggagcccggcaaggggagcttctgg

SEQ ID NO: 30455 - RNA, 33 nt, synthetic construct
  misc_feature 1..33: note = RNA polymerase II subunit A C-terminal domain phosphatase SSU72 (177-187)
  source 1..33: mol_type = other RNA
caggagttcgaggagaagagcggccgcaccttc

SEQ ID NO: 30456 - RNA, 27 nt, synthetic construct
  misc_feature 1..27: note = Alpha-galactosidase A (357-365)
  source 1..27: mol_type = other RNA
caggagatcggcgggccccgcagctac

SEQ ID NO: 30457 - RNA, 33 nt, synthetic construct
  misc_feature 1..33: note = Splicing factor 3B subunit 1 (41-51)
  source 1..33: mol_type = other RNA
caggagatctacggcgggagcgactcccgcttc

SEQ ID NO: 30458 - RNA, 30 nt, synthetic construct
  misc_feature 1..30: note = Translin-associated protein X (44-53)
  source 1..30: mol_type = other RNA
caggagctggacgcccgccacgacaagtac

SEQ ID NO: 30459 - RNA, 27 nt, synthetic construct
  misc_feature 1..27: note = Mis18-binding protein 1 (582-590)
  source 1..27: mol_type = other RNA
caggagctgatcggcaagaaggagtac

SEQ ID NO: 30460 - RNA, 30 nt, synthetic construct
  misc_feature 1..30: note = Desmin (113-122)
  source 1..30: mol_type = other RNA
caggagctgaacgaccgcttcgccaactac

SEQ ID NO: 30461 - RNA, 30 nt, synthetic construct
  misc_feature 1..30: note = DNA-(apurinic or apyrimidinic site) lyase (109-118)
  source 1..30: mol_type = other RNA
caggagctgcccggcctcagccaccagtac

SEQ ID NO: 30462 - RNA, 30 nt, synthetic construct
  misc_feature 1..30: note = Protein phosphatase 1G (202-211)
  source 1..30: mol_type = other RNA
caggagaacggccccaccgccaaggcctac

SEQ ID NO: 30463 - RNA, 27 nt, synthetic construct
  misc_feature 1..27: note = tRNA (cytosine(34)-C(5))-methyltransferase (545-553)
  source 1..27: mol_type = other RNA
caggagaaccccttcttccgcaagctg

SEQ ID NO: 30464 - RNA, 27 nt, synthetic construct
  misc_feature 1..27: note = Condensin-2 complex subunit H2 (444-452)
  source 1..27: mol_type = other RNA
caggagaccgagctgagccagcgcatc

SEQ ID NO: 30465 - RNA, 27 nt, synthetic construct
  misc_feature 1..27: note = Protein C10 (28-36)
  source 1..27: mol_type = other RNA
caggaggtgatcaaggcctacggcttc

SEQ ID NO: 30466 - RNA, 24 nt, synthetic construct
  misc_feature 1..24: note = 60S ribosomal protein L6 (269-276)
  source 1..24: mol_type = other RNA
cagggctacctgcgcagcgtgttc

SEQ ID NO: 30467 - RNA, 27 nt, synthetic construct
  misc_feature 1..27: note = Histone deacetylase 2 (240-248)
  source 1..27: mol_type = other RNA
cagatcttcaagcccatcatcagcaag

SEQ ID NO: 30468 - RNA, 27 nt, synthetic construct
  misc_feature 1..27: note = 60S ribosomal protein L7 (116-124)
  source 1..27: mol_type = other RNA
cagatcttcaacggcaccttcgtgaag

SEQ ID NO: 30469 - RNA, 30 nt, synthetic construct
  misc_feature 1..30: note = Ubiquitin-60S ribosomal protein L40 (7-16)
  source 1..30: mol_type = other RNA
cagatcttcgtgaagaccctgaccggcaag

SEQ ID NO: 30470 - RNA, 33 nt, synthetic construct
  misc_feature 1..33: note = 40S ribosomal protein S16 (79-89)
  source 1..33: mol_type = other RNA
cagatctacgccatccgccagagcatctccaag

SEQ ID NO: 30471 - RNA, 24 nt, synthetic construct
  misc_feature 1..24: note = 60S ribosomal protein L15 (91-98)
  source 1..24: mol_type = other RNA
cagctgaagttcgcccgcagcctc

SEQ ID NO: 30472 - RNA, 27 nt, synthetic construct
  misc_feature 1..27: note = Cleft lip and palate transmembrane protein 1 (316-324)
  source 1..27: mol_type = other RNA
cagctgtacgccgcccagagcaccaag

SEQ ID NO: 30473 - RNA, 27 nt, synthetic construct
  misc_feature 1..27: note = Myosin-9 (648-656)
  source 1..27: mol_type = other RNA
cagctgtacaaggagcagctcgccaag

SEQ ID NO: 30474 - RNA, 27 nt, synthetic construct
  misc_feature 1..27: note = F-box only protein 5 (293-301)
  source 1..27: mol_type = other RNA
cagctgtacagcaaggccatccagcgc

SEQ ID NO: 30475 - RNA, 24 nt, synthetic construct
  misc_feature 1..24: note = 40S ribosomal protein S11 (18-25)
  source 1..24: mol_type = other RNA
cagaacaagaagcgcgtgctgctc

SEQ ID NO: 30476 - RNA, 27 nt, synthetic construct
  misc_feature 1..27: note = TRAF3-interacting JNK-activating modulator (38-46)
  source 1..27: mol_type = other RNA
cagagcacccagcgctccctggccctc

SEQ ID NO: 30477 - RNA, 27 nt, synthetic construct
  misc_feature 1..27: note = U5 small nuclear ribonucleoprotein 200 kDa helicase (438-446)
  source 1..27: mol_type = other RNA
cagacctacgtgggcatcaccgagaag

SEQ ID NO: 30478 - RNA, 27 nt, synthetic construct
  misc_feature 1..27: note = 40S ribosomal protein S9 (113-121)
  source 1..27: mol_type = other RNA
caggtgttcaagctgggcctcgccaag

SEQ ID NO: 30479 - RNA, 27 nt, synthetic construct
  misc_feature 1..27: note = Eukaryotic translation initiation factor 3 subunit E (354-362)
  source 1..27: mol_type = other RNA
caggtgatcgagaagaccaagagcctg

SEQ ID NO: 30480 - RNA, 27 nt, synthetic construct
  misc_feature 1..27: note = TCF3 fusion partner (94-102)
  source 1..27: mol_type = other RNA
caggtgaacgagcgcgtcctgaaccgg

SEQ ID NO: 30481 - RNA, 27 nt, synthetic construct
  misc_feature 1..27: note = Inorganic pyrophosphatase (9-17)
  source 1..27: mol_type = other RNA
cgcgccgcccccttcagcctggagtac

SEQ ID NO: 30482 - RNA, 27 nt, synthetic construct
  misc_feature 1..27: note = ATP-dependent RNA helicase DDX19B (56-64)
  source 1..27: mol_type = other RNA
cgcgccgcccagagcctgctcaacaag

SEQ ID NO: 30483 - RNA, 27 nt, synthetic construct
  misc_feature 1..27: note = LBH domain-containing protein 1 (95-103)
  source 1..27: mol_type = other RNA
cgcgccaacatcaccctgagcggcaag

SEQ ID NO: 30484 - RNA, 27 nt, synthetic construct
  misc_feature 1..27: note = Midasin (1000-1008)
  source 1..27: mol_type = other RNA
cgcgccagccaccccatcgtgcagaag

SEQ ID NO: 30485 - RNA, 27 nt, synthetic construct
  misc_feature 1..27: note = Perilipin-2 (230-238)
  source 1..27: mol_type = other RNA
cgcgcctaccagcaggccctgagccgg

SEQ ID NO: 30486 - RNA, 30 nt, synthetic construct
  misc_feature 1..30: note = Protein VPRBP (31-40)
  source 1..30: mol_type = other RNA
cgcgaggccgaccagcccctgcggacctac

SEQ ID NO: 30487 - RNA, 27 nt, synthetic construct
  misc_feature 1..27: note = Signal peptidase complex subunit 2 (185-193)
  source 1..27: mol_type = other RNA
cgcgaggccgagttcaccaagagcatc

SEQ ID NO: 30488 - RNA, 27 nt, synthetic construct
  misc_feature 1..27: note = NADH dehydrogenase (ubiquinone) 1 beta subcomplex subunit 11, mitochondrial (120-128)
  source 1..27: mol_type = other RNA
cgcgaggccgagcggctggtgaagtac

SEQ ID NO: 30489 - RNA, 27 nt, synthetic construct
  misc_feature 1..27: note = Ubiquilin-2 (597-605)
  source 1..27: mol_type = other RNA
cgcgaggccaacctgcaggccctcatc

SEQ ID NO: 30490 - RNA, 27 nt, synthetic construct
  misc_feature 1..27: note = Gamma-taxilin (154-162)
  source 1..27: mol_type = other RNA
cgcgaggagcacatcgacaaggtgttc

SEQ ID NO: 30491 - RNA, 30 nt, synthetic construct
  misc_feature 1..30: note = Nuclear receptor-binding protein (234-243)
  source 1..30: mol_type = other RNA
cgcgaggagcagaagaacctgcacttcttc

SEQ ID NO: 30492 - RNA, 30 nt, synthetic construct
  misc_feature 1..30: note = Exostosin-2 (567-576)
  source 1..30: mol_type = other RNA
cgcgagttccccgaccggctggtgggctac

SEQ ID NO: 30493 - RNA, 30 nt, synthetic construct
  misc_feature 1..30: note = Di-N-acetylchitobiase (169-178)
  source 1..30: mol_type = other RNA
cgcgagatcgagggcagccaggtgaccttc

SEQ ID NO: 30494 - RNA, 27 nt, synthetic construct
  misc_feature 1..27: note = Ataxin-2-like protein (324-332)
  source 1..27: mol_type = other RNA
cgcgagatcgagagctccccccagtac

SEQ ID NO: 30495 - RNA, 30 nt, synthetic construct
  misc_feature 1..30: note = Sorting nexin-17 (146-155)
  source 1..30: mol_type = other RNA
cgcgagaaggaggacggcgccttcagcttc

SEQ ID NO: 30496 - RNA, 30 nt, synthetic construct
  misc_feature 1..30: note = Ras-related GTP-binding protein A (97-106)
  source 1..30: mol_type = other RNA
cgcgagctggagaaggacatgcactactac

SEQ ID NO: 30497 - RNA, 27 nt, synthetic construct
  misc_feature 1..27: note = Tropomyosin alpha-3 chain (7-15)
  source 1..27: mol_type = other RNA
cgcgagatggacgagcagatccggctg

SEQ ID NO: 30498 - RNA, 30 nt, synthetic construct
  misc_feature 1..30: note = Tetratricopeptide repeat protein 39C (46-55)
  source 1..30: mol_type = other RNA
cgcgagagcgaccagctgttcaagcagtac

SEQ ID NO: 30499 - RNA, 27 nt, synthetic construct
  misc_feature 1..27: note = Aurora kinase A (180-188)
  source 1..27: mol_type = other RNA
cgcgaggtggagatccagagccacctg

SEQ ID NO: 30500 - RNA, 33 nt, synthetic construct
  misc_feature 1..33: note = Histone H2B type 2-E (48-58)
  source 1..33: mol_type = other RNA
cgcatcgccggcgaggccagccggctggcgcac

SEQ ID NO: 30501 - RNA, 33 nt, synthetic construct
  misc_feature 1..33: note = 40S ribosomal protein S19 (133-143)
  source 1..33: mol_type = other RNA
cgcatcgccggccaggtggccgcggccaacaag

SEQ ID NO: 30502 - RNA, 33 nt, synthetic construct
  misc_feature 1..33: note = 60S ribosomal protein L18a (31-41)
  source 1..33: mol_type = other RNA
cgcatcttcgcccccaaccacgtggtcgccaag

SEQ ID NO: 30503 - RNA, 27 nt, synthetic construct
  misc_feature 1..27: note = 60S ribosomal protein L10 (32-40)
  source 1..27: mol_type = other RNA
cgcatcttcgacctgggccggaagaag

SEQ ID NO: 30504 - RNA, 33 nt, synthetic construct
  misc_feature 1..33: note = Nuclear pore complex protein Nup214 (26-36)
  source 1..33: mol_type = other RNA
cgcatcttcgacagccccgaggagctgccgaag

SEQ ID NO: 30505 - RNA, 30 nt, synthetic construct
  misc_feature 1..30: note = Ribonucleoside-diphosphate reductase subunit M2 (50-59)
  source 1..30: mol_type = other RNA
cgcatcttccaggagcccaccgagccgaag

SEQ ID NO: 30506 - RNA, 27 nt, synthetic construct
  misc_feature 1..27: note = Unconventional myosin-Ie (627-635)
  source 1..27: mol_type = other RNA
cgcatcttccagaagttcctgcagcgg

SEQ ID NO: 30507 - RNA, 27 nt, synthetic construct
  misc_feature 1..27: note = Sorbitol dehydrogenase (56-64)
  source 1..27: mol_type = other RNA
cgcatcggcaacttcatcgtgaagaag

SEQ ID NO: 30508 - RNA, 30 nt, synthetic construct
  misc_feature 1..30: note = Serine/threonine-protein kinase Nek6 (243-252)
  source 1..30: mol_type = other RNA
cgcatccacgagaacggctacaacttcaag

SEQ ID NO: 30509 - RNA, 27 nt, synthetic construct
  misc_feature 1..27: note = U3 small nucleolar ribonucleoprotein protein MPP10 (48-56)
  source 1..27: mol_type = other RNA
cgcatccacggcagccccctgcagaag

SEQ ID NO: 30510 - RNA, 27 nt, synthetic construct
  misc_feature 1..27: note = 60S ribosomal protein L31 (32-40)
  source 1..27: mol_type = other RNA
cgcatccacggcgtggggttcaagaag

SEQ ID NO: 30511 - RNA, 27 nt, synthetic construct
  misc_feature 1..27: note = Importin-8 (433-441)
  source 1..27: mol_type = other RNA
cgcatcatcgacctggtgctccagaag

SEQ ID NO: 30512 - RNA, 27 nt, synthetic construct
  misc_feature 1..27: note = Replication factor C subunit 4 (185-193)
  source 1..27: mol_type = other RNA
cgcatcatcgagcccctgaccagccgg

SEQ ID NO: 30513 - RNA, 27 nt, synthetic construct
  misc_feature 1..27: note = Putative Polycomb group protein ASXL1 (573-581)
  source 1..27: mol_type = other RNA
cgcatcaagcccccgtgggtggtcaag

SEQ ID NO: 30514 - RNA, 27 nt, synthetic construct
  misc_feature 1..27: note = 26S proteasome non-ATPase regulatory subunit 8 (196-204)
  source 1..27: mol_type = other RNA
cgcatcctgttcttcaacacccccaag

SEQ ID NO: 30515 - RNA, 27 nt, synthetic construct
  misc_feature 1..27: note = 60S ribosomal protein L10a (122-130)
  source 1..27: mol_type = other RNA
cgcatcctgggccccgggctcaacaag

SEQ ID NO: 30516 - RNA, 27 nt, synthetic construct
  misc_feature 1..27: note = 40S ribosomal protein S7 (97-105)
  source 1..27: mol_type = other RNA
cgcatcctgcccaagccgacccggaag

SEQ ID NO: 30517 - RNA, 27 nt, synthetic construct
  misc_feature 1..27: note = 40S ribosomal protein S11 (71-79)
  source 1..27: mol_type = other RNA
cgcatcctgagcggcgtggtcaccaag

SEQ ID NO: 30518 - RNA, 30 nt, synthetic construct
  misc_feature 1..30: note = Helicase-like transcription factor (514-523)
  source 1..30: mol_type = other RNA
cgcatccgggagcccgccctgctcagcaag

SEQ ID NO: 30519 - RNA, 33 nt, synthetic construct
  misc_feature 1..33: note = Heat shock 70 kDa protein 14 (56-66)
  source 1..33: mol_type = other RNA
cgcatccggaacatcagcaacaccgtgatgaag

SEQ ID NO: 30520 - RNA, 33 nt, synthetic construct
  misc_feature 1..33: note = Protein PML (31-41)
  source 1..33: mol_type = other RNA
cgcatccggaccggcagcgccctggtgcagcgc

SEQ ID NO: 30521 - RNA, 27 nt, synthetic construct
  misc_feature 1..27: note = DNA-directed RNA polymerases I, II, and III subunit RPABC2 (51-59)
  source 1..27: mol_type = other RNA
cgcatcaccaccccctacatgacgaag

SEQ ID NO: 30522 - RNA, 27 nt, synthetic construct
  misc_feature 1..27: note = Translational activator GCN1 (122-130)
  source 1..27: mol_type = other RNA
cgcatcgtgttccccagccgggccaag

SEQ ID NO: 30523 - RNA, 27 nt, synthetic construct
  misc_feature 1..27: note = Zinc finger protein 195 (247-255)
  source 1..27: mol_type = other RNA
cgcatctacgccggcggggagcactac

SEQ ID NO: 30524 - RNA, 33 nt, synthetic construct
  misc_feature 1..33: note = Fragile X mental retardation syndrome-related protein 1 (263-273)
  source 1..33: mol_type = other RNA
cgcatctacggcgagagcgccgacgccgtgaag

SEQ ID NO: 30525 - RNA, 27 nt, synthetic construct
  misc_feature 1..27: note = Dual specificity tyrosine-phosphorylation-regulated kinase 1A (317-325)
  source 1..27: mol_type = other RNA
cgcatctaccagtacatccagagccgg

SEQ ID NO: 30526 - RNA, 30 nt, synthetic construct
  misc_feature 1..30: note = Integrator complex subunit 1 (219-228)
  source 1..30: mol_type = other RNA
cgcctggccgaggccgcggtggccgagaag

SEQ ID NO: 30527 - RNA, 30 nt, synthetic construct
  misc_feature 1..30: note = RNA pseudouridylate synthase domain-containing protein 4 (45-54)
  source 1..30: mol_type = other RNA
cgcctggccgagaagctccgggcccagaag

SEQ ID NO: 30528 - RNA, 27 nt, synthetic construct
  misc_feature 1..27: note = Ubiquitin carboxyl-terminal hydrolase 19 (897-905)
  source 1..27: mol_type = other RNA
cgcctggccgaggtgatcaagaaccgg

SEQ ID NO: 30529 - RNA, 30 nt, synthetic construct
  misc_feature 1..30: note = Phosducin-like protein 3 (78-87)
  source 1..30: mol_type = other RNA
cgcctggccgagtggaaggccaccaagctc

SEQ ID NO: 30530 - RNA, 33 nt, synthetic construct
  misc_feature 1..33: note = 40S ribosomal protein S21 (71-81)
  source 1..33: mol_type = other RNA
cgcctggccaaggccgacggcatcgtgagcaag

SEQ ID NO: 30531 - RNA, 27 nt, synthetic construct
  misc_feature 1..27: note = Golgi phosphoprotein 3 (176-184)
  source 1..27: mol_type = other RNA
cgcctggccaagaacctcgtggagaag

SEQ ID NO: 30532 - RNA, 33 nt, synthetic construct
  misc_feature 1..33: note = 60S ribosomal protein L19 (9-19)
  source 1..33: mol_type = other RNA
cgcctggccagctccgtgctccggtgcggcaag

SEQ ID NO: 30533 - RNA, 30 nt, synthetic construct
  misc_feature 1..30: note = Guanine nucleotide-binding protein G(I)/G(S)/G(O) subunit gamma-5 (18-27)
  source 1..30: mol_type = other RNA
cgcctggaggccggcctcaaccgggtgaag

SEQ ID NO: 30534 - RNA, 30 nt, synthetic construct
  misc_feature 1..30: note = 40S ribosomal protein S9 (70-79)
  source 1..30: mol_type = other RNA
cgcctgttcgagggcaacgccctcctgcgg

SEQ ID NO: 30535 - RNA, 27 nt, synthetic construct
  misc_feature 1..27: note = Cartilage-associated protein (107-115)
  source 1..27: mol_type = other RNA
cgcctgttcggcgggctcctgcggcgc

SEQ ID NO: 30536 - RNA, 24 nt, synthetic construct
  misc_feature 1..24: note = 60S ribosomal protein L13 (190-197)
  source 1..24: mol_type = other RNA
cgcctgttcggcatccgggccaag

SEQ ID NO: 30537 - RNA, 27 nt, synthetic construct
  misc_feature 1..27: note = Ubiquitin-associated domain-containing protein 2 (164-172)
  source 1..27: mol_type = other RNA
cgcctgttccccccgctccggcagcgc

SEQ ID NO: 30538 - RNA, 27 nt, synthetic construct
  misc_feature 1..27: note = Heterogeneous nuclear ribonucleoprotein R (146-154)
  source 1..27: mol_type = other RNA
cgcctgttcgtgggcagcatccccaag

SEQ ID NO: 30539 - RNA, 33 nt, synthetic construct
  misc_feature 1..33: note = Heterogeneous nuclear ribonucleoprotein Q (244-254)
  source 1..33: mol_type = other RNA
cgcctgttcgtgggcagcatccccaagtccaag

SEQ ID NO: 30540 - RNA, 27 nt, synthetic construct
  misc_feature 1..27: note = DNA damage-binding protein 1 (327-335)
  source 1..27: mol_type = other RNA
cgcctgggcgacagccagctcgtgaag

SEQ ID NO: 30541 - RNA, 27 nt, synthetic construct
  misc_feature 1..27: note = Semaphorin-7A (24-32)
  source 1..27: mol_type = other RNA
cgcctgggcctccccctgcggctgcgc

SEQ ID NO: 30542 - RNA, 27 nt, synthetic construct
  misc_feature 1..27: note = Cleavage and polyadenylation specificity factor subunit 1 (387-395)
  source 1..27: mol_type = other RNA
cgcctgggcaacagcctcctgctgaag

SEQ ID NO: 30543 - RNA, 27 nt, synthetic construct
  misc_feature 1..27: note = Pentatricopeptide repeat domain-containing protein 3, mitochondrial (15-23)
  source 1..27: mol_type = other RNA
cgcctgggccagcccctcaccgggcgg

SEQ ID NO: 30544 - RNA, 30 nt, synthetic construct
  misc_feature 1..30: note = Egl nine homolog 2 (270-279)
  source 1..30: mol_type = other RNA
cgcctgggcagctacgtgatcaacgggcgg

SEQ ID NO: 30545 - RNA, 33 nt, synthetic construct
  misc_feature 1..33: note = Parkinson disease 7 domain-containing protein 1 (68-78)
  source 1..33: mol_type = other RNA
cgcctgaaggcctacgccagccccgcgaagctc

SEQ ID NO: 30546 - RNA, 27 nt, synthetic construct
  misc_feature 1..27: note = Protein RRP5 homolog (385-393)
  source 1..27: mol_type = other RNA
cgcctgaaggacggcgtgctcgcctac

SEQ ID NO: 30547 - RNA, 33 nt, synthetic construct
  misc_feature 1..33: note = Nuclear pore complex protein Nup98-Nup96 (515-525)
  source 1..33: mol_type = other RNA
cgcctgaagcccaccaacccggccgcccagaag

SEQ ID NO: 30548 - RNA, 30 nt, synthetic construct
  misc_feature 1..30: note = HAUS augmin-like complex subunit 1 (226-235)
  source 1..30: mol_type = other RNA
cgcctgaagcagcagaccatccccctcaag

SEQ ID NO: 30549 - RNA, 33 nt, synthetic construct
  misc_feature 1..33: note = FERM, RhoGEF and pleckstrin domain-containing protein 2 (321-331)
  source 1..33: mol_type = other RNA
cgcctgctcgaccagcccaagccgaaggccaag

SEQ ID NO: 30550 - RNA, 30 nt, synthetic construct
  misc_feature 1..30: note = Glycogen synthase kinase-3 beta (319-328)
  source 1..30: mol_type = other RNA
cgcctgctcgagtacacccccaccgcccgg

SEQ ID NO: 30551 - RNA, 33 nt, synthetic construct
  misc_feature 1..33: note = Nucleolar protein 56 (77-87)
  source 1..33: mol_type = other RNA
cgcctgctcctggagacccacctgcccagcaag

SEQ ID NO: 30552 - RNA, 30 nt, synthetic construct
  misc_feature 1..30: note = Histone H2B type 2-F (100-109)
  source 1..30: mol_type = other RNA
cgcctgctcctgcccggcgagctggccaag

SEQ ID NO: 30553 - RNA, 33 nt, synthetic construct
  misc_feature 1..33: note = Poly (ADP-ribose) polymerase 14 (858-868)
  source 1..33: mol_type = other RNA
cgcctgctccccggcaacgccaccatcagcaag

SEQ ID NO: 30554 - RNA, 27 nt, synthetic construct
  misc_feature 1..27: note = BTB/POZ domain-containing protein KCTD20 (259-267)
  source 1..27: mol_type = other RNA
cgcctgaacgcccccctcagccagatg

SEQ ID NO: 30555 - RNA, 30 nt, synthetic construct
  misc_feature 1..30: note = Tubulin gamma-1 chain (156-165)
  source 1..30: mol_type = other RNA
cgcctgaacgaccggtaccccaagaagctc

SEQ ID NO: 30556 - RNA, 30 nt, synthetic construct
  misc_feature 1..30: note = LYR motif-containing protein 2 (5-14)
  source 1..30: mol_type = other RNA
cgcctgcccccggccaccctcaccctgaag

SEQ ID NO: 30557 - RNA, 27 nt, synthetic construct
  misc_feature 1..27: note = NF-kappa-B inhibitor beta (339-347)
  source 1..27: mol_type = other RNA
cgcctgcccccgacccccgccagcaag

SEQ ID NO: 30558 - RNA, 27 nt, synthetic construct
  misc_feature 1..27: note = Kinesin-like protein KIF18B (390-398)
  source 1..27: mol_type = other RNA
cgcctgcccagctccaccctcaagcgg

SEQ ID NO: 30559 - RNA, 30 nt, synthetic construct
  misc_feature 1..30: note = Histone deacetylase 5 (529-538)
  source 1..30: mol_type = other RNA
cgcctgcaggagaccggcctcctgagcaag

SEQ ID NO: 30560 - RNA, 33 nt, synthetic construct
  misc_feature 1..33: note = Egl nine homolog 2 (218-228)
  source 1..33: mol_type = other RNA
cgcctgcgggacggccagctcgtgagccagcgc

SEQ ID NO: 30561 - RNA, 27 nt, synthetic construct
  misc_feature 1..27: note = HCLS1-associated protein X-1 (118-126)
  source 1..27: mol_type = other RNA
cgcctgcgggagggccagaccctccgc

SEQ ID NO: 30562 - RNA, 27 nt, synthetic construct
  misc_feature 1..27: note = AP-5 complex subunit zeta-1 (429-437)
  source 1..27: mol_type = other RNA
cgcctgagcttccccaacctcttcaag

SEQ ID NO: 30563 - RNA, 27 nt, synthetic construct
  misc_feature 1..27: note = A-kinase anchor protein 11 (941-949)
  source 1..27: mol_type = other RNA
cgcctgagcaagtccatcatcaagcac

SEQ ID NO: 30564 - RNA, 30 nt, synthetic construct
  misc_feature 1..30: note = 40S ribosomal protein S4, X isoform (202-211)
  source 1..30: mol_type = other RNA
cgcctgagcaacatcttcgtgatcggcaag

SEQ ID NO: 30565 - RNA, 30 nt, synthetic construct
  misc_feature 1..30: note = Prelamin-A/C (307-316)
  source 1..30: mol_type = other RNA
cgcctgagcccctccccgaccagccagcgg

SEQ ID NO: 30566 - RNA, 30 nt, synthetic construct
  misc_feature 1..30: note = 60S ribosomal protein L34 (10-19)
  source 1..30: mol_type = other RNA
cgcctgagctacaacaccgcctccaacaag

SEQ ID NO: 30567 - RNA, 30 nt, synthetic construct
  misc_feature 1..30: note = Proliferating cell nuclear antigen (5-14)
  source 1..30: mol_type = other RNA
cgcctggtgcagggcagcatcctcaagaag

SEQ ID NO: 30568 - RNA, 30 nt, synthetic construct
  misc_feature 1..30: note = E3 ubiquitin-protein ligase MARCH6 (597-606)
  source 1..30: mol_type = other RNA
cgcctgtacgagcacatcaagaacgacaag

SEQ ID NO: 30569 - RNA, 27 nt, synthetic construct
  misc_feature 1..27: note = ATP-binding cassette sub-family D member 1 (172-180)
  source 1..27: mol_type = other RNA
cgcctgtacttcagccagcagacctac

SEQ ID NO: 30570 - RNA, 27 nt, synthetic construct
  misc_feature 1..27: note = Kelch-like protein 20 (534-542)
  source 1..27: mol_type = other RNA
cgcctgtacggcgggatgaactaccgg

SEQ ID NO: 30571 - RNA, 30 nt, synthetic construct
  misc_feature 1..30: note = Protein KIAA0100 (809-818)
  source 1..30: mol_type = other RNA
cgcctgtacggcaacacccccatgcggcgc

SEQ ID NO: 30572 - RNA, 30 nt, synthetic construct
  misc_feature 1..30: note = Terminal uridylyltransferase 4 (269-278)
  source 1..30: mol_type = other RNA
cgcctgtacggcagctccctcacccggttc

SEQ ID NO: 30573 - RNA, 33 nt, synthetic construct
  misc_feature 1..33: note = TNF receptor-associated factor 1 (308-318)
  source 1..33: mol_type = other RNA
cgcctgtacctcaacggcgacgggaccggcaag

SEQ ID NO: 30574 - RNA, 27 nt, synthetic construct
  misc_feature 1..27: note = DnaJ homolog subfamily B member 12 (36-44)
  source 1..27: mol_type = other RNA
cgcctgtaccccaccccgcgggtgcgc

SEQ ID NO: 30575 - RNA, 30 nt, synthetic construct
  misc_feature 1..30: note = E3 ubiquitin-protein ligase UBR5 (2771-2780)
  source 1..30: mol_type = other RNA
cgcctgtacgtgcccctctacagctccaag

SEQ ID NO: 30576 - RNA, 30 nt, synthetic construct
  misc_feature 1..30: note = 60S ribosomal protein L4 (100-109)
  source 1..30: mol_type = other RNA
cgcatgttcgcccccaccaagacctggcgg

SEQ ID NO: 30577 - RNA, 33 nt, synthetic construct
  misc_feature 1..33: note = DNA methyltransferase 1-associated protein 1 (326-336)
  source 1..33: mol_type = other RNA
cgcatgaagctgcccagctccgtgggccagaag

SEQ ID NO: 30578 - RNA, 27 nt, synthetic construct
  misc_feature 1..27: note Dolichyl-diphosphooligosaccharide-proteinosyltransferase subunit 2 (619-627)
  source 1..27: mol_type = other RNA
cgcatgctggcccagcaggccgtgaag

SEQ ID NO: 30579 - RNA, 24 nt, synthetic construct
  misc_feature 1..24: note = Proteasome subunit beta type-5 (80-87)
  source 1..24: mol_type = other RNA
cgcaacaaggagcggatcagcgtg

SEQ ID NO: 30580 - RNA, 27 nt, synthetic construct
  misc_feature 1..27: note = Chromosome transmission fidelity protein 8 homolog (109-117)
  source 1..27: mol_type = other RNA
cgccccaagccgatcatcaccagcgtg

SEQ ID NO: 30581 - RNA, 24 nt, synthetic construct
  misc_feature 1..24: note = Zinc finger MIZ domain-containing protein 1 (589-596)
  source 1..24: mol_type = other RNA
cgccccagcgtgcggtccgtcctg

SEQ ID NO: 30582 - RNA, 27 nt, synthetic construct
  misc_feature 1..27: note = Apoptosis inhibitor 5 (189-197)
  source 1..27: mol_type = other RNA
cgccaggccgtgcccctgttcagcaag

SEQ ID NO: 30583 - RNA, 27 nt, synthetic construct
  misc_feature 1..27: note = 39S ribosomal protein L55, mitochondrial (47-55)
  source 1..27: mol_type = other RNA
cgccagttctggacccggaccaagaag

SEQ ID NO: 30584 - RNA, 27 nt, synthetic construct
  misc_feature 1..27: note = Phosphate carrier protein, mitochondrial (224-232)
  source 1..27: mol_type = other RNA
cgccagatcccctacaccatgatgaag

SEQ ID NO: 30585 - RNA, 27 nt, synthetic construct
  misc_feature 1..27: note = 60S ribosomal protein L7a (89-97)
  source 1..27: mol_type = other RNA
cgccagaccgccacccagctgctcaag

SEQ ID NO: 30586 - RNA, 27 nt, synthetic construct
  misc_feature 1..27: note = Formin-binding protein 1 (239-247)
  source 1..27: mol_type = other RNA
cgccaggtgatccccatcatcggcaag

SEQ ID NO: 30587 - RNA, 27 nt, synthetic construct
  misc_feature 1..27: note = F-box only protein 33 (21-29)
  source 1..27: mol_type = other RNA
cgccagtacgacaagttcctgacccac

SEQ ID NO: 30588 - RNA, 27 nt, synthetic construct
  misc_feature 1..27: note = Protein-lysine N-methyltransferase EEF2KMT (18-26)
  source 1..27: mol_type = other RNA
cgccggttcctggccgcccgcaccctc

SEQ ID NO: 30589 - RNA, 27 nt, synthetic construct
  misc_feature 1..27: note = Growth factor receptor-bound protein 2 (137-145)
  source 1..27: mol_type = other RNA
cgccggggcgacttcatccacgtgatg

SEQ ID NO: 30590 - RNA, 27 nt, synthetic construct
  misc_feature 1..27: note = 60S ribosomal protein L23 (89-97)
  source 1..27: mol_type = other RNA
cgccggaaggacggcgtgttcctgtac

SEQ ID NO: 30591 - RNA, 27 nt, synthetic construct
  misc_feature 1..27: note = Neuroepithelial cell-transforming gene 1 protein (32-40)
  source 1..27: mol_type = other RNA
cgccggcaggaggccatctacgagatg

SEQ ID NO: 30592 - RNA, 27 nt, synthetic construct
  misc_feature 1..27: note = Isoleucine-tRNA ligase, cytoplasmic (402-410)
  source 1..27: mol_type = other RNA
cgcagcgacacccccctgatctacaag

SEQ ID NO: 30593 - RNA, 27 nt, synthetic construct
  misc_feature 1..27: note = Uncharacterized protein KIAA1551 (365-373)
  source 1..27: mol_type = other RNA
cgcagcctgggctccagccccgtgaag

SEQ ID NO: 30594 - RNA, 30 nt, synthetic construct
  misc_feature 1..30: note = 60S ribosomal protein L30 (106-115)
  source 1..30: mol_type = other RNA
cgcagcatgcccgagcagaccggcgagaag

SEQ ID NO: 30595 - RNA, 27 nt, synthetic construct
  misc_feature 1..27: note = Structural maintenance of chromosomes protein 3 (132-140)
  source 1..27: mol_type = other RNA
cgcagcaacccctactacatcgtgaag

SEQ ID NO: 30596 - RNA, 30 nt, synthetic construct
  misc_feature 1..30: note = Protein BRICK1 (44-53)
  source 1..30: mol_type = other RNA
cgcagccggctggccaccctcaacgagaag

SEQ ID NO: 30597 - RNA, 27 nt, synthetic construct
  misc_feature 1..27: note = Protein PRRC2C (2148-2156)
  source 1..27: mol_type = other RNA
cgcagcaccgaccccgtgaccacgaag

SEQ ID NO: 30598 - RNA, 33 nt, synthetic construct
  misc_feature 1..33: note = Cytoskeleton-associated protein 2-like (319-329)
  source 1..33: mol_type = other RNA
cgcagctaccccgtgaccgagcagcgggtcaag

SEQ ID NO: 30599 - RNA, 27 nt, synthetic construct
  misc_feature 1..27: note = Heterogeneous nuclear ribonucleoprotein F (192-200)
  source 1..27: mol_type = other RNA
cgcagctactccgaccccccgctgaag

SEQ ID NO: 30600 - RNA, 27 nt, synthetic construct
  misc_feature 1..27: note = Vimentin (28-36)
  source 1..27: mol_type = other RNA
cgcagctacgtgaccacctccacgcgg

SEQ ID NO: 30601 - RNA, 27 nt, synthetic construct
  misc_feature 1..27: note = Sorting and assembly machinery component 50 homolog (240-248)
  source 1..27: mol_type = other RNA
cgcaccgccagcttcgccgtgcggaag

SEQ ID NO: 30602 - RNA, 30 nt, synthetic construct
  misc_feature 1..30: note = T-complex protein 1 subunit eta (114-123)
  source 1..30: mol_type = other RNA
cgcaccgccacccagctggccgtgaacaag

SEQ ID NO: 30603 - RNA, 30 nt, synthetic construct
  misc_feature 1..30: note = UAP56-interacting factor (226-235)
  source 1..30: mol_type = other RNA
cgcaccgccgtgcccagcttcctgaccaag

SEQ ID NO: 30604 - RNA, 27 nt, synthetic construct
  misc_feature 1..27: note = Plectin (471-479)
  source 1..27: mol_type = other RNA
cgcaccgagtacaacctgcggctcaag

SEQ ID NO: 30605 - RNA, 27 nt, synthetic construct
  misc_feature 1..27: note = Cyclin-dependent kinase 12 (1374-1382)
  source 1..27: mol_type = other RNA
cgcaccttcagcggctccctgagccac

SEQ ID NO: 30606 - RNA, 30 nt, synthetic construct
  misc_feature 1..30: note = Cold shock domain-containing protein E1 (78-87)
  source 1..30: mol_type = other RNA
cgcaccggcaagcccatcgccgtgaagctg

SEQ ID NO: 30607 - RNA, 27 nt, synthetic construct
  misc_feature 1..27: note = Eukaryotic translation initiation factor 4H (221-229)
  source 1..27: mol_type = other RNA
cgcaccggccccccgatggggagccgg

SEQ ID NO: 30608 - RNA, 30 nt, synthetic construct
  misc_feature 1..30: note = Eukaryotic translation initiation factor 4H (155-164)
  source 1..30: mol_type = other RNA
cgcaccggccccccgatggggagccggttc

SEQ ID NO: 30609 - RNA, 27 nt, synthetic construct
  misc_feature 1..27: note = Cell division cycle 5-like protein (83-91)
  source 1..27: mol_type = other RNA
cgcaccatcgcccccatcatcggccgg

SEQ ID NO: 30610 - RNA, 27 nt, synthetic construct
  misc_feature 1..27: note = Biogenesis of lysosome-related organelles complex 1 subunit 1 (106-114)
  source 1..27: mol_type = other RNA
cgcaccatcgccaccgccctggagtac

SEQ ID NO: 30611 - RNA, 27 nt, synthetic construct
  misc_feature 1..27: note = Beta-catenin-like protein 1 (270-278)
  source 1..27: mol_type = other RNA
cgcaccatcttccccctgttcatgaag

SEQ ID NO: 30612 - RNA, 30 nt, synthetic construct
  misc_feature 1..30: note = 60S ribosomal protein L37a (4-13)
  source 1..30: mol_type = other RNA
cgcaccaagaaggtgggcatcgtcgggaag

SEQ ID NO: 30613 - RNA, 30 nt, synthetic construct
  misc_feature 1..30: note = 39S ribosomal protein L2, mitochondrial (69-78)
  source 1..30: mol_type = other RNA
cgcaccaagtacaccatcacgcccgtgaag

SEQ ID NO: 30614 - RNA, 30 nt, synthetic construct
  misc_feature 1..30: note = Peroxisomal multifunctional enzyme type 2 (251-260)
  source 1..30: mol_type = other RNA
cgcaccctgggcgccatcgtgcggcagaag

SEQ ID NO: 30615 - RNA, 27 nt, synthetic construct
  misc_feature 1..27: note = Cytosolic carboxypeptidase 1 (1067-1075)
  source 1..27: mol_type = other RNA
cgcaccctgcccaagatcctcagccac

SEQ ID NO: 30616 - RNA, 30 nt, synthetic construct
  misc_feature 1..30: note = Ubiquitin-40S ribosomal protein S27a (74-83)
  source 1..30: mol_type = other RNA
cgcaccctgagcgactacaacatccagaag

SEQ ID NO: 30617 - RNA, 27 nt, synthetic construct
  misc_feature 1..27: note = RAD50-interacting protein 1 (155-163)
  source 1..27: mol_type = other RNA
cgcaccaactggcccaacaccggcaag

SEQ ID NO: 30618 - RNA, 33 nt, synthetic construct
  misc_feature 1..33: note = Dynamin-binding protein (144-154)
  source 1..33: mol_type = other RNA
cgcacccgggactacgccagcctgcccccgaag

SEQ ID NO: 30619 - RNA, 27 nt, synthetic construct
  misc_feature 1..27: note = ATP-dependent RNA helicase DDX24 (666-674)
  source 1..27: mol_type = other RNA
cgcaccagcgagatctacgtgcaccgg

SEQ ID NO: 30620 - RNA, 27 nt, synthetic construct
  misc_feature 1..27: note = Sterol regulatory element-binding protein 2 (332-340)
  source 1..27: mol_type = other RNA
cgcaccacccacaacatcatcgagaag

SEQ ID NO: 30621 - RNA, 30 nt, synthetic construct
  misc_feature 1..30: note = Cleavage and polyadenylation specificity factor subunit 2 (358-367)
  source 1..30: mol_type = other RNA
cgcaccacccccggcacgctggcccggttc

SEQ ID NO: 30622 - RNA, 30 nt, synthetic construct
  misc_feature 1..30: note = Diphosphoinositol polyphosphate phosphohydrolase 1 (10-19)
  source 1..30: mol_type = other RNA
cgcacctacgacggcgacgggtacaagaag

SEQ ID NO: 30623 - RNA, 30 nt, synthetic construct
  misc_feature 1..30: note = Diphosphoinositol polyphosphate phosphohydrolase 2 (7-16)
  source 1..30: mol_type = other RNA
cgcacctacgaccgggagggcttcaagaag

SEQ ID NO: 30624 - RNA, 30 nt, synthetic construct
  misc_feature 1..30: note = Coatomer subunit beta' (759-768)
  source 1..30: mol_type = other RNA
cgcacctacctgcccagccaggtgtcccgg

SEQ ID NO: 30625 - RNA, 27 nt, synthetic construct
  misc_feature 1..27: note = Exocyst complex component 4 (74-82)
  source 1..27: mol_type = other RNA
cgcacctaccagagcatcaccgagcgg

SEQ ID NO: 30626 - RNA, 30 nt, synthetic construct
  misc_feature 1..30: note = Lon protease homolog 2, peroxisomal (371-380)
  source 1..30: mol_type = other RNA
cgcacctacgtgggcagcatgcccgggcgg

SEQ ID NO: 30627 - RNA, 27 nt, synthetic construct
  misc_feature 1..27: note = Plakophilin-4 (418-426)
  source 1..27: mol_type = other RNA
cgcacctactacagccccgtgtaccgg

SEQ ID NO: 30628 - RNA, 33 nt, synthetic construct
  misc_feature 1..33: note = tRNA pseudouridine synthase-like 1 (270-280)
  source 1..33: mol_type = other RNA
cgcgtggcccccgcccacggcctgttcctcaag

SEQ ID NO: 30629 - RNA, 30 nt, synthetic construct
  misc_feature 1..30: note = Protein ERGIC-53 (12-21)
  source 1..30: mol_type = other RNA
cgcgtggcccccagcctgaagtcccagcgg

SEQ ID NO: 30630 - RNA, 33 nt, synthetic construct
  misc_feature 1..33: note = Chromobox protein homolog 6 (9-19)
  source 1..33: mol_type = other RNA
cgcgtgttcgccgccgagagcatcatcaagcgg

SEQ ID NO: 30631 - RNA, 27 nt, synthetic construct
  misc_feature 1..27: note = F-box only protein 3 (143-151)
  source 1..27: mol_type = other RNA
cgcgtgttcgacgtccccatccggcgc

SEQ ID NO: 30632 - RNA, 33 nt, synthetic construct
  misc_feature 1..33: note = ATP synthase mitochondrial F1 complex assembly factor 1 (45-55)
  source 1..33: mol_type = other RNA
cgcgtgttccccgtccggccgggcagcgggcgc

SEQ ID NO: 30633 - RNA, 30 nt, synthetic construct
  misc_feature 1..30: note = tRNA (guanine(26)-N(2))-dimethyltransferase (327-336)
  source 1..30: mol_type = other RNA
cgcgtgttcaccggccaggccaaggtcaag

SEQ ID NO: 30634 - RNA, 27 nt, synthetic construct
  misc_feature 1..27: note = Poly (ADP-ribose) polymerase 3 (110-118)
  source 1..27: mol_type = other RNA
cgcgtgggcgaggtcgggcagagcaag

SEQ ID NO: 30635 - RNA, 30 nt, synthetic construct
  misc_feature 1..30: note = Poly (ADP-ribose) polymerase 1 (591-600)
  source 1..30: mol_type = other RNA
cgcgtgggcaccgtcatcgggagcaacaag

SEQ ID NO: 30636 - RNA, 33 nt, synthetic construct
  misc_feature 1..33: note = Bifunctional methylenetetrahydrofolate dehydrogenase/cyclohydrolase, mitochondrial (278-288)
  source 1..33: mol_type = other RNA
cgcgtgcacgaccccgtcaccgccaagccgaag

SEQ ID NO: 30637 - RNA, 30 nt, synthetic construct
  misc_feature 1..30: note = Choline/ethanolaminephosphotransferase 1 (267-276)
  source 1..30: mol_type = other RNA
cgcgtgatcttcaccggcggggtcggcaag

SEQ ID NO: 30638 - RNA, 33 nt, synthetic construct
  misc_feature 1..33: note = Drebrin-like protein (68-78)
  source 1..33: mol_type = other RNA
cgcgtgaaggaccccaacagcggcctgccgaag

SEQ ID NO: 30639 - RNA, 27 nt, synthetic construct
  misc_feature 1..27: note = YEATS domain-containing protein 4 (11-19)
  source 1..27: mol_type = other RNA
cgcgtgaagggcgtcaccatcgtgaag

SEQ ID NO: 30640 - RNA, 30 nt, synthetic construct
  misc_feature 1..30: note = 60S ribosomal protein L8 (147-156)
  source 1..30: mol_type = other RNA
cgcgtgaagctgcccagcggctccaagaag

SEQ ID NO: 30641 - RNA, 30 nt, synthetic construct
  misc_feature 1..30: note = Sorting nexin-3 (52-61)
  source 1..30: mol_type = other RNA
cgcgtgaagaccaacctgcccatcttcaag

SEQ ID NO: 30642 - RNA, 30 nt, synthetic construct
  misc_feature 1..30: note = Copper transport protein ATOX1 (20-29)
  source 1..30: mol_type = other RNA
cgcgtgctgaacaagctcggcggggtcaag

SEQ ID NO: 30643 - RNA, 27 nt, synthetic construct
  misc_feature 1..27: note = U3 small nucleolar RNA-associated protein 14 homolog A (631-639)
  source 1..27: mol_type = other RNA
cgcgtgctgccctacccgttcacccac

SEQ ID NO: 30644 - RNA, 27 nt, synthetic construct
  misc_feature 1..27: note = 60S ribosomal export protein NMD3 (397-405)
  source 1..27: mol_type = other RNA
cgcgtgcccgacgtcgtgctgatcaag

SEQ ID NO: 30645 - RNA, 33 nt, synthetic construct
  misc_feature 1..33: note = Protein FAM136A (8-18)
  source 1..33: mol_type = other RNA
cgcgtgcaggaggccgtcgagagcatggtgaag

SEQ ID NO: 30646 - RNA, 30 nt, synthetic construct
  misc_feature 1..30: note = Acetolactate synthase-like protein (181-190)
  source 1..30: mol_type = other RNA
cgcgtgcgggacatcgtccccaccctgcgc

SEQ ID NO: 30647 - RNA, 27 nt, synthetic construct
  misc_feature 1..27: note = Inosine-5'-monophosphate dehydrogenase 2 (126-134)
  source 1..27: mol_type = other RNA
cgcgtgcgggacgtcttcgaggccaag

SEQ ID NO: 30648 - RNA, 30 nt, synthetic construct
  misc_feature 1..30: note = Transmembrane protein 107 (3-12)
  source 1..30: mol_type = other RNA
cgcgtgagcggcctggtcccctcccggttc

SEQ ID NO: 30649 - RNA, 27 nt, synthetic construct
  misc_feature 1..27: note = Mitochondrial import receptor subunit TOM5 homolog (39-47)
  source 1..27: mol_type = other RNA
cgcgtgacccccttcatcctgaagaag

SEQ ID NO: 30650 - RNA, 27 nt, synthetic construct
  misc_feature 1..27: note Dolichyl-diphosphooligosaccharide-proteinosyltransferase subunit 2 (256-264)
  source 1..27: mol_type = other RNA
cgcgtgacctaccccgccaaggccaag

SEQ ID NO: 30651 - RNA, 33 nt, synthetic construct
  misc_feature 1..33: note = Fanconi anemia group D2 protein (185-195)
  source 1..33: mol_type = other RNA
cgcgtggtcgacggcaaggacctgaccaccaag

SEQ ID NO: 30652 - RNA, 33 nt, synthetic construct
  misc_feature 1..33: note = Ribosome biogenesis protein WDR12 (281-291)
  source 1..33: mol_type = other RNA
cgcgtgtgggacgtcgagagcggctccctgaag

SEQ ID NO: 30653 - RNA, 27 nt, synthetic construct
  misc_feature 1..27: note = Splicing factor 3B subunit 3 (968-976)
  source 1..27: mol_type = other RNA
cgcgtgtacgacctgggcaagaagaag

SEQ ID NO: 30654 - RNA, 33 nt, synthetic construct
  misc_feature 1..33: note = WD repeat-containing protein 74 (208-218)
  source 1..33: mol_type = other RNA
cgcgtgtacgaccccgccagcccgcagcggcgc

SEQ ID NO: 30655 - RNA, 30 nt, synthetic construct
  misc_feature 1..30: note = Arf-GAP with coiled-coil, ANK repeat and PH domain-containing protein 2 (477-486)
  source 1..30: mol_type = other RNA
cgcgtgtacgaggccaacgtcgagaagatg

SEQ ID NO: 30656 - RNA, 33 nt, synthetic construct
  misc_feature 1..33: note = Centrosomal protein of 104 kDa (621-631)
  source 1..33: mol_type = other RNA
cgcgtgtacgaggtccgggagaccgccgtgcgc

SEQ ID NO: 30657 - RNA, 27 nt, synthetic construct
  misc_feature 1..27: note = Programmed cell death 6-interacting protein (606-614)
  source 1..27: mol_type = other RNA
cgcgtgtacggcgggctgaccaccaag

SEQ ID NO: 30658 - RNA, 27 nt, synthetic construct
  misc_feature 1..27: note = Probable E3 ubiquitin-protein ligase TRIM8 (538-546)
  source 1..27: mol_type = other RNA
cgcgtgtacggccagcccagcaccaag

SEQ ID NO: 30659 - RNA, 33 nt, synthetic construct
  misc_feature 1..33: note = Probable E3 ubiquitin-protein ligase TRIM8 (538-548)
  source 1..33: mol_type = other RNA
cgcgtgtacggccagcccagcaccaagcactac

SEQ ID NO: 30660 - RNA, 33 nt, synthetic construct
  misc_feature 1..33: note = UPF0769 protein C21orf59 (33-43)
  source 1..33: mol_type = other RNA
cgcgtgtacaacggccggctgaaggtccagcgc

SEQ ID NO: 30661 - RNA, 33 nt, synthetic construct
  misc_feature 1..33: note = Serine/threonine-protein kinase pim-2 (201-211)
  source 1..33: mol_type = other RNA
cgcgtgtacagccccccggagtggatctcccgg

SEQ ID NO: 30662 - RNA, 30 nt, synthetic construct
  misc_feature 1..30: note = E3 ubiquitin-protein ligase Itchy homolog (177-186)
  source 1..30: mol_type = other RNA
cgcgtgtactacgtcgaccacgtggagaag

SEQ ID NO: 30663 - RNA, 27 nt, synthetic construct
  misc_feature 1..27: note = Superkiller viralicidic activity 2-like 2 (738-746)
  source 1..27: mol_type = other RNA
agcgccatctccagcgtgcgcctgtac

SEQ ID NO: 30664 - RNA, 27 nt, synthetic construct
  misc_feature 1..27: note = Ubiquilin-1 (452-460)
  source 1..27: mol_type = other RNA
agcgccatgtccaacccccgcgccatg

SEQ ID NO: 30665 - RNA, 30 nt, synthetic construct
  misc_feature 1..30: note = 40S ribosomal protein S21 (18-27)
  source 1..30: mol_type = other RNA
agcgcctccaaccgcatcatcggcgccaag

SEQ ID NO: 30666 - RNA, 27 nt, synthetic construct
  misc_feature 1..27: note = Condensin-2 complex subunit G2 (606-614)
  source 1..27: mol_type = other RNA
agcgaggccgccgcgccccgcgccttc

SEQ ID NO: 30667 - RNA, 27 nt, synthetic construct
  misc_feature 1..27: note = Ferritin heavy chain (79-87)
  source 1..27: mol_type = other RNA
agcgaggccgccatcaaccgccagatc

SEQ ID NO: 30668 - RNA, 27 nt, synthetic construct
  misc_feature 1..27: note = Microtubule-actin cross-linking factor 1, isoforms 1/2/3/5 (3831-3839)
  source 1..27: mol_type = other RNA
agcgaggccgagcagaccctgcgcttc

SEQ ID NO: 30669 - RNA, 27 nt, synthetic construct
  misc_feature 1..27: note = Single-stranded DNA-binding protein 2 (86-94)
  source 1..27: mol_type = other RNA
agcgaggccaaggccttccacgactac

SEQ ID NO: 30670 - RNA, 30 nt, synthetic construct
  misc_feature 1..30: note = PERQ amino acid-rich with GYF domain-containing protein 2 (1182-1191)
  source 1..30: mol_type = other RNA
agcgaggccaaggagttcgccaagcagttc

SEQ ID NO: 30671 - RNA, 33 nt, synthetic construct
  misc_feature 1..33: note = Transcriptional adapter 1 (16-26)
  source 1..33: mol_type = other RNA
agcgaggccctgggcgacaacgtgaagcagtac

SEQ ID NO: 30672 - RNA, 27 nt, synthetic construct
  misc_feature 1..27: note = Cytoplasmic dynein 1 heavy chain 1 (1405-1413)
  source 1..27: mol_type = other RNA
agcgaggccctgaaggaccgccactgg

SEQ ID NO: 30673 - RNA, 27 nt, synthetic construct
  misc_feature 1..27: note = Zinc finger protein 296 (189-197)
  source 1..27: mol_type = other RNA
agcgaggcccccgaggccccgctgctc

SEQ ID NO: 30674 - RNA, 30 nt, synthetic construct
  misc_feature 1..30: note = ATP-dependent RNA helicase DDX50 (2-11)
  source 1..30: mol_type = other RNA
agcgaggacaacccccagaccctgctcttc

SEQ ID NO: 30675 - RNA, 27 nt, synthetic construct
  misc_feature 1..27: note = UV-stimulated scaffold protein A (35-43)
  source 1..27: mol_type = other RNA
agcgaggagcagctgtcccgcgcctac

SEQ ID NO: 30676 - RNA, 27 nt, synthetic construct
  misc_feature 1..27: note = X-ray repair cross-complementing protein 5 (650-658)
  source 1..27: mol_type = other RNA
agcgaggagcagcgcttcaacaacttc

SEQ ID NO: 30677 - RNA, 27 nt, synthetic construct
  misc_feature 1..27: note = WD repeat-containing protein 63 (190-198)
  source 1..27: mol_type = other RNA
agcgagttcggcgcccccatcaagttc

SEQ ID NO: 30678 - RNA, 30 nt, synthetic construct
  misc_feature 1..30: note = Pre-mRNA-processing-splicing factor 8 (1377-1386)
  source 1..30: mol_type = other RNA
agcgagttcatcgactcccagcgcgtgtgg

SEQ ID NO: 30679 - RNA, 27 nt, synthetic construct
  misc_feature 1..27: note = Programmed cell death protein 6 (83-91)
  source 1..27: mol_type = other RNA
agcgagttcaccggcgtgtggaagtac

SEQ ID NO: 30680 - RNA, 33 nt, synthetic construct
  misc_feature 1..33: note = Proteasome subunit beta type-5 (72-82)
  source 1..33: mol_type = other RNA
agcgagggcaaccgcatctccggggccaccttc

SEQ ID NO: 30681 - RNA, 33 nt, synthetic construct
  misc_feature 1..33: note = WD repeat-containing protein 62 (1273-1283)
  source 1..33: mol_type = other RNA
agcgagggccaggagcccgccctgcgctcctgg

SEQ ID NO: 30682 - RNA, 30 nt, synthetic construct
  misc_feature 1..30: note = E3 ubiquitin-protein ligase MARCH6 (14-23)
  source 1..30: mol_type = other RNA
agcgagggcacccccgagaagccgctgtac

SEQ ID NO: 30683 - RNA, 30 nt, synthetic construct
  misc_feature 1..30: note = Serine hydroxymethyltransferase, mitochondrial (67-76)
  source 1..30: mol_type = other RNA
agcgagggctaccccgggaagcgctactac

SEQ ID NO: 30684 - RNA, 27 nt, synthetic construct
  misc_feature 1..27: note = Serine hydroxymethyltransferase, cytosolic (74-82)
  source 1..27: mol_type = other RNA
agcgagggctaccccgggcagcgctac

SEQ ID NO: 30685 - RNA, 27 nt, synthetic construct
  misc_feature 1..27: note = Pre-mRNA-splicing factor CWC22 homolog (326-334)
  source 1..27: mol_type = other RNA
agcgagatcgacaagcgcgtgcagtac

SEQ ID NO: 30686 - RNA, 27 nt, synthetic construct
  misc_feature 1..27: note = Talin-1 (290-298)
  source 1..27: mol_type = other RNA
agcgagatcgaggccaaggtgcgctac

SEQ ID NO: 30687 - RNA, 27 nt, synthetic construct
  misc_feature 1..27: note = Beta-parvin (141-149)
  source 1..27: mol_type = other RNA
agcgagatcggccagaagcagaagctg

SEQ ID NO: 30688 - RNA, 33 nt, synthetic construct
  misc_feature 1..33: note = Ribosome-binding protein 1 (242-252)
  source 1..33: mol_type = other RNA
agcgagaaggccggcatcatccaggacacctgg

SEQ ID NO: 30689 - RNA, 27 nt, synthetic construct
  misc_feature 1..27: note = Nuclear pore complex protein Nup155 (295-303)
  source 1..27: mol_type = other RNA
agcgagaagggcgtgatccaggtctac

SEQ ID NO: 30690 - RNA, 27 nt, synthetic construct
  misc_feature 1..27: note = Plectin (3212-3220)
  source 1..27: mol_type = other RNA
agcgagctgcaggcccgcgagaccttc

SEQ ID NO: 30691 - RNA, 27 nt, synthetic construct
  misc_feature 1..27: note = Inositol 1,4,5-trisphosphate receptor type 1 (2099-2107)
  source 1..27: mol_type = other RNA
agcgagaacgccgagcgcatcctgtac

SEQ ID NO: 30692 - RNA, 27 nt, synthetic construct
  misc_feature 1..27: note = AP-2 complex subunit mu (347-355)
  source 1..27: mol_type = other RNA
agcgagaacgccatcgtgtggaagatc

SEQ ID NO: 30693 - RNA, 27 nt, synthetic construct
  misc_feature 1..27: note = DnaJ homolog subfamily A member 2 (20-28)
  source 1..27: mol_type = other RNA
agcgagaacgagctgaagaaggcctac

SEQ ID NO: 30694 - RNA, 33 nt, synthetic construct
  misc_feature 1..33: note = DNA-dependent protein kinase catalytic subunit (2174-2184)
  source 1..33: mol_type = other RNA
agcgagaacaacggcggggagggcatccactac

SEQ ID NO: 30695 - RNA, 30 nt, synthetic construct
  misc_feature 1..30: note = Mediator of RNA polymerase II transcription subunit 12 (891-900)
  source 1..30: mol_type = other RNA
agcgagaaccccgccaaccgctactccttc

SEQ ID NO: 30696 - RNA, 27 nt, synthetic construct
  misc_feature 1..27: note = F-box/LRR-repeat protein 3 (261-269)
  source 1..27: mol_type = other RNA
agcgagaaccccggccagacccacttc

SEQ ID NO: 30697 - RNA, 33 nt, synthetic construct
  misc_feature 1..33: note = Protein sel-1 homolog 1 (20-30)
  source 1..33: mol_type = other RNA
agcgagcagcagcactccgcccaggccatgttc

SEQ ID NO: 30698 - RNA, 27 nt, synthetic construct
  misc_feature 1..27: note = HLA class II histocompatibility antigen, DRB1-11 beta chain (221-229)
  source 1..27: mol_type = other RNA
agcgagtccgcccagagcaagatgctg

SEQ ID NO: 30699 - RNA, 33 nt, synthetic construct
  misc_feature 1..33: note = Eukaryotic initiation factor 4A-I (40-50)
  source 1..33: mol_type = other RNA
agcgagtccctgctccgcggcatctacgcctac

SEQ ID NO: 30700 - RNA, 27 nt, synthetic construct
  misc_feature 1..27: note = Retinoic acid receptor alpha (17-25)
  source 1..27: mol_type = other RNA
agcgagtcccgcatggtggtcaccttc

SEQ ID NO: 30701 - RNA, 27 nt, synthetic construct
  misc_feature 1..27: note = Vacuolar protein sorting-associated protein 51 homolog (16-24)
  source 1..27: mol_type = other RNA
agcgagaccgacatggtgcgccagatc

SEQ ID NO: 30702 - RNA, 27 nt, synthetic construct
  misc_feature 1..27: note = 26S proteasome non-ATPase regulatory subunit 2 (546-554)
  source 1..27: mol_type = other RNA
agcgagaccgagctgaaggacacctac

SEQ ID NO: 30703 - RNA, 27 nt, synthetic construct
  misc_feature 1..27: note = Misshapen-like kinase 1 (969-977)
  source 1..27: mol_type = other RNA
agcgagacccccgagatccgcaagtac

SEQ ID NO: 30704 - RNA, 27 nt, synthetic construct
  misc_feature 1..27: note = Serine/threonine-protein kinase Nek6 (224-232)
  source 1..27: mol_type = other RNA
agcgagaccaccgccgcccactccctg

SEQ ID NO: 30705 - RNA, 27 nt, synthetic construct
  misc_feature 1..27: note = U5 small nuclear ribonucleoprotein 200 kDa helicase (1230-1238)
  source 1..27: mol_type = other RNA
agcgaggtgatcctgcaccacgagtac

SEQ ID NO: 30706 - RNA, 27 nt, synthetic construct
  misc_feature 1..27: note = Arginine-glutamic acid dipeptide repeats protein (1257-1265)
  source 1..27: mol_type = other RNA
agcgagtacgcccgcccccacgtgatg

SEQ ID NO: 30707 - RNA, 30 nt, synthetic construct
  misc_feature 1..30: note = Proteasome subunit alpha type-5 (6-15)
  source 1..30: mol_type = other RNA
agcgagtacgaccgcggcgtgaacaccttc

SEQ ID NO: 30708 - RNA, 30 nt, synthetic construct
  misc_feature 1..30: note = Nucleolar protein 56 (275-284)
  source 1..30: mol_type = other RNA
agcgagtaccgccagtccctgcacacctac

SEQ ID NO: 30709 - RNA, 24 nt, synthetic construct
  misc_feature 1..24: note = Pleiotropic regulator 1 (226-233)
  source 1..24: mol_type = other RNA
agcggcaagctgaagctctccctg

SEQ ID NO: 30710 - RNA, 27 nt, synthetic construct
  misc_feature 1..27: note = Manganese-transporting ATPase 13A1 (75-83)
  source 1..27: mol_type = other RNA
agcatcgccgcccccttcacctccaag

SEQ ID NO: 30711 - RNA, 27 nt, synthetic construct
  misc_feature 1..27: note = Myotubularin-related protein 10 (210-218)
  source 1..27: mol_type = other RNA
agcatcctgggcacccccctctccaag

SEQ ID NO: 30712 - RNA, 30 nt, synthetic construct
  misc_feature 1..30: note = U2 small nuclear ribonucleoprotein A' (119-128)
  source 1..30: mol_type = other RNA
agcatcctgcgcaaccccgtgaccaacaag

SEQ ID NO: 30713 - RNA, 30 nt, synthetic construct
  misc_feature 1..30: note = Cytospin-A (887-896)
  source 1..30: mol_type = other RNA
agcatctccggccccatcagcacctccaag

SEQ ID NO: 30714 - RNA, 33 nt, synthetic construct
  misc_feature 1..33: note = Double-stranded RNA-specific adenosine deaminase (1110-1120)
  source 1..33: mol_type = other RNA
agcatctacgactccaagcgccagagcggcaag

SEQ ID NO: 30715 - RNA, 27 nt, synthetic construct
  misc_feature 1..27: note = Importin-8 (234-242)
  source 1..27: mol_type = other RNA
agcctggccgagatcctcctgaagaag

SEQ ID NO: 30716 - RNA, 30 nt, synthetic construct
  misc_feature 1..30: note = Heterogeneous nuclear ribonucleoprotein K (154-163)
  source 1..30: mol_type = other RNA
agcctggccggcgggatcatcggcgtgaag

SEQ ID NO: 30717 - RNA, 27 nt, synthetic construct
  misc_feature 1..27: note = G2/M phase-specific E3 ubiquitin-protein ligase (424-432)
  source 1..27: mol_type = other RNA
agcctgttcgagggctccctcagcaag

SEQ ID NO: 30718 - RNA, 27 nt, synthetic construct
  misc_feature 1..27: note = Serine/threonine-protein phosphatase 2A 56 kDa regulatory subunit epsilon isoform (278-286)
  source 1..27: mol_type = other RNA
agcctgttccacgcccagctcgcctac

SEQ ID NO: 30719 - RNA, 27 nt, synthetic construct
  misc_feature 1..27: note = Adenylate cyclase type 6 (161-169)
  source 1..27: mol_type = other RNA
agcctgttccccaaggccctccagcgc

SEQ ID NO: 30720 - RNA, 27 nt, synthetic construct
  misc_feature 1..27: note = Cytochrome c oxidase subunit 6C (30-38)
  source 1..27: mol_type = other RNA
agcctgggcgtggccgccctctacaag

SEQ ID NO: 30721 - RNA, 30 nt, synthetic construct
  misc_feature 1..30: note = Histone H2A.V (91-100)
  source 1..30: mol_type = other RNA
agcctgatcggcaagaaggggcagcagaag

SEQ ID NO: 30722 - RNA, 27 nt, synthetic construct
  misc_feature 1..27: note = N-alpha-acetyltransferase 30 (63-71)
  source 1..27: mol_type = other RNA
agcctgaagtccaaggtgctcagcgtc

SEQ ID NO: 30723 - RNA, 27 nt, synthetic construct
  misc_feature 1..27: note = COP9 signalosome complex subunit 2 (433-441)
  source 1..27: mol_type = other RNA
agcctgaaccaggccgtggtctccaag

SEQ ID NO: 30724 - RNA, 30 nt, synthetic construct
  misc_feature 1..30: note = Cell division cycle-associated protein 2 (247-256)
  source 1..30: mol_type = other RNA
agcctgcccgccaacaccccgctccgcaag

SEQ ID NO: 30725 - RNA, 27 nt, synthetic construct
  misc_feature 1..27: note = Zinc finger protein 697 (327-335)
  source 1..27: mol_type = other RNA
agcctgtccagccacctcctgtcccac

SEQ ID NO: 30726 - RNA, 33 nt, synthetic construct
  misc_feature 1..33: note = Protection of telomeres protein 1 (417-427)
  source 1..33: mol_type = other RNA
agcctgtacgactccaagatctggaccaccaag

SEQ ID NO: 30727 - RNA, 33 nt, synthetic construct
  misc_feature 1..33: note = MICOS complex subunit MIC26 (41-51)
  source 1..33: mol_type = other RNA
agcctgtactccgtgcccgagggccagagcaag

SEQ ID NO: 30728 - RNA, 27 nt, synthetic construct
  misc_feature 1..27: note = A-kinase anchor protein 13 (930-938)
  source 1..27: mol_type = other RNA
agccccctgaccaagtccatcagcctc

SEQ ID NO: 30729 - RNA, 24 nt, synthetic construct
  misc_feature 1..24: note = Elongation factor 2 (95-102)
  source 1..24: mol_type = other RNA
agccccaacaagcacaaccgcctg

SEQ ID NO: 30730 - RNA, 27 nt, synthetic construct
  misc_feature 1..27: note = WD repeat-containing protein 3 (558-566)
  source 1..27: mol_type = other RNA
agccccaaccagaagctgctcgccgtg

SEQ ID NO: 30731 - RNA, 24 nt, synthetic construct
  misc_feature 1..24: note = Gamma-interferon-inducible protein 16 (166-173)
  source 1..24: mol_type = other RNA
agcccctccccgaagaccagcctg

SEQ ID NO: 30732 - RNA, 24 nt, synthetic construct
  misc_feature 1..24: note = Elongation factor 2 (2-9)
  source 1..24: mol_type = other RNA
agccccgtggtccgcgtggccgtg

SEQ ID NO: 30733 - RNA, 27 nt, synthetic construct
  misc_feature 1..27: note = Uridine diphosphate glucose pyrophosphatase (83-91)
  source 1..27: mol_type = other RNA
agcccctacctgcgcccgctcaccctg

SEQ ID NO: 30734 - RNA, 27 nt, synthetic construct
  misc_feature 1..27: note = Ubiquitin carboxyl-terminal hydrolase 48 (410-418)
  source 1..27: mol_type = other RNA
agccgcaacgcctacatgctggtgtac

SEQ ID NO: 30735 - RNA, 27 nt, synthetic construct
  misc_feature 1..27: note = RNA-binding protein EWS (328-336)
  source 1..27: mol_type = other RNA
agctccgcccccccgctgaccggcaag

SEQ ID NO: 30736 - RNA, 27 nt, synthetic construct
  misc_feature 1..27: note = Immediate early response gene 5 protein (275-283)
  source 1..27: mol_type = other RNA
agctccttcagcggcctgctccgcaag

SEQ ID NO: 30737 - RNA, 27 nt, synthetic construct
  misc_feature 1..27: note = 40S ribosomal protein S5 (184-192)
  source 1..27: mol_type = other RNA
agctccaacagctacgccatcaagaag

SEQ ID NO: 30738 - RNA, 27 nt, synthetic construct
  misc_feature 1..27: note = Proteasome activator complex subunit 4 (977-985)
  source 1..27: mol_type = other RNA
agctcctacagccaggtgcgcaacaag

SEQ ID NO: 30739 - RNA, 27 nt, synthetic construct
  misc_feature 1..27: note = PCI domain-containing protein 2 (203-211)
  source 1..27: mol_type = other RNA
agcaccgcccagcgcgtgacctacaag

SEQ ID NO: 30740 - RNA, 27 nt, synthetic construct
  misc_feature 1..27: note = MAP7 domain-containing protein 1 (454-462)
  source 1..27: mol_type = other RNA
agcaccgcctccgagctgagccccaag

SEQ ID NO: 30741 - RNA, 27 nt, synthetic construct
  misc_feature 1..27: note = 60S ribosomal protein L18 (41-49)
  source 1..27: mol_type = other RNA
agcaccttcaaccaggtggtcctgaag

SEQ ID NO: 30742 - RNA, 27 nt, synthetic construct
  misc_feature 1..27: note = WD repeat and coiled-coil-containing protein C2orf44 (449-457)
  source 1..27: mol_type = other RNA
agcaccttctccgcccccctgaacaag

SEQ ID NO: 30743 - RNA, 27 nt, synthetic construct
  misc_feature 1..27: note = Kanadaptin (238-246)
  source 1..27: mol_type = other RNA
agcacccacggcaccttcctgaacaag

SEQ ID NO: 30744 - RNA, 27 nt, synthetic construct
  misc_feature 1..27: note = Double-stranded RNA-binding protein Staufen homolog 2 (41-49)
  source 1..27: mol_type = other RNA
agcaccctgcccaagccggtgcagaag

SEQ ID NO: 30745 - RNA, 27 nt, synthetic construct
  misc_feature 1..27: note = F-box only protein 11 (143-151)
  source 1..27: mol_type = other RNA
agcaccaactcccaccccatcctgcgc

SEQ ID NO: 30746 - RNA, 27 nt, synthetic construct
  misc_feature 1..27: note = LisH domain-containing protein ARMC9 (382-390)
  source 1..27: mol_type = other RNA
agcacctccgacgtggtccgccagtac

SEQ ID NO: 30747 - RNA, 27 nt, synthetic construct
  misc_feature 1..27: note = E3 ubiquitin-protein ligase CHFR (78-86)
  source 1..27: mol_type = other RNA
agcacctccggcaccgtgatcaacaag

SEQ ID NO: 30748 - RNA, 27 nt, synthetic construct
  misc_feature 1..27: note = Lysine-specific histone demethylase 1A (633-641)
  source 1..27: mol_type = other RNA
agcacctcccagaccttcatctacaag

SEQ ID NO: 30749 - RNA, 27 nt, synthetic construct
  misc_feature 1..27: note = Heterogeneous nuclear ribonucleoprotein U-like protein 2 (165-173)
  source 1..27: mol_type = other RNA
agcacctacggcgtgaccaaggggaag

SEQ ID NO: 30750 - RNA, 27 nt, synthetic construct
  misc_feature 1..27: note = Cathepsin Z (38-46)
  source 1..27: mol_type = other RNA
agcacctacccccgcccgcacgagtac

SEQ ID NO: 30751 - RNA, 27 nt, synthetic construct
  misc_feature 1..27: note = Nucleolar pre-ribosomal-associated protein 1 (2084-2092)
  source 1..27: mol_type = other RNA
agcgtggccgagcaccccctgtcccgc

SEQ ID NO: 30752 - RNA, 27 nt, synthetic construct
  misc_feature 1..27: note = MOB kinase activator 1A (188-196)
  source 1..27: mol_type = other RNA
agcgtggccaagaccatcctgaagcgc

SEQ ID NO: 30753 - RNA, 30 nt, synthetic construct
  misc_feature 1..30: note = Lysine-specific demethylase 5C (959-968)
  source 1..30: mol_type = other RNA
agcgtggccccctccccggccgtcgacaag

SEQ ID NO: 30754 - RNA, 27 nt, synthetic construct
  misc_feature 1..27: note = Lysine-specific demethylase 5A (796-804)
  source 1..27: mol_type = other RNA
agcgtggcccagctgctcctgtccaag

SEQ ID NO: 30755 - RNA, 27 nt, synthetic construct
  misc_feature 1..27: note = Probable cation-transporting ATPase 13A4 (871-879)
  source 1..27: mol_type = other RNA
agcgtggcctcccccttcaccagcaag

SEQ ID NO: 30756 - RNA, 27 nt, synthetic construct
  misc_feature 1..27: note = Sentrin-specific protease 5 (115-123)
  source 1..27: mol_type = other RNA
agcgtggacggccccgtctcccagaag

SEQ ID NO: 30757 - RNA, 27 nt, synthetic construct
  misc_feature 1..27: note = Exostosin-2 (692-700)
  source 1..27: mol_type = other RNA
agcgtgttcggcaccatgcccctgaag

SEQ ID NO: 30758 - RNA, 27 nt, synthetic construct
  misc_feature 1..27: note = SRR1-like protein (301-309)
  source 1..27: mol_type = other RNA
agcgtgcactggttccccgtccagaag

SEQ ID NO: 30759 - RNA, 27 nt, synthetic construct
  misc_feature 1..27: note = Epidermal growth factor receptor kinase substrate 8 (380-388)
  source 1..27: mol_type = other RNA
agcgtgctgtcccccctcctgaacaag

SEQ ID NO: 30760 - RNA, 27 nt, synthetic construct
  misc_feature 1..27: note = Nodal modulator 2 (130-138)
  source 1..27: mol_type = other RNA
agcgtgaacggcaaggtcctgtccaag

SEQ ID NO: 30761 - RNA, 27 nt, synthetic construct
  misc_feature 1..27: note = Ubiquitin carboxyl-terminal hydrolase 11 (442-450)
  source 1..27: mol_type = other RNA
agcgtgcccctgccgatctcccacaag

SEQ ID NO: 30762 - RNA, 30 nt, synthetic construct
  misc_feature 1..30: note = Cytoplasmic dynein 1 light intermediate chain 1 (419-428)
  source 1..30: mol_type = other RNA
agcgtgtcccccatcccggccggcagcaag

SEQ ID NO: 30763 - RNA, 30 nt, synthetic construct
  misc_feature 1..30: note = Zinc finger protein 697 (10-19)
  source 1..30: mol_type = other RNA
agcgtgtccagccacctgttcacccacaag

SEQ ID NO: 30764 - RNA, 27 nt, synthetic construct
  misc_feature 1..27: note = Zinc finger protein 619 (226-234)
  source 1..27: mol_type = other RNA
agcgtgtccacccacctgatcaccaag

SEQ ID NO: 30765 - RNA, 27 nt, synthetic construct
  misc_feature 1..27: note = Fatty acyl-CoA reductase 1 (39-47)
  source 1..27: mol_type = other RNA
agcgtgtacgtcctggtgcgccagaag

SEQ ID NO: 30766 - RNA, 27 nt, synthetic construct
  misc_feature 1..27: note = Histone H2B type 2-F (39-47)
  source 1..27: mol_type = other RNA
agcgtgtacgtctacaaggtgctgaag

SEQ ID NO: 30767 - RNA, 27 nt, synthetic construct
  misc_feature 1..27: note = Nucleolar RNA helicase 2 (15-23)
  source 1..27: mol_type = other RNA
accgccatgaagaagggcgagaccctg

SEQ ID NO: 30768 - RNA, 30 nt, synthetic construct
  misc_feature 1..30: note = Pre-mRNA-processing-splicing factor 8 (1079-1088)
  source 1..30: mol_type = other RNA
accgaggccgcccaccccatccgcctgttc

SEQ ID NO: 30769 - RNA, 30 nt, synthetic construct
  misc_feature 1..30: note = NHP2-like protein 1 (2-11)
  source 1..30: mol_type = other RNA
accgaggccgacgtgaaccccaaggcctac

SEQ ID NO: 30770 - RNA, 27 nt, synthetic construct
  misc_feature 1..27: note = Splicing factor, proline- and glutamine-rich (309-317)
  source 1..27: mol_type = other RNA
accgaggacgagttcaagcgcctgttc

SEQ ID NO: 30771 - RNA, 30 nt, synthetic construct
  misc_feature 1..30: note = 60S ribosomal protein L13 (170-179)
  source 1..30: mol_type = other RNA
accgaggaggagaagaacttcaaggccttc

SEQ ID NO: 30772 - RNA, 30 nt, synthetic construct
  misc_feature 1..30: note = Protein SET (136-145)
  source 1..30: mol_type = other RNA
accgagttcgaggacatcaagagcggctac

SEQ ID NO: 30773 - RNA, 30 nt, synthetic construct
  misc_feature 1..30: note = Neutral alpha-glucosidase AB (174-183)
  source 1..30: mol_type = other RNA
accgagggcggggagccctaccgcctgtac

SEQ ID NO: 30774 - RNA, 27 nt, synthetic construct
  misc_feature 1..27: note = T-complex protein 1 subunit theta (342-350)
  source 1..27: mol_type = other RNA
accgagatcgagctggccaagcagatc

SEQ ID NO: 30775 - RNA, 27 nt, synthetic construct
  misc_feature 1..27: note = RNA-binding protein 27 (734-742)
  source 1..27: mol_type = other RNA
accgagctggacctccacaagcgcctg

SEQ ID NO: 30776 - RNA, 27 nt, synthetic construct
  misc_feature 1..27: note = RNA-binding protein 26 (793-801)
  source 1..27: mol_type = other RNA
accgagctggacctctacaagaagatg

SEQ ID NO: 30777 - RNA, 27 nt, synthetic construct
  misc_feature 1..27: note = Cell cycle progression protein 1 (432-440)
  source 1..27: mol_type = other RNA
accgagctggagcgcaagctcaccttc

SEQ ID NO: 30778 - RNA, 30 nt, synthetic construct
  misc_feature 1..30: note = Exocyst complex component 4 (67-76)
  source 1..30: mol_type = other RNA
accgagctgaccacggccatccgcacctac

SEQ ID NO: 30779 - RNA, 27 nt, synthetic construct
  misc_feature 1..27: note = Geranylgeranyl pyrophosphate synthase (238-246)
  source 1..27: mol_type = other RNA
accgagaacatcgacatcaagaagtac

SEQ ID NO: 30780 - RNA, 33 nt, synthetic construct
  misc_feature 1..33: note = Fructose-bisphosphate aldolase A (103-113)
  source 1..33: mol_type = other RNA
accgagaacaccgaggagaaccgccggttctac

SEQ ID NO: 30781 - RNA, 27 nt, synthetic construct
  misc_feature 1..27: note = Probable cation-transporting ATPase 13A3 (132-140)
  source 1..27: mol_type = other RNA
accgagagccagcagatccgctacttc

SEQ ID NO: 30782 - RNA, 27 nt, synthetic construct
  misc_feature 1..27: note = Nuclear factor erythroid 2-related factor 2 (198-206)
  source 1..27: mol_type = other RNA
accgaggtggacaactaccacttctac

SEQ ID NO: 30783 - RNA, 24 nt, synthetic construct
  misc_feature 1..24: note = Basigin (48-55)
  source 1..24: mol_type = other RNA
accgaggtgaccggccaccgctgg

SEQ ID NO: 30784 - RNA, 27 nt, synthetic construct
  misc_feature 1..27: note = Myosin phosphatase Rho-interacting protein (441-449)
  source 1..27: mol_type = other RNA
accgagtaccccgtgcagcgcaactac

SEQ ID NO: 30785 - RNA, 33 nt, synthetic construct
  misc_feature 1..33: note = GPI transamidase component PIG-T (450-460)
  source 1..33: mol_type = other RNA
accgagtacacccccgacccgaaccacggcttc

SEQ ID NO: 30786 - RNA, 27 nt, synthetic construct
  misc_feature 1..27: note = Protein kinase C delta-binding protein (181-189)
  source 1..27: mol_type = other RNA
accggcctgcagaaggtgcagagcctc

SEQ ID NO: 30787 - RNA, 27 nt, synthetic construct
  misc_feature 1..27: note = Alpha-enolase (72-80)
  source 1..27: mol_type = other RNA
accatcgcccccgccctggtgagcaag

SEQ ID NO: 30788 - RNA, 27 nt, synthetic construct
  misc_feature 1..27: note = Histidine triad nucleotide-binding protein 1 (17-25)
  source 1..27: mol_type = other RNA
accatcttcggcaagatcatccgcaag

SEQ ID NO: 30789 - RNA, 27 nt, synthetic construct
  misc_feature 1..27: note = NHP2-like protein 1 (105-113)
  source 1..27: mol_type = other RNA
accatcaaggagggcagccagctgaag

SEQ ID NO: 30790 - RNA, 27 nt, synthetic construct
  misc_feature 1..27: note = H/ACA ribonucleoprotein complex subunit 3 (47-55)
  source 1..27: mol_type = other RNA
accatcaagaagcgcttcaaggtgctg

SEQ ID NO: 30791 - RNA, 27 nt, synthetic construct
  misc_feature 1..27: note = Signal peptidase complex subunit 2 (129-137)
  source 1..27: mol_type = other RNA
accatctacaccagctacaaggagaag

SEQ ID NO: 30792 - RNA, 24 nt, synthetic construct
  misc_feature 1..24: note = Retinoblastoma-like protein 1 (803-810)
  source 1..24: mol_type = other RNA
accatctacgtgggccgcgtcaag

SEQ ID NO: 30793 - RNA, 24 nt, synthetic construct
  misc_feature 1..24: note = Interferon-related developmental regulator 1 (118-125)
  source 1..24: mol_type = other RNA
accctgggccccatcctcaagaag

SEQ ID NO: 30794 - RNA, 27 nt, synthetic construct
  misc_feature 1..27: note = Protein BRICK1 (49-57)
  source 1..27: mol_type = other RNA
accctgaacgagaagctcaccgccctg

SEQ ID NO: 30795 - RNA, 27 nt, synthetic construct
  misc_feature 1..27: note = GPI mannosyltransferase 3 (40-48)
  source 1..27: mol_type = other RNA
accctgtacttcaacacccaggagaag

SEQ ID NO: 30796 - RNA, 27 nt, synthetic construct
  misc_feature 1..27: note = Splicing factor 3B subunit 3 (759-767)
  source 1..27: mol_type = other RNA
accaacaccctgcgcatcctcgccctg

SEQ ID NO: 30797 - RNA, 27 nt, synthetic construct
  misc_feature 1..27: note = Ubiquitin-like protein 7 (248-256)
  source 1..27: mol_type = other RNA
acccccagctcccgcccggccagcctg

SEQ ID NO: 30798 - RNA, 27 nt, synthetic construct
  misc_feature 1..27: note = Exportin-6 (55-63)
  source 1..27: mol_type = other RNA
acccgcaacgactacgtgatgatgtac

SEQ ID NO: 30799 - RNA, 27 nt, synthetic construct
  misc_feature 1..27: note = Perilipin-2 (63-71)
  source 1..27: mol_type = other RNA
accagcgccctgcccatcatccagaag

SEQ ID NO: 30800 - RNA, 27 nt, synthetic construct
  misc_feature 1..27: note = Huntingtin (1215-1223)
  source 1..27: mol_type = other RNA
accagcggccccgtgaccacgtccaag

SEQ ID NO: 30801 - RNA, 24 nt, synthetic construct
  misc_feature 1..24: note = YTH domain-containing protein 1 (327-334)
  source 1..24: mol_type = other RNA
accagcaagctgaagtacgtgctc

SEQ ID NO: 30802 - RNA, 27 nt, synthetic construct
  misc_feature 1..27: note = Male-specific lethal 3 homolog (328-336)
  source 1..27: mol_type = other RNA
accaccggcgagcccgccacgccgaag

SEQ ID NO: 30803 - RNA, 30 nt, synthetic construct
  misc_feature 1..30: note = Flap endonuclease 1 (60-69)
  source 1..30: mol_type = other RNA
accaccagccacctgatgggcatgttctac

SEQ ID NO: 30804 - RNA, 27 nt, synthetic construct
  misc_feature 1..27: note = Elongation factor 1-alpha 1 (22-30)
  source 1..27: mol_type = other RNA
accaccacgggccacctgatctacaag

SEQ ID NO: 30805 - RNA, 27 nt, synthetic construct
  misc_feature 1..27: note = Derlin-1 (22-30)
  source 1..27: mol_type = other RNA
accgtggccgtccccctggtgggcaag

SEQ ID NO: 30806 - RNA, 27 nt, synthetic construct
  misc_feature 1..27: note = COP9 signalosome complex subunit 3 (378-386)
  source 1..27: mol_type = other RNA
accgtgaacccccagttcgtccagaag

SEQ ID NO: 30807 - RNA, 30 nt, synthetic construct
  misc_feature 1..30: note = HIG1 domain family member 2A, mitochondrial (27-36)
  source 1..30: mol_type = other RNA
accgtgtaccgcaaccccgagagcttcaag

SEQ ID NO: 30808 - RNA, 27 nt, synthetic construct
  misc_feature 1..27: note = Talin-1 (1188-1196)
  source 1..27: mol_type = other RNA
gtggccaaggccgtcacccaggcgctg

SEQ ID NO: 30809 - RNA, 27 nt, synthetic construct
  misc_feature 1..27: note = DNA damage-binding protein 1 (510-518)
  source 1..27: mol_type = other RNA
gtggccgtcggccgcgccctgtactac

SEQ ID NO: 30810 - RNA, 27 nt, synthetic construct
  misc_feature 1..27: note = Translin-associated protein X (128-136)
  source 1..27: mol_type = other RNA
gtggaggccgtcagcttccagcacttc

SEQ ID NO: 30811 - RNA, 33 nt, synthetic construct
  misc_feature 1..33: note = Nodal modulator 3 (448-458)
  source 1..33: mol_type = other RNA
gtggagggcaccatcggggacttcaaggcctac

SEQ ID NO: 30812 - RNA, 27 nt, synthetic construct
  misc_feature 1..27: note = 3-phosphoinositide-dependent protein kinase 1 (325-333)
  source 1..27: mol_type = other RNA
gtggagaacaacctgatcctcaagatg

SEQ ID NO: 30813 - RNA, 27 nt, synthetic construct
  misc_feature 1..27: note = Sodium-coupled neutral amino acid transporter 2 (354-362)
  source 1..27: mol_type = other RNA
gtggagagcgagctgctccacacctac

SEQ ID NO: 30814 - RNA, 27 nt, synthetic construct
  misc_feature 1..27: note = Intraflagellar transport protein 81 homolog (196-204)
  source 1..27: mol_type = other RNA
gtggagaccgcccagaaccaccagtgg

SEQ ID NO: 30815 - RNA, 30 nt, synthetic construct
  misc_feature 1..30: note = Cleavage and polyadenylation specificity factor subunit 3 (444-453)
  source 1..30: mol_type = other RNA
gtgatcctggaggtccagagcaaccccaag

SEQ ID NO: 30816 - RNA, 27 nt, synthetic construct
  misc_feature 1..27: note = Centrosomal protein of 57 kDa (326-334)
  source 1..27: mol_type = other RNA
gtgatcaacagcatccccctggccaag

SEQ ID NO: 30817 - RNA, 27 nt, synthetic construct
  misc_feature 1..27: note = DNA-directed RNA polymerase I subunit RPA2 (81-89)
  source 1..27: mol_type = other RNA
gtgatcagccccccgaccgtccccaag

SEQ ID NO: 30818 - RNA, 33 nt, synthetic construct
  misc_feature 1..33: note = Ras GTPase-activating protein-binding protein 1 (113-123)
  source 1..33: mol_type = other RNA
gtgctggcccccgagggcagcgtcgccaacaag

SEQ ID NO: 30819 - RNA, 33 nt, synthetic construct
  misc_feature 1..33: note = Ras GTPase-activating protein-binding protein 2 (113-123)
  source 1..33: mol_type = other RNA
gtgctggcccccgagggcagcgtcccgaacaag

SEQ ID NO: 30820 - RNA, 27 nt, synthetic construct
  misc_feature 1..27: note = Interferon-stimulated gene 20 kDa protein (132-140)
  source 1..27: mol_type = other RNA
gtgctgagcgagcgcctcctgcacaag

SEQ ID NO: 30821 - RNA, 27 nt, synthetic construct
  misc_feature 1..27: note = DNA-directed RNA polymerase II subunit RPB2 (1020-1028)
  source 1..27: mol_type = other RNA
gtgctgtacaacggcttcaccgggcgc

SEQ ID NO: 30822 - RNA, 27 nt, synthetic construct
  misc_feature 1..27: note = Long-chain-fatty-acid-CoA ligase 4 (576-584)
  source 1..27: mol_type = other RNA
gtgcccaaccagaagcgcctgaccctc

SEQ ID NO: 30823 - RNA, 27 nt, synthetic construct
  misc_feature 1..27: note = Protein kintoun (155-163)
  source 1..27: mol_type = other RNA
gtgccccgcatccagccgcagagcctg

SEQ ID NO: 30824 - RNA, 27 nt, synthetic construct
  misc_feature 1..27: note = Leucine-rich repeat-containing protein 20 (35-43)
  source 1..27: mol_type = other RNA
gtgagcttccccatcggcatctacaag

SEQ ID NO: 30825 - RNA, 24 nt, synthetic construct
  misc_feature 1..24: note = Vimentin (31-38)
  source 1..24: mol_type = other RNA
gtgaccaccagcacgcgcacctac

SEQ ID NO: 30826 - RNA, 27 nt, synthetic construct
  misc_feature 1..27: note = Nucleolar and spindle-associated protein 1 (308-316)
  source 1..27: mol_type = other RNA
gtgaccgtcagcggcgggacccccaag

SEQ ID NO: 30827 - RNA, 30 nt, synthetic construct
  misc_feature 1..30: note = Septin-7 (317-326)
  source 1..30: mol_type = other RNA
gtgacctacaacggcgtcgacaacaacaag

SEQ ID NO: 30828 - RNA, 27 nt, synthetic construct
  misc_feature 1..27: note = Histone deacetylase 9 (78-86)
  source 1..27: mol_type = other RNA
gtggtcgaccccgtggtgcgcgagaag

SEQ ID NO: 30829 - RNA, 27 nt, synthetic construct
  misc_feature 1..27: note = Probable 18S rRNA (guanine-N(7))-methyltransferase (188-196)
  source 1..27: mol_type = other RNA
gtggtcgactaccccaacagcgccaag

SEQ ID NO: 30830 - RNA, 27 nt, synthetic construct
  misc_feature 1..27: note = Heterogeneous nuclear ribonucleoproteins A2/B1 (39-47)
  source 1..27: mol_type = other RNA
gtggtcatgcgcgaccccgccagcaag

SEQ ID NO: 30831 - RNA, 27 nt, synthetic construct
  misc_feature 1..27: note = Heterogeneous nuclear ribonucleoprotein A3 (65-73)
  source 1..27: mol_type = other RNA
gtggtcatgcgcgacccccagaccaag

SEQ ID NO: 30832 - RNA, 30 nt, synthetic construct
  misc_feature 1..30: note = Transmembrane protein 263 (101-110)
  source 1..30: mol_type = other RNA
gtggtcaacaaggtgcccctgaccggcaag

SEQ ID NO: 30833 - RNA, 33 nt, synthetic construct
  misc_feature 1..33: note = X-ray repair cross-complementing protein 5 (574-584)
  source 1..33: mol_type = other RNA
gtggtccaggacggcatcaccctgatcaccaag

SEQ ID NO: 30834 - RNA, 27 nt, synthetic construct
  misc_feature 1..27: note = 60S ribosomal protein L22-like 1 (65-73)
  source 1..27: mol_type = other RNA
gtggtcagcgagaagcagttctccaag

SEQ ID NO: 30835 - RNA, 27 nt, synthetic construct
  misc_feature 1..27: note = Glutathione S-transferase P (6-14)
  source 1..27: mol_type = other RNA
gtggtctacttccccgtgcgcggccgg

SEQ ID NO: 30836 - RNA, 27 nt, synthetic construct
  misc_feature 1..27: note = Adenylosuccinate lyase (363-371)
  source 1..27: mol_type = other RNA
gtggtctaccccaaggtgatcgagcgc

SEQ ID NO: 30837 - RNA, 27 nt, synthetic construct
  misc_feature 1..27: note = ER membrane protein complex subunit 1 (790-798)
  source 1..27: mol_type = other RNA
gtggtctaccagtactggaacaccaag

SEQ ID NO: 30838 - RNA, 33 nt, synthetic construct
  misc_feature 1..33: note = NmrA-like family domain-containing protein 1 (109-119)
  source 1..33: mol_type = other RNA
gtggtctacagcggcctggagaacatcaagaag

SEQ ID NO: 30839 - RNA, 27 nt, synthetic construct
  misc_feature 1..27: note = JmjC domain-containing protein 8 (81-89)
  source 1..27: mol_type = other RNA
tacgccttcgtgcgccccgtcatcctg

SEQ ID NO: 30840 - RNA, 27 nt, synthetic construct
  misc_feature 1..27: note = CCR4-NOT transcription complex subunit 1 (93-101)
  source 1..27: mol_type = other RNA
tacgccatcgacaaccccctgcactac

SEQ ID NO: 30841 - RNA, 27 nt, synthetic construct
  misc_feature 1..27: note = WD repeat-containing protein 82 (63-71)
  source 1..27: mol_type = other RNA
tacgccaacagcaaggccgtgaccctg

SEQ ID NO: 30842 - RNA, 27 nt, synthetic construct
  misc_feature 1..27: note = Splicing factor 3B subunit 1 (761-769)
  source 1..27: mol_type = other RNA
tacgccaactactacacccgcgaggtg

SEQ ID NO: 30843 - RNA, 27 nt, synthetic construct
  misc_feature 1..27: note = WD repeat-containing protein 3 (84-92)
  source 1..27: mol_type = other RNA
tacgaggacggcagcatccgcatcttc

SEQ ID NO: 30844 - RNA, 30 nt, synthetic construct
  misc_feature 1..30: note = NADH dehydrogenase (ubiquinone) 1 beta subcomplex subunit 11, mitochondrial (67-76)
  source 1..30: mol_type = other RNA
tacgagaagaaccccgacagccacggctac

SEQ ID NO: 30845 - RNA, 27 nt, synthetic construct
  misc_feature 1..27: note = Lon protease homolog 2, peroxisomal (599-607)
  source 1..27: mol_type = other RNA
tacgagatggaggtgagccagcgcctg

SEQ ID NO: 30846 - RNA, 27 nt, synthetic construct
  misc_feature 1..27: note = AN1-type zinc finger protein 5 (21-29)
  source 1..27: mol_type = other RNA
tacggcaacccccgcaccaacgggatg

SEQ ID NO: 30847 - RNA, 27 nt, synthetic construct
  misc_feature 1..27: note = Cullin-3 (34-42)
  source 1..27: mol_type = other RNA
taccgcaacgcctacaccatggtgctg

SEQ ID NO: 30848 - RNA, 27 nt, synthetic construct
  misc_feature 1..27: note = MICOS complex subunit MIC27 (44-52)
  source 1..27: mol_type = other RNA
tacaccgcccccccgctgcagagcaag

SEQ ID NO: 30849 - RNA, 27 nt, synthetic construct
  misc_feature 1..27: note = ATP-dependent RNA helicase DDX3X (200-208)
  source 1..27: mol_type = other RNA
tacacccgccccaccccggtgcagaag

SEQ ID NO: 30850 - RNA, 27 nt, synthetic construct
  misc_feature 1..27: note = Vimentin (30-38)
  source 1..27: mol_type = other RNA
tacgtgaccaccagcacgcgcacctac

SEQ ID NO: 30851 - RNA, 27 nt, synthetic construct
  misc_feature 1..27: note = Serine/threonine-protein kinase mTOR (853-861)
  source 1..27: mol_type = other RNA
tacgtggtcgagccctaccgcaagtac

SEQ ID NO: 30852 - RNA, 27 nt, synthetic construct
  misc_feature 1..27: note = Enhancer of filamentation 1 (164-172)
  source 1..27: mol_type = other RNA
tacgtgtacgagtaccccagccgctac

SEQ ID NO: 30853 - RNA, 30 nt, synthetic construct
  misc_feature 1..30: note = Nucleolar pre-ribosomal-associated protein 1 (1468-1477)
  source 1..30: mol_type = other RNA
tactacagccacctggagggcgcccgcttc

SEQ ID NO: 30854 - RNA, 27 nt, synthetic construct
  misc_feature 1..27: note = Selenoprotein H (10-18)
  source 1..27: mol_type = other RNA
gccgaggccgcggtggtcgccgtggcc

SEQ ID NO: 30855 - RNA, 27 nt, synthetic construct
  misc_feature 1..27: note = Transcription factor BTF3 (128-136)
  source 1..27: mol_type = other RNA
gccgaggccctgcccaagcagagcgtg

SEQ ID NO: 30856 - RNA, 27 nt, synthetic construct
  misc_feature 1..27: note = E3 ubiquitin-protein ligase HUWE1 (1156-1164)
  source 1..27: mol_type = other RNA
gccgaggacaaggacacccccgccctg

SEQ ID NO: 30857 - RNA, 33 nt, synthetic construct
  misc_feature 1..33: note = Centromere protein H (228-238)
  source 1..33: mol_type = other RNA
gccgaggaccccgccctgaaggagatcgtgctc

SEQ ID NO: 30858 - RNA, 33 nt, synthetic construct
  misc_feature 1..33: note = Probable ATP-dependent RNA helicase DDX56 (121-131)
  source 1..33: mol_type = other RNA
gccgaggacagcgtgtcccagcgcgccgtcctg

SEQ ID NO: 30859 - RNA, 27 nt, synthetic construct
  misc_feature 1..27: note = Transforming acidic coiled-coil-containing protein 3 (469-477)
  source 1..27: mol_type = other RNA
gccgaggacacccccgtggtccagctg

SEQ ID NO: 30860 - RNA, 30 nt, synthetic construct
  misc_feature 1..30: note = Beta-hexosaminidase subunit alpha (266-275)
  source 1..30: mol_type = other RNA
gccgagttcgacacccccggccacaccctg

SEQ ID NO: 30861 - RNA, 30 nt, synthetic construct
  misc_feature 1..30: note = 26S proteasome non-ATPase regulatory subunit 8 (113-122)
  source 1..30: mol_type = other RNA
gccgagttccacaccgagctggagcgcctc

SEQ ID NO: 30862 - RNA, 27 nt, synthetic construct
  misc_feature 1..27: note = Zinc phosphodiesterase ELAC protein 2 (677-685)
  source 1..27: mol_type = other RNA
gccgagttcatcatgctgaaccacttc

SEQ ID NO: 30863 - RNA, 30 nt, synthetic construct
  misc_feature 1..30: note = Calmodulin (11-20)
  source 1..30: mol_type = other RNA
gccgagttcaaggaggccttcagcctgttc

SEQ ID NO: 30864 - RNA, 30 nt, synthetic construct
  misc_feature 1..30: note = BRCA1-A complex subunit BRE (90-99)
  source 1..30: mol_type = other RNA
gccgagttcctgcccgacccgagcgccctc

SEQ ID NO: 30865 - RNA, 36 nt, synthetic construct
  misc_feature 1..36: note = DNA dC-dU-editing enzyme APOBEC-3B (105-116)
  source 1..36: mol_type = other RNA
gccgagttcctgagcgagcaccccaacgtgaccctc

SEQ ID NO: 30866 - RNA, 27 nt, synthetic construct
  misc_feature 1..27: note = ATP-dependent RNA helicase DHX8 (979-987)
  source 1..27: mol_type = other RNA
gccgagttccccctggagccgatgctc

SEQ ID NO: 30867 - RNA, 27 nt, synthetic construct
  misc_feature 1..27: note = Cytochrome c oxidase subunit 6B1 (9-17)
  source 1..27: mol_type = other RNA
gccgagggcaccttccccgggaagatc

SEQ ID NO: 30868 - RNA, 27 nt, synthetic construct
  misc_feature 1..27: note = SRSF protein kinase 1 (114-122)
  source 1..27: mol_type = other RNA
gccgagcactacaccgagaccgccctg

SEQ ID NO: 30869 - RNA, 33 nt, synthetic construct
  misc_feature 1..33: note = DNA repair protein RAD50 (134-144)
  source 1..33: mol_type = other RNA
gccgagatcgaccgcgagatgatcagctccctg

SEQ ID NO: 30870 - RNA, 27 nt, synthetic construct
  misc_feature 1..27: note = Insulin-like growth factor 2 mRNA-binding protein 2 (201-209)
  source 1..27: mol_type = other RNA
gccgagatcgagatcatgaagaagctg

SEQ ID NO: 30871 - RNA, 36 nt, synthetic construct
  misc_feature 1..36: note = Sodium/potassium-transporting ATPase subunit alpha-1 (69-80)
  source 1..36: mol_type = other RNA
gccgagatcctggcccgcgacggccccaacgcgctc

SEQ ID NO: 30872 - RNA, 33 nt, synthetic construct
  misc_feature 1..33: note = Lamin-B1 (347-357)
  source 1..33: mol_type = other RNA
gccgagatccgcgaccagatgcagcagcagctg

SEQ ID NO: 30873 - RNA, 27 nt, synthetic construct
  misc_feature 1..27: note = Transcription factor 25 (361-369)
  source 1..27: mol_type = other RNA
gccgagatcagccagcccccggccctg

SEQ ID NO: 30874 - RNA, 36 nt, synthetic construct
  misc_feature 1..36: note = BAG64702.1 (100-111)
  source 1..36: mol_type = other RNA
gccgagatcaccgacaagctgggcctccacagcctg

SEQ ID NO: 30875 - RNA, 30 nt, synthetic construct
  misc_feature 1..30: note = Importin subunit alpha-1 (451-460)
  source 1..30: mol_type = other RNA
gccgagaagctgggcgagaccgagaagctc

SEQ ID NO: 30876 - RNA, 27 nt, synthetic construct
  misc_feature 1..27: note = T-complex protein 1 subunit epsilon (350-358)
  source 1..27: mol_type = other RNA
gccgagaagctgggcttcgccgggctc

SEQ ID NO: 30877 - RNA, 30 nt, synthetic construct
  misc_feature 1..30: note = Coiled-coil domain-containing protein 85B (121-130)
  source 1..30: mol_type = other RNA
gccgagctggagggccgccaggaggagctc

SEQ ID NO: 30878 - RNA, 30 nt, synthetic construct
  misc_feature 1..30: note = Centrosomal protein of 55 kDa (140-149)
  source 1..30: mol_type = other RNA
gccgagctggagagcaagaccaacaccctc

SEQ ID NO: 30879 - RNA, 36 nt, synthetic construct
  misc_feature 1..36: note = Tropomodulin-3 (286-297)
  source 1..36: mol_type = other RNA
gccgagctgaagatcgacaaccagcgccagcagctc

SEQ ID NO: 30880 - RNA, 27 nt, synthetic construct
  misc_feature 1..27: note = COMM domain-containing protein 4 (192-200)
  source 1..27: mol_type = other RNA
gccgagctgaagcaggcccagaccctc

SEQ ID NO: 30881 - RNA, 27 nt, synthetic construct
  misc_feature 1..27: note = trabeculin-alpha (1770-1778)
  source 1..27: mol_type = other RNA
gccgagctgaagcaggtgcagaccctc

SEQ ID NO: 30882 - RNA, 30 nt, synthetic construct
  misc_feature 1..30: note = Microtubule-associated protein RP/EB family member 1 (194-203)
  source 1..30: mol_type = other RNA
gccgagctgatgcagcaggtgaacgtcctc

SEQ ID NO: 30883 - RNA, 33 nt, synthetic construct
  misc_feature 1..33: note = 14-3-3 protein theta (34-44)
  source 1..33: mol_type = other RNA
gccgagctgagcaacgaggagcgcaacctcctg

SEQ ID NO: 30884 - RNA, 33 nt, synthetic construct
  misc_feature 1..33: note = Sodium/potassium-transporting ATPase subunit alpha-1 (677-687)
  source 1..33: mol_type = other RNA
gccgagaacggcttcctgcccatccacctcctg

SEQ ID NO: 30885 - RNA, 33 nt, synthetic construct
  misc_feature 1..33: note = Armadillo repeat-containing X-linked protein 3 (271-281)
  source 1..33: mol_type = other RNA
gccgagaaccccgccatgacccgcgagctgctc

SEQ ID NO: 30886 - RNA, 27 nt, synthetic construct
  misc_feature 1..27: note = Eukaryotic translation initiation factor 4 gamma 1 (1379-1387)
  source 1..27: mol_type = other RNA
gccgagcagaaggtggagtacaccctg

SEQ ID NO: 30887 - RNA, 27 nt, synthetic construct
  misc_feature 1..27: note = Double-strand-break repair protein rad21 homolog (576-584)
  source 1..27: mol_type = other RNA
gccgagagcatctccctgctcgagctg

SEQ ID NO: 30888 - RNA, 27 nt, synthetic construct
  misc_feature 1..27: note = Uncharacterized protein C6orf226 (67-75)
  source 1..27: mol_type = other RNA
gccgagagcctgcccccgcccaccctc

SEQ ID NO: 30889 - RNA, 33 nt, synthetic construct
  misc_feature 1..33: note = Endoplasmin (528-538)
  source 1..33: mol_type = other RNA
gccgagagctcccccttcgtggagcgcctgctc

SEQ ID NO: 30890 - RNA, 27 nt, synthetic construct
  misc_feature 1..27: note = Magnesium transporter protein 1 (299-307)
  source 1..27: mol_type = other RNA
gccgagacccacatcgtgctgctcttc

SEQ ID NO: 30891 - RNA, 27 nt, synthetic construct
  misc_feature 1..27: note = DNA-directed RNA polymerase I subunit RPA1 (1590-1598)
  source 1..27: mol_type = other RNA
gccgaggtgctggacctccgccggctg

SEQ ID NO: 30892 - RNA, 33 nt, synthetic construct
  misc_feature 1..33: note = Syntaxin-binding protein 1 (297-307)
  source 1..33: mol_type = other RNA
gccgaggtgagccaggaggtcacccgctccctg

SEQ ID NO: 30893 - RNA, 30 nt, synthetic construct
  misc_feature 1..30: note = Cytochrome b-c1 complex subunit 9 (42-51)
  source 1..30: mol_type = other RNA
gccatctacgaccacatcaacgagggcgtg

SEQ ID NO: 30894 - RNA, 30 nt, synthetic construct
  misc_feature 1..30: note = Rab GDP dissociation inhibitor beta (137-146)
  source 1..30: mol_type = other RNA
gcccgctacggcaagagcccctacctgtac

SEQ ID NO: 30895 - RNA, 27 nt, synthetic construct
  misc_feature 1..27: note = Replication factor C subunit 4 (343-351)
  source 1..27: mol_type = other RNA
gacgagcacctgcagctcatcagcctg

SEQ ID NO: 30896 - RNA, 33 nt, synthetic construct
  misc_feature 1..33: note = Small nuclear ribonucleoprotein Sm D2 (22-32)
  source 1..33: mol_type = other RNA
gaggagttcaacaccggccccctgagcgtgctc

SEQ ID NO: 30897 - RNA, 27 nt, synthetic construct
  misc_feature 1..27: note = Transmembrane emp24 domain-containing protein 10 (136-144)
  source 1..27: mol_type = other RNA
gaggagatcgccaaggtggagaagctg

SEQ ID NO: 30898 - RNA, 27 nt, synthetic construct
  misc_feature 1..27: note = Protein RRP5 homolog (820-828)
  source 1..27: mol_type = other RNA
gaggagctgcagggcgtgcgcagcctc

SEQ ID NO: 30899 - RNA, 33 nt, synthetic construct
  misc_feature 1..33: note = T-complex protein 1 subunit delta (363-373)
  source 1..33: mol_type = other RNA
gaggaggtgaacctgaacggcagcgggaagctc

SEQ ID NO: 30900 - RNA, 27 nt, synthetic construct
  misc_feature 1..27: note = Nucleophosmin (92-100)
  source 1..27: mol_type = other RNA
ttcgagatcacccccccggtggtcctg

SEQ ID NO: 30901 - RNA, 27 nt, synthetic construct
  misc_feature 1..27: note = Actin, cytoplasmic 1 (223-231)
  source 1..27: mol_type = other RNA
ttcgagcaggagatggccaccgccgcg

SEQ ID NO: 30902 - RNA, 27 nt, synthetic construct
  misc_feature 1..27: note = Serine/arginine repetitive matrix protein 2 (873-881)
  source 1..27: mol_type = other RNA
ttcgagagctcccccgacccggagctg

SEQ ID NO: 30903 - RNA, 30 nt, synthetic construct
  misc_feature 1..30: note = Mitochondrial Rho GTPase 2 (11-20)
  source 1..30: mol_type = other RNA
ggcgaggcccaggtggggaagaccagcctg

SEQ ID NO: 30904 - RNA, 36 nt, synthetic construct
  misc_feature 1..36: note = Heterogeneous nuclear ribonucleoprotein C-like 1 (69-80)
  source 1..36: mol_type = other RNA
ggcgaggacgggcgcatgatcgccggccaggtgctg

SEQ ID NO: 30905 - RNA, 30 nt, synthetic construct
  misc_feature 1..30: note = Cytoplasmic dynein 1 heavy chain 1 (1073-1082)
  source 1..30: mol_type = other RNA
ggcgaggacctgaacaagtggcaggccctc

SEQ ID NO: 30906 - RNA, 30 nt, synthetic construct
  misc_feature 1..30: note = HDAC2 protein (482-491)
  source 1..30: mol_type = other RNA
ggcgaggaccccgacaagcgcatcagcatc

SEQ ID NO: 30907 - RNA, 27 nt, synthetic construct
  misc_feature 1..27: note = Histone-binding protein RBBP7 (146-154)
  source 1..27: mol_type = other RNA
ggcgagttcgggggcttcgggagcgtg

SEQ ID NO: 30908 - RNA, 33 nt, synthetic construct
  misc_feature 1..33: note = PC4 and SFRS1-interacting protein (251-261)
  source 1..33: mol_type = other RNA
ggcgagggggacagcgtgatcacccaggtcctg

SEQ ID NO: 30909 - RNA, 27 nt, synthetic construct
  misc_feature 1..27: note = Nardilysin-arginine dibasic convertase), isoform CRA_d (823-831)
  source 1..27: mol_type = other RNA
ggcgagcacgggctgatcatccgcgtg

SEQ ID NO: 30910 - RNA, 33 nt, synthetic construct
  misc_feature 1..33: note = Elongation factor 2 (42-52)
  source 1..33: mol_type = other RNA
ggcgagcacatcatcgccggggccggcgagctg

SEQ ID NO: 30911 - RNA, 27 nt, synthetic construct
  misc_feature 1..27: note = Ragulator complex protein LAMTOR4 (44-52)
  source 1..27: mol_type = other RNA
ggcgagcacaccctgctcgtgaccgtc

SEQ ID NO: 30912 - RNA, 33 nt, synthetic construct
  misc_feature 1..33: note = 26S protease regulatory subunit 10B (338-348)
  source 1..33: mol_type = other RNA
ggcgagatcgactacgaggccatcgtgaagctg

SEQ ID NO: 30913 - RNA, 33 nt, synthetic construct
  misc_feature 1..33: note = Golgin subfamily B member 1 (2640-2650)
  source 1..33: mol_type = other RNA
ggcgagatcgaggacaagctgaagaaggagctc

SEQ ID NO: 30914 - RNA, 33 nt, synthetic construct
  misc_feature 1..33: note = Coatomer subunit beta' (518-528)
  source 1..33: mol_type = other RNA
ggcgagatccaggagatcgtgaagaccgggctg

SEQ ID NO: 30915 - RNA, 27 nt, synthetic construct
  misc_feature 1..27: note = Prolyl 4-hydroxylase subunit alpha-1 (197-205)
  source 1..27: mol_type = other RNA
ggcgagatcagcaccatcgacaaggtg

SEQ ID NO: 30916 - RNA, 27 nt, synthetic construct
  misc_feature 1..27: note = Filamin-A (1802-1810)
  source 1..27: mol_type = other RNA
ggcgagatcaccggggaggtgcgcatg

SEQ ID NO: 30917 - RNA, 27 nt, synthetic construct
  misc_feature 1..27: note = Coatomer subunit beta' (549-557)
  source 1..27: mol_type = other RNA
ggcgagatcgtgaccatcgcccacctg

SEQ ID NO: 30918 - RNA, 30 nt, synthetic construct
  misc_feature 1..30: note = Proliferating cell nuclear antigen (173-182)
  source 1..30: mol_type = other RNA
ggcgagctggggaacggcaacatcaagctc

SEQ ID NO: 30919 - RNA, 27 nt, synthetic construct
  misc_feature 1..27: note = E3 SUMO-protein ligase PIAS3 (130-138)
  source 1..27: mol_type = other RNA
ggcgagctgatccgccccaccaccctc

SEQ ID NO: 30920 - RNA, 27 nt, synthetic construct
  misc_feature 1..27: note = Prohibitin (137-145)
  source 1..27: mol_type = other RNA
ggcgagctgatcacccagcgcgagctc

SEQ ID NO: 30921 - RNA, 30 nt, synthetic construct
  misc_feature 1..30: note = 40S ribosomal protein S21 (63-72)
  source 1..30: mol_type = other RNA
ggcgagagcgacgactccatcctgcgcctc

SEQ ID NO: 30922 - RNA, 33 nt, synthetic construct
  misc_feature 1..33: note = Ubiquitin carboxyl-terminal hydrolase 22 (352-362)
  source 1..33: mol_type = other RNA
ggcgagagccacgtgtccgggaccaccacgctg

SEQ ID NO: 30923 - RNA, 33 nt, synthetic construct
  misc_feature 1..33: note = Maspardin (165-175)
  source 1..33: mol_type = other RNA
ggccagagcgagctggcctcccgcctcaccctg

SEQ ID NO: 30924 - RNA, 30 nt, synthetic construct
  misc_feature 1..30: note = RNA-binding protein EWS (382-391)
  source 1..30: mol_type = other RNA
cacgaggcccagcacggcgtgaccagcctg

SEQ ID NO: 30925 - RNA, 27 nt, synthetic construct
  misc_feature 1..27: note = Kinesin-associated protein 3 (357-365)
  source 1..27: mol_type = other RNA
cacgaggacctgctcaacatcaccctg

SEQ ID NO: 30926 - RNA, 27 nt, synthetic construct
  misc_feature 1..27: note = Chromodomain-helicase-DNA-binding protein 6 (1642-1650)
  source 1..27: mol_type = other RNA
cacgaggaccccggccaggccaccctg

SEQ ID NO: 30927 - RNA, 27 nt, synthetic construct
  misc_feature 1..27: note = V-type proton ATPase subunit D (113-121)
  source 1..27: mol_type = other RNA
cacgagggcaccgacagctacgagctg

SEQ ID NO: 30928 - RNA, 30 nt, synthetic construct
  misc_feature 1..30: note = Taperin (362-371)
  source 1..30: mol_type = other RNA
cacgagatcgaggtgatcggcgggtacctg

SEQ ID NO: 30929 - RNA, 27 nt, synthetic construct
  misc_feature 1..27: note = Transcription elongation factor SPT6 (746-754)
  source 1..27: mol_type = other RNA
cacgagctggaccagggccagcagctc

SEQ ID NO: 30930 - RNA, 33 nt, synthetic construct
  misc_feature 1..33: note = Coronin-1C (313-323)
  source 1..33: mol_type = other RNA
cacgagatggacaccagcaacggcgtgctgctc

SEQ ID NO: 30931 - RNA, 27 nt, synthetic construct
  misc_feature 1..27: note = Importin subunit alpha-4 (468-476)
  source 1..27: mol_type = other RNA
cacgagaacgaggacatctacaagctg

SEQ ID NO: 30932 - RNA, 30 nt, synthetic construct
  misc_feature 1..30: note = Pre-mRNA-processing factor 19 (305-314)
  source 1..30: mol_type = other RNA
cacgagagcgccgtgaccggcctgtccctc

SEQ ID NO: 30933 - RNA, 27 nt, synthetic construct
  misc_feature 1..27: note = Single-stranded DNA-binding protein, mitochondrial (16-24)
  source 1..27: mol_type = other RNA
cacgagagcgagaccaccacgtccctg

SEQ ID NO: 30934 - RNA, 27 nt, synthetic construct
  misc_feature 1..27: note = Vacuolar protein sorting-associated protein 33A (58-66)
  source 1..27: mol_type = other RNA
cacgaggtggagaagatgttcaccctg

SEQ ID NO: 30935 - RNA, 27 nt, synthetic construct
  misc_feature 1..27: note = STAGA complex 65 subunit gamma (219-227)
  source 1..27: mol_type = other RNA
cacgaggtgggcatcgggagcgtcctg

SEQ ID NO: 30936 - RNA, 27 nt, synthetic construct
  misc_feature 1..27: note = DNA replication licensing factor MCM4 (588-596)
  source 1..27: mol_type = other RNA
cacgaggtgatggagcagcagaccctg

SEQ ID NO: 30937 - RNA, 27 nt, synthetic construct
  misc_feature 1..27: note = F-box only protein 38 (323-331)
  source 1..27: mol_type = other RNA
cacgaggtgcgcatccagcccagcctg

SEQ ID NO: 30938 - RNA, 30 nt, synthetic construct
  misc_feature 1..30: note = 3-hydroxy-3-methylglutaryl-coenzyme A reductase (619-628)
  source 1..30: mol_type = other RNA
cacgagtacttccccgagatgcagatcctg

SEQ ID NO: 30939 - RNA, 27 nt, synthetic construct
  misc_feature 1..27: note = Protein C-ets-1 (189-197)
  source 1..27: mol_type = other RNA
caccccatcagctccgaggagctgctc

SEQ ID NO: 30940 - RNA, 33 nt, synthetic construct
  misc_feature 1..33: note = DNA repair endonuclease XPF (748-758)
  source 1..33: mol_type = other RNA
atcgagttcgaccccagcaagccgttctccctg

SEQ ID NO: 30941 - RNA, 27 nt, synthetic construct
  misc_feature 1..27: note = Proliferating cell nuclear antigen (197-205)
  source 1..27: mol_type = other RNA
atcgagatgaacgagcccgtgcagctg

SEQ ID NO: 30942 - RNA, 30 nt, synthetic construct
  misc_feature 1..30: note = Nuclear poreoprotein p62 (366-375)
  source 1..30: mol_type = other RNA
atcgagaacggcgagaagatcaccagcctg

SEQ ID NO: 30943 - RNA, 30 nt, synthetic construct
  misc_feature 1..30: note = Melanoma-associated antigen F1 (112-121)
  source 1..30: mol_type = other RNA
atcctgttccccgacatcatcgcccgcgcc

SEQ ID NO: 30944 - RNA, 30 nt, synthetic construct
  misc_feature 1..30: note = Clathrin light chain A (227-236)
  source 1..30: mol_type = other RNA
atcagcctgaagcaggcccccctcgtgcac

SEQ ID NO: 30945 - RNA, 27 nt, synthetic construct
  misc_feature 1..27: note = NAD(P)H dehydrogenase (quinone) 1 (143-151)
  source 1..27: mol_type = other RNA
atctgggacgagacccccctgtacttc

SEQ ID NO: 30946 - RNA, 24 nt, synthetic construct
  misc_feature 1..24: note = Guanine nucleotide-binding protein subunit beta-2-like 1 (106-113)
  source 1..24: mol_type = other RNA
aaggacgtgctgagcgtcgccttc

SEQ ID NO: 30947 - RNA, 33 nt, synthetic construct
  misc_feature 1..33: note = T-complex protein 1 subunit theta (367-377)
  source 1..33: mol_type = other RNA
aaggaggacggcgccatcagcaccatcgtgctg

SEQ ID NO: 30948 - RNA, 27 nt, synthetic construct
  misc_feature 1..27: note = Ubiquitin carboxyl-terminal hydrolase 48 (790-798)
  source 1..27: mol_type = other RNA
aaggaggacagcaagctgatcgccctc

SEQ ID NO: 30949 - RNA, 27 nt, synthetic construct
  misc_feature 1..27: note = Myosin-9 (1084-1092)
  source 1..27: mol_type = other RNA
aaggaggaggagctgcaggccgccctc

SEQ ID NO: 30950 - RNA, 30 nt, synthetic construct
  misc_feature 1..30: note = Plasminogen activator inhibitor 1 RNA-binding protein (8-17)
  source 1..30: mol_type = other RNA
aaggaggagacccagcccccggtggccctg

SEQ ID NO: 30951 - RNA, 30 nt, synthetic construct
  misc_feature 1..30: note = Chitinase domain-containing protein 1 (269-278)
  source 1..30: mol_type = other RNA
aaggagttcgagcagctggcccccgtgctc

SEQ ID NO: 30952 - RNA, 30 nt, synthetic construct
  misc_feature 1..30: note = ATP-dependent RNA helicase DDX24 (116-125)
  source 1..30: mol_type = other RNA
aaggagttcgaggtgaaggaccccgagctg

SEQ ID NO: 30953 - RNA, 33 nt, synthetic construct
  misc_feature 1..33: note = E3 ubiquitin-protein ligase listerin (1308-1318)
  source 1..33: mol_type = other RNA
aaggagttcttcagccagggcatccactccctg

SEQ ID NO: 30954 - RNA, 30 nt, synthetic construct
  misc_feature 1..30: note = Inhibitor of growth protein 4 (52-61)
  source 1..30: mol_type = other RNA
aaggagttcggcgacgacaaggtgcagctg

SEQ ID NO: 30955 - RNA, 30 nt, synthetic construct
  misc_feature 1..30: note = Eukaryotic translation initiation factor 4 gamma 1 (1365-1374)
  source 1..30: mol_type = other RNA
aaggagttcctgcccgagggccaggacatc

SEQ ID NO: 30956 - RNA, 33 nt, synthetic construct
  misc_feature 1..33: note = Serine-tRNA ligase, cytoplasmic (457-467)
  source 1..33: mol_type = other RNA
aaggagttcatgcccccgggcctgcaggagctc

SEQ ID NO: 30957 - RNA, 36 nt, synthetic construct
  misc_feature 1..36: note = Heterogeneous nuclear ribonucleoprotein Q (66-77)
  source 1..36: mol_type = other RNA
aaggagttcaacgaggacggcgccctggccgtgctc

SEQ ID NO: 30958 - RNA, 27 nt, synthetic construct
  misc_feature 1..27: note = Protein zer-1 homolog (579-587)
  source 1..27: mol_type = other RNA
aaggagttccccgagaagcaggagctg

SEQ ID NO: 30959 - RNA, 27 nt, synthetic construct
  misc_feature 1..27: note = Regulator of G-protein signaling 10 (61-69)
  source 1..27: mol_type = other RNA
aaggagttcagcgaggagaacgtgctg

SEQ ID NO: 30960 - RNA, 36 nt, synthetic construct
  misc_feature 1..36: note = Apolipoprotein L2 (196-207)
  source 1..36: mol_type = other RNA
aaggagttcgtgggcgggaacacccccaacgtcctg

SEQ ID NO: 30961 - RNA, 27 nt, synthetic construct
  misc_feature 1..27: note = Cyclin-dependent kinase 9 (56-64)
  source 1..27: mol_type = other RNA
aaggagggcttccccatcaccgccctg

SEQ ID NO: 30962 - RNA, 33 nt, synthetic construct
  misc_feature 1..33: note = Vacuolar protein sorting-associated protein 33A (56-66)
  source 1..33: mol_type = other RNA
aaggagcacgaggtggagaagatgttcaccctg

SEQ ID NO: 30963 - RNA, 36 nt, synthetic construct
  misc_feature 1..36: note = Serine/Arginine-related protein 53 (223-234)
  source 1..36: mol_type = other RNA
aaggagatcgaccccaccagcatcccgaccgccatc

SEQ ID NO: 30964 - RNA, 27 nt, synthetic construct
  misc_feature 1..27: note = Ran GTPase-activating protein 1 (43-51)
  source 1..27: mol_type = other RNA
aaggagatcgaggacttcgacagcctg

SEQ ID NO: 30965 - RNA, 30 nt, synthetic construct
  misc_feature 1..30: note = RNA cytidine acetyltransferase (729-738)
  source 1..30: mol_type = other RNA
aaggagatcgagctgcccagcggccagctc

SEQ ID NO: 30966 - RNA, 27 nt, synthetic construct
  misc_feature 1..27: note = Transcription initiation factor IIB (272-280)
  source 1..27: mol_type = other RNA
aaggagatcggcgacatcgccggggtg

SEQ ID NO: 30967 - RNA, 27 nt, synthetic construct
  misc_feature 1..27: note = Ras suppressor protein 1 (177-185)
  source 1..27: mol_type = other RNA
aaggagatcggcgagctgacccagctc

SEQ ID NO: 30968 - RNA, 30 nt, synthetic construct
  misc_feature 1..30: note = V-type proton ATPase 116 kDa subunit a isoform 1 (109-118)
  source 1..30: mol_type = other RNA
aaggagatcaacaccaaccaggaggccctg

SEQ ID NO: 30969 - RNA, 27 nt, synthetic construct
  misc_feature 1..27: note = Scavenger receptor class B member 1 (57-65)
  source 1..27: mol_type = other RNA
aaggagatccccatcccgttctacctg

SEQ ID NO: 30970 - RNA, 30 nt, synthetic construct
  misc_feature 1..30: note = Centromere protein F (1675-1684)
  source 1..30: mol_type = other RNA
aaggagatccaggagctggagcagctcctg

SEQ ID NO: 30971 - RNA, 30 nt, synthetic construct
  misc_feature 1..30: note = Spatacsin (1706-1715)
  source 1..30: mol_type = other RNA
aaggagatcacccaggagatgcagaccctg

SEQ ID NO: 30972 - RNA, 36 nt, synthetic construct
  misc_feature 1..36: note = Importin-11 (778-789)
  source 1..36: mol_type = other RNA
aaggagatcaccaccgagggccaggtgcaggtcctg

SEQ ID NO: 30973 - RNA, 30 nt, synthetic construct
  misc_feature 1..30: note = Eukaryotic translation initiation factor 3 subunit E (29-38)
  source 1..30: mol_type = other RNA
aaggagatctacaacgagaaggagctgctc

SEQ ID NO: 30974 - RNA, 30 nt, synthetic construct
  misc_feature 1..30: note = Double-stranded RNA-binding protein Staufen homolog 2 (288-297)
  source 1..30: mol_type = other RNA
aaggagaaggagcccgactacgtgctgctc

SEQ ID NO: 30975 - RNA, 30 nt, synthetic construct
  misc_feature 1..30: note = Double-stranded RNA-binding protein Staufen homolog 1 (258-267)
  source 1..30: mol_type = other RNA
aaggagaaggagcccgagtacaccctgctc

SEQ ID NO: 30976 - RNA, 27 nt, synthetic construct
  misc_feature 1..27: note = Protein transport protein Sec16A (1490-1498)
  source 1..27: mol_type = other RNA
aaggagaagcccgaggaggagagcctg

SEQ ID NO: 30977 - RNA, 30 nt, synthetic construct
  misc_feature 1..30: note = Heat shock protein HSP 90-alpha A2 (280-289)
  source 1..30: mol_type = other RNA
aaggagaagtacatcgaccaggaggagctg

SEQ ID NO: 30978 - RNA, 30 nt, synthetic construct
  misc_feature 1..30: note = Alpha-2-macroglobulin receptor-associated protein (272-281)
  source 1..30: mol_type = other RNA
aaggagctggaggccttccgcgaggagctc

SEQ ID NO: 30979 - RNA, 30 nt, synthetic construct
  misc_feature 1..30: note = Ribosome-binding protein 1 (235-244)
  source 1..30: mol_type = other RNA
aaggagctggagagccaggtgtccggcctc

SEQ ID NO: 30980 - RNA, 33 nt, synthetic construct
  misc_feature 1..33: note = Probable ATP-dependent RNA helicase DDX56 (208-218)
  source 1..33: mol_type = other RNA
aaggagctgatcctccacaaccccgtgaccctg

SEQ ID NO: 30981 - RNA, 30 nt, synthetic construct
  misc_feature 1..30: note = CDK5 regulatory subunit-associated protein 2 (665-674)
  source 1..30: mol_type = other RNA
aaggagctgtacaccgacaaccagcacctc

SEQ ID NO: 30982 - RNA, 27 nt, synthetic construct
  misc_feature 1..27: note = Aurora kinase B (57-65)
  source 1..27: mol_type = other RNA
aaggagcccgtgaccccgagcgccctg

SEQ ID NO: 30983 - RNA, 27 nt, synthetic construct
  misc_feature 1..27: note = CDK5 regulatory subunit-associated protein 2 (559-567)
  source 1..27: mol_type = other RNA
aaggagcaggacatctacacccacctg

SEQ ID NO: 30984 - RNA, 27 nt, synthetic construct
  misc_feature 1..27: note = Plectin (2047-2055)
  source 1..27: mol_type = other RNA
aaggagcaggagctgcagcagaccctc

SEQ ID NO: 30985 - RNA, 30 nt, synthetic construct
  misc_feature 1..30: note = Nucleoprotein TPR (995-1004)
  source 1..30: mol_type = other RNA
aaggagagcgccgagttccagacccagctg

SEQ ID NO: 30986 - RNA, 30 nt, synthetic construct
  misc_feature 1..30: note = Antizyme inhibitor 1 (203-212)
  source 1..30: mol_type = other RNA
aaggagagccaggtgtacgtccacgccctg

SEQ ID NO: 30987 - RNA, 27 nt, synthetic construct
  misc_feature 1..27: note = Gamma-interferon-inducible protein 16 (299-307)
  source 1..27: mol_type = other RNA
aaggagaccctgaagatcgacatcctc

SEQ ID NO: 30988 - RNA, 27 nt, synthetic construct
  misc_feature 1..27: note = Periodic tryptophan protein 1 homolog (19-27)
  source 1..27: mol_type = other RNA
aaggagacccccgacaaggtggagctg

SEQ ID NO: 30989 - RNA, 39 nt, synthetic construct
  misc_feature 1..39: note = Sequestosome-1 (324-336)
  source 1..39: mol_type = other RNA
aaggaggtggaccccagcaccggcgagctgcagtccctc

SEQ ID NO: 30990 - RNA, 27 nt, synthetic construct
  misc_feature 1..27: note = DNA replication licensing factor MCM6 (332-340)
  source 1..27: mol_type = other RNA
aaggagtgggagaaggtgttcgagatg

SEQ ID NO: 30991 - RNA, 33 nt, synthetic construct
  misc_feature 1..33: note = Lupus La protein (75-85)
  source 1..33: mol_type = other RNA
aaggagtggctggaggacaagggccaggtgctc

SEQ ID NO: 30992 - RNA, 27 nt, synthetic construct
  misc_feature 1..27: note = 40S ribosomal protein S2 (58-66)
  source 1..27: mol_type = other RNA
aaggagtggatgcccgtgaccaagctg

SEQ ID NO: 30993 - RNA, 27 nt, synthetic construct
  misc_feature 1..27: note = DNA-directed RNA polymerases I, II, and III subunit RPABC4 (50-58)
  source 1..27: mol_type = other RNA
aagcgcctggtggtcttcgacgcccgg

SEQ ID NO: 30994 - RNA, 33 nt, synthetic construct
  misc_feature 1..33: note = Dual specificity protein kinase CLK3 (601-611)
  source 1..33: mol_type = other RNA
ctggagttcgaccccgcccagcgcatcaccctc

SEQ ID NO: 30995 - RNA, 27 nt, synthetic construct
  misc_feature 1..27: note = Microtubule-associated protein RP/EB family member 2 (98-106)
  source 1..27: mol_type = other RNA
ctggagcacgagtacatccacaacttc

SEQ ID NO: 30996 - RNA, 27 nt, synthetic construct
  misc_feature 1..27: note = Mitochondrial import inner membrane translocase subunit TIM50 (324-332)
  source 1..27: mol_type = other RNA
ctggagcaggaggagcagcagcgcctc

SEQ ID NO: 30997 - RNA, 30 nt, synthetic construct
  misc_feature 1..30: note = Cyclin-dependent kinase 7 (5-14)
  source 1..30: mol_type = other RNA
ctggaggtgatcatcaaggacaacagcctc

SEQ ID NO: 30998 - RNA, 33 nt, synthetic construct
  misc_feature 1..33: note = POTE ankyrin domain family member F (794-804)
  source 1..33: mol_type = other RNA
ctgcgcgtggcccccgaggagcacccggtcctc

SEQ ID NO: 30999 - RNA, 30 nt, synthetic construct
  misc_feature 1..30: note = Eukaryotic translation initiation factor 4 gamma 1 (1290-1299)
  source 1..30: mol_type = other RNA
atggagatcgacatcccccacgtgtggctg

SEQ ID NO: 31000 - RNA, 27 nt, synthetic construct
  misc_feature 1..27: note = MICOS complex subunit MIC60 (474-482)
  source 1..27: mol_type = other RNA
atggagaacgagatgcgcacccagctg

SEQ ID NO: 31001 - RNA, 30 nt, synthetic construct
  misc_feature 1..30: note = Interleukin enhancer-binding factor 3 (561-570)
  source 1..30: mol_type = other RNA
atggaggtggaggtcgacggccagaagttc

SEQ ID NO: 31002 - RNA, 27 nt, synthetic construct
  misc_feature 1..27: note = Pre-mRNA-processing-splicing factor 8 (1868-1876)
  source 1..27: mol_type = other RNA
atgctggaccccctcgaggtgcacctg

SEQ ID NO: 31003 - RNA, 27 nt, synthetic construct
  misc_feature 1..27: note = Elongation factor 2 (673-681)
  source 1..27: mol_type = other RNA
aacgagatcaaggacagcgtggtcgcc

SEQ ID NO: 31004 - RNA, 24 nt, synthetic construct
  misc_feature 1..24: note = Heterogeneous nuclear ribonucleoprotein K (38-45)
  source 1..24: mol_type = other RNA
aacaccgacgagatggtggagctg

SEQ ID NO: 31005 - RNA, 30 nt, synthetic construct
  misc_feature 1..30: note = Poly(U)-binding-splicing factor PUF60 (318-327)
  source 1..30: mol_type = other RNA
caggaggccgtggccggcgcggccgtcctg

SEQ ID NO: 31006 - RNA, 33 nt, synthetic construct
  misc_feature 1..33: note = Tyrosine-protein kinase BAZ1B (891-901)
  source 1..33: mol_type = other RNA
caggagttcctgaccgacatgaagcaggtgttc

SEQ ID NO: 31007 - RNA, 27 nt, synthetic construct
  misc_feature 1..27: note = Pumilio homolog 3 (495-503)
  source 1..27: mol_type = other RNA
caggagcacgcccaggaggtggtcctg

SEQ ID NO: 31008 - RNA, 27 nt, synthetic construct
  misc_feature 1..27: note = Nuclear pore complex protein Nup205 (13-21)
  source 1..27: mol_type = other RNA
caggagatccccgagccgctgcagctc

SEQ ID NO: 31009 - RNA, 27 nt, synthetic construct
  misc_feature 1..27: note = Fc receptor-like A (166-174)
  source 1..27: mol_type = other RNA
caggagctgttccccgccccgatcctc

SEQ ID NO: 31010 - RNA, 33 nt, synthetic construct
  misc_feature 1..33: note = 40S ribosomal protein S9 (27-37)
  source 1..33: mol_type = other RNA
caggagctgaagctcatcggcgagtacgggctg

SEQ ID NO: 31011 - RNA, 36 nt, synthetic construct
  misc_feature 1..36: note = Heterogeneous nuclear ribonucleoprotein H (438-449)
  source 1..36: mol_type = other RNA
caggagaacagctccgacttccagagcaacatcgcc

SEQ ID NO: 31012 - RNA, 33 nt, synthetic construct
  misc_feature 1..33: note = T-complex protein 1 subunit theta (95-105)
  source 1..33: mol_type = other RNA
caggaggtgggcgacgggaccaacttcgtcctg

SEQ ID NO: 31013 - RNA, 24 nt, synthetic construct
  misc_feature 1..24: note = Coatomer subunit epsilon (97-104)
  source 1..24: mol_type = other RNA
cgcgacagcatcgtggccgagctg

SEQ ID NO: 31014 - RNA, 30 nt, synthetic construct
  misc_feature 1..30: note = Ribosome-binding protein 1 (360-369)
  source 1..30: mol_type = other RNA
cgcgaggccgaggagacccagagcaccctg

SEQ ID NO: 31015 - RNA, 33 nt, synthetic construct
  misc_feature 1..33: note = Nodal modulator 2 (274-284)
  source 1..33: mol_type = other RNA
cgcgaggacggcagcttctccttctacagcctg

SEQ ID NO: 31016 - RNA, 27 nt, synthetic construct
  misc_feature 1..27: note = Guanine nucleotide-binding protein G(s) subunit alpha isoforms short (244-252)
  source 1..27: mol_type = other RNA
cgcgaggacaaccagaccaaccggctg

SEQ ID NO: 31017 - RNA, 27 nt, synthetic construct
  misc_feature 1..27: note = Nucleolar complex protein 2 homolog (609-617)
  source 1..27: mol_type = other RNA
cgcgaggagggcacccccctgaccctc

SEQ ID NO: 31018 - RNA, 27 nt, synthetic construct
  misc_feature 1..27: note = DNA topoisomerase 1 (708-716)
  source 1..27: mol_type = other RNA
cgcgaggagaacaagcagatcgccctg

SEQ ID NO: 31019 - RNA, 27 nt, synthetic construct
  misc_feature 1..27: note = Eukaryotic initiation factor 4A-II (256-264)
  source 1..27: mol_type = other RNA
cgcgaggagtggaagctggacaccctc

SEQ ID NO: 31020 - RNA, 30 nt, synthetic construct
  misc_feature 1..30: note = Spermine synthase (251-260)
  source 1..30: mol_type = other RNA
cgcgagttcgactacgtgatcaacgacctg

SEQ ID NO: 31021 - RNA, 30 nt, synthetic construct
  misc_feature 1..30: note = DNA mismatch repair protein Msh6 (1321-1330)
  source 1..30: mol_type = other RNA
cgcgagttcgagaagatgaaccagagcctg

SEQ ID NO: 31022 - RNA, 36 nt, synthetic construct
  misc_feature 1..36: note = Heterogeneous nuclear ribonucleoprotein R (69-80)
  source 1..36: mol_type = other RNA
cgcgagttcaacgaggagggcgccctgagcgtgctc

SEQ ID NO: 31023 - RNA, 27 nt, synthetic construct
  misc_feature 1..27: note = Inner centromere protein (47-55)
  source 1..27: mol_type = other RNA
cgcgagttcagcaaggagcccgagctg

SEQ ID NO: 31024 - RNA, 27 nt, synthetic construct
  misc_feature 1..27: note = Eukaryotic translation initiation factor 3 subunit I (20-28)
  source 1..27: mol_type = other RNA
cgcgagggcgacctgctcttcaccgtg

SEQ ID NO: 31025 - RNA, 27 nt, synthetic construct
  misc_feature 1..27: note = ZW10 interactor (104-112)
  source 1..27: mol_type = other RNA
cgcgagcacgtggaggccatcaagatc

SEQ ID NO: 31026 - RNA, 33 nt, synthetic construct
  misc_feature 1..33: note = ZW10 interactor (104-114)
  source 1..33: mol_type = other RNA
cgcgagcacgtggaggccatcaagatcggcctg

SEQ ID NO: 31027 - RNA, 33 nt, synthetic construct
  misc_feature 1..33: note = Histone H3.3 (73-83)
  source 1..33: mol_type = other RNA
cgcgagatcgcccaggacttcaagaccgacctg

SEQ ID NO: 31028 - RNA, 33 nt, synthetic construct
  misc_feature 1..33: note = Serine/threonine-protein phosphatase PP1-alpha catalytic subunit (21-31)
  source 1..33: mol_type = other RNA
cgcgagatcttcctgagccagcccatcctcctg

SEQ ID NO: 31029 - RNA, 30 nt, synthetic construct
  misc_feature 1..30: note = Structural maintenance of chromosomes flexible hinge domain-containing protein 1 (393-402)
  source 1..30: mol_type = other RNA
cgcgagatccaggacgacatgcagaccctg

SEQ ID NO: 31030 - RNA, 27 nt, synthetic construct
  misc_feature 1..27: note = DNA-dependent protein kinase catalytic subunit (2753-2761)
  source 1..27: mol_type = other RNA
cgcgagaaggagatcaagagcgagctg

SEQ ID NO: 31031 - RNA, 27 nt, synthetic construct
  misc_feature 1..27: note = Actin-related protein 2 (125-133)
  source 1..27: mol_type = other RNA
cgcgagaagatcgtggaggtcatgttc

SEQ ID NO: 31032 - RNA, 27 nt, synthetic construct
  misc_feature 1..27: note = Aurora kinase A (151-159)
  source 1..27: mol_type = other RNA
cgcgagaagcagagcaagttcatcctg

SEQ ID NO: 31033 - RNA, 30 nt, synthetic construct
  misc_feature 1..30: note = Myosin-9 (1110-1119)
  source 1..30: mol_type = other RNA
cgcgagctggagagccagatctccgagctc

SEQ ID NO: 31034 - RNA, 30 nt, synthetic construct
  misc_feature 1..30: note = TRAF3-interacting JNK-activating modulator (73-82)
  source 1..30: mol_type = other RNA
cgcgagctggagagccagctccacgtgctg

SEQ ID NO: 31035 - RNA, 33 nt, synthetic construct
  misc_feature 1..33: note = NADH dehydrogenase (ubiquinone) 1 alpha subcomplex subunit 13 (79-89)
  source 1..33: mol_type = other RNA
cgcgagaacctggaggaggaggccatcatcatg

SEQ ID NO: 31036 - RNA, 36 nt, synthetic construct
  misc_feature 1..36: note = T-complex protein 1 subunit delta (160-171)
  source 1..36: mol_type = other RNA
cgcgagaccctgctcaacagcgccaccacgtccctg

SEQ ID NO: 31037 - RNA, 33 nt, synthetic construct
  misc_feature 1..33: note = Elongation factor 2 (80-90)
  source 1..33: mol_type = other RNA
cgcgagaccgtgagcgaggagtccaacgtcctg

SEQ ID NO: 31038 - RNA, 30 nt, synthetic construct
  misc_feature 1..30: note = Epsilon-sarcoglycan (213-222)
  source 1..30: mol_type = other RNA
cgcgaggtggagaacccccagaaccagctg

SEQ ID NO: 31039 - RNA, 27 nt, synthetic construct
  misc_feature 1..27: note = Protein disulfide-isomerase A6 (18-26)
  source 1..27: mol_type = other RNA
cgcgaggtgatccagagcgactccctg

SEQ ID NO: 31040 - RNA, 30 nt, synthetic construct
  misc_feature 1..30: note = Proteasome subunit beta type-4 (165-174)
  source 1..30: mol_type = other RNA
cgcgaggtgctggagaagcagcccgtcctc

SEQ ID NO: 31041 - RNA, 27 nt, synthetic construct
  misc_feature 1..27: note = SWI/SNF complex subunit SMARCC2 (599-607)
  source 1..27: mol_type = other RNA
cgcgagtggaccgagcaggagaccctg

SEQ ID NO: 31042 - RNA, 30 nt, synthetic construct
  misc_feature 1..30: note = Transcription factor E2F7 (615-624)
  source 1..30: mol_type = other RNA
cgcgagtacgaggacggccccctgagcctc

SEQ ID NO: 31043 - RNA, 33 nt, synthetic construct
  misc_feature 1..33: note = GDP-L-fucose synthase (38-48)
  source 1..33: mol_type = other RNA
cgcgagtacaacgaggtggagcccatcatcctg

SEQ ID NO: 31044 - RNA, 33 nt, synthetic construct
  misc_feature 1..33: note = Vimentin (381-391)
  source 1..33: mol_type = other RNA
cgcgagtaccaggacctgctcaacgtgaagatg

SEQ ID NO: 31045 - RNA, 27 nt, synthetic construct
  misc_feature 1..27: note = Metastasis-associated protein MTA2 (188-196)
  source 1..27: mol_type = other RNA
cgccagatcgaccagttcctggtggtc

SEQ ID NO: 31046 - RNA, 27 nt, synthetic construct
  misc_feature 1..27: note = Runt-related transcription factor 3 (264-272)
  source 1..27: mol_type = other RNA
cgcagcttccccaccctgccgaccctc

SEQ ID NO: 31047 - RNA, 33 nt, synthetic construct
  misc_feature 1..33: note = HLA class I histocompatibility antigen, B-15 alpha chain (352-362)
  source 1..33: mol_type = other RNA
agcgcccagggctccgacgtgagcctgaccgcc

SEQ ID NO: 31048 - RNA, 27 nt, synthetic construct
  misc_feature 1..27: note = Asparagine synthetase (glutamine-hydrolyzing) (159-167)
  source 1..27: mol_type = other RNA
agcgaggccaagggcctggtgaccctc

SEQ ID NO: 31049 - RNA, 27 nt, synthetic construct
  misc_feature 1..27: note = Chromodomain-helicase-DNA-binding protein 4 (1833-1841)
  source 1..27: mol_type = other RNA
agcgaggacccctcccacccgagcatg

SEQ ID NO: 31050 - RNA, 27 nt, synthetic construct
  misc_feature 1..27: note = SRA stem-loop-interacting RNA-binding protein, mitochondrial (69-77)
  source 1..27: mol_type = other RNA
agcgaggagggcctgcgcaacgccctc

SEQ ID NO: 31051 - RNA, 30 nt, synthetic construct
  misc_feature 1..30: note = Poly (ADP-ribose) polymerase 9 (292-301)
  source 1..30: mol_type = other RNA
agcgagttcatcctgggcaagtccgagctc

SEQ ID NO: 31052 - RNA, 30 nt, synthetic construct
  misc_feature 1..30: note = Cold shock domain-containing protein E1 (183-192)
  source 1..30: mol_type = other RNA
agcgagttcaagggcgacctggagaccctc

SEQ ID NO: 31053 - RNA, 30 nt, synthetic construct
  misc_feature 1..30: note = Cold shock domain-containing protein E1 (519-528)
  source 1..30: mol_type = other RNA
agcgagttctccggcgacgtggacagcctg

SEQ ID NO: 31054 - RNA, 27 nt, synthetic construct
  misc_feature 1..27: note = Zinc finger protein 451 (35-43)
  source 1..27: mol_type = other RNA
agcgagggccccctgcgcccggtgctc

SEQ ID NO: 31055 - RNA, 27 nt, synthetic construct
  misc_feature 1..27: note = Protein SON (1526-1534)
  source 1..27: mol_type = other RNA
agcgagcacggcatcaacatcgacctg

SEQ ID NO: 31056 - RNA, 33 nt, synthetic construct
  misc_feature 1..33: note = Spectrin beta chain, non-erythrocytic 1 (1024-1034)
  source 1..33: mol_type = other RNA
agcgagcaccccgaccaggcccaggccatcctg

SEQ ID NO: 31057 - RNA, 36 nt, synthetic construct
  misc_feature 1..36: note = Copper transport protein ATOX1 (44-55)
  source 1..36: mol_type = other RNA
agcgagcactccatggacaccctgctcgccaccctg

SEQ ID NO: 31058 - RNA, 27 nt, synthetic construct
  misc_feature 1..27: note = Coatomer subunit zeta-1 (34-42)
  source 1..27: mol_type = other RNA
agcgagatcgccctgctcgagggcctg

SEQ ID NO: 31059 - RNA, 30 nt, synthetic construct
  misc_feature 1..30: note = Cyclin-dependent kinase 1 (208-217)
  source 1..30: mol_type = other RNA
agcgagatcgaccagctgttccgcatcttc

SEQ ID NO: 31060 - RNA, 27 nt, synthetic construct
  misc_feature 1..27: note = Rho guanine nucleotide exchange factor 18 (689-697)
  source 1..27: mol_type = other RNA
agcgagatcgagggcatccagtccctg

SEQ ID NO: 31061 - RNA, 30 nt, synthetic construct
  misc_feature 1..30: note = Neuroblast differentiation-associated protein AHNAK (845-854)
  source 1..30: mol_type = other RNA
agcgagatcaaggtgcccgacgtcgagctg

SEQ ID NO: 31062 - RNA, 30 nt, synthetic construct
  misc_feature 1..30: note = Eukaryotic translation initiation factor 4B (442-451)
  source 1..30: mol_type = other RNA
agcgagaagtccctggagaacgagaccctc

SEQ ID NO: 31063 - RNA, 27 nt, synthetic construct
  misc_feature 1..27: note = 116 kDa U5 small nuclear ribonucleoprotein component (91-99)
  source 1..27: mol_type = other RNA
agcgagctgatccgcaacgtgaccctc

SEQ ID NO: 31064 - RNA, 33 nt, synthetic construct
  misc_feature 1..33: note = E3 ubiquitin-protein ligase UBR5 (466-476)
  source 1..33: mol_type = other RNA
agcgagctgcagggcgagcgcatcgtgtccctc

SEQ ID NO: 31065 - RNA, 27 nt, synthetic construct
  misc_feature 1..27: note = Death-associated protein kinase 3 (429-437)
  source 1..27: mol_type = other RNA
agcgagatgcgcttcgtgcaggacctg

SEQ ID NO: 31066 - RNA, 27 nt, synthetic construct
  misc_feature 1..27: note = Leucine-rich repeat-containing protein 47 (315-323)
  source 1..27: mol_type = other RNA
agcgagaaccccgtgccgctgaccgtc

SEQ ID NO: 31067 - RNA, 27 nt, synthetic construct
  misc_feature 1..27: note = Protein SON (197-205)
  source 1..27: mol_type = other RNA
agcgagccccacatcctggagaccctc

SEQ ID NO: 31068 - RNA, 27 nt, synthetic construct
  misc_feature 1..27: note = Programmed cell death protein 5 (88-96)
  source 1..27: mol_type = other RNA
agcgagcagggcctgatcgagatcctc

SEQ ID NO: 31069 - RNA, 27 nt, synthetic construct
  misc_feature 1..27: note = DNA replication licensing factor MCM4 (142-150)
  source 1..27: mol_type = other RNA
agcgagcagtccctgggccagaagctc

SEQ ID NO: 31070 - RNA, 27 nt, synthetic construct
  misc_feature 1..27: note = Guanylate-binding protein 1 (360-368)
  source 1..27: mol_type = other RNA
agcgagcgcgaggccatcgaggtgttc

SEQ ID NO: 31071 - RNA, 27 nt, synthetic construct
  misc_feature 1..27: note = Signal peptidase complex catalytic subunit SEC11C (57-65)
  source 1..27: mol_type = other RNA
agcgagtcccccatcgtggtcgtgctg

SEQ ID NO: 31072 - RNA, 27 nt, synthetic construct
  misc_feature 1..27: note = Actin-related protein 2/3 complex subunit 1B (242-250)
  source 1..27: mol_type = other RNA
agcgagaccctgcccctcctggccctg

SEQ ID NO: 31073 - RNA, 36 nt, synthetic construct
  misc_feature 1..36: note = Annexin A2 (296-307)
  source 1..36: mol_type = other RNA
agcgaggtggacatgctgaagatccgctccgagttc

SEQ ID NO: 31074 - RNA, 27 nt, synthetic construct
  misc_feature 1..27: note = Proteasome maturation protein (124-132)
  source 1..27: mol_type = other RNA
agcgaggtgatgggcgagccccacctg

SEQ ID NO: 31075 - RNA, 27 nt, synthetic construct
  misc_feature 1..27: note = AP-1 complex subunit beta-1 (347-355)
  source 1..27: mol_type = other RNA
agccaggccaacatcgcccaggtgctg

SEQ ID NO: 31076 - RNA, 27 nt, synthetic construct
  misc_feature 1..27: note = Rab GTPase-activating protein 1-like (162-170)
  source 1..27: mol_type = other RNA
agccagtaccccttcccggtgaccctg

SEQ ID NO: 31077 - RNA, 33 nt, synthetic construct
  misc_feature 1..33: note = Probable ATP-dependent RNA helicase DDX41 (118-128)
  source 1..33: mol_type = other RNA
agcgtggccgagggccgcgccctgatgtccgtc

SEQ ID NO: 31078 - RNA, 27 nt, synthetic construct
  misc_feature 1..27: note = General vesicular transport factor p115 (18-26)
  source 1..27: mol_type = other RNA
accgaggccgagaccatccagaagctg

SEQ ID NO: 31079 - RNA, 27 nt, synthetic construct
  misc_feature 1..27: note = SH2 domain-containing protein 3C (769-777)
  source 1..27: mol_type = other RNA
accgagcacggcgtggaggtcgtgctg

SEQ ID NO: 31080 - RNA, 30 nt, synthetic construct
  misc_feature 1..30: note = Nucleolin (452-461)
  source 1..30: mol_type = other RNA
accgagatcgacggccgcagcatctccctg

SEQ ID NO: 31081 - RNA, 27 nt, synthetic construct
  misc_feature 1..27: note = Adenosylhomocysteinase (244-252)
  source 1..27: mol_type = other RNA
accgagatcgaccccatcaacgccctg

SEQ ID NO: 31082 - RNA, 30 nt, synthetic construct
  misc_feature 1..30: note = Polyadenylate-binding protein-interacting protein 1 (66-75)
  source 1..30: mol_type = other RNA
accgagatcgagcagttcgccgagaccctg

SEQ ID NO: 31083 - RNA, 27 nt, synthetic construct
  misc_feature 1..27: note = Suppressor of SWI4 1 homolog (72-80)
  source 1..27: mol_type = other RNA
accgagatcggcccccgcatgaccctg

SEQ ID NO: 31084 - RNA, 33 nt, synthetic construct
  misc_feature 1..33: note = Microtubule-associated protein 4 (428-438)
  source 1..33: mol_type = other RNA
accgagatcagctccgccgagaaggtggccctg

SEQ ID NO: 31085 - RNA, 24 nt, synthetic construct
  misc_feature 1..24: note = Histone H3.1 (59-66)
  source 1..24: mol_type = other RNA
accgagctgctcatccgcaagctg

SEQ ID NO: 31086 - RNA, 30 nt, synthetic construct
  misc_feature 1..30: note = Chromodomain-helicase-DNA-binding protein 4 (1265-1274)
  source 1..30: mol_type = other RNA
accgagctgcagggcatgaacgagtacctc

SEQ ID NO: 31087 - RNA, 33 nt, synthetic construct
  misc_feature 1..33: note = Transcription factor BTF3 (106-116)
  source 1..33: mol_type = other RNA
accgagatgctgcccagcatcctcaaccagctg

SEQ ID NO: 31088 - RNA, 27 nt, synthetic construct
  misc_feature 1..27: note = Probable ATP-dependent RNA helicase DDX6 (6-14)
  source 1..27: mol_type = other RNA
accgagaaccccgtgatcatgggcctg

SEQ ID NO: 31089 - RNA, 27 nt, synthetic construct
  misc_feature 1..27: note = Poly(rC)-binding protein 1 (6-14)
  source 1..27: mol_type = other RNA
accgagagcggcctgaacgtgaccctc

SEQ ID NO: 31090 - RNA, 27 nt, synthetic construct
  misc_feature 1..27: note = Steroid hormone receptor ERR1 (88-96)
  source 1..27: mol_type = other RNA
accgagaccgagcccccggtggccctg

SEQ ID NO: 31091 - RNA, 24 nt, synthetic construct
  misc_feature 1..24: note = Elongation factor 1-alpha 1 (287-294)
  source 1..24: mol_type = other RNA
accgaggtgaagagcgtcgagatg

SEQ ID NO: 31092 - RNA, 27 nt, synthetic construct
  misc_feature 1..27: note = Pinin (538-546)
  source 1..27: mol_type = other RNA
accgaggtgcccgtcgagccggtgctg

SEQ ID NO: 31093 - RNA, 27 nt, synthetic construct
  misc_feature 1..27: note = Cytoskeleton-associated protein 4 (55-63)
  source 1..27: mol_type = other RNA
accgaggtgcgcgagctggtcagcctc

SEQ ID NO: 31094 - RNA, 27 nt, synthetic construct
  misc_feature 1..27: note = Asparagine synthetase (glutamine-hydrolyzing) (269-277)
  source 1..27: mol_type = other RNA
accctgctcaagcagctgaaggaggcc

SEQ ID NO: 31095 - RNA, 33 nt, synthetic construct
  misc_feature 1..33: note = Integrin beta-7 (702-712)
  source 1..33: mol_type = other RNA
gtggaggacgacgcccgcggcaccgtcgtgctg

SEQ ID NO: 31096 - RNA, 30 nt, synthetic construct
  misc_feature 1..30: note = Eukaryotic translation initiation factor 3 subunit A (253-262)
  source 1..30: mol_type = other RNA
gtggaggacatccacggcctgttcagcctc

SEQ ID NO: 31097 - RNA, 33 nt, synthetic construct
  misc_feature 1..33: note = Serine/threonine-protein phosphatase 2A 65 kDa regulatory subunit A alpha isoform (436-446)
  source 1..33: mol_type = other RNA
gtggagttcttcgacgagaagctgaacagcctc

SEQ ID NO: 31098 - RNA, 27 nt, synthetic construct
  misc_feature 1..27: note = F-box only protein 7 (135-143)
  source 1..27: mol_type = other RNA
gtggagggccaggtcccccacagcctg

SEQ ID NO: 31099 - RNA, 27 nt, synthetic construct
  misc_feature 1..27: note = GPN-loop GTPase 2 (169-177)
  source 1..27: mol_type = other RNA
gtggagctgccccacatcaacctcctg

SEQ ID NO: 31100 - RNA, 27 nt, synthetic construct
  misc_feature 1..27: note = Melanoma-associated antigen 12 (279-287)
  source 1..27: mol_type = other RNA
gtggagaccagctacgtcaaggtgctg

SEQ ID NO: 31101 - RNA, 27 nt, synthetic construct
  misc_feature 1..27: note = Melanoma-associated antigen D2 (37-45)
  source 1..27: mol_type = other RNA
gtggaggtccccgagaccccgaaggcc

SEQ ID NO: 31102 - RNA, 27 nt, synthetic construct
  misc_feature 1..27: note = Vigilin (656-664)
  source 1..27: mol_type = other RNA
gtggaggtcagcatccccgccaagctg

SEQ ID NO: 31103 - RNA, 27 nt, synthetic construct
  misc_feature 1..27: note = Basic leucine zipper and W2 domain-containing protein 2 (305-313)
  source 1..27: mol_type = other RNA
gtggagtggaacaagaaggaggagctg

SEQ ID NO: 31104 - RNA, 30 nt, synthetic construct
  misc_feature 1..30: note = Stomatin-like protein 3 (151-160)
  source 1..30: mol_type = other RNA
gtgctgggcacccagaccctcagccagatc

SEQ ID NO: 31105 - RNA, 27 nt, synthetic construct
  misc_feature 1..27: note = Condensin complex subunit 1 (162-170)
  source 1..27: mol_type = other RNA
tgggaggaggagcgccagcccatcctg

SEQ ID NO: 31106 - RNA, 27 nt, synthetic construct
  misc_feature 1..27: note = Catenin beta-1 (66-74)
  source 1..27: mol_type = other RNA
tgggagcagggcttcagccagtccttc

SEQ ID NO: 31107 - RNA, 27 nt, synthetic construct
  misc_feature 1..27: note = Myosin light polypeptide 6 (141-149)
  source 1..27: mol_type = other RNA
tacgaggagctggtgcgcatggtcctc

SEQ ID NO: 31108 - RNA, 30 nt, synthetic construct
  misc_feature 1..30: note = Nucleophosmin (67-76)
  source 1..30: mol_type = other RNA
tacgagggcagccccatcaaggtgaccctg

SEQ ID NO: 31109 - RNA, 27 nt, synthetic construct
  misc_feature 1..27: note = 60S ribosomal protein L6 (240-248)
  source 1..27: mol_type = other RNA
tacgagatcaccgagcagcgcaagatc

SEQ ID NO: 31110 - RNA, 30 nt, synthetic construct
  misc_feature 1..30: note = Septin-11 (95-104)
  source 1..30: mol_type = other RNA
tacgagctgcaggagagcaacgtgcgcctc

SEQ ID NO: 31111 - RNA, 30 nt, synthetic construct
  misc_feature 1..30: note = Glutamine-dependent NAD(+) synthetase (58-67)
  source 1..30: mol_type = other RNA
tacgagagcgacaccctgctccactccttc

SEQ ID NO: 31112 - RNA, 36 nt, synthetic construct
  misc_feature 1..36: note = Mitogen-activated protein kinase kinase kinase 5 (675-686)
  source 1..36: mol_type = other RNA
tacgagtacgacgagaacggcgaccgcgtggtcctg

SEQ ID NO: 31113 - RNA, 27 nt, synthetic construct
  misc_feature 1..27: note = 60S ribosomal protein L7a (158-166)
  source 1..27: mol_type = other RNA
gcccacgacgtggaccccatcgagctg

SEQ ID NO: 31114 - RNA, 30 nt, synthetic construct
  misc_feature 1..30: note = 40S ribosomal protein S29 (47-56)
  source 1..30: mol_type = other RNA
gccaaggacatcggcttcatcaagctggac

SEQ ID NO: 31115 - RNA, 24 nt, synthetic construct
  misc_feature 1..24: note = Long-chain-fatty-acid-CoA ligase 4 (42-49)
  source 1..24: mol_type = other RNA
ttcgaccacgccgtgagcaagttc

SEQ ID NO: 31116 - RNA, 27 nt, synthetic construct
  misc_feature 1..27: note = Eukaryotic translation initiation factor 3 subunit L (478-486)
  source 1..27: mol_type = other RNA
ttcctggacctcaccgagcaggagttc

SEQ ID NO: 31117 - RNA, 27 nt, synthetic construct
  misc_feature 1..27: note = Ubiquitin-like modifier-activating enzyme 1 (637-645)
  source 1..27: mol_type = other RNA
ttccccaacgccatcgagcacaccctg

SEQ ID NO: 31118 - RNA, 27 nt, synthetic construct
  misc_feature 1..27: note = Bcl-2-associated transcription factor 1 (338-346)
  source 1..27: mol_type = other RNA
ttcaccgacgaggagagccgcgtgttc

SEQ ID NO: 31119 - RNA, 30 nt, synthetic construct
  misc_feature 1..30: note = Bcl-2-associated transcription factor 1 (338-347)
  source 1..30: mol_type = other RNA
ttcaccgacgaggagagccgcgtgttcctg

SEQ ID NO: 31120 - RNA, 27 nt, synthetic construct
  misc_feature 1..27: note = Disco-interacting protein 2 homolog B (444-452)
  source 1..27: mol_type = other RNA
ttctacgacgagcgcatcgtggtcgtg

SEQ ID NO: 31121 - RNA, 27 nt, synthetic construct
  misc_feature 1..27: note = WD repeat-containing protein 46 (188-196)
  source 1..27: mol_type = other RNA
cacttcgacctgaacctccgccagttc

SEQ ID NO: 31122 - RNA, 30 nt, synthetic construct
  misc_feature 1..30: note = HLA class I histocompatibility antigen, A-24 alpha chain (216-225)
  source 1..30: mol_type = other RNA
caccccatcagcgaccacgaggccaccctg

SEQ ID NO: 31123 - RNA, 27 nt, synthetic construct
  misc_feature 1..27: note = Integrator complex subunit 2 (1006-1014)
  source 1..27: mol_type = other RNA
atcgccgaccccaacatcgccaagctg

SEQ ID NO: 31124 - RNA, 27 nt, synthetic construct
  misc_feature 1..27: note = Heterogeneous nuclear ribonucleoprotein M (188-196)
  source 1..27: mol_type = other RNA
atccccaacgagatcatccacgccctg

SEQ ID NO: 31125 - RNA, 27 nt, synthetic construct
  misc_feature 1..27: note = UPF0428 protein CXorf56 (100-108)
  source 1..27: mol_type = other RNA
atcgtggacggcgccgtcgtgaagttc

SEQ ID NO: 31126 - RNA, 27 nt, synthetic construct
  misc_feature 1..27: note = Long-chain-fatty-acid-CoA ligase 4 (41-49)
  source 1..27: mol_type = other RNA
ctgttcgaccacgccgtgagcaagttc

SEQ ID NO: 31127 - RNA, 27 nt, synthetic construct
  misc_feature 1..27: note = Cleavage stimulation factor subunit 1 (370-378)
  source 1..27: mol_type = other RNA
ctgcccgacgagcgcaccatcagcctc

SEQ ID NO: 31128 - RNA, 30 nt, synthetic construct
  misc_feature 1..30: note = Nucleolar transcription factor 1 (365-374)
  source 1..30: mol_type = other RNA
ctgcccgaggaggagcagcagcgcgtgctc

SEQ ID NO: 31129 - RNA, 27 nt, synthetic construct
  misc_feature 1..27: note = Microtubule-associated protein 4 (308-316)
  source 1..27: mol_type = other RNA
ctgcccaccgagaaggaggtggccctc

SEQ ID NO: 31130 - RNA, 24 nt, synthetic construct
  misc_feature 1..24: note = Fructose-bisphosphate aldolase A (271-278)
  source 1..24: mol_type = other RNA
ctgagcgaccaccacatctacctc

SEQ ID NO: 31131 - RNA, 27 nt, synthetic construct
  misc_feature 1..27: note = MMS19 nucleotide excision repair protein homolog (636-644)
  source 1..27: mol_type = other RNA
atgcccgagaaggagccgagcgtgctg

SEQ ID NO: 31132 - RNA, 27 nt, synthetic construct
  misc_feature 1..27: note = AF4/FMR2 family member 4 (1053-1061)
  source 1..27: mol_type = other RNA
atgcccagcccggtgtcccccaagctg

SEQ ID NO: 31133 - RNA, 27 nt, synthetic construct
  misc_feature 1..27: note = Ras-related C3 botulinum toxin substrate 1 (45-53)
  source 1..27: mol_type = other RNA
atggtggacggcaagcccgtcaacctg

SEQ ID NO: 31134 - RNA, 27 nt, synthetic construct
  misc_feature 1..27: note = Bone morphogenetic protein receptor type-1B (507-515)
  source 1..27: mol_type = other RNA
aaccccgccagccgcctgaccgccctc

SEQ ID NO: 31135 - RNA, 27 nt, synthetic construct
  misc_feature 1..27: note = Multiple epidermal growth factor-like domains protein 8 (2530-2538)
  source 1..27: mol_type = other RNA
cccgccccgcccccccccccgcccccc

SEQ ID NO: 31136 - RNA, 30 nt, synthetic construct
  misc_feature 1..30: note = Keratin, type II cytoskeletal 1 (338-347)
  source 1..30: mol_type = other RNA
agcatggacaacaaccgctccctggacctc

SEQ ID NO: 31137 - RNA, 27 nt, synthetic construct
  misc_feature 1..27: note = Nuclear pore complex protein Nup155 (220-228)
  source 1..27: mol_type = other RNA
agcaccgacaacggccgcatcttcctg

SEQ ID NO: 31138 - RNA, 27 nt, synthetic construct
  misc_feature 1..27: note = Coatomer subunit epsilon (111-119)
  source 1..27: mol_type = other RNA
agcgtggacgtcaccaacaccacgttc

SEQ ID NO: 31139 - RNA, 27 nt, synthetic construct
  misc_feature 1..27: note = Fatty acid synthase (545-553)
  source 1..27: mol_type = other RNA
accttcgacgacatcgtgcacagcttc

SEQ ID NO: 31140 - RNA, 27 nt, synthetic construct
  misc_feature 1..27: note = Tumor suppressor candidate 3 (165-173)
  source 1..27: mol_type = other RNA
accttcgacctgcagcgcatcggcttc

SEQ ID NO: 31141 - RNA, 27 nt, synthetic construct
  misc_feature 1..27: note = Rho GTPase-activating protein 24 (436-444)
  source 1..27: mol_type = other RNA
acctacgacaacgtgcaccagcagttc

SEQ ID NO: 31142 - RNA, 27 nt, synthetic construct
  misc_feature 1..27: note = ATP-dependent RNA helicase A (697-705)
  source 1..27: mol_type = other RNA
gtgttcgaccccgtcccggtgggcgtg

SEQ ID NO: 31143 - RNA, 30 nt, synthetic construct
  misc_feature 1..30: note = 10 kDa heat shock protein, mitochondrial (81-90)
  source 1..30: mol_type = other RNA
gtgctggacgacaaggactacttcctcttc

SEQ ID NO: 31144 - RNA, 30 nt, synthetic construct
  misc_feature 1..30: note = Metastasis-associated protein MTA3 (135-144)
  source 1..30: mol_type = other RNA
gtgtacgaccccagcctgaagaccctcctg

SEQ ID NO: 31145 - RNA, 24 nt, synthetic construct
  misc_feature 1..24: note = ADP-ribosylation factor GTPase-activating protein 3 (312-319)
  source 1..24: mol_type = other RNA
tacttcgacgagcccgtggagctg

SEQ ID NO: 31146 - RNA, 27 nt, synthetic construct
  misc_feature 1..27: note = Transcription factor HES-1 (155-163)
  source 1..27: mol_type = other RNA
taccccggccagccgcaccccgccctg

SEQ ID NO: 31147 - RNA, 27 nt, synthetic construct
  misc_feature 1..27: note = Nuclear nucleic acid-binding protein C1D (10-18)
  source 1..27: mol_type = other RNA
taccccgtggagatccacgagtacctg

SEQ ID NO: 31148 - RNA, 27 nt, synthetic construct
  misc_feature 1..27: note = Pecanex-like protein 1 (22-30)
  source 1..27: mol_type = other RNA
tactacgacccccaccaggccaccttc

SEQ ID NO: 31149 - RNA, 27 nt, synthetic construct
  misc_feature 1..27: note = ATP-binding cassette sub-family F member 3 (500-508)
  source 1..27: mol_type = other RNA
tactacgaccccaagcacgtgatcttc

SEQ ID NO: 31150 - RNA, 30 nt, synthetic construct
  misc_feature 1..30: note = Melanoma antigen preferentially expressed in tumors (300-309)
  source 1..30: mol_type = other RNA
gccctgtacgtggacagcctcttcttcctg

SEQ ID NO: 31151 - RNA, 27 nt, synthetic construct
  misc_feature 1..27: note = Fatty acid synthase (986-994)
  source 1..27: mol_type = other RNA
gcccaggccgaggtgtacaaggagctg

SEQ ID NO: 31152 - RNA, 30 nt, synthetic construct
  misc_feature 1..30: note = 2',3'-cyclic-nucleotide 3'-phosphodiesterase (249-258)
  source 1..30: mol_type = other RNA
gcccagcaggacgtgctgaagaagagctac

SEQ ID NO: 31153 - RNA, 24 nt, synthetic construct
  misc_feature 1..24: note = Cytochrome c oxidase subunit 2 (156-163)
  source 1..24: mol_type = other RNA
agccaggacgtgctgcactcctgg

SEQ ID NO: 31154 - RNA, 27 nt, synthetic construct
  misc_feature 1..27: note = RNA exonuclease 4 (126-134)
  source 1..27: mol_type = other RNA
gcccgcgtgagcatcgtcaaccagtac

SEQ ID NO: 31155 - RNA, 30 nt, synthetic construct
  misc_feature 1..30: note = RNA-binding protein 14 (646-655)
  source 1..30: mol_type = other RNA
gcccgctacagcggctcctacaacgactac

SEQ ID NO: 31156 - RNA, 30 nt, synthetic construct
  misc_feature 1..30: note = Talin-1 (1272-1281)
  source 1..30: mol_type = other RNA
ggccgcttcgggcaggacttcagcaccttc

SEQ ID NO: 31157 - RNA, 27 nt, synthetic construct
  misc_feature 1..27: note = YTH domain-containing family protein 2 (30-38)
  source 1..27: mol_type = other RNA
ggccgcgtgttcatcatcaagagctac

SEQ ID NO: 31158 - RNA, 27 nt, synthetic construct
  misc_feature 1..27: note = ATP-dependent RNA helicase DDX42 (228-236)
  source 1..27: mol_type = other RNA
aagcgcttcggcaaggcctacaacctg

SEQ ID NO: 31159 - RNA, 27 nt, synthetic construct
  misc_feature 1..27: note = Eukaryotic translation initiation factor 3 subunit E (73-81)
  source 1..27: mol_type = other RNA
aagcgcaccaccgtggtcgcccagctg

SEQ ID NO: 31160 - RNA, 27 nt, synthetic construct
  misc_feature 1..27: note = Proteasome subunit beta type-5 (113-121)
  source 1..27: mol_type = other RNA
cgccgggccatctaccaggccacctac

SEQ ID NO: 31161 - RNA, 27 nt, synthetic construct
  misc_feature 1..27: note = DNA replication licensing factor MCM5 (602-610)
  source 1..27: mol_type = other RNA
cgccggagctccatccccatcaccgtg

SEQ ID NO: 31162 - RNA, 39 nt, synthetic construct
  misc_feature 1..39: note = HLA class I histocompatibility antigen, B-15 alpha chain (193-205)
  source 1..39: mol_type = other RNA
cgccggtacctggagaacggcaaggagaccctccagcgc

SEQ ID NO: 31163 - RNA, 30 nt, synthetic construct
  misc_feature 1..30: note = Probable bifunctional methylenetetrahydrofolate dehydrogenase/cyclohydrolase 2 (246-255)
  source 1..30: mol_type = other RNA
caccgctacacccccaaggagcagctgaag

SEQ ID NO: 31164 - RNA, 27 nt, synthetic construct
  misc_feature 1..27: note = 60S ribosomal protein L7 (199-207)
  source 1..27: mol_type = other RNA
aagcgcttcaaggaggccaacaacttc

SEQ ID NO: 31165 - RNA, 45 nt, synthetic construct
  misc_feature 1..45: note = Heat shock 70 kDa protein 1-like (171-185)
  source 1..45: mol_type = other RNA
gtgctgcgcatcatcaacgagcccaccgccgccgcgatcgcctac

SEQ ID NO: 31166 - RNA, 27 nt, synthetic construct
  misc_feature 1..27: note = Polypyrimidine tract-binding protein 1 (169-177)
  source 1..27: mol_type = other RNA
gccgccgtggacgcgggcatggccatg

SEQ ID NO: 31167 - RNA, 33 nt, synthetic construct
  misc_feature 1..33: note = HLA class I histocompatibility antigen, alpha chain E (137-147)
  source 1..33: mol_type = other RNA
ttcgcctacgacggcaaggactacctgaccctc

SEQ ID NO: 31168 - RNA, 42 nt, synthetic construct
  misc_feature 1..42: note = HLA class I histocompatibility antigen, A-29 alpha chain (21-34)
  source 1..42: mol_type = other RNA
ttcatcgccgtgggctacgtcgacgacacccagttcgtgcgc

SEQ ID NO: 31169 - RNA, 30 nt, synthetic construct
  misc_feature 1..30: note = Ubiquitin-like protein ISG15 (45-54)
  source 1..30: mol_type = other RNA
ctggccgtgcaccccagcggcgtcgccctc

SEQ ID NO: 31170 - RNA, 27 nt, synthetic construct
  misc_feature 1..27: note = N-acetyltransferase 8 (174-182)
  source 1..27: mol_type = other RNA
atcctggacaccggcaccatccagctc

SEQ ID NO: 31171 - RNA, 27 nt, synthetic construct
  misc_feature 1..27: note = Protein prune homolog 2 (1910-1918)
  source 1..27: mol_type = other RNA
gccctgttcgacggcgacccccacctc

SEQ ID NO: 31172 - RNA, 27 nt, synthetic construct
  misc_feature 1..27: note = Phosphatidylinositol 4,5-bisphosphate 3-kinase catalytic subunit delta isoform (477-485)
  source 1..27: mol_type = other RNA
gaggtggccccccacccggtctactac

SEQ ID NO: 31173 - RNA, 27 nt, synthetic construct
  misc_feature 1..27: note = Chloride intracellular channel protein 1 (167-175)
  source 1..27: mol_type = other RNA
ttcctggacggcaacgagctcaccctg

SEQ ID NO: 31174 - RNA, 27 nt, synthetic construct
  misc_feature 1..27: note = Carbonic anhydrase 9 (254-262)
  source 1..27: mol_type = other RNA
cacctgagcaccgccttcgcccgcgtg

SEQ ID NO: 31175 - RNA, 27 nt, synthetic construct
  misc_feature 1..27: note = 40S ribosomal protein S16 (49-57)
  source 1..27: mol_type = other RNA
aagctgctcgagcccgtgctgctgctc

SEQ ID NO: 31176 - RNA, 27 nt, synthetic construct
  misc_feature 1..27: note = Glutathione peroxidase 1 (40-48)
  source 1..27: mol_type = other RNA
ctgctcatcgagaacgtggccagcctg

SEQ ID NO: 31177 - RNA, 27 nt, synthetic construct
  misc_feature 1..27: note = Proliferating cell nuclear antigen (228-236)
  source 1..27: mol_type = other RNA
agcatgtccgccgacgtgcccctggtc

SEQ ID NO: 31178 - RNA, 39 nt, synthetic construct
  misc_feature 1..39: note = Dermokine (410-422)
  source 1..39: mol_type = other RNA
gccatcatcgagggcgccgacgcgagctccctgcagaag

SEQ ID NO: 31179 - RNA, 33 nt, synthetic construct
  misc_feature 1..33: note = PRELI domain-containing protein 1, mitochondrial (142-152)
  source 1..33: mol_type = other RNA
gccgtgcaggagttcggcctggcccgcttcaag

SEQ ID NO: 31180 - RNA, 27 nt, synthetic construct
  misc_feature 1..27: note = Putative WAS protein family homolog 3 (42-50)
  source 1..27: mol_type = other RNA
aaggtgagcggcgacatcttctcccgc

SEQ ID NO: 31181 - RNA, 39 nt, synthetic construct
  misc_feature 1..39: note = Mitochondrial import inner membrane translocase subunit Tim23 (156-168)
  source 1..39: mol_type = other RNA
accgtggccgccggcaccatgacggggatgctgtacaag

SEQ ID NO: 31182 - RNA, 33 nt, synthetic construct
  misc_feature 1..33: note = Tryptophan-tRNA ligase, mitochondrial (162-172)
  source 1..33: mol_type = other RNA
gtgctgcaggccgccgacatcctcctgtacaag

SEQ ID NO: 31183 - RNA, 27 nt, synthetic construct
  misc_feature 1..27: note = Cytochrome c oxidase subunit 6A1, mitochondrial (29-37)
  source 1..27: mol_type = other RNA
gtgagcatgctgaacgtctacctcaag

SEQ ID NO: 31184 - RNA, 27 nt, synthetic construct
  misc_feature 1..27: note = 40S ribosomal protein S4, X isoform (171-179)
  source 1..27: mol_type = other RNA
ggccgcatcggggtgatcaccaaccgg

SEQ ID NO: 31185 - RNA, 51 nt, synthetic construct
  misc_feature 1..51: note = SLAM family member 6 (103-119)
  source 1..51: mol_type = other RNA
gacaccggcagctaccgcgcccagatctccaccaagacgagcgccaagctg

SEQ ID NO: 31186 - RNA, 45 nt, synthetic construct
  misc_feature 1..45: note = Transferrin receptor protein 1 (680-694)
  source 1..45: mol_type = other RNA
cgcgtggagtaccacttcctgagcccctacgtctccccgaaggag

SEQ ID NO: 31187 - RNA, 54 nt, synthetic construct
  misc_feature 1..54: note = Transferrin receptor protein 1 (680-697)
  source 1..54: mol_type = other RNA
cgcgtggagtaccacttcctgagcccctacgtctccccgaaggagagccccttc

SEQ ID NO: 31188 - RNA, 45 nt, synthetic construct
  misc_feature 1..45: note = HLA class I histocompatibility antigen, A-1 alpha chain (28-42)
  source 1..45: mol_type = other RNA
gacgacacccagttcgtgcgcttcgacagcgacgccgcctcccag

SEQ ID NO: 31189 - RNA, 48 nt, synthetic construct
  misc_feature 1..48: note = HLA class I histocompatibility antigen, A-2 alpha chain (28-43)
  source 1..48: mol_type = other RNA
gacgacacccagttcgtgcgcttcgacagcgacgccgcctcccagcgg

SEQ ID NO: 31190 - RNA, 51 nt, synthetic construct
  misc_feature 1..51: note = HLA class I histocompatibility antigen, A-2 alpha chain (28-44)
  source 1..51: mol_type = other RNA
gacgacacccagttcgtgcgcttcgacagcgacgccgcctcccagcggatg

SEQ ID NO: 31191 - RNA, 54 nt, synthetic construct
  misc_feature 1..54: note = HLA class I histocompatibility antigen, A-2 alpha chain (28-45)
  source 1..54: mol_type = other RNA
gacgacacccagttcgtgcgcttcgacagcgacgccgcctcccagcggatggag

SEQ ID NO: 31192 - RNA, 51 nt, synthetic construct
  misc_feature 1..51: note = HLA class I histocompatibility antigen, Cw-7 alpha chain (153-169)
  source 1..51: mol_type = other RNA
gacctgcgcagctggaccgccgccgacaccgcggcccagatcacgcagcgg

SEQ ID NO: 31193 - RNA, 39 nt, synthetic construct
  misc_feature 1..39: note = HLA class I histocompatibility antigen, alpha chain E (140-152)
  source 1..39: mol_type = other RNA
gacctgcgcagctggaccgccgtggacaccgccgcgcag

SEQ ID NO: 31194 - RNA, 48 nt, synthetic construct
  misc_feature 1..48: note = HLA class I histocompatibility antigen, A-2 alpha chain (29-44)
  source 1..48: mol_type = other RNA
gacacccagttcgtgcgcttcgacagcgacgccgcctcccagcggatg

SEQ ID NO: 31195 - RNA, 54 nt, synthetic construct
  misc_feature 1..54: note = HLA class I histocompatibility antigen, Cw-7 alpha chain (152-169)
  source 1..54: mol_type = other RNA
gaggacctgcgcagctggaccgccgccgacaccgcggcccagatcacgcagcgg

SEQ ID NO: 31196 - RNA, 54 nt, synthetic construct
  misc_feature 1..54: note = HLA class I histocompatibility antigen, B-15 alpha chain (152-169)
  source 1..54: mol_type = other RNA
gaggacctgagctcctggaccgccgccgacaccgcggcccagatcacgcagcgc

SEQ ID NO: 31197 - RNA, 36 nt, synthetic construct
  misc_feature 1..36: note = HLA class I histocompatibility antigen, A-2 alpha chain (32-43)
  source 1..36: mol_type = other RNA
ttcgtgcgcttcgacagcgacgccgcctcccagcgg

SEQ ID NO: 31198 - RNA, 45 nt, synthetic construct
  misc_feature 1..45: note = Heat shock cognate 71 kDa protein (484-498)
  source 1..45: mol_type = other RNA
ggcatcctgaacgtgagcgccgtcgacaagtccaccgggaaggag

SEQ ID NO: 31199 - RNA, 42 nt, synthetic construct
  misc_feature 1..42: note = HLA class I histocompatibility antigen, B-15 alpha chain (154-167)
  source 1..42: mol_type = other RNA
ctgagctcctggaccgccgccgacaccgcggcccagatcacg

SEQ ID NO: 31200 - RNA, 48 nt, synthetic construct
  misc_feature 1..48: note = HLA class I histocompatibility antigen, B-15 alpha chain (154-169)
  source 1..48: mol_type = other RNA
ctgagctcctggaccgccgccgacaccgcggcccagatcacgcagcgc

SEQ ID NO: 31201 - RNA, 54 nt, synthetic construct
  misc_feature 1..54: note = HLA class I histocompatibility antigen, Cw-7 alpha chain (151-168)
  source 1..54: mol_type = other RNA
aacgaggacctgcgcagctggaccgccgccgacaccgcggcccagatcacgcag

SEQ ID NO: 31202 - RNA, 42 nt, synthetic construct
  misc_feature 1..42: note = HLA class I histocompatibility antigen, B-15 alpha chain (155-168)
  source 1..42: mol_type = other RNA
agctcctggaccgccgccgacaccgcggcccagatcacgcag

SEQ ID NO: 31203 - RNA, 42 nt, synthetic construct
  misc_feature 1..42: note = HLA class I histocompatibility antigen, B-15 alpha chain (55-68)
  source 1..42: mol_type = other RNA
acccagttcgtgcgcttcgacagcgacgccgcctccccccgg

SEQ ID NO: 31204 - RNA, 42 nt, synthetic construct
  misc_feature 1..42: note = HLA class I histocompatibility antigen, A-2 alpha chain (30-43)
  source 1..42: mol_type = other RNA
acccagttcgtgcgcttcgacagcgacgccgcctcccagcgg

SEQ ID NO: 31205 - RNA, 48 nt, synthetic construct
  misc_feature 1..48: note = HLA class I histocompatibility antigen, A-1 alpha chain (27-42)
  source 1..48: mol_type = other RNA
gtggacgacacccagttcgtccgcttcgacagcgacgccgcctcccag

SEQ ID NO: 31206 - RNA, 54 nt, synthetic construct
  misc_feature 1..54: note = HLA class I histocompatibility antigen, A-2 alpha chain (27-44)
  source 1..54: mol_type = other RNA
gtggacgacacccagttcgtccgcttcgacagcgacgccgcctcccagcggatg

SEQ ID NO: 31207 - RNA, 27 nt, synthetic construct
  misc_feature 1..27: note = Ankyrin repeat domain-containing protein 17 (744-752)
  source 1..27: mol_type = other RNA
gccccccgcgtgccggtccaggccctg

SEQ ID NO: 31208 - RNA, 27 nt, synthetic construct
  misc_feature 1..27: note = Probable ubiquitin carboxyl-terminal hydrolase FAF-Y (2050-2058)
  source 1..27: mol_type = other RNA
gcccgcttcctgttcaccaccggcttc

SEQ ID NO: 31209 - RNA, 42 nt, synthetic construct
  misc_feature 1..42: note = Transferrin receptor protein 1 (15-28)
  source 1..42: mol_type = other RNA
ggcgagcccctgagctacacccgcttctccctcgcccggcag

SEQ ID NO: 31210 - RNA, 48 nt, synthetic construct
  misc_feature 1..48: note = Transferrin receptor protein 1 (15-30)
  source 1..48: mol_type = other RNA
ggcgagcccctgagctacacccgcttctccctcgcccggcaggtggac

SEQ ID NO: 31211 - RNA, 51 nt, synthetic construct
  misc_feature 1..51: note = Transferrin receptor protein 1 (14-30)
  source 1..51: mol_type = other RNA
ggcggggagcccctgagctacacccgcttctccctcgcccggcaggtggac

SEQ ID NO: 31212 - RNA, 54 nt, synthetic construct
  misc_feature 1..54: note = Transferrin receptor protein 1 (14-31)
  source 1..54: mol_type = other RNA
ggcggggagcccctgagctacacccgcttctccctcgcccggcaggtggacggc

SEQ ID NO: 31213 - RNA, 27 nt, synthetic construct
  misc_feature 1..27: note = Annexin A3 (33-41)
  source 1..27: mol_type = other RNA
ggcatcgggaccgacgagaagatgctg

SEQ ID NO: 31214 - RNA, 27 nt, synthetic construct
  misc_feature 1..27: note = Microtubule-associated protein 1B (225-233)
  source 1..27: mol_type = other RNA
ggcctgagcgagttcaccgagtacctc

SEQ ID NO: 31215 - RNA, 27 nt, synthetic construct
  misc_feature 1..27: note = SCAN domain-containing protein 1 (121-129)
  source 1..27: mol_type = other RNA
ggcccccgcgaggccttccggcagctg

SEQ ID NO: 31216 - RNA, 27 nt, synthetic construct
  misc_feature 1..27: note = Splicing factor 3B subunit 3 (430-438)
  source 1..27: mol_type = other RNA
ggcccccgcagctccctgcgggtgctc

SEQ ID NO: 31217 - RNA, 27 nt, synthetic construct
  misc_feature 1..27: note = Glyoxylate reductase/hydroxypyruvate reductase (162-170)
  source 1..27: mol_type = other RNA
ggccgcatcgggcaggccatcgcccgg

SEQ ID NO: 31218 - RNA, 30 nt, synthetic construct
  misc_feature 1..30: note = 40S ribosomal protein S11 (70-79)
  source 1..30: mol_type = other RNA
ggccgcatcctgagcggggtggtcaccaag

SEQ ID NO: 31219 - RNA, 27 nt, synthetic construct
  misc_feature 1..27: note = Eukaryotic initiation factor 4A-II (368-376)
  source 1..27: mol_type = other RNA
ggccgcaagggggtggccatcaacttc

SEQ ID NO: 31220 - RNA, 27 nt, synthetic construct
  misc_feature 1..27: note = 40S ribosomal protein S4, Y isoform 1 (190-198)
  source 1..27: mol_type = other RNA
ggccgcgtgggggtcatcaccaaccgg

SEQ ID NO: 31221 - RNA, 27 nt, synthetic construct
  misc_feature 1..27: note = Splicing factor 3B subunit 3 (957-965)
  source 1..27: mol_type = other RNA
ggccgcgtgctgatcggggtcggcaag

SEQ ID NO: 31222 - RNA, 30 nt, synthetic construct
  misc_feature 1..30: note = Nucleolar RNA helicase 2 (403-412)
  source 1..30: mol_type = other RNA
atcccccagaagcagcgcgagatcaccctg

SEQ ID NO: 31223 - RNA, 27 nt, synthetic construct
  misc_feature 1..27: note = Probable ATP-dependent RNA helicase DDX4 (355-363)
  source 1..27: mol_type = other RNA
atcaccgccagccgcttcaaggagctg

SEQ ID NO: 31224 - RNA, 27 nt, synthetic construct
  misc_feature 1..27: note = EH domain-containing protein 2 (480-488)
  source 1..27: mol_type = other RNA
aagctgcccaacagcgtgctcggccgc

SEQ ID NO: 31225 - RNA, 27 nt, synthetic construct
  misc_feature 1..27: note = Speriolin-like protein (246-254)
  source 1..27: mol_type = other RNA
aagctgcgcgagctcacccagcggtac

SEQ ID NO: 31226 - RNA, 27 nt, synthetic construct
  misc_feature 1..27: note = Ubiquitin carboxyl-terminal hydrolase 45 (297-305)
  source 1..27: mol_type = other RNA
ctgctccactacctgctggacgccgtg

SEQ ID NO: 31227 - RNA, 27 nt, synthetic construct
  misc_feature 1..27: note = 40S ribosomal protein S4, X isoform (238-246)
  source 1..27: mol_type = other RNA
ctgccccgcggcaaggggatccggctc

SEQ ID NO: 31228 - RNA, 30 nt, synthetic construct
  misc_feature 1..30: note = DNA replication licensing factor MCM6 (215-224)
  source 1..30: mol_type = other RNA
ctgccccgcggcagcatcccgcggtccctc

SEQ ID NO: 31229 - RNA, 33 nt, synthetic construct
  misc_feature 1..33: note = 2',3'-cyclic-nucleotide 3'-phosphodiesterase (303-313)
  source 1..33: mol_type = other RNA
ctgccccgcggcagccgggcccacatcaccctc

SEQ ID NO: 31230 - RNA, 27 nt, synthetic construct
  misc_feature 1..27: note = 39S ribosomal protein L20, mitochondrial (89-97)
  source 1..27: mol_type = other RNA
aacctggtgaagtgccaggtcgagctc

SEQ ID NO: 31231 - RNA, 33 nt, synthetic construct
  misc_feature 1..33: note = Trinucleotide repeat-containing gene 18 protein (554-564)
  source 1..33: mol_type = other RNA
aaccgcaaggccctggccaagggcctcgggctg

SEQ ID NO: 31232 - RNA, 33 nt, synthetic construct
  misc_feature 1..33: note = Transmembrane emp24 domain-containing protein 4 (23-33)
  source 1..33: mol_type = other RNA
aactaccccgagatcgccgccaaggacaagctg

SEQ ID NO: 31233 - RNA, 27 nt, synthetic construct
  misc_feature 1..27: note = Lymphocyte antigen 75 (791-799)
  source 1..27: mol_type = other RNA
cagatccccaagggccgcaccccgaag

SEQ ID NO: 31234 - RNA, 27 nt, synthetic construct
  misc_feature 1..27: note = Ribonucleoside-diphosphate reductase large subunit (742-750)
  source 1..27: mol_type = other RNA
cgccccgccgccaacccgatccagttc

SEQ ID NO: 31235 - RNA, 27 nt, synthetic construct
  misc_feature 1..27: note = Aldo-keto reductase family 1 member C1 (91-99)
  source 1..27: mol_type = other RNA
cgccccgagctggtgcggccggccctc

SEQ ID NO: 31236 - RNA, 30 nt, synthetic construct
  misc_feature 1..30: note = Protein phosphatase 1 regulatory subunit 35 (234-243)
  source 1..30: mol_type = other RNA
cgcccccggccgagcgaggacaccttcctg

SEQ ID NO: 31237 - RNA, 27 nt, synthetic construct
  misc_feature 1..27: note = Frizzled-2 (2-10)
  source 1..27: mol_type = other RNA
cgcccccggagcgccctgccgcgcctc

SEQ ID NO: 31238 - RNA, 27 nt, synthetic construct
  misc_feature 1..27: note = HLA class I histocompatibility antigen, alpha chain E (25-33)
  source 1..27: mol_type = other RNA
agcctgaagtacttccacacctccgtg

SEQ ID NO: 31239 - RNA, 27 nt, synthetic construct
  misc_feature 1..27: note = Histone H2B type 2-F (79-87)
  source 1..27: mol_type = other RNA
agccgcctggcccactacaacaagcgg

SEQ ID NO: 31240 - RNA, 27 nt, synthetic construct
  misc_feature 1..27: note = EH domain-containing protein 2 (484-492)
  source 1..27: mol_type = other RNA
agcgtgctgggccgcatctggaagctc

SEQ ID NO: 31241 - RNA, 33 nt, synthetic construct
  misc_feature 1..33: note = Heterogeneous nuclear ribonucleoprotein K (78-88)
  source 1..33: mol_type = other RNA
gtgcccgacagctccggcccggagcgcatcctg

SEQ ID NO: 31242 - RNA, 27 nt, synthetic construct
  misc_feature 1..27: note = Vimentin (216-224)
  source 1..27: mol_type = other RNA
gcccgcctggacctcgagcggaaggtg

SEQ ID NO: 31243 - RNA, 27 nt, synthetic construct
  misc_feature 1..27: note = E3 ubiquitin-protein ligase HECTD1 (174-182)
  source 1..27: mol_type = other RNA
gcccgcctgggcgtgatcagcaaggtc

SEQ ID NO: 31244 - RNA, 30 nt, synthetic construct
  misc_feature 1..30: note = V-type proton ATPase subunit S1 (217-226)
  source 1..30: mol_type = other RNA
gcccgcctgagcctcacctacgagcggctg

SEQ ID NO: 31245 - RNA, 27 nt, synthetic construct
  misc_feature 1..27: note = Peroxisomal membrane protein PEX16 (38-46)
  source 1..27: mol_type = other RNA
ggccgcttcgccgacagccacgagctg

SEQ ID NO: 31246 - RNA, 30 nt, synthetic construct
  misc_feature 1..30: note = 40S ribosomal protein S21 (44-53)
  source 1..30: mol_type = other RNA
ggccgcttcaacgggcagttcaagacctac

SEQ ID NO: 31247 - RNA, 27 nt, synthetic construct
  misc_feature 1..27: note = Pro-interleukin-16 (881-889)
  source 1..27: mol_type = other RNA
ggccgcttcagcgggctgctcggccgg

SEQ ID NO: 31248 - RNA, 27 nt, synthetic construct
  misc_feature 1..27: note = 60S ribosomal protein L13a (17-25)
  source 1..27: mol_type = other RNA
ggccgcctggccgccatcgtggcgaag

SEQ ID NO: 31249 - RNA, 27 nt, synthetic construct
  misc_feature 1..27: note = Leucine-tRNA ligase, cytoplasmic (57-65)
  source 1..27: mol_type = other RNA
ggccgcctgcacctcgggcacaccttc

SEQ ID NO: 31250 - RNA, 27 nt, synthetic construct
  misc_feature 1..27: note = Amidophosphoribosyltransferase (354-362)
  source 1..27: mol_type = other RNA
ggccgcaccttcatccagcccaacatg

SEQ ID NO: 31251 - RNA, 27 nt, synthetic construct
  misc_feature 1..27: note = Ubiquitin-60S ribosomal protein L40 (58-66)
  source 1..27: mol_type = other RNA
ggccgcaccctgagcgactacaacatc

SEQ ID NO: 31252 - RNA, 30 nt, synthetic construct
  misc_feature 1..30: note = Lamin-B receptor (14-23)
  source 1..30: mol_type = other RNA
ggccgctggcccgggagctccctgtactac

SEQ ID NO: 31253 - RNA, 27 nt, synthetic construct
  misc_feature 1..27: note = 40S ribosomal protein S25 (103-111)
  source 1..27: mol_type = other RNA
caccgcgcccaggtgatctacacccgg

SEQ ID NO: 31254 - RNA, 27 nt, synthetic construct
  misc_feature 1..27: note = Transcription activator BRG1 (1255-1263)
  source 1..27: mol_type = other RNA
caccgcatcggccagcagaacgaggtg

SEQ ID NO: 31255 - RNA, 27 nt, synthetic construct
  misc_feature 1..27: note = H/ACA ribonucleoprotein complex subunit 3 (44-52)
  source 1..27: mol_type = other RNA
caccgcatcaccatcaagaagcggttc

SEQ ID NO: 31256 - RNA, 30 nt, synthetic construct
  misc_feature 1..30: note = Heterogeneous nuclear ribonucleoprotein H (274-283)
  source 1..30: mol_type = other RNA
caccgctacggcgacgggggcagcaccttc

SEQ ID NO: 31257 - RNA, 27 nt, synthetic construct
  misc_feature 1..27: note = Histone H2A type 1-A (88-96)
  source 1..27: mol_type = other RNA
atccgcaacgacgaggagctgaacaag

SEQ ID NO: 31258 - RNA, 27 nt, synthetic construct
  misc_feature 1..27: note = Hsc70-interacting protein (153-161)
  source 1..27: mol_type = other RNA
aagcgcgccagcgtgttcgtcaagctg

SEQ ID NO: 31259 - RNA, 27 nt, synthetic construct
  misc_feature 1..27: note = Signal peptidase complex subunit 2 (164-172)
  source 1..27: mol_type = other RNA
aagcgcttcgacgacaagtacaccctg

SEQ ID NO: 31260 - RNA, 27 nt, synthetic construct
  misc_feature 1..27: note = YEATS domain-containing protein 2 (299-307)
  source 1..27: mol_type = other RNA
aagcgcatcgacatcatccacaacctg

SEQ ID NO: 31261 - RNA, 27 nt, synthetic construct
  misc_feature 1..27: note = Protein arginine N-methyltransferase 1 (266-274)
  source 1..27: mol_type = other RNA
aagcgcaacgactacgtgcacgccctg

SEQ ID NO: 31262 - RNA, 27 nt, synthetic construct
  misc_feature 1..27: note = Cyclic AMP-responsive element-binding protein 3-like protein 2 (270-278)
  source 1..27: mol_type = other RNA
aagcgcaccctgatcgccgagggctac

SEQ ID NO: 31263 - RNA, 30 nt, synthetic construct
  misc_feature 1..30: note = DNA-dependent protein kinase catalytic subunit (263-272)
  source 1..30: mol_type = other RNA
aagcgctacgccgtgcccagcgccggcctg

SEQ ID NO: 31264 - RNA, 27 nt, synthetic construct
  misc_feature 1..27: note = Small nuclear ribonucleoprotein Sm D2 (110-118)
  source 1..27: mol_type = other RNA
ctgcgcaaccccctcatcgccggcaag

SEQ ID NO: 31265 - RNA, 30 nt, synthetic construct
  misc_feature 1..30: note = Solute carrier family 25 member 46 (98-107)
  source 1..30: mol_type = other RNA
aaccgcttcgccggcttcgggatcggcctg

SEQ ID NO: 31266 - RNA, 27 nt, synthetic construct
  misc_feature 1..27: note = General transcription factor II-I (491-499)
  source 1..27: mol_type = other RNA
aaccgcatcaagttcgtgatcaagcgg

SEQ ID NO: 31267 - RNA, 27 nt, synthetic construct
  misc_feature 1..27: note = L-lactate dehydrogenase A chain (111-119)
  source 1..27: mol_type = other RNA
cagcgcaacgtgaacatcttcaagttc

SEQ ID NO: 31268 - RNA, 27 nt, synthetic construct
  misc_feature 1..27: note = Annexin A2 (67-75)
  source 1..27: mol_type = other RNA
cagcgccaggacatcgccttcgcctac

SEQ ID NO: 31269 - RNA, 36 nt, synthetic construct
  misc_feature 1..36: note = 40S ribosomal protein S30 (114-125)
  source 1..36: mol_type = other RNA
cgccggttcgtgaacgtcgtgcccaccttcggcaag

SEQ ID NO: 31270 - RNA, 27 nt, synthetic construct
  misc_feature 1..27: note = 2'-5'-oligoadenylate synthase 1 (94-102)
  source 1..27: mol_type = other RNA
cgccggggcgagttcatccaggagatc

SEQ ID NO: 31271 - RNA, 30 nt, synthetic construct
  misc_feature 1..30: note = NADH dehydrogenase (ubiquinone) 1 alpha subcomplex subunit 1 (52-61)
  source 1..30: mol_type = other RNA
cgccggatcagcggcgtggaccgctactac

SEQ ID NO: 31272 - RNA, 30 nt, synthetic construct
  misc_feature 1..30: note = Protein disulfide-isomerase A3 (4-13)
  source 1..30: mol_type = other RNA
cgccggctggccctcttccccggcgtggcc

SEQ ID NO: 31273 - RNA, 27 nt, synthetic construct
  misc_feature 1..27: note = Reticulocalbin-1 (8-16)
  source 1..27: mol_type = other RNA
cgccggctgggcctcgccctggggctg

SEQ ID NO: 31274 - RNA, 27 nt, synthetic construct
  misc_feature 1..27: note = S-adenosylmethionine synthase isoform type-1 (312-320)
  source 1..27: mol_type = other RNA
cgccgggtgctggtccaggtgagctac

SEQ ID NO: 31275 - RNA, 33 nt, synthetic construct
  misc_feature 1..33: note = Probable ATP-dependent RNA helicase DDX5 (24-34)
  source 1..33: mol_type = other RNA
agccgcgccggccccctgtccgggaagaagttc

SEQ ID NO: 31276 - RNA, 27 nt, synthetic construct
  misc_feature 1..27: note = Membralin (120-128)
  source 1..27: mol_type = other RNA
agccgcgcccccgtgttcctgcagttc

SEQ ID NO: 31277 - RNA, 30 nt, synthetic construct
  misc_feature 1..30: note = Dynamin-like 120 kDa protein, mitochondrial (499-508)
  source 1..30: mol_type = other RNA
agccgcatccagcagatcatcgagggcaag

SEQ ID NO: 31278 - RNA, 27 nt, synthetic construct
  misc_feature 1..27: note = Growth hormone-inducible transmembrane protein (146-154)
  source 1..27: mol_type = other RNA
agccgcacccccgtgctgatgaacttc

SEQ ID NO: 31279 - RNA, 30 nt, synthetic construct
  misc_feature 1..30: note = Clathrin heavy chain 1 (1341-1350)
  source 1..30: mol_type = other RNA
agccgcgtgaacatccccaaggtcctgcgg

SEQ ID NO: 31280 - RNA, 27 nt, synthetic construct
  misc_feature 1..27: note = Heat shock-related 70 kDa protein 2 (344-352)
  source 1..27: mol_type = other RNA
acccgcatccccaagatccagaagctg

SEQ ID NO: 31281 - RNA, 27 nt, synthetic construct
  misc_feature 1..27: note = Polyadenylate-binding protein 1 (289-297)
  source 1..27: mol_type = other RNA
acccgctaccagggcgtgaacctgtac

SEQ ID NO: 31282 - RNA, 33 nt, synthetic construct
  misc_feature 1..33: note = Histone H2B type 2-F (99-109)
  source 1..33: mol_type = other RNA
gtgcgcctgctcctgcccggcgagctggccaag

SEQ ID NO: 31283 - RNA, 30 nt, synthetic construct
  misc_feature 1..30: note = Eukaryotic translation initiation factor 3 subunit B (340-349)
  source 1..30: mol_type = other RNA
gtgcgctggagccccaagggcacctacctg

SEQ ID NO: 31284 - RNA, 27 nt, synthetic construct
  misc_feature 1..27: note = Ras-specific guanine nucleotide-releasing factor 1 (983-991)
  source 1..27: mol_type = other RNA
gccgccgcgaacatcatccgcaccctg

SEQ ID NO: 31285 - RNA, 27 nt, synthetic construct
  misc_feature 1..27: note = Cytoskeleton-associated protein 4 (73-81)
  source 1..27: mol_type = other RNA
gccgccgacaccgagcgcctggcgctc

SEQ ID NO: 31286 - RNA, 42 nt, synthetic construct
  misc_feature 1..42: note = Voltage-dependent anion-selective channel protein 2 (222-235)
  source 1..42: mol_type = other RNA
gccgccaagtaccagctggaccccaccgcgagcatctccgcc

SEQ ID NO: 31287 - RNA, 27 nt, synthetic construct
  misc_feature 1..27: note = RNA polymerase II subunit A C-terminal domain phosphatase (41-49)
  source 1..27: mol_type = other RNA
gccgccgtgcgcatcggcagcgtcctg

SEQ ID NO: 31288 - RNA, 36 nt, synthetic construct
  misc_feature 1..36: note = Protein unc-13 homolog D (1011-1022)
  source 1..36: mol_type = other RNA
gccgacgacctggagggcgaggccttcctccccctg

SEQ ID NO: 31289 - RNA, 39 nt, synthetic construct
  misc_feature 1..39: note = Protein unc-13 homolog D (1011-1023)
  source 1..39: mol_type = other RNA
gccgacgacctggagggcgaggccttcctccccctgcgc

SEQ ID NO: 31290 - RNA, 42 nt, synthetic construct
  misc_feature 1..42: note = Protein unc-13 homolog D (1011-1024)
  source 1..42: mol_type = other RNA
gccgacgacctggagggcgaggccttcctccccctgcgcgag

SEQ ID NO: 31291 - RNA, 45 nt, synthetic construct
  misc_feature 1..45: note = SLAM family member 6 (47-61)
  source 1..45: mol_type = other RNA
gccgacgacaacgtgagcttccgctgggaggccctgggcaacacc

SEQ ID NO: 31292 - RNA, 48 nt, synthetic construct
  misc_feature 1..48: note = SLAM family member 6 (47-62)
  source 1..48: mol_type = other RNA
gccgacgacaacgtgagcttccgctgggaggccctgggcaacaccctc

SEQ ID NO: 31293 - RNA, 36 nt, synthetic construct
  misc_feature 1..36: note = Golgi apparatus protein 1 (724-735)
  source 1..36: mol_type = other RNA
gccgacatcttcgtggaccccgtcctgcacaccgcc

SEQ ID NO: 31294 - RNA, 42 nt, synthetic construct
  misc_feature 1..42: note = Golgi apparatus protein 1 (1059-1072)
  source 1..42: mol_type = other RNA
gccgacatcttcgtggaccccgtcctgcacaccgcctgcgcg

SEQ ID NO: 31295 - RNA, 36 nt, synthetic construct
  misc_feature 1..36: note = Low affinity immunoglobulin epsilon Fc receptor (40-51)
  source 1..36: mol_type = other RNA
gccgacctgagctccttcaagagccaggagctcaac

SEQ ID NO: 31296 - RNA, 42 nt, synthetic construct
  misc_feature 1..42: note = Low affinity immunoglobulin epsilon Fc receptor (40-53)
  source 1..42: mol_type = other RNA
gccgacctgagctccttcaagagccaggagctcaacgagcgc

SEQ ID NO: 31297 - RNA, 45 nt, synthetic construct
  misc_feature 1..45: note = Low affinity immunoglobulin epsilon Fc receptor (40-54)
  source 1..45: mol_type = other RNA
gccgacctgagctccttcaagagccaggagctcaacgagcgcaac

SEQ ID NO: 31298 - RNA, 48 nt, synthetic construct
  misc_feature 1..48: note = Low affinity immunoglobulin epsilon Fc receptor (40-55)
  source 1..48: mol_type = other RNA
gccgacctgagctccttcaagagccaggagctcaacgagcgcaacgag

SEQ ID NO: 31299 - RNA, 51 nt, synthetic construct
  misc_feature 1..51: note = Low affinity immunoglobulin epsilon Fc receptor (40-56)
  source 1..51: mol_type = other RNA
gccgacctgagctccttcaagagccaggagctcaacgagcgcaacgaggcc

SEQ ID NO: 31300 - RNA, 48 nt, synthetic construct
  misc_feature 1..48: note = T-complex protein 1 subunit beta (163-178)
  source 1..48: mol_type = other RNA
gccgacagctacctggacgagggcttcctcctggacaagaagatcggg

SEQ ID NO: 31301 - RNA, 27 nt, synthetic construct
  misc_feature 1..27: note = Eukaryotic translation initiation factor 6 (130-138)
  source 1..27: mol_type = other RNA
gccgacgtgctgaaggtcgaggtgttc

SEQ ID NO: 31302 - RNA, 27 nt, synthetic construct
  misc_feature 1..27: note = Proline-rich protein 12 (390-398)
  source 1..27: mol_type = other RNA
gccgaggaggccggcgggacccgcctg

SEQ ID NO: 31303 - RNA, 27 nt, synthetic construct
  misc_feature 1..27: note = Probable ribonuclease ZC3H12D (154-162)
  source 1..27: mol_type = other RNA
gccgagctggagcgccaggccgtgctc

SEQ ID NO: 31304 - RNA, 30 nt, synthetic construct
  misc_feature 1..30: note = A-kinase anchor protein 2 (688-697)
  source 1..30: mol_type = other RNA
gccgagctgcgcagcaccgcctccctcctg

SEQ ID NO: 31305 - RNA, 48 nt, synthetic construct
  misc_feature 1..48: note = Ragulator complex protein LAMTOR1 (36-51)
  source 1..48: mol_type = other RNA
gccgagcccaactaccacagcctgccgtccgcccgcaccgacgagcag

SEQ ID NO: 31306 - RNA, 57 nt, synthetic construct
  misc_feature 1..57: note = Low affinity immunoglobulin epsilon Fc receptor (19-37)
  source 1..57: mol_type = other RNA
gccgagcagcagcgcctgaagagccaggacctcgagctgtcctggaacctgaacggc

SEQ ID NO: 31307 - RNA, 30 nt, synthetic construct
  misc_feature 1..30: note = Ribonucleoside-diphosphate reductase subunit M2 B (284-293)
  source 1..30: mol_type = other RNA
gccgagaccaccgacaacgtgttcacgctg

SEQ ID NO: 31308 - RNA, 27 nt, synthetic construct
  misc_feature 1..27: note = Zinc finger protein 638 (1263-1271)
  source 1..27: mol_type = other RNA
gccgaggtggagaagaacgagaccgtc

SEQ ID NO: 31309 - RNA, 45 nt, synthetic construct
  misc_feature 1..45: note = Peroxisomal multifunctional enzyme type 2 (19-33)
  source 1..45: mol_type = other RNA
gccggcctggggcgcgcctacgcgctcgccttcgccgagcggggc

SEQ ID NO: 31310 - RNA, 45 nt, synthetic construct
  misc_feature 1..45: note = B- and T-lymphocyte attenuator (191-205)
  source 1..45: mol_type = other RNA
gccggccgcgagatcaacctggtggacgcccacctcaagagcgag

SEQ ID NO: 31311 - RNA, 51 nt, synthetic construct
  misc_feature 1..51: note = B- and T-lymphocyte attenuator (191-207)
  source 1..51: mol_type = other RNA
gccggccgcgagatcaacctggtggacgcccacctcaagagcgagcagacc

SEQ ID NO: 31312 - RNA, 36 nt, synthetic construct
  misc_feature 1..36: note = CD44 antigen (8-19)
  source 1..36: mol_type = other RNA
gccggcgtgttccacgtcgagaagaacgggcgctac

SEQ ID NO: 31313 - RNA, 30 nt, synthetic construct
  misc_feature 1..30: note = Cordon-bleu protein-like 1 (1088-1097)
  source 1..30: mol_type = other RNA
gccatccgcagcggcgaggccgcggccaag

SEQ ID NO: 31314 - RNA, 36 nt, synthetic construct
  misc_feature 1..36: note = C-C chemokine receptor type 7 (94-105)
  source 1..36: mol_type = other RNA
gccatcgtgcaggccgtcagcgcgcaccgccaccgg

SEQ ID NO: 31315 - RNA, 42 nt, synthetic construct
  misc_feature 1..42: note = Ragulator complex protein LAMTOR3 (21-34)
  source 1..42: mol_type = other RNA
gccatcgtggtcagcgaccgcgacggcgtgcccgtgatcaag

SEQ ID NO: 31316 - RNA, 45 nt, synthetic construct
  misc_feature 1..45: note = IgG receptor FcRn large subunit p51 (131-145)
  source 1..45: mol_type = other RNA
gccaagttcgccctgaacggcgaggagttcatgaacttcgacctc

SEQ ID NO: 31317 - RNA, 48 nt, synthetic construct
  misc_feature 1..48: note = IgG receptor FcRn large subunit p51 (131-146)
  source 1..48: mol_type = other RNA
gccaagttcgccctgaacggcgaggagttcatgaacttcgacctcaag

SEQ ID NO: 31318 - RNA, 42 nt, synthetic construct
  misc_feature 1..42: note = Glutathione peroxidase 1 (84-97)
  source 1..42: mol_type = other RNA
gccctgatgaccgaccccaagctcatcacctggagcccggtg

SEQ ID NO: 31319 - RNA, 39 nt, synthetic construct
  misc_feature 1..39: note = IgG receptor FcRn large subunit p51 (134-146)
  source 1..39: mol_type = other RNA
gccctgaacggcgaggagttcatgaacttcgacctcaag

SEQ ID NO: 31320 - RNA, 27 nt, synthetic construct
  misc_feature 1..27: note = Serine/threonine-protein kinase LATS1 (729-737)
  source 1..27: mol_type = other RNA
gccctgtacgccaccaagaccctccgc

SEQ ID NO: 31321 - RNA, 42 nt, synthetic construct
  misc_feature 1..42: note = E3 ubiquitin-protein ligase CHIP (43-56)
  source 1..42: mol_type = other RNA
gccaacctgcagcgcgcctacagcctcgcgaaggagcagcgg

SEQ ID NO: 31322 - RNA, 33 nt, synthetic construct
  misc_feature 1..33: note = A-kinase anchor protein 2 (298-308)
  source 1..33: mol_type = other RNA
gcccccgccagctcccacgagcgcgcgagcatg

SEQ ID NO: 31323 - RNA, 30 nt, synthetic construct
  misc_feature 1..30: note = Interferon regulatory factor 9 (199-208)
  source 1..30: mol_type = other RNA
gcccccttccagggcgaccagcgcagcctg

SEQ ID NO: 31324 - RNA, 30 nt, synthetic construct
  misc_feature 1..30: note = T-cell activation Rho GTPase-activating protein (268-277)
  source 1..30: mol_type = other RNA
gcccccggcagcgtgctgccgcgcgccctc

SEQ ID NO: 31325 - RNA, 45 nt, synthetic construct
  misc_feature 1..45: note = Platelet endothelial cell adhesion molecule (159-173)
  source 1..45: mol_type = other RNA
gcccccatccacttcaccatcgagaagctggagctcaacgagaag

SEQ ID NO: 31326 - RNA, 42 nt, synthetic construct
  misc_feature 1..42: note = Alpha-1B-glycoprotein (205-218)
  source 1..42: mol_type = other RNA
gcccccctggagggcgcccgcttcgcgctcgtgcgggaggac

SEQ ID NO: 31327 - RNA, 27 nt, synthetic construct
  misc_feature 1..27: note = TBC1 domain family member 22A (113-121)
  source 1..27: mol_type = other RNA
gcccccctgcagcgcagccagtccctc

SEQ ID NO: 31328 - RNA, 27 nt, synthetic construct
  misc_feature 1..27: note = Cordon-bleu protein-like 1 (891-899)
  source 1..27: mol_type = other RNA
gcccccaacccggcccccaaggagctg

SEQ ID NO: 31329 - RNA, 24 nt, synthetic construct
  misc_feature 1..24: note = Negative elongation factor E (257-264)
  source 1..24: mol_type = other RNA
gccccccgcaagggcaacaccctg

SEQ ID NO: 31330 - RNA, 27 nt, synthetic construct
  misc_feature 1..27: note = Cyclin-dependent kinase inhibitor 1C (105-113)
  source 1..27: mol_type = other RNA
gccccccgcccggtggccgtcgcggtg

SEQ ID NO: 31331 - RNA, 27 nt, synthetic construct
  misc_feature 1..27: note = Endoplasmic reticulum resident protein 44 (391-399)
  source 1..27: mol_type = other RNA
gcccccagcgagtaccgctacaccctg

SEQ ID NO: 31332 - RNA, 30 nt, synthetic construct
  misc_feature 1..30: note = Endoplasmic reticulum resident protein 44 (391-400)
  source 1..30: mol_type = other RNA
gcccccagcgagtaccgctacaccctgctc

SEQ ID NO: 31333 - RNA, 48 nt, synthetic construct
  misc_feature 1..48: note = Lipolysis-stimulated lipoprotein receptor (216-231)
  source 1..48: mol_type = other RNA
gcccccagcacctacgcccacctgtccccggcgaagaccccccccccc

SEQ ID NO: 31334 - RNA, 51 nt, synthetic construct
  misc_feature 1..51: note = Lipolysis-stimulated lipoprotein receptor (216-232)
  source 1..51: mol_type = other RNA
gcccccagcacctacgcccacctgtccccggcgaagacccccccccccccg

SEQ ID NO: 31335 - RNA, 54 nt, synthetic construct
  misc_feature 1..54: note = Lipolysis-stimulated lipoprotein receptor (216-233)
  source 1..54: mol_type = other RNA
gcccccagcacctacgcccacctgtccccggcgaagacccccccccccccggcc

SEQ ID NO: 31336 - RNA, 39 nt, synthetic construct
  misc_feature 1..39: note = C-C chemokine receptor type 7 (190-202)
  source 1..39: mol_type = other RNA
gcccgcaacttcgagcggaacaaggccatcaaggtgatc

SEQ ID NO: 31337 - RNA, 45 nt, synthetic construct
  misc_feature 1..45: note = C-C chemokine receptor type 7 (190-204)
  source 1..45: mol_type = other RNA
gcccgcaacttcgagcggaacaaggccatcaaggtgatcatcgcg

SEQ ID NO: 31338 - RNA, 48 nt, synthetic construct
  misc_feature 1..48: note = Glucose-6-phosphate isomerase (181-196)
  source 1..48: mol_type = other RNA
gccagcaagaccttcaccacgcaggagaccatcaccaacgccgagacc

SEQ ID NO: 31339 - RNA, 45 nt, synthetic construct
  misc_feature 1..45: note = Cystatin-C (63-77)
  source 1..45: mol_type = other RNA
gccagcaacgacatgtaccactcccgcgccctgcaggtggtccgg

SEQ ID NO: 31340 - RNA, 48 nt, synthetic construct
  misc_feature 1..48: note = Cystatin-C (63-78)
  source 1..48: mol_type = other RNA
gccagcaacgacatgtaccactcccgcgccctgcaggtggtccgggcg

SEQ ID NO: 31341 - RNA, 27 nt, synthetic construct
  misc_feature 1..27: note = A-kinase anchor protein 2 (107-115)
  source 1..27: mol_type = other RNA
gccagccgccaggcccccccgcacatc

SEQ ID NO: 31342 - RNA, 30 nt, synthetic construct
  misc_feature 1..30: note = Exostosin-2 (691-700)
  source 1..30: mol_type = other RNA
gccagcgtgttcggcaccatgcccctgaag

SEQ ID NO: 31343 - RNA, 30 nt, synthetic construct
  misc_feature 1..30: note = Fatty acyl-CoA reductase 2 (227-236)
  source 1..30: mol_type = other RNA
gccaccttcgagaagatccccttcgagcgc

SEQ ID NO: 31344 - RNA, 45 nt, synthetic construct
  misc_feature 1..45: note = Ras-related protein Rab-11A (49-63)
  source 1..45: mol_type = other RNA
gccacccgcagcatccaggtggacggcaagaccatcaaggcccag

SEQ ID NO: 31345 - RNA, 48 nt, synthetic construct
  misc_feature 1..48: note = Ras-related protein Rab-11A (49-64)
  source 1..48: mol_type = other RNA
gccacccgcagcatccaggtggacggcaagaccatcaaggcccagatc

SEQ ID NO: 31346 - RNA, 27 nt, synthetic construct
  misc_feature 1..27: note = Cadherin EGF LAG seven-pass G-type receptor 1 (1076-1084)
  source 1..27: mol_type = other RNA
gccaccagcgcccccctggtgtcccgc

SEQ ID NO: 31347 - RNA, 33 nt, synthetic construct
  misc_feature 1..33: note = Tumor protein p53-inducible protein 11 (90-100)
  source 1..33: mol_type = other RNA
gccgtgttcgacggcgcccaggtcaccagcaag

SEQ ID NO: 31348 - RNA, 27 nt, synthetic construct
  misc_feature 1..27: note = Short-chain dehydrogenase/reductase 3 (9-17)
  source 1..27: mol_type = other RNA
gccgtgggcctggtcctccccgccaag

SEQ ID NO: 31349 - RNA, 30 nt, synthetic construct
  misc_feature 1..30: note = A-kinase anchor protein 2 (230-239)
  source 1..30: mol_type = other RNA
gccgtgaagaagaaccccggcatcgccgcg

SEQ ID NO: 31350 - RNA, 51 nt, synthetic construct
  misc_feature 1..51: note = SLAM family member 6 (46-62)
  source 1..51: mol_type = other RNA
gacgccgacgacaacgtgagcttccgctgggaggccctgggcaacaccctc

SEQ ID NO: 31351 - RNA, 42 nt, synthetic construct
  misc_feature 1..42: note = Peroxisomal multifunctional enzyme type 2 (88-101)
  source 1..42: mol_type = other RNA
gacgccttcggccgcatcgacgtggtcgtgaacaacgccggg

SEQ ID NO: 31352 - RNA, 45 nt, synthetic construct
  misc_feature 1..45: note = Lymphocyte antigen 9 (125-139)
  source 1..45: mol_type = other RNA
gacgccggcagctacaaggcccagatcaaccagcgcaacttcgag

SEQ ID NO: 31353 - RNA, 51 nt, synthetic construct
  misc_feature 1..51: note = Lymphocyte antigen 9 (125-141)
  source 1..51: mol_type = other RNA
gacgccggcagctacaaggcccagatcaaccagcgcaacttcgaggtgacc

SEQ ID NO: 31354 - RNA, 24 nt, synthetic construct
  misc_feature 1..24: note = Cell division cycle-associated 7-like protein (200-207)
  source 1..24: mol_type = other RNA
gacgccctgctcaagcgcaccatg

SEQ ID NO: 31355 - RNA, 27 nt, synthetic construct
  misc_feature 1..27: note = Probable ribosome biogenesis protein RLP24 (91-99)
  source 1..27: mol_type = other RNA
gacgccatgaagcgcgtggaggagatc

SEQ ID NO: 31356 - RNA, 39 nt, synthetic construct
  misc_feature 1..39: note = Platelet endothelial cell adhesion molecule (416-428)
  source 1..39: mol_type = other RNA
gacgcccagttcgaggtgatcaagggccagaccatcgag

SEQ ID NO: 31357 - RNA, 45 nt, synthetic construct
  misc_feature 1..45: note = Platelet endothelial cell adhesion molecule (416-430)
  source 1..45: mol_type = other RNA
gacgcccagttcgaggtgatcaagggccagaccatcgaggtccgc

SEQ ID NO: 31358 - RNA, 36 nt, synthetic construct
  misc_feature 1..36: note = Ceruloplasmin (715-726)
  source 1..36: mol_type = other RNA
gacgacaacatcaagacctacagcgaccaccccgag

SEQ ID NO: 31359 - RNA, 39 nt, synthetic construct
  misc_feature 1..39: note = Ceruloplasmin (715-727)
  source 1..39: mol_type = other RNA
gacgacaacatcaagacctacagcgaccaccccgagaag

SEQ ID NO: 31360 - RNA, 42 nt, synthetic construct
  misc_feature 1..42: note = SLAM family member 6 (48-61)
  source 1..42: mol_type = other RNA
gacgacaacgtgagcttccgctgggaggccctgggcaacacc

SEQ ID NO: 31361 - RNA, 45 nt, synthetic construct
  misc_feature 1..45: note = SLAM family member 6 (48-62)
  source 1..45: mol_type = other RNA
gacgacaacgtgagcttccgctgggaggccctgggcaacaccctc

SEQ ID NO: 31362 - RNA, 51 nt, synthetic construct
  misc_feature 1..51: note = Ceramide glucosyltransferase (91-107)
  source 1..51: mol_type = other RNA
gacgaccccgccatcgacgtgtgcaagaagctgctcggcaagtacccgaac

SEQ ID NO: 31363 - RNA, 27 nt, synthetic construct
  misc_feature 1..27: note = Dystrophin (386-394)
  source 1..27: mol_type = other RNA
gacgagcacctgctcatccagcactac

SEQ ID NO: 31364 - RNA, 27 nt, synthetic construct
  misc_feature 1..27: note = E3 ubiquitin-protein ligase Mdm2 (68-76)
  source 1..27: mol_type = other RNA
gacgagaagcagcagcacatcgtgtac

SEQ ID NO: 31365 - RNA, 27 nt, synthetic construct
  misc_feature 1..27: note = Dynamin-binding protein (858-866)
  source 1..27: mol_type = other RNA
gacgagctgcccaagttccaccagtac

SEQ ID NO: 31366 - RNA, 27 nt, synthetic construct
  misc_feature 1..27: note = Transmembrane emp24 domain-containing protein 4 (48-56)
  source 1..27: mol_type = other RNA
gacgagaccatggtgatcggcaactac

SEQ ID NO: 31367 - RNA, 27 nt, synthetic construct
  misc_feature 1..27: note = Uncharacterized protein CXorf21 (47-55)
  source 1..27: mol_type = other RNA
gacgagacccaggtgcgcagcctgtac

SEQ ID NO: 31368 - RNA, 24 nt, synthetic construct
  misc_feature 1..24: note = TBC1 domain family member 22A (223-230)
  source 1..24: mol_type = other RNA
gacgaggtgcaccaggacacctac

SEQ ID NO: 31369 - RNA, 27 nt, synthetic construct
  misc_feature 1..27: note = E3 ubiquitin-protein ligase Mdm2 (273-281)
  source 1..27: mol_type = other RNA
gacgaggtgtaccaggtcaccgtgtac

SEQ ID NO: 31370 - RNA, 42 nt, synthetic construct
  misc_feature 1..42: note = MyoD family inhibitor domain-containing protein (67-80)
  source 1..42: mol_type = other RNA
gacggcgagctgatccgcacccagccccagcggctcccgcag

SEQ ID NO: 31371 - RNA, 24 nt, synthetic construct
  misc_feature 1..24: note = Obscurin-like protein 1 (299-306)
  source 1..24: mol_type = other RNA
gacggcgggttcgtgctgaaggtc

SEQ ID NO: 31372 - RNA, 54 nt, synthetic construct
  misc_feature 1..54: note = Beta-1,4-galactosyltransferase 1 (110-127)
  source 1..54: mol_type = other RNA
gacggcctgaacagcctcacctaccaggtgctggacgtccagcgctaccccctg

SEQ ID NO: 31373 - RNA, 39 nt, synthetic construct
  misc_feature 1..39: note = Plasma membrane calcium-transporting ATPase 1 (257-269)
  source 1..39: mol_type = other RNA
gacggcagctaccgcatcttctccaagggggccagcgag

SEQ ID NO: 31374 - RNA, 24 nt, synthetic construct
  misc_feature 1..24: note = T-cell activation Rho GTPase-activating protein (29-36)
  source 1..24: mol_type = other RNA
gacatcaaggagcaccccctgctc

SEQ ID NO: 31375 - RNA, 27 nt, synthetic construct
  misc_feature 1..27: note = Probable ribosome biogenesis protein RLP24 (123-131)
  source 1..27: mol_type = other RNA
gacatcaaggaggtgaagcagaacatc

SEQ ID NO: 31376 - RNA, 48 nt, synthetic construct
  misc_feature 1..48: note = Vesicle-associated membrane protein 3 (27-42)
  source 1..48: mol_type = other RNA
gacatcatgcgcgtgaacgtcgacaaggtgctggagcgggaccagaag

SEQ ID NO: 31377 - RNA, 51 nt, synthetic construct
  misc_feature 1..51: note = Vesicle-associated membrane protein 3 (27-43)
  source 1..51: mol_type = other RNA
gacatcatgcgcgtgaacgtcgacaaggtgctggagcgggaccagaagctc

SEQ ID NO: 31378 - RNA, 39 nt, synthetic construct
  misc_feature 1..39: note = Endoplasmin (536-548)
  source 1..39: mol_type = other RNA
gacaagatctacttcatggccggcagctcccgcaaggag

SEQ ID NO: 31379 - RNA, 48 nt, synthetic construct
  misc_feature 1..48: note = Ceramide glucosyltransferase (43-58)
  source 1..48: mol_type = other RNA
gacaagcagccctacagcaagctgccgggcgtgtccctcctgaagccc

SEQ ID NO: 31380 - RNA, 51 nt, synthetic construct
  misc_feature 1..51: note = Ceramide glucosyltransferase (43-59)
  source 1..51: mol_type = other RNA
gacaagcagccctacagcaagctgccgggcgtgtccctcctgaagcccctg

SEQ ID NO: 31381 - RNA, 27 nt, synthetic construct
  misc_feature 1..27: note = Poly (ADP-ribose) polymerase 3 (217-225)
  source 1..27: mol_type = other RNA
gacctggacgtgaagaagatgcccctc

SEQ ID NO: 31382 - RNA, 45 nt, synthetic construct
  misc_feature 1..45: note = Perilipin-3 (369-383)
  source 1..45: mol_type = other RNA
gacctgagctccagcatcctcgcccagtcccgcgagcgggtggcc

SEQ ID NO: 31383 - RNA, 27 nt, synthetic construct
  misc_feature 1..27: note = Cytoskeleton-associated protein 4 (188-196)
  source 1..27: mol_type = other RNA
gacatgaaggccaaggtggccagcctg

SEQ ID NO: 31384 - RNA, 48 nt, synthetic construct
  misc_feature 1..48: note = Phosphoinositide-3-kinase-interacting protein 1 (28-43)
  source 1..48: mol_type = other RNA
gacaacggccacctgtaccgcgaggaccagaccagccccgccccgggg

SEQ ID NO: 31385 - RNA, 54 nt, synthetic construct
  misc_feature 1..54: note = Phosphoinositide-3-kinase-interacting protein 1 (28-45)
  source 1..54: mol_type = other RNA
gacaacggccacctgtaccgcgaggaccagaccagccccgccccggggctccgg

SEQ ID NO: 31386 - RNA, 42 nt, synthetic construct
  misc_feature 1..42: note = Protein CDV3 homolog (139-152)
  source 1..42: mol_type = other RNA
gacaaccagtacgccgtgctggagaaccagaagagctcccac

SEQ ID NO: 31387 - RNA, 39 nt, synthetic construct
  misc_feature 1..39: note = SLAM family member 6 (49-61)
  source 1..39: mol_type = other RNA
gacaacgtgagcttccgctgggaggccctgggcaacacc

SEQ ID NO: 31388 - RNA, 42 nt, synthetic construct
  misc_feature 1..42: note = SLAM family member 6 (49-62)
  source 1..42: mol_type = other RNA
gacaacgtgagcttccgctgggaggccctgggcaacaccctc

SEQ ID NO: 31389 - RNA, 45 nt, synthetic construct
  misc_feature 1..45: note = SLAM family member 6 (49-63)
  source 1..45: mol_type = other RNA
gacaacgtgagcttccgctgggaggccctgggcaacaccctctcc

SEQ ID NO: 31390 - RNA, 45 nt, synthetic construct
  misc_feature 1..45: note = Golgi apparatus protein 1 (492-506)
  source 1..45: mol_type = other RNA
gaccccggcgccgactaccgcatcgaccgggccctgaacgaggcg

SEQ ID NO: 31391 - RNA, 51 nt, synthetic construct
  misc_feature 1..51: note = Peroxiredoxin-1 (107-123)
  source 1..51: mol_type = other RNA
gaccccaagcgcaccatcgcccaggactacggcgtgctgaaggccgacgag

SEQ ID NO: 31392 - RNA, 54 nt, synthetic construct
  misc_feature 1..54: note = Peroxiredoxin-1 (107-124)
  source 1..54: mol_type = other RNA
gaccccaagcgcaccatcgcccaggactacggcgtgctgaaggccgacgagggg

SEQ ID NO: 31393 - RNA, 27 nt, synthetic construct
  misc_feature 1..27: note = Methyltransferase-like protein 7A (98-106)
  source 1..27: mol_type = other RNA
gaccccaacccgaacttcgagaagttc

SEQ ID NO: 31394 - RNA, 45 nt, synthetic construct
  misc_feature 1..45: note = Glucose-6-phosphate isomerase (276-290)
  source 1..45: mol_type = other RNA
gaccagcacttccgcaccacccccctggagaagaacgccccggtg

SEQ ID NO: 31395 - RNA, 27 nt, synthetic construct
  misc_feature 1..27: note = Perilipin-2 (38-46)
  source 1..27: mol_type = other RNA
gaccagtacccctacctgaagagcgtg

SEQ ID NO: 31396 - RNA, 27 nt, synthetic construct
  misc_feature 1..27: note = T-cell activation Rho GTPase-activating protein (165-173)
  source 1..27: mol_type = other RNA
gacagcgccggcccccaggacgcccgc

SEQ ID NO: 31397 - RNA, 42 nt, synthetic construct
  misc_feature 1..42: note = Ceruloplasmin (187-200)
  source 1..42: mol_type = other RNA
gacagcgccgtgttcttcgagcagggcaccacccgcatcggg

SEQ ID NO: 31398 - RNA, 39 nt, synthetic construct
  misc_feature 1..39: note = T-complex protein 1 subunit beta (164-176)
  source 1..39: mol_type = other RNA
gacagctacctggacgagggcttcctcctggacaagaag

SEQ ID NO: 31399 - RNA, 45 nt, synthetic construct
  misc_feature 1..45: note = T-complex protein 1 subunit beta (164-178)
  source 1..45: mol_type = other RNA
gacagctacctggacgagggcttcctcctggacaagaagatcggg

SEQ ID NO: 31400 - RNA, 48 nt, synthetic construct
  misc_feature 1..48: note = SLAM family member 6 (103-118)
  source 1..48: mol_type = other RNA
gacaccggcagctaccgcgcccagatctccaccaagacgagcgccaag

SEQ ID NO: 31401 - RNA, 39 nt, synthetic construct
  misc_feature 1..39: note = SLAM family member 6 (193-205)
  source 1..39: mol_type = other RNA
gacaccatcaccatctacagcacgatcaaccactccaag

SEQ ID NO: 31402 - RNA, 27 nt, synthetic construct
  misc_feature 1..27: note = Interferon regulatory factor 9 (104-112)
  source 1..27: mol_type = other RNA
gacgtggccgagccctacaaggtctac

SEQ ID NO: 31403 - RNA, 45 nt, synthetic construct
  misc_feature 1..45: note = HLA class II histocompatibility antigen, DO beta chain (69-83)
  source 1..45: mol_type = other RNA
gacgtgggcatgttcgtcgccctgaccaagctcgggcagcccgac

SEQ ID NO: 31404 - RNA, 60 nt, synthetic construct
  misc_feature 1..60: note = Endoplasmin (783-802)
  source 1..60: mol_type = other RNA
gacgtgggcaccgacgaggaggaggagaccgccaaggagagcacggccgagaaggacgag

SEQ ID NO: 31405 - RNA, 30 nt, synthetic construct
  misc_feature 1..30: note = Dynamin-binding protein (46-55)
  source 1..30: mol_type = other RNA
gacgtgaccggccagttccccagctccttc

SEQ ID NO: 31406 - RNA, 48 nt, synthetic construct
  misc_feature 1..48: note = Testican-2 (66-81)
  source 1..48: mol_type = other RNA
gaggacgactacatcaagagctgggaggacaaccagcagggcgacgag

SEQ ID NO: 31407 - RNA, 27 nt, synthetic construct
  misc_feature 1..27: note = Elongator complex protein 3 (321-329)
  source 1..27: mol_type = other RNA
gaggaccccgaccaggacatcctgatc

SEQ ID NO: 31408 - RNA, 51 nt, synthetic construct
  misc_feature 1..51: note = SLAM family member 6 (102-118)
  source 1..51: mol_type = other RNA
gaggacaccggcagctaccgcgcccagatctccaccaagacgagcgccaag

SEQ ID NO: 31409 - RNA, 45 nt, synthetic construct
  misc_feature 1..45: note = Receptor-type tyrosine-protein phosphatase alpha (384-398)
  source 1..45: mol_type = other RNA
gaggagttcaagaagctgaccagcatcaagatccagaacgacaag

SEQ ID NO: 31410 - RNA, 27 nt, synthetic construct
  misc_feature 1..27: note = ATP-binding cassette sub-family A member 6 (1600-1608)
  source 1..27: mol_type = other RNA
gaggagatcgacaccaccatgcgctgg

SEQ ID NO: 31411 - RNA, 51 nt, synthetic construct
  misc_feature 1..51: note = 14-3-3 protein beta/alpha (41-57)
  source 1..51: mol_type = other RNA
gaggagcgcaacctgctcagcgtggcctacaagaacgtcgtgggcgcccgg

SEQ ID NO: 31412 - RNA, 42 nt, synthetic construct
  misc_feature 1..42: note = Ras GTPase-activating-like protein IQGAP1 (61-74)
  source 1..42: mol_type = other RNA
gaggaggtgatcaccctgatccgcagcaaccagcagctcgag

SEQ ID NO: 31413 - RNA, 45 nt, synthetic construct
  misc_feature 1..45: note = Ras GTPase-activating-like protein IQGAP1 (61-75)
  source 1..45: mol_type = other RNA
gaggaggtgatcaccctgatccgcagcaaccagcagctcgagaac

SEQ ID NO: 31414 - RNA, 39 nt, synthetic construct
  misc_feature 1..39: note = Glycosyltransferase 8 domain-containing protein 1 (272-284)
  source 1..39: mol_type = other RNA
gagggcctgtacagccgcaccctcgccgggtccatcacc

SEQ ID NO: 31415 - RNA, 48 nt, synthetic construct
  misc_feature 1..48: note = Glycosyltransferase 8 domain-containing protein 1 (272-287)
  source 1..48: mol_type = other RNA
gagggcctgtacagccgcaccctcgccgggtccatcaccacgcccccg

SEQ ID NO: 31416 - RNA, 39 nt, synthetic construct
  misc_feature 1..39: note = Serine incorporator 3 (399-411)
  source 1..39: mol_type = other RNA
gagggcgtgcagtacagctactccctgttccacctcatg

SEQ ID NO: 31417 - RNA, 42 nt, synthetic construct
  misc_feature 1..42: note = Serine incorporator 3 (399-412)
  source 1..42: mol_type = other RNA
gagggcgtgcagtacagctactccctgttccacctcatgctg

SEQ ID NO: 31418 - RNA, 45 nt, synthetic construct
  misc_feature 1..45: note = Cystatin-C (47-61)
  source 1..45: mol_type = other RNA
gagggcgtgcgccgggccctggacttcgccgtcggggagtacaac

SEQ ID NO: 31419 - RNA, 48 nt, synthetic construct
  misc_feature 1..48: note = Cystatin-C (47-62)
  source 1..48: mol_type = other RNA
gagggcgtgcgccgggccctggacttcgccgtcggggagtacaacaag

SEQ ID NO: 31420 - RNA, 27 nt, synthetic construct
  misc_feature 1..27: note = Lysine-specific demethylase 2B (554-562)
  source 1..27: mol_type = other RNA
gagcacgccgacgacgaccccagcctg

SEQ ID NO: 31421 - RNA, 27 nt, synthetic construct
  misc_feature 1..27: note = Dynamin-binding protein (916-924)
  source 1..27: mol_type = other RNA
gagcacagccgcgtgctgcagcagctc

SEQ ID NO: 31422 - RNA, 27 nt, synthetic construct
  misc_feature 1..27: note = Endoplasmic reticulum resident protein 44 (277-285)
  source 1..27: mol_type = other RNA
gagatcttccagaacgaggtggcccgc

SEQ ID NO: 31423 - RNA, 45 nt, synthetic construct
  misc_feature 1..45: note = Calsyntenin-1 (203-217)
  source 1..45: mol_type = other RNA
gagatcatcacccccgacgtgccgttcaccgtcgacaaggacggc

SEQ ID NO: 31424 - RNA, 48 nt, synthetic construct
  misc_feature 1..48: note = Perilipin-3 (64-79)
  source 1..48: mol_type = other RNA
gagaagggcgtgcgcaccctgaccgccgccgcggtcagcggggcccag

SEQ ID NO: 31425 - RNA, 51 nt, synthetic construct
  misc_feature 1..51: note = Perilipin-3 (64-80)
  source 1..51: mol_type = other RNA
gagaagggcgtgcgcaccctgaccgccgccgcggtcagcggggcccagccc

SEQ ID NO: 31426 - RNA, 54 nt, synthetic construct
  misc_feature 1..54: note = Perilipin-3 (64-81)
  source 1..54: mol_type = other RNA
gagaagggcgtgcgcaccctgaccgccgccgcggtcagcggggcccagcccatc

SEQ ID NO: 31427 - RNA, 39 nt, synthetic construct
  misc_feature 1..39: note = Glycosyltransferase 8 domain-containing protein 1 (347-359)
  source 1..39: mol_type = other RNA
gagaagtggtacatccccgacccgaccggcaagttcaac

SEQ ID NO: 31428 - RNA, 48 nt, synthetic construct
  misc_feature 1..48: note = Testican-2 (316-331)
  source 1..48: mol_type = other RNA
gagctggagcgcatccagatccaggaggccgccaagaagaagcccggc

SEQ ID NO: 31429 - RNA, 42 nt, synthetic construct
  misc_feature 1..42: note = ATP synthase subunit alpha, mitochondrial (295-308)
  source 1..42: mol_type = other RNA
gagctgttctacaagggcatccgccccgccatcaacgtgggg

SEQ ID NO: 31430 - RNA, 39 nt, synthetic construct
  misc_feature 1..39: note = Alpha-1B-glycoprotein (176-188)
  source 1..39: mol_type = other RNA
gagctgatcctcagcgacgagaccctgcccgccccggag

SEQ ID NO: 31431 - RNA, 27 nt, synthetic construct
  misc_feature 1..27: note = NACHT, LRR and PYD domains-containing protein 2 (1026-1034)
  source 1..27: mol_type = other RNA
gagctgaacaagctcctggaggagatc

SEQ ID NO: 31432 - RNA, 27 nt, synthetic construct
  misc_feature 1..27: note = Baculoviral IAP repeat-containing protein 5 (95-103)
  source 1..27: mol_type = other RNA
gagctgaccctcggcgagttcctgaag

SEQ ID NO: 31433 - RNA, 45 nt, synthetic construct
  misc_feature 1..45: note = SLAM family member 6 (191-205)
  source 1..45: mol_type = other RNA
gagaacgacaccatcaccatctacagcacgatcaaccactccaag

SEQ ID NO: 31434 - RNA, 60 nt, synthetic construct
  misc_feature 1..60: note = SLAM family member 6 (191-210)
  source 1..60: mol_type = other RNA
gagaacgacaccatcaccatctacagcacgatcaaccactccaaggagagcaagcccacc

SEQ ID NO: 31435 - RNA, 45 nt, synthetic construct
  misc_feature 1..45: note = Alpha-mannosidase 2 (64-78)
  source 1..45: mol_type = other RNA
gagaacaacgagatcatcagcaacatccgcgactccgtgatcaac

SEQ ID NO: 31436 - RNA, 24 nt, synthetic construct
  misc_feature 1..24: note = Proline-rich protein 12 (830-837)
  source 1..24: mol_type = other RNA
gagaacgtgaacaagaaggactac

SEQ ID NO: 31437 - RNA, 45 nt, synthetic construct
  misc_feature 1..45: note = Low affinity immunoglobulin epsilon Fc receptor (20-34)
  source 1..45: mol_type = other RNA
gagcagcagcgcctgaagagccaggacctcgagctgtcctggaac

SEQ ID NO: 31438 - RNA, 27 nt, synthetic construct
  misc_feature 1..27: note = RNA polymerase II subunit A C-terminal domain phosphatase (86-94)
  source 1..27: mol_type = other RNA
gagcgcgccggcgtggtccgggagctg

SEQ ID NO: 31439 - RNA, 39 nt, synthetic construct
  misc_feature 1..39: note = Testican-2 (318-330)
  source 1..39: mol_type = other RNA
gagcgcatccagatccaggaggccgccaagaagaagccc

SEQ ID NO: 31440 - RNA, 42 nt, synthetic construct
  misc_feature 1..42: note = Testican-2 (318-331)
  source 1..42: mol_type = other RNA
gagcgcatccagatccaggaggccgccaagaagaagcccggc

SEQ ID NO: 31441 - RNA, 45 nt, synthetic construct
  misc_feature 1..45: note = Testican-2 (318-332)
  source 1..45: mol_type = other RNA
gagcgcatccagatccaggaggccgccaagaagaagcccggcatc

SEQ ID NO: 31442 - RNA, 48 nt, synthetic construct
  misc_feature 1..48: note = 14-3-3 protein beta/alpha (42-57)
  source 1..48: mol_type = other RNA
gagcgcaacctgctcagcgtggcctacaagaacgtcgtgggcgcccgg

SEQ ID NO: 31443 - RNA, 45 nt, synthetic construct
  misc_feature 1..45: note = Platelet endothelial cell adhesion molecule (92-106)
  source 1..45: mol_type = other RNA
gagagctacttcatccccgaggtgcgcatctacgactccggcacc

SEQ ID NO: 31444 - RNA, 51 nt, synthetic construct
  misc_feature 1..51: note = DnaJ homolog subfamily C member 5 (180-196)
  source 1..51: mol_type = other RNA
gagaccacccagctgacggccgacagccacccctcctaccacaccgacggc

SEQ ID NO: 31445 - RNA, 27 nt, synthetic construct
  misc_feature 1..27: note = DNA dC-dU-editing enzyme APOBEC-3D (299-307)
  source 1..27: mol_type = other RNA
gaggtggccgagttcctggcccgccac

SEQ ID NO: 31446 - RNA, 27 nt, synthetic construct
  misc_feature 1..27: note = Zinc finger protein 638 (1173-1181)
  source 1..27: mol_type = other RNA
gaggtgaaggaggagatccccctggtc

SEQ ID NO: 31447 - RNA, 48 nt, synthetic construct
  misc_feature 1..48: note = Phosphoinositide-3-kinase-interacting protein 1 (127-142)
  source 1..48: mol_type = other RNA
gaggtgcaggtcttcgcccccgccaacgcgctgccggcccgcagcgag

SEQ ID NO: 31448 - RNA, 45 nt, synthetic construct
  misc_feature 1..45: note = Endoplasmin (359-373)
  source 1..45: mol_type = other RNA
gaggtgaccttcaagagcatcctgttcgtccccacctccgccccg

SEQ ID NO: 31449 - RNA, 36 nt, synthetic construct
  misc_feature 1..36: note = Fas apoptotic inhibitory molecule 3 (253-264)
  source 1..36: mol_type = other RNA
gagtacgtgagcctgtaccaccagcccgccgccatg

SEQ ID NO: 31450 - RNA, 42 nt, synthetic construct
  misc_feature 1..42: note = CD44 antigen (7-20)
  source 1..42: mol_type = other RNA
ttcgccggcgtgttccacgtcgagaagaacgggcgctacagc

SEQ ID NO: 31451 - RNA, 42 nt, synthetic construct
  misc_feature 1..42: note = HLA class II histocompatibility antigen, DM alpha chain (67-80)
  source 1..42: mol_type = other RNA
ttcgacttcagccagaacacccgcgtgccccggctgccggag

SEQ ID NO: 31452 - RNA, 69 nt, synthetic construct
  misc_feature 1..69: note = Heterogeneous nuclear ribonucleoprotein A1-like 2 (110-132)
  source 1..69: mol_type = other RNA
ttcggcaactacaacaaccagagctccaacttcgggcccatgaagggcgggaacttcggcgggcgcagc

SEQ ID NO: 31453 - RNA, 69 nt, synthetic construct
  misc_feature 1..69: note = Heterogeneous nuclear ribonucleoprotein A1-like 2 (120-142)
  source 1..69: mol_type = other RNA
ttcggccccatgaaggggggcaacttcgggggccgcagctccgggccgtacggcggcgggggccagtac

SEQ ID NO: 31454 - RNA, 27 nt, synthetic construct
  misc_feature 1..27: note = T-cell activation Rho GTPase-activating protein (545-553)
  source 1..27: mol_type = other RNA
ttccagtacgccaaggagagctacatc

SEQ ID NO: 31455 - RNA, 27 nt, synthetic construct
  misc_feature 1..27: note = Transcription regulator protein BACH2 (345-353)
  source 1..27: mol_type = other RNA
ttcagcatcaccaagtccgtggagctg

SEQ ID NO: 31456 - RNA, 27 nt, synthetic construct
  misc_feature 1..27: note = Poly (ADP-ribose) polymerase 3 (264-272)
  source 1..27: mol_type = other RNA
ttctacaccgtgatcccccacaacttc

SEQ ID NO: 31457 - RNA, 30 nt, synthetic construct
  misc_feature 1..30: note = RNA polymerase II subunit A C-terminal domain phosphatase (40-49)
  source 1..30: mol_type = other RNA
ggcgccgccgtgcgcatcgggagcgtcctg

SEQ ID NO: 31458 - RNA, 42 nt, synthetic construct
  misc_feature 1..42: note = Protein unc-13 homolog D (1010-1023)
  source 1..42: mol_type = other RNA
ggcgccgacgacctggagggggaggccttcctccccctgcgc

SEQ ID NO: 31459 - RNA, 42 nt, synthetic construct
  misc_feature 1..42: note = Glycosyltransferase 8 domain-containing protein 1 (79-92)
  source 1..42: mol_type = other RNA
ggcgccatcgccgcgatcaacagcatccagcacaacacccgc

SEQ ID NO: 31460 - RNA, 36 nt, synthetic construct
  misc_feature 1..36: note = HLA class II histocompatibility antigen, DM alpha chain (89-100)
  source 1..36: mol_type = other RNA
ggcgacgcccccgccatcctgttcgacaaggagttc

SEQ ID NO: 31461 - RNA, 48 nt, synthetic construct
  misc_feature 1..48: note = Ceruloplasmin (102-117)
  source 1..48: mol_type = other RNA
ggcgacaaggtgtacgtccacctgaagaacctcgccagccgcccctac

SEQ ID NO: 31462 - RNA, 51 nt, synthetic construct
  misc_feature 1..51: note = Ceruloplasmin (102-118)
  source 1..51: mol_type = other RNA
ggcgacaaggtgtacgtccacctgaagaacctcgccagccgcccctacacc

SEQ ID NO: 31463 - RNA, 27 nt, synthetic construct
  misc_feature 1..27: note = Zinc finger protein 107 (751-759)
  source 1..27: mol_type = other RNA
ggcgactacgggcgcgccttcaacctg

SEQ ID NO: 31464 - RNA, 27 nt, synthetic construct
  misc_feature 1..27: note = Cell division cycle-associated 7-like protein (377-385)
  source 1..27: mol_type = other RNA
ggcgaggacgtgcgcagcgccctgctc

SEQ ID NO: 31465 - RNA, 27 nt, synthetic construct
  misc_feature 1..27: note = A-kinase anchor protein 2 (435-443)
  source 1..27: mol_type = other RNA
ggcgagttcaccagcgcccgcgccgtg

SEQ ID NO: 31466 - RNA, 27 nt, synthetic construct
  misc_feature 1..27: note = E3 ubiquitin-protein ligase Mdm2 (339-347)
  source 1..27: mol_type = other RNA
ggcgagatcagcgagaaggccaagctg

SEQ ID NO: 31467 - RNA, 39 nt, synthetic construct
  misc_feature 1..39: note = MyoD family inhibitor domain-containing protein (68-80)
  source 1..39: mol_type = other RNA
ggcgagctgatccgcacccagccccagcggctcccgcag

SEQ ID NO: 31468 - RNA, 51 nt, synthetic construct
  misc_feature 1..51: note = Transferrin receptor protein 1 (15-31)
  source 1..51: mol_type = other RNA
ggcgagcccctgagctacacccgcttctccctcgcccggcaggtggacggg

SEQ ID NO: 31469 - RNA, 54 nt, synthetic construct
  misc_feature 1..54: note = Heterogeneous nuclear ribonucleoprotein A3 (172-189)
  source 1..54: mol_type = other RNA
ggcgggggctacgggagcggcgggggctccggcgggtacggcagccgccggttc

SEQ ID NO: 31470 - RNA, 36 nt, synthetic construct
  misc_feature 1..36: note = Heterogeneous nuclear ribonucleoprotein A3 (159-170)
  source 1..36: mol_type = other RNA
ggcgggagcttcggcgggcgctccagcggctccccc

SEQ ID NO: 31471 - RNA, 27 nt, synthetic construct
  misc_feature 1..27: note = Probable ATP-dependent RNA helicase DDX46 (366-374)
  source 1..27: mol_type = other RNA
ggcatcgccaagaccgggagcggcaag

SEQ ID NO: 31472 - RNA, 36 nt, synthetic construct
  misc_feature 1..36: note = Kynureninase (432-443)
  source 1..36: mol_type = other RNA
ggcatccgcgtggcccccgtcccgctgtacaacagc

SEQ ID NO: 31473 - RNA, 42 nt, synthetic construct
  misc_feature 1..42: note = Kynureninase (432-445)
  source 1..42: mol_type = other RNA
ggcatccgcgtggcccccgtcccgctgtacaacagcttccac

SEQ ID NO: 31474 - RNA, 39 nt, synthetic construct
  misc_feature 1..39: note = Peroxiredoxin-1 (129-141)
  source 1..39: mol_type = other RNA
ggcctgttcatcatcgacgacaaggggatcctccgccag

SEQ ID NO: 31475 - RNA, 45 nt, synthetic construct
  misc_feature 1..45: note = Peroxiredoxin-1 (129-143)
  source 1..45: mol_type = other RNA
ggcctgttcatcatcgacgacaaggggatcctccgccagatcacc

SEQ ID NO: 31476 - RNA, 39 nt, synthetic construct
  misc_feature 1..39: note = Peroxisomal multifunctional enzyme type 2 (20-32)
  source 1..39: mol_type = other RNA
ggcctggggcgcgcctacgccctcgcgttcgccgagcgg

SEQ ID NO: 31477 - RNA, 42 nt, synthetic construct
  misc_feature 1..42: note = Peroxisomal multifunctional enzyme type 2 (20-33)
  source 1..42: mol_type = other RNA
ggcctggggcgcgcctacgccctcgcgttcgccgagcggggc

SEQ ID NO: 31478 - RNA, 45 nt, synthetic construct
  misc_feature 1..45: note = Ragulator complex protein LAMTOR3 (18-32)
  source 1..45: mol_type = other RNA
ggcctgcacgccatcgtggtcagcgaccgcgacggggtgcccgtg

SEQ ID NO: 31479 - RNA, 51 nt, synthetic construct
  misc_feature 1..51: note = Ragulator complex protein LAMTOR3 (18-34)
  source 1..51: mol_type = other RNA
ggcctgcacgccatcgtggtcagcgaccgcgacggggtgcccgtgatcaag

SEQ ID NO: 31480 - RNA, 42 nt, synthetic construct
  misc_feature 1..42: note = Interleukin-4 receptor subunit alpha (192-205)
  source 1..42: mol_type = other RNA
ggcaaccccgcctaccgcagcttctccaacagcctgtcccag

SEQ ID NO: 31481 - RNA, 51 nt, synthetic construct
  misc_feature 1..51: note = Polypeptide N-acetylgalactosaminyltransferase 1 (404-420)
  source 1..51: mol_type = other RNA
ggcaaccaggtgttcagctacaccgccaacaaggagatccgcaccgacgac

SEQ ID NO: 31482 - RNA, 36 nt, synthetic construct
  misc_feature 1..36: note = Fibromodulin (4-15)
  source 1..36: mol_type = other RNA
ggcaaccgcatcaacgagttcagcatctccagcttc

SEQ ID NO: 31483 - RNA, 45 nt, synthetic construct
  misc_feature 1..45: note = Pericentriolar material 1 protein (1456-1470)
  source 1..45: mol_type = other RNA
ggcaacaccgtgatccacctggaccaggccctcgcccgcatgcgg

SEQ ID NO: 31484 - RNA, 42 nt, synthetic construct
  misc_feature 1..42: note = CD44 antigen (141-154)
  source 1..42: mol_type = other RNA
ggccccatcaccatcaccatcgtgaaccgcgacgggacgcgg

SEQ ID NO: 31485 - RNA, 27 nt, synthetic construct
  misc_feature 1..27: note = Probable ribosome biogenesis protein RLP24 (11-19)
  source 1..27: mol_type = other RNA
ggccccatctacccggggcacggcatg

SEQ ID NO: 31486 - RNA, 45 nt, synthetic construct
  misc_feature 1..45: note = Cation-independent mannose-6-phosphate receptor (972-986)
  source 1..45: mol_type = other RNA
ggccccctgaagttcctccaccaggacatcgacagcgggcagggc

SEQ ID NO: 31487 - RNA, 51 nt, synthetic construct
  misc_feature 1..51: note = Cation-independent mannose-6-phosphate receptor (972-988)
  source 1..51: mol_type = other RNA
ggccccctgaagttcctccaccaggacatcgacagcgggcagggcatccgc

SEQ ID NO: 31488 - RNA, 45 nt, synthetic construct
  misc_feature 1..45: note = Heterogeneous nuclear ribonucleoprotein A1-like 2 (121-135)
  source 1..45: mol_type = other RNA
ggccccatgaaggggggcaacttcgggggccgcagctccgggccg

SEQ ID NO: 31489 - RNA, 39 nt, synthetic construct
  misc_feature 1..39: note = Protein CDV3 homolog (83-95)
  source 1..39: mol_type = other RNA
ggccccccggagatctacagcgacacccagttcccctcc

SEQ ID NO: 31490 - RNA, 45 nt, synthetic construct
  misc_feature 1..45: note = Protein CDV3 homolog (83-97)
  source 1..45: mol_type = other RNA
ggccccccggagatctacagcgacacccagttcccctccctgcag

SEQ ID NO: 31491 - RNA, 48 nt, synthetic construct
  misc_feature 1..48: note = Interleukin-4 receptor subunit alpha (295-310)
  source 1..48: mol_type = other RNA
ggccccccgggggaggccggctacaaggccttcagctccctgctcgcg

SEQ ID NO: 31492 - RNA, 54 nt, synthetic construct
  misc_feature 1..54: note = Interleukin-4 receptor subunit alpha (295-312)
  source 1..54: mol_type = other RNA
ggccccccgggggaggccggctacaaggccttcagctccctgctcgcgagctcc

SEQ ID NO: 31493 - RNA, 57 nt, synthetic construct
  misc_feature 1..57: note = Interleukin-4 receptor subunit alpha (295-313)
  source 1..57: mol_type = other RNA
ggccccccgggggaggccggctacaaggccttcagctccctgctcgcgagctccgcc

SEQ ID NO: 31494 - RNA, 69 nt, synthetic construct
  misc_feature 1..69: note = Interleukin-4 receptor subunit alpha (295-317)
  source 1..69: mol_type = other RNA
ggccccccgggggaggccggctacaaggccttcagctccctgctcgcgagctccgccgtgagccccgag

SEQ ID NO: 31495 - RNA, 72 nt, synthetic construct
  misc_feature 1..72: note = Interleukin-4 receptor subunit alpha (295-318)
  source 1..72: mol_type = other RNA
ggccccccgggggaggccggctacaaggccttcagctccctgctcgcgagctccgccgtgagccccgagaag

SEQ ID NO: 31496 - RNA, 30 nt, synthetic construct
  misc_feature 1..30: note = Ubiquitin-like protein 7 (263-272)
  source 1..30: mol_type = other RNA
ggcccccgcccgatcacccagagcgagctg

SEQ ID NO: 31497 - RNA, 39 nt, synthetic construct
  misc_feature 1..39: note = Heterogeneous nuclear ribonucleoprotein A1-like 2 (134-146)
  source 1..39: mol_type = other RNA
ggcccctacgggggcgggggccagtacttcgccaagccg

SEQ ID NO: 31498 - RNA, 48 nt, synthetic construct
  misc_feature 1..48: note = 60S ribosomal protein L3 (136-151)
  source 1..48: mol_type = other RNA
ggccaggggtacctgatcaaggacggcaagctcatcaagaacaacgcc

SEQ ID NO: 31499 - RNA, 27 nt, synthetic construct
  misc_feature 1..27: note = Glycosylphosphatidylinositol anchor attachment 1 protein (448-456)
  source 1..27: mol_type = other RNA
ggccagcacgtggccacccagcacttc

SEQ ID NO: 31500 - RNA, 27 nt, synthetic construct
  misc_feature 1..27: note = AT-rich interactive domain-containing protein 5B (138-146)
  source 1..27: mol_type = other RNA
ggccagaaggaggccctgctcaagtac

SEQ ID NO: 31501 - RNA, 39 nt, synthetic construct
  misc_feature 1..39: note = ATP synthase subunit alpha, mitochondrial (147-159)
  source 1..39: mol_type = other RNA
ggccagaagcgcagcaccgtggcccagctggtcaagcgg

SEQ ID NO: 31502 - RNA, 30 nt, synthetic construct
  misc_feature 1..30: note = A-kinase anchor protein 2 (343-352)
  source 1..30: mol_type = other RNA
ggccagagcaccccccgcctgttctccatc

SEQ ID NO: 31503 - RNA, 27 nt, synthetic construct
  misc_feature 1..27: note = Transcription regulator protein BACH2 (68-76)
  source 1..27: mol_type = other RNA
ggccagaccaagaacgacctggtggtc

SEQ ID NO: 31504 - RNA, 42 nt, synthetic construct
  misc_feature 1..42: note = B- and T-lymphocyte attenuator (193-206)
  source 1..42: mol_type = other RNA
ggccgcgagatcaacctggtggacgcccacctcaagagcgag

SEQ ID NO: 31505 - RNA, 30 nt, synthetic construct
  misc_feature 1..30: note = Ras-specific guanine nucleotide-releasing factor 1 (386-395)
  source 1..30: mol_type = other RNA
ggccgcttcaagaacctgcgggaggccctc

SEQ ID NO: 31506 - RNA, 27 nt, synthetic construct
  misc_feature 1..27: note = Protein asunder homolog (674-682)
  source 1..27: mol_type = other RNA
ggccgcctgaacagcgtgaacaaccgg

SEQ ID NO: 31507 - RNA, 27 nt, synthetic construct
  misc_feature 1..27: note = Probable ribonuclease ZC3H12D (383-391)
  source 1..27: mol_type = other RNA
ggccgcgtgcccgggccgctgagcctc

SEQ ID NO: 31508 - RNA, 42 nt, synthetic construct
  misc_feature 1..42: note = Carbohydrate sulfotransferase 2 (176-189)
  source 1..42: mol_type = other RNA
ggcagctccttcttcggggagctgttcaaccagaaccccgag

SEQ ID NO: 31509 - RNA, 42 nt, synthetic construct
  misc_feature 1..42: note = SLAM family member 6 (105-118)
  source 1..42: mol_type = other RNA
ggcagctaccgcgcccagatctccaccaagaccagcgccaag

SEQ ID NO: 31510 - RNA, 36 nt, synthetic construct
  misc_feature 1..36: note = Plasma membrane calcium-transporting ATPase 1 (258-269)
  source 1..36: mol_type = other RNA
ggcagctaccgcatcttctccaagggggccagcgag

SEQ ID NO: 31511 - RNA, 30 nt, synthetic construct
  misc_feature 1..30: note = Kelch-like ECH-associated protein 1 (419-428)
  source 1..30: mol_type = other RNA
ggcgtgatcgacgggcacatctacgccgtc

SEQ ID NO: 31512 - RNA, 36 nt, synthetic construct
  misc_feature 1..36: note = Serine incorporator 3 (400-411)
  source 1..36: mol_type = other RNA
ggcgtgcagtacagctactccctgttccacctcatg

SEQ ID NO: 31513 - RNA, 39 nt, synthetic construct
  misc_feature 1..39: note = Serine incorporator 3 (400-412)
  source 1..39: mol_type = other RNA
ggcgtgcagtacagctactccctgttccacctcatgctg

SEQ ID NO: 31514 - RNA, 48 nt, synthetic construct
  misc_feature 1..48: note = Interleukin-4 receptor subunit alpha (301-316)
  source 1..48: mol_type = other RNA
ggctacaaggccttcagctccctgctcgccagctccgcggtgagcccc

SEQ ID NO: 31515 - RNA, 51 nt, synthetic construct
  misc_feature 1..51: note = Interleukin-4 receptor subunit alpha (301-317)
  source 1..51: mol_type = other RNA
ggctacaaggccttcagctccctgctcgccagctccgcggtgagccccgag

SEQ ID NO: 31516 - RNA, 27 nt, synthetic construct
  misc_feature 1..27: note = Dystrophin (325-333)
  source 1..27: mol_type = other RNA
ggctacctgcccgtgcagaccgtcctc

SEQ ID NO: 31517 - RNA, 39 nt, synthetic construct
  misc_feature 1..39: note = Ragulator complex protein LAMTOR3 (20-32)
  source 1..39: mol_type = other RNA
cacgccatcgtggtcagcgaccgcgacggcgtgcccgtg

SEQ ID NO: 31518 - RNA, 27 nt, synthetic construct
  misc_feature 1..27: note = HLA class II histocompatibility antigen, DM alpha chain (87-95)
  source 1..27: mol_type = other RNA
cacgagatcgaccgctacaccgccatc

SEQ ID NO: 31519 - RNA, 27 nt, synthetic construct
  misc_feature 1..27: note = Elongator complex protein 3 (261-269)
  source 1..27: mol_type = other RNA
cacggcaacctgcgcgagctcgccctg

SEQ ID NO: 31520 - RNA, 42 nt, synthetic construct
  misc_feature 1..42: note = Fibromodulin (137-150)
  source 1..42: mol_type = other RNA
cacggcaaccagatcaccagcgacaaggtggggcgcaaggtc

SEQ ID NO: 31521 - RNA, 30 nt, synthetic construct
  misc_feature 1..30: note = Poly (ADP-ribose) polymerase 3 (457-466)
  source 1..30: mol_type = other RNA
caccacatcaacaccgacaaccccagcctg

SEQ ID NO: 31522 - RNA, 27 nt, synthetic construct
  misc_feature 1..27: note = DmX-like protein 1 (888-896)
  source 1..27: mol_type = other RNA
cacctgaagagcatccccgtgtccctc

SEQ ID NO: 31523 - RNA, 27 nt, synthetic construct
  misc_feature 1..27: note = Cyclin-dependent kinase 14 (229-237)
  source 1..27: mol_type = other RNA
caccccgacaacgtgaagctgttcctc

SEQ ID NO: 31524 - RNA, 42 nt, synthetic construct
  misc_feature 1..42: note = Ceramide glucosyltransferase (193-206)
  source 1..42: mol_type = other RNA
cacccccgctactacatcagcgccaacgtgaccggcttcaag

SEQ ID NO: 31525 - RNA, 42 nt, synthetic construct
  misc_feature 1..42: note = Beta-1,4-galactosyltransferase 1 (199-212)
  source 1..42: mol_type = other RNA
caccccgtgctgcagcgccagcagctcgactacggcatctac

SEQ ID NO: 31526 - RNA, 27 nt, synthetic construct
  misc_feature 1..27: note = Hematopoietic SH2 domain-containing protein (64-72)
  source 1..27: mol_type = other RNA
cacgtgggctacaccctgagctacaag

SEQ ID NO: 31527 - RNA, 27 nt, synthetic construct
  misc_feature 1..27: note = Cytoskeleton-associated protein 4 (129-137)
  source 1..27: mol_type = other RNA
cacgtgctggaggaggtccagcaggtg

SEQ ID NO: 31528 - RNA, 45 nt, synthetic construct
  misc_feature 1..45: note = Voltage-dependent anion-selective channel protein 2 (221-235)
  source 1..45: mol_type = other RNA
atcgccgccaagtaccagctggaccccaccgcgagcatctccgcc

SEQ ID NO: 31529 - RNA, 48 nt, synthetic construct
  misc_feature 1..48: note = Voltage-dependent anion-selective channel protein 2 (221-236)
  source 1..48: mol_type = other RNA
atcgccgccaagtaccagctggaccccaccgcgagcatctccgccaag

SEQ ID NO: 31530 - RNA, 42 nt, synthetic construct
  misc_feature 1..42: note = 14-3-3 protein zeta/delta (61-74)
  source 1..42: mol_type = other RNA
atcgccgagctggacaccctcagcgaggagtcctacaaggac

SEQ ID NO: 31531 - RNA, 45 nt, synthetic construct
  misc_feature 1..45: note = 14-3-3 protein zeta/delta (61-75)
  source 1..45: mol_type = other RNA
atcgccgagctggacaccctcagcgaggagtcctacaaggacagc

SEQ ID NO: 31532 - RNA, 36 nt, synthetic construct
  misc_feature 1..36: note = Golgi apparatus protein 1 (362-373)
  source 1..36: mol_type = other RNA
atcgcccaggactacaaggtgagctactccctggcc

SEQ ID NO: 31533 - RNA, 39 nt, synthetic construct
  misc_feature 1..39: note = Golgi apparatus protein 1 (362-374)
  source 1..39: mol_type = other RNA
atcgcccaggactacaaggtgagctactccctggccaag

SEQ ID NO: 31534 - RNA, 27 nt, synthetic construct
  misc_feature 1..27: note = Perilipin-2 (313-321)
  source 1..27: mol_type = other RNA
atcgcccgcaacctgacccagcagctc

SEQ ID NO: 31535 - RNA, 45 nt, synthetic construct
  misc_feature 1..45: note = 60S ribosomal protein L3 (216-230)
  source 1..45: mol_type = other RNA
atcgacaccaccagcaagttcggccacgggcgcttccagacgatg

SEQ ID NO: 31536 - RNA, 57 nt, synthetic construct
  misc_feature 1..57: note = 60S ribosomal protein L3 (65-83)
  source 1..57: mol_type = other RNA
atcgacgtgatcggcgtcaccaaggggaagggctacaagggggtgaccagccgctgg

SEQ ID NO: 31537 - RNA, 30 nt, synthetic construct
  misc_feature 1..30: note = Plexin-B3 (1741-1750)
  source 1..30: mol_type = other RNA
atcgaggaccccggcaccctgcacatctgg

SEQ ID NO: 31538 - RNA, 42 nt, synthetic construct
  misc_feature 1..42: note = Polypeptide N-acetylgalactosaminyltransferase 1 (88-101)
  source 1..42: mol_type = other RNA
atcgaggagatcgtgctggtcgacgacgccagcgagcgcgac

SEQ ID NO: 31539 - RNA, 45 nt, synthetic construct
  misc_feature 1..45: note = Polypeptide N-acetylgalactosaminyltransferase 1 (88-102)
  source 1..45: mol_type = other RNA
atcgaggagatcgtgctggtcgacgacgccagcgagcgcgacttc

SEQ ID NO: 31540 - RNA, 27 nt, synthetic construct
  misc_feature 1..27: note = Perilipin-2 (306-314)
  source 1..27: mol_type = other RNA
atcgagagccgcaccctggccatcgcc

SEQ ID NO: 31541 - RNA, 45 nt, synthetic construct
  misc_feature 1..45: note = Ras-related protein Rab-11A (44-58)
  source 1..45: mol_type = other RNA
atcggcgtggagttcgccacccgcagcatccaggtcgacgggaag

SEQ ID NO: 31542 - RNA, 27 nt, synthetic construct
  misc_feature 1..27: note = Elongation factor Tu, mitochondrial (171-179)
  source 1..27: mol_type = other RNA
atcggcgtggagcacgtcgtggtgtac

SEQ ID NO: 31543 - RNA, 42 nt, synthetic construct
  misc_feature 1..42: note = Calsyntenin-1 (204-217)
  source 1..42: mol_type = other RNA
atcatcacccccgacgtgccgttcaccgtcgacaaggacggc

SEQ ID NO: 31544 - RNA, 48 nt, synthetic construct
  misc_feature 1..48: note = Fas apoptotic inhibitory molecule 3 (68-83)
  source 1..48: mol_type = other RNA
atcaaggccgagtacaagggccgcgtgaccctgaagcagtacccccgg

SEQ ID NO: 31545 - RNA, 24 nt, synthetic construct
  misc_feature 1..24: note = Dynamin-binding protein (527-534)
  source 1..24: mol_type = other RNA
atcaaggtgagcaagcagctgctc

SEQ ID NO: 31546 - RNA, 27 nt, synthetic construct
  misc_feature 1..27: note = ATP-binding cassette sub-family A member 6 (1270-1278)
  source 1..27: mol_type = other RNA
atcctggacgagaagcccgtgatcatc

SEQ ID NO: 31547 - RNA, 27 nt, synthetic construct
  misc_feature 1..27: note = DNA dC-dU-editing enzyme APOBEC-3D (26-34)
  source 1..27: mol_type = other RNA
atcctgtacggccgcagctacacctgg

SEQ ID NO: 31548 - RNA, 45 nt, synthetic construct
  misc_feature 1..45: note = Vesicle-associated membrane protein 3 (28-42)
  source 1..45: mol_type = other RNA
atcatgcgcgtgaacgtcgacaaggtgctggagcgggaccagaag

SEQ ID NO: 31549 - RNA, 39 nt, synthetic construct
  misc_feature 1..39: note = Receptor-type tyrosine-protein phosphatase alpha (79-91)
  source 1..39: mol_type = other RNA
atcaaccgccggatggccgacgacaacaagctgttccgc

SEQ ID NO: 31550 - RNA, 42 nt, synthetic construct
  misc_feature 1..42: note = Protocadherin-9 (157-170)
  source 1..42: mol_type = other RNA
atcaacagccgcttccccatcccgtccgccaccgaccccgac

SEQ ID NO: 31551 - RNA, 48 nt, synthetic construct
  misc_feature 1..48: note = Ras GTPase-activating-like protein IQGAP1 (232-247)
  source 1..48: mol_type = other RNA
atccccgccgacaccttcgccgcgctgaagaacccgaacgccatgctc

SEQ ID NO: 31552 - RNA, 36 nt, synthetic construct
  misc_feature 1..36: note = Platelet endothelial cell adhesion molecule (96-107)
  source 1..36: mol_type = other RNA
atccccgaggtgcgcatctacgacagcggcacctac

SEQ ID NO: 31553 - RNA, 27 nt, synthetic construct
  misc_feature 1..27: note = NACHT, LRR and PYD domains-containing protein 2 (193-201)
  source 1..27: mol_type = other RNA
atccccttcagcaacccgcgcgtgctg

SEQ ID NO: 31554 - RNA, 42 nt, synthetic construct
  misc_feature 1..42: note = Fibromodulin (308-321)
  source 1..42: mol_type = other RNA
atccccccggtgaacaccaacctggagaacctctacctgcag

SEQ ID NO: 31555 - RNA, 24 nt, synthetic construct
  misc_feature 1..24: note = Eukaryotic translation initiation factor 6 (46-53)
  source 1..24: mol_type = other RNA
atccccgtggtccacgccagcatc

SEQ ID NO: 31556 - RNA, 27 nt, synthetic construct
  misc_feature 1..27: note = Monoglyceride lipase (24-32)
  source 1..27: mol_type = other RNA
atcccctaccaggacctgccgcacctc

SEQ ID NO: 31557 - RNA, 27 nt, synthetic construct
  misc_feature 1..27: note = Methyltransferase-like protein 7A (225-233)
  source 1..27: mol_type = other RNA
atccaggcccccctgagctgggagctc

SEQ ID NO: 31558 - RNA, 27 nt, synthetic construct
  misc_feature 1..27: note = Cyclin-dependent kinase 14 (264-272)
  source 1..27: mol_type = other RNA
atcagcgacaccggcgagctgaagctc

SEQ ID NO: 31559 - RNA, 27 nt, synthetic construct
  misc_feature 1..27: note = Probable ATP-dependent RNA helicase DDX46 (331-339)
  source 1..27: mol_type = other RNA
atcagcatgaagatcctgaactccctc

SEQ ID NO: 31560 - RNA, 48 nt, synthetic construct
  misc_feature 1..48: note = Low affinity immunoglobulin epsilon Fc receptor (10-25)
  source 1..48: mol_type = other RNA
atcagccaggagctggaggagctccgcgccgagcagcagcggctgaag

SEQ ID NO: 31561 - RNA, 42 nt, synthetic construct
  misc_feature 1..42: note = Golgi apparatus protein 1 (553-566)
  source 1..42: mol_type = other RNA
atcagccgcgactggaagctggaccccgtgctctaccggaag

SEQ ID NO: 31562 - RNA, 24 nt, synthetic construct
  misc_feature 1..24: note = B-lymphocyte antigen CD19 (274-281)
  source 1..24: mol_type = other RNA
atcaccgcccgccccgtgctgtgg

SEQ ID NO: 31563 - RNA, 27 nt, synthetic construct
  misc_feature 1..27: note = Zinc finger protein 107 (139-147)
  source 1..27: mol_type = other RNA
aaggccttcaactggttcagcaccctg

SEQ ID NO: 31564 - RNA, 45 nt, synthetic construct
  misc_feature 1..45: note = Interleukin-4 receptor subunit alpha (303-317)
  source 1..45: mol_type = other RNA
aaggccttcagctccctgctcgccagctccgcggtgagccccgag

SEQ ID NO: 31565 - RNA, 42 nt, synthetic construct
  misc_feature 1..42: note = Platelet endothelial cell adhesion molecule (274-287)
  source 1..42: mol_type = other RNA
aaggacaaggccatcgtggcccacaaccgccacggcaacaag

SEQ ID NO: 31566 - RNA, 45 nt, synthetic construct
  misc_feature 1..45: note = Platelet endothelial cell adhesion molecule (274-288)
  source 1..45: mol_type = other RNA
aaggacaaggccatcgtggcccacaaccgccacggcaacaaggcg

SEQ ID NO: 31567 - RNA, 27 nt, synthetic construct
  misc_feature 1..27: note = Endoplasmic reticulum resident protein 44 (336-344)
  source 1..27: mol_type = other RNA
aaggacgtgctgatccccggcaagctc

SEQ ID NO: 31568 - RNA, 27 nt, synthetic construct
  misc_feature 1..27: note = Cytoskeleton-associated protein 4 (71-79)
  source 1..27: mol_type = other RNA
aaggaggccgccgacaccgagcgcctg

SEQ ID NO: 31569 - RNA, 33 nt, synthetic construct
  misc_feature 1..33: note = Uncharacterized protein CXorf21 (31-41)
  source 1..33: mol_type = other RNA
aaggaggaggagaccaacagcgtggccaccctg

SEQ ID NO: 31570 - RNA, 24 nt, synthetic construct
  misc_feature 1..24: note = Negative elongation factor E (373-380)
  source 1..24: mol_type = other RNA
aaggagaacctggtggacggcttc

SEQ ID NO: 31571 - RNA, 27 nt, synthetic construct
  misc_feature 1..27: note = Cell division cycle-associated 7-like protein (280-288)
  source 1..27: mol_type = other RNA
aagttcgccgaggagttctacagcttc

SEQ ID NO: 31572 - RNA, 42 nt, synthetic construct
  misc_feature 1..42: note = IgG receptor FcRn large subunit p51 (132-145)
  source 1..42: mol_type = other RNA
aagttcgccctgaacggcgaggagttcatgaacttcgacctc

SEQ ID NO: 31573 - RNA, 36 nt, synthetic construct
  misc_feature 1..36: note = Heterogeneous nuclear ribonucleoprotein A1-like 2 (124-135)
  source 1..36: mol_type = other RNA
aagggcgggaacttcggcgggcgcagctccggcccc

SEQ ID NO: 31574 - RNA, 39 nt, synthetic construct
  misc_feature 1..39: note = Heterogeneous nuclear ribonucleoprotein A3 (158-170)
  source 1..39: mol_type = other RNA
aagggcgggagcttcggcgggcgctccagcggctccccc

SEQ ID NO: 31575 - RNA, 36 nt, synthetic construct
  misc_feature 1..36: note = Low affinity immunoglobulin epsilon Fc receptor (101-112)
  source 1..36: mol_type = other RNA
aagggcaccaagcagtgggtgcacgcccgctacgcc

SEQ ID NO: 31576 - RNA, 42 nt, synthetic construct
  misc_feature 1..42: note = Perilipin-3 (65-78)
  source 1..42: mol_type = other RNA
aagggcgtgcgcaccctgaccgccgccgcggtcagcggggcc

SEQ ID NO: 31577 - RNA, 45 nt, synthetic construct
  misc_feature 1..45: note = Perilipin-3 (65-79)
  source 1..45: mol_type = other RNA
aagggcgtgcgcaccctgaccgccgccgcggtcagcggggcccag

SEQ ID NO: 31578 - RNA, 30 nt, synthetic construct
  misc_feature 1..30: note = B-cell linker protein (6-15)
  source 1..30: mol_type = other RNA
aagatcaccgtgcccgccagccagaagctg

SEQ ID NO: 31579 - RNA, 27 nt, synthetic construct
  misc_feature 1..27: note = Afadin- and alpha-actinin-binding protein (328-336)
  source 1..27: mol_type = other RNA
aagctggacaaccaggtgagcaaggtc

SEQ ID NO: 31580 - RNA, 30 nt, synthetic construct
  misc_feature 1..30: note = B-lymphocyte antigen CD19 (150-159)
  source 1..30: mol_type = other RNA
aagctgatgagccccaagctctacgtgtgg

SEQ ID NO: 31581 - RNA, 54 nt, synthetic construct
  misc_feature 1..54: note = Ragulator complex protein LAMTOR3 (12-29)
  source 1..54: mol_type = other RNA
aagctgcccagcgtggagggcctccacgccatcgtcgtgtccgaccgcgacggg

SEQ ID NO: 31582 - RNA, 30 nt, synthetic construct
  misc_feature 1..30: note = RNA polymerase II subunit A C-terminal domain phosphatase (238-247)
  source 1..30: mol_type = other RNA
aagctgtacgagctccacgtgttcaccttc

SEQ ID NO: 31583 - RNA, 27 nt, synthetic construct
  misc_feature 1..27: note = Ubiquitin-like protein 7 (100-108)
  source 1..27: mol_type = other RNA
aagcccgagccggtggacaaggtcgcc

SEQ ID NO: 31584 - RNA, 45 nt, synthetic construct
  misc_feature 1..45: note = B- and T-lymphocyte attenuator (252-266)
  source 1..45: mol_type = other RNA
aagcccggcatcgtgtacgccagcctgaaccactccgtcatcggg

SEQ ID NO: 31585 - RNA, 27 nt, synthetic construct
  misc_feature 1..27: note = hematopoietic SH2 domain-containing protein isoform X7 (112-120)
  source 1..27: mol_type = other RNA
aagcccatcgagccgcgccgggagctg

SEQ ID NO: 31586 - RNA, 27 nt, synthetic construct
  misc_feature 1..27: note = Dynamin-binding protein (183-191)
  source 1..27: mol_type = other RNA
aagccccgccagagctccccgcagctg

SEQ ID NO: 31587 - RNA, 27 nt, synthetic construct
  misc_feature 1..27: note = AT-rich interactive domain-containing protein 5B (518-526)
  source 1..27: mol_type = other RNA
aagcccagcgaggagcgcaagaccatc

SEQ ID NO: 31588 - RNA, 27 nt, synthetic construct
  misc_feature 1..27: note = Plateletoprotein 4 (394-402)
  source 1..27: mol_type = other RNA
aagcccagcgagaagatccaggtgctg

SEQ ID NO: 31589 - RNA, 27 nt, synthetic construct
  misc_feature 1..27: note = Zinc finger protein 638 (538-546)
  source 1..27: mol_type = other RNA
aagcccaccagcgcccgctccggcctg

SEQ ID NO: 31590 - RNA, 27 nt, synthetic construct
  misc_feature 1..27: note = Dynamin-binding protein (531-539)
  source 1..27: mol_type = other RNA
aagcagctgctcgccgccctggagatc

SEQ ID NO: 31591 - RNA, 27 nt, synthetic construct
  misc_feature 1..27: note = AT-rich interactive domain-containing protein 5B (171-179)
  source 1..27: mol_type = other RNA
aagcagacccccaaggtgctggtcgtg

SEQ ID NO: 31592 - RNA, 27 nt, synthetic construct
  misc_feature 1..27: note = Dystrophin (152-160)
  source 1..27: mol_type = other RNA
aagcaggtggccagctccaccggcttc

SEQ ID NO: 31593 - RNA, 39 nt, synthetic construct
  misc_feature 1..39: note = Endoplasmin (72-84)
  source 1..39: mol_type = other RNA
aagagcgagaagttcgccttccaggccgaggtgaaccgc

SEQ ID NO: 31594 - RNA, 30 nt, synthetic construct
  misc_feature 1..30: note = Probable ATP-dependent RNA helicase DDX46 (374-383)
  source 1..30: mol_type = other RNA
aagaccatcgccttcctgctccccatgttc

SEQ ID NO: 31595 - RNA, 27 nt, synthetic construct
  misc_feature 1..27: note = T-cell activation Rho GTPase-activating protein (56-64)
  source 1..27: mol_type = other RNA
aaggtgctgagctggcccttcctcatg

SEQ ID NO: 31596 - RNA, 30 nt, synthetic construct
  misc_feature 1..30: note = Cyclin-dependent kinase 14 (155-164)
  source 1..30: mol_type = other RNA
aaggtgaacggcaagctggtcgccctcaag

SEQ ID NO: 31597 - RNA, 27 nt, synthetic construct
  misc_feature 1..27: note = DmX-like protein 1 (194-202)
  source 1..27: mol_type = other RNA
aaggtgtggtacaacgtcgagaactgg

SEQ ID NO: 31598 - RNA, 30 nt, synthetic construct
  misc_feature 1..30: note = Zinc finger protein 638 (730-739)
  source 1..30: mol_type = other RNA
aagtacatcgagaccacccccctgacgatc

SEQ ID NO: 31599 - RNA, 42 nt, synthetic construct
  misc_feature 1..42: note = Alpha-1B-glycoprotein (204-217)
  source 1..42: mol_type = other RNA
ctggcccccctcgagggcgcccgcttcgcgctggtgcgggag

SEQ ID NO: 31600 - RNA, 45 nt, synthetic construct
  misc_feature 1..45: note = Alpha-1B-glycoprotein (204-218)
  source 1..45: mol_type = other RNA
ctggcccccctcgagggcgcccgcttcgcgctggtgcgggaggac

SEQ ID NO: 31601 - RNA, 45 nt, synthetic construct
  misc_feature 1..45: note = Transmembrane protein C16orf54 (117-131)
  source 1..45: mol_type = other RNA
ctggaggcccgcgccaccgcgcccccggcccccagcgcccccaac

SEQ ID NO: 31602 - RNA, 27 nt, synthetic construct
  misc_feature 1..27: note = T-cell activation Rho GTPase-activating protein (66-74)
  source 1..27: mol_type = other RNA
ctggagaacgaccagagcctctccttc

SEQ ID NO: 31603 - RNA, 39 nt, synthetic construct
  misc_feature 1..39: note = Polypeptide N-acetylgalactosaminyltransferase 1 (355-367)
  source 1..39: mol_type = other RNA
ctggagaacatctaccccgacagccagatcccgcgccac

SEQ ID NO: 31604 - RNA, 42 nt, synthetic construct
  misc_feature 1..42: note = Polypeptide N-acetylgalactosaminyltransferase 1 (355-368)
  source 1..42: mol_type = other RNA
ctggagaacatctaccccgacagccagatcccgcgccactac

SEQ ID NO: 31605 - RNA, 27 nt, synthetic construct
  misc_feature 1..27: note = Uncharacterized protein CXorf21 (214-222)
  source 1..27: mol_type = other RNA
ctggagcagaaggtggtcgagctctac

SEQ ID NO: 31606 - RNA, 30 nt, synthetic construct
  misc_feature 1..30: note = Cadherin EGF LAG seven-pass G-type receptor 1 (2401-2410)
  source 1..30: mol_type = other RNA
ctggaggtggaggagcgcaccaagcccgtc

SEQ ID NO: 31607 - RNA, 39 nt, synthetic construct
  misc_feature 1..39: note = Cation-independent mannose-6-phosphate receptor (2073-2085)
  source 1..39: mol_type = other RNA
ctgggcgacatctacttcaagctcttccgcgccagcggg

SEQ ID NO: 31608 - RNA, 42 nt, synthetic construct
  misc_feature 1..42: note = Ragulator complex protein LAMTOR3 (19-32)
  source 1..42: mol_type = other RNA
ctgcacgccatcgtggtcagcgaccgcgacggcgtgcccgtg

SEQ ID NO: 31609 - RNA, 45 nt, synthetic construct
  misc_feature 1..45: note = Ragulator complex protein LAMTOR3 (19-33)
  source 1..45: mol_type = other RNA
ctgcacgccatcgtggtcagcgaccgcgacggcgtgcccgtgatc

SEQ ID NO: 31610 - RNA, 48 nt, synthetic construct
  misc_feature 1..48: note = Ragulator complex protein LAMTOR3 (19-34)
  source 1..48: mol_type = other RNA
ctgcacgccatcgtggtcagcgaccgcgacggcgtgcccgtgatcaag

SEQ ID NO: 31611 - RNA, 39 nt, synthetic construct
  misc_feature 1..39: note = Golgi apparatus protein 1 (361-373)
  source 1..39: mol_type = other RNA
ctgatcgcccaggactacaaggtgagctactccctcgcc

SEQ ID NO: 31612 - RNA, 45 nt, synthetic construct
  misc_feature 1..45: note = Ras GTPase-activating-like protein IQGAP1 (347-361)
  source 1..45: mol_type = other RNA
ctgaagcagctcctgagcgacaagcagcagaagcgccagtccggc

SEQ ID NO: 31613 - RNA, 48 nt, synthetic construct
  misc_feature 1..48: note = Ras GTPase-activating-like protein IQGAP1 (347-362)
  source 1..48: mol_type = other RNA
ctgaagcagctcctgagcgacaagcagcagaagcgccagtccggccag

SEQ ID NO: 31614 - RNA, 30 nt, synthetic construct
  misc_feature 1..30: note = NACHT, LRR and PYD domains-containing protein 2 (823-832)
  source 1..30: mol_type = other RNA
ctgctcgacgagggcgccaagctgctgtac

SEQ ID NO: 31615 - RNA, 39 nt, synthetic construct
  misc_feature 1..39: note = Beta-1,4-galactosyltransferase 1 (112-124)
  source 1..39: mol_type = other RNA
ctgaacagcctcacctaccaggtgctggacgtccagcgc

SEQ ID NO: 31616 - RNA, 45 nt, synthetic construct
  misc_feature 1..45: note = Beta-1,4-galactosyltransferase 1 (112-126)
  source 1..45: mol_type = other RNA
ctgaacagcctcacctaccaggtgctggacgtccagcgctacccc

SEQ ID NO: 31617 - RNA, 48 nt, synthetic construct
  misc_feature 1..48: note = Beta-1,4-galactosyltransferase 1 (112-127)
  source 1..48: mol_type = other RNA
ctgaacagcctcacctaccaggtgctggacgtccagcgctaccccctg

SEQ ID NO: 31618 - RNA, 45 nt, synthetic construct
  misc_feature 1..45: note = Fas apoptotic inhibitory molecule 3 (120-134)
  source 1..45: mol_type = other RNA
ctgaacgtgcacagcgagtacgagccctcctgggaggagcagccg

SEQ ID NO: 31619 - RNA, 45 nt, synthetic construct
  misc_feature 1..45: note = Phosphoinositide-3-kinase-interacting protein 1 (137-151)
  source 1..45: mol_type = other RNA
ctgcccgcccgcagcgaggccgcggccgtgcagccggtcatcggc

SEQ ID NO: 31620 - RNA, 27 nt, synthetic construct
  misc_feature 1..27: note = DmX-like protein 1 (1557-1565)
  source 1..27: mol_type = other RNA
ctgcccgcctaccgcgcccagctcctg

SEQ ID NO: 31621 - RNA, 42 nt, synthetic construct
  misc_feature 1..42: note = Putative endoplasmin-like protein (219-232)
  source 1..42: mol_type = other RNA
ctgcccgagttcgacggcaagcgcttccagaacgtggccaag

SEQ ID NO: 31622 - RNA, 36 nt, synthetic construct
  misc_feature 1..36: note = Cullin-associated NEDD8-dissociated protein 1 (297-308)
  source 1..36: mol_type = other RNA
ctgcccgagttctacaagaccgtgagcccggccctc

SEQ ID NO: 31623 - RNA, 27 nt, synthetic construct
  misc_feature 1..27: note = TBC1 domain family member 22A (121-129)
  source 1..27: mol_type = other RNA
ctgccccacagcgccaccgtgaccctc

SEQ ID NO: 31624 - RNA, 36 nt, synthetic construct
  misc_feature 1..36: note = Glycosyltransferase 8 domain-containing protein 1 (157-168)
  source 1..36: mol_type = other RNA
ctgcccatcctcgtgccgagcgccaagaaggccatc

SEQ ID NO: 31625 - RNA, 39 nt, synthetic construct
  misc_feature 1..39: note = Glycosyltransferase 8 domain-containing protein 1 (157-169)
  source 1..39: mol_type = other RNA
ctgcccatcctcgtgccgagcgccaagaaggccatctac

SEQ ID NO: 31626 - RNA, 42 nt, synthetic construct
  misc_feature 1..42: note = Glycosyltransferase 8 domain-containing protein 1 (157-170)
  source 1..42: mol_type = other RNA
ctgcccatcctcgtgccgagcgccaagaaggccatctacatg

SEQ ID NO: 31627 - RNA, 45 nt, synthetic construct
  misc_feature 1..45: note = Glycosyltransferase 8 domain-containing protein 1 (157-171)
  source 1..45: mol_type = other RNA
ctgcccatcctcgtgccgagcgccaagaaggccatctacatggac

SEQ ID NO: 31628 - RNA, 48 nt, synthetic construct
  misc_feature 1..48: note = Glycosyltransferase 8 domain-containing protein 1 (157-172)
  source 1..48: mol_type = other RNA
ctgcccatcctcgtgccgagcgccaagaaggccatctacatggacgac

SEQ ID NO: 31629 - RNA, 27 nt, synthetic construct
  misc_feature 1..27: note = ATP-binding cassette sub-family A member 6 (899-907)
  source 1..27: mol_type = other RNA
ctgccccaggagccgcgcaccagcctc

SEQ ID NO: 31630 - RNA, 39 nt, synthetic construct
  misc_feature 1..39: note = Beta-1,4-galactosyltransferase 1 (50-62)
  source 1..39: mol_type = other RNA
ctgccccagctcgtgggcgtcagcaccccgctgcagggg

SEQ ID NO: 31631 - RNA, 42 nt, synthetic construct
  misc_feature 1..42: note = Beta-1,4-galactosyltransferase 1 (50-63)
  source 1..42: mol_type = other RNA
ctgccccagctcgtgggcgtcagcaccccgctgcaggggggc

SEQ ID NO: 31632 - RNA, 45 nt, synthetic construct
  misc_feature 1..45: note = Beta-1,4-galactosyltransferase 1 (50-64)
  source 1..45: mol_type = other RNA
ctgccccagctcgtgggcgtcagcaccccgctgcaggggggctcc

SEQ ID NO: 31633 - RNA, 27 nt, synthetic construct
  misc_feature 1..27: note = Proline and serine-rich protein 2 (219-227)
  source 1..27: mol_type = other RNA
ctgccccgcccgcagggcatcaccgtg

SEQ ID NO: 31634 - RNA, 42 nt, synthetic construct
  misc_feature 1..42: note = Pro-cathepsin H (48-61)
  source 1..42: mol_type = other RNA
ctgcccagccaggccttcgagtacatcctctacaacaagggc

SEQ ID NO: 31635 - RNA, 45 nt, synthetic construct
  misc_feature 1..45: note = Pro-cathepsin H (48-62)
  source 1..45: mol_type = other RNA
ctgcccagccaggccttcgagtacatcctctacaacaagggcatc

SEQ ID NO: 31636 - RNA, 48 nt, synthetic construct
  misc_feature 1..48: note = Pro-cathepsin H (48-63)
  source 1..48: mol_type = other RNA
ctgcccagccaggccttcgagtacatcctctacaacaagggcatcatg

SEQ ID NO: 31637 - RNA, 51 nt, synthetic construct
  misc_feature 1..51: note = Pro-cathepsin H (48-64)
  source 1..51: mol_type = other RNA
ctgcccagccaggccttcgagtacatcctctacaacaagggcatcatgggg

SEQ ID NO: 31638 - RNA, 45 nt, synthetic construct
  misc_feature 1..45: note = Ragulator complex protein LAMTOR3 (13-27)
  source 1..45: mol_type = other RNA
ctgcccagcgtggagggcctccacgccatcgtcgtgtccgaccgc

SEQ ID NO: 31639 - RNA, 42 nt, synthetic construct
  misc_feature 1..42: note = Fas apoptotic inhibitory molecule 3 (32-45)
  source 1..42: mol_type = other RNA
ctgccctacctcttccagatgccggcctacgccagctccagc

SEQ ID NO: 31640 - RNA, 45 nt, synthetic construct
  misc_feature 1..45: note = Fas apoptotic inhibitory molecule 3 (32-46)
  source 1..45: mol_type = other RNA
ctgccctacctcttccagatgccggcctacgccagctccagcaag

SEQ ID NO: 31641 - RNA, 39 nt, synthetic construct
  misc_feature 1..39: note = Fibromodulin (27-39)
  source 1..39: mol_type = other RNA
ctgcaggtgctccgcctggacggcaacgagatcaagcgg

SEQ ID NO: 31642 - RNA, 42 nt, synthetic construct
  misc_feature 1..42: note = Fibromodulin (27-40)
  source 1..42: mol_type = other RNA
ctgcaggtgctccgcctggacggcaacgagatcaagcggagc

SEQ ID NO: 31643 - RNA, 45 nt, synthetic construct
  misc_feature 1..45: note = Fibromodulin (27-41)
  source 1..45: mol_type = other RNA
ctgcaggtgctccgcctggacggcaacgagatcaagcggagcgcc

SEQ ID NO: 31644 - RNA, 48 nt, synthetic construct
  misc_feature 1..48: note = Fibromodulin (178-193)
  source 1..48: mol_type = other RNA
ctgcgcgagctccacctggaccacaaccagatcagccgggtgcccaac

SEQ ID NO: 31645 - RNA, 27 nt, synthetic construct
  misc_feature 1..27: note = DmX-like protein 1 (2001-2009)
  source 1..27: mol_type = other RNA
ctgagcgagcagacctccgtgcccctc

SEQ ID NO: 31646 - RNA, 24 nt, synthetic construct
  misc_feature 1..24: note = Transcription regulator protein BACH2 (709-716)
  source 1..24: mol_type = other RNA
ctgagccaggaggtgtgccgcgac

SEQ ID NO: 31647 - RNA, 36 nt, synthetic construct
  misc_feature 1..36: note = Testican-2 (45-56)
  source 1..36: mol_type = other RNA
ctgagctccatcagccagtactccggcaagatcaag

SEQ ID NO: 31648 - RNA, 24 nt, synthetic construct
  misc_feature 1..24: note = Baculoviral IAP repeat-containing protein 5 (96-103)
  source 1..24: mol_type = other RNA
ctgaccctcggcgagttcctgaag

SEQ ID NO: 31649 - RNA, 27 nt, synthetic construct
  misc_feature 1..27: note = Baculoviral IAP repeat-containing protein 5 (96-104)
  source 1..27: mol_type = other RNA
ctgaccctcggcgagttcctgaagctg

SEQ ID NO: 31650 - RNA, 24 nt, synthetic construct
  misc_feature 1..24: note = ATP-binding cassette sub-family A member 6 (1544-1551)
  source 1..24: mol_type = other RNA
ctgacctacaagctccccgtggcc

SEQ ID NO: 31651 - RNA, 24 nt, synthetic construct
  misc_feature 1..24: note = A-kinase anchor protein 2 (561-568)
  source 1..24: mol_type = other RNA
ctggtggacgaccccctcgagtac

SEQ ID NO: 31652 - RNA, 27 nt, synthetic construct
  misc_feature 1..27: note = RNA polymerase II subunit A C-terminal domain phosphatase (239-247)
  source 1..27: mol_type = other RNA
ctgtacgagctccacgtgttcaccttc

SEQ ID NO: 31653 - RNA, 42 nt, synthetic construct
  misc_feature 1..42: note = Fibromodulin (271-284)
  source 1..42: mol_type = other RNA
ctgtacgtgcgcctcagccacaactccctgaccaacaacggc

SEQ ID NO: 31654 - RNA, 45 nt, synthetic construct
  misc_feature 1..45: note = 60S ribosomal protein L3 (237-251)
  source 1..45: mol_type = other RNA
atgggccccctgaagaaggaccgcatcgccaaggaggagggggcc

SEQ ID NO: 31655 - RNA, 39 nt, synthetic construct
  misc_feature 1..39: note = Pro-cathepsin H (222-234)
  source 1..39: mol_type = other RNA
atgaacggctacttcctgatcgagcgcgggaagaacatg

SEQ ID NO: 31656 - RNA, 27 nt, synthetic construct
  misc_feature 1..27: note = Ras-specific guanine nucleotide-releasing factor 1 (773-781)
  source 1..27: mol_type = other RNA
atgagccccttctccaaggccaccctg

SEQ ID NO: 31657 - RNA, 30 nt, synthetic construct
  misc_feature 1..30: note = Perilipin-2 (62-71)
  source 1..30: mol_type = other RNA
atgaccagcgccctgcccatcatccagaag

SEQ ID NO: 31658 - RNA, 27 nt, synthetic construct
  misc_feature 1..27: note = RUN and FYVE domain-containing protein 1 (291-299)
  source 1..27: mol_type = other RNA
atgtacagcgacgtgtggaagcagctg

SEQ ID NO: 31659 - RNA, 45 nt, synthetic construct
  misc_feature 1..45: note = Heterogeneous nuclear ribonucleoprotein A1-like 2 (108-122)
  source 1..45: mol_type = other RNA
aacgacttcggcaactacaacaaccagagctccaacttcgggccc

SEQ ID NO: 31660 - RNA, 36 nt, synthetic construct
  misc_feature 1..36: note = SLAM family member 6 (192-203)
  source 1..36: mol_type = other RNA
aacgacaccatcaccatctacagcacgatcaaccac

SEQ ID NO: 31661 - RNA, 39 nt, synthetic construct
  misc_feature 1..39: note = SLAM family member 6 (192-204)
  source 1..39: mol_type = other RNA
aacgacaccatcaccatctacagcacgatcaaccactcc

SEQ ID NO: 31662 - RNA, 42 nt, synthetic construct
  misc_feature 1..42: note = SLAM family member 6 (192-205)
  source 1..42: mol_type = other RNA
aacgacaccatcaccatctacagcacgatcaaccactccaag

SEQ ID NO: 31663 - RNA, 48 nt, synthetic construct
  misc_feature 1..48: note = Glutathione peroxidase 1 (100-115)
  source 1..48: mol_type = other RNA
aacgacgtggcctggaacttcgagaagttcctggtcggccccgacggg

SEQ ID NO: 31664 - RNA, 30 nt, synthetic construct
  misc_feature 1..30: note = ATP-binding cassette sub-family A member 6 (811-820)
  source 1..30: mol_type = other RNA
aacgagatggagctggcccacagctccttc

SEQ ID NO: 31665 - RNA, 24 nt, synthetic construct
  misc_feature 1..24: note = Ribonucleoside-diphosphate reductase subunit M2 B (50-57)
  source 1..24: mol_type = other RNA
aacgagaacctggtggagcgcttc

SEQ ID NO: 31666 - RNA, 36 nt, synthetic construct
  misc_feature 1..36: note = C-C chemokine receptor type 7 (192-203)
  source 1..36: mol_type = other RNA
aacttcgagcgcaacaaggccatcaaggtgatcatc

SEQ ID NO: 31667 - RNA, 39 nt, synthetic construct
  misc_feature 1..39: note = C-C chemokine receptor type 7 (192-204)
  source 1..39: mol_type = other RNA
aacttcgagcgcaacaaggccatcaaggtgatcatcgcc

SEQ ID NO: 31668 - RNA, 36 nt, synthetic construct
  misc_feature 1..36: note = Fas apoptotic inhibitory molecule 3 (66-77)
  source 1..36: mol_type = other RNA
aacttcatcaaggccgagtacaagggccgcgtgacc

SEQ ID NO: 31669 - RNA, 42 nt, synthetic construct
  misc_feature 1..42: note = Platelet endothelial cell adhesion molecule (187-200)
  source 1..42: mol_type = other RNA
aacttcgtgatcctggagttccccgtcgaggagcaggaccgc

SEQ ID NO: 31670 - RNA, 45 nt, synthetic construct
  misc_feature 1..45: note = Phosphoinositide-3-kinase-interacting protein 1 (29-43)
  source 1..45: mol_type = other RNA
aacggccacctgtaccgcgaggaccagaccagccccgccccgggg

SEQ ID NO: 31671 - RNA, 48 nt, synthetic construct
  misc_feature 1..48: note = Phosphoinositide-3-kinase-interacting protein 1 (29-44)
  source 1..48: mol_type = other RNA
aacggccacctgtaccgcgaggaccagaccagccccgccccggggctc

SEQ ID NO: 31672 - RNA, 51 nt, synthetic construct
  misc_feature 1..51: note = Phosphoinositide-3-kinase-interacting protein 1 (29-45)
  source 1..51: mol_type = other RNA
aacggccacctgtaccgcgaggaccagaccagccccgccccggggctccgg

SEQ ID NO: 31673 - RNA, 42 nt, synthetic construct
  misc_feature 1..42: note = CD44 antigen (16-29)
  source 1..42: mol_type = other RNA
aacggccgctacagcatctcccggaccgaggccgccgacctg

SEQ ID NO: 31674 - RNA, 36 nt, synthetic construct
  misc_feature 1..36: note = Pro-cathepsin H (223-234)
  source 1..36: mol_type = other RNA
aacggctacttcctgatcgagcgcgggaagaacatg

SEQ ID NO: 31675 - RNA, 30 nt, synthetic construct
  misc_feature 1..30: note = Thymidylate synthase (260-269)
  source 1..30: mol_type = other RNA
aaccacatcgagcccctgaagatccagctc

SEQ ID NO: 31676 - RNA, 48 nt, synthetic construct
  misc_feature 1..48: note = B- and T-lymphocyte attenuator (251-266)
  source 1..48: mol_type = other RNA
aacaagcccggcatcgtgtacgccagcctgaaccactccgtcatcggg

SEQ ID NO: 31677 - RNA, 39 nt, synthetic construct
  misc_feature 1..39: note = E3 ubiquitin-protein ligase CHIP (44-56)
  source 1..39: mol_type = other RNA
aacctgcagcgcgcctacagcctcgccaaggagcagcgg

SEQ ID NO: 31678 - RNA, 42 nt, synthetic construct
  misc_feature 1..42: note = Alpha-mannosidase 2 (65-78)
  source 1..42: mol_type = other RNA
aacaacgagatcatcagcaacatccgcgactccgtgatcaac

SEQ ID NO: 31679 - RNA, 39 nt, synthetic construct
  misc_feature 1..39: note = Neurofibromin (66-78)
  source 1..39: mol_type = other RNA
aacaacatgcgcatcttcggcgaggccgccgagaagaac

SEQ ID NO: 31680 - RNA, 39 nt, synthetic construct
  misc_feature 1..39: note = Interleukin-4 receptor subunit alpha (193-205)
  source 1..39: mol_type = other RNA
aaccccgcctaccgcagcttctccaacagcctgtcccag

SEQ ID NO: 31681 - RNA, 51 nt, synthetic construct
  misc_feature 1..51: note = Transferrin receptor protein 1 (215-231)
  source 1..51: mol_type = other RNA
aaccccggcgggtacgtggcctacagcaaggccgcgaccgtcaccggcaag

SEQ ID NO: 31682 - RNA, 33 nt, synthetic construct
  misc_feature 1..33: note = Uncharacterized protein CXorf21 (203-213)
  source 1..33: mol_type = other RNA
aaccccatcagcaacgccgtgctgaacgagtac

SEQ ID NO: 31683 - RNA, 51 nt, synthetic construct
  misc_feature 1..51: note = Kynureninase (429-445)
  source 1..51: mol_type = other RNA
aaccccaacggcatccgcgtggccccggtccccctgtacaacagcttccac

SEQ ID NO: 31684 - RNA, 48 nt, synthetic construct
  misc_feature 1..48: note = MyoD family inhibitor domain-containing protein (64-79)
  source 1..48: mol_type = other RNA
aaccccagcgacggcgagctgatccgcacccagccgcagcggctcccc

SEQ ID NO: 31685 - RNA, 51 nt, synthetic construct
  misc_feature 1..51: note = MyoD family inhibitor domain-containing protein (64-80)
  source 1..51: mol_type = other RNA
aaccccagcgacggcgagctgatccgcacccagccgcagcggctcccccag

SEQ ID NO: 31686 - RNA, 54 nt, synthetic construct
  misc_feature 1..54: note = MyoD family inhibitor domain-containing protein (64-81)
  source 1..54: mol_type = other RNA
aaccccagcgacggcgagctgatccgcacccagccgcagcggctcccccagctg

SEQ ID NO: 31687 - RNA, 39 nt, synthetic construct
  misc_feature 1..39: note = Polypeptide N-acetylgalactosaminyltransferase 1 (405-417)
  source 1..39: mol_type = other RNA
aaccaggtgttcagctacaccgccaacaaggagatccgc

SEQ ID NO: 31688 - RNA, 42 nt, synthetic construct
  misc_feature 1..42: note = Polypeptide N-acetylgalactosaminyltransferase 1 (405-418)
  source 1..42: mol_type = other RNA
aaccaggtgttcagctacaccgccaacaaggagatccgcacc

SEQ ID NO: 31689 - RNA, 48 nt, synthetic construct
  misc_feature 1..48: note = Polypeptide N-acetylgalactosaminyltransferase 1 (405-420)
  source 1..48: mol_type = other RNA
aaccaggtgttcagctacaccgccaacaaggagatccgcaccgacgac

SEQ ID NO: 31690 - RNA, 27 nt, synthetic construct
  misc_feature 1..27: note = Cyclin-dependent kinase 14 (406-414)
  source 1..27: mol_type = other RNA
aaccgcctgagcgcccaggccgcgctc

SEQ ID NO: 31691 - RNA, 36 nt, synthetic construct
  misc_feature 1..36: note = Transferrin receptor protein 1 (198-209)
  source 1..36: mol_type = other RNA
aacagcgtgatcatcgtcgacaagaacggccgcctg

SEQ ID NO: 31692 - RNA, 39 nt, synthetic construct
  misc_feature 1..39: note = Transferrin receptor protein 1 (198-210)
  source 1..39: mol_type = other RNA
aacagcgtgatcatcgtcgacaagaacggccgcctggtg

SEQ ID NO: 31693 - RNA, 42 nt, synthetic construct
  misc_feature 1..42: note = Transferrin receptor protein 1 (198-211)
  source 1..42: mol_type = other RNA
aacagcgtgatcatcgtcgacaagaacggccgcctggtgtac

SEQ ID NO: 31694 - RNA, 42 nt, synthetic construct
  misc_feature 1..42: note = Glucose-6-phosphate isomerase (108-121)
  source 1..42: mol_type = other RNA
aacacccccatcctggtggacggcaaggacgtcatgccggag

SEQ ID NO: 31695 - RNA, 45 nt, synthetic construct
  misc_feature 1..45: note = Glucose-6-phosphate isomerase (108-122)
  source 1..45: mol_type = other RNA
aacacccccatcctggtggacggcaaggacgtcatgccggaggtg

SEQ ID NO: 31696 - RNA, 48 nt, synthetic construct
  misc_feature 1..48: note = Glucose-6-phosphate isomerase (108-123)
  source 1..48: mol_type = other RNA
aacacccccatcctggtggacggcaaggacgtcatgccggaggtgaac

SEQ ID NO: 31697 - RNA, 42 nt, synthetic construct
  misc_feature 1..42: note = Pericentriolar material 1 protein (1457-1470)
  source 1..42: mol_type = other RNA
aacaccgtgatccacctggaccaggccctcgcccgcatgcgg

SEQ ID NO: 31698 - RNA, 45 nt, synthetic construct
  misc_feature 1..45: note = Pericentriolar material 1 protein (1457-1471)
  source 1..45: mol_type = other RNA
aacaccgtgatccacctggaccaggccctcgcccgcatgcgggag

SEQ ID NO: 31699 - RNA, 39 nt, synthetic construct
  misc_feature 1..39: note = SLAM family member 6 (50-62)
  source 1..39: mol_type = other RNA
aacgtgagcttccgctgggaggccctgggcaacaccctc

SEQ ID NO: 31700 - RNA, 51 nt, synthetic construct
  misc_feature 1..51: note = Peroxiredoxin-1 (108-124)
  source 1..51: mol_type = other RNA
cccaagcgcaccatcgcccaggactacggcgtgctgaaggccgacgagggg

SEQ ID NO: 31701 - RNA, 39 nt, synthetic construct
  misc_feature 1..39: note = Calsyntenin-1 (57-69)
  source 1..39: mol_type = other RNA
cccccgctgatcgccctcgacaaggacgcccccctgcgc

SEQ ID NO: 31702 - RNA, 39 nt, synthetic construct
  misc_feature 1..39: note = Pro-cathepsin H (49-61)
  source 1..39: mol_type = other RNA
cccagccaggccttcgagtacatcctgtacaacaagggc

SEQ ID NO: 31703 - RNA, 42 nt, synthetic construct
  misc_feature 1..42: note = Pro-cathepsin H (49-62)
  source 1..42: mol_type = other RNA
cccagccaggccttcgagtacatcctgtacaacaagggcatc

SEQ ID NO: 31704 - RNA, 45 nt, synthetic construct
  misc_feature 1..45: note = Pro-cathepsin H (49-63)
  source 1..45: mol_type = other RNA
cccagccaggccttcgagtacatcctgtacaacaagggcatcatg

SEQ ID NO: 31705 - RNA, 45 nt, synthetic construct
  misc_feature 1..45: note = Low affinity immunoglobulin epsilon Fc receptor (39-53)
  source 1..45: mol_type = other RNA
caggccgacctgagctccttcaagagccaggagctcaacgagcgc

SEQ ID NO: 31706 - RNA, 33 nt, synthetic construct
  misc_feature 1..33: note = Ras-specific guanine nucleotide-releasing factor 1 (993-1003)
  source 1..33: mol_type = other RNA
caggaggaccccggcgacaaccagatcaccctg

SEQ ID NO: 31707 - RNA, 30 nt, synthetic construct
  misc_feature 1..30: note = ATP synthase F(0) complex subunit C1, mitochondrial (106-115)
  source 1..30: mol_type = other RNA
cagctgttcagctacgccatcctcggcttc

SEQ ID NO: 31708 - RNA, 27 nt, synthetic construct
  misc_feature 1..27: note = Transmembrane emp24 domain-containing protein 4 (162-170)
  source 1..27: mol_type = other RNA
cagctgctcgaccaggtggagcagatc

SEQ ID NO: 31709 - RNA, 39 nt, synthetic construct
  misc_feature 1..39: note = Glutathione peroxidase 1 (12-24)
  source 1..39: mol_type = other RNA
cagagcgtgtacgccttctccgcccgccccctggcgggc

SEQ ID NO: 31710 - RNA, 51 nt, synthetic construct
  misc_feature 1..51: note = Glutathione peroxidase 1 (12-28)
  source 1..51: mol_type = other RNA
cagagcgtgtacgccttctccgcccgccccctggcgggcggggagccggtc

SEQ ID NO: 31711 - RNA, 45 nt, synthetic construct
  misc_feature 1..45: note = Lipolysis-stimulated lipoprotein receptor (423-437)
  source 1..45: mol_type = other RNA
cgcgacgacctgtacgaccaggacgacagccgggacttcccccgc

SEQ ID NO: 31712 - RNA, 33 nt, synthetic construct
  misc_feature 1..33: note = Dystrophin (314-324)
  source 1..33: mol_type = other RNA
cgcgacttcggccccgccagccagcacttcctg

SEQ ID NO: 31713 - RNA, 27 nt, synthetic construct
  misc_feature 1..27: note = Transcription regulator protein BACH2 (715-723)
  source 1..27: mol_type = other RNA
cgcgacatccagagccccgagcagatc

SEQ ID NO: 31714 - RNA, 24 nt, synthetic construct
  misc_feature 1..24: note = Elongation factor Tu, mitochondrial (53-60)
  source 1..24: mol_type = other RNA
cgcgacaagccccacgtgaacgtc

SEQ ID NO: 31715 - RNA, 33 nt, synthetic construct
  misc_feature 1..33: note = TRAF3-interacting JNK-activating modulator (92-102)
  source 1..33: mol_type = other RNA
cgcgacctgcagatgaaccaggccctccggttc

SEQ ID NO: 31716 - RNA, 24 nt, synthetic construct
  misc_feature 1..24: note = Probable ATP-dependent RNA helicase DDX46 (658-665)
  source 1..24: mol_type = other RNA
cgcgacagcatcatcaacgacttc

SEQ ID NO: 31717 - RNA, 27 nt, synthetic construct
  misc_feature 1..27: note = Eukaryotic translation initiation factor 6 (237-245)
  source 1..27: mol_type = other RNA
cgcgacagcctgatcgactccctcacc

SEQ ID NO: 31718 - RNA, 33 nt, synthetic construct
  misc_feature 1..33: note = Cadherin EGF LAG seven-pass G-type receptor 1 (380-390)
  source 1..33: mol_type = other RNA
cgcgacagccccatcaacgccaacctgcggtac

SEQ ID NO: 31719 - RNA, 27 nt, synthetic construct
  misc_feature 1..27: note = Transcription regulator protein BACH2 (258-266)
  source 1..27: mol_type = other RNA
cgcgaggacaacagctccaacagcctg

SEQ ID NO: 31720 - RNA, 30 nt, synthetic construct
  misc_feature 1..30: note = ATP-binding cassette sub-family A member 6 (1183-1192)
  source 1..30: mol_type = other RNA
cgcgagttccccgaggccaacttcgagctg

SEQ ID NO: 31721 - RNA, 48 nt, synthetic construct
  misc_feature 1..48: note = Alpha-1B-glycoprotein (123-138)
  source 1..48: mol_type = other RNA
cgcggcgagaaggagctgctcgtgccccggagctccaccagcccggac

SEQ ID NO: 31722 - RNA, 39 nt, synthetic construct
  misc_feature 1..39: note = Peroxiredoxin-1 (128-140)
  source 1..39: mol_type = other RNA
cgcggcctgttcatcatcgacgacaaggggatcctccgg

SEQ ID NO: 31723 - RNA, 42 nt, synthetic construct
  misc_feature 1..42: note = Peroxiredoxin-1 (128-141)
  source 1..42: mol_type = other RNA
cgcggcctgttcatcatcgacgacaaggggatcctccggcag

SEQ ID NO: 31724 - RNA, 48 nt, synthetic construct
  misc_feature 1..48: note = Peroxiredoxin-1 (128-143)
  source 1..48: mol_type = other RNA
cgcggcctgttcatcatcgacgacaaggggatcctccggcagatcacc

SEQ ID NO: 31725 - RNA, 27 nt, synthetic construct
  misc_feature 1..27: note = DNA dC-dU-editing enzyme APOBEC-3D (306-314)
  source 1..27: mol_type = other RNA
cgccacagcaacgtgaacctgaccatc

SEQ ID NO: 31726 - RNA, 30 nt, synthetic construct
  misc_feature 1..30: note = Zinc finger protein 107 (152-161)
  source 1..30: mol_type = other RNA
cgcatccacaccggcgagaagccctacaag

SEQ ID NO: 31727 - RNA, 30 nt, synthetic construct
  misc_feature 1..30: note = Fibromodulin (324-333)
  source 1..30: mol_type = other RNA
cgcatcaacgagttcagcatctccagcttc

SEQ ID NO: 31728 - RNA, 27 nt, synthetic construct
  misc_feature 1..27: note = Cytoskeleton-associated protein 4 (199-207)
  source 1..27: mol_type = other RNA
cgcatcagcgaggtgctgcagaagctc

SEQ ID NO: 31729 - RNA, 42 nt, synthetic construct
  misc_feature 1..42: note = Leukosialin (349-362)
  source 1..42: mol_type = other RNA
cgcaagagccggcagggctccctggccatggaggagctcaag

SEQ ID NO: 31730 - RNA, 48 nt, synthetic construct
  misc_feature 1..48: note = Beta-1,4-galactosyltransferase 1 (49-64)
  source 1..48: mol_type = other RNA
cgcctgccccagctcgtgggcgtcagcaccccgctgcaggggggctcc

SEQ ID NO: 31731 - RNA, 36 nt, synthetic construct
  misc_feature 1..36: note = Proline-rich protein 12 (1113-1124)
  source 1..36: mol_type = other RNA
cgccccgccggcgagccgtacaaccggaagaccctg

SEQ ID NO: 31732 - RNA, 24 nt, synthetic construct
  misc_feature 1..24: note = Cadherin EGF LAG seven-pass G-type receptor 1 (2237-2244)
  source 1..24: mol_type = other RNA
cgccccttcgtgatcgtcaccgcc

SEQ ID NO: 31733 - RNA, 27 nt, synthetic construct
  misc_feature 1..27: note = Cadherin EGF LAG seven-pass G-type receptor 1 (2367-2375)
  source 1..27: mol_type = other RNA
cgccccatcatcaacaccccgatggtg

SEQ ID NO: 31734 - RNA, 27 nt, synthetic construct
  misc_feature 1..27: note = A-kinase anchor protein 2 (800-808)
  source 1..27: mol_type = other RNA
cgccccaagaacctgatgcagaccctc

SEQ ID NO: 31735 - RNA, 24 nt, synthetic construct
  misc_feature 1..24: note = B-lymphocyte antigen CD20 (222-229)
  source 1..24: mol_type = other RNA
cgccccaagagcaacatcgtgctg

SEQ ID NO: 31736 - RNA, 27 nt, synthetic construct
  misc_feature 1..27: note = Arrestin domain-containing protein 4 (148-156)
  source 1..27: mol_type = other RNA
cgccccaaggtgccggaccagagcgtc

SEQ ID NO: 31737 - RNA, 27 nt, synthetic construct
  misc_feature 1..27: note = A-kinase anchor protein 2 (109-117)
  source 1..27: mol_type = other RNA
cgccaggcccccccgcacatcgagctg

SEQ ID NO: 31738 - RNA, 42 nt, synthetic construct
  misc_feature 1..42: note = Golgi apparatus protein 1 (358-371)
  source 1..42: mol_type = other RNA
cgccagaagctgatcgcccaggactacaaggtgagctactcc

SEQ ID NO: 31739 - RNA, 45 nt, synthetic construct
  misc_feature 1..45: note = Golgi apparatus protein 1 (358-372)
  source 1..45: mol_type = other RNA
cgccagaagctgatcgcccaggactacaaggtgagctactccctc

SEQ ID NO: 31740 - RNA, 48 nt, synthetic construct
  misc_feature 1..48: note = Golgi apparatus protein 1 (358-373)
  source 1..48: mol_type = other RNA
cgccagaagctgatcgcccaggactacaaggtgagctactccctcgcc

SEQ ID NO: 31741 - RNA, 51 nt, synthetic construct
  misc_feature 1..51: note = Golgi apparatus protein 1 (358-374)
  source 1..51: mol_type = other RNA
cgccagaagctgatcgcccaggactacaaggtgagctactccctcgccaag

SEQ ID NO: 31742 - RNA, 27 nt, synthetic construct
  misc_feature 1..27: note = Dystrophin (178-186)
  source 1..27: mol_type = other RNA
cgccagctgggcgaggtggccagcttc

SEQ ID NO: 31743 - RNA, 24 nt, synthetic construct
  misc_feature 1..24: note = Cordon-bleu protein-like 1 (1082-1089)
  source 1..24: mol_type = other RNA
cgccagagcctgctcaccgccatc

SEQ ID NO: 31744 - RNA, 27 nt, synthetic construct
  misc_feature 1..27: note = Dynamin-binding protein (661-669)
  source 1..27: mol_type = other RNA
cgccggaaggacctggtgctcaagtac

SEQ ID NO: 31745 - RNA, 45 nt, synthetic construct
  misc_feature 1..45: note = Leukosialin (348-362)
  source 1..45: mol_type = other RNA
cgccggaagagccgccagggctccctggccatggaggagctcaag

SEQ ID NO: 31746 - RNA, 36 nt, synthetic construct
  misc_feature 1..36: note = Ras-related protein Rab-11A (51-62)
  source 1..36: mol_type = other RNA
cgcagcatccaggtggacggcaagaccatcaaggcc

SEQ ID NO: 31747 - RNA, 39 nt, synthetic construct
  misc_feature 1..39: note = Ras-related protein Rab-11A (51-63)
  source 1..39: mol_type = other RNA
cgcagcatccaggtggacggcaagaccatcaaggcccag

SEQ ID NO: 31748 - RNA, 42 nt, synthetic construct
  misc_feature 1..42: note = Ras-related protein Rab-11A (51-64)
  source 1..42: mol_type = other RNA
cgcagcatccaggtggacggcaagaccatcaaggcccagatc

SEQ ID NO: 31749 - RNA, 33 nt, synthetic construct
  misc_feature 1..33: note = TP53-target gene 5 protein (40-50)
  source 1..33: mol_type = other RNA
cgcaccgtgctgaagaacctcagcctgctgaag

SEQ ID NO: 31750 - RNA, 42 nt, synthetic construct
  misc_feature 1..42: note = Golgi apparatus protein 1 (995-1008)
  source 1..42: mol_type = other RNA
agcgccctggactaccgcctcgacccccagctgcagctgcac

SEQ ID NO: 31751 - RNA, 33 nt, synthetic construct
  misc_feature 1..33: note = AN1-type zinc finger protein 5 (63-73)
  source 1..33: mol_type = other RNA
agcgcctccgtgcagcgcgccgacaccagcctg

SEQ ID NO: 31752 - RNA, 42 nt, synthetic construct
  misc_feature 1..42: note = IgG receptor FcRn large subunit p51 (253-266)
  source 1..42: mol_type = other RNA
agcgacggctccttccacgccagctccagcctgaccgtgaag

SEQ ID NO: 31753 - RNA, 42 nt, synthetic construct
  misc_feature 1..42: note = Plasma membrane calcium-transporting ATPase 1 (256-269)
  source 1..42: mol_type = other RNA
agcgacggctcctaccgcatcttcagcaagggggcctccgag

SEQ ID NO: 31754 - RNA, 27 nt, synthetic construct
  misc_feature 1..27: note = Probable ribonuclease ZC3H12D (505-513)
  source 1..27: mol_type = other RNA
agcgacctggcccgcctcatcctgctg

SEQ ID NO: 31755 - RNA, 45 nt, synthetic construct
  misc_feature 1..45: note = ATP synthase subunit alpha, mitochondrial (348-362)
  source 1..45: mol_type = other RNA
agcgacctggacgccgccacccagcagctcctgtcccgcggcgtg

SEQ ID NO: 31756 - RNA, 27 nt, synthetic construct
  misc_feature 1..27: note = TRAF3-interacting JNK-activating modulator (138-146)
  source 1..27: mol_type = other RNA
agcgaggccgagaagctgaccctcgtg

SEQ ID NO: 31757 - RNA, 30 nt, synthetic construct
  misc_feature 1..30: note = Lysine-specific demethylase 2B (477-486)
  source 1..30: mol_type = other RNA
agcgaggagtccgtgaagagcaccaccctg

SEQ ID NO: 31758 - RNA, 27 nt, synthetic construct
  misc_feature 1..27: note = Elongator complex protein 3 (338-346)
  source 1..27: mol_type = other RNA
agcgaggagaccttccgcttcgagctg

SEQ ID NO: 31759 - RNA, 27 nt, synthetic construct
  misc_feature 1..27: note = Zinc finger protein 638 (865-873)
  source 1..27: mol_type = other RNA
agcgagatcaagacctccatcgaggtg

SEQ ID NO: 31760 - RNA, 27 nt, synthetic construct
  misc_feature 1..27: note = Ribonucleoside-diphosphate reductase subunit M2 B (275-283)
  source 1..27: mol_type = other RNA
agcgagtaccagcgcttcgccgtgatg

SEQ ID NO: 31761 - RNA, 57 nt, synthetic construct
  misc_feature 1..57: note = DnaJ homolog subfamily C member 5 (12-30)
  source 1..57: mol_type = other RNA
agcggcgagtccctgtaccacgtgctcgggctggacaagaacgccaccagcgacgac

SEQ ID NO: 31762 - RNA, 42 nt, synthetic construct
  misc_feature 1..42: note = Heterogeneous nuclear ribonucleoprotein A1-like 2 (133-146)
  source 1..42: mol_type = other RNA
agcggcccctacgggggcgggggccagtacttcgccaagccg

SEQ ID NO: 31763 - RNA, 75 nt, synthetic construct
  misc_feature 1..75: note = Heterogeneous nuclear ribonucleoprotein A3 (147-171)
  source 1..75: mol_type = other RNA
agcggccagcagcagtccaactacgggcccatgaagggcgggagcttcggcgggcgctccagcggctccccgtac

SEQ ID NO: 31764 - RNA, 69 nt, synthetic construct
  misc_feature 1..69: note = Heterogeneous nuclear ribonucleoprotein A3 (167-189)
  source 1..69: mol_type = other RNA
agcggctccccctacgggggcgggtacggcagcgggggcggctccgggggctacgggagccgccggttc

SEQ ID NO: 31765 - RNA, 45 nt, synthetic construct
  misc_feature 1..45: note = Carbohydrate sulfotransferase 2 (175-189)
  source 1..45: mol_type = other RNA
agcggctccagcttcttcggggagctgttcaaccagaaccccgag

SEQ ID NO: 31766 - RNA, 39 nt, synthetic construct
  misc_feature 1..39: note = Ceramide glucosyltransferase (192-204)
  source 1..39: mol_type = other RNA
agccacccccgctactacatctccgccaacgtgaccggc

SEQ ID NO: 31767 - RNA, 45 nt, synthetic construct
  misc_feature 1..45: note = Ceramide glucosyltransferase (192-206)
  source 1..45: mol_type = other RNA
agccacccccgctactacatctccgccaacgtgaccggcttcaag

SEQ ID NO: 31768 - RNA, 27 nt, synthetic construct
  misc_feature 1..27: note = Hematopoietic SH2 domain-containing protein (61-69)
  source 1..27: mol_type = other RNA
agccactcccacgtgggctacaccctg

SEQ ID NO: 31769 - RNA, 45 nt, synthetic construct
  misc_feature 1..45: note = Serine incorporator 3 (252-266)
  source 1..45: mol_type = other RNA
agcatcatctccatccaccccaagatccaggagcaccagccgcgc

SEQ ID NO: 31770 - RNA, 24 nt, synthetic construct
  misc_feature 1..24: note = Uncharacterized protein CXorf21 (192-199)
  source 1..24: mol_type = other RNA
agcatcaaggagaagtccagcctg

SEQ ID NO: 31771 - RNA, 27 nt, synthetic construct
  misc_feature 1..27: note = Protein asunder homolog (394-402)
  source 1..27: mol_type = other RNA
agcatcctggaggaccccccgtccatc

SEQ ID NO: 31772 - RNA, 42 nt, synthetic construct
  misc_feature 1..42: note = Golgi apparatus protein 1 (1057-1070)
  source 1..42: mol_type = other RNA
agcaaggccgacatcttcgtggaccccgtcctgcacaccgcc

SEQ ID NO: 31773 - RNA, 36 nt, synthetic construct
  misc_feature 1..36: note = Perilipin-2 (369-380)
  source 1..36: mol_type = other RNA
agcctgctcacctccagcaagggccagctgcagaag

SEQ ID NO: 31774 - RNA, 27 nt, synthetic construct
  misc_feature 1..27: note = DmX-like protein 1 (607-615)
  source 1..27: mol_type = other RNA
agcctgaaccagtggctcgtgtccttc

SEQ ID NO: 31775 - RNA, 27 nt, synthetic construct
  misc_feature 1..27: note = DmX-like protein 1 (1285-1293)
  source 1..27: mol_type = other RNA
agcatgacctccctggcccagaagatc

SEQ ID NO: 31776 - RNA, 42 nt, synthetic construct
  misc_feature 1..42: note = Cystatin-C (64-77)
  source 1..42: mol_type = other RNA
agcaacgacatgtaccactcccgcgccctgcaggtggtccgg

SEQ ID NO: 31777 - RNA, 42 nt, synthetic construct
  misc_feature 1..42: note = Vitamin D-binding protein (234-247)
  source 1..42: mol_type = other RNA
agcaacctgatcaagctcgcccagaaggtgcccaccgccgac

SEQ ID NO: 31778 - RNA, 45 nt, synthetic construct
  misc_feature 1..45: note = Glucose-6-phosphate isomerase (107-121)
  source 1..45: mol_type = other RNA
agcaacacccccatcctggtggacggcaaggacgtcatgccggag

SEQ ID NO: 31779 - RNA, 51 nt, synthetic construct
  misc_feature 1..51: note = Glucose-6-phosphate isomerase (107-123)
  source 1..51: mol_type = other RNA
agcaacacccccatcctggtggacggcaaggacgtcatgccggaggtgaac

SEQ ID NO: 31780 - RNA, 27 nt, synthetic construct
  misc_feature 1..27: note = NACHT, LRR and PYD domains-containing protein 2 (739-747)
  source 1..27: mol_type = other RNA
agccccgccgacgcccaccgcaacctg

SEQ ID NO: 31781 - RNA, 36 nt, synthetic construct
  misc_feature 1..36: note = Calcium and integrin-binding protein 1 (80-91)
  source 1..36: mol_type = other RNA
agccccgccaaggactccctgagcttcgaggacttc

SEQ ID NO: 31782 - RNA, 45 nt, synthetic construct
  misc_feature 1..45: note = Calcium and integrin-binding protein 1 (80-94)
  source 1..45: mol_type = other RNA
agccccgccaaggactccctgagcttcgaggacttcctcgacctg

SEQ ID NO: 31783 - RNA, 24 nt, synthetic construct
  misc_feature 1..24: note = Tumor necrosis factor receptor superfamily member 13C (50-57)
  source 1..24: mol_type = other RNA
agccccgccccgcgcaccgccctg

SEQ ID NO: 31784 - RNA, 27 nt, synthetic construct
  misc_feature 1..27: note = Cordon-bleu protein-like 1 (911-919)
  source 1..27: mol_type = other RNA
agccccgagcagaccctgtccccgctc

SEQ ID NO: 31785 - RNA, 45 nt, synthetic construct
  misc_feature 1..45: note = Transferrin receptor protein 1 (695-709)
  source 1..45: mol_type = other RNA
agccccttccgccacgtgttctggggctccgggagccacaccctg

SEQ ID NO: 31786 - RNA, 24 nt, synthetic construct
  misc_feature 1..24: note = Ras-specific guanine nucleotide-releasing factor 1 (774-781)
  source 1..24: mol_type = other RNA
agccccttctccaaggccaccctg

SEQ ID NO: 31787 - RNA, 42 nt, synthetic construct
  misc_feature 1..42: note = Beta-1,4-galactosyltransferase 1 (174-187)
  source 1..42: mol_type = other RNA
agcccccacaaggtggccatcatcatcccgttccgcaaccgg

SEQ ID NO: 31788 - RNA, 48 nt, synthetic construct
  misc_feature 1..48: note = Beta-1,4-galactosyltransferase 1 (174-189)
  source 1..48: mol_type = other RNA
agcccccacaaggtggccatcatcatcccgttccgcaaccggcaggag

SEQ ID NO: 31789 - RNA, 51 nt, synthetic construct
  misc_feature 1..51: note = Beta-1,4-galactosyltransferase 1 (174-190)
  source 1..51: mol_type = other RNA
agcccccacaaggtggccatcatcatcccgttccgcaaccggcaggagcac

SEQ ID NO: 31790 - RNA, 39 nt, synthetic construct
  misc_feature 1..39: note = Phosphate-regulating neutral endopeptidase (424-436)
  source 1..39: mol_type = other RNA
agccccccgcagttccgcgtgaacggcgccatctccaac

SEQ ID NO: 31791 - RNA, 45 nt, synthetic construct
  misc_feature 1..45: note = Phosphate-regulating neutral endopeptidase (424-438)
  source 1..45: mol_type = other RNA
agccccccgcagttccgcgtgaacggcgccatctccaacttcgag

SEQ ID NO: 31792 - RNA, 48 nt, synthetic construct
  misc_feature 1..48: note = Phosphate-regulating neutral endopeptidase (424-439)
  source 1..48: mol_type = other RNA
agccccccgcagttccgcgtgaacggcgccatctccaacttcgaggag

SEQ ID NO: 31793 - RNA, 51 nt, synthetic construct
  misc_feature 1..51: note = Phosphate-regulating neutral endopeptidase (424-440)
  source 1..51: mol_type = other RNA
agccccccgcagttccgcgtgaacggcgccatctccaacttcgaggagttc

SEQ ID NO: 31794 - RNA, 27 nt, synthetic construct
  misc_feature 1..27: note = Zinc finger protein 296 (218-226)
  source 1..27: mol_type = other RNA
agcccccgcgcctccggcagcgggctg

SEQ ID NO: 31795 - RNA, 30 nt, synthetic construct
  misc_feature 1..30: note = Lysine-specific demethylase 2B (832-841)
  source 1..30: mol_type = other RNA
agcccccgcccgcccctgggctccagcctc

SEQ ID NO: 31796 - RNA, 45 nt, synthetic construct
  misc_feature 1..45: note = Golgi apparatus protein 1 (1141-1155)
  source 1..45: mol_type = other RNA
agcccctccaagaactacatcctgagcgtgatctccggcagcatc

SEQ ID NO: 31797 - RNA, 24 nt, synthetic construct
  misc_feature 1..24: note = T-cell activation Rho GTPase-activating protein (149-156)
  source 1..24: mol_type = other RNA
agcccctcccgccagccgcaggtg

SEQ ID NO: 31798 - RNA, 54 nt, synthetic construct
  misc_feature 1..54: note = SLAM family member 6 (167-184)
  source 1..54: mol_type = other RNA
agccccaccaacaacaccgtgtacgcctccgtcacgcacagcaaccgcgagacc

SEQ ID NO: 31799 - RNA, 30 nt, synthetic construct
  misc_feature 1..30: note = Cadherin EGF LAG seven-pass G-type receptor 1 (2960-2969)
  source 1..30: mol_type = other RNA
agccccacctccagccgcacctccagcctg

SEQ ID NO: 31800 - RNA, 42 nt, synthetic construct
  misc_feature 1..42: note = Alpha-mannosidase 2 (670-683)
  source 1..42: mol_type = other RNA
agccccaccgtgcaggtcttctccgccagcggcaagccggtg

SEQ ID NO: 31801 - RNA, 33 nt, synthetic construct
  misc_feature 1..33: note = ATP synthase F(0) complex subunit C1, mitochondrial (32-42)
  source 1..33: mol_type = other RNA
agccccgtgaactccagcaagcagccgtcctac

SEQ ID NO: 31802 - RNA, 24 nt, synthetic construct
  misc_feature 1..24: note = Lysine-specific demethylase 2B (842-849)
  source 1..24: mol_type = other RNA
agcccctggtggcgctccagcctg

SEQ ID NO: 31803 - RNA, 63 nt, synthetic construct
  misc_feature 1..63: note = Heterogeneous nuclear ribonucleoprotein A3 (169-189)
  source 1..63: mol_type = other RNA
agcccctacggcgggggctacgggtccggcgggggcagcggcgggtacggctcccgccggttc

SEQ ID NO: 31804 - RNA, 27 nt, synthetic construct
  misc_feature 1..27: note = Melanoma antigen preferentially expressed in tumors (406-414)
  source 1..27: mol_type = other RNA
agccagctgaccaccctctccttctac

SEQ ID NO: 31805 - RNA, 45 nt, synthetic construct
  misc_feature 1..45: note = Platelet endothelial cell adhesion molecule (409-423)
  source 1..45: mol_type = other RNA
agccagccccgcatctcctacgacgcccagttcgaggtgatcaag

SEQ ID NO: 31806 - RNA, 48 nt, synthetic construct
  misc_feature 1..48: note = Platelet endothelial cell adhesion molecule (409-424)
  source 1..48: mol_type = other RNA
agccagccccgcatctcctacgacgcccagttcgaggtgatcaagggc

SEQ ID NO: 31807 - RNA, 27 nt, synthetic construct
  misc_feature 1..27: note = Tumor protein p53-inducible protein 11 (14-22)
  source 1..27: mol_type = other RNA
agccagaccgacctggtgtcccgcctc

SEQ ID NO: 31808 - RNA, 45 nt, synthetic construct
  misc_feature 1..45: note = Interleukin-4 receptor subunit alpha (90-104)
  source 1..45: mol_type = other RNA
agccgcgacgacttccaggagggccgggaggggatcgtggcccgc

SEQ ID NO: 31809 - RNA, 27 nt, synthetic construct
  misc_feature 1..27: note = T-cell activation Rho GTPase-activating protein (308-316)
  source 1..27: mol_type = other RNA
agccgccaccagtccttcaccaccaag

SEQ ID NO: 31810 - RNA, 27 nt, synthetic construct
  misc_feature 1..27: note = T-cell activation Rho GTPase-activating protein (5-13)
  source 1..27: mol_type = other RNA
agctcccacaacgccagcaagaccctg

SEQ ID NO: 31811 - RNA, 45 nt, synthetic construct
  misc_feature 1..45: note = Ragulator complex protein LAMTOR1 (55-69)
  source 1..45: mol_type = other RNA
agctccatcctggccaagaccgccagcaacatcatcgacgtgtcc

SEQ ID NO: 31812 - RNA, 39 nt, synthetic construct
  misc_feature 1..39: note = Serine incorporator 3 (351-363)
  source 1..39: mol_type = other RNA
agctccatccgcaccagcaccaactcccaggtggacaag

SEQ ID NO: 31813 - RNA, 48 nt, synthetic construct
  misc_feature 1..48: note = Alpha-mannosidase 2 (669-684)
  source 1..48: mol_type = other RNA
agctcccccaccgtgcaggtcttcagcgcctccggcaagccggtggag

SEQ ID NO: 31814 - RNA, 27 nt, synthetic construct
  misc_feature 1..27: note = DmX-like protein 1 (1271-1279)
  source 1..27: mol_type = other RNA
agctccagcggcctgcaccccccgaag

SEQ ID NO: 31815 - RNA, 39 nt, synthetic construct
  misc_feature 1..39: note = Interleukin-4 receptor subunit alpha (490-502)
  source 1..39: mol_type = other RNA
agctccagctccttccaccccgccccgggcaacgcccag

SEQ ID NO: 31816 - RNA, 27 nt, synthetic construct
  misc_feature 1..27: note = Interleukin-1 beta (84-92)
  source 1..27: mol_type = other RNA
agcgtggaccccaagaactacccgaag

SEQ ID NO: 31817 - RNA, 39 nt, synthetic construct
  misc_feature 1..39: note = 15 kDa selenoprotein (150-162)
  source 1..39: mol_type = other RNA
agcgtggaggagttcctgtccgagaagctcgagcgcatc

SEQ ID NO: 31818 - RNA, 36 nt, synthetic construct
  misc_feature 1..36: note = Transferrin receptor protein 1 (199-210)
  source 1..36: mol_type = other RNA
agcgtgatcatcgtcgacaagaacggccgcctggtg

SEQ ID NO: 31819 - RNA, 27 nt, synthetic construct
  misc_feature 1..27: note = AT-rich interactive domain-containing protein 5B (278-286)
  source 1..27: mol_type = other RNA
agcgtgatccagcacgtccagtccttc

SEQ ID NO: 31820 - RNA, 30 nt, synthetic construct
  misc_feature 1..30: note = Probable ATP-dependent RNA helicase DDX46 (198-207)
  source 1..30: mol_type = other RNA
agcgtgaagggcgggggcgggaacgagaag

SEQ ID NO: 31821 - RNA, 42 nt, synthetic construct
  misc_feature 1..42: note = Plasma membrane calcium-transporting ATPase 1 (110-123)
  source 1..42: mol_type = other RNA
agcgtgaagaagatgatgaaggacaacaacctggtccgccac

SEQ ID NO: 31822 - RNA, 27 nt, synthetic construct
  misc_feature 1..27: note = Zinc finger protein 638 (619-627)
  source 1..27: mol_type = other RNA
agcgtgaagcccacctccgccaccaag

SEQ ID NO: 31823 - RNA, 33 nt, synthetic construct
  misc_feature 1..33: note = Interleukin-17 receptor A (789-799)
  source 1..33: mol_type = other RNA
agcgtgcagtccgaccagggctacatcagccgc

SEQ ID NO: 31824 - RNA, 45 nt, synthetic construct
  misc_feature 1..45: note = Low affinity immunoglobulin epsilon Fc receptor (32-46)
  source 1..45: mol_type = other RNA
agctggaacctgaacggcctccaggccgacctgtccagcttcaag

SEQ ID NO: 31825 - RNA, 45 nt, synthetic construct
  misc_feature 1..45: note = Receptor-type tyrosine-protein phosphatase alpha (182-196)
  source 1..45: mol_type = other RNA
accgccaccatcgtgatggtcacgaacctgaaggagcgcaaggag

SEQ ID NO: 31826 - RNA, 30 nt, synthetic construct
  misc_feature 1..30: note = Dystrophin (30-39)
  source 1..30: mol_type = other RNA
accgaggccgagaccacggccaacgtgctg

SEQ ID NO: 31827 - RNA, 24 nt, synthetic construct
  misc_feature 1..24: note = Transcription regulator protein BACH2 (559-566)
  source 1..24: mol_type = other RNA
accgagcaccaggagcccggcctg

SEQ ID NO: 31828 - RNA, 27 nt, synthetic construct
  misc_feature 1..27: note = Cordon-bleu protein-like 1 (804-812)
  source 1..27: mol_type = other RNA
accgagcaccaggtgcccagctccgtc

SEQ ID NO: 31829 - RNA, 33 nt, synthetic construct
  misc_feature 1..33: note = Uncharacterized protein CXorf21 (281-291)
  source 1..33: mol_type = other RNA
accgagatcaccgagatcagcacgccctccctg

SEQ ID NO: 31830 - RNA, 27 nt, synthetic construct
  misc_feature 1..27: note = Ribonucleoside-diphosphate reductase subunit M2 B (128-136)
  source 1..27: mol_type = other RNA
accttcggcgagcgcgtggtcgccttc

SEQ ID NO: 31831 - RNA, 45 nt, synthetic construct
  misc_feature 1..45: note = Cation-independent mannose-6-phosphate receptor (1446-1460)
  source 1..45: mol_type = other RNA
accggccacctgttcgacctcagctccctgagcgggcgcgccggc

SEQ ID NO: 31832 - RNA, 42 nt, synthetic construct
  misc_feature 1..42: note = Low affinity immunoglobulin epsilon Fc receptor (139-152)
  source 1..42: mol_type = other RNA
accggcagctggatcgggctgcgcaacctcgacctgaagggc

SEQ ID NO: 31833 - RNA, 45 nt, synthetic construct
  misc_feature 1..45: note = SLAM family member 6 (104-118)
  source 1..45: mol_type = other RNA
accggcagctaccgcgcccagatctccaccaagacgagcgccaag

SEQ ID NO: 31834 - RNA, 27 nt, synthetic construct
  misc_feature 1..27: note = ATP-binding cassette sub-family A member 6 (728-736)
  source 1..27: mol_type = other RNA
acccaccacatccccgacgccaagctg

SEQ ID NO: 31835 - RNA, 27 nt, synthetic construct
  misc_feature 1..27: note = Transcription regulator protein BACH2 (70-78)
  source 1..27: mol_type = other RNA
accaagaacgacctggtggtcagcctc

SEQ ID NO: 31836 - RNA, 24 nt, synthetic construct
  misc_feature 1..24: note = Baculoviral IAP repeat-containing protein 5 (97-104)
  source 1..24: mol_type = other RNA
accctgggcgagttcctcaagctg

SEQ ID NO: 31837 - RNA, 39 nt, synthetic construct
  misc_feature 1..39: note = Fas apoptotic inhibitory molecule 3 (65-77)
  source 1..39: mol_type = other RNA
accaacttcatcaaggccgagtacaagggccgcgtgacc

SEQ ID NO: 31838 - RNA, 42 nt, synthetic construct
  misc_feature 1..42: note = Calsyntenin-1 (140-153)
  source 1..42: mol_type = other RNA
accaacgtgaagaagagccacaaggccaccgtccacatccag

SEQ ID NO: 31839 - RNA, 27 nt, synthetic construct
  misc_feature 1..27: note = Interferon regulatory factor 9 (382-390)
  source 1..27: mol_type = other RNA
acccccgagcagcaggccgccatcctg

SEQ ID NO: 31840 - RNA, 27 nt, synthetic construct
  misc_feature 1..27: note = Cyclin-dependent kinase 14 (174-182)
  source 1..27: mol_type = other RNA
acccccttcaccgccatccgcgaggcc

SEQ ID NO: 31841 - RNA, 27 nt, synthetic construct
  misc_feature 1..27: note = AT-rich interactive domain-containing protein 5B (36-44)
  source 1..27: mol_type = other RNA
acccccatcgagcgcatcccgtacctg

SEQ ID NO: 31842 - RNA, 36 nt, synthetic construct
  misc_feature 1..36: note = Glucose-6-phosphate isomerase (109-120)
  source 1..36: mol_type = other RNA
acccccatcctggtggacggcaaggacgtcatgccg

SEQ ID NO: 31843 - RNA, 39 nt, synthetic construct
  misc_feature 1..39: note = Glucose-6-phosphate isomerase (109-121)
  source 1..39: mol_type = other RNA
acccccatcctggtggacggcaaggacgtcatgccggag

SEQ ID NO: 31844 - RNA, 42 nt, synthetic construct
  misc_feature 1..42: note = Glucose-6-phosphate isomerase (109-122)
  source 1..42: mol_type = other RNA
acccccatcctggtggacggcaaggacgtcatgccggaggtg

SEQ ID NO: 31845 - RNA, 45 nt, synthetic construct
  misc_feature 1..45: note = Glucose-6-phosphate isomerase (109-123)
  source 1..45: mol_type = other RNA
acccccatcctggtggacggcaaggacgtcatgccggaggtgaac

SEQ ID NO: 31846 - RNA, 27 nt, synthetic construct
  misc_feature 1..27: note = Probable ribonuclease ZC3H12D (145-153)
  source 1..27: mol_type = other RNA
acccccatccgcgagcagcacgtgctg

SEQ ID NO: 31847 - RNA, 48 nt, synthetic construct
  misc_feature 1..48: note = Protein CDV3 homolog (80-95)
  source 1..48: mol_type = other RNA
accccccagggcccgcccgagatctacagcgacacccagttcccctcc

SEQ ID NO: 31848 - RNA, 54 nt, synthetic construct
  misc_feature 1..54: note = Protein CDV3 homolog (80-97)
  source 1..54: mol_type = other RNA
accccccagggcccgcccgagatctacagcgacacccagttcccctccctgcag

SEQ ID NO: 31849 - RNA, 60 nt, synthetic construct
  misc_feature 1..60: note = Protein CDV3 homolog (80-99)
  source 1..60: mol_type = other RNA
accccccagggcccgcccgagatctacagcgacacccagttcccctccctgcagagcacg

SEQ ID NO: 31850 - RNA, 54 nt, synthetic construct
  misc_feature 1..54: note = SLAM family member 6 (188-205)
  source 1..54: mol_type = other RNA
accccccgcgagaacgacaccatcacgatctacagcaccatcaaccactccaag

SEQ ID NO: 31851 - RNA, 69 nt, synthetic construct
  misc_feature 1..69: note = SLAM family member 6 (188-210)
  source 1..69: mol_type = other RNA
accccccgcgagaacgacaccatcacgatctacagcaccatcaaccactccaaggagagcaagccgacc

SEQ ID NO: 31852 - RNA, 27 nt, synthetic construct
  misc_feature 1..27: note = Protein asunder homolog (320-328)
  source 1..27: mol_type = other RNA
accccccgcaccaacaacatcgagctg

SEQ ID NO: 31853 - RNA, 45 nt, synthetic construct
  misc_feature 1..45: note = E3 ubiquitin-protein ligase CHIP (246-260)
  source 1..45: mol_type = other RNA
acccccagcggcatcacctacgaccgcaaggacatcgaggagcac

SEQ ID NO: 31854 - RNA, 36 nt, synthetic construct
  misc_feature 1..36: note = Putative heat shock 70 kDa protein 7 (40-51)
  source 1..36: mol_type = other RNA
acccccagctacgtggccttcaccgacacggagcgc

SEQ ID NO: 31855 - RNA, 39 nt, synthetic construct
  misc_feature 1..39: note = Putative heat shock 70 kDa protein 7 (40-52)
  source 1..39: mol_type = other RNA
acccccagctacgtggccttcaccgacacggagcgcctg

SEQ ID NO: 31856 - RNA, 27 nt, synthetic construct
  misc_feature 1..27: note = Zinc finger protein 107 (512-520)
  source 1..27: mol_type = other RNA
acccgccacaagatcgtgcacaccaag

SEQ ID NO: 31857 - RNA, 42 nt, synthetic construct
  misc_feature 1..42: note = Cytochrome b ascorbate-dependent protein 3 (187-200)
  source 1..42: mol_type = other RNA
acccgcccctaccacagcctgccgtccgaggccgtgttcgcc

SEQ ID NO: 31858 - RNA, 45 nt, synthetic construct
  misc_feature 1..45: note = Cytochrome b ascorbate-dependent protein 3 (187-201)
  source 1..45: mol_type = other RNA
acccgcccctaccacagcctgccgtccgaggccgtgttcgccaac

SEQ ID NO: 31859 - RNA, 42 nt, synthetic construct
  misc_feature 1..42: note = Ras-related protein Rab-11A (50-63)
  source 1..42: mol_type = other RNA
acccgcagcatccaggtggacggcaagaccatcaaggcccag

SEQ ID NO: 31860 - RNA, 42 nt, synthetic construct
  misc_feature 1..42: note = Ceramide glucosyltransferase (191-204)
  source 1..42: mol_type = other RNA
accagccacccccgctactacatctccgccaacgtgaccggc

SEQ ID NO: 31861 - RNA, 48 nt, synthetic construct
  misc_feature 1..48: note = Ceramide glucosyltransferase (191-206)
  source 1..48: mol_type = other RNA
accagccacccccgctactacatctccgccaacgtgaccggcttcaag

SEQ ID NO: 31862 - RNA, 48 nt, synthetic construct
  misc_feature 1..48: note = B- and T-lymphocyte attenuator (128-143)
  source 1..48: mol_type = other RNA
accaccctgtacgtgacggacgtcaagagcgcctccgagcgccccagc

SEQ ID NO: 31863 - RNA, 42 nt, synthetic construct
  misc_feature 1..42: note = Fas apoptotic inhibitory molecule 3 (64-77)
  source 1..42: mol_type = other RNA
accaccaacttcatcaaggccgagtacaagggccgcgtgacg

SEQ ID NO: 31864 - RNA, 42 nt, synthetic construct
  misc_feature 1..42: note = DnaJ homolog subfamily C member 5 (181-194)
  source 1..42: mol_type = other RNA
accacccagctgacggccgacagccacccctcctaccacacc

SEQ ID NO: 31865 - RNA, 45 nt, synthetic construct
  misc_feature 1..45: note = DnaJ homolog subfamily C member 5 (181-195)
  source 1..45: mol_type = other RNA
accacccagctgacggccgacagccacccctcctaccacaccgac

SEQ ID NO: 31866 - RNA, 48 nt, synthetic construct
  misc_feature 1..48: note = DnaJ homolog subfamily C member 5 (181-196)
  source 1..48: mol_type = other RNA
accacccagctgacggccgacagccacccctcctaccacaccgacggc

SEQ ID NO: 31867 - RNA, 27 nt, synthetic construct
  misc_feature 1..27: note = Cordon-bleu protein-like 1 (732-740)
  source 1..27: mol_type = other RNA
accacctacaagatcgtgcccccgaag

SEQ ID NO: 31868 - RNA, 33 nt, synthetic construct
  misc_feature 1..33: note = Eukaryotic translation initiation factor 6 (141-151)
  source 1..33: mol_type = other RNA
accgtggccgaccaggtcctggtgggcagctac

SEQ ID NO: 31869 - RNA, 27 nt, synthetic construct
  misc_feature 1..27: note = ATP-binding cassette sub-family A member 6 (572-580)
  source 1..27: mol_type = other RNA
accgtgaaggagaacctgagcctcttc

SEQ ID NO: 31870 - RNA, 36 nt, synthetic construct
  misc_feature 1..36: note = C-C chemokine receptor type 7 (93-104)
  source 1..36: mol_type = other RNA
gtggccatcgtccaggccgtgagcgcgcaccgccac

SEQ ID NO: 31871 - RNA, 39 nt, synthetic construct
  misc_feature 1..39: note = C-C chemokine receptor type 7 (93-105)
  source 1..39: mol_type = other RNA
gtggccatcgtccaggccgtgagcgcgcaccgccaccgg

SEQ ID NO: 31872 - RNA, 42 nt, synthetic construct
  misc_feature 1..42: note = C-C chemokine receptor type 7 (93-106)
  source 1..42: mol_type = other RNA
gtggccatcgtccaggccgtgagcgcgcaccgccaccgggcc

SEQ ID NO: 31873 - RNA, 45 nt, synthetic construct
  misc_feature 1..45: note = C-C chemokine receptor type 7 (93-107)
  source 1..45: mol_type = other RNA
gtggccatcgtccaggccgtgagcgcgcaccgccaccgggcccgc

SEQ ID NO: 31874 - RNA, 36 nt, synthetic construct
  misc_feature 1..36: note = Interleukin-4 receptor subunit alpha (102-113)
  source 1..36: mol_type = other RNA
gtggcccgcctgaccgagagcctcttcctggacctg

SEQ ID NO: 31875 - RNA, 42 nt, synthetic construct
  misc_feature 1..42: note = Interleukin-4 receptor subunit alpha (102-115)
  source 1..42: mol_type = other RNA
gtggcccgcctgaccgagagcctcttcctggacctgctcggc

SEQ ID NO: 31876 - RNA, 36 nt, synthetic construct
  misc_feature 1..36: note = Cytochrome b ascorbate-dependent protein 3 (99-110)
  source 1..36: mol_type = other RNA
gtggccgtcttcaccttccacaaccacggccgcacc

SEQ ID NO: 31877 - RNA, 39 nt, synthetic construct
  misc_feature 1..39: note = Cytochrome b ascorbate-dependent protein 3 (99-111)
  source 1..39: mol_type = other RNA
gtggccgtcttcaccttccacaaccacggccgcaccgcc

SEQ ID NO: 31878 - RNA, 45 nt, synthetic construct
  misc_feature 1..45: note = Cytochrome b ascorbate-dependent protein 3 (99-113)
  source 1..45: mol_type = other RNA
gtggccgtcttcaccttccacaaccacggccgcaccgccaacctg

SEQ ID NO: 31879 - RNA, 39 nt, synthetic construct
  misc_feature 1..39: note = Vesicle-associated membrane protein 1 (52-64)
  source 1..39: mol_type = other RNA
gtggacaaggtcctggagcgcgaccagaagctcagcgag

SEQ ID NO: 31880 - RNA, 45 nt, synthetic construct
  misc_feature 1..45: note = Vesicle-associated membrane protein 3 (33-47)
  source 1..45: mol_type = other RNA
gtggacaaggtcctggagcgcgaccagaagctcagcgagctggac

SEQ ID NO: 31881 - RNA, 48 nt, synthetic construct
  misc_feature 1..48: note = Vesicle-associated membrane protein 3 (33-48)
  source 1..48: mol_type = other RNA
gtggacaaggtcctggagcgcgaccagaagctcagcgagctggacgac

SEQ ID NO: 31882 - RNA, 51 nt, synthetic construct
  misc_feature 1..51: note = Vesicle-associated membrane protein 1 (52-68)
  source 1..51: mol_type = other RNA
gtggacaaggtcctggagcgcgaccagaagctcagcgagctggacgaccgg

SEQ ID NO: 31883 - RNA, 45 nt, synthetic construct
  misc_feature 1..45: note = T-complex protein 1 subunit beta (408-422)
  source 1..45: mol_type = other RNA
gtggacaacatcatcaaggccgccccccgcaagcgggtcccggac

SEQ ID NO: 31884 - RNA, 36 nt, synthetic construct
  misc_feature 1..36: note = 15 kDa selenoprotein (151-162)
  source 1..36: mol_type = other RNA
gtggaggagttcctgagcgagaagctcgagcgcatc

SEQ ID NO: 31885 - RNA, 45 nt, synthetic construct
  misc_feature 1..45: note = Glycosyltransferase 8 domain-containing protein 1 (270-284)
  source 1..45: mol_type = other RNA
gtggaggagggcctgtacagccgcaccctcgccgggtccatcacc

SEQ ID NO: 31886 - RNA, 30 nt, synthetic construct
  misc_feature 1..30: note = B-lymphocyte antigen CD19 (115-124)
  source 1..30: mol_type = other RNA
gtggagggcagcggggagctgttccgctgg

SEQ ID NO: 31887 - RNA, 27 nt, synthetic construct
  misc_feature 1..27: note = Interferon regulatory factor 9 (320-328)
  source 1..27: mol_type = other RNA
gtggagctgttccgcaccgcctacttc

SEQ ID NO: 31888 - RNA, 39 nt, synthetic construct
  misc_feature 1..39: note = Transferrin receptor protein 1 (681-693)
  source 1..39: mol_type = other RNA
gtggagtaccacttcctgagcccctacgtctccccgaag

SEQ ID NO: 31889 - RNA, 42 nt, synthetic construct
  misc_feature 1..42: note = Transferrin receptor protein 1 (681-694)
  source 1..42: mol_type = other RNA
gtggagtaccacttcctgagcccctacgtctccccgaaggag

SEQ ID NO: 31890 - RNA, 45 nt, synthetic construct
  misc_feature 1..45: note = Phosphoinositide-3-kinase-interacting protein 1 (130-144)
  source 1..45: mol_type = other RNA
gtgttcgcccccgccaacgcgctgccggcccgcagcgaggccgcc

SEQ ID NO: 31891 - RNA, 27 nt, synthetic construct
  misc_feature 1..27: note = HLA class II histocompatibility antigen, DM alpha chain (12-20)
  source 1..27: mol_type = other RNA
gtgttcaccctgaagcccctcgagttc

SEQ ID NO: 31892 - RNA, 39 nt, synthetic construct
  misc_feature 1..39: note = Cystatin-C (57-69)
  source 1..39: mol_type = other RNA
gtgggcgagtacaacaaggccagcaacgacatgtaccac

SEQ ID NO: 31893 - RNA, 45 nt, synthetic construct
  misc_feature 1..45: note = Phosphate-regulating neutral endopeptidase (131-145)
  source 1..45: mol_type = other RNA
gtgggcaagatgttcgtcgacgtgtacttccaggaggacaagaag

SEQ ID NO: 31894 - RNA, 48 nt, synthetic construct
  misc_feature 1..48: note = Phosphate-regulating neutral endopeptidase (131-146)
  source 1..48: mol_type = other RNA
gtgggcaagatgttcgtcgacgtgtacttccaggaggacaagaaggag

SEQ ID NO: 31895 - RNA, 42 nt, synthetic construct
  misc_feature 1..42: note = HLA class II histocompatibility antigen, DO beta chain (70-83)
  source 1..42: mol_type = other RNA
gtgggcatgttcgtcgccctgaccaagctcgggcagcccgac

SEQ ID NO: 31896 - RNA, 51 nt, synthetic construct
  misc_feature 1..51: note = Perilipin-3 (406-422)
  source 1..51: mol_type = other RNA
gtgggccccttcgccccggggatcaccgagaaggcccccgaggagaagaag

SEQ ID NO: 31897 - RNA, 42 nt, synthetic construct
  misc_feature 1..42: note = Cullin-associated NEDD8-dissociated protein 1 (747-760)
  source 1..42: mol_type = other RNA
gtgggccagttcatccaggacgtcaagaacagccgctccacc

SEQ ID NO: 31898 - RNA, 45 nt, synthetic construct
  misc_feature 1..45: note = Cullin-associated NEDD8-dissociated protein 1 (747-761)
  source 1..45: mol_type = other RNA
gtgggccagttcatccaggacgtcaagaacagccgctccaccgac

SEQ ID NO: 31899 - RNA, 36 nt, synthetic construct
  misc_feature 1..36: note = Ceruloplasmin (107-118)
  source 1..36: mol_type = other RNA
gtgcacctgaagaacctcgccagccgcccctacacc

SEQ ID NO: 31900 - RNA, 45 nt, synthetic construct
  misc_feature 1..45: note = Polypeptide N-acetylgalactosaminyltransferase 1 (76-90)
  source 1..45: mol_type = other RNA
gtgcacagcgtcatcaaccgctccccccggcacatgatcgaggag

SEQ ID NO: 31901 - RNA, 39 nt, synthetic construct
  misc_feature 1..39: note = Interleukin-4 receptor subunit alpha (189-201)
  source 1..39: mol_type = other RNA
gtgatcgccggcaaccccgcctaccgcagcttctccaac

SEQ ID NO: 31902 - RNA, 30 nt, synthetic construct
  misc_feature 1..30: note = Methyltransferase-like protein 7A (45-54)
  source 1..30: mol_type = other RNA
gtgatctacaacgagcagatggccagcaag

SEQ ID NO: 31903 - RNA, 39 nt, synthetic construct
  misc_feature 1..39: note = Plasma membrane calcium-transporting ATPase 1 (111-123)
  source 1..39: mol_type = other RNA
gtgaagaagatgatgaaggacaacaacctggtccgccac

SEQ ID NO: 31904 - RNA, 42 nt, synthetic construct
  misc_feature 1..42: note = Vesicle-associated membrane protein 1 (55-68)
  source 1..42: mol_type = other RNA
gtgctggagcgcgaccagaagctcagcgagctggacgaccgg

SEQ ID NO: 31905 - RNA, 24 nt, synthetic construct
  misc_feature 1..24: note = ATP-binding cassette sub-family A member 6 (320-327)
  source 1..24: mol_type = other RNA
gtgctgctcaagaaggccgtcctg

SEQ ID NO: 31906 - RNA, 27 nt, synthetic construct
  misc_feature 1..27: note = Methyltransferase-like protein 7A (163-171)
  source 1..27: mol_type = other RNA
gtgctgcgccccggcggggccttctac

SEQ ID NO: 31907 - RNA, 36 nt, synthetic construct
  misc_feature 1..36: note = Serine incorporator 3 (91-102)
  source 1..36: mol_type = other RNA
gtgctggtcggctacaaggccgtgtaccgcatcagc

SEQ ID NO: 31908 - RNA, 27 nt, synthetic construct
  misc_feature 1..27: note = Ras GTPase-activating protein nGAP (848-856)
  source 1..27: mol_type = other RNA
gtgatgctggacgtccccatccgcctc

SEQ ID NO: 31909 - RNA, 30 nt, synthetic construct
  misc_feature 1..30: note = B-cell linker protein (9-18)
  source 1..30: mol_type = other RNA
gtgcccgccagccagaagctgcgccagctc

SEQ ID NO: 31910 - RNA, 27 nt, synthetic construct
  misc_feature 1..27: note = Endoplasmic reticulum resident protein 44 (242-250)
  source 1..27: mol_type = other RNA
gtgcccctggtccgcgagatcaccttc

SEQ ID NO: 31911 - RNA, 27 nt, synthetic construct
  misc_feature 1..27: note = BRCA2 and CDKN1A-interacting protein (285-293)
  source 1..27: mol_type = other RNA
gtgcccatgaccccgctgcgcaccgtc

SEQ ID NO: 31912 - RNA, 57 nt, synthetic construct
  misc_feature 1..57: note = Interleukin-4 receptor subunit alpha (241-259)
  source 1..57: mol_type = other RNA
gtgccccagccggagcccgagacctgggagcagatcctgcgccggaacgtcctccag

SEQ ID NO: 31913 - RNA, 48 nt, synthetic construct
  misc_feature 1..48: note = Cation-independent mannose-6-phosphate receptor (1001-1016)
  source 1..48: mol_type = other RNA
gtgcccagcccggtcgactgccaggtgaccgacctggccggcaacgag

SEQ ID NO: 31914 - RNA, 42 nt, synthetic construct
  misc_feature 1..42: note = Fibromodulin (103-116)
  source 1..42: mol_type = other RNA
gtgcccagccgcatgaagtacgtctacttccagaacaaccag

SEQ ID NO: 31915 - RNA, 48 nt, synthetic construct
  misc_feature 1..48: note = Fibromodulin (103-118)
  source 1..48: mol_type = other RNA
gtgcccagccgcatgaagtacgtctacttccagaacaaccagatcacc

SEQ ID NO: 31916 - RNA, 51 nt, synthetic construct
  misc_feature 1..51: note = Fibromodulin (103-119)
  source 1..51: mol_type = other RNA
gtgcccagccgcatgaagtacgtctacttccagaacaaccagatcacctcc

SEQ ID NO: 31917 - RNA, 39 nt, synthetic construct
  misc_feature 1..39: note = Ragulator complex protein LAMTOR3 (30-42)
  source 1..39: mol_type = other RNA
gtgcccgtcatcaaggtggccaacgacaacgccccggag

SEQ ID NO: 31918 - RNA, 27 nt, synthetic construct
  misc_feature 1..27: note = Beta-1,4-galactosyltransferase 1 (117-125)
  source 1..27: mol_type = other RNA
gtgcccgtcccgcacaccaccgccctg

SEQ ID NO: 31919 - RNA, 27 nt, synthetic construct
  misc_feature 1..27: note = Plateletoprotein 4 (96-104)
  source 1..27: mol_type = other RNA
gtgccctacccggtcaccaccacggtg

SEQ ID NO: 31920 - RNA, 42 nt, synthetic construct
  misc_feature 1..42: note = Protocadherin-9 (176-189)
  source 1..42: mol_type = other RNA
gtgcagcactacgagctgctcaacggccagagcgtcttcggg

SEQ ID NO: 31921 - RNA, 45 nt, synthetic construct
  misc_feature 1..45: note = Phosphoinositide-3-kinase-interacting protein 1 (128-142)
  source 1..45: mol_type = other RNA
gtgcaggtcttcgcccccgccaacgcgctgccggcccgcagcgag

SEQ ID NO: 31922 - RNA, 39 nt, synthetic construct
  misc_feature 1..39: note = Cystatin-C (76-88)
  source 1..39: mol_type = other RNA
gtgcgcgcccggaagcagatcgtcgccggcgtgaactac

SEQ ID NO: 31923 - RNA, 27 nt, synthetic construct
  misc_feature 1..27: note = Perilipin-2 (218-226)
  source 1..27: mol_type = other RNA
gtgcgcctgggcagcctctccaccaag

SEQ ID NO: 31924 - RNA, 54 nt, synthetic construct
  misc_feature 1..54: note = Cystatin-C (49-66)
  source 1..54: mol_type = other RNA
gtgcgccgggccctggacttcgccgtcggcgagtacaacaaggcgagcaacgac

SEQ ID NO: 31925 - RNA, 36 nt, synthetic construct
  misc_feature 1..36: note = SLAM family member 6 (51-62)
  source 1..36: mol_type = other RNA
gtgagcttccgctgggaggccctgggcaacaccctc

SEQ ID NO: 31926 - RNA, 42 nt, synthetic construct
  misc_feature 1..42: note = Rab GTPase-activating protein 1 (17-30)
  source 1..42: mol_type = other RNA
gtgagcaccctgaactccgaggacttcgtcctcgtgagccgc

SEQ ID NO: 31927 - RNA, 45 nt, synthetic construct
  misc_feature 1..45: note = Rab GTPase-activating protein 1 (17-31)
  source 1..45: mol_type = other RNA
gtgagcaccctgaactccgaggacttcgtcctcgtgagccgccag

SEQ ID NO: 31928 - RNA, 48 nt, synthetic construct
  misc_feature 1..48: note = Rab GTPase-activating protein 1 (17-32)
  source 1..48: mol_type = other RNA
gtgagcaccctgaactccgaggacttcgtcctcgtgagccgccagggc

SEQ ID NO: 31929 - RNA, 39 nt, synthetic construct
  misc_feature 1..39: note = HLA class II histocompatibility antigen, DM alpha chain (200-212)
  source 1..39: mol_type = other RNA
gtgacccacgagatcgaccgctacaccgccatcgcctac

SEQ ID NO: 31930 - RNA, 51 nt, synthetic construct
  misc_feature 1..51: note = Fas apoptotic inhibitory molecule 3 (118-134)
  source 1..51: mol_type = other RNA
gtgaccctgaacgtccacagcgagtacgagccctcctgggaggagcagccg

SEQ ID NO: 31931 - RNA, 27 nt, synthetic construct
  misc_feature 1..27: note = Zinc finger protein 296 (209-217)
  source 1..27: mol_type = other RNA
gtggtcggccccgccgccgaggcgaag

SEQ ID NO: 31932 - RNA, 42 nt, synthetic construct
  misc_feature 1..42: note = Cullin-associated NEDD8-dissociated protein 1 (746-759)
  source 1..42: mol_type = other RNA
gtggtcggccagttcatccaggacgtgaagaacagccgctcc

SEQ ID NO: 31933 - RNA, 45 nt, synthetic construct
  misc_feature 1..45: note = Cullin-associated NEDD8-dissociated protein 1 (746-760)
  source 1..45: mol_type = other RNA
gtggtcggccagttcatccaggacgtgaagaacagccgctccacc

SEQ ID NO: 31934 - RNA, 48 nt, synthetic construct
  misc_feature 1..48: note = Cullin-associated NEDD8-dissociated protein 1 (746-761)
  source 1..48: mol_type = other RNA
gtggtcggccagttcatccaggacgtgaagaacagccgctccaccgac

SEQ ID NO: 31935 - RNA, 51 nt, synthetic construct
  misc_feature 1..51: note = Cullin-associated NEDD8-dissociated protein 1 (746-762)
  source 1..51: mol_type = other RNA
gtggtcggccagttcatccaggacgtgaagaacagccgctccaccgacagc

SEQ ID NO: 31936 - RNA, 39 nt, synthetic construct
  misc_feature 1..39: note = Cystatin-C (75-87)
  source 1..39: mol_type = other RNA
gtggtccgcgcccggaagcagatcgtggccggcgtgaac

SEQ ID NO: 31937 - RNA, 42 nt, synthetic construct
  misc_feature 1..42: note = Cystatin-C (75-88)
  source 1..42: mol_type = other RNA
gtggtccgcgcccggaagcagatcgtggccggcgtgaactac

SEQ ID NO: 31938 - RNA, 30 nt, synthetic construct
  misc_feature 1..30: note = Negative elongation factor E (371-380)
  source 1..30: mol_type = other RNA
gtgtacaaggagaacctggtcgacggcttc

SEQ ID NO: 31939 - RNA, 30 nt, synthetic construct
  misc_feature 1..30: note = Lysine-specific demethylase 2B (316-325)
  source 1..30: mol_type = other RNA
gtgtacacccccgtcgacagcctggtgttc

SEQ ID NO: 31940 - RNA, 39 nt, synthetic construct
  misc_feature 1..39: note = Ceruloplasmin (105-117)
  source 1..39: mol_type = other RNA
gtgtacgtccacctgaagaacctcgccagccgcccctac

SEQ ID NO: 31941 - RNA, 42 nt, synthetic construct
  misc_feature 1..42: note = Ceruloplasmin (105-118)
  source 1..42: mol_type = other RNA
gtgtacgtccacctgaagaacctcgccagccgcccctacacc

SEQ ID NO: 31942 - RNA, 48 nt, synthetic construct
  misc_feature 1..48: note = Ceruloplasmin (105-120)
  source 1..48: mol_type = other RNA
gtgtacgtccacctgaagaacctcgccagccgcccctacaccttccac

SEQ ID NO: 31943 - RNA, 42 nt, synthetic construct
  misc_feature 1..42: note = Glycosyltransferase 8 domain-containing protein 1 (346-359)
  source 1..42: mol_type = other RNA
tgggagaagtggtacatccccgacccgaccggcaagttcaac

SEQ ID NO: 31944 - RNA, 36 nt, synthetic construct
  misc_feature 1..36: note = Fibromodulin (133-144)
  source 1..36: mol_type = other RNA
tggatcgccctgcacggcaaccagatcaccagcgac

SEQ ID NO: 31945 - RNA, 39 nt, synthetic construct
  misc_feature 1..39: note = Fibromodulin (133-145)
  source 1..39: mol_type = other RNA
tggatcgccctgcacggcaaccagatcaccagcgacaag

SEQ ID NO: 31946 - RNA, 36 nt, synthetic construct
  misc_feature 1..36: note = Glutathione peroxidase 1 (104-115)
  source 1..36: mol_type = other RNA
tggaacttcgagaagttcctggtgggccccgacggg

SEQ ID NO: 31947 - RNA, 42 nt, synthetic construct
  misc_feature 1..42: note = Platelet endothelial cell adhesion molecule (415-428)
  source 1..42: mol_type = other RNA
tacgacgcccagttcgaggtgatcaagggccagaccatcgag

SEQ ID NO: 31948 - RNA, 36 nt, synthetic construct
  misc_feature 1..36: note = Vitamin D-binding protein (84-95)
  source 1..36: mol_type = other RNA
tacgacacccgcaccagcgccctgtccgccaagagc

SEQ ID NO: 31949 - RNA, 57 nt, synthetic construct
  misc_feature 1..57: note = Heterogeneous nuclear ribonucleoprotein A3 (171-189)
  source 1..57: mol_type = other RNA
tacggcgggggctacgggagcggcgggggctccggcgggtacggcagccgccggttc

SEQ ID NO: 31950 - RNA, 42 nt, synthetic construct
  misc_feature 1..42: note = Interleukin-4 receptor subunit alpha (302-315)
  source 1..42: mol_type = other RNA
tacaaggccttcagctccctgctcgccagctccgcggtgagc

SEQ ID NO: 31951 - RNA, 45 nt, synthetic construct
  misc_feature 1..45: note = Interleukin-4 receptor subunit alpha (302-316)
  source 1..45: mol_type = other RNA
tacaaggccttcagctccctgctcgccagctccgcggtgagcccc

SEQ ID NO: 31952 - RNA, 48 nt, synthetic construct
  misc_feature 1..48: note = Interleukin-4 receptor subunit alpha (302-317)
  source 1..48: mol_type = other RNA
tacaaggccttcagctccctgctcgccagctccgcggtgagccccgag

SEQ ID NO: 31953 - RNA, 36 nt, synthetic construct
  misc_feature 1..36: note = Glycosyltransferase 8 domain-containing protein 1 (123-134)
  source 1..36: mol_type = other RNA
tacaagatcgtgaacttcgaccccaagctgctcgag

SEQ ID NO: 31954 - RNA, 39 nt, synthetic construct
  misc_feature 1..39: note = Glycosyltransferase 8 domain-containing protein 1 (123-135)
  source 1..39: mol_type = other RNA
tacaagatcgtgaacttcgaccccaagctgctcgagggc

SEQ ID NO: 31955 - RNA, 45 nt, synthetic construct
  misc_feature 1..45: note = Glycosyltransferase 8 domain-containing protein 1 (123-137)
  source 1..45: mol_type = other RNA
tacaagatcgtgaacttcgaccccaagctgctcgagggcaaggtc

SEQ ID NO: 31956 - RNA, 39 nt, synthetic construct
  misc_feature 1..39: note = Ragulator complex protein LAMTOR3 (68-80)
  source 1..39: mol_type = other RNA
tacaacacctaccaggtggtccagttcaaccgcctgccc

SEQ ID NO: 31957 - RNA, 42 nt, synthetic construct
  misc_feature 1..42: note = Ragulator complex protein LAMTOR3 (68-81)
  source 1..42: mol_type = other RNA
tacaacacctaccaggtggtccagttcaaccgcctgcccctc

SEQ ID NO: 31958 - RNA, 45 nt, synthetic construct
  misc_feature 1..45: note = Ragulator complex protein LAMTOR3 (68-82)
  source 1..45: mol_type = other RNA
tacaacacctaccaggtggtccagttcaaccgcctgcccctcgtg

SEQ ID NO: 31959 - RNA, 48 nt, synthetic construct
  misc_feature 1..48: note = Ragulator complex protein LAMTOR3 (68-83)
  source 1..48: mol_type = other RNA
tacaacacctaccaggtggtccagttcaaccgcctgcccctcgtggtg

SEQ ID NO: 31960 - RNA, 27 nt, synthetic construct
  misc_feature 1..27: note = Zinc finger protein 638 (459-467)
  source 1..27: mol_type = other RNA
taccccaacaagggcgtggggcaggcc

SEQ ID NO: 31961 - RNA, 57 nt, synthetic construct
  misc_feature 1..57: note = Fas apoptotic inhibitory molecule 3 (81-99)
  source 1..57: mol_type = other RNA
tacccccgcaagaacctgttcctcgtggaggtcacccagctgaccgagagcgactcc

SEQ ID NO: 31962 - RNA, 60 nt, synthetic construct
  misc_feature 1..60: note = Fas apoptotic inhibitory molecule 3 (81-100)
  source 1..60: mol_type = other RNA
tacccccgcaagaacctgttcctcgtggaggtcacccagctgaccgagagcgactccggc

SEQ ID NO: 31963 - RNA, 27 nt, synthetic construct
  misc_feature 1..27: note = Beta-1,4-galactosyltransferase 1 (117-125)
  source 1..27: mol_type = other RNA
taccaggtgctggacgtccagcgctac

SEQ ID NO: 31964 - RNA, 42 nt, synthetic construct
  misc_feature 1..42: note = Serine incorporator 3 (350-363)
  source 1..42: mol_type = other RNA
tacagctccatccgcaccagcaccaactcccaggtggacaag

SEQ ID NO: 31965 - RNA, 27 nt, synthetic construct
  misc_feature 1..27: note = E3 ubiquitin-protein ligase Mdm2 (48-56)
  source 1..27: mol_type = other RNA
tacaccatgaaggaggtgctgttctac

SEQ ID NO: 31966 - RNA, 36 nt, synthetic construct
  misc_feature 1..36: note = Ceruloplasmin (106-117)
  source 1..36: mol_type = other RNA
tacgtgcacctgaagaacctcgccagccgcccctac

SEQ ID NO: 31967 - RNA, 39 nt, synthetic construct
  misc_feature 1..39: note = Ceruloplasmin (106-118)
  source 1..39: mol_type = other RNA
tacgtgcacctgaagaacctcgccagccgcccctacacc

SEQ ID NO: 31968 - RNA, 45 nt, synthetic construct
  misc_feature 1..45: note = Ceruloplasmin (106-120)
  source 1..45: mol_type = other RNA
tacgtgcacctgaagaacctcgccagccgcccctacaccttccac

SEQ ID NO: 31969 - RNA, 24 nt, synthetic construct
  misc_feature 1..24: note = HLA class II histocompatibility antigen, DM alpha chain (116-123)
  source 1..24: mol_type = other RNA
tactgggtgccccgcaacgccctg

SEQ ID NO: 31970 - RNA, 42 nt, synthetic construct
  misc_feature 1..42: note = Ragulator complex protein LAMTOR3 (67-80)
  source 1..42: mol_type = other RNA
tactacaacacctaccaggtggtccagttcaaccgcctgccc

SEQ ID NO: 31971 - RNA, 45 nt, synthetic construct
  misc_feature 1..45: note = Ragulator complex protein LAMTOR3 (67-81)
  source 1..45: mol_type = other RNA
tactacaacacctaccaggtggtccagttcaaccgcctgcccctc

SEQ ID NO: 31972 - RNA, 48 nt, synthetic construct
  misc_feature 1..48: note = Ragulator complex protein LAMTOR3 (67-82)
  source 1..48: mol_type = other RNA
tactacaacacctaccaggtggtccagttcaaccgcctgcccctcgtg

SEQ ID NO: 31973 - RNA, 30 nt, synthetic construct
  misc_feature 1..30: note = Melanoma-associated antigen C2 (191-200)
  source 1..30: mol_type = other RNA
ctgctcttcggcctggccctgatcgaggtg

SEQ ID NO: 31974 - RNA, 42 nt, synthetic construct
  misc_feature 1..42: note = C-C motif chemokine 3 (59-72)
  source 1..42: mol_type = other RNA
aagcccggcgtgatcttcctgaccaagcgcagccggcaggtc

SEQ ID NO: 31975 - RNA, 15 nt, synthetic construct
  misc_feature 1..15: note = Ig gamma-1 chain C region (91-95)
  source 1..15: mol_type = other RNA
agcgccgtgtactac

SEQ ID NO: 31976 - RNA, 27 nt, synthetic construct
  misc_feature 1..27: note = Serum albumin (444-452)
  source 1..27: mol_type = other RNA
acccccaccctggtggaggtcagccgc

SEQ ID NO: 31977 - RNA, 36 nt, synthetic construct
  misc_feature 1..36: note = DNA topoisomerase 2-alpha (978-989)
  source 1..36: mol_type = other RNA
gccgaggccgagcgcgtgggcctgcacaaggtcttc

SEQ ID NO: 31978 - RNA, 36 nt, synthetic construct
  misc_feature 1..36: note = Basement membrane-specific heparan sulfate proteoglycan core protein (1484-1495)
  source 1..36: mol_type = other RNA
gccctggccgacctcgacgagctgctgatccgcgcg

SEQ ID NO: 31979 - RNA, 36 nt, synthetic construct
  misc_feature 1..36: note = Protein phosphatase 1M (122-133)
  source 1..36: mol_type = other RNA
gccctgttcgacggccacgggggccccgccgcggcc

SEQ ID NO: 31980 - RNA, 39 nt, synthetic construct
  misc_feature 1..39: note = Sequestosome-1 (53-65)
  source 1..39: mol_type = other RNA
gccctgttccccgccctccgcccgggcgggttccaggcg

SEQ ID NO: 31981 - RNA, 36 nt, synthetic construct
  misc_feature 1..36: note = UPF0585 protein C16orf13 (153-164)
  source 1..36: mol_type = other RNA
gccctgctcgaggacctgggcaaggccagcgggctg

SEQ ID NO: 31982 - RNA, 39 nt, synthetic construct
  misc_feature 1..39: note = Signal transducer and activator of transcription 1-alpha/beta (589-601)
  source 1..39: mol_type = other RNA
gccctgctcaaggaccagcagcccggcaccttcctgctg

SEQ ID NO: 31983 - RNA, 51 nt, synthetic construct
  misc_feature 1..51: note = Glyceraldehyde-3-phosphate dehydrogenase (202-218)
  source 1..51: mol_type = other RNA
gccctgcagaacatcatccccgccagcaccggcgcggccaaggccgtgggg

SEQ ID NO: 31984 - RNA, 36 nt, synthetic construct
  misc_feature 1..36: note = Guanine nucleotide-binding protein G(I)/G(S)/G(T) subunit beta-1 (74-85)
  source 1..36: mol_type = other RNA
gccctgtgggacatcgagaccggccagcagaccacg

SEQ ID NO: 31985 - RNA, 36 nt, synthetic construct
  misc_feature 1..36: note = 26S protease regulatory subunit 7 (76-87)
  source 1..36: mol_type = other RNA
gccctgtgggacctcgccgcggacaagcagaccctg

SEQ ID NO: 31986 - RNA, 36 nt, synthetic construct
  misc_feature 1..36: note = Peroxisomal multifunctional enzyme type 2 (193-204)
  source 1..36: mol_type = other RNA
gcccccaacgccggcagccgcatgacccagaccgtg

SEQ ID NO: 31987 - RNA, 39 nt, synthetic construct
  misc_feature 1..39: note = 60S ribosomal protein L13 (47-59)
  source 1..39: mol_type = other RNA
gccccccgcccggccagcggccccatccggcccatcgtg

SEQ ID NO: 31988 - RNA, 39 nt, synthetic construct
  misc_feature 1..39: note = HLA class I histocompatibility antigen, A-23 alpha chain (5-17)
  source 1..39: mol_type = other RNA
gccccccgcaccctggtgctcctgctgagcggcgccctc

SEQ ID NO: 31989 - RNA, 48 nt, synthetic construct
  misc_feature 1..48: note = HLA class II histocompatibility antigen, DR alpha chain (51-66)
  source 1..48: mol_type = other RNA
gcccagggcgccctggcgaacatcgccgtggacaaggccaacctcgag

SEQ ID NO: 31990 - RNA, 36 nt, synthetic construct
  misc_feature 1..36: note = Actin, cytoplasmic 2 (19-30)
  source 1..36: mol_type = other RNA
gccaccgccgcgagctccagctccctggagaagagc

SEQ ID NO: 31991 - RNA, 48 nt, synthetic construct
  misc_feature 1..48: note = Annexin A2 (52-67)
  source 1..48: mol_type = other RNA
gacgaggtgaccatcgtcaacatcctgaccaaccgcagcaacgcccag

SEQ ID NO: 31992 - RNA, 39 nt, synthetic construct
  misc_feature 1..39: note = Interferon-induced transmembrane protein 1 (71-83)
  source 1..39: mol_type = other RNA
gacgtgaccggcgcccaggcctacgcgagcaccgccaag

SEQ ID NO: 31993 - RNA, 39 nt, synthetic construct
  misc_feature 1..39: note = HLA class II histocompatibility antigen, DR alpha chain (50-62)
  source 1..39: mol_type = other RNA
gaggcccagggcgccctggcgaacatcgccgtggacaag

SEQ ID NO: 31994 - RNA, 51 nt, synthetic construct
  misc_feature 1..51: note = HLA class I histocompatibility antigen, Cw-7 alpha chain (152-168)
  source 1..51: mol_type = other RNA
gaggacctgcgcagctggaccgccgccgacaccgcggcccagatcacgcag

SEQ ID NO: 31995 - RNA, 48 nt, synthetic construct
  misc_feature 1..48: note = Myosin-9 (1232-1247)
  source 1..48: mol_type = other RNA
gaggaggtggacggcaaggccgacggggccgaggcgaagcccgccgag

SEQ ID NO: 31996 - RNA, 51 nt, synthetic construct
  misc_feature 1..51: note = Heat shock cognate 71 kDa protein (444-460)
  source 1..51: mol_type = other RNA
gagggcgagcgcgccatgaccaaggacaacaacctgctcgggaagttcgag

SEQ ID NO: 31997 - RNA, 48 nt, synthetic construct
  misc_feature 1..48: note = Actin, cytoplasmic 2 (15-30)
  source 1..48: mol_type = other RNA
gagcaggagatggccaccgccgcgagctccagctccctggagaagagc

SEQ ID NO: 31998 - RNA, 36 nt, synthetic construct
  misc_feature 1..36: note = Zinc finger protein ZPR1 (349-360)
  source 1..36: mol_type = other RNA
ttcatcatggacgaccccgccggcaacagctacctg

SEQ ID NO: 31999 - RNA, 36 nt, synthetic construct
  misc_feature 1..36: note = Sorting nexin-14 (234-245)
  source 1..36: mol_type = other RNA
ttcctggccgaccccgacaccgtgaaccacctcctg

SEQ ID NO: 32000 - RNA, 36 nt, synthetic construct
  misc_feature 1..36: note = Cytochrome c oxidase assembly factor 3 homolog, mitochondrial (84-95)
  source 1..36: mol_type = other RNA
ttcctggacgagctcgaggacgaggccaaggccgcg

SEQ ID NO: 32001 - RNA, 36 nt, synthetic construct
  misc_feature 1..36: note = Heterogeneous nuclear ribonucleoprotein U (198-209)
  source 1..36: mol_type = other RNA
ttcctgtgggccggcgggcgcgccagctacggcgtg

SEQ ID NO: 32002 - RNA, 36 nt, synthetic construct
  misc_feature 1..36: note = Arf-GAP with Rho-GAP domain, ANK repeat and PH domain-containing protein 1 (1183-1194)
  source 1..36: mol_type = other RNA
ttcaccgccgaccccctgagcctcctgcgcaacgtg

SEQ ID NO: 32003 - RNA, 36 nt, synthetic construct
  misc_feature 1..36: note = Nucleolin (630-641)
  source 1..36: mol_type = other RNA
ggcgagatcgacgggaacaaggtgaccctggactgg

SEQ ID NO: 32004 - RNA, 48 nt, synthetic construct
  misc_feature 1..48: note = Heat shock cognate 71 kDa protein (445-460)
  source 1..48: mol_type = other RNA
ggcgagcgcgccatgaccaaggacaacaacctgctcgggaagttcgag

SEQ ID NO: 32005 - RNA, 51 nt, synthetic construct
  misc_feature 1..51: note = Keratin, type I cytoskeletal 9 (15-31)
  source 1..51: mol_type = other RNA
ggcgggggcgggggcgggggcctgggcagcgggggctccatccgcagctcc

SEQ ID NO: 32006 - RNA, 36 nt, synthetic construct
  misc_feature 1..36: note = Putative RNA-binding protein 15 (1399-1410)
  source 1..36: mol_type = other RNA
ggcctggcccccgccgaggtggtcgtggcgaccgtg

SEQ ID NO: 32007 - RNA, 36 nt, synthetic construct
  misc_feature 1..36: note = ERI1 exoribonuclease 3 (154-165)
  source 1..36: mol_type = other RNA
ggcctgctcgaccccaacgtgaagagcatcttcgtc

SEQ ID NO: 32008 - RNA, 39 nt, synthetic construct
  misc_feature 1..39: note = Anion exchange protein 2 (714-726)
  source 1..39: mol_type = other RNA
ggcctgctcggggagaagacccaggacctgatcggcgtg

SEQ ID NO: 32009 - RNA, 48 nt, synthetic construct
  misc_feature 1..48: note = Phosphoglycerate kinase 1 (338-353)
  source 1..48: mol_type = other RNA
ggccccgtgggggtcttcgagtgggaggccttcgcccgcggcaccaag

SEQ ID NO: 32010 - RNA, 51 nt, synthetic construct
  misc_feature 1..51: note = Phosphoglycerate kinase 1 (338-354)
  source 1..51: mol_type = other RNA
ggccccgtgggggtcttcgagtgggaggccttcgcccgcggcaccaaggcg

SEQ ID NO: 32011 - RNA, 45 nt, synthetic construct
  misc_feature 1..45: note = Calmodulin (135-149)
  source 1..45: mol_type = other RNA
ggccaggtgaactacgaggagttcgtccagatgatgaccgccaag

SEQ ID NO: 32012 - RNA, 57 nt, synthetic construct
  misc_feature 1..57: note = Keratin, type II cytoskeletal 1 (560-578)
  source 1..57: mol_type = other RNA
ggcagcgggggcgggtcctacggcagcgggggcggcgggggcgggcacggctcctac

SEQ ID NO: 32013 - RNA, 48 nt, synthetic construct
  misc_feature 1..48: note = HLA class I histocompatibility antigen, B-39 alpha chain (25-40)
  source 1..48: mol_type = other RNA
ggcagccactccatgcgctacttctacaccagcgtgtcccggcccggg

SEQ ID NO: 32014 - RNA, 39 nt, synthetic construct
  misc_feature 1..39: note = Tumor susceptibility gene 101 protein (219-231)
  source 1..39: mol_type = other RNA
ggcaccatcagcgaggacaccatccgcgcctccctgatc

SEQ ID NO: 32015 - RNA, 36 nt, synthetic construct
  misc_feature 1..36: note = A-kinase anchor protein 1, mitochondrial (608-619)
  source 1..36: mol_type = other RNA
atcatctgggagatcgaggtgcccaagcacctggtc

SEQ ID NO: 32016 - RNA, 36 nt, synthetic construct
  misc_feature 1..36: note = Cirhin (454-465)
  source 1..36: mol_type = other RNA
atcctgttcagcgaggactccaccaagctcttcgtg

SEQ ID NO: 32017 - RNA, 36 nt, synthetic construct
  misc_feature 1..36: note = 4-hydroxyphenylpyruvate dioxygenase-like protein (312-323)
  source 1..36: mol_type = other RNA
atcctgctcgacggcgacaaggggaagttcctgctg

SEQ ID NO: 32018 - RNA, 39 nt, synthetic construct
  misc_feature 1..39: note = Nucleosome-remodeling factor subunit BPTF (1571-1583)
  source 1..39: mol_type = other RNA
aagatcatccccgagaacgacatcaagagcctgaccgtg

SEQ ID NO: 32019 - RNA, 39 nt, synthetic construct
  misc_feature 1..39: note = Centrin-3 (108-120)
  source 1..39: mol_type = other RNA
aagctgttcgacgacgacgacagcggcaagatctccctc

SEQ ID NO: 32020 - RNA, 36 nt, synthetic construct
  misc_feature 1..36: note = Uridine-cytidine kinase 2 (2-13)
  source 1..36: mol_type = other RNA
aagctgttcgtggacaccgacgccgacacccgcctc

SEQ ID NO: 32021 - RNA, 36 nt, synthetic construct
  misc_feature 1..36: note = Retinoic acid receptor RXR-gamma (441-452)
  source 1..36: mol_type = other RNA
aagctgatcggcgacacccccatcgacaccttcctc

SEQ ID NO: 32022 - RNA, 39 nt, synthetic construct
  misc_feature 1..39: note = 40S ribosomal protein S17 (107-119)
  source 1..39: mol_type = other RNA
aagctgctcgacttcggcagcctgtccaacctgcaggtg

SEQ ID NO: 32023 - RNA, 36 nt, synthetic construct
  misc_feature 1..36: note = Golgin subfamily A member 4 (849-860)
  source 1..36: mol_type = other RNA
aagctgctcgacctggagaccgagcgcatcctgctc

SEQ ID NO: 32024 - RNA, 36 nt, synthetic construct
  misc_feature 1..36: note = Utrophin (226-237)
  source 1..36: mol_type = other RNA
aagctgctcgaccccgaggacgtggccgtccagctg

SEQ ID NO: 32025 - RNA, 36 nt, synthetic construct
  misc_feature 1..36: note = Prelamin-A/C (297-308)
  source 1..36: mol_type = other RNA
aagctgctcgagggcgaggaggagcgcctgcggctg

SEQ ID NO: 32026 - RNA, 36 nt, synthetic construct
  misc_feature 1..36: note = Vimentin (236-247)
  source 1..36: mol_type = other RNA
aagctgctcgagggcgaggagagccgcatctccctg

SEQ ID NO: 32027 - RNA, 42 nt, synthetic construct
  misc_feature 1..42: note = V-type proton ATPase subunit H (396-409)
  source 1..42: mol_type = other RNA
aagctgctcgaggtgagcgacgacccccaggtcctggccgtg

SEQ ID NO: 32028 - RNA, 39 nt, synthetic construct
  misc_feature 1..39: note = Methionine aminopeptidase 1 (15-27)
  source 1..39: mol_type = other RNA
aagctgctcagctccgaggacatcgagggcatgcgcctg

SEQ ID NO: 32029 - RNA, 36 nt, synthetic construct
  misc_feature 1..36: note = Isovaleryl-CoA dehydrogenase, mitochondrial (398-409)
  source 1..36: mol_type = other RNA
aagctgtacgagatcggcgccgggaccagcgaggtg

SEQ ID NO: 32030 - RNA, 36 nt, synthetic construct
  misc_feature 1..36: note = Eukaryotic translation initiation factor 3 subunit C-like protein (765-776)
  source 1..36: mol_type = other RNA
aaggtgtgggacctgttccccgaggccgacaaggtc

SEQ ID NO: 32031 - RNA, 45 nt, synthetic construct
  misc_feature 1..45: note = HLA class I histocompatibility antigen, Cw-7 alpha chain (154-168)
  source 1..45: mol_type = other RNA
ctgcgcagctggaccgccgccgacaccgcggcccagatcacgcag

SEQ ID NO: 32032 - RNA, 42 nt, synthetic construct
  misc_feature 1..42: note = Mitochondrial import receptor subunit TOM5 homolog (38-51)
  source 1..42: mol_type = other RNA
ctgcgcgtgacccccttcatcctcaagaagctggacagcatc

SEQ ID NO: 32033 - RNA, 39 nt, synthetic construct
  misc_feature 1..39: note = Beta-2-microglobulin (89-101)
  source 1..39: mol_type = other RNA
ctgagccagcccaagatcgtgaagtgggaccgcgacatg

SEQ ID NO: 32034 - RNA, 39 nt, synthetic construct
  misc_feature 1..39: note = Actin, cytoplasmic 2 (18-30)
  source 1..39: mol_type = other RNA
atggccaccgccgcgagctccagctccctggagaagagc

SEQ ID NO: 32035 - RNA, 57 nt, synthetic construct
  misc_feature 1..57: note = HLA class I histocompatibility antigen, Cw-7 alpha chain (151-169)
  source 1..57: mol_type = other RNA
aacgaggacctgcgcagctggaccgccgccgacaccgcggcccagatcacgcagcgg

SEQ ID NO: 32036 - RNA, 36 nt, synthetic construct
  misc_feature 1..36: note = Alkyldihydroxyacetonephosphate synthase, peroxisomal (324-335)
  source 1..36: mol_type = other RNA
aacatctacggcaacatcgaggacctggtggtccac

SEQ ID NO: 32037 - RNA, 36 nt, synthetic construct
  misc_feature 1..36: note = Poly(U)-binding-splicing factor PUF60 (270-281)
  source 1..36: mol_type = other RNA
aacctgttcgacctcggcgggcagtacctgcgcgtg

SEQ ID NO: 32038 - RNA, 36 nt, synthetic construct
  misc_feature 1..36: note = Inosine-5'-monophosphate dehydrogenase 2 (312-323)
  source 1..36: mol_type = other RNA
aacctgatcgacgccggcgtggacgccctccgcgtc

SEQ ID NO: 32039 - RNA, 36 nt, synthetic construct
  misc_feature 1..36: note = Cyclin-dependent kinase 1 (133-144)
  source 1..36: mol_type = other RNA
aacctgctcatcgacgacaagggcaccatcaagctg

SEQ ID NO: 32040 - RNA, 42 nt, synthetic construct
  misc_feature 1..42: note = Protein ERGIC-53 (162-175)
  source 1..42: mol_type = other RNA
aaccccgccatcgtgatcatcggcaacaacgggcagatccac

SEQ ID NO: 32041 - RNA, 51 nt, synthetic construct
  misc_feature 1..51: note = Heat shock 70 kDa protein 1-like (170-186)
  source 1..51: mol_type = other RNA
aacgtgctgcgcatcatcaacgagcccaccgccgccgcgatcgcctacggc

SEQ ID NO: 32042 - RNA, 51 nt, synthetic construct
  misc_feature 1..51: note = Hsp90 co-chaperone Cdc37 (362-378)
  source 1..51: mol_type = other RNA
cccctgctcgaggccgtgccgaagaccggcgacgagaaggacgtcagcgtg

SEQ ID NO: 32043 - RNA, 36 nt, synthetic construct
  misc_feature 1..36: note = Nucleolar RNA helicase 2 (109-120)
  source 1..36: mol_type = other RNA
caggagatccccgtggagcagaaggagggcgccttc

SEQ ID NO: 32044 - RNA, 36 nt, synthetic construct
  misc_feature 1..36: note = Signal recognition particle 54 kDa protein (385-396)
  source 1..36: mol_type = other RNA
caggagctggacagcaccgacggcgccaaggtgttc

SEQ ID NO: 32045 - RNA, 48 nt, synthetic construct
  misc_feature 1..48: note = Septin-2 (381-396)
  source 1..48: mol_type = other RNA
cagatgcagggcggggacggcgacgggggcgccctggggcaccacgtg

SEQ ID NO: 32046 - RNA, 36 nt, synthetic construct
  misc_feature 1..36: note = Polyadenylate-binding protein 4 (179-190)
  source 1..36: mol_type = other RNA
cgcgaggccgagctgggcgccaaggcgaaggagttc

SEQ ID NO: 32047 - RNA, 36 nt, synthetic construct
  misc_feature 1..36: note = Polyadenylate-binding protein 3 (179-190)
  source 1..36: mol_type = other RNA
cgcgaggccgagctgggcgcccgggcgaaggagttc

SEQ ID NO: 32048 - RNA, 36 nt, synthetic construct
  misc_feature 1..36: note = Bromodomain adjacent to zinc finger domain protein 2B (1684-1695)
  source 1..36: mol_type = other RNA
cgcatcatcgaccccgaggacctgaaggccctcctg

SEQ ID NO: 32049 - RNA, 36 nt, synthetic construct
  misc_feature 1..36: note = Nucleolar complex protein 2 homolog (10-21)
  source 1..36: mol_type = other RNA
cgcctggccgagctcaccgtggacgagttcctggcc

SEQ ID NO: 32050 - RNA, 36 nt, synthetic construct
  misc_feature 1..36: note = Protein unc-45 homolog A (202-213)
  source 1..36: mol_type = other RNA
cgcctgctcgacatgggcgagaccgacctgatgctg

SEQ ID NO: 32051 - RNA, 36 nt, synthetic construct
  misc_feature 1..36: note = Iron-sulfur cluster assembly 2 homolog, mitochondrial (59-70)
  source 1..36: mol_type = other RNA
cgcctgctcgagatcaccgagggcagcgagttcctg

SEQ ID NO: 32052 - RNA, 36 nt, synthetic construct
  misc_feature 1..36: note = Cytoskeleton-associated protein 5 (1718-1729)
  source 1..36: mol_type = other RNA
cgcctgctccccgacaccatcaacagcatcaacctg

SEQ ID NO: 32053 - RNA, 39 nt, synthetic construct
  misc_feature 1..39: note = ATP-dependent RNA helicase DHX36 (643-655)
  source 1..39: mol_type = other RNA
cgcctgatggaccccccgagcaacgaggccgtgctcctg

SEQ ID NO: 32054 - RNA, 36 nt, synthetic construct
  misc_feature 1..36: note = Multidrug resistance protein 1 (378-389)
  source 1..36: mol_type = other RNA
cgcctgtacgaccccaccgagggcatggtgagcgtc

SEQ ID NO: 32055 - RNA, 42 nt, synthetic construct
  misc_feature 1..42: note = WD repeat-containing protein 11 (918-931)
  source 1..42: mol_type = other RNA
cgcctgtacggcgacgagagcgagctccacttctggaccgtg

SEQ ID NO: 32056 - RNA, 36 nt, synthetic construct
  misc_feature 1..36: note = Transmembrane emp24 domain-containing protein 9 (11-22)
  source 1..36: mol_type = other RNA
cgcccccggccgggcaccgggctgggccgcgtgatg

SEQ ID NO: 32057 - RNA, 36 nt, synthetic construct
  misc_feature 1..36: note = Serine-rich coiled-coil domain-containing protein 2 (24-35)
  source 1..36: mol_type = other RNA
cgcccctacgccgccggcgggaagaagctggcgctc

SEQ ID NO: 32058 - RNA, 36 nt, synthetic construct
  misc_feature 1..36: note = Anaphase-promoting complex subunit 2 (163-174)
  source 1..36: mol_type = other RNA
cgcgtgctggaccccagcatggtcatcctcgaggtg

SEQ ID NO: 32059 - RNA, 42 nt, synthetic construct
  misc_feature 1..42: note = HLA class I histocompatibility antigen, A-23 alpha chain (352-365)
  source 1..42: mol_type = other RNA
agcgcccagggctccgacgtgagcctgaccgcctgcaaggtc

SEQ ID NO: 32060 - RNA, 36 nt, synthetic construct
  misc_feature 1..36: note = Protein KRI1 homolog (456-467)
  source 1..36: mol_type = other RNA
agcgagcaggaggagctgcgcgacaagcgggcctac

SEQ ID NO: 32061 - RNA, 48 nt, synthetic construct
  misc_feature 1..48: note = Keratin, type I cytoskeletal 9 (13-28)
  source 1..48: mol_type = other RNA
agcggcgggggcgggggcgggggcctgggctccgggggcagcatccgc

SEQ ID NO: 32062 - RNA, 36 nt, synthetic construct
  misc_feature 1..36: note = Stress-70 protein, mitochondrial (253-264)
  source 1..36: mol_type = other RNA
agcatcctggagatccagaagggcgtgttcgaggtc

SEQ ID NO: 32063 - RNA, 36 nt, synthetic construct
  misc_feature 1..36: note = Centrosomal protein of 192 kDa (19-30)
  source 1..36: mol_type = other RNA
agcctgttcggcaactccgggatcctcgagaacgtg

SEQ ID NO: 32064 - RNA, 36 nt, synthetic construct
  misc_feature 1..36: note = DNA-dependent protein kinase catalytic subunit (3305-3316)
  source 1..36: mol_type = other RNA
agcctgctcgacgagaacaacgtgtccagctacctg

SEQ ID NO: 32065 - RNA, 36 nt, synthetic construct
  misc_feature 1..36: note = Zinc finger protein 829 (85-96)
  source 1..36: mol_type = other RNA
agcctgctcgagcagggcaaggagccctggatggtg

SEQ ID NO: 32066 - RNA, 42 nt, synthetic construct
  misc_feature 1..42: note = Renin receptor (241-254)
  source 1..42: mol_type = other RNA
agcctgtacggcgggaacgccgtggtcgagctcgtgaccgtg

SEQ ID NO: 32067 - RNA, 39 nt, synthetic construct
  misc_feature 1..39: note = Protein kinase C-binding protein 1 (470-482)
  source 1..39: mol_type = other RNA
agccccgcctccaccaagaccggccaggccgggagcctg

SEQ ID NO: 32068 - RNA, 42 nt, synthetic construct
  misc_feature 1..42: note = AT-rich interactive domain-containing protein 1A (233-246)
  source 1..42: mol_type = other RNA
agcccccgcggcgggaccccgggctccggggccgccgcggcc

SEQ ID NO: 32069 - RNA, 36 nt, synthetic construct
  misc_feature 1..36: note = E3 ubiquitin-protein ligase TRIP12 (1954-1965)
  source 1..36: mol_type = other RNA
agcccccgcctgccggtgggcgggttccggtccctc

SEQ ID NO: 32070 - RNA, 36 nt, synthetic construct
  misc_feature 1..36: note = Msx2-interacting protein (1024-1035)
  source 1..36: mol_type = other RNA
agcccccgcccgtccggccccgggcccagctccttc

SEQ ID NO: 32071 - RNA, 36 nt, synthetic construct
  misc_feature 1..36: note = Long-chain-fatty-acid-CoA ligase 1 (687-698)
  source 1..36: mol_type = other RNA
agccagatcgacgacctgtactccaccatcaaggtg

SEQ ID NO: 32072 - RNA, 54 nt, synthetic construct
  misc_feature 1..54: note = Keratin, type I cytoskeletal 9 (12-29)
  source 1..54: mol_type = other RNA
agccgctccggcgggggcgggggcgggggcctgggcagcgggggctccatccgg

SEQ ID NO: 32073 - RNA, 60 nt, synthetic construct
  misc_feature 1..60: note = Keratin, type I cytoskeletal 9 (12-31)
  source 1..60: mol_type = other RNA
agccgctccggcgggggcgggggcgggggcctgggcagcgggggctccatccggagctcc

SEQ ID NO: 32074 - RNA, 63 nt, synthetic construct
  misc_feature 1..63: note = Keratin, type I cytoskeletal 9 (12-32)
  source 1..63: mol_type = other RNA
agccgctccggcgggggcgggggcgggggcctgggcagcgggggctccatccggagctcctac

SEQ ID NO: 32075 - RNA, 60 nt, synthetic construct
  misc_feature 1..60: note = Cytochrome c oxidase subunit 6A1, mitochondrial (2-21)
  source 1..60: mol_type = other RNA
agctccggcgcccacggggaggagggcagcgcccgcatgtggaagaccctgaccttcttc

SEQ ID NO: 32076 - RNA, 42 nt, synthetic construct
  misc_feature 1..42: note = Glyceraldehyde-3-phosphate dehydrogenase (2-15)
  source 1..42: mol_type = other RNA
agcaccttcgacgccggcgccgggatcgcgctgaacgaccac

SEQ ID NO: 32077 - RNA, 36 nt, synthetic construct
  misc_feature 1..36: note = HLA class I histocompatibility antigen, B-15 alpha chain (158-169)
  source 1..36: mol_type = other RNA
accgccgccgacaccgcggcccagatcacgcagcgc

SEQ ID NO: 32078 - RNA, 36 nt, synthetic construct
  misc_feature 1..36: note = Intercellular adhesion molecule 3 (536-547)
  source 1..36: mol_type = other RNA
accgaggccatgggcgaggagcccagccgcgccgag

SEQ ID NO: 32079 - RNA, 36 nt, synthetic construct
  misc_feature 1..36: note = Ragulator complex protein LAMTOR5 (36-47)
  source 1..36: mol_type = other RNA
accctgagcgacgagcacgccggcgtgatctccgtc

SEQ ID NO: 32080 - RNA, 36 nt, synthetic construct
  misc_feature 1..36: note = Treacle protein (102-113)
  source 1..36: mol_type = other RNA
accccccgcctggccagcaccaactccagcgtgctc

SEQ ID NO: 32081 - RNA, 36 nt, synthetic construct
  misc_feature 1..36: note = Neuropilin-2 (234-245)
  source 1..36: mol_type = other RNA
acccccagcgagctgcgctccagcaccggcatcctc

SEQ ID NO: 32082 - RNA, 66 nt, synthetic construct
  misc_feature 1..66: note = Cytochrome c oxidase subunit 7A2, mitochondrial (62-83)
  source 1..66: mol_type = other RNA
accgtgggcgggaccgcctacgccatctacgagctggcggtcgccagcttccccaagaagcaggag

SEQ ID NO: 32083 - RNA, 51 nt, synthetic construct
  misc_feature 1..51: note = HLA class I histocompatibility antigen, Cw-5 alpha chain (52-68)
  source 1..51: mol_type = other RNA
gtggacgacacccagttcgtccagttcgacagcgacgccgcctccccccgc

SEQ ID NO: 32084 - RNA, 51 nt, synthetic construct
  misc_feature 1..51: note = HLA class I histocompatibility antigen, alpha chain E (49-65)
  source 1..51: mol_type = other RNA
gtggacgacacccagttcgtccgcttcgacaacgacgccgccagcccccgg

SEQ ID NO: 32085 - RNA, 57 nt, synthetic construct
  misc_feature 1..57: note = HLA class I histocompatibility antigen, B-55 alpha chain (52-70)
  source 1..57: mol_type = other RNA
gtggacgacacccagttcgtccgcttcgacagcgacgccgcctccccccgggaggag

SEQ ID NO: 32086 - RNA, 60 nt, synthetic construct
  misc_feature 1..60: note = HLA class I histocompatibility antigen, B-55 alpha chain (52-71)
  source 1..60: mol_type = other RNA
gtggacgacacccagttcgtccgcttcgacagcgacgccgcctccccccgggaggagccg

SEQ ID NO: 32087 - RNA, 39 nt, synthetic construct
  misc_feature 1..39: note = butyrophilin subfamily 3 member A3 secreted isoform (174-186)
  source 1..39: mol_type = other RNA
gtgatcctggaccccgacaccgccaacgccatcctcctg

SEQ ID NO: 32088 - RNA, 39 nt, synthetic construct
  misc_feature 1..39: note = Dihydropyrimidinase-related protein 2 (374-386)
  source 1..39: mol_type = other RNA
gtgatctgggaccccgacagcgtcaagaccatctccgcc

SEQ ID NO: 32089 - RNA, 36 nt, synthetic construct
  misc_feature 1..36: note = Exocyst complex component 4 (203-214)
  source 1..36: mol_type = other RNA
gtgctggccgagatcaacaaggagatcgagggcgtc

SEQ ID NO: 32090 - RNA, 36 nt, synthetic construct
  misc_feature 1..36: note = Deoxyuridine 5'-triphosphate nucleotidohydrolase, mitochondrial (112-123)
  source 1..36: mol_type = other RNA
gtgctgttcaacttcggcaaggagaagttcgaggtc

SEQ ID NO: 32091 - RNA, 42 nt, synthetic construct
  misc_feature 1..42: note = Translocon-associated protein subunit alpha (19-32)
  source 1..42: mol_type = other RNA
gtgctgttccgcggcgggccccggggcctcctggccgtcgcc

SEQ ID NO: 32092 - RNA, 48 nt, synthetic construct
  misc_feature 1..48: note = Heat shock 70 kDa protein 1-like (171-186)
  source 1..48: mol_type = other RNA
gtgctgcgcatcatcaacgagcccaccgccgccgcgatcgcctacggc

SEQ ID NO: 32093 - RNA, 39 nt, synthetic construct
  misc_feature 1..39: note = G2/mitotic-specific cyclin-B1 (388-400)
  source 1..39: mol_type = other RNA
gtgatggtcaaccagggcctgaccaagcacatgaccgtg

SEQ ID NO: 32094 - RNA, 39 nt, synthetic construct
  misc_feature 1..39: note = Endoplasmic reticulum resident protein 29 (5-17)
  source 1..39: mol_type = other RNA
gtgccccgcgccgccttcctgagcccgctcctgcccctg

SEQ ID NO: 32095 - RNA, 36 nt, synthetic construct
  misc_feature 1..36: note = Lysosomal alpha-glucosidase (38-49)
  source 1..36: mol_type = other RNA
gtgccccgcgagctgagcggctccagcccggtcctc

SEQ ID NO: 32096 - RNA, 42 nt, synthetic construct
  misc_feature 1..42: note = HLA class I histocompatibility antigen, B-15 alpha chain (241-254)
  source 1..42: mol_type = other RNA
tggcagcgcgacggcgaggaccagacccaggacaccgagctg

SEQ ID NO: 32097 - RNA, 39 nt, synthetic construct
  misc_feature 1..39: note = V-type proton ATPase subunit S1 (77-89)
  source 1..39: mol_type = other RNA
tacctggaccccgccctcgagctgggcccgcgcaacgtg

SEQ ID NO: 32098 - RNA, 36 nt, synthetic construct
  misc_feature 1..36: note = Armadillo repeat-containing protein 8 (306-317)
  source 1..36: mol_type = other RNA
tacctgatcgagcccgacgtggagctccagcgcatc

SEQ ID NO: 32099 - RNA, 36 nt, synthetic construct
  misc_feature 1..36: note = F-actin-capping protein subunit beta (120-131)
  source 1..36: mol_type = other RNA
tacctgtgggacctcgaccacggcttcgccggggtg

SEQ ID NO: 32100 - RNA, 36 nt, synthetic construct
  misc_feature 1..36: note = 40S ribosomal protein S8 (188-199)
  source 1..36: mol_type = other RNA
tacgtgctggagggcaaggagctcgagttctacctg

SEQ ID NO: 32101 - RNA, 45 nt, synthetic construct
  misc_feature 1..45: note = DnaJ homolog subfamily C member 3 (3-17)
  source 1..45: mol_type = other RNA
gcccccggcagcgtgacctcccgcctggggagcgtcttcccgttc

SEQ ID NO: 32102 - RNA, 27 nt, synthetic construct
  misc_feature 1..27: note = Pre-rRNA-processing protein TSR1 homolog (480-488)
  source 1..27: mol_type = other RNA
gcccgcatcttccagttccagaacttc

SEQ ID NO: 32103 - RNA, 27 nt, synthetic construct
  misc_feature 1..27: note = Protein FAM98B (250-258)
  source 1..27: mol_type = other RNA
gcccgcatctaccagcccaagcggtac

SEQ ID NO: 32104 - RNA, 27 nt, synthetic construct
  misc_feature 1..27: note = Acyl-CoA desaturase (130-138)
  source 1..27: mol_type = other RNA
gcccgcctgcccctccggctgttcctg

SEQ ID NO: 32105 - RNA, 27 nt, synthetic construct
  misc_feature 1..27: note = Serine/arginine-rich splicing factor 3 (42-50)
  source 1..27: mol_type = other RNA
gcccgcaaccccccgggcttcgccttc

SEQ ID NO: 32106 - RNA, 33 nt, synthetic construct
  misc_feature 1..33: note = ATP synthase F(0) complex subunit C1, mitochondrial (62-72)
  source 1..33: mol_type = other RNA
gcccgcaaccccagcctgaagcagcagctcttc

SEQ ID NO: 32107 - RNA, 27 nt, synthetic construct
  misc_feature 1..27: note = 40S ribosomal protein S28 (12-20)
  source 1..27: mol_type = other RNA
gcccgcgtgaccaaggtcctgggccgg

SEQ ID NO: 32108 - RNA, 27 nt, synthetic construct
  misc_feature 1..27: note = Rab GDP dissociation inhibitor alpha (217-225)
  source 1..27: mol_type = other RNA
gcccgctacggcaagagcccctacctg

SEQ ID NO: 32109 - RNA, 27 nt, synthetic construct
  misc_feature 1..27: note = Vacuolar fusion protein CCZ1 homolog (167-175)
  source 1..27: mol_type = other RNA
gagcgcctggagaagttcttccaccgg

SEQ ID NO: 32110 - RNA, 27 nt, synthetic construct
  misc_feature 1..27: note = Mitochondrial import receptor subunit TOM5 homolog (2-10)
  source 1..27: mol_type = other RNA
ttccgcatcgagggcctggcccccaag

SEQ ID NO: 32111 - RNA, 33 nt, synthetic construct
  misc_feature 1..33: note = Lysosome-associated membraneoprotein 2 (4-14)
  source 1..33: mol_type = other RNA
ttccgcctgttccccgtgccgggcagcgggctc

SEQ ID NO: 32112 - RNA, 30 nt, synthetic construct
  misc_feature 1..30: note = 60S ribosomal protein L28 (38-47)
  source 1..30: mol_type = other RNA
ttccgctacaacggcctgatccaccggaag

SEQ ID NO: 32113 - RNA, 30 nt, synthetic construct
  misc_feature 1..30: note = Menin (410-419)
  source 1..30: mol_type = other RNA
ggccgcttcgaggggcaggtgcggcagaag

SEQ ID NO: 32114 - RNA, 36 nt, synthetic construct
  misc_feature 1..36: note = Myelin basic protein (43-54)
  source 1..36: mol_type = other RNA
ggccgcttcttcgggggcgaccggggggcccccaag

SEQ ID NO: 32115 - RNA, 27 nt, synthetic construct
  misc_feature 1..27: note = Rho guanine nucleotide exchange factor 2 (459-467)
  source 1..27: mol_type = other RNA
ggccgcttcaaggacgtgctggtcctc

SEQ ID NO: 32116 - RNA, 27 nt, synthetic construct
  misc_feature 1..27: note = Protein OS-9 (125-133)
  source 1..27: mol_type = other RNA
ggccgccacatccagcagtaccacatg

SEQ ID NO: 32117 - RNA, 27 nt, synthetic construct
  misc_feature 1..27: note = 26S protease regulatory subunit 4 (345-353)
  source 1..27: mol_type = other RNA
ggccgcatcgaccggaagatcgagttc

SEQ ID NO: 32118 - RNA, 27 nt, synthetic construct
  misc_feature 1..27: note = Uncharacterized protein C1orf131 (262-270)
  source 1..27: mol_type = other RNA
ggccgcatcgggcaggtgggcaagttc

SEQ ID NO: 32119 - RNA, 27 nt, synthetic construct
  misc_feature 1..27: note = Glyceraldehyde-3-phosphate dehydrogenase (12-20)
  source 1..27: mol_type = other RNA
ggccgcatcgggcggctggtgacccgc

SEQ ID NO: 32120 - RNA, 27 nt, synthetic construct
  misc_feature 1..27: note = Induced myeloid leukemia cell differentiation protein Mcl-1 (109-117)
  source 1..27: mol_type = other RNA
ggccgcatcgtgaccctgatcagcttc

SEQ ID NO: 32121 - RNA, 33 nt, synthetic construct
  misc_feature 1..33: note = 60S ribosomal protein L13a (139-149)
  source 1..33: mol_type = other RNA
ggccgcctggcccacgaggtggggtggaagtac

SEQ ID NO: 32122 - RNA, 27 nt, synthetic construct
  misc_feature 1..27: note = Protein MON2 homolog (593-601)
  source 1..27: mol_type = other RNA
ggccgcctggggctcgtgaccagccgg

SEQ ID NO: 32123 - RNA, 27 nt, synthetic construct
  misc_feature 1..27: note = Protein transport protein Sec23B (152-160)
  source 1..27: mol_type = other RNA
ggccgcatggtgcaggtccacgagctg

SEQ ID NO: 32124 - RNA, 27 nt, synthetic construct
  misc_feature 1..27: note = Major facilitator superfamily domain-containing protein 10 (356-364)
  source 1..27: mol_type = other RNA
ggccgcagcctgcccgtgctcgggctg

SEQ ID NO: 32125 - RNA, 27 nt, synthetic construct
  misc_feature 1..27: note = Unconventional myosin-Ic (676-684)
  source 1..27: mol_type = other RNA
ggccgcaccaagatcttcatccggttc

SEQ ID NO: 32126 - RNA, 27 nt, synthetic construct
  misc_feature 1..27: note = Protein CNPPD1 (197-205)
  source 1..27: mol_type = other RNA
ggccgctggcgggggtggtacacctac

SEQ ID NO: 32127 - RNA, 27 nt, synthetic construct
  misc_feature 1..27: note = E3 ubiquitin-protein ligase MYCBP2 (3264-3272)
  source 1..27: mol_type = other RNA
ggccgctacgccgggggccaggggtac

SEQ ID NO: 32128 - RNA, 27 nt, synthetic construct
  misc_feature 1..27: note = NEDD4 family-interacting protein 1 (145-153)
  source 1..27: mol_type = other RNA
ggccgctacggggccatcagcggcttc

SEQ ID NO: 32129 - RNA, 33 nt, synthetic construct
  misc_feature 1..33: note = NEDD4 family-interacting protein 1 (145-155)
  source 1..33: mol_type = other RNA
ggccgctacggggccatcagcggcttcgggctg

SEQ ID NO: 32130 - RNA, 27 nt, synthetic construct
  misc_feature 1..27: note = Inositol hexakisphosphate kinase 2 (296-304)
  source 1..27: mol_type = other RNA
ggccgctacctgcggcgcgagctcctg

SEQ ID NO: 32131 - RNA, 27 nt, synthetic construct
  misc_feature 1..27: note = Translocon-associated protein subunit delta (84-92)
  source 1..27: mol_type = other RNA
ggccgctaccaggtgagctggtccctg

SEQ ID NO: 32132 - RNA, 27 nt, synthetic construct
  misc_feature 1..27: note = Cleavage and polyadenylation specificity factor subunit 5 (89-97)
  source 1..27: mol_type = other RNA
caccgcctgccccacgtgctcctgctg

SEQ ID NO: 32133 - RNA, 27 nt, synthetic construct
  misc_feature 1..27: note = Zinc finger protein 281 (55-63)
  source 1..27: mol_type = other RNA
caccgcctgcccccggtgaccagcttc

SEQ ID NO: 32134 - RNA, 30 nt, synthetic construct
  misc_feature 1..30: note = Calpain-1 catalytic subunit (132-141)
  source 1..30: mol_type = other RNA
caccgcgtggtcccccacggccagagcttc

SEQ ID NO: 32135 - RNA, 30 nt, synthetic construct
  misc_feature 1..30: note = X-ray repair cross-complementing protein 6 (338-347)
  source 1..30: mol_type = other RNA
aagcgcttcgacgaccccggcctgatgctc

SEQ ID NO: 32136 - RNA, 30 nt, synthetic construct
  misc_feature 1..30: note = Copine-1 (190-199)
  source 1..30: mol_type = other RNA
aagcgcttcagcgtgcccgtccagcacttc

SEQ ID NO: 32137 - RNA, 27 nt, synthetic construct
  misc_feature 1..27: note = Ornithine decarboxylase antizyme 1 (58-66)
  source 1..27: mol_type = other RNA
aagcgcatcaactggcggaccgtgctg

SEQ ID NO: 32138 - RNA, 27 nt, synthetic construct
  misc_feature 1..27: note = Bax inhibitor 1 (129-137)
  source 1..27: mol_type = other RNA
aagcgcctgggcctcctggccgggttc

SEQ ID NO: 32139 - RNA, 27 nt, synthetic construct
  misc_feature 1..27: note = Pre-rRNA-processing protein TSR1 homolog (726-734)
  source 1..27: mol_type = other RNA
aagcgcgtgttccccaagtggacctac

SEQ ID NO: 32140 - RNA, 30 nt, synthetic construct
  misc_feature 1..30: note = Pre-mRNA-processing-splicing factor 8 (85-94)
  source 1..30: mol_type = other RNA
aagcgcgtgtacctgggcgccctcaagtac

SEQ ID NO: 32141 - RNA, 30 nt, synthetic construct
  misc_feature 1..30: note = ER degradation-enhancing alpha-mannosidase-like protein 1 (467-476)
  source 1..30: mol_type = other RNA
aagcgctacggcgccctgcccgagcggtac

SEQ ID NO: 32142 - RNA, 27 nt, synthetic construct
  misc_feature 1..27: note = Mitochondrial import receptor subunit TOM5 homolog (38-46)
  source 1..27: mol_type = other RNA
ctgcgcgtgacccccttcatcctcaag

SEQ ID NO: 32143 - RNA, 27 nt, synthetic construct
  misc_feature 1..27: note = Interferon alpha-inducible protein 6 (1-9)
  source 1..27: mol_type = other RNA
atgcgccagaaggccgtgagcctgttc

SEQ ID NO: 32144 - RNA, 30 nt, synthetic construct
  misc_feature 1..30: note = Interferon alpha-inducible protein 6 (1-10)
  source 1..30: mol_type = other RNA
atgcgccagaaggccgtgagcctgttcctc

SEQ ID NO: 32145 - RNA, 27 nt, synthetic construct
  misc_feature 1..27: note = Double-strand-break repair protein rad21 homolog (383-391)
  source 1..27: mol_type = other RNA
aaccgcctgctcaagctgttcacccgg

SEQ ID NO: 32146 - RNA, 27 nt, synthetic construct
  misc_feature 1..27: note = ER degradation-enhancing alpha-mannosidase-like protein 1 (35-43)
  source 1..27: mol_type = other RNA
cagcgcttccccctgagcttcggcttc

SEQ ID NO: 32147 - RNA, 27 nt, synthetic construct
  misc_feature 1..27: note = B-cell receptor-associated protein 31 (100-108)
  source 1..27: mol_type = other RNA
cagcgcaacctgtacatcgccggcttc

SEQ ID NO: 32148 - RNA, 33 nt, synthetic construct
  misc_feature 1..33: note = Chondroitin sulfate glucuronyltransferase (434-444)
  source 1..33: mol_type = other RNA
cgccggttcgaccccgcccgcggcatggagtac

SEQ ID NO: 32149 - RNA, 27 nt, synthetic construct
  misc_feature 1..27: note = Nuclear envelope integral membrane protein 1 (157-165)
  source 1..27: mol_type = other RNA
cgccggttcgaccccaagctgttcctc

SEQ ID NO: 32150 - RNA, 27 nt, synthetic construct
  misc_feature 1..27: note = ER membrane protein complex subunit 4 (13-21)
  source 1..27: mol_type = other RNA
cgccggttcaagtgggccatcgagctg

SEQ ID NO: 32151 - RNA, 27 nt, synthetic construct
  misc_feature 1..27: note = Ras GTPase-activating protein-binding protein 1 (106-114)
  source 1..27: mol_type = other RNA
cgccggttcatgcagaccttcgtgctg

SEQ ID NO: 32152 - RNA, 27 nt, synthetic construct
  misc_feature 1..27: note = Cullin-7 (439-447)
  source 1..27: mol_type = other RNA
cgccggttccgcccccggagcgagttc

SEQ ID NO: 32153 - RNA, 27 nt, synthetic construct
  misc_feature 1..27: note = Ubiquitin carboxyl-terminal hydrolase 22 (367-375)
  source 1..27: mol_type = other RNA
cgccggttcacccgccccgagcacctg

SEQ ID NO: 32154 - RNA, 27 nt, synthetic construct
  misc_feature 1..27: note = Cytochrome c oxidase subunit 7C, mitochondrial (7-15)
  source 1..27: mol_type = other RNA
cgccggttcaccaccagcgtggtccgc

SEQ ID NO: 32155 - RNA, 33 nt, synthetic construct
  misc_feature 1..33: note = 40S ribosomal protein S30 (114-124)
  source 1..33: mol_type = other RNA
cgccggttcgtgaacgtcgtgcccaccttcggc

SEQ ID NO: 32156 - RNA, 27 nt, synthetic construct
  misc_feature 1..27: note = Acyl-CoA desaturase (174-182)
  source 1..27: mol_type = other RNA
cgccggggcttcttcttcagccacgtg

SEQ ID NO: 32157 - RNA, 27 nt, synthetic construct
  misc_feature 1..27: note = Store-operated calcium entry-associated regulatory factor (56-64)
  source 1..27: mol_type = other RNA
cgccggctggaccccatcccgcagctc

SEQ ID NO: 32158 - RNA, 30 nt, synthetic construct
  misc_feature 1..30: note = Melanoma-associated antigen F1 (195-204)
  source 1..30: mol_type = other RNA
cgccggctgggcgtgcagcccagcaagtac

SEQ ID NO: 32159 - RNA, 27 nt, synthetic construct
  misc_feature 1..27: note = Transformation/transcription domain-associated protein (2920-2928)
  source 1..27: mol_type = other RNA
cgccggctgccccacgtggtcagccac

SEQ ID NO: 32160 - RNA, 27 nt, synthetic construct
  misc_feature 1..27: note = Heat shock protein HSP 90-beta (375-383)
  source 1..27: mol_type = other RNA
cgccggctgagcgagctcctgcgctac

SEQ ID NO: 32161 - RNA, 27 nt, synthetic construct
  misc_feature 1..27: note = DNA-directed RNA polymerase II subunit RPB1 (1052-1060)
  source 1..27: mol_type = other RNA
cgccggatggccgaggagttccgcctg

SEQ ID NO: 32162 - RNA, 30 nt, synthetic construct
  misc_feature 1..30: note = Signal-induced proliferation-associated 1-like protein 2 (954-963)
  source 1..30: mol_type = other RNA
cgccggaacggcctggggcagctcggcttc

SEQ ID NO: 32163 - RNA, 27 nt, synthetic construct
  misc_feature 1..27: note = NADH dehydrogenase (ubiquinone) 1 subunit C2 (4-12)
  source 1..27: mol_type = other RNA
cgccggaaccccgagccgctgcgcttc

SEQ ID NO: 32164 - RNA, 30 nt, synthetic construct
  misc_feature 1..30: note = Elongation factor 2 (341-350)
  source 1..30: mol_type = other RNA
cgccggtggctgcccgccggcgacgccctc

SEQ ID NO: 32165 - RNA, 27 nt, synthetic construct
  misc_feature 1..27: note = Eukaryotic initiation factor 4A-I (168-176)
  source 1..27: mol_type = other RNA
cgccggtacctgagccccaagtacatc

SEQ ID NO: 32166 - RNA, 27 nt, synthetic construct
  misc_feature 1..27: note = 60S ribosomal protein L17 (61-69)
  source 1..27: mol_type = other RNA
cgccggtacaacggcggggtgggccgc

SEQ ID NO: 32167 - RNA, 30 nt, synthetic construct
  misc_feature 1..30: note = Eukaryotic translation initiation factor 3 subunit L (327-336)
  source 1..30: mol_type = other RNA
cgccggtaccaggacgccatccgcgtgttc

SEQ ID NO: 32168 - RNA, 27 nt, synthetic construct
  misc_feature 1..27: note = Charged multivesicular body protein 2a (70-78)
  source 1..27: mol_type = other RNA
cgccggtacgtgcgcaagttcgtcctg

SEQ ID NO: 32169 - RNA, 27 nt, synthetic construct
  misc_feature 1..27: note = Histone H2A type 1-A (20-28)
  source 1..27: mol_type = other RNA
agccgcgccggcctgcagttccccgtg

SEQ ID NO: 32170 - RNA, 27 nt, synthetic construct
  misc_feature 1..27: note = Pre-mRNA cleavage complex 2 protein Pcf11 (1103-1111)
  source 1..27: mol_type = other RNA
agccgcttcgacatccccctgggcctc

SEQ ID NO: 32171 - RNA, 27 nt, synthetic construct
  misc_feature 1..27: note = Pericentrin (1289-1297)
  source 1..27: mol_type = other RNA
agccgcttcgagaaggagttctccttc

SEQ ID NO: 32172 - RNA, 27 nt, synthetic construct
  misc_feature 1..27: note = Myosin-7 (242-250)
  source 1..27: mol_type = other RNA
agccgcttcggcaagttcatccggatc

SEQ ID NO: 32173 - RNA, 27 nt, synthetic construct
  misc_feature 1..27: note = Pre-mRNA-processing-splicing factor 8 (538-546)
  source 1..27: mol_type = other RNA
agccgcttcggcaacgccttccacctg

SEQ ID NO: 32174 - RNA, 33 nt, synthetic construct
  misc_feature 1..33: note = EH domain-containing protein 4 (129-139)
  source 1..33: mol_type = other RNA
agccgcttcggcaacgccttcctgaaccggttc

SEQ ID NO: 32175 - RNA, 27 nt, synthetic construct
  misc_feature 1..27: note = DNA replication licensing factor MCM7 (227-235)
  source 1..27: mol_type = other RNA
agccgcttcatcaagttccaggagatg

SEQ ID NO: 32176 - RNA, 27 nt, synthetic construct
  misc_feature 1..27: note = ATP-dependent RNA helicase DDX3X (591-599)
  source 1..27: mol_type = other RNA
agccgcttctccggcgggttcggcgcc

SEQ ID NO: 32177 - RNA, 30 nt, synthetic construct
  misc_feature 1..30: note = NADH dehydrogenase (ubiquinone) 1 beta subcomplex subunit 5, mitochondrial (60-69)
  source 1..30: mol_type = other RNA
agccgcttctacgaccggcgcttcctgaag

SEQ ID NO: 32178 - RNA, 27 nt, synthetic construct
  misc_feature 1..27: note = Hypoxia-inducible factor 1-alpha (268-276)
  source 1..27: mol_type = other RNA
agccgccactccctggacatgaagttc

SEQ ID NO: 32179 - RNA, 33 nt, synthetic construct
  misc_feature 1..33: note = Ubiquitin fusion degradation protein 1 homolog (57-67)
  source 1..33: mol_type = other RNA
agccgcctgaacatcacctaccccatgctcttc

SEQ ID NO: 32180 - RNA, 27 nt, synthetic construct
  misc_feature 1..27: note = Protein diaphanous homolog 3 (854-862)
  source 1..27: mol_type = other RNA
agccgcaacgcccagaccttcggcttc

SEQ ID NO: 32181 - RNA, 27 nt, synthetic construct
  misc_feature 1..27: note = Cytochrome b-c1 complex subunit 8 (9-17)
  source 1..27: mol_type = other RNA
acccgcatgcggcacgtgatcagctac

SEQ ID NO: 32182 - RNA, 27 nt, synthetic construct
  misc_feature 1..27: note = WD repeat-containing protein 36 (383-391)
  source 1..27: mol_type = other RNA
gtgcgcctgcccccgatcaccaagttc

SEQ ID NO: 32183 - RNA, 42 nt, synthetic construct
  misc_feature 1..42: note = POTE ankyrin domain family member F (791-804)
  source 1..42: mol_type = other RNA
tacaacgagctgcgcgtggcccccgaggagcacccggtcctc

SEQ ID NO: 32184 - RNA, 27 nt, synthetic construct
  misc_feature 1..27: note = Dystonin (7305-7313)
  source 1..27: mol_type = other RNA
taccgcttcttcctgggcaaccagttc

SEQ ID NO: 32185 - RNA, 27 nt, synthetic construct
  misc_feature 1..27: note = BTB/POZ domain-containing protein KCTD20 (192-200)
  source 1..27: mol_type = other RNA
ggccgcagcgaggtgatctacaactac

SEQ ID NO: 32186 - RNA, 27 nt, synthetic construct
  misc_feature 1..27: note = Filamin-B (2069-2077)
  source 1..27: mol_type = other RNA
ggccgcgtgaaggagagcatcacccgg

SEQ ID NO: 32187 - RNA, 27 nt, synthetic construct
  misc_feature 1..27: note = Intron-binding protein aquarius (896-904)
  source 1..27: mol_type = other RNA
ggccgcgtgaactacgtcctggcccgg

SEQ ID NO: 32188 - RNA, 33 nt, synthetic construct
  misc_feature 1..33: note = Integrin-linked protein kinase (149-159)
  source 1..33: mol_type = other RNA
ggccgctggcaggggaacgacatcgtggtcaag

SEQ ID NO: 32189 - RNA, 27 nt, synthetic construct
  misc_feature 1..27: note = Serine/threonine-protein kinase 38 (446-454)
  source 1..27: mol_type = other RNA
aagcgcttcgagggcctgaccgcccgg

SEQ ID NO: 32190 - RNA, 27 nt, synthetic construct
  misc_feature 1..27: note = 39S ribosomal protein L43, mitochondrial (27-35)
  source 1..27: mol_type = other RNA
cagcgcctgagcttctccgtgagccgg

SEQ ID NO: 32191 - RNA, 27 nt, synthetic construct
  misc_feature 1..27: note = Protein diaphanous homolog 1 (967-975)
  source 1..27: mol_type = other RNA
agccgcaacgccggcgccttcgggttc

SEQ ID NO: 32192 - RNA, 30 nt, synthetic construct
  misc_feature 1..30: note = WD repeat-containing protein 1 (55-64)
  source 1..30: mol_type = other RNA
gtgcgcttcagccccgacggcaaccggttc

SEQ ID NO: 32193 - RNA, 39 nt, synthetic construct
  misc_feature 1..39: note = Elongation factor 1-beta (213-225)
  source 1..39: mol_type = other RNA
tacgtgcagagcatggacgtcgccgccttcaacaagatc

SEQ ID NO: 32194 - RNA, 27 nt, synthetic construct
  misc_feature 1..27: note = T-complex protein 1 subunit zeta (2-10)
  source 1..27: mol_type = other RNA
gccgccgtgaagaccctgaaccccaag

SEQ ID NO: 32195 - RNA, 33 nt, synthetic construct
  misc_feature 1..33: note = 40S ribosomal protein S21 (73-83)
  source 1..33: mol_type = other RNA
gccaaggccgacggcatcgtgagcaagaacttc

SEQ ID NO: 32196 - RNA, 33 nt, synthetic construct
  misc_feature 1..33: note = Alpha-enolase (13-23)
  source 1..33: mol_type = other RNA
gacagccgcggcaaccccaccgtggaggtcgac

SEQ ID NO: 32197 - RNA, 27 nt, synthetic construct
  misc_feature 1..27: note = Triosephosphate isomerase (159-167)
  source 1..27: mol_type = other RNA
ttcgtggacatcatcaacgccaagcag

SEQ ID NO: 32198 - RNA, 27 nt, synthetic construct
  misc_feature 1..27: note = 60S ribosomal protein L37 (76-84)
  source 1..27: mol_type = other RNA
cacggcttccgcgaggggaccaccccc

SEQ ID NO: 32199 - RNA, 27 nt, synthetic construct
  misc_feature 1..27: note = Store-operated calcium entry-associated regulatory factor (103-111)
  source 1..27: mol_type = other RNA
atcgcctacaagttcggcaagaccgtg

SEQ ID NO: 32200 - RNA, 27 nt, synthetic construct
  misc_feature 1..27: note = Ubiquitin-60S ribosomal protein L40 (48-56)
  source 1..27: mol_type = other RNA
atcatcgagcccagcctgcgccagctc

SEQ ID NO: 32201 - RNA, 27 nt, synthetic construct
  misc_feature 1..27: note = Eukaryotic translation initiation factor 4 gamma 1 (1452-1460)
  source 1..27: mol_type = other RNA
atcatcttcgagacccccctgcgcgtg

SEQ ID NO: 32202 - RNA, 27 nt, synthetic construct
  misc_feature 1..27: note = Vacuolar protein sorting-associated protein 4A (144-152)
  source 1..27: mol_type = other RNA
atcctgcccatcaagttcccgcacctc

SEQ ID NO: 32203 - RNA, 30 nt, synthetic construct
  misc_feature 1..30: note = 40S ribosomal protein S21 (74-83)
  source 1..30: mol_type = other RNA
aaggccgacggcatcgtgagcaagaacttc

SEQ ID NO: 32204 - RNA, 27 nt, synthetic construct
  misc_feature 1..27: note = COMM domain-containing protein 3 (187-195)
  source 1..27: mol_type = other RNA
aagagcctggagcgcgccacccagctc

SEQ ID NO: 32205 - RNA, 27 nt, synthetic construct
  misc_feature 1..27: note = POTE ankyrin domain family member E (805-813)
  source 1..27: mol_type = other RNA
ctgaccgaggcccccctcaacccgaag

SEQ ID NO: 32206 - RNA, 27 nt, synthetic construct
  misc_feature 1..27: note = DNA-dependent protein kinase catalytic subunit (1340-1348)
  source 1..27: mol_type = other RNA
cgcatcatggagttcaccaccacgctg

SEQ ID NO: 32207 - RNA, 33 nt, synthetic construct
  misc_feature 1..33: note = TAR DNA-binding protein 43 (248-258)
  source 1..33: mol_type = other RNA
agcatggactccaagagctccggctgggggatg

SEQ ID NO: 32208 - RNA, 33 nt, synthetic construct
  misc_feature 1..33: note = Vimentin (2-12)
  source 1..33: mol_type = other RNA
agcacccgctccgtgagctccagctcctaccgg

SEQ ID NO: 32209 - RNA, 42 nt, synthetic construct
  misc_feature 1..42: note = Vimentin (446-459)
  source 1..42: mol_type = other RNA
accgtggagacccgcgacggccaggtcatcaacgagacgagc

SEQ ID NO: 32210 - RNA, 30 nt, synthetic construct
  misc_feature 1..30: note = 60S ribosomal protein L31 (106-115)
  source 1..30: mol_type = other RNA
gtgacctacgtccccgtgaccacgttcaag

SEQ ID NO: 32211 - RNA, 27 nt, synthetic construct
  misc_feature 1..27: note = Hemoglobin subunit delta (34-42)
  source 1..27: mol_type = other RNA
gtggtctacccctggacccagcgcttc

SEQ ID NO: 32212 - RNA, 27 nt, synthetic construct
  misc_feature 1..27: note = Guanine nucleotide-binding protein subunit beta-2-like 1 (192-200)
  source 1..27: mol_type = other RNA
accggctacctgaacaccgtgacggtc

SEQ ID NO: 32213 - RNA, 24 nt, synthetic construct
  misc_feature 1..24: note = Ubiquitin-conjugating enzyme E2 D2 (59-66)
  source 1..24: mol_type = other RNA
taccccttcaagccgcccaaggtg

SEQ ID NO: 32214 - RNA, 57 nt, synthetic construct
  misc_feature 1..57: note = Histone H2B type 2-E (83-101)
  source 1..57: mol_type = other RNA
gccaagcacgccgtgagcgagggcaccaaggcggtcaccaagtacacgtccagcaag

SEQ ID NO: 32215 - RNA, 30 nt, synthetic construct
  misc_feature 1..30: note = HLA class II histocompatibility antigen, DP beta 1 chain (9-18)
  source 1..30: mol_type = other RNA
gccccccgcaccgtggccctgaccgcgctc

SEQ ID NO: 32216 - RNA, 27 nt, synthetic construct
  misc_feature 1..27: note = SWI/SNF-related matrix-associated actin-dependent regulator of chromatin subfamily E member 1 (114-122)
  source 1..27: mol_type = other RNA
gcctaccacaacagccccgcctacctg

SEQ ID NO: 32217 - RNA, 27 nt, synthetic construct
  misc_feature 1..27: note = Chloride intracellular channel protein 4 (243-251)
  source 1..27: mol_type = other RNA
gcctacagcgacgtggccaagcgcctg

SEQ ID NO: 32218 - RNA, 27 nt, synthetic construct
  misc_feature 1..27: note = CDK5 regulatory subunit-associated protein 1 (381-389)
  source 1..27: mol_type = other RNA
gcctacgtggagctggtccaccacatc

SEQ ID NO: 32219 - RNA, 30 nt, synthetic construct
  misc_feature 1..30: note = Exocyst complex component 2 (85-94)
  source 1..30: mol_type = other RNA
gcctacgtgaagggcgggctgagcaccttc

SEQ ID NO: 32220 - RNA, 27 nt, synthetic construct
  misc_feature 1..27: note = 60S ribosomal protein L23a (148-156)
  source 1..27: mol_type = other RNA
gacgtggccaacaagatcggcatcatc

SEQ ID NO: 32221 - RNA, 27 nt, synthetic construct
  misc_feature 1..27: note = Spectrin beta chain, non-erythrocytic 1 (1643-1651)
  source 1..27: mol_type = other RNA
gactacgccgagaccgtgcaccagctg

SEQ ID NO: 32222 - RNA, 27 nt, synthetic construct
  misc_feature 1..27: note = Nuclear export mediator factor NEMF (234-242)
  source 1..27: mol_type = other RNA
gactacatgaagaccaccagcaacttc

SEQ ID NO: 32223 - RNA, 27 nt, synthetic construct
  misc_feature 1..27: note = Formin-binding protein 1 (189-197)
  source 1..27: mol_type = other RNA
gactacagctccatcctgcagaagttc

SEQ ID NO: 32224 - RNA, 27 nt, synthetic construct
  misc_feature 1..27: note = Myosin light polypeptide 6 (94-102)
  source 1..27: mol_type = other RNA
gactacgtggagggcctgcgcgtcttc

SEQ ID NO: 32225 - RNA, 27 nt, synthetic construct
  misc_feature 1..27: note = Sterol regulatory element-binding protein 2 (839-847)
  source 1..27: mol_type = other RNA
gagtacctgaagctcctgcacagcttc

SEQ ID NO: 32226 - RNA, 27 nt, synthetic construct
  misc_feature 1..27: note = Clathrin heavy chain 1 (1605-1613)
  source 1..27: mol_type = other RNA
gagtacctgaccaaggtggacaagctc

SEQ ID NO: 32227 - RNA, 30 nt, synthetic construct
  misc_feature 1..30: note = Tubulin beta chain (158-167)
  source 1..30: mol_type = other RNA
gagtaccccgaccgcatcatgaacaccttc

SEQ ID NO: 32228 - RNA, 27 nt, synthetic construct
  misc_feature 1..27: note = Histone deacetylase 1 (86-94)
  source 1..27: mol_type = other RNA
gagtacagcaagcagatgcagcgcttc

SEQ ID NO: 32229 - RNA, 27 nt, synthetic construct
  misc_feature 1..27: note = DNA repair protein RAD50 (1281-1289)
  source 1..27: mol_type = other RNA
gagtacgtggagaagttctaccgcatc

SEQ ID NO: 32230 - RNA, 30 nt, synthetic construct
  misc_feature 1..30: note = V-type proton ATPase catalytic subunit A (463-472)
  source 1..30: mol_type = other RNA
gagtactacgacaagcacttcaccgagttc

SEQ ID NO: 32231 - RNA, 27 nt, synthetic construct
  misc_feature 1..27: note = Exostosin-2 (609-617)
  source 1..27: mol_type = other RNA
ttctaccacaagtacttcaactacctg

SEQ ID NO: 32232 - RNA, 27 nt, synthetic construct
  misc_feature 1..27: note = Late secretory pathway protein AVL9 homolog (280-288)
  source 1..27: mol_type = other RNA
ttctacatcagccccgtgaacaagctg

SEQ ID NO: 32233 - RNA, 33 nt, synthetic construct
  misc_feature 1..33: note = 60S ribosomal protein L7 (81-91)
  source 1..33: mol_type = other RNA
ttctacgtgcccgccgagccgaagctggccttc

SEQ ID NO: 32234 - RNA, 48 nt, synthetic construct
  misc_feature 1..48: note = Elongation factor 1-beta (2-17)
  source 1..48: mol_type = other RNA
ggcttcggggacctgaagagccccgccggcctccaggtgctgaacgac

SEQ ID NO: 32235 - RNA, 36 nt, synthetic construct
  misc_feature 1..36: note = 60S ribosomal protein L5 (2-13)
  source 1..36: mol_type = other RNA
ggcttcgtgaaggtcgtgaagaacaaggcctacttc

SEQ ID NO: 32236 - RNA, 27 nt, synthetic construct
  misc_feature 1..27: note = Poly(A) RNA polymerase GLD2 (252-260)
  source 1..27: mol_type = other RNA
ggctacatcgagcgcccccagctgatc

SEQ ID NO: 32237 - RNA, 27 nt, synthetic construct
  misc_feature 1..27: note = Mannose-1-phosphate guanyltransferase alpha (166-174)
  source 1..27: mol_type = other RNA
cactacgtggagaagcccagcaccttc

SEQ ID NO: 32238 - RNA, 27 nt, synthetic construct
  misc_feature 1..27: note = Little elongation complex subunit 2 (341-349)
  source 1..27: mol_type = other RNA
atcttccacgaggtgcccctgaagttc

SEQ ID NO: 32239 - RNA, 33 nt, synthetic construct
  misc_feature 1..33: note = Modulator of apoptosis 1 (92-102)
  source 1..33: mol_type = other RNA
atcttcaagcccccggaccccgacaacaccttc

SEQ ID NO: 32240 - RNA, 30 nt, synthetic construct
  misc_feature 1..30: note = DNA replication licensing factor MCM7 (276-285)
  source 1..30: mol_type = other RNA
atcttcctgcccatcctccgcaccggcttc

SEQ ID NO: 32241 - RNA, 27 nt, synthetic construct
  misc_feature 1..27: note = Putative eukaryotic translation initiation factor 2 subunit 3-like protein (314-322)
  source 1..27: mol_type = other RNA
atcttcagcaagatcgtgtccctgttc

SEQ ID NO: 32242 - RNA, 27 nt, synthetic construct
  misc_feature 1..27: note = X-ray repair cross-complementing protein 5 (134-142)
  source 1..27: mol_type = other RNA
atcttcaccgacctgagctcccgcttc

SEQ ID NO: 32243 - RNA, 27 nt, synthetic construct
  misc_feature 1..27: note = A-kinase anchor protein 11 (638-646)
  source 1..27: mol_type = other RNA
atcttcaccaacaccgtggcccgcttc

SEQ ID NO: 32244 - RNA, 27 nt, synthetic construct
  misc_feature 1..27: note = Zinc finger protein 24 (103-111)
  source 1..27: mol_type = other RNA
atcctgcccaaggagctccagacctgg

SEQ ID NO: 32245 - RNA, 30 nt, synthetic construct
  misc_feature 1..30: note = DNA polymerase epsilon catalytic subunit A (1791-1800)
  source 1..30: mol_type = other RNA
atctacgccgacaaccaggtgatgcacttc

SEQ ID NO: 32246 - RNA, 27 nt, synthetic construct
  misc_feature 1..27: note = G1/S-specific cyclin-E2 (202-210)
  source 1..27: mol_type = other RNA
atctacgcccccaagctgcaggagttc

SEQ ID NO: 32247 - RNA, 27 nt, synthetic construct
  misc_feature 1..27: note = A-kinase anchor protein 1, mitochondrial (683-691)
  source 1..27: mol_type = other RNA
atctacgcccccccgctgcccagcctc

SEQ ID NO: 32248 - RNA, 27 nt, synthetic construct
  misc_feature 1..27: note = Signal peptidase complex subunit 1 (37-45)
  source 1..27: mol_type = other RNA
atctacggctacgtggccgagcagttc

SEQ ID NO: 32249 - RNA, 30 nt, synthetic construct
  misc_feature 1..30: note = Lon protease homolog, mitochondrial (188-197)
  source 1..30: mol_type = other RNA
atctaccacaccggcaccttcgcccagatc

SEQ ID NO: 32250 - RNA, 27 nt, synthetic construct
  misc_feature 1..27: note = Heterogeneous nuclear ribonucleoprotein L (145-153)
  source 1..27: mol_type = other RNA
atctacatcgccggccaccccgccttc

SEQ ID NO: 32251 - RNA, 27 nt, synthetic construct
  misc_feature 1..27: note = Tuftelin-interacting protein 11 (168-176)
  source 1..27: mol_type = other RNA
atctacatcgaccgcggcgtggtcttc

SEQ ID NO: 32252 - RNA, 36 nt, synthetic construct
  misc_feature 1..36: note = Clathrin heavy chain 1 (882-893)
  source 1..36: mol_type = other RNA
atctacatcgacagcaacaacaaccccgagcgcttc

SEQ ID NO: 32253 - RNA, 27 nt, synthetic construct
  misc_feature 1..27: note = Deoxynucleotidyltransferase terminal-interacting protein 1 (232-240)
  source 1..27: mol_type = other RNA
atctacatcaagcacccccacctgttc

SEQ ID NO: 32254 - RNA, 27 nt, synthetic construct
  misc_feature 1..27: note = Retinoblastoma-like protein 2 (1012-1020)
  source 1..27: mol_type = other RNA
atctacatcaagcagatcaagaccttc

SEQ ID NO: 32255 - RNA, 30 nt, synthetic construct
  misc_feature 1..30: note = Activator of 90 kDa heat shock protein ATPase homolog 1 (74-83)
  source 1..30: mol_type = other RNA
atctacatcagcaccctgaagaccgagttc

SEQ ID NO: 32256 - RNA, 33 nt, synthetic construct
  misc_feature 1..33: note = Ras-related GTP-binding protein C (99-109)
  source 1..33: mol_type = other RNA
atctacaaggacgacatcagcaactccagcttc

SEQ ID NO: 32257 - RNA, 27 nt, synthetic construct
  misc_feature 1..27: note = Leucine-rich PPR motif-containing protein, mitochondrial (1129-1137)
  source 1..27: mol_type = other RNA
atctacaagcccgtgaccgacttcttc

SEQ ID NO: 32258 - RNA, 30 nt, synthetic construct
  misc_feature 1..30: note = DNA-directed RNA polymerases I, II, and III subunit RPABC3 (11-20)
  source 1..30: mol_type = other RNA
atctaccccgtggacctgggcgacaagttc

SEQ ID NO: 32259 - RNA, 30 nt, synthetic construct
  misc_feature 1..30: note = Cullin-4B (362-371)
  source 1..30: mol_type = other RNA
atctaccaggacagcttcgagcagcgcttc

SEQ ID NO: 32260 - RNA, 27 nt, synthetic construct
  misc_feature 1..27: note = Transmembrane protein 209 (509-517)
  source 1..27: mol_type = other RNA
atctaccagcgccacgtgtacaacctg

SEQ ID NO: 32261 - RNA, 27 nt, synthetic construct
  misc_feature 1..27: note = Coatomer subunit beta' (535-543)
  source 1..27: mol_type = other RNA
atctacaccagctccgtgaaccgcctg

SEQ ID NO: 32262 - RNA, 27 nt, synthetic construct
  misc_feature 1..27: note = Retinoblastoma-like protein 1 (804-812)
  source 1..27: mol_type = other RNA
atctacgtgggccgcgtcaagagcttc

SEQ ID NO: 32263 - RNA, 27 nt, synthetic construct
  misc_feature 1..27: note = Vam6/Vps39-like protein (97-105)
  source 1..27: mol_type = other RNA
atctacgtgcacgacctgctcaccttc

SEQ ID NO: 32264 - RNA, 33 nt, synthetic construct
  misc_feature 1..33: note = DDB1- and CUL4-associated factor 8 (337-347)
  source 1..33: mol_type = other RNA
atctacgtgaaccccgccaacacccaccagttc

SEQ ID NO: 32265 - RNA, 27 nt, synthetic construct
  misc_feature 1..27: note = 60S ribosomal protein L3 (361-369)
  source 1..27: mol_type = other RNA
aagttcatcgacaccaccagcaagttc

SEQ ID NO: 32266 - RNA, 27 nt, synthetic construct
  misc_feature 1..27: note = Zyxin (193-201)
  source 1..27: mol_type = other RNA
aagttcacccccgtggccagcaagttc

SEQ ID NO: 32267 - RNA, 27 nt, synthetic construct
  misc_feature 1..27: note = Protein SDA1 homolog (8-16)
  source 1..27: mol_type = other RNA
aagctgcccagcaacctcccgcagctg

SEQ ID NO: 32268 - RNA, 27 nt, synthetic construct
  misc_feature 1..27: note = Protein sel-1 homolog 1 (504-512)
  source 1..27: mol_type = other RNA
aagcaggccctgaagtacttcaacctc

SEQ ID NO: 32269 - RNA, 27 nt, synthetic construct
  misc_feature 1..27: note = Muscleblind-like protein 3 (180-188)
  source 1..27: mol_type = other RNA
aagtacttccaccccccggcccacctg

SEQ ID NO: 32270 - RNA, 27 nt, synthetic construct
  misc_feature 1..27: note = Nardilysin (660-668)
  source 1..27: mol_type = other RNA
aagtacatcgccaccgacttcaccctg

SEQ ID NO: 32271 - RNA, 27 nt, synthetic construct
  misc_feature 1..27: note = U6 snRNA-associated Sm-like protein LSm7 (17-25)
  source 1..27: mol_type = other RNA
aagtacatcgacaagaccatccgcgtg

SEQ ID NO: 32272 - RNA, 30 nt, synthetic construct
  misc_feature 1..30: note = RuvB-like 1 (285-294)
  source 1..30: mol_type = other RNA
aagtacatcgaccagggcatcgccgagctg

SEQ ID NO: 32273 - RNA, 27 nt, synthetic construct
  misc_feature 1..27: note = Short transient receptor potential channel 4-associated protein (594-602)
  source 1..27: mol_type = other RNA
aagtacatcaacaccgacgccaagttc

SEQ ID NO: 32274 - RNA, 27 nt, synthetic construct
  misc_feature 1..27: note = Interferon-induced GTP-binding protein Mx2 (223-231)
  source 1..27: mol_type = other RNA
aagtacatccagcgccagcagaccatc

SEQ ID NO: 32275 - RNA, 27 nt, synthetic construct
  misc_feature 1..27: note = Centromere protein F (1270-1278)
  source 1..27: mol_type = other RNA
aagtacatcagcggcccccacgagctg

SEQ ID NO: 32276 - RNA, 27 nt, synthetic construct
  misc_feature 1..27: note = Calcium-binding protein 39-like (247-255)
  source 1..27: mol_type = other RNA
aagtacatcagcaagcccgagaacctg

SEQ ID NO: 32277 - RNA, 27 nt, synthetic construct
  misc_feature 1..27: note = Small subunit processome component 20 homolog (1425-1433)
  source 1..27: mol_type = other RNA
aagtacatcaccgacgtggtcaagctg

SEQ ID NO: 32278 - RNA, 30 nt, synthetic construct
  misc_feature 1..30: note = Poly(A)-specific ribonuclease PARN (21-30)
  source 1..30: mol_type = other RNA
aagtacatcaccaagagcttcaacttctac

SEQ ID NO: 32279 - RNA, 33 nt, synthetic construct
  misc_feature 1..33: note = Elongation of very long chain fatty acids protein 5 (200-210)
  source 1..33: mol_type = other RNA
aagtacatcacccagggccagctgctccagttc

SEQ ID NO: 32280 - RNA, 27 nt, synthetic construct
  misc_feature 1..27: note = Phosphate carrier protein, mitochondrial (97-105)
  source 1..27: mol_type = other RNA
aagtacaagggcatcttcaacgggttc

SEQ ID NO: 32281 - RNA, 33 nt, synthetic construct
  misc_feature 1..33: note = S-adenosylmethionine synthase isoform type-2 (234-244)
  source 1..33: mol_type = other RNA
aagtacctggacgaggacaccatctaccacctc

SEQ ID NO: 32282 - RNA, 27 nt, synthetic construct
  misc_feature 1..27: note = Mitochondrial-processing peptidase subunit alpha (106-114)
  source 1..27: mol_type = other RNA
aagtacctgagcggcatcgcccacttc

SEQ ID NO: 32283 - RNA, 27 nt, synthetic construct
  misc_feature 1..27: note = DNA ligase 1 (566-574)
  source 1..27: mol_type = other RNA
aagtaccccgacatcatcagccgcatc

SEQ ID NO: 32284 - RNA, 27 nt, synthetic construct
  misc_feature 1..27: note = Gamma-aminobutyric acid receptor-associated protein-like 1 (24-32)
  source 1..27: mol_type = other RNA
aagtaccccgaccgcgtgccggtcatc

SEQ ID NO: 32285 - RNA, 27 nt, synthetic construct
  misc_feature 1..27: note = Rho guanine nucleotide exchange factor 2 (366-374)
  source 1..27: mol_type = other RNA
aagtaccccctgctcatcagccgcatc

SEQ ID NO: 32286 - RNA, 24 nt, synthetic construct
  misc_feature 1..24: note = ATP-dependent RNA helicase A (169-176)
  source 1..24: mol_type = other RNA
aagtaccccagcccgttcttcgtg

SEQ ID NO: 32287 - RNA, 27 nt, synthetic construct
  misc_feature 1..27: note = Translocating chain-associated membrane protein 1 (245-253)
  source 1..27: mol_type = other RNA
aagtaccagaagggcttcagcctgtgg

SEQ ID NO: 32288 - RNA, 27 nt, synthetic construct
  misc_feature 1..27: note = NADH dehydrogenase (ubiquinone) iron-sulfur protein 5 (91-99)
  source 1..27: mol_type = other RNA
aagtacacccccccgccccaccacatc

SEQ ID NO: 32289 - RNA, 27 nt, synthetic construct
  misc_feature 1..27: note = Heme oxygenase 2 (124-132)
  source 1..27: mol_type = other RNA
aagtacgtggagcgcatccactacatc

SEQ ID NO: 32290 - RNA, 27 nt, synthetic construct
  misc_feature 1..27: note = WD repeat-containing protein 35 (371-379)
  source 1..27: mol_type = other RNA
aagtacgtgaagggcctgatcagcatc

SEQ ID NO: 32291 - RNA, 27 nt, synthetic construct
  misc_feature 1..27: note = Zinc finger protein 195 (148-156)
  source 1..27: mol_type = other RNA
aagtacgtgaagatcttcgacaacttc

SEQ ID NO: 32292 - RNA, 30 nt, synthetic construct
  misc_feature 1..30: note = NADH dehydrogenase (ubiquinone) 1 alpha subcomplex subunit 12 (47-56)
  source 1..30: mol_type = other RNA
aagtactacgaggacaacaagcagttcttc

SEQ ID NO: 32293 - RNA, 45 nt, synthetic construct
  misc_feature 1..45: note = Phosphoglycerate kinase 1 (403-417)
  source 1..45: mol_type = other RNA
ctggagggcaaggtgctccccggggtcgacgccctgagcaacatc

SEQ ID NO: 32294 - RNA, 24 nt, synthetic construct
  misc_feature 1..24: note = Superkiller viralicidic activity 2-like 2 (586-593)
  source 1..24: mol_type = other RNA
ctggagaagagcttctaccagttc

SEQ ID NO: 32295 - RNA, 33 nt, synthetic construct
  misc_feature 1..33: note = Gamma-interferon-inducible lysosomal thiol reductase (15-25)
  source 1..33: mol_type = other RNA
ctgctcctggacgtgcccaccgccgccgtccag

SEQ ID NO: 32296 - RNA, 45 nt, synthetic construct
  misc_feature 1..45: note = Polypyrimidine tract-binding protein 1 (359-373)
  source 1..45: mol_type = other RNA
ctggtgagcaacctcaaccccgagcgcgtcaccccgcagtccctg

SEQ ID NO: 32297 - RNA, 30 nt, synthetic construct
  misc_feature 1..30: note = Translocon-associated protein subunit delta (66-75)
  source 1..30: mol_type = other RNA
ctgtacgccgacgtgggcgggaagcagttc

SEQ ID NO: 32298 - RNA, 27 nt, synthetic construct
  misc_feature 1..27: note = Nuclear factor erythroid 2-related factor 3 (413-421)
  source 1..27: mol_type = other RNA
ctgtaccacgacatcttcagccgcctc

SEQ ID NO: 32299 - RNA, 27 nt, synthetic construct
  misc_feature 1..27: note = Rho GTPase-activating protein 1 (181-189)
  source 1..27: mol_type = other RNA
ctgtacatcgtgcaccccaccatgttc

SEQ ID NO: 32300 - RNA, 30 nt, synthetic construct
  misc_feature 1..30: note = 60S ribosomal protein L19 (104-113)
  source 1..30: mol_type = other RNA
ctgtacctcaaggtgaagggcaacgtcttc

SEQ ID NO: 32301 - RNA, 33 nt, synthetic construct
  misc_feature 1..33: note = Signal transducer and activator of transcription 1-alpha/beta (667-677)
  source 1..33: mol_type = other RNA
ctgtaccccaacatcgacaaggaccacgccttc

SEQ ID NO: 32302 - RNA, 27 nt, synthetic construct
  misc_feature 1..27: note = BTB/POZ domain-containing protein KCTD20 (142-150)
  source 1..27: mol_type = other RNA
ctgtacagctccaagctctaccgcttc

SEQ ID NO: 32303 - RNA, 27 nt, synthetic construct
  misc_feature 1..27: note = Alpha-taxilin (389-397)
  source 1..27: mol_type = other RNA
ctgtacaccgagaagttcgaggagttc

SEQ ID NO: 32304 - RNA, 27 nt, synthetic construct
  misc_feature 1..27: note = 40S ribosomal protein S29 (6-14)
  source 1..27: mol_type = other RNA
ctgtactggagccacccccgcaagttc

SEQ ID NO: 32305 - RNA, 42 nt, synthetic construct
  misc_feature 1..42: note = Calmodulin (125-138)
  source 1..42: mol_type = other RNA
atgatccgcgaggccgacatcgacggcgacgggcaggtgaac

SEQ ID NO: 32306 - RNA, 27 nt, synthetic construct
  misc_feature 1..27: note = Tubulin alpha-1C chain (172-180)
  source 1..27: mol_type = other RNA
aactacgcccgcggccactacaccatc

SEQ ID NO: 32307 - RNA, 27 nt, synthetic construct
  misc_feature 1..27: note = Sorting nexin-4 (257-265)
  source 1..27: mol_type = other RNA
aactacggccgcgtgttcagcgagtgg

SEQ ID NO: 32308 - RNA, 27 nt, synthetic construct
  misc_feature 1..27: note = Abl interactor 1 (434-442)
  source 1..27: mol_type = other RNA
aactacatcgagaaggtggtcgccatc

SEQ ID NO: 32309 - RNA, 27 nt, synthetic construct
  misc_feature 1..27: note = Unconventional myosin-Id (229-237)
  source 1..27: mol_type = other RNA
aactacatccacgtgggcgcccagctg

SEQ ID NO: 32310 - RNA, 27 nt, synthetic construct
  misc_feature 1..27: note = CTD small phosphatase-like protein 2 (385-393)
  source 1..27: mol_type = other RNA
aactacatcaaggacctgaacatcctc

SEQ ID NO: 32311 - RNA, 27 nt, synthetic construct
  misc_feature 1..27: note = CWF19-like protein 1 (409-417)
  source 1..27: mol_type = other RNA
aactacaagagccaccacctgcagctc

SEQ ID NO: 32312 - RNA, 27 nt, synthetic construct
  misc_feature 1..27: note = Polyadenylate-binding protein-interacting protein 1 (111-119)
  source 1..27: mol_type = other RNA
aactacctgagccaccacctcaccatc

SEQ ID NO: 32313 - RNA, 27 nt, synthetic construct
  misc_feature 1..27: note = Methionine-tRNA ligase, cytoplasmic (152-160)
  source 1..27: mol_type = other RNA
aactacaccctggtgagccacctcatc

SEQ ID NO: 32314 - RNA, 27 nt, synthetic construct
  misc_feature 1..27: note = Ribosomal RNA processing protein 1 homolog B (648-656)
  source 1..27: mol_type = other RNA
cccttcctgccgaagcccctcttcttc

SEQ ID NO: 32315 - RNA, 27 nt, synthetic construct
  misc_feature 1..27: note = Ribosome biogenesis protein BRX1 homolog (200-208)
  source 1..27: mol_type = other RNA
cccttcgtggaccacgtcttcaccttc

SEQ ID NO: 32316 - RNA, 36 nt, synthetic construct
  misc_feature 1..36: note = 40S ribosomal protein S19 (2-13)
  source 1..36: mol_type = other RNA
cccggcgtgaccgtcaaggacgtgaaccagcaggag

SEQ ID NO: 32317 - RNA, 51 nt, synthetic construct
  misc_feature 1..51: note = Nuclease-sensitive element-binding protein 1 (304-320)
  source 1..51: mol_type = other RNA
cccccggccgagaacagctccgcccccgaggcggagcagggcggggccgag

SEQ ID NO: 32318 - RNA, 27 nt, synthetic construct
  misc_feature 1..27: note = Protein AATF (255-263)
  source 1..27: mol_type = other RNA
ccccagccggacgtgttccccctgttc

SEQ ID NO: 32319 - RNA, 30 nt, synthetic construct
  misc_feature 1..30: note = pre-mRNA 3' end processing protein WDR33 (495-504)
  source 1..30: mol_type = other RNA
ccctacgccaagccgatccccgcccagttc

SEQ ID NO: 32320 - RNA, 27 nt, synthetic construct
  misc_feature 1..27: note = Fatty acid desaturase 2 (227-235)
  source 1..27: mol_type = other RNA
ccctacaaccaccagcacgagtacttc

SEQ ID NO: 32321 - RNA, 27 nt, synthetic construct
  misc_feature 1..27: note = Methionine-tRNA ligase, cytoplasmic (273-281)
  source 1..27: mol_type = other RNA
ccctacgtgaacaacgtcccgcacctg

SEQ ID NO: 32322 - RNA, 27 nt, synthetic construct
  misc_feature 1..27: note = Surfeit locus protein 4 (23-31)
  source 1..27: mol_type = other RNA
cagtacctgccccacgtggcccgcctc

SEQ ID NO: 32323 - RNA, 33 nt, synthetic construct
  misc_feature 1..33: note = Moesin (48-58)
  source 1..33: mol_type = other RNA
cagtaccaggacaccaagggcttcagcacctgg

SEQ ID NO: 32324 - RNA, 27 nt, synthetic construct
  misc_feature 1..27: note = Protein BIVM-ERCC5 (1290-1298)
  source 1..27: mol_type = other RNA
cagtacgtggacttccacaaccagctg

SEQ ID NO: 32325 - RNA, 30 nt, synthetic construct
  misc_feature 1..30: note = Elongation factor 1-gamma (245-254)
  source 1..30: mol_type = other RNA
cgcttccccgaggagctgacccagaccttc

SEQ ID NO: 32326 - RNA, 27 nt, synthetic construct
  misc_feature 1..27: note = 60S ribosomal protein L17 (82-90)
  source 1..27: mol_type = other RNA
cgctggcccaagaagagcgccgagttc

SEQ ID NO: 32327 - RNA, 30 nt, synthetic construct
  misc_feature 1..30: note = Elongation factor 2 (264-273)
  source 1..30: mol_type = other RNA
cgctacttcgaccccgccaacggcaagttc

SEQ ID NO: 32328 - RNA, 27 nt, synthetic construct
  misc_feature 1..27: note = Casein kinase II subunit alpha (195-203)
  source 1..27: mol_type = other RNA
cgctacttcaagggccccgagctgctc

SEQ ID NO: 32329 - RNA, 27 nt, synthetic construct
  misc_feature 1..27: note = Interferon-induced helicase C domain-containing protein 1 (806-814)
  source 1..27: mol_type = other RNA
cgctacggcctggtgaccaacgagatc

SEQ ID NO: 32330 - RNA, 27 nt, synthetic construct
  misc_feature 1..27: note = Pre-mRNA-processing-splicing factor 8 (1090-1098)
  source 1..27: mol_type = other RNA
cgctacatcgaccggatccacatcttc

SEQ ID NO: 32331 - RNA, 33 nt, synthetic construct
  misc_feature 1..33: note = Alpha-enolase (99-109)
  source 1..33: mol_type = other RNA
cgctacatcagccccgaccagctggccgacctc

SEQ ID NO: 32332 - RNA, 30 nt, synthetic construct
  misc_feature 1..30: note = E3 ubiquitin-protein ligase MGRN1 (24-33)
  source 1..30: mol_type = other RNA
cgctaccccccgaagagcggcaactacttc

SEQ ID NO: 32333 - RNA, 27 nt, synthetic construct
  misc_feature 1..27: note = Mitotic checkpoint protein BUB3 (274-282)
  source 1..27: mol_type = other RNA
cgctaccccaccagcatcgcctccctg

SEQ ID NO: 32334 - RNA, 33 nt, synthetic construct
  misc_feature 1..33: note = Mitotic checkpoint protein BUB3 (274-284)
  source 1..33: mol_type = other RNA
cgctaccccaccagcatcgcctccctggccttc

SEQ ID NO: 32335 - RNA, 27 nt, synthetic construct
  misc_feature 1..27: note = Tyrosine-protein kinase BAZ1B (609-617)
  source 1..27: mol_type = other RNA
cgctaccaggacatcatccacagcatc

SEQ ID NO: 32336 - RNA, 27 nt, synthetic construct
  misc_feature 1..27: note = Histone H3.1 (54-62)
  source 1..27: mol_type = other RNA
cgctaccagaagagcaccgagctgctc

SEQ ID NO: 32337 - RNA, 27 nt, synthetic construct
  misc_feature 1..27: note = Thioredoxin-related transmembrane protein 2 (198-206)
  source 1..27: mol_type = other RNA
cgctacaccgacgtgagcacccggtac

SEQ ID NO: 32338 - RNA, 30 nt, synthetic construct
  misc_feature 1..30: note = Suppressor of fused homolog (146-155)
  source 1..30: mol_type = other RNA
cgctacgtgttccagagcgagaacaccttc

SEQ ID NO: 32339 - RNA, 27 nt, synthetic construct
  misc_feature 1..27: note = WD repeat-containing protein 36 (350-358)
  source 1..27: mol_type = other RNA
agcttctccaccgtgcacgagaagttc

SEQ ID NO: 32340 - RNA, 27 nt, synthetic construct
  misc_feature 1..27: note = Astrocytic phosphoprotein PEA-15 (61-69)
  source 1..27: mol_type = other RNA
agctacatcgagcacatcttcgagatc

SEQ ID NO: 32341 - RNA, 27 nt, synthetic construct
  misc_feature 1..27: note = Protein ELYS (236-244)
  source 1..27: mol_type = other RNA
agctacatctcccgcaccaaccagctg

SEQ ID NO: 32342 - RNA, 27 nt, synthetic construct
  misc_feature 1..27: note = Solute carrier family 23 member 2 (617-625)
  source 1..27: mol_type = other RNA
agctacctgcccatctccccgaccttc

SEQ ID NO: 32343 - RNA, 27 nt, synthetic construct
  misc_feature 1..27: note = Splicing factor 3B subunit 5 (42-50)
  source 1..27: mol_type = other RNA
agctacatgggccacttcgacctgctc

SEQ ID NO: 32344 - RNA, 27 nt, synthetic construct
  misc_feature 1..27: note = Lymphokine-activated killer T-cell-originated protein kinase (300-308)
  source 1..27: mol_type = other RNA
agctaccagaaggtgatcgagctgttc

SEQ ID NO: 32345 - RNA, 27 nt, synthetic construct
  misc_feature 1..27: note = Heterogeneous nuclear ribonucleoprotein F (193-201)
  source 1..27: mol_type = other RNA
agctactccgaccccccgctgaagttc

SEQ ID NO: 32346 - RNA, 24 nt, synthetic construct
  misc_feature 1..24: note = Signal transducer and activator of transcription 2 (259-266)
  source 1..24: mol_type = other RNA
accgccggcgccaagctgctcttc

SEQ ID NO: 32347 - RNA, 27 nt, synthetic construct
  misc_feature 1..27: note = Zinc finger protein 280C (189-197)
  source 1..27: mol_type = other RNA
accttcagcgacgtggaggcccacttc

SEQ ID NO: 32348 - RNA, 27 nt, synthetic construct
  misc_feature 1..27: note = NADH dehydrogenase (ubiquinone) 1 subunit C2 (107-115)
  source 1..27: mol_type = other RNA
acctacggcgagatcttcgagaagttc

SEQ ID NO: 32349 - RNA, 27 nt, synthetic construct
  misc_feature 1..27: note = Peroxisomal acyl-coenzyme A oxidase 3 (142-150)
  source 1..27: mol_type = other RNA
acctacatccagaagatcttccgcatg

SEQ ID NO: 32350 - RNA, 27 nt, synthetic construct
  misc_feature 1..27: note = Oxidative stress-induced growth inhibitor 2 (326-334)
  source 1..27: mol_type = other RNA
acctacatcaccagcgtgtcccgcctg

SEQ ID NO: 32351 - RNA, 27 nt, synthetic construct
  misc_feature 1..27: note = Ubiquitin carboxyl-terminal hydrolase 7 (1092-1100)
  source 1..27: mol_type = other RNA
acctacctggagaaggccatcaagatc

SEQ ID NO: 32352 - RNA, 27 nt, synthetic construct
  misc_feature 1..27: note = Iron-responsive element-binding protein 2 (410-418)
  source 1..27: mol_type = other RNA
acctacctgaaggccgtgaagctcttc

SEQ ID NO: 32353 - RNA, 30 nt, synthetic construct
  misc_feature 1..30: note = Cellular tumor antigen p53 (125-134)
  source 1..30: mol_type = other RNA
acctacagccccgccctgaacaagatgttc

SEQ ID NO: 32354 - RNA, 30 nt, synthetic construct
  misc_feature 1..30: note = StAR-related lipid transfer protein 7, mitochondrial (95-104)
  source 1..30: mol_type = other RNA
acctacaccgacgtgacgccccgccagttc

SEQ ID NO: 32355 - RNA, 33 nt, synthetic construct
  misc_feature 1..33: note = StAR-related lipid transfer protein 7, mitochondrial (95-105)
  source 1..33: mol_type = other RNA
acctacaccgacgtgacgccccgccagttcttc

SEQ ID NO: 32356 - RNA, 27 nt, synthetic construct
  misc_feature 1..27: note = Nesprin-2 (590-598)
  source 1..27: mol_type = other RNA
acctacgtggagaacctgcgcctcctg

SEQ ID NO: 32357 - RNA, 27 nt, synthetic construct
  misc_feature 1..27: note = Choline/ethanolaminephosphotransferase 1 (200-208)
  source 1..27: mol_type = other RNA
acctacgtgagcggcaccctgcgcttc

SEQ ID NO: 32358 - RNA, 33 nt, synthetic construct
  misc_feature 1..33: note = Bifunctional glutamate/proline-tRNA ligase (557-567)
  source 1..33: mol_type = other RNA
gtgttcatcgagggcgccgacgccgagaccttc

SEQ ID NO: 32359 - RNA, 27 nt, synthetic construct
  misc_feature 1..27: note = F-actin-capping protein subunit alpha-2 (30-38)
  source 1..27: mol_type = other RNA
gtgttcaacgacgtccgcctgctcctg

SEQ ID NO: 32360 - RNA, 27 nt, synthetic construct
  misc_feature 1..27: note = Nucleolysin TIAR (236-244)
  source 1..27: mol_type = other RNA
gtgttccccgagaagggctacagcttc

SEQ ID NO: 32361 - RNA, 27 nt, synthetic construct
  misc_feature 1..27: note = 3-hydroxy-3-methylglutaryl-coenzyme A reductase (105-113)
  source 1..27: mol_type = other RNA
gtgttcagcaccgtcgtgatccacttc

SEQ ID NO: 32362 - RNA, 33 nt, synthetic construct
  misc_feature 1..33: note = H/ACA ribonucleoprotein complex subunit 3 (54-64)
  source 1..33: mol_type = other RNA
gtgctgatgacccagcagccccgcccggtcctc

SEQ ID NO: 32363 - RNA, 27 nt, synthetic construct
  misc_feature 1..27: note = 40S ribosomal protein S26 (63-71)
  source 1..27: mol_type = other RNA
gtgctgcccaagctctacgtcaagctg

SEQ ID NO: 32364 - RNA, 36 nt, synthetic construct
  misc_feature 1..36: note = 60S ribosomal protein L31 (106-117)
  source 1..36: mol_type = other RNA
gtgacctacgtccccgtgaccacgttcaagaacctg

SEQ ID NO: 32365 - RNA, 27 nt, synthetic construct
  misc_feature 1..27: note = Mitochondrial folate transporter/carrier (299-307)
  source 1..27: mol_type = other RNA
gtgtacgagaacgtcagccacttcctg

SEQ ID NO: 32366 - RNA, 27 nt, synthetic construct
  misc_feature 1..27: note = Protein-lysine N-methyltransferase METTL10 (41-49)
  source 1..27: mol_type = other RNA
gtgtacgagcgcgagctgcagaccttc

SEQ ID NO: 32367 - RNA, 39 nt, synthetic construct
  misc_feature 1..39: note = Nuclear pore complex protein Nup153 (381-393)
  source 1..39: mol_type = other RNA
gtgtacttcaagcccagcctgaccccgtccggcgagttc

SEQ ID NO: 32368 - RNA, 27 nt, synthetic construct
  misc_feature 1..27: note = Cytochrome c oxidase subunit 4 isoform 1, mitochondrial (125-133)
  source 1..27: mol_type = other RNA
gtgtacggccccctgccgcagagcttc

SEQ ID NO: 32369 - RNA, 27 nt, synthetic construct
  misc_feature 1..27: note = 26S proteasome non-ATPase regulatory subunit 8 (131-139)
  source 1..27: mol_type = other RNA
gtgtacatcaagcaccccgtcagcctg

SEQ ID NO: 32370 - RNA, 30 nt, synthetic construct
  misc_feature 1..30: note = DNA replication licensing factor MCM3 (192-201)
  source 1..30: mol_type = other RNA
gtgtacaaggaccaccagaccatcaccatc

SEQ ID NO: 32371 - RNA, 30 nt, synthetic construct
  misc_feature 1..30: note = Afadin (161-170)
  source 1..30: mol_type = other RNA
gtgtacaaggacatgcccgagaccagcttc

SEQ ID NO: 32372 - RNA, 27 nt, synthetic construct
  misc_feature 1..27: note = Guanine nucleotide-binding protein-like 3-like protein (293-301)
  source 1..27: mol_type = other RNA
gtgtacctggacaagttcatccgcctc

SEQ ID NO: 32373 - RNA, 27 nt, synthetic construct
  misc_feature 1..27: note = Rho-related BTB domain-containing protein 1 (526-534)
  source 1..27: mol_type = other RNA
gtgtacctgcccaacatcaacaagatc

SEQ ID NO: 32374 - RNA, 30 nt, synthetic construct
  misc_feature 1..30: note = Pre-mRNA-splicing factor SPF27 (137-146)
  source 1..30: mol_type = other RNA
gtgtacaacgagaacctggtccacatgatc

SEQ ID NO: 32375 - RNA, 27 nt, synthetic construct
  misc_feature 1..27: note = Splicing factor 3B subunit 3 (519-527)
  source 1..27: mol_type = other RNA
gtgtaccccgacggcatccgccacatc

SEQ ID NO: 32376 - RNA, 30 nt, synthetic construct
  misc_feature 1..30: note = Proteasome-associated protein ECM29 homolog (682-691)
  source 1..30: mol_type = other RNA
gtgtaccccgagaagctggccaccaagttc

SEQ ID NO: 32377 - RNA, 27 nt, synthetic construct
  misc_feature 1..27: note = AP-5 complex subunit zeta-1 (388-396)
  source 1..27: mol_type = other RNA
gtgtaccagcacctgttcacccgcatc

SEQ ID NO: 32378 - RNA, 33 nt, synthetic construct
  misc_feature 1..33: note = Serine/arginine-rich splicing factor 1 (152-162)
  source 1..33: mol_type = other RNA
gtgtaccgcgacggcaccggggtcgtggagttc

SEQ ID NO: 32379 - RNA, 27 nt, synthetic construct
  misc_feature 1..27: note = Dynamin-2 (124-132)
  source 1..27: mol_type = other RNA
gtgtacagcccccacgtcctgaacctc

SEQ ID NO: 32380 - RNA, 33 nt, synthetic construct
  misc_feature 1..33: note = Dynamin-2 (124-134)
  source 1..33: mol_type = other RNA
gtgtacagcccccacgtcctgaacctcaccctg

SEQ ID NO: 32381 - RNA, 33 nt, synthetic construct
  misc_feature 1..33: note = E3 ubiquitin-protein ligase UBR5 (1809-1819)
  source 1..33: mol_type = other RNA
gtgtacagccagatccccgccgccgtcaagctg

SEQ ID NO: 32382 - RNA, 33 nt, synthetic construct
  misc_feature 1..33: note = Ribosome biogenesis protein BMS1 homolog (352-362)
  source 1..33: mol_type = other RNA
gtgtacgtcgacctgggcgggagccacgtgttc

SEQ ID NO: 32383 - RNA, 27 nt, synthetic construct
  misc_feature 1..27: note = BRCA1-associated protein (237-245)
  source 1..27: mol_type = other RNA
gtgtacgtcgagcgcgccgaggtgctg

SEQ ID NO: 32384 - RNA, 27 nt, synthetic construct
  misc_feature 1..27: note = AP-3 complex subunit mu-1 (274-282)
  source 1..27: mol_type = other RNA
gtgtacgtcaagcacagcatctccttc

SEQ ID NO: 32385 - RNA, 27 nt, synthetic construct
  misc_feature 1..27: note = Lipopolysaccharide-induced tumor necrosis factor-alpha factor (79-87)
  source 1..27: mol_type = other RNA
gtgtacgtccagcaccccatcaccttc

SEQ ID NO: 32386 - RNA, 27 nt, synthetic construct
  misc_feature 1..27: note = AP-3 complex subunit delta-1 (521-529)
  source 1..27: mol_type = other RNA
gtgtacgtccagaacgtggtgaagctg

SEQ ID NO: 32387 - RNA, 27 nt, synthetic construct
  misc_feature 1..27: note = Signal transducer and activator of transcription 2 (828-836)
  source 1..27: mol_type = other RNA
gtgtacgtcagccgcccctcccacttc

SEQ ID NO: 32388 - RNA, 27 nt, synthetic construct
  misc_feature 1..27: note = TraB domain-containing protein (75-83)
  source 1..27: mol_type = other RNA
gtgtacgtcgtgggcaccgcccacttc

SEQ ID NO: 32389 - RNA, 24 nt, synthetic construct
  misc_feature 1..24: note = Dystonin (673-680)
  source 1..24: mol_type = other RNA
tacgccgagaagctgcaccgcctc

SEQ ID NO: 32390 - RNA, 24 nt, synthetic construct
  misc_feature 1..24: note = Histone deacetylase 1 (87-94)
  source 1..24: mol_type = other RNA
tacagcaagcagatgcagcgcttc

SEQ ID NO: 32391 - RNA, 30 nt, synthetic construct
  misc_feature 1..30: note = Activator of 90 kDa heat shock protein ATPase homolog 1 (246-255)
  source 1..30: mol_type = other RNA
tactacttcgagggcatcaagcagaccttc

SEQ ID NO: 32392 - RNA, 30 nt, synthetic construct
  misc_feature 1..30: note = Phosphatidylinositol 4-kinase alpha (328-337)
  source 1..30: mol_type = other RNA
tactacatgaaggacctgcccaccagcttc

SEQ ID NO: 32393 - RNA, 27 nt, synthetic construct
  misc_feature 1..27: note = Eukaryotic translation initiation factor 3 subunit A (275-283)
  source 1..27: mol_type = other RNA
tactacaacaaggtgagcaccgtcttc

SEQ ID NO: 32394 - RNA, 30 nt, synthetic construct
  misc_feature 1..30: note = Eukaryotic translation initiation factor 4 gamma 1 (169-178)
  source 1..30: mol_type = other RNA
tactaccccgcccagggcgtgcagcagttc

SEQ ID NO: 32395 - RNA, 27 nt, synthetic construct
  misc_feature 1..27: note = 40S ribosomal protein S17 (20-28)
  source 1..27: mol_type = other RNA
tactacacccgcctgggcaacgacttc

SEQ ID NO: 32396 - RNA, 27 nt, synthetic construct
  misc_feature 1..27: note = Transmembrane protein 43 (102-110)
  source 1..27: mol_type = other RNA
ggccgcttcttcctgagctccgggctc

SEQ ID NO: 32397 - RNA, 30 nt, synthetic construct
  misc_feature 1..30: note = Microsomal glutathione S-transferase 3 (82-91)
  source 1..30: mol_type = other RNA
cacccccgcatcgccagcggcctggggctc

SEQ ID NO: 32398 - RNA, 27 nt, synthetic construct
  misc_feature 1..27: note = Non-specific lipid-transfer protein (373-381)
  source 1..27: mol_type = other RNA
aagatcggcgggatcttcgccttcaag

SEQ ID NO: 32399 - RNA, 24 nt, synthetic construct
  misc_feature 1..24: note = Cyclin-dependent kinase 11B (590-597)
  source 1..24: mol_type = other RNA
taccgcgcccccgagctgctcctg

SEQ ID NO: 32400 - RNA, 27 nt, synthetic construct
  misc_feature 1..27: note = Spectrin beta chain, non-erythrocytic 1 (1663-1671)
  source 1..27: mol_type = other RNA
caccccgagagcgagcgcatctccatg

SEQ ID NO: 32401 - RNA, 27 nt, synthetic construct
  misc_feature 1..27: note = Mitochondrial import receptor subunit TOM7 homolog (44-52)
  source 1..27: mol_type = other RNA
atgcccgagccgaccgtgctgagcctc

SEQ ID NO: 32402 - RNA, 27 nt, synthetic construct
  misc_feature 1..27: note = Histidine triad nucleotide-binding protein 1 (8-16)
  source 1..27: mol_type = other RNA
agcccccaggccccgacccacttcctg

SEQ ID NO: 32403 - RNA, 27 nt, synthetic construct
  misc_feature 1..27: note = Prolyl endopeptidase (534-542)
  source 1..27: mol_type = other RNA
gccgagtacctgatcaaggagggctac

SEQ ID NO: 32404 - RNA, 30 nt, synthetic construct
  misc_feature 1..30: note = Tuftelin-interacting protein 11 (216-225)
  source 1..30: mol_type = other RNA
gaggagttccagaaggagctgagccagtgg

SEQ ID NO: 32405 - RNA, 30 nt, synthetic construct
  misc_feature 1..30: note = Protein unc-93 homolog B1 (315-324)
  source 1..30: mol_type = other RNA
gaggagatcgacctgcgcagcgtgggctgg

SEQ ID NO: 32406 - RNA, 27 nt, synthetic construct
  misc_feature 1..27: note = Spatacsin (901-909)
  source 1..27: mol_type = other RNA
ggcgagttccagacccagcacagctac

SEQ ID NO: 32407 - RNA, 30 nt, synthetic construct
  misc_feature 1..30: note = HLA class I histocompatibility antigen, alpha chain E (109-118)
  source 1..30: mol_type = other RNA
agcgaggccggctcccacaccctgcagtgg

SEQ ID NO: 32408 - RNA, 27 nt, synthetic construct
  misc_feature 1..27: note = Vacuolar protein sorting-associated protein 41 homolog (103-111)
  source 1..27: mol_type = other RNA
agcgaggacggcaaggtgcaggtcttc

SEQ ID NO: 32409 - RNA, 36 nt, synthetic construct
  misc_feature 1..36: note = Plastin-3 (65-76)
  source 1..36: mol_type = other RNA
agcgagctgtccagcgagggcacccagcactcctac

SEQ ID NO: 32410 - RNA, 21 nt, synthetic construct
  misc_feature 1..21: note = GTPase-activating protein and VPS9 domain-containing protein 1 (36-42)
  source 1..21: mol_type = other RNA
gccttcagcatcctgttcaag

SEQ ID NO: 32411 - RNA, 33 nt, synthetic construct
  misc_feature 1..33: note = 40S ribosomal protein S3 (42-52)
  source 1..33: mol_type = other RNA
gccatcgcccaggcggagagcctgcgctacaag

SEQ ID NO: 32412 - RNA, 27 nt, synthetic construct
  misc_feature 1..27: note = 26S proteasome non-ATPase regulatory subunit 4 (282-290)
  source 1..27: mol_type = other RNA
gccatccgcaacgccatgggcagcctg

SEQ ID NO: 32413 - RNA, 33 nt, synthetic construct
  misc_feature 1..33: note = Exportin-2 (374-384)
  source 1..33: mol_type = other RNA
gccatctacctggtgaccagcctcgcctccaag

SEQ ID NO: 32414 - RNA, 27 nt, synthetic construct
  misc_feature 1..27: note = DNA-dependent protein kinase catalytic subunit (28-36)
  source 1..27: mol_type = other RNA
gccctggccggccaccagctcatccgc

SEQ ID NO: 32415 - RNA, 27 nt, synthetic construct
  misc_feature 1..27: note = Coatomer subunit beta (905-913)
  source 1..27: mol_type = other RNA
gccctggccaacgtgagcatcgagaag

SEQ ID NO: 32416 - RNA, 30 nt, synthetic construct
  misc_feature 1..30: note = Protein SDE2 homolog (346-355)
  source 1..30: mol_type = other RNA
gccctgttcgccaagcccctcaagggcaag

SEQ ID NO: 32417 - RNA, 27 nt, synthetic construct
  misc_feature 1..27: note = Cytochrome c oxidase subunit 2 (41-49)
  source 1..27: mol_type = other RNA
gccctgttcctcaccctgaccacgaag

SEQ ID NO: 32418 - RNA, 27 nt, synthetic construct
  misc_feature 1..27: note = ADP-ribosylation factor 5 (7-15)
  source 1..27: mol_type = other RNA
gccctgttcagccgcatcttcggcaag

SEQ ID NO: 32419 - RNA, 27 nt, synthetic construct
  misc_feature 1..27: note = Similar to 60S ribosomal protein L7 (172-180)
  source 1..27: mol_type = other RNA
gccctgatcgcccgcagcctcggcaag

SEQ ID NO: 32420 - RNA, 30 nt, synthetic construct
  misc_feature 1..30: note = Regulation of nuclear pre-mRNA domain-containing protein 2 (166-175)
  source 1..30: mol_type = other RNA
gccctgatcgaggagctcctgctgtacaag

SEQ ID NO: 32421 - RNA, 33 nt, synthetic construct
  misc_feature 1..33: note = Mitochondrial import receptor subunit TOM5 homolog (36-46)
  source 1..33: mol_type = other RNA
gccctgctccgcgtgacccccttcatcctgaag

SEQ ID NO: 32422 - RNA, 27 nt, synthetic construct
  misc_feature 1..27: note = ADP/ATP translocase 3 (38-46)
  source 1..27: mol_type = other RNA
gccctgaacttcgccttcaaggacaag

SEQ ID NO: 32423 - RNA, 42 nt, synthetic construct
  misc_feature 1..42: note = Heat shock protein HSP 90-beta (536-549)
  source 1..42: mol_type = other RNA
gccctgcgcgacaacagcaccatgggctacatgatggccaag

SEQ ID NO: 32424 - RNA, 33 nt, synthetic construct
  misc_feature 1..33: note = Vimentin (43-53)
  source 1..33: mol_type = other RNA
gccctgcgccccagcacctcccggagcctctac

SEQ ID NO: 32425 - RNA, 36 nt, synthetic construct
  misc_feature 1..36: note = 60S ribosomal protein L36 (2-13)
  source 1..36: mol_type = other RNA
gccctgcgctaccccatggccgtgggcctcaacaag

SEQ ID NO: 32426 - RNA, 27 nt, synthetic construct
  misc_feature 1..27: note = Heterogeneous nuclear ribonucleoprotein U-like protein 1 (367-375)
  source 1..27: mol_type = other RNA
gccctgtacccccacgtgctcgtcaag

SEQ ID NO: 32427 - RNA, 30 nt, synthetic construct
  misc_feature 1..30: note = 60S ribosomal protein L6 (61-70)
  source 1..30: mol_type = other RNA
gccatgtacagccgcaaggccatgtacaag

SEQ ID NO: 32428 - RNA, 27 nt, synthetic construct
  misc_feature 1..27: note = HCG15392, isoform CRA_b (43-51)
  source 1..27: mol_type = other RNA
gcccccgccccgcccaaggcggaggcc

SEQ ID NO: 32429 - RNA, 33 nt, synthetic construct
  misc_feature 1..33: note = Myotrophin (63-73)
  source 1..33: mol_type = other RNA
gcccccgacaagcaccacatcaccccgctgctc

SEQ ID NO: 32430 - RNA, 24 nt, synthetic construct
  misc_feature 1..24: note = Actin, cytoplasmic 1 (14-21)
  source 1..24: mol_type = other RNA
gcccccgaggagcacccggtgctg

SEQ ID NO: 32431 - RNA, 27 nt, synthetic construct
  misc_feature 1..27: note = CCR4-NOT transcription complex subunit 1 (239-247)
  source 1..27: mol_type = other RNA
gcccccttcctgcgcaacgtggagctc

SEQ ID NO: 32432 - RNA, 30 nt, synthetic construct
  misc_feature 1..30: note = Protein PRRC2A (692-701)
  source 1..30: mol_type = other RNA
gccccccaggccccgcccccccccccgaag

SEQ ID NO: 32433 - RNA, 33 nt, synthetic construct
  misc_feature 1..33: note = 60S ribosomal protein L13 (47-57)
  source 1..33: mol_type = other RNA
gccccccgcccggccagcggccccatccggccc

SEQ ID NO: 32434 - RNA, 30 nt, synthetic construct
  misc_feature 1..30: note = NSFL1 cofactor p47 (66-75)
  source 1..30: mol_type = other RNA
gcccccagcgacaaccgcgtgacctccttc

SEQ ID NO: 32435 - RNA, 27 nt, synthetic construct
  misc_feature 1..27: note = 60S ribosomal protein L13 (2-10)
  source 1..27: mol_type = other RNA
gcccccagccgcaacggcatggtgctg

SEQ ID NO: 32436 - RNA, 48 nt, synthetic construct
  misc_feature 1..48: note = Heat shock protein HSP 90-beta (534-549)
  source 1..48: mol_type = other RNA
gcccaggccctgcgcgacaacagcaccatgggctacatgatggcgaag

SEQ ID NO: 32437 - RNA, 24 nt, synthetic construct
  misc_feature 1..24: note = DNA-directed RNA polymerase II subunit RPB2 (365-372)
  source 1..24: mol_type = other RNA
gcccgcggccccatccagatcctg

SEQ ID NO: 32438 - RNA, 24 nt, synthetic construct
  misc_feature 1..24: note = Interferon regulatory factor 2-binding protein 1 (263-270)
  source 1..24: mol_type = other RNA
gcccgccccccgggctacgagttc

SEQ ID NO: 32439 - RNA, 27 nt, synthetic construct
  misc_feature 1..27: note = Serine/threonine-protein kinase 4 (270-278)
  source 1..27: mol_type = other RNA
gccaccgccacccagctgctccagcac

SEQ ID NO: 32440 - RNA, 27 nt, synthetic construct
  misc_feature 1..27: note = DNA-dependent protein kinase catalytic subunit (4080-4088)
  source 1..27: mol_type = other RNA
gccaccgaccccaacatcctgggccgc

SEQ ID NO: 32441 - RNA, 30 nt, synthetic construct
  misc_feature 1..30: note = S-formylglutathione hydrolase (124-133)
  source 1..30: mol_type = other RNA
gccaccgaggacccctggaagaccaactac

SEQ ID NO: 32442 - RNA, 27 nt, synthetic construct
  misc_feature 1..27: note = Probable ATP-dependent RNA helicase DDX6 (267-275)
  source 1..27: mol_type = other RNA
gccaccttccccctgagcgtgcagaag

SEQ ID NO: 32443 - RNA, 30 nt, synthetic construct
  misc_feature 1..30: note = General transcription factor II-I repeat domain-containing protein 2B (163-172)
  source 1..30: mol_type = other RNA
gccaccctgaagtggatcctcgagaacaag

SEQ ID NO: 32444 - RNA, 30 nt, synthetic construct
  misc_feature 1..30: note = Phosphatidylinositol-binding clathrin assembly protein (29-38)
  source 1..30: mol_type = other RNA
gccaccacccacgagatcatgggccccaag

SEQ ID NO: 32445 - RNA, 33 nt, synthetic construct
  misc_feature 1..33: note = Tubulin alpha-1C chain (340-350)
  source 1..33: mol_type = other RNA
gccacctacgcccccgtgatcagcgcggagaag

SEQ ID NO: 32446 - RNA, 33 nt, synthetic construct
  misc_feature 1..33: note = E3 ubiquitin/ISG15 ligase TRIM25 (592-602)
  source 1..33: mol_type = other RNA
gccgtggccgacaaggtccacctgatgtacaag

SEQ ID NO: 32447 - RNA, 36 nt, synthetic construct
  misc_feature 1..36: note = Omega-amidase NIT2 (98-109)
  source 1..36: mol_type = other RNA
gccgtgttcggccccgacgggaccctgctcgccaag

SEQ ID NO: 32448 - RNA, 27 nt, synthetic construct
  misc_feature 1..27: note = Farnesyl pyrophosphate synthase (332-340)
  source 1..27: mol_type = other RNA
gccgtgttcctgggcctcgcccgcaag

SEQ ID NO: 32449 - RNA, 33 nt, synthetic construct
  misc_feature 1..33: note = COP9 signalosome complex subunit 8 (4-14)
  source 1..33: mol_type = other RNA
gccgtgatggccgagagcgcgttctccttcaag

SEQ ID NO: 32450 - RNA, 33 nt, synthetic construct
  misc_feature 1..33: note = Asparagine-tRNA ligase, cytoplasmic (180-190)
  source 1..33: mol_type = other RNA
gccgtgtacggcatgctgaacctcacccccaag

SEQ ID NO: 32451 - RNA, 33 nt, synthetic construct
  misc_feature 1..33: note = Ras GTPase-activating protein-binding protein 2 (54-64)
  source 1..33: mol_type = other RNA
gccgtgtacggccagaacgacatccaccacaag

SEQ ID NO: 32452 - RNA, 30 nt, synthetic construct
  misc_feature 1..30: note = ATP-dependent RNA helicase DHX8 (1045-1054)
  source 1..30: mol_type = other RNA
gccgtgtacaacagctggaagaacaacaag

SEQ ID NO: 32453 - RNA, 33 nt, synthetic construct
  misc_feature 1..33: note = E3 ubiquitin/ISG15 ligase TRIM25 (55-65)
  source 1..33: mol_type = other RNA
gccgtgtaccaggcccgcccccagctgcacaag

SEQ ID NO: 32454 - RNA, 33 nt, synthetic construct
  misc_feature 1..33: note = DNA damage-binding protein 1 (869-879)
  source 1..33: mol_type = other RNA
gccgtgtacagcatggtcgagttcaacggcaag

SEQ ID NO: 32455 - RNA, 27 nt, synthetic construct
  misc_feature 1..27: note = Glucose-6-phosphate 1-dehydrogenase (246-254)
  source 1..27: mol_type = other RNA
gccgtgtacaccaagatgatgaccaag

SEQ ID NO: 32456 - RNA, 30 nt, synthetic construct
  misc_feature 1..30: note = Glucose-6-phosphate 1-dehydrogenase (246-255)
  source 1..30: mol_type = other RNA
gccgtgtacaccaagatgatgaccaagaag

SEQ ID NO: 32457 - RNA, 27 nt, synthetic construct
  misc_feature 1..27: note = COP9 signalosome complex subunit 3 (239-247)
  source 1..27: mol_type = other RNA
gcctaccacgagctggcccaggtgtac

SEQ ID NO: 32458 - RNA, 90 nt, synthetic construct
  misc_feature 1..90: note = 60 kDa heat shock protein, mitochondrial (315-344)
  source 1..90: mol_type = other RNA
gacatggccatcgccaccggcggggcggtgttcggcgaggaggggctgaccctcaacctggaggacgtccagccccacgacctgggcaag

SEQ ID NO: 32459 - RNA, 24 nt, synthetic construct
  misc_feature 1..24: note = Protein FAM136A (11-18)
  source 1..24: mol_type = other RNA
gaggccgtggagagcatggtcaag

SEQ ID NO: 32460 - RNA, 27 nt, synthetic construct
  misc_feature 1..27: note = 60S ribosomal protein L4 (213-221)
  source 1..27: mol_type = other RNA
gaggacaacggcatcatcaaggccttc

SEQ ID NO: 32461 - RNA, 33 nt, synthetic construct
  misc_feature 1..33: note = Basic leucine zipper and W2 domain-containing protein 2 (51-61)
  source 1..33: mol_type = other RNA
ttcctggacagcaccggctcccgcctcgactac

SEQ ID NO: 32462 - RNA, 30 nt, synthetic construct
  misc_feature 1..30: note = Rab GDP dissociation inhibitor beta (29-38)
  source 1..30: mol_type = other RNA
ttcgtgtacaagggcgggaagatctacaag

SEQ ID NO: 32463 - RNA, 27 nt, synthetic construct
  misc_feature 1..27: note = Protein PRRC2C (2390-2398)
  source 1..27: mol_type = other RNA
ttctacatggacaccagccacctgttc

SEQ ID NO: 32464 - RNA, 24 nt, synthetic construct
  misc_feature 1..24: note = Probable ATP-dependent RNA helicase DDX5 (58-65)
  source 1..24: mol_type = other RNA
ttctaccaggagcaccccgacctg

SEQ ID NO: 32465 - RNA, 36 nt, synthetic construct
  misc_feature 1..36: note = Peroxisomal multifunctional enzyme type 2 (235-246)
  source 1..36: mol_type = other RNA
ggcctgttcgaggtgggggccggctggatcgggaag

SEQ ID NO: 32466 - RNA, 27 nt, synthetic construct
  misc_feature 1..27: note = RNA cytidine acetyltransferase (821-829)
  source 1..27: mol_type = other RNA
ggcctgttcaaccgcatcatccggaag

SEQ ID NO: 32467 - RNA, 36 nt, synthetic construct
  misc_feature 1..36: note = Transgelin-2 (142-153)
  source 1..36: mol_type = other RNA
ggcctgttcagcggggaccccaactggttcccgaag

SEQ ID NO: 32468 - RNA, 27 nt, synthetic construct
  misc_feature 1..27: note = Heterogeneous nuclear ribonucleoprotein Q (269-277)
  source 1..27: mol_type = other RNA
ggcctgaccgacgtgatcctctaccac

SEQ ID NO: 32469 - RNA, 27 nt, synthetic construct
  misc_feature 1..27: note = Malignant T-cell-amplified sequence 1 (174-182)
  source 1..27: mol_type = other RNA
ggcctgtggcacatgaagacctacaag

SEQ ID NO: 32470 - RNA, 30 nt, synthetic construct
  misc_feature 1..30: note = Synaptic vesicle membrane protein VAT-1 homolog (282-291)
  source 1..30: mol_type = other RNA
ggcatggccaacctgctcaccgggcccaag

SEQ ID NO: 32471 - RNA, 27 nt, synthetic construct
  misc_feature 1..27: note = Reticulocalbin-2 (4-12)
  source 1..27: mol_type = other RNA
ggcccccgcaccgccgccctggggctc

SEQ ID NO: 32472 - RNA, 30 nt, synthetic construct
  misc_feature 1..30: note = Superkiller viralicidic activity 2-like 2 (368-377)
  source 1..30: mol_type = other RNA
ggcaccaaggggcccagcaacgtgttcaag

SEQ ID NO: 32473 - RNA, 30 nt, synthetic construct
  misc_feature 1..30: note = Calnexin (78-87)
  source 1..30: mol_type = other RNA
ggcaccctgagcgggtggatcctctccaag

SEQ ID NO: 32474 - RNA, 27 nt, synthetic construct
  misc_feature 1..27: note = Parafibromin (313-321)
  source 1..27: mol_type = other RNA
ggcacctaccacgggatgaccctgaag

SEQ ID NO: 32475 - RNA, 27 nt, synthetic construct
  misc_feature 1..27: note = Transcription factor 12 (417-425)
  source 1..27: mol_type = other RNA
cacgccgtgggccccagcacctccctg

SEQ ID NO: 32476 - RNA, 30 nt, synthetic construct
  misc_feature 1..30: note = GMP synthase (glutamine-hydrolyzing) (436-445)
  source 1..30: mol_type = other RNA
caccccttcccgggccccgggctggccatc

SEQ ID NO: 32477 - RNA, 27 nt, synthetic construct
  misc_feature 1..27: note = Superkiller viralicidic activity 2-like 2 (807-815)
  source 1..27: mol_type = other RNA
caccccctgcacaacgacccgaacctc

SEQ ID NO: 32478 - RNA, 27 nt, synthetic construct
  misc_feature 1..27: note = Staphylococcal nuclease domain-containing protein 1 (254-262)
  source 1..27: mol_type = other RNA
caccccaacggcaacatcaccgagctg

SEQ ID NO: 32479 - RNA, 33 nt, synthetic construct
  misc_feature 1..33: note = Extended synaptotagmin-1 (652-662)
  source 1..33: mol_type = other RNA
cacgtgctggaggcccaggacctcatcgccaag

SEQ ID NO: 32480 - RNA, 27 nt, synthetic construct
  misc_feature 1..27: note = Pre-mRNA-processing factor 19 (442-450)
  source 1..27: mol_type = other RNA
atcttcgaccagagcggcacctacctg

SEQ ID NO: 32481 - RNA, 30 nt, synthetic construct
  misc_feature 1..30: note = Heterogeneous nuclear ribonucleoprotein C-like 1 (20-29)
  source 1..30: mol_type = other RNA
atcggcaacctgaacaccctcgtggtcaag

SEQ ID NO: 32482 - RNA, 27 nt, synthetic construct
  misc_feature 1..27: note = Catenin alpha-1 (90-98)
  source 1..27: mol_type = other RNA
atcctgcagaagaacgtgcccatcctc

SEQ ID NO: 32483 - RNA, 27 nt, synthetic construct
  misc_feature 1..27: note = 60S ribosomal protein L10a (82-90)
  source 1..27: mol_type = other RNA
atcccccacatggacatcgaggccctg

SEQ ID NO: 32484 - RNA, 33 nt, synthetic construct
  misc_feature 1..33: note = Spectrin beta chain, non-erythrocytic 1 (2247-2257)
  source 1..33: mol_type = other RNA
atcccctaccacagcgaggtgccggtctccctg

SEQ ID NO: 32485 - RNA, 27 nt, synthetic construct
  misc_feature 1..27: note = Bifunctional glutamate/proline-tRNA ligase (415-423)
  source 1..27: mol_type = other RNA
atccgcaagccctacatctgggagtac

SEQ ID NO: 32486 - RNA, 27 nt, synthetic construct
  misc_feature 1..27: note = Histone deacetylase 1 (79-87)
  source 1..27: mol_type = other RNA
atccgccccgacaacatgagcgagtac

SEQ ID NO: 32487 - RNA, 27 nt, synthetic construct
  misc_feature 1..27: note = DNA replication licensing factor MCM5 (289-297)
  source 1..27: mol_type = other RNA
atccgcagctcctacatccgggtgctg

SEQ ID NO: 32488 - RNA, 30 nt, synthetic construct
  misc_feature 1..30: note = Spectrin beta chain, non-erythrocytic 4 (145-154)
  source 1..30: mol_type = other RNA
atcgtggacggcaaccaccgcctgaccctc

SEQ ID NO: 32489 - RNA, 27 nt, synthetic construct
  misc_feature 1..27: note = Cytochrome c oxidase subunit 2 (209-217)
  source 1..27: mol_type = other RNA
atcgtgctggagctcatccccctgaag

SEQ ID NO: 32490 - RNA, 27 nt, synthetic construct
  misc_feature 1..27: note = Mitotic checkpoint protein BUB3 (234-242)
  source 1..27: mol_type = other RNA
atctaccccgtgaacgccatcagcttc

SEQ ID NO: 32491 - RNA, 27 nt, synthetic construct
  misc_feature 1..27: note = Non-POU domain-containing octamer-binding protein (10-18)
  source 1..27: mol_type = other RNA
aaggccggcgaggtgttcatccacaag

SEQ ID NO: 32492 - RNA, 45 nt, synthetic construct
  misc_feature 1..45: note = ATP synthase-coupling factor 6, mitochondrial (94-108)
  source 1..45: mol_type = other RNA
aagttcgaggaccccaagttcgaggtgatcgagaagccgcaggcc

SEQ ID NO: 32493 - RNA, 27 nt, synthetic construct
  misc_feature 1..27: note = 60S ribosomal protein L10 (156-164)
  source 1..27: mol_type = other RNA
aagttcaagttccccggccgccagaag

SEQ ID NO: 32494 - RNA, 27 nt, synthetic construct
  misc_feature 1..27: note = Coatomer subunit beta' (413-421)
  source 1..27: mol_type = other RNA
aagatcttcaagaacttcaaggagaag

SEQ ID NO: 32495 - RNA, 27 nt, synthetic construct
  misc_feature 1..27: note = Elongation factor 2 (571-579)
  source 1..27: mol_type = other RNA
aagaagagcgaccccgtggtctcctac

SEQ ID NO: 32496 - RNA, 27 nt, synthetic construct
  misc_feature 1..27: note = Apoptosis inhibitor 5 (238-246)
  source 1..27: mol_type = other RNA
aagctgttcgacaagctcctggagtac

SEQ ID NO: 32497 - RNA, 33 nt, synthetic construct
  misc_feature 1..33: note = COX assembly mitochondrial protein 2 homolog (69-79)
  source 1..33: mol_type = other RNA
aagctgttcaaccccccggaggagagcgagaag

SEQ ID NO: 32498 - RNA, 27 nt, synthetic construct
  misc_feature 1..27: note = 116 kDa U5 small nuclear ribonucleoprotein component (713-721)
  source 1..27: mol_type = other RNA
aagctgggcgagttcttccagaccaag

SEQ ID NO: 32499 - RNA, 27 nt, synthetic construct
  misc_feature 1..27: note = 40S ribosomal protein S5 (86-94)
  source 1..27: mol_type = other RNA
aagctgatgaccgtgcgcatcgtcaag

SEQ ID NO: 32500 - RNA, 27 nt, synthetic construct
  misc_feature 1..27: note = 60S ribosomal protein L23a (115-123)
  source 1..27: mol_type = other RNA
aagctgtacgacatcgacgtggccaag

SEQ ID NO: 32501 - RNA, 39 nt, synthetic construct
  misc_feature 1..39: note = ATP-citrate synthase (650-662)
  source 1..39: mol_type = other RNA
aagctgtaccgccccggcagcgtggcctacgtctcccgg

SEQ ID NO: 32502 - RNA, 30 nt, synthetic construct
  misc_feature 1..30: note = Signal recognition particle 54 kDa protein (433-442)
  source 1..30: mol_type = other RNA
aagatgggcgggatcaagggcctgttcaag

SEQ ID NO: 32503 - RNA, 27 nt, synthetic construct
  misc_feature 1..27: note = Charged multivesicular body protein 5 (9-17)
  source 1..27: mol_type = other RNA
aagcccaaggccccgccccccagcctg

SEQ ID NO: 32504 - RNA, 66 nt, synthetic construct
  misc_feature 1..66: note = 60 kDa heat shock protein, mitochondrial (153-174)
  source 1..66: mol_type = other RNA
aagcccctggtgatcatcgccgaggacgtcgacggcgaggccctcagcaccctggtgctgaaccgc

SEQ ID NO: 32505 - RNA, 27 nt, synthetic construct
  misc_feature 1..27: note = Lysine-specific histone demethylase 1A (200-208)
  source 1..27: mol_type = other RNA
aagcccgtgagcctgggccaggccctc

SEQ ID NO: 32506 - RNA, 39 nt, synthetic construct
  misc_feature 1..39: note = Histone H4 (80-92)
  source 1..39: mol_type = other RNA
aagaccgtgaccgccatggacgtcgtgtacgccctgaag

SEQ ID NO: 32507 - RNA, 36 nt, synthetic construct
  misc_feature 1..36: note = High mobility group protein B1 (76-87)
  source 1..36: mol_type = other RNA
aagacctacatccccccgaagggcgagaccaagaag

SEQ ID NO: 32508 - RNA, 27 nt, synthetic construct
  misc_feature 1..27: note = GMP synthase (glutamine-hydrolyzing) (112-120)
  source 1..27: mol_type = other RNA
aaggtgttcggcgggaccgtccacaag

SEQ ID NO: 32509 - RNA, 27 nt, synthetic construct
  misc_feature 1..27: note = Splicing factor 3B subunit 1 (554-562)
  source 1..27: mol_type = other RNA
aaggtgatcgaccgcatcctgtacaag

SEQ ID NO: 32510 - RNA, 27 nt, synthetic construct
  misc_feature 1..27: note = SRSF protein kinase 1 (4-12)
  source 1..27: mol_type = other RNA
aaggtgctggccctccaggcccgcaag

SEQ ID NO: 32511 - RNA, 33 nt, synthetic construct
  misc_feature 1..33: note = RANBP2-like and GRIP domain-containing protein 2 (608-618)
  source 1..33: mol_type = other RNA
aaggtgctgcccctcctgaagatcatcaagaag

SEQ ID NO: 32512 - RNA, 33 nt, synthetic construct
  misc_feature 1..33: note = Cytochrome c oxidase subunit 4 isoform 1, mitochondrial (149-159)
  source 1..33: mol_type = other RNA
aaggtgaaccccatccagggcctggccagcaag

SEQ ID NO: 32513 - RNA, 27 nt, synthetic construct
  misc_feature 1..27: note = PC4 and SFRS1-interacting protein (228-236)
  source 1..27: mol_type = other RNA
aaggtgagccaggtcatcatggagaag

SEQ ID NO: 32514 - RNA, 30 nt, synthetic construct
  misc_feature 1..30: note = Rab GDP dissociation inhibitor alpha (103-112)
  source 1..30: mol_type = other RNA
aaggtggtcgagggcagcttcgtgtacaag

SEQ ID NO: 32515 - RNA, 27 nt, synthetic construct
  misc_feature 1..27: note = Lymphocyte cytosolic protein 2 (468-476)
  source 1..27: mol_type = other RNA
aaggtgtacaacatccagatccgctac

SEQ ID NO: 32516 - RNA, 27 nt, synthetic construct
  misc_feature 1..27: note = ATP-dependent RNA helicase A (169-177)
  source 1..27: mol_type = other RNA
aagtaccccagcccgttcttcgtgttc

SEQ ID NO: 32517 - RNA, 57 nt, synthetic construct
  misc_feature 1..57: note = Vimentin (79-97)
  source 1..57: mol_type = other RNA
ctgctccaggacagcgtggacttctccctggccgacgccatcaacaccgagttcaag

SEQ ID NO: 32518 - RNA, 27 nt, synthetic construct
  misc_feature 1..27: note = Actin, gamma-enteric smooth muscle (200-208)
  source 1..27: mol_type = other RNA
ctgcccgacggccaggtgatcaccatc

SEQ ID NO: 32519 - RNA, 27 nt, synthetic construct
  misc_feature 1..27: note = Polypyrimidine tract-binding protein 3 (123-131)
  source 1..27: mol_type = other RNA
ctgcccttcggcaaggtgaccaacctc

SEQ ID NO: 32520 - RNA, 27 nt, synthetic construct
  misc_feature 1..27: note = Histone deacetylase 1 (373-381)
  source 1..27: mol_type = other RNA
ctgccccacgccccgggcgtgcagatg

SEQ ID NO: 32521 - RNA, 30 nt, synthetic construct
  misc_feature 1..30: note = Eukaryotic translation initiation factor 4B (90-99)
  source 1..30: mol_type = other RNA
ctgcccaagagcccgccctacaccgccttc

SEQ ID NO: 32522 - RNA, 27 nt, synthetic construct
  misc_feature 1..27: note = DNA polymerase epsilon subunit 3 (10-18)
  source 1..27: mol_type = other RNA
ctgcccaacgccgtgatcacccgcatc

SEQ ID NO: 32523 - RNA, 30 nt, synthetic construct
  misc_feature 1..30: note = Sorting nexin-1 (270-279)
  source 1..30: mol_type = other RNA
ctgccccgcgccgtgggcacccagaccctc

SEQ ID NO: 32524 - RNA, 27 nt, synthetic construct
  misc_feature 1..27: note = T-complex protein 1 subunit theta (260-268)
  source 1..27: mol_type = other RNA
ctgccccgcctcaccccgcccgtgctg

SEQ ID NO: 32525 - RNA, 27 nt, synthetic construct
  misc_feature 1..27: note = Phosphate carrier protein, mitochondrial (340-348)
  source 1..27: mol_type = other RNA
ctgccccgcccgcccccccccgagatg

SEQ ID NO: 32526 - RNA, 27 nt, synthetic construct
  misc_feature 1..27: note = Protein flightless-1 homolog (881-889)
  source 1..27: mol_type = other RNA
ctgccccgccagccgcccatgagcctc

SEQ ID NO: 32527 - RNA, 27 nt, synthetic construct
  misc_feature 1..27: note = Cytochrome c oxidase subunit 2 (78-86)
  source 1..27: mol_type = other RNA
ctgcccagcctccgcatcctgtacatg

SEQ ID NO: 32528 - RNA, 27 nt, synthetic construct
  misc_feature 1..27: note = BAG family molecular chaperone regulator 3 (188-196)
  source 1..27: mol_type = other RNA
ctgcccagctccggccgcagctccctc

SEQ ID NO: 32529 - RNA, 27 nt, synthetic construct
  misc_feature 1..27: note = Staphylococcal nuclease domain-containing protein 1 (747-755)
  source 1..27: mol_type = other RNA
ctgcccagcacccgcctcggcaccctg

SEQ ID NO: 32530 - RNA, 27 nt, synthetic construct
  misc_feature 1..27: note = Beta-enolase (102-110)
  source 1..27: mol_type = other RNA
ctgcccgtgccggccttcaacgtcatc

SEQ ID NO: 32531 - RNA, 27 nt, synthetic construct
  misc_feature 1..27: note = RNA-binding protein 4 (186-194)
  source 1..27: mol_type = other RNA
ctgaccgagcagtacaacgagcagtac

SEQ ID NO: 32532 - RNA, 27 nt, synthetic construct
  misc_feature 1..27: note = 60S ribosomal protein L13 (150-158)
  source 1..27: mol_type = other RNA
ctgaccggccccgtgatgccggtccgc

SEQ ID NO: 32533 - RNA, 27 nt, synthetic construct
  misc_feature 1..27: note = Proteasome activator complex subunit 3 (29-37)
  source 1..27: mol_type = other RNA
ctggtggccaacttcttccccaagaag

SEQ ID NO: 32534 - RNA, 27 nt, synthetic construct
  misc_feature 1..27: note = CD99 antigen (1-9)
  source 1..27: mol_type = other RNA
atggcccgcggcgccgcgctggccctc

SEQ ID NO: 32535 - RNA, 33 nt, synthetic construct
  misc_feature 1..33: note = Destrin (115-125)
  source 1..33: mol_type = other RNA
atgatctacgccagctccaaggacgccatcaag

SEQ ID NO: 32536 - RNA, 36 nt, synthetic construct
  misc_feature 1..36: note = Destrin (115-126)
  source 1..36: mol_type = other RNA
atgatctacgccagctccaaggacgccatcaagaag

SEQ ID NO: 32537 - RNA, 33 nt, synthetic construct
  misc_feature 1..33: note = Peroxiredoxin-1 (21-31)
  source 1..33: mol_type = other RNA
atgcccgacggccagttcaaggacatcagcctg

SEQ ID NO: 32538 - RNA, 27 nt, synthetic construct
  misc_feature 1..27: note = E3 ubiquitin-protein ligase HECTD1 (409-417)
  source 1..27: mol_type = other RNA
atgccccgcggcgtggtcgtgaccctg

SEQ ID NO: 32539 - RNA, 33 nt, synthetic construct
  misc_feature 1..33: note = Double-stranded RNA-binding protein Staufen homolog 1 (482-492)
  source 1..33: mol_type = other RNA
atgccccgcaccggcaacgggccgatgagcgtg

SEQ ID NO: 32540 - RNA, 27 nt, synthetic construct
  misc_feature 1..27: note = 60S acidic ribosomal protein P2 (1-9)
  source 1..27: mol_type = other RNA
atgcgctacgtggccagctacctgctc

SEQ ID NO: 32541 - RNA, 27 nt, synthetic construct
  misc_feature 1..27: note = Eukaryotic translation initiation factor 1A, Y-chromosomal (87-95)
  source 1..27: mol_type = other RNA
aacaaggccgacgtgatcctgaagtac

SEQ ID NO: 32542 - RNA, 27 nt, synthetic construct
  misc_feature 1..27: note = ATP-dependent RNA helicase DDX24 (498-506)
  source 1..27: mol_type = other RNA
aaccccaagcgccagaccctggtgttc

SEQ ID NO: 32543 - RNA, 30 nt, synthetic construct
  misc_feature 1..30: note = Transgelin-2 (158-167)
  source 1..30: mol_type = other RNA
aacccccgcaacttcagcgacaaccagctg

SEQ ID NO: 32544 - RNA, 27 nt, synthetic construct
  misc_feature 1..27: note = 5'-3' exoribonuclease 2 (456-464)
  source 1..27: mol_type = other RNA
aacccccgccaggccgcctacgagatg

SEQ ID NO: 32545 - RNA, 27 nt, synthetic construct
  misc_feature 1..27: note = Lysine-specific histone demethylase 1A (407-415)
  source 1..27: mol_type = other RNA
aaccgcctgctcgaggccaccagctac

SEQ ID NO: 32546 - RNA, 27 nt, synthetic construct
  misc_feature 1..27: note = Nesprin-2 (5548-5556)
  source 1..27: mol_type = other RNA
aaccgccccgagttcatcaccgagttc

SEQ ID NO: 32547 - RNA, 27 nt, synthetic construct
  misc_feature 1..27: note = Protein DEK (115-123)
  source 1..27: mol_type = other RNA
aaccgccccggcaccgtgagctccctg

SEQ ID NO: 32548 - RNA, 27 nt, synthetic construct
  misc_feature 1..27: note = ATP-dependent RNA helicase DDX3X (644-652)
  source 1..27: mol_type = other RNA
aacagcgacggctacgggggcaactac

SEQ ID NO: 32549 - RNA, 24 nt, synthetic construct
  misc_feature 1..24: note = 40S ribosomal protein S26 (108-115)
  source 1..24: mol_type = other RNA
ccccgcccgccccccaagcccatg

SEQ ID NO: 32550 - RNA, 27 nt, synthetic construct
  misc_feature 1..27: note = Tubulin beta chain (43-51)
  source 1..27: mol_type = other RNA
cagctggaccgcatcagcgtgtactac

SEQ ID NO: 32551 - RNA, 27 nt, synthetic construct
  misc_feature 1..27: note = Isoleucine-tRNA ligase, cytoplasmic (165-173)
  source 1..27: mol_type = other RNA
cagctgtacgacaagggcctcgtgtac

SEQ ID NO: 32552 - RNA, 27 nt, synthetic construct
  misc_feature 1..27: note = Filamin-A (2017-2025)
  source 1..27: mol_type = other RNA
cagcccgccagcttcgccgtgtccctg

SEQ ID NO: 32553 - RNA, 27 nt, synthetic construct
  misc_feature 1..27: note = Lysine-specific histone demethylase 1A (574-582)
  source 1..27: mol_type = other RNA
cagcccatcaccccgggccccagcatc

SEQ ID NO: 32554 - RNA, 27 nt, synthetic construct
  misc_feature 1..27: note = Pericentriolar material 1 protein (1892-1900)
  source 1..27: mol_type = other RNA
cagcccaacccgctgcccctccgcctg

SEQ ID NO: 32555 - RNA, 30 nt, synthetic construct
  misc_feature 1..30: note = Cytochrome c oxidase subunit 4 isoform 1, mitochondrial (93-102)
  source 1..30: mol_type = other RNA
cagagcttcgacaaggagtgggtggccaag

SEQ ID NO: 32556 - RNA, 30 nt, synthetic construct
  misc_feature 1..30: note = Nucleoporin SEH1 (246-255)
  source 1..30: mol_type = other RNA
cgcatcttcaccctgaagcccgtgcggaag

SEQ ID NO: 32557 - RNA, 30 nt, synthetic construct
  misc_feature 1..30: note = L-lactate dehydrogenase B chain (270-279)
  source 1..30: mol_type = other RNA
cgcatccaccccgtgagcaccatggtcaag

SEQ ID NO: 32558 - RNA, 27 nt, synthetic construct
  misc_feature 1..27: note = DNA replication licensing factor MCM6 (131-139)
  source 1..27: mol_type = other RNA
cgcatcatcgagaaggtgatccaccgg

SEQ ID NO: 32559 - RNA, 36 nt, synthetic construct
  misc_feature 1..36: note = Reticulon-4 (62-73)
  source 1..36: mol_type = other RNA
cgcatctacaagggcgtgatccaggccatccagaag

SEQ ID NO: 32560 - RNA, 27 nt, synthetic construct
  misc_feature 1..27: note = DNA (cytosine-5)-methyltransferase 1 (1459-1467)
  source 1..27: mol_type = other RNA
cgcctgttcggcaacatcctcgacaag

SEQ ID NO: 32561 - RNA, 30 nt, synthetic construct
  misc_feature 1..30: note = 26S protease regulatory subunit 6B (342-351)
  source 1..30: mol_type = other RNA
cgcctgatcttcagcaccatcacctccaag

SEQ ID NO: 32562 - RNA, 33 nt, synthetic construct
  misc_feature 1..33: note = 26S protease regulatory subunit 6A (11-21)
  source 1..33: mol_type = other RNA
cgcctgctcgacagcgagatcaagatcatgaag

SEQ ID NO: 32563 - RNA, 39 nt, synthetic construct
  misc_feature 1..39: note = Heat shock 70 kDa protein 4L (128-140)
  source 1..39: mol_type = other RNA
cgcctgatgaacgagaccaccgccgtggccctcgcgtac

SEQ ID NO: 32564 - RNA, 30 nt, synthetic construct
  misc_feature 1..30: note = DNA-dependent protein kinase catalytic subunit (659-668)
  source 1..30: mol_type = other RNA
cgcctgcccctcatcagcggcttctacaag

SEQ ID NO: 32565 - RNA, 30 nt, synthetic construct
  misc_feature 1..30: note = Vimentin (69-78)
  source 1..30: mol_type = other RNA
cgcctgcggagctccgtgcccggcgtccgc

SEQ ID NO: 32566 - RNA, 27 nt, synthetic construct
  misc_feature 1..27: note = Cytoskeleton-associated protein 2 (369-377)
  source 1..27: mol_type = other RNA
cgcctgagcgagtggaaggccggcaag

SEQ ID NO: 32567 - RNA, 30 nt, synthetic construct
  misc_feature 1..30: note = Coiled-coil domain-containing protein 124 (192-201)
  source 1..30: mol_type = other RNA
cgcctgagccagctcaagcagctgctgaag

SEQ ID NO: 32568 - RNA, 27 nt, synthetic construct
  misc_feature 1..27: note = E3 ubiquitin-protein ligase HECTD1 (170-178)
  source 1..27: mol_type = other RNA
cgcctggtggacctccccatcagcaag

SEQ ID NO: 32569 - RNA, 27 nt, synthetic construct
  misc_feature 1..27: note = Serine-threonine kinase receptor-associated protein (290-298)
  source 1..27: mol_type = other RNA
cgcctgtggcagaccgtggtcggcaag

SEQ ID NO: 32570 - RNA, 39 nt, synthetic construct
  misc_feature 1..39: note = Mitotic checkpoint protein BUB3 (40-52)
  source 1..39: mol_type = other RNA
cgcctgtacgacgtgcccgccaacagcatgcggctcaag

SEQ ID NO: 32571 - RNA, 27 nt, synthetic construct
  misc_feature 1..27: note = DNA damage-binding protein 1 (889-897)
  source 1..27: mol_type = other RNA
cgcctgtacgagtggaccaccgagaag

SEQ ID NO: 32572 - RNA, 36 nt, synthetic construct
  misc_feature 1..36: note = 60S ribosomal protein L23a (129-140)
  source 1..36: mol_type = other RNA
cgccccgacggcgagaagaaggcctacgtgcggctg

SEQ ID NO: 32573 - RNA, 27 nt, synthetic construct
  misc_feature 1..27: note = 26S proteasome non-ATPase regulatory subunit 12 (417-425)
  source 1..27: mol_type = other RNA
cgccccaaggacccgaacaacctgctc

SEQ ID NO: 32574 - RNA, 27 nt, synthetic construct
  misc_feature 1..27: note = Ataxin-3 (188-196)
  source 1..27: mol_type = other RNA
cgccccaagctgatcggcgaggagctc

SEQ ID NO: 32575 - RNA, 33 nt, synthetic construct
  misc_feature 1..33: note = Poly(rC)-binding protein 2 (183-193)
  source 1..33: mol_type = other RNA
cgccccaagccgagctccagccccgtgatcttc

SEQ ID NO: 32576 - RNA, 27 nt, synthetic construct
  misc_feature 1..27: note = 40S ribosomal protein S11 (132-140)
  source 1..27: mol_type = other RNA
cgccccctgagcaagaccgtgcggttc

SEQ ID NO: 32577 - RNA, 27 nt, synthetic construct
  misc_feature 1..27: note = Splicing factor 3B subunit 2 (222-230)
  source 1..27: mol_type = other RNA
cgcccccggggcccgcccccccccccg

SEQ ID NO: 32578 - RNA, 33 nt, synthetic construct
  misc_feature 1..33: note = Vimentin (23-33)
  source 1..33: mol_type = other RNA
cgccccagctccagccggtcctacgtgaccacc

SEQ ID NO: 32579 - RNA, 27 nt, synthetic construct
  misc_feature 1..27: note = Elongation factor 1-alpha 1 (240-248)
  source 1..27: mol_type = other RNA
cgccccaccgacaagccgctgcggctc

SEQ ID NO: 32580 - RNA, 30 nt, synthetic construct
  misc_feature 1..30: note = Translation initiation factor eIF-2B subunit delta (385-394)
  source 1..30: mol_type = other RNA
cgcccctggctggagggccggcacaccctc

SEQ ID NO: 32581 - RNA, 30 nt, synthetic construct
  misc_feature 1..30: note = Polyglutamine-binding protein 1 (242-251)
  source 1..30: mol_type = other RNA
cgcccctacccgagccccggcgccgtgctg

SEQ ID NO: 32582 - RNA, 30 nt, synthetic construct
  misc_feature 1..30: note = Transcriptional repressor p66-alpha (257-266)
  source 1..30: mol_type = other RNA
cgcagcatcccccagtccgccacctggaag

SEQ ID NO: 32583 - RNA, 30 nt, synthetic construct
  misc_feature 1..30: note = Constitutive coactivator of PPAR-gamma-like protein 1 (313-322)
  source 1..30: mol_type = other RNA
cgcaccgacgacaaggtgatccggttcaag

SEQ ID NO: 32584 - RNA, 33 nt, synthetic construct
  misc_feature 1..33: note = Ras GTPase-activating protein-binding protein 1 (247-257)
  source 1..33: mol_type = other RNA
cgcaccttcagctgggcctccgtgaccagcaag

SEQ ID NO: 32585 - RNA, 27 nt, synthetic construct
  misc_feature 1..27: note = 42 kda non-muscle cytoplasmic actin (2-10)
  source 1..27: mol_type = other RNA
cgcgtggcccccgaggagcacccggtc

SEQ ID NO: 32586 - RNA, 39 nt, synthetic construct
  misc_feature 1..39: note = Heterogeneous nuclear ribonucleoprotein C-like 1 (17-29)
  source 1..39: mol_type = other RNA
cgcgtgttcatcggcaacctgaacaccctcgtcgtgaag

SEQ ID NO: 32587 - RNA, 36 nt, synthetic construct
  misc_feature 1..36: note = Elongation factor 2 (415-426)
  source 1..36: mol_type = other RNA
cgcgtgttcagcggcctggtctccaccgggctcaag

SEQ ID NO: 32588 - RNA, 27 nt, synthetic construct
  misc_feature 1..27: note = Paired amphipathic helix protein Sin3a (1263-1271)
  source 1..27: mol_type = other RNA
cgcgtgaagtacggcaccgtcttcaag

SEQ ID NO: 32589 - RNA, 36 nt, synthetic construct
  misc_feature 1..36: note = Prohibitin (117-128)
  source 1..36: mol_type = other RNA
cgcgtgctgcccagcatcaccaccgagatcctcaag

SEQ ID NO: 32590 - RNA, 39 nt, synthetic construct
  misc_feature 1..39: note = Coatomer subunit beta (327-339)
  source 1..39: mol_type = other RNA
cgcgtgctgagcacccccgacctcgaggtccggaagaag

SEQ ID NO: 32591 - RNA, 27 nt, synthetic construct
  misc_feature 1..27: note = Filamin-A (2022-2030)
  source 1..27: mol_type = other RNA
cgcgtgcgggtcagcggccaggggctg

SEQ ID NO: 32592 - RNA, 27 nt, synthetic construct
  misc_feature 1..27: note = Pre-mRNA-processing-splicing factor 8 (444-452)
  source 1..27: mol_type = other RNA
cgcgtgagctaccagaagctgctcaag

SEQ ID NO: 32593 - RNA, 48 nt, synthetic construct
  misc_feature 1..48: note = Ribose-5-phosphate isomerase (219-234)
  source 1..48: mol_type = other RNA
cgcgtgtacttcggcatgcaggacgggagcgtcaacatgcgggagaag

SEQ ID NO: 32594 - RNA, 27 nt, synthetic construct
  misc_feature 1..27: note = Antigen KI-67 (420-428)
  source 1..27: mol_type = other RNA
agcgagaacctgctcggcaagcagttc

SEQ ID NO: 32595 - RNA, 30 nt, synthetic construct
  misc_feature 1..30: note = Heterogeneous nuclear ribonucleoproteins A2/B1 (73-82)
  source 1..30: mol_type = other RNA
agcatcgacggccgcgtggtcgagcccaag

SEQ ID NO: 32596 - RNA, 30 nt, synthetic construct
  misc_feature 1..30: note = Transmembrane and coiled-coil domain-containing protein 1 (107-116)
  source 1..30: mol_type = other RNA
agcatcttcgacggccgcgtggtcgccaag

SEQ ID NO: 32597 - RNA, 33 nt, synthetic construct
  misc_feature 1..33: note = Phosphoglycerate kinase 1 (87-97)
  source 1..33: mol_type = other RNA
agcctgctcggcaaggacgtgctgttcctgaag

SEQ ID NO: 32598 - RNA, 27 nt, synthetic construct
  misc_feature 1..27: note = Dynein light chain roadblock-type 1 (51-59)
  source 1..27: mol_type = other RNA
agcctgatgcactccttcatcctcaag

SEQ ID NO: 32599 - RNA, 30 nt, synthetic construct
  misc_feature 1..30: note = Vimentin (430-439)
  source 1..30: mol_type = other RNA
agcctgcccctcgtggacacccactccaag

SEQ ID NO: 32600 - RNA, 42 nt, synthetic construct
  misc_feature 1..42: note = Vimentin (51-64)
  source 1..42: mol_type = other RNA
agcctgtacgcctccagccccggcggggtgtacgccacccgc

SEQ ID NO: 32601 - RNA, 27 nt, synthetic construct
  misc_feature 1..27: note = Fatty acid synthase (2326-2334)
  source 1..27: mol_type = other RNA
agccccgccccgacccacaactccctg

SEQ ID NO: 32602 - RNA, 27 nt, synthetic construct
  misc_feature 1..27: note = Ataxin-2-like protein (516-524)
  source 1..27: mol_type = other RNA
agccccgcctccccgaagatcagcctg

SEQ ID NO: 32603 - RNA, 27 nt, synthetic construct
  misc_feature 1..27: note = Chromosome alignment-maintaining phosphoprotein 1 (618-626)
  source 1..27: mol_type = other RNA
agccccgagcagtcccgcaacgtgctg

SEQ ID NO: 32604 - RNA, 27 nt, synthetic construct
  misc_feature 1..27: note = Rho guanine nucleotide exchange factor 1 (10-18)
  source 1..27: mol_type = other RNA
agccccggcccgtcccgccccgggctg

SEQ ID NO: 32605 - RNA, 30 nt, synthetic construct
  misc_feature 1..30: note = Isocitrate dehydrogenase (NADP) cytoplasmic (28-37)
  source 1..30: mol_type = other RNA
agccccaacggcaccatccgcaacatcctg

SEQ ID NO: 32606 - RNA, 27 nt, synthetic construct
  misc_feature 1..27: note = Trifunctional enzyme subunit alpha, mitochondrial (56-64)
  source 1..27: mol_type = other RNA
agccccaactccaaggtgaacaccctg

SEQ ID NO: 32607 - RNA, 27 nt, synthetic construct
  misc_feature 1..27: note = Cleavage stimulation factor subunit 2 (153-161)
  source 1..27: mol_type = other RNA
agcccccaggaggcccgcaacatgctg

SEQ ID NO: 32608 - RNA, 27 nt, synthetic construct
  misc_feature 1..27: note = Poly(rC)-binding protein 1 (173-181)
  source 1..27: mol_type = other RNA
agcccccagggccgcgtgatgaccatc

SEQ ID NO: 32609 - RNA, 27 nt, synthetic construct
  misc_feature 1..27: note = E3 ubiquitin-protein ligase TRIP12 (1954-1962)
  source 1..27: mol_type = other RNA
agcccccgcctgccggtgggcgggttc

SEQ ID NO: 32610 - RNA, 27 nt, synthetic construct
  misc_feature 1..27: note = Cytoplasmic dynein 1 light intermediate chain 1 (398-406)
  source 1..27: mol_type = other RNA
agcccccgcgtgccgggcgggtccccc

SEQ ID NO: 32611 - RNA, 30 nt, synthetic construct
  misc_feature 1..30: note = Telomeric repeat-binding factor 2-interacting protein 1 (154-163)
  source 1..30: mol_type = other RNA
agcccctccagcgtgaccggcaacgccctg

SEQ ID NO: 32612 - RNA, 27 nt, synthetic construct
  misc_feature 1..27: note = Transketolase (386-394)
  source 1..27: mol_type = other RNA
agccgccccgagaacgccatcatctac

SEQ ID NO: 32613 - RNA, 24 nt, synthetic construct
  misc_feature 1..24: note = Heterogeneous nuclear ribonucleoprotein K (81-88)
  source 1..24: mol_type = other RNA
agctccggccccgagcgcatcctg

SEQ ID NO: 32614 - RNA, 36 nt, synthetic construct
  misc_feature 1..36: note = RNA-binding protein FUS (44-55)
  source 1..36: mol_type = other RNA
agcaccgacacctccggctacgggcagagctcctac

SEQ ID NO: 32615 - RNA, 27 nt, synthetic construct
  misc_feature 1..27: note = DNA-dependent protein kinase catalytic subunit (1861-1869)
  source 1..27: mol_type = other RNA
agcaccttcgacacccagatcacgaag

SEQ ID NO: 32616 - RNA, 27 nt, synthetic construct
  misc_feature 1..27: note = 60S ribosomal protein L10a (153-161)
  source 1..27: mol_type = other RNA
agcaccatcaagttccagatgaagaag

SEQ ID NO: 32617 - RNA, 27 nt, synthetic construct
  misc_feature 1..27: note = Cytoskeleton-associated protein 5 (430-438)
  source 1..27: mol_type = other RNA
agcaccctgcccaagtccctcctgaag

SEQ ID NO: 32618 - RNA, 33 nt, synthetic construct
  misc_feature 1..33: note Dolichyl-diphosphooligosaccharide-proteinosyltransferase subunit 2 (254-264)
  source 1..33: mol_type = other RNA
agcgtggcctccgccgcggccgtcctgagccac

SEQ ID NO: 32619 - RNA, 27 nt, synthetic construct
  misc_feature 1..27: note = Cytoplasmic FMR1-interacting protein 1 (504-512)
  source 1..27: mol_type = other RNA
agcgtgttcaaccacgccatccgccac

SEQ ID NO: 32620 - RNA, 27 nt, synthetic construct
  misc_feature 1..27: note = Far upstream element-binding protein 3 (77-85)
  source 1..27: mol_type = other RNA
agcgtgtacggctacggggtccagaag

SEQ ID NO: 32621 - RNA, 27 nt, synthetic construct
  misc_feature 1..27: note = YTH domain-containing protein 1 (570-578)
  source 1..27: mol_type = other RNA
agctacaacgactacgtgcgcgagttc

SEQ ID NO: 32622 - RNA, 27 nt, synthetic construct
  misc_feature 1..27: note = RNA binding motif protein, X-linked-like-1 (280-288)
  source 1..27: mol_type = other RNA
agctaccgcgactcctacgagagctac

SEQ ID NO: 32623 - RNA, 27 nt, synthetic construct
  misc_feature 1..27: note = Nuclear pore complex protein Nup98-Nup96 (1516-1524)
  source 1..27: mol_type = other RNA
accgccgaccccctggactaccgcctc

SEQ ID NO: 32624 - RNA, 27 nt, synthetic construct
  misc_feature 1..27: note = Fatty acid synthase (1230-1238)
  source 1..27: mol_type = other RNA
accgccgtggagaacatgcccagcctg

SEQ ID NO: 32625 - RNA, 30 nt, synthetic construct
  misc_feature 1..30: note = T-complex protein 1 subunit theta (13-22)
  source 1..30: mol_type = other RNA
accgcctacggccccaacgggatgaacaag

SEQ ID NO: 32626 - RNA, 27 nt, synthetic construct
  misc_feature 1..27: note = Eukaryotic translation elongation factor 1 epsilon-1 (114-122)
  source 1..27: mol_type = other RNA
accctggccgacatcctcctgtactac

SEQ ID NO: 32627 - RNA, 27 nt, synthetic construct
  misc_feature 1..27: note = Coatomer subunit beta' (828-836)
  source 1..27: mol_type = other RNA
acccccaacgaggagcgcaacgtgatg

SEQ ID NO: 32628 - RNA, 27 nt, synthetic construct
  misc_feature 1..27: note = Extended synaptotagmin-1 (769-777)
  source 1..27: mol_type = other RNA
accccccgcccgaccgccgccgagctg

SEQ ID NO: 32629 - RNA, 27 nt, synthetic construct
  misc_feature 1..27: note = Serine/arginine repetitive matrix protein 2 (2049-2057)
  source 1..27: mol_type = other RNA
acccccgtggccggcagccagtccctg

SEQ ID NO: 32630 - RNA, 27 nt, synthetic construct
  misc_feature 1..27: note = Exportin-1 (61-69)
  source 1..27: mol_type = other RNA
acccgcgtggacaccatcctggagttc

SEQ ID NO: 32631 - RNA, 30 nt, synthetic construct
  misc_feature 1..30: note = TATA-binding protein-associated factor 2N (41-50)
  source 1..30: mol_type = other RNA
accaccgacagctcctacggccagaactac

SEQ ID NO: 32632 - RNA, 30 nt, synthetic construct
  misc_feature 1..30: note = Retinoblastoma-associated protein (408-417)
  source 1..30: mol_type = other RNA
accgtgaaccccaaggagagcatcctgaag

SEQ ID NO: 32633 - RNA, 27 nt, synthetic construct
  misc_feature 1..27: note = Prosaposin (51-59)
  source 1..27: mol_type = other RNA
accgtgtggaacaagcccaccgtcaag

SEQ ID NO: 32634 - RNA, 24 nt, synthetic construct
  misc_feature 1..24: note = Zinc phosphodiesterase ELAC protein 2 (581-588)
  source 1..24: mol_type = other RNA
gtggagcgcctgatcagctccctc

SEQ ID NO: 32635 - RNA, 24 nt, synthetic construct
  misc_feature 1..24: note = Antigen KI-67 (75-82)
  source 1..24: mol_type = other RNA
gtgatcgacgagcccgtccgcctg

SEQ ID NO: 32636 - RNA, 39 nt, synthetic construct
  misc_feature 1..39: note = Myb-binding protein 1A (543-555)
  source 1..39: mol_type = other RNA
gtgatccgcagcccctccctgctccagagcggcgccaag

SEQ ID NO: 32637 - RNA, 30 nt, synthetic construct
  misc_feature 1..30: note = Filamin-A (331-340)
  source 1..30: mol_type = other RNA
gtgctgttcgccggccagcacatcgccaag

SEQ ID NO: 32638 - RNA, 27 nt, synthetic construct
  misc_feature 1..27: note = Barrier-to-autointegration factor (45-53)
  source 1..27: mol_type = other RNA
gtgctgggccagttcctcgtcctgaag

SEQ ID NO: 32639 - RNA, 27 nt, synthetic construct
  misc_feature 1..27: note = Protein flightless-1 homolog (179-187)
  source 1..27: mol_type = other RNA
gtgctgaacggcaaccccctcctgcac

SEQ ID NO: 32640 - RNA, 27 nt, synthetic construct
  misc_feature 1..27: note = Signal recognition particle subunit SRP68 (453-461)
  source 1..27: mol_type = other RNA
gtgctgtacgaccgcgtcctcaagtac

SEQ ID NO: 32641 - RNA, 27 nt, synthetic construct
  misc_feature 1..27: note = 60S ribosomal protein L7 (83-91)
  source 1..27: mol_type = other RNA
gtgcccgccgagccgaagctggccttc

SEQ ID NO: 32642 - RNA, 27 nt, synthetic construct
  misc_feature 1..27: note = Protein FAM219A (74-82)
  source 1..27: mol_type = other RNA
gtgcccaacaagggctacagctccctg

SEQ ID NO: 32643 - RNA, 30 nt, synthetic construct
  misc_feature 1..30: note = Long-chain-fatty-acid-CoA ligase 4 (576-585)
  source 1..30: mol_type = other RNA
gtgcccaaccagaagcgcctgaccctcctg

SEQ ID NO: 32644 - RNA, 27 nt, synthetic construct
  misc_feature 1..27: note = ATP-dependent RNA helicase DDX24 (199-207)
  source 1..27: mol_type = other RNA
gtgccccgcccggtcctgcgggccctc

SEQ ID NO: 32645 - RNA, 27 nt, synthetic construct
  misc_feature 1..27: note = Ankyrin repeat and KH domain-containing protein 1 (748-756)
  source 1..27: mol_type = other RNA
gtgccccgcgtcccgacccacaccctg

SEQ ID NO: 32646 - RNA, 27 nt, synthetic construct
  misc_feature 1..27: note = Nuclear pore complex protein Nup153 (582-590)
  source 1..27: mol_type = other RNA
gtgcccgtcgccaagaccgccgagctg

SEQ ID NO: 32647 - RNA, 27 nt, synthetic construct
  misc_feature 1..27: note = 60S ribosomal protein L27a (104-112)
  source 1..27: mol_type = other RNA
gtgcgcagcggctactacaaggtcctg

SEQ ID NO: 32648 - RNA, 27 nt, synthetic construct
  misc_feature 1..27: note = RNA-binding protein 4 (197-205)
  source 1..27: mol_type = other RNA
gtgcgcaccccctacaccatgagctac

SEQ ID NO: 32649 - RNA, 33 nt, synthetic construct
  misc_feature 1..33: note = Tripeptidyl-peptidase 1 (68-78)
  source 1..33: mol_type = other RNA
gtgagcgacccctccagcccgcagtacggcaag

SEQ ID NO: 32650 - RNA, 33 nt, synthetic construct
  misc_feature 1..33: note = Vimentin (31-41)
  source 1..33: mol_type = other RNA
gtgaccaccagcacgcgcacctactccctgggc

SEQ ID NO: 32651 - RNA, 30 nt, synthetic construct
  misc_feature 1..30: note = 60S ribosomal protein L8 (15-24)
  source 1..30: mol_type = other RNA
gtggtcttccgcgacccctaccggttcaag

SEQ ID NO: 32652 - RNA, 24 nt, synthetic construct
  misc_feature 1..24: note = Non-specific lipid-transfer protein (16-23)
  source 1..24: mol_type = other RNA
gtggtcggcgtggggatgaccaag

SEQ ID NO: 32653 - RNA, 30 nt, synthetic construct
  misc_feature 1..30: note = Filamin-A (391-400)
  source 1..30: mol_type = other RNA
gtggtcatccaggaccccatgggccagaag

SEQ ID NO: 32654 - RNA, 30 nt, synthetic construct
  misc_feature 1..30: note = Barrier-to-autointegration factor (44-53)
  source 1..30: mol_type = other RNA
gtggtcctgggccagttcctcgtgctgaag

SEQ ID NO: 32655 - RNA, 63 nt, synthetic construct
  misc_feature 1..63: note = Glyceraldehyde-3-phosphate dehydrogenase (87-107)
  source 1..63: mol_type = other RNA
tggggcgacgccggggccgagtacgtggtcgagagcaccggcgtgttcaccacgatggagaag

SEQ ID NO: 32656 - RNA, 27 nt, synthetic construct
  misc_feature 1..27: note = Tubulin beta chain (179-187)
  source 1..27: mol_type = other RNA
taccccgaccgcatcatgaacaccttc

SEQ ID NO: 32657 - RNA, 27 nt, synthetic construct
  misc_feature 1..27: note = RNA-binding protein 14 (249-257)
  source 1..27: mol_type = other RNA
taccgcgcccagcccagcgcctccctg

SEQ ID NO: 32658 - RNA, 27 nt, synthetic construct
  misc_feature 1..27: note = RNA-binding protein 14 (237-245)
  source 1..27: mol_type = other RNA
taccgcgcccagcccagcgtgtccctg

SEQ ID NO: 32659 - RNA, 27 nt, synthetic construct
  misc_feature 1..27: note = RNA-binding protein 14 (540-548)
  source 1..27: mol_type = other RNA
taccgcggccagcccgggaacgcctac

SEQ ID NO: 32660 - RNA, 24 nt, synthetic construct
  misc_feature 1..24: note = Cyclin-dependent kinase 9 (194-201)
  source 1..24: mol_type = other RNA
taccgccccccggagctgctcctg

SEQ ID NO: 32661 - RNA, 27 nt, synthetic construct
  misc_feature 1..27: note = Pre-mRNA-processing-splicing factor 8 (1470-1478)
  source 1..27: mol_type = other RNA
taccgcaccgacatgatccaggccctg

SEQ ID NO: 32662 - RNA, 36 nt, synthetic construct
  misc_feature 1..36: note = Plectin (3167-3178)
  source 1..36: mol_type = other RNA
tacagcgacccctccaccggcgagccggccacctac

SEQ ID NO: 32663 - RNA, 27 nt, synthetic construct
  misc_feature 1..27: note = Protein SON (1132-1140)
  source 1..27: mol_type = other RNA
tacaccgacagctacaccgacacgtac

SEQ ID NO: 32664 - RNA, 33 nt, synthetic construct
  misc_feature 1..33: note = HLA class I histocompatibility antigen, B-38 alpha chain (140-150)
  source 1..33: mol_type = other RNA
ttcgcctacgacggcaaggactacatcgccctg

SEQ ID NO: 32665 - RNA, 27 nt, synthetic construct
  misc_feature 1..27: note = Proteasome subunit beta type-7 (202-210)
  source 1..27: mol_type = other RNA
atcgccgccggcatcttcaacgacctg

SEQ ID NO: 32666 - RNA, 27 nt, synthetic construct
  misc_feature 1..27: note = 40S ribosomal protein S17 (38-46)
  source 1..27: mol_type = other RNA
atcgccatcatccccagcaagaagctg

SEQ ID NO: 32667 - RNA, 27 nt, synthetic construct
  misc_feature 1..27: note = Neudesin (21-29)
  source 1..27: mol_type = other RNA
gccctggcccccggcctcccgaccgcg

SEQ ID NO: 32668 - RNA, 30 nt, synthetic construct
  misc_feature 1..30: note = TRAF2 and NCK-interacting protein kinase (1170-1179)
  source 1..30: mol_type = other RNA
gcctgggcccccaagccgtaccacaagttc

SEQ ID NO: 32669 - RNA, 27 nt, synthetic construct
  misc_feature 1..27: note = Neuroblast differentiation-associated protein AHNAK (739-747)
  source 1..27: mol_type = other RNA
gacgtgcacggccccgactggcacctg

SEQ ID NO: 32670 - RNA, 27 nt, synthetic construct
  misc_feature 1..27: note = Prelamin-A/C (53-61)
  source 1..27: mol_type = other RNA
gaggagctggacttccagaagaacatc

SEQ ID NO: 32671 - RNA, 27 nt, synthetic construct
  misc_feature 1..27: note = Protein flightless-1 homolog (1158-1166)
  source 1..27: mol_type = other RNA
gagtacatgaagcacacccgcctgttc

SEQ ID NO: 32672 - RNA, 27 nt, synthetic construct
  misc_feature 1..27: note = Non-POU domain-containing octamer-binding protein (374-382)
  source 1..27: mol_type = other RNA
ttccccgacgcccgcgagcaggagatc

SEQ ID NO: 32673 - RNA, 24 nt, synthetic construct
  misc_feature 1..24: note = Probable RNA-binding protein 23 (351-358)
  source 1..24: mol_type = other RNA
ttccccgacggcgaccaggagctg

SEQ ID NO: 32674 - RNA, 27 nt, synthetic construct
  misc_feature 1..27: note = Tubulin beta-6 chain (159-167)
  source 1..27: mol_type = other RNA
ttccccgaccgcatcatgaacaccttc

SEQ ID NO: 32675 - RNA, 27 nt, synthetic construct
  misc_feature 1..27: note = Actin-related protein 2/3 complex subunit 3 (103-111)
  source 1..27: mol_type = other RNA
ttccccatcccgggcgagcccgggttc

SEQ ID NO: 32676 - RNA, 27 nt, synthetic construct
  misc_feature 1..27: note = Solute carrier family 35 member F5 (288-296)
  source 1..27: mol_type = other RNA
ttccccagcaactccggcgaccgcttc

SEQ ID NO: 32677 - RNA, 30 nt, synthetic construct
  misc_feature 1..30: note = Myoferlin (286-295)
  source 1..30: mol_type = other RNA
ttcgtgtacgacgagcccggccacgccgtc

SEQ ID NO: 32678 - RNA, 30 nt, synthetic construct
  misc_feature 1..30: note = HLA class I histocompatibility antigen, B-44 alpha chain (216-225)
  source 1..30: mol_type = other RNA
caccccatcagcgaccacgaggtgaccctg

SEQ ID NO: 32679 - RNA, 24 nt, synthetic construct
  misc_feature 1..24: note = Fructose-bisphosphate aldolase B (192-199)
  source 1..24: mol_type = other RNA
atccccgacggcgaccacgacctg

SEQ ID NO: 32680 - RNA, 27 nt, synthetic construct
  misc_feature 1..27: note = Neutral cholesterol ester hydrolase 1 (34-42)
  source 1..27: mol_type = other RNA
aagtacttcctgaagcccgaggtgctc

SEQ ID NO: 32681 - RNA, 27 nt, synthetic construct
  misc_feature 1..27: note = Vacuolar protein sorting-associated protein 13B (2853-2861)
  source 1..27: mol_type = other RNA
ctgcccgacccgatcatcatccacctc

SEQ ID NO: 32682 - RNA, 27 nt, synthetic construct
  misc_feature 1..27: note = FERM domain-containing protein 6 (550-558)
  source 1..27: mol_type = other RNA
ctgtaccagaaggacttcctccgcatc

SEQ ID NO: 32683 - RNA, 27 nt, synthetic construct
  misc_feature 1..27: note = Microtubule-associated protein RP/EB family member 1 (50-58)
  source 1..27: mol_type = other RNA
atgctgttccccggcagcatcgccctc

SEQ ID NO: 32684 - RNA, 27 nt, synthetic construct
  misc_feature 1..27: note = Cyclic AMP-dependent transcription factor ATF-4 (108-116)
  source 1..27: mol_type = other RNA
atgcccgacgacctgctcaccaccctg

SEQ ID NO: 32685 - RNA, 24 nt, synthetic construct
  misc_feature 1..24: note = Neuroblast differentiation-associated protein AHNAK (820-827)
  source 1..24: mol_type = other RNA
atgcccgacgtggacctgcacctc

SEQ ID NO: 32686 - RNA, 27 nt, synthetic construct
  misc_feature 1..27: note = Transcription factor AP-1 (42-50)
  source 1..27: mol_type = other RNA
atggtggcccccgccgtcgcgagcgtg

SEQ ID NO: 32687 - RNA, 27 nt, synthetic construct
  misc_feature 1..27: note = Chloride intracellular channel protein 4 (190-198)
  source 1..27: mol_type = other RNA
aacctgctccccaagctgcacatcgtg

SEQ ID NO: 32688 - RNA, 27 nt, synthetic construct
  misc_feature 1..27: note = Growth arrest and DNA damage-inducible protein GADD45 alpha (48-56)
  source 1..27: mol_type = other RNA
aacgtggaccccgacaacgtcgtgctg

SEQ ID NO: 32689 - RNA, 27 nt, synthetic construct
  misc_feature 1..27: note = Probable C-mannosyltransferase DPY19L4 (693-701)
  source 1..27: mol_type = other RNA
aactacagcccctacgtgaactacttc

SEQ ID NO: 32690 - RNA, 33 nt, synthetic construct
  misc_feature 1..33: note = Integrin alpha-3 (412-422)
  source 1..33: mol_type = other RNA
cagccccagcaggtgatccacggcgagaagctg

SEQ ID NO: 32691 - RNA, 27 nt, synthetic construct
  misc_feature 1..27: note = Protein transport protein Sec61 subunit alpha isoform 2 (393-401)
  source 1..27: mol_type = other RNA
cgctacatccccaccgccgccgcgttc

SEQ ID NO: 32692 - RNA, 30 nt, synthetic construct
  misc_feature 1..30: note = Tumor suppressor candidate 3 (18-27)
  source 1..30: mol_type = other RNA
cgctacctgcccaccggcagcttcccgttc

SEQ ID NO: 32693 - RNA, 27 nt, synthetic construct
  misc_feature 1..27: note = Rho GTPase-activating protein 7 (915-923)
  source 1..27: mol_type = other RNA
agcgagggccccccgctgcgcctctgg

SEQ ID NO: 32694 - RNA, 27 nt, synthetic construct
  misc_feature 1..27: note = Exosome complex component RRP42 (222-230)
  source 1..27: mol_type = other RNA
agcctggcctccctcctggtgagcgtc

SEQ ID NO: 32695 - RNA, 27 nt, synthetic construct
  misc_feature 1..27: note = AAC83183.1 (1386-1394)
  source 1..27: mol_type = other RNA
agcctgctcgaccccgtgccggaggtc

SEQ ID NO: 32696 - RNA, 27 nt, synthetic construct
  misc_feature 1..27: note = E3 ubiquitin-protein ligase BRE1A (312-320)
  source 1..27: mol_type = other RNA
agcctgtacggcgggaccatcaccatc

SEQ ID NO: 32697 - RNA, 27 nt, synthetic construct
  misc_feature 1..27: note = WD repeat-containing protein 48 (452-460)
  source 1..27: mol_type = other RNA
agccccgacggctccgacccgaagctg

SEQ ID NO: 32698 - RNA, 27 nt, synthetic construct
  misc_feature 1..27: note = Pericentriolar material 1 protein (1935-1943)
  source 1..27: mol_type = other RNA
agccccgacaccgagtccccggtgctg

SEQ ID NO: 32699 - RNA, 30 nt, synthetic construct
  misc_feature 1..30: note = Protein LDOC1 (73-82)
  source 1..30: mol_type = other RNA
agctacatgctggtgaacgagaaccgcttc

SEQ ID NO: 32700 - RNA, 27 nt, synthetic construct
  misc_feature 1..27: note = Nardilysin (1115-1123)
  source 1..27: mol_type = other RNA
acctacctgcccaccagcccgctcctg

SEQ ID NO: 32701 - RNA, 27 nt, synthetic construct
  misc_feature 1..27: note = Calnexin (12-20)
  source 1..27: mol_type = other RNA
gtgctgggcaccgccatcgtcgaggcc

SEQ ID NO: 32702 - RNA, 27 nt, synthetic construct
  misc_feature 1..27: note = Cleft lip and palate transmembrane protein 1 (107-115)
  source 1..27: mol_type = other RNA
gtgtacatcagcgagcacgagcacttc

SEQ ID NO: 32703 - RNA, 27 nt, synthetic construct
  misc_feature 1..27: note = U5 small nuclear ribonucleoprotein 200 kDa helicase (1389-1397)
  source 1..27: mol_type = other RNA
gtgtacatggactggtacgagaagttc

SEQ ID NO: 32704 - RNA, 30 nt, synthetic construct
  misc_feature 1..30: note = BTB/POZ domain-containing protein KCTD4 (77-86)
  source 1..30: mol_type = other RNA
tacttcatcgaccgcgacggcctgctcttc

SEQ ID NO: 32705 - RNA, 30 nt, synthetic construct
  misc_feature 1..30: note = DNA-binding protein SATB2 (639-648)
  source 1..30: mol_type = other RNA
taccccgaccaggaggccatccacaccctg

SEQ ID NO: 32706 - RNA, 30 nt, synthetic construct
  misc_feature 1..30: note = Long-chain-fatty-acid-CoA ligase 4 (238-247)
  source 1..30: mol_type = other RNA
taccccgagggcttcgagatccacagcatg

SEQ ID NO: 32707 - RNA, 30 nt, synthetic construct
  misc_feature 1..30: note = Tribbles homolog 3 (259-268)
  source 1..30: mol_type = other RNA
taccccttccaggacagcgagccggtgctg

SEQ ID NO: 32708 - RNA, 27 nt, synthetic construct
  misc_feature 1..27: note = Protein LAP2 (483-491)
  source 1..27: mol_type = other RNA
taccccaccccgtaccccgacgagctg

SEQ ID NO: 32709 - RNA, 27 nt, synthetic construct
  misc_feature 1..27: note = V-type proton ATPase catalytic subunit A (464-472)
  source 1..27: mol_type = other RNA
tactacgacaagcacttcaccgagttc

SEQ ID NO: 32710 - RNA, 33 nt, synthetic construct
  misc_feature 1..33: note = Filamin-B (515-525)
  source 1..33: mol_type = other RNA
tactaccccagcaccccgggccgctactccatc

SEQ ID NO: 32711 - RNA, 27 nt, synthetic construct
  misc_feature 1..27: note = Polypyrimidine tract-binding protein 3 (113-121)
  source 1..27: mol_type = other RNA
tactacacccccatcaccccgcacctg

SEQ ID NO: 32712 - RNA, 27 nt, synthetic construct
  misc_feature 1..27: note = Small nuclear ribonucleoprotein E (28-36)
  source 1..27: mol_type = other RNA
cgcagccggatccaggtgtggctgtac

SEQ ID NO: 32713 - RNA, 63 nt, synthetic construct
  misc_feature 1..63: note = 60S ribosomal protein L30 (95-115)
  source 1..63: mol_type = other RNA
gccatcatcgaccccggcgacagcgacatcatccgctccatgccggagcagaccggggagaag

SEQ ID NO: 32714 - RNA, 30 nt, synthetic construct
  misc_feature 1..30: note = Catenin beta-1 (115-124)
  source 1..30: mol_type = other RNA
gacgccgcccaccccaccaacgtgcagcgc

SEQ ID NO: 32715 - RNA, 27 nt, synthetic construct
  misc_feature 1..27: note = HLA class I histocompatibility antigen, B-51 alpha chain (161-169)
  source 1..27: mol_type = other RNA
gacaccgccgcccagatcacccagcgc

SEQ ID NO: 32716 - RNA, 27 nt, synthetic construct
  misc_feature 1..27: note = Heterogeneous nuclear ribonucleoproteins A2/B1 (139-147)
  source 1..27: mol_type = other RNA
gacaccatcgagatcatcaccgaccgc

SEQ ID NO: 32717 - RNA, 27 nt, synthetic construct
  misc_feature 1..27: note = Translocon-associated protein subunit beta isoform X1 (107-115)
  source 1..27: mol_type = other RNA
gacgtgagccacaccgtcgtgctgcgc

SEQ ID NO: 32718 - RNA, 27 nt, synthetic construct
  misc_feature 1..27: note = Actin, aortic smooth muscle (366-374)
  source 1..27: mol_type = other RNA
gaggccggccccagcatcgtgcaccgc

SEQ ID NO: 32719 - RNA, 27 nt, synthetic construct
  misc_feature 1..27: note = Fructose-bisphosphate aldolase A (35-43)
  source 1..27: mol_type = other RNA
gagagcaccggctccatcgccaagcgc

SEQ ID NO: 32720 - RNA, 27 nt, synthetic construct
  misc_feature 1..27: note = SH3 domain-binding glutamic acid-rich-like protein 3 (23-31)
  source 1..27: mol_type = other RNA
gaggtgacccgcatcctggacggcaag

SEQ ID NO: 32721 - RNA, 48 nt, synthetic construct
  misc_feature 1..48: note = HLA class II histocompatibility antigen, DRB1-4 beta chain (62-77)
  source 1..48: mol_type = other RNA
caccaggaggagtacgtgcgcttcgacagcgacgtcggcgagtaccgg

SEQ ID NO: 32722 - RNA, 45 nt, synthetic construct
  misc_feature 1..45: note = Sodium/potassium-transporting ATPase subunit alpha-1 (60-74)
  source 1..45: mol_type = other RNA
atcgtggtctacaccggcgaccgcaccgtgatggggcggatcgcc

SEQ ID NO: 32723 - RNA, 48 nt, synthetic construct
  misc_feature 1..48: note = NEDD4 family-interacting protein 1 (63-78)
  source 1..48: mol_type = other RNA
aagcccccgagctacaacgtggccaccaccctgccctcctacgacgag

SEQ ID NO: 32724 - RNA, 27 nt, synthetic construct
  misc_feature 1..27: note = Keratin, type I cytoskeletal 18 (32-40)
  source 1..27: mol_type = other RNA
cgcctggccagctacctcgaccgggtg

SEQ ID NO: 32725 - RNA, 27 nt, synthetic construct
  misc_feature 1..27: note = 60S ribosomal protein L24 (86-94)
  source 1..27: mol_type = other RNA
agcctggccgacatcatggccaagcgc

SEQ ID NO: 32726 - RNA, 33 nt, synthetic construct
  misc_feature 1..33: note = HLA class I histocompatibility antigen, Cw-4 alpha chain (133-143)
  source 1..33: mol_type = other RNA
accgccgccgacaccgcggcccagatcacgcgc

SEQ ID NO: 32727 - RNA, 30 nt, synthetic construct
  misc_feature 1..30: note = WD repeat-containing protein 6 (462-471)
  source 1..30: mol_type = other RNA
accctgttccccggcaaggtgcacagcctc

SEQ ID NO: 32728 - RNA, 27 nt, synthetic construct
  misc_feature 1..27: note = Fatty acid-binding protein, liver (114-122)
  source 1..27: mol_type = other RNA
accctgggcgacatcgtgttcaagcgc

SEQ ID NO: 32729 - RNA, 27 nt, synthetic construct
  misc_feature 1..27: note = Actin, aortic smooth muscle (204-212)
  source 1..27: mol_type = other RNA
accaccgccgagcgcgagatcgtgcgg

SEQ ID NO: 32730 - RNA, 27 nt, synthetic construct
  misc_feature 1..27: note = Polymeric immunoglobulin receptor (656-664)
  source 1..27: mol_type = other RNA
gtggccgtcggcgtggcccgcgcgcgg

SEQ ID NO: 32731 - RNA, 27 nt, synthetic construct
  misc_feature 1..27: note = DAZ-associated protein 2 (63-71)
  source 1..27: mol_type = other RNA
gccgccttccccggcgcgagcctgtac

SEQ ID NO: 32732 - RNA, 27 nt, synthetic construct
  misc_feature 1..27: note = Kelch-like protein 24 (576-584)
  source 1..27: mol_type = other RNA
gccgccatgccccgcccggtgagctac

SEQ ID NO: 32733 - RNA, 27 nt, synthetic construct
  misc_feature 1..27: note = Lck-interacting transmembrane adapter 1 (159-167)
  source 1..27: mol_type = other RNA
gccgccagccccgtggtcgcggagtac

SEQ ID NO: 32734 - RNA, 27 nt, synthetic construct
  misc_feature 1..27: note = Cysteine-rich protein 2-binding protein (154-162)
  source 1..27: mol_type = other RNA
gccttcatcgagaagcactggaccttc

SEQ ID NO: 32735 - RNA, 27 nt, synthetic construct
  misc_feature 1..27: note = Bifunctional 3'-phosphoadenosine 5'-phosphosulfate synthase 2 (479-487)
  source 1..27: mol_type = other RNA
gccatcttccccagcccgatgctgtac

SEQ ID NO: 32736 - RNA, 27 nt, synthetic construct
  misc_feature 1..27: note = Bifunctional 3'-phosphoadenosine 5'-phosphosulfate synthase 1 (488-496)
  source 1..27: mol_type = other RNA
gccatcttccccagcccgatgatgtac

SEQ ID NO: 32737 - RNA, 27 nt, synthetic construct
  misc_feature 1..27: note = Phosphatidylinositol 5-phosphate 4-kinase type-2 alpha (356-364)
  source 1..27: mol_type = other RNA
gccatcatcgacatcctgacccactac

SEQ ID NO: 32738 - RNA, 30 nt, synthetic construct
  misc_feature 1..30: note = Calsyntenin-3 (69-78)
  source 1..30: mol_type = other RNA
gccctggacaaggacgcccccctccgctac

SEQ ID NO: 32739 - RNA, 27 nt, synthetic construct
  misc_feature 1..27: note = Ras-related protein Rab-20 (156-164)
  source 1..27: mol_type = other RNA
gccctgtacaagaagatcctcaagtac

SEQ ID NO: 32740 - RNA, 27 nt, synthetic construct
  misc_feature 1..27: note = Structure-specific endonuclease subunit SLX4 (1765-1773)
  source 1..27: mol_type = other RNA
gccctgtaccagaaggtgctcctgtac

SEQ ID NO: 32741 - RNA, 33 nt, synthetic construct
  misc_feature 1..33: note = Myosin regulatory light polypeptide 9 (24-34)
  source 1..33: mol_type = other RNA
gccatgttcgaccagagccagatccaggagttc

SEQ ID NO: 32742 - RNA, 27 nt, synthetic construct
  misc_feature 1..27: note = 60S ribosomal protein L6 (61-69)
  source 1..27: mol_type = other RNA
gccatgtacagccgcaaggccatgtac

SEQ ID NO: 32743 - RNA, 27 nt, synthetic construct
  misc_feature 1..27: note = Junction plakoglobin (472-480)
  source 1..27: mol_type = other RNA
gcccagaacagcgtgcgcctgaactac

SEQ ID NO: 32744 - RNA, 27 nt, synthetic construct
  misc_feature 1..27: note = Protein transport protein Sec23B (125-133)
  source 1..27: mol_type = other RNA
gcccagagccccctgatcttcctctac

SEQ ID NO: 32745 - RNA, 27 nt, synthetic construct
  misc_feature 1..27: note = Centrosome-associated protein 350 (330-338)
  source 1..27: mol_type = other RNA
gccaccgcccccccggcgcccgcctac

SEQ ID NO: 32746 - RNA, 27 nt, synthetic construct
  misc_feature 1..27: note = Protein transport protein Sec31A (61-69)
  source 1..27: mol_type = other RNA
gccaccttcagctccagccaccgctac

SEQ ID NO: 32747 - RNA, 30 nt, synthetic construct
  misc_feature 1..30: note = E3 ubiquitin/ISG15 ligase TRIM25 (592-601)
  source 1..30: mol_type = other RNA
gccgtggccgacaaggtccacctgatgtac

SEQ ID NO: 32748 - RNA, 27 nt, synthetic construct
  misc_feature 1..27: note = StAR-related lipid transfer protein 5 (12-20)
  source 1..27: mol_type = other RNA
gccgtggccgagaagatgctgcagtac

SEQ ID NO: 32749 - RNA, 27 nt, synthetic construct
  misc_feature 1..27: note = WASH complex subunit 7 (624-632)
  source 1..27: mol_type = other RNA
gccgtggacgccgcgcgcctgcactac

SEQ ID NO: 32750 - RNA, 30 nt, synthetic construct
  misc_feature 1..30: note = Nuclear pore membraneoprotein 210 (497-506)
  source 1..30: mol_type = other RNA
gccgtggaccccaccagcggccagctgtac

SEQ ID NO: 32751 - RNA, 27 nt, synthetic construct
  misc_feature 1..27: note = Lysocardiolipin acyltransferase 1 (91-99)
  source 1..27: mol_type = other RNA
gccgtgcacgacatcaccgtcgcctac

SEQ ID NO: 32752 - RNA, 30 nt, synthetic construct
  misc_feature 1..30: note = Methylsterol monooxygenase 1 (15-24)
  source 1..30: mol_type = other RNA
gccgtgatcgaggacacctggcactacttc

SEQ ID NO: 32753 - RNA, 27 nt, synthetic construct
  misc_feature 1..27: note = V-type proton ATPase subunit d 1 (111-119)
  source 1..27: mol_type = other RNA
gcctacctggagagcttctacaagttc

SEQ ID NO: 32754 - RNA, 27 nt, synthetic construct
  misc_feature 1..27: note = Protein S100-A9 (67-75)
  source 1..27: mol_type = other RNA
gacaccaacgccgacaagcagctgagc

SEQ ID NO: 32755 - RNA, 27 nt, synthetic construct
  misc_feature 1..27: note = Transcription elongation factor SPT6 (339-347)
  source 1..27: mol_type = other RNA
gacgtgtacaaccacttcctgctctac

SEQ ID NO: 32756 - RNA, 27 nt, synthetic construct
  misc_feature 1..27: note = MOB kinase activator 1A (175-183)
  source 1..27: mol_type = other RNA
gaggaggcccacctgaacaccagcttc

SEQ ID NO: 32757 - RNA, 27 nt, synthetic construct
  misc_feature 1..27: note = HLA class II histocompatibility antigen, DP alpha 1 chain (43-51)
  source 1..27: mol_type = other RNA
gaggagttcggccaggccttcagcttc

SEQ ID NO: 32758 - RNA, 27 nt, synthetic construct
  misc_feature 1..27: note = Protein arginine N-methyltransferase 1 (319-327)
  source 1..27: mol_type = other RNA
gaggagatcttcggcaccatcgggatg

SEQ ID NO: 32759 - RNA, 30 nt, synthetic construct
  misc_feature 1..30: note = Puromycin-sensitive aminopeptidase-like protein (113-122)
  source 1..30: mol_type = other RNA
gaggagatccacgccaccggcttcaactac

SEQ ID NO: 32760 - RNA, 30 nt, synthetic construct
  misc_feature 1..30: note = Myocyte-specific enhancer factor 2D (127-136)
  source 1..30: mol_type = other RNA
gaggagctggacggcctcttccgccggtac

SEQ ID NO: 32761 - RNA, 27 nt, synthetic construct
  misc_feature 1..27: note = Ribosomal RNA processing protein 36 homolog (132-140)
  source 1..27: mol_type = other RNA
gaggtgttcgacaagacctaccagttc

SEQ ID NO: 32762 - RNA, 27 nt, synthetic construct
  misc_feature 1..27: note = G1/S-specific cyclin-D3 (26-34)
  source 1..27: mol_type = other RNA
gaggtgttccccctggccatgaactac

SEQ ID NO: 32763 - RNA, 27 nt, synthetic construct
  misc_feature 1..27: note = Golgi resident protein GCP60 (490-498)
  source 1..27: mol_type = other RNA
gaggtgtacgccggcagccaccagtac

SEQ ID NO: 32764 - RNA, 27 nt, synthetic construct
  misc_feature 1..27: note = Dipeptidyl peptidase 1 (375-383)
  source 1..27: mol_type = other RNA
gaggtgtacgacgacttcctgcactac

SEQ ID NO: 32765 - RNA, 27 nt, synthetic construct
  misc_feature 1..27: note = Sphingolipid delta(4)-desaturase DES1 (176-184)
  source 1..27: mol_type = other RNA
ttcatcaaccccaagccgatcacctac

SEQ ID NO: 32766 - RNA, 27 nt, synthetic construct
  misc_feature 1..27: note = Histone acetyltransferase KAT6A (600-608)
  source 1..27: mol_type = other RNA
ttcctggaccacaagaccctctactac

SEQ ID NO: 32767 - RNA, 27 nt, synthetic construct
  misc_feature 1..27: note = Putative ATP-dependent RNA helicase DHX57 (392-400)
  source 1..27: mol_type = other RNA
ttcctgtacgacaaggccctcaccttc

SEQ ID NO: 32768 - RNA, 27 nt, synthetic construct
  misc_feature 1..27: note = Calnexin (230-238)
  source 1..27: mol_type = other RNA
ttcaccgacaagaagacccacctgtac

SEQ ID NO: 32769 - RNA, 30 nt, synthetic construct
  misc_feature 1..30: note = Histone-arginine methyltransferase CARM1 (584-593)
  source 1..30: mol_type = other RNA
ttcaccatgggcgggcccgccatcagcatg

SEQ ID NO: 32770 - RNA, 42 nt, synthetic construct
  misc_feature 1..42: note = Myosin regulatory light chain 12A (164-177)
  source 1..42: mol_type = other RNA
ttcacccgcatcctgaagcacggcgccaaggacaaggacgac

SEQ ID NO: 32771 - RNA, 27 nt, synthetic construct
  misc_feature 1..27: note = Plastin-3 (324-332)
  source 1..27: mol_type = other RNA
ttcgtggccaacctgttcaacaagtac

SEQ ID NO: 32772 - RNA, 33 nt, synthetic construct
  misc_feature 1..33: note = U5 small nuclear ribonucleoprotein 200 kDa helicase (1845-1855)
  source 1..33: mol_type = other RNA
ttcgtggcccccgccaccggcgcgcacaactac

SEQ ID NO: 32773 - RNA, 42 nt, synthetic construct
  misc_feature 1..42: note = Cytochrome c oxidase subunit NDUFA4 (19-32)
  source 1..42: mol_type = other RNA
ttcgtgttcatcggcaccggggccaccggcgccacgctgtac

SEQ ID NO: 32774 - RNA, 27 nt, synthetic construct
  misc_feature 1..27: note = Ras-related protein Rab-5B (92-100)
  source 1..27: mol_type = other RNA
ttcgtgaagggccagttccacgagtac

SEQ ID NO: 32775 - RNA, 27 nt, synthetic construct
  misc_feature 1..27: note = COP9 signalosome complex subunit 6 (275-283)
  source 1..27: mol_type = other RNA
ttcgtgaacaagttcaacgtcctgtac

SEQ ID NO: 32776 - RNA, 30 nt, synthetic construct
  misc_feature 1..30: note = Probable ATP-dependent RNA helicase DDX5 (549-558)
  source 1..30: mol_type = other RNA
ttcgtgagcgccggcatccagacctccttc

SEQ ID NO: 32777 - RNA, 30 nt, synthetic construct
  misc_feature 1..30: note = Transmembrane protein 258 (37-46)
  source 1..30: mol_type = other RNA
ttcgtgtacgaggtcaccagcaccaagtac

SEQ ID NO: 32778 - RNA, 36 nt, synthetic construct
  misc_feature 1..36: note = Dermcidin (97-108)
  source 1..36: mol_type = other RNA
ggcgccgtgcacgacgtcaaggacgtgctggacagc

SEQ ID NO: 32779 - RNA, 27 nt, synthetic construct
  misc_feature 1..27: note = Vacuolar protein sorting-associated protein 51 homolog (121-129)
  source 1..27: mol_type = other RNA
ggcgcctacgggcaggccgtgcgctac

SEQ ID NO: 32780 - RNA, 27 nt, synthetic construct
  misc_feature 1..27: note = Histone H2B type 2-F (76-84)
  source 1..27: mol_type = other RNA
ggcgaggccagccgcctggcccactac

SEQ ID NO: 32781 - RNA, 27 nt, synthetic construct
  misc_feature 1..27: note = RING finger and transmembrane domain-containing protein 2 (264-272)
  source 1..27: mol_type = other RNA
ggcatcgccgacttcgtgctgaagtac

SEQ ID NO: 32782 - RNA, 36 nt, synthetic construct
  misc_feature 1..36: note = Myosin-9 (1952-1963)
  source 1..36: mol_type = other RNA
ggcaaggccgacggggccgaggcgaagcccgccgag

SEQ ID NO: 32783 - RNA, 27 nt, synthetic construct
  misc_feature 1..27: note = Inositol 1,4,5-trisphosphate receptor type 3 (2333-2341)
  source 1..27: mol_type = other RNA
ggcctgttcgcccacgagctcttctac

SEQ ID NO: 32784 - RNA, 27 nt, synthetic construct
  misc_feature 1..27: note = E3 ubiquitin-protein ligase TRIM56 (486-494)
  source 1..27: mol_type = other RNA
ggcctgctcccccgcccgatcttctac

SEQ ID NO: 32785 - RNA, 27 nt, synthetic construct
  misc_feature 1..27: note = Protein transport protein Sec16A (1463-1471)
  source 1..27: mol_type = other RNA
ggcctgtgggggcacgccctcctgctg

SEQ ID NO: 32786 - RNA, 27 nt, synthetic construct
  misc_feature 1..27: note = DNA repair protein complementing XP-C cells (639-647)
  source 1..27: mol_type = other RNA
ggcctgtacaagaaccaccccctctac

SEQ ID NO: 32787 - RNA, 42 nt, synthetic construct
  misc_feature 1..42: note = Heterogeneous nuclear ribonucleoproteins A2/B1 (241-254)
  source 1..42: mol_type = other RNA
ggcaactacgggagcggcaactacaacgacttcgggaactac

SEQ ID NO: 32788 - RNA, 24 nt, synthetic construct
  misc_feature 1..24: note = HLA class I histocompatibility antigen, B-15 alpha chain (25-32)
  source 1..24: mol_type = other RNA
ggcagccactccatgcgctacttc

SEQ ID NO: 32789 - RNA, 27 nt, synthetic construct
  misc_feature 1..27: note = HLA class I histocompatibility antigen, B-35 alpha chain (25-33)
  source 1..27: mol_type = other RNA
ggcagccactccatgcgctacttctac

SEQ ID NO: 32790 - RNA, 27 nt, synthetic construct
  misc_feature 1..27: note = Heterogeneous nuclear ribonucleoprotein A1 (310-318)
  source 1..27: mol_type = other RNA
ggcagctacaacgacttcgggaactac

SEQ ID NO: 32791 - RNA, 27 nt, synthetic construct
  misc_feature 1..27: note = E3 ubiquitin-protein ligase MARCH6 (620-628)
  source 1..27: mol_type = other RNA
ggcaccgccaagatccacgagctgtac

SEQ ID NO: 32792 - RNA, 27 nt, synthetic construct
  misc_feature 1..27: note = DNA topoisomerase 2-beta (560-568)
  source 1..27: mol_type = other RNA
ggcaccgccaccaagcacctgacgtac

SEQ ID NO: 32793 - RNA, 27 nt, synthetic construct
  misc_feature 1..27: note = Filamin-A (2181-2189)
  source 1..27: mol_type = other RNA
ggcacccacaccgtgagcgtcaagtac

SEQ ID NO: 32794 - RNA, 27 nt, synthetic construct
  misc_feature 1..27: note = Ubiquitin-conjugating enzyme E2 C (71-79)
  source 1..27: mol_type = other RNA
ggcaccgtgtacgaggacctgcgctac

SEQ ID NO: 32795 - RNA, 30 nt, synthetic construct
  misc_feature 1..30: note = Cold shock domain-containing protein E1 (28-37)
  source 1..30: mol_type = other RNA
ggcgtgatcgagaagctgctcaccagctac

SEQ ID NO: 32796 - RNA, 39 nt, synthetic construct
  misc_feature 1..39: note = ADP-ribosylation factor GTPase-activating protein 2 (469-481)
  source 1..39: mol_type = other RNA
ggcgtgatgaacagcctgcaggaccgctacgggtcctac

SEQ ID NO: 32797 - RNA, 27 nt, synthetic construct
  misc_feature 1..27: note = Bardet-Biedl syndrome 2 protein (227-235)
  source 1..27: mol_type = other RNA
ggcgtgtacgacaagaccagccgctac

SEQ ID NO: 32798 - RNA, 27 nt, synthetic construct
  misc_feature 1..27: note = Coatomer subunit alpha (633-641)
  source 1..27: mol_type = other RNA
ggctaccccgaggtggccctgcacttc

SEQ ID NO: 32799 - RNA, 33 nt, synthetic construct
  misc_feature 1..33: note = Protein S100-A8 (27-37)
  source 1..33: mol_type = other RNA
cacgccgtgtaccgcgacgacctgaagaagctc

SEQ ID NO: 32800 - RNA, 27 nt, synthetic construct
  misc_feature 1..27: note = Zinc finger protein 608 (1347-1355)
  source 1..27: mol_type = other RNA
cacgcctacccctacccgcagatgtac

SEQ ID NO: 32801 - RNA, 27 nt, synthetic construct
  misc_feature 1..27: note = Sphingolipid delta(4)-desaturase DES1 (228-236)
  source 1..27: mol_type = other RNA
cacttcatcgccgagcactacatgttc

SEQ ID NO: 32802 - RNA, 27 nt, synthetic construct
  misc_feature 1..27: note = BTB/POZ domain-containing protein KCTD1 (41-49)
  source 1..27: mol_type = other RNA
cacatcgacgtgggcgggcacatgtac

SEQ ID NO: 32803 - RNA, 27 nt, synthetic construct
  misc_feature 1..27: note = RNA-binding protein with serine-rich domain 1 (176-184)
  source 1..27: mol_type = other RNA
cacatcatggagatcttcagcacctac

SEQ ID NO: 32804 - RNA, 27 nt, synthetic construct
  misc_feature 1..27: note = Laminin subunit beta-3 (1158-1166)
  source 1..27: mol_type = other RNA
cacatcaacggccgcgtgctgtactac

SEQ ID NO: 32805 - RNA, 27 nt, synthetic construct
  misc_feature 1..27: note = UDP-N-acetylglucosamine-dolichyl-phosphate N-acetylglucosaminephosphotransferase (55-63)
  source 1..27: mol_type = other RNA
cacctggacctcggcatcctgtactac

SEQ ID NO: 32806 - RNA, 27 nt, synthetic construct
  misc_feature 1..27: note = Nuclear pore complex protein Nup205 (240-248)
  source 1..27: mol_type = other RNA
cacctgtacggcagcctcctgtactac

SEQ ID NO: 32807 - RNA, 27 nt, synthetic construct
  misc_feature 1..27: note = DAZ-associated protein 1 (397-405)
  source 1..27: mol_type = other RNA
cacaacgtgcagggcttccacccctac

SEQ ID NO: 32808 - RNA, 27 nt, synthetic construct
  misc_feature 1..27: note = pre-mRNA 3' end processing protein WDR33 (19-27)
  source 1..27: mol_type = other RNA
caccaggccccccgccagctgttctac

SEQ ID NO: 32809 - RNA, 27 nt, synthetic construct
  misc_feature 1..27: note = Nuclear receptor corepressor 2 (34-42)
  source 1..27: mol_type = other RNA
cacaccgacgtgggcctgctcgagtac

SEQ ID NO: 32810 - RNA, 27 nt, synthetic construct
  misc_feature 1..27: note = Ribosomal protein S6 kinase alpha-1 (517-525)
  source 1..27: mol_type = other RNA
cacaccatcggcaagaccgtggagtac

SEQ ID NO: 32811 - RNA, 27 nt, synthetic construct
  misc_feature 1..27: note = Type II inositol 3,4-bisphosphate 4-phosphatase (657-665)
  source 1..27: mol_type = other RNA
cacaccgtgggcctgatcgtccagtac

SEQ ID NO: 32812 - RNA, 30 nt, synthetic construct
  misc_feature 1..30: note = Zinc finger CCHC domain-containing protein 14 (172-181)
  source 1..30: mol_type = other RNA
cacgtggacctggacagcggcctccgctac

SEQ ID NO: 32813 - RNA, 33 nt, synthetic construct
  misc_feature 1..33: note = Prefoldin subunit 5 (94-104)
  source 1..33: mol_type = other RNA
cacgtgctgatcgacgtcggcaccgggtactac

SEQ ID NO: 32814 - RNA, 27 nt, synthetic construct
  misc_feature 1..27: note = Erythroid differentiation-related factor 1 (370-378)
  source 1..27: mol_type = other RNA
cacgtgaacggcatcgtccagaagtac

SEQ ID NO: 32815 - RNA, 30 nt, synthetic construct
  misc_feature 1..30: note = Protein prenyltransferase alpha subunit repeat-containing protein 1 (213-222)
  source 1..30: mol_type = other RNA
cacgtgagcgaccactccggcttccactac

SEQ ID NO: 32816 - RNA, 27 nt, synthetic construct
  misc_feature 1..27: note = Peroxisomal membrane protein PEX14 (119-127)
  source 1..27: mol_type = other RNA
atcgccttcggcttccaccagctgtac

SEQ ID NO: 32817 - RNA, 27 nt, synthetic construct
  misc_feature 1..27: note = Protein FAM134C (153-161)
  source 1..27: mol_type = other RNA
atcttcatccgcaacgtgctgctcttc

SEQ ID NO: 32818 - RNA, 27 nt, synthetic construct
  misc_feature 1..27: note = Probable ATP-dependent RNA helicase DDX5 (604-612)
  source 1..27: mol_type = other RNA
atcggctaccccatgccgaccgggtac

SEQ ID NO: 32819 - RNA, 27 nt, synthetic construct
  misc_feature 1..27: note = Dolichol kinase (352-360)
  source 1..27: mol_type = other RNA
atcatcttcgaccgccccctgctctac

SEQ ID NO: 32820 - RNA, 27 nt, synthetic construct
  misc_feature 1..27: note Dolichyl-diphosphooligosaccharide-proteinosyltransferase subunit 2 (410-418)
  source 1..27: mol_type = other RNA
atcctgagccccctcctgctgctcttc

SEQ ID NO: 32821 - RNA, 33 nt, synthetic construct
  misc_feature 1..33: note = Beta-2-microglobulin (21-31)
  source 1..33: mol_type = other RNA
atccagcgcacccccaagatccaggtgtacagc

SEQ ID NO: 32822 - RNA, 39 nt, synthetic construct
  misc_feature 1..39: note = Beta-2-microglobulin (21-33)
  source 1..39: mol_type = other RNA
atccagcgcacccccaagatccaggtgtacagccggcac

SEQ ID NO: 32823 - RNA, 27 nt, synthetic construct
  misc_feature 1..27: note = HLA class I histocompatibility antigen, B-52 alpha chain (90-98)
  source 1..27: mol_type = other RNA
atcagcaagaccaacacccagacgtac

SEQ ID NO: 32824 - RNA, 33 nt, synthetic construct
  misc_feature 1..33: note = Eukaryotic peptide chain release factor subunit 1 (307-317)
  source 1..33: mol_type = other RNA
atcgtgtacgagaacctggacatcatgcgctac

SEQ ID NO: 32825 - RNA, 27 nt, synthetic construct
  misc_feature 1..27: note = Cyclin-H (138-146)
  source 1..27: mol_type = other RNA
aaggccctggagcagatcctcgagtac

SEQ ID NO: 32826 - RNA, 30 nt, synthetic construct
  misc_feature 1..30: note = Proliferating cell nuclear antigen (240-249)
  source 1..30: mol_type = other RNA
aagatcgccgacatgggccacctgaagtac

SEQ ID NO: 32827 - RNA, 27 nt, synthetic construct
  misc_feature 1..27: note = Protein LAP2 (282-290)
  source 1..27: mol_type = other RNA
aagatcgacgagaaccagctgatgtac

SEQ ID NO: 32828 - RNA, 27 nt, synthetic construct
  misc_feature 1..27: note = Beta-2-microglobulin (90-98)
  source 1..27: mol_type = other RNA
aagatcgtgaagtgggaccgcgacatg

SEQ ID NO: 32829 - RNA, 30 nt, synthetic construct
  misc_feature 1..30: note = Ras GTPase-activating-like protein IQGAP1 (94-103)
  source 1..30: mol_type = other RNA
aagatctacgaccgcgagcagacccggtac

SEQ ID NO: 32830 - RNA, 27 nt, synthetic construct
  misc_feature 1..27: note = Phosphorylated CTD-interacting factor 1 (363-371)
  source 1..27: mol_type = other RNA
aagatctaccacatcagcctggagtac

SEQ ID NO: 32831 - RNA, 27 nt, synthetic construct
  misc_feature 1..27: note = Cytoplasmic FMR1-interacting protein 1 (739-747)
  source 1..27: mol_type = other RNA
aagctggccgaccagatcttcgcctac

SEQ ID NO: 32832 - RNA, 30 nt, synthetic construct
  misc_feature 1..30: note = Cytoplasmic FMR1-interacting protein 1 (739-748)
  source 1..30: mol_type = other RNA
aagctggccgaccagatcttcgcctactac

SEQ ID NO: 32833 - RNA, 27 nt, synthetic construct
  misc_feature 1..27: note = Golgi-associated PDZ and coiled-coil motif-containing protein (394-402)
  source 1..27: mol_type = other RNA
aagctggacgacctccacaccctgtac

SEQ ID NO: 32834 - RNA, 42 nt, synthetic construct
  misc_feature 1..42: note = Oxysterol-binding protein-related protein 8 (705-718)
  source 1..42: mol_type = other RNA
aagctgttcgagctcgaccccctgaccggcgagtggcactac

SEQ ID NO: 32835 - RNA, 30 nt, synthetic construct
  misc_feature 1..30: note = SHC SH2 domain-binding protein 1 (262-271)
  source 1..30: mol_type = other RNA
aagctgatcgagaaccccctcctgcgctac

SEQ ID NO: 32836 - RNA, 27 nt, synthetic construct
  misc_feature 1..27: note = Proteasome subunit alpha type (67-75)
  source 1..27: mol_type = other RNA
aagctgaacgagtacctcctgcagtac

SEQ ID NO: 32837 - RNA, 27 nt, synthetic construct
  misc_feature 1..27: note = Protein farnesyltransferase/geranylgeranyltransferase type-1 subunit alpha (211-219)
  source 1..27: mol_type = other RNA
aagctgtgggacaacgagctccagtac

SEQ ID NO: 32838 - RNA, 27 nt, synthetic construct
  misc_feature 1..27: note = Crooked neck-like protein 1 (615-623)
  source 1..27: mol_type = other RNA
aagctgtacgagaagttcctcgagttc

SEQ ID NO: 32839 - RNA, 27 nt, synthetic construct
  misc_feature 1..27: note = Tetratricopeptide repeat protein 21B (693-701)
  source 1..27: mol_type = other RNA
aagatggccgacatctacctgaagcac

SEQ ID NO: 32840 - RNA, 27 nt, synthetic construct
  misc_feature 1..27: note = SPRY domain-containing protein 3 (14-22)
  source 1..27: mol_type = other RNA
aagatggacgacctgaacctccactac

SEQ ID NO: 32841 - RNA, 27 nt, synthetic construct
  misc_feature 1..27: note = Phosphatidylinositol 4-kinase alpha (321-329)
  source 1..27: mol_type = other RNA
aagatgctgcgcgacaccctctactac

SEQ ID NO: 32842 - RNA, 27 nt, synthetic construct
  misc_feature 1..27: note = Platelet-activating factor acetylhydrolase IB subunit alpha (95-103)
  source 1..27: mol_type = other RNA
aagatgtgggaggtgcagaccggctac

SEQ ID NO: 32843 - RNA, 30 nt, synthetic construct
  misc_feature 1..30: note = Clathrin heavy chain 1 (1209-1218)
  source 1..30: mol_type = other RNA
aagatgtacgacgccgccaagctgctctac

SEQ ID NO: 32844 - RNA, 27 nt, synthetic construct
  misc_feature 1..27: note = Elongation factor Tu GTP-binding domain-containing protein 1 (71-79)
  source 1..27: mol_type = other RNA
aagagctccgccatcagcctgcactac

SEQ ID NO: 32845 - RNA, 27 nt, synthetic construct
  misc_feature 1..27: note = Elongation factor 2 (71-79)
  source 1..27: mol_type = other RNA
aagagcaccgccatctccctgttctac

SEQ ID NO: 32846 - RNA, 27 nt, synthetic construct
  misc_feature 1..27: note = Flotillin-2 (214-222)
  source 1..27: mol_type = other RNA
aagaccgccgaggcccagctggcgtac

SEQ ID NO: 32847 - RNA, 27 nt, synthetic construct
  misc_feature 1..27: note = Cytoplasmic dynein 1 heavy chain 1 (2633-2641)
  source 1..27: mol_type = other RNA
aagaccttcgaccactactgcgagtac

SEQ ID NO: 32848 - RNA, 27 nt, synthetic construct
  misc_feature 1..27: note = Protein RMD5 homolog B (13-21)
  source 1..27: mol_type = other RNA
aaggtgctgcagaagttcctcacctac

SEQ ID NO: 32849 - RNA, 27 nt, synthetic construct
  misc_feature 1..27: note = Probable E3 ubiquitin-protein ligase HECTD4 (700-708)
  source 1..27: mol_type = other RNA
aaggtgctgagccgcgccctcatgtac

SEQ ID NO: 32850 - RNA, 27 nt, synthetic construct
  misc_feature 1..27: note = Cartilage-associated protein (329-337)
  source 1..27: mol_type = other RNA
aaggtgatgcagcagaacctggtctac

SEQ ID NO: 32851 - RNA, 27 nt, synthetic construct
  misc_feature 1..27: note = KIF1-binding protein (205-213)
  source 1..27: mol_type = other RNA
aaggtgtacacccacaacctgtactac

SEQ ID NO: 32852 - RNA, 30 nt, synthetic construct
  misc_feature 1..30: note = Protein S100-A9 (66-75)
  source 1..30: mol_type = other RNA
ctggacaccaacgccgacaagcagctcagc

SEQ ID NO: 32853 - RNA, 24 nt, synthetic construct
  misc_feature 1..24: note = Engulfment and cell motility protein 2 (574-581)
  source 1..24: mol_type = other RNA
ctgaaccacaaggtgctccactac

SEQ ID NO: 32854 - RNA, 27 nt, synthetic construct
  misc_feature 1..27: note = CDNA FLJ25829 fis, clone TST08126 (128-136)
  source 1..27: mol_type = other RNA
atgaccgccaagctgcagaccccctac

SEQ ID NO: 32855 - RNA, 27 nt, synthetic construct
  misc_feature 1..27: note = HLA class II histocompatibility antigen, DQ alpha 1 chain (247-255)
  source 1..27: mol_type = other RNA
aacgccgccgagcgccggggccccctg

SEQ ID NO: 32856 - RNA, 27 nt, synthetic construct
  misc_feature 1..27: note = Heat shock protein beta-1 (177-185)
  source 1..27: mol_type = other RNA
aacgagatcaccatccccgtgaccttc

SEQ ID NO: 32857 - RNA, 27 nt, synthetic construct
  misc_feature 1..27: note = Serpin B12 (169-177)
  source 1..27: mol_type = other RNA
aacaagacccagaccatcctgttctac

SEQ ID NO: 32858 - RNA, 27 nt, synthetic construct
  misc_feature 1..27: note = S1 RNA-binding domain-containing protein 1 (240-248)
  source 1..27: mol_type = other RNA
aacaccatccccttcatcatccgctac

SEQ ID NO: 32859 - RNA, 42 nt, synthetic construct
  misc_feature 1..42: note = Mediator of RNA polymerase II transcription subunit 12 (2010-2023)
  source 1..42: mol_type = other RNA
aacacccagccccagccgagcaccaacatcttcggccgctac

SEQ ID NO: 32860 - RNA, 27 nt, synthetic construct
  misc_feature 1..27: note = Agrin (56-64)
  source 1..27: mol_type = other RNA
aacgtggaccccgtccagcacacctac

SEQ ID NO: 32861 - RNA, 27 nt, synthetic construct
  misc_feature 1..27: note = Abhydrolase domain-containing protein 2 (306-314)
  source 1..27: mol_type = other RNA
aacgtgatgcgcaagttccacggctac

SEQ ID NO: 32862 - RNA, 30 nt, synthetic construct
  misc_feature 1..30: note = Tubulin beta chain (103-112)
  source 1..30: mol_type = other RNA
cagatcttccgccccgacaacttcgtgttc

SEQ ID NO: 32863 - RNA, 27 nt, synthetic construct
  misc_feature 1..27: note = WD repeat-containing protein 19 (527-535)
  source 1..27: mol_type = other RNA
cagctgtacgagaagggcctctactac

SEQ ID NO: 32864 - RNA, 27 nt, synthetic construct
  misc_feature 1..27: note = Serine/threonine-protein phosphatase 2A 56 kDa regulatory subunit epsilon isoform (358-366)
  source 1..27: mol_type = other RNA
caggtggccgagcgcgccctgtactac

SEQ ID NO: 32865 - RNA, 30 nt, synthetic construct
  misc_feature 1..30: note = Muskelin (626-635)
  source 1..30: mol_type = other RNA
caggtggaccccctgagcgccctcaagtac

SEQ ID NO: 32866 - RNA, 27 nt, synthetic construct
  misc_feature 1..27: note = Coatomer subunit beta' (136-144)
  source 1..27: mol_type = other RNA
caggtgttcgagggccacacccactac

SEQ ID NO: 32867 - RNA, 27 nt, synthetic construct
  misc_feature 1..27: note = DNA polymerase epsilon subunit 3 (39-47)
  source 1..27: mol_type = other RNA
cgcgccgccagcgtgttcgtcctgtac

SEQ ID NO: 32868 - RNA, 27 nt, synthetic construct
  misc_feature 1..27: note = Histone H2B type 1-A (94-102)
  source 1..27: mol_type = other RNA
cgcgagatccagaccgccgtgcggctg

SEQ ID NO: 32869 - RNA, 27 nt, synthetic construct
  misc_feature 1..27: note = 26S proteasome non-ATPase regulatory subunit 3 (294-302)
  source 1..27: mol_type = other RNA
cgcatcaaggccatccagctggagtac

SEQ ID NO: 32870 - RNA, 33 nt, synthetic construct
  misc_feature 1..33: note = DNA polymerase delta catalytic subunit (386-396)
  source 1..33: mol_type = other RNA
cgcatcatggaccccgacgtgatcaccggctac

SEQ ID NO: 32871 - RNA, 27 nt, synthetic construct
  misc_feature 1..27: note = Protein TASOR (185-193)
  source 1..27: mol_type = other RNA
cgcctggacgacaagaagttcctctac

SEQ ID NO: 32872 - RNA, 27 nt, synthetic construct
  misc_feature 1..27: note = F-box only protein 7 (266-274)
  source 1..27: mol_type = other RNA
cgcctgttcaaggaccagctcgtgtac

SEQ ID NO: 32873 - RNA, 33 nt, synthetic construct
  misc_feature 1..33: note = Zinc finger protein 419 (43-53)
  source 1..33: mol_type = other RNA
cgcctgctcgacgacgcccagcggctgctgtac

SEQ ID NO: 32874 - RNA, 27 nt, synthetic construct
  misc_feature 1..27: note = Angiomotin (17-25)
  source 1..27: mol_type = other RNA
cgcctgctccaggagcagctgcggtac

SEQ ID NO: 32875 - RNA, 27 nt, synthetic construct
  misc_feature 1..27: note = Protein Smaug homolog 2 (103-111)
  source 1..27: mol_type = other RNA
cgcctgctccagaaggtgctggcctac

SEQ ID NO: 32876 - RNA, 27 nt, synthetic construct
  misc_feature 1..27: note = N-acetylgalactosamine-6-sulfatase (376-384)
  source 1..27: mol_type = other RNA
cgcctgatggaccggcccatcttctac

SEQ ID NO: 32877 - RNA, 27 nt, synthetic construct
  misc_feature 1..27: note = Beta-catenin-like protein 1 (330-338)
  source 1..27: mol_type = other RNA
cgcctgatggagctccacttcaagtac

SEQ ID NO: 32878 - RNA, 27 nt, synthetic construct
  misc_feature 1..27: note = Mitochondrial folate transporter/carrier (251-259)
  source 1..27: mol_type = other RNA
cgcctgcaggaccagcacatgttctac

SEQ ID NO: 32879 - RNA, 27 nt, synthetic construct
  misc_feature 1..27: note = Probable C-mannosyltransferase DPY19L3 (411-419)
  source 1..27: mol_type = other RNA
cgcctgagcgacaccctcctgttctac

SEQ ID NO: 32880 - RNA, 27 nt, synthetic construct
  misc_feature 1..27: note = Vacuolar protein sorting-associated protein 4A (30-38)
  source 1..27: mol_type = other RNA
cgcctgtaccagcacgccgtggagtac

SEQ ID NO: 32881 - RNA, 33 nt, synthetic construct
  misc_feature 1..33: note = Src substrate cortactin (94-104)
  source 1..33: mol_type = other RNA
cgcatggacaagagcgccgtgggccacgagtac

SEQ ID NO: 32882 - RNA, 27 nt, synthetic construct
  misc_feature 1..27: note = ATP-dependent RNA helicase DDX42 (292-300)
  source 1..27: mol_type = other RNA
cgcatgttcgacatgggcttcgagtac

SEQ ID NO: 32883 - RNA, 27 nt, synthetic construct
  misc_feature 1..27: note = Signal peptidase complex catalytic subunit SEC11A (12-20)
  source 1..27: mol_type = other RNA
cgcatgaacaagcggcagctgtactac

SEQ ID NO: 32884 - RNA, 27 nt, synthetic construct
  misc_feature 1..27: note = 60S ribosomal protein L24 (47-55)
  source 1..27: mol_type = other RNA
cgccagatcaactggaccgtgctgtac

SEQ ID NO: 32885 - RNA, 39 nt, synthetic construct
  misc_feature 1..39: note = Annexin A5 (245-257)
  source 1..39: mol_type = other RNA
cgcagcatccccgcctacctggccgagaccctctactac

SEQ ID NO: 32886 - RNA, 27 nt, synthetic construct
  misc_feature 1..27: note = Nuclear pore complex protein Nup160 (729-737)
  source 1..27: mol_type = other RNA
cgcaccgcccccctgctcctgagctac

SEQ ID NO: 32887 - RNA, 30 nt, synthetic construct
  misc_feature 1..30: note = Matrin-3 (149-158)
  source 1..30: mol_type = other RNA
cgcaccgaggagggccccaccctgagctac

SEQ ID NO: 32888 - RNA, 27 nt, synthetic construct
  misc_feature 1..27: note = 26S proteasome non-ATPase regulatory subunit 2 (673-681)
  source 1..27: mol_type = other RNA
cgcaccttcggccacctgctccggtac

SEQ ID NO: 32889 - RNA, 27 nt, synthetic construct
  misc_feature 1..27: note = Tyrosine-protein phosphatase non-receptor type 23 (1272-1280)
  source 1..27: mol_type = other RNA
cgcaccggcgccttcgccctgctctac

SEQ ID NO: 32890 - RNA, 27 nt, synthetic construct
  misc_feature 1..27: note = Msx2-interacting protein (176-184)
  source 1..27: mol_type = other RNA
cgcaccctgcagcacggcctctactac

SEQ ID NO: 32891 - RNA, 27 nt, synthetic construct
  misc_feature 1..27: note = NFX1-type zinc finger-containing protein 1 (334-342)
  source 1..27: mol_type = other RNA
cgcaccatgcccatctacccgacctac

SEQ ID NO: 32892 - RNA, 27 nt, synthetic construct
  misc_feature 1..27: note = UPF0505 protein C16orf62 (929-937)
  source 1..27: mol_type = other RNA
cgcaccatggtgaagaccctggagtac

SEQ ID NO: 32893 - RNA, 36 nt, synthetic construct
  misc_feature 1..36: note = DNA damage-regulated autophagy modulator protein 2 (236-247)
  source 1..36: mol_type = other RNA
cgcgtggaggccaacctgcacggcctcaccctgtac

SEQ ID NO: 32894 - RNA, 39 nt, synthetic construct
  misc_feature 1..39: note = Eukaryotic translation initiation factor 3 subunit C-like protein (873-885)
  source 1..39: mol_type = other RNA
cgcgtgttcgaccacaagcagggcacctacgggggctac

SEQ ID NO: 32895 - RNA, 30 nt, synthetic construct
  misc_feature 1..30: note = Semaphorin-4C (339-348)
  source 1..30: mol_type = other RNA
cgcgtgttcgagggcccctacaaggagtac

SEQ ID NO: 32896 - RNA, 27 nt, synthetic construct
  misc_feature 1..27: note = Niemann-Pick C1 protein (1077-1085)
  source 1..27: mol_type = other RNA
cgcgtgttcccctacagcgtcttctac

SEQ ID NO: 32897 - RNA, 33 nt, synthetic construct
  misc_feature 1..33: note = 26S protease regulatory subunit 4 (249-259)
  source 1..33: mol_type = other RNA
cgcgtggtcggcagcgagctgatccagaagtac

SEQ ID NO: 32898 - RNA, 27 nt, synthetic construct
  misc_feature 1..27: note = HLA class II histocompatibility antigen, DRB1-4 beta chain (123-131)
  source 1..27: mol_type = other RNA
cgcgtgtaccccgaggtcaccgtgtac

SEQ ID NO: 32899 - RNA, 27 nt, synthetic construct
  misc_feature 1..27: note = Sorting nexin-17 (432-440)
  source 1..27: mol_type = other RNA
agcgcctccgacgtgcacggcaacttc

SEQ ID NO: 32900 - RNA, 27 nt, synthetic construct
  misc_feature 1..27: note = Splicing factor 3B subunit 3 (351-359)
  source 1..27: mol_type = other RNA
agcgagttcggcaaccactacctgtac

SEQ ID NO: 32901 - RNA, 27 nt, synthetic construct
  misc_feature 1..27: note = Mitotic checkpoint protein BUB3 (241-249)
  source 1..27: mol_type = other RNA
agcttccacaacatccacaacaccttc

SEQ ID NO: 32902 - RNA, 27 nt, synthetic construct
  misc_feature 1..27: note = Transmembrane 9 superfamily member 2 (545-553)
  source 1..27: mol_type = other RNA
agcatctggtcccaccagatgtactac

SEQ ID NO: 32903 - RNA, 30 nt, synthetic construct
  misc_feature 1..30: note = Vimentin (87-96)
  source 1..30: mol_type = other RNA
agcctggccgacgccatcaacaccgagttc

SEQ ID NO: 32904 - RNA, 30 nt, synthetic construct
  misc_feature 1..30: note = Protein PRRC1 (47-56)
  source 1..30: mol_type = other RNA
agcatggagtccttccccccgctggcctac

SEQ ID NO: 32905 - RNA, 27 nt, synthetic construct
  misc_feature 1..27: note = Heterogeneous nuclear ribonucleoprotein A1 (304-312)
  source 1..27: mol_type = other RNA
agcaacttcggcgggggcgggtcctac

SEQ ID NO: 32906 - RNA, 36 nt, synthetic construct
  misc_feature 1..36: note = Cyclin-dependent kinase 19 (490-501)
  source 1..36: mol_type = other RNA
agccagtaccacccctcccaccaggcccaccgctac

SEQ ID NO: 32907 - RNA, 27 nt, synthetic construct
  misc_feature 1..27: note = Pre-mRNA-splicing factor ATP-dependent RNA helicase DHX15 (227-235)
  source 1..27: mol_type = other RNA
agctccgccaagaccatcctgaagtac

SEQ ID NO: 32908 - RNA, 27 nt, synthetic construct
  misc_feature 1..27: note = Probable glutamate-tRNA ligase, mitochondrial (249-257)
  source 1..27: mol_type = other RNA
agcaccgccaagcacctgctcctgtac

SEQ ID NO: 32909 - RNA, 27 nt, synthetic construct
  misc_feature 1..27: note = Chondroitin sulfate proteoglycan 4 (745-753)
  source 1..27: mol_type = other RNA
agcaccgacccccagcaccacgcctac

SEQ ID NO: 32910 - RNA, 27 nt, synthetic construct
  misc_feature 1..27: note = Peroxisomal carnitine O-octanoyltransferase (8-16)
  source 1..27: mol_type = other RNA
agcaccgaggagcgcaccttccagtac

SEQ ID NO: 32911 - RNA, 33 nt, synthetic construct
  misc_feature 1..33: note = WD repeat-containing protein 44 (34-44)
  source 1..33: mol_type = other RNA
agcaccttcaaggagaccgagaacacggcctac

SEQ ID NO: 32912 - RNA, 27 nt, synthetic construct
  misc_feature 1..27: note = Serine/threonine-protein kinase mTOR (1766-1774)
  source 1..27: mol_type = other RNA
agcaccatccccaaggtgctgcagtac

SEQ ID NO: 32913 - RNA, 27 nt, synthetic construct
  misc_feature 1..27: note = ADP-ribosylation factor GTPase-activating protein 3 (97-105)
  source 1..27: mol_type = other RNA
agcaccaacgacaccaacgccaagtac

SEQ ID NO: 32914 - RNA, 33 nt, synthetic construct
  misc_feature 1..33: note = Cytochrome c oxidase subunit 1 (9-19)
  source 1..33: mol_type = other RNA
agcaccaaccacaaggacatcggcaccctgtac

SEQ ID NO: 32915 - RNA, 27 nt, synthetic construct
  misc_feature 1..27: note = Syntaxin-binding protein 1 (511-519)
  source 1..27: mol_type = other RNA
agcaccaccgccgtgtccgcccgctac

SEQ ID NO: 32916 - RNA, 27 nt, synthetic construct
  misc_feature 1..27: note = Regulator of microtubule dynamics protein 1 (209-217)
  source 1..27: mol_type = other RNA
agcacctacgagaaggccctgggctac

SEQ ID NO: 32917 - RNA, 27 nt, synthetic construct
  misc_feature 1..27: note = GPI transamidase component PIG-S (261-269)
  source 1..27: mol_type = other RNA
agcgtggactcccagatcctgtactac

SEQ ID NO: 32918 - RNA, 27 nt, synthetic construct
  misc_feature 1..27: note = Ubiquitin-protein ligase E3C (150-158)
  source 1..27: mol_type = other RNA
agcgtgatcgagcagatcctgcactac

SEQ ID NO: 32919 - RNA, 27 nt, synthetic construct
  misc_feature 1..27: note = Transcription elongation regulator 1 (419-427)
  source 1..27: mol_type = other RNA
accgccgacggcaagacctactactac

SEQ ID NO: 32920 - RNA, 27 nt, synthetic construct
  misc_feature 1..27: note = Sorting nexin-9 (146-154)
  source 1..27: mol_type = other RNA
accgccttcggccacccccaggcctac

SEQ ID NO: 32921 - RNA, 27 nt, synthetic construct
  misc_feature 1..27: note = Heterogeneous nuclear ribonucleoprotein F (301-309)
  source 1..27: mol_type = other RNA
accgagaacgacatctacaacttcttc

SEQ ID NO: 32922 - RNA, 36 nt, synthetic construct
  misc_feature 1..36: note = N-acetylglucosamine-6-sulfatase (192-203)
  source 1..36: mol_type = other RNA
accatcgaccccgagctgctcggcaagatgaactac

SEQ ID NO: 32923 - RNA, 33 nt, synthetic construct
  misc_feature 1..33: note = Thymosin beta-4 (34-44)
  source 1..33: mol_type = other RNA
accatcgagcaggagaagcaggccggcgagagc

SEQ ID NO: 32924 - RNA, 27 nt, synthetic construct
  misc_feature 1..27: note = Integral membrane protein GPR155 (369-377)
  source 1..27: mol_type = other RNA
accatggaccccaagccgctggcctac

SEQ ID NO: 32925 - RNA, 27 nt, synthetic construct
  misc_feature 1..27: note = Intraflagellar transport protein 122 homolog (937-945)
  source 1..27: mol_type = other RNA
accatgctgggcaagttctaccacttc

SEQ ID NO: 32926 - RNA, 33 nt, synthetic construct
  misc_feature 1..33: note = Cytochrome c oxidase subunit 2 (182-192)
  source 1..33: mol_type = other RNA
accaccttcacggccacccgccccggcgtgtac

SEQ ID NO: 32927 - RNA, 36 nt, synthetic construct
  misc_feature 1..36: note = Cytochrome c oxidase subunit 2 (182-193)
  source 1..36: mol_type = other RNA
accaccttcacggccacccgccccggcgtgtactac

SEQ ID NO: 32928 - RNA, 27 nt, synthetic construct
  misc_feature 1..27: note = Calponin-3 (136-144)
  source 1..27: mol_type = other RNA
accaccatcgacatcggcgtgaagtac

SEQ ID NO: 32929 - RNA, 27 nt, synthetic construct
  misc_feature 1..27: note = E3 ubiquitin/ISG15 ligase TRIM25 (593-601)
  source 1..27: mol_type = other RNA
gtggccgacaaggtccacctgatgtac

SEQ ID NO: 32930 - RNA, 27 nt, synthetic construct
  misc_feature 1..27: note = T-complex protein 1 subunit eta (127-135)
  source 1..27: mol_type = other RNA
gtggccttcaagaagaccttcagctac

SEQ ID NO: 32931 - RNA, 27 nt, synthetic construct
  misc_feature 1..27: note = General transcription factor II-I (324-332)
  source 1..27: mol_type = other RNA
gtggaggagctgttcgagcgcaagtac

SEQ ID NO: 32932 - RNA, 27 nt, synthetic construct
  misc_feature 1..27: note = Inactive hydroxysteroid dehydrogenase-like protein 1 (133-141)
  source 1..27: mol_type = other RNA
gtgttctacccctacccgcagtacttc

SEQ ID NO: 32933 - RNA, 27 nt, synthetic construct
  misc_feature 1..27: note = NADH dehydrogenase (ubiquinone) 1 alpha subcomplex subunit 3 (30-38)
  source 1..27: mol_type = other RNA
gtgatcctgcccccgctcagcccctac

SEQ ID NO: 32934 - RNA, 27 nt, synthetic construct
  misc_feature 1..27: note = Tribbles homolog 3 (126-134)
  source 1..27: mol_type = other RNA
gtgctggccggcacccagctcctgtac

SEQ ID NO: 32935 - RNA, 27 nt, synthetic construct
  misc_feature 1..27: note = Transketolase (50-58)
  source 1..27: mol_type = other RNA
gtgctgttcttccacaccatgcgctac

SEQ ID NO: 32936 - RNA, 27 nt, synthetic construct
  misc_feature 1..27: note = Unconventional myosin-Id (415-423)
  source 1..27: mol_type = other RNA
gtgctgaagcaggagcaggaggagtac

SEQ ID NO: 32937 - RNA, 27 nt, synthetic construct
  misc_feature 1..27: note = Calcyclin-binding protein (63-71)
  source 1..27: mol_type = other RNA
gtggtcgcccccatcaccaccggctac

SEQ ID NO: 32938 - RNA, 27 nt, synthetic construct
  misc_feature 1..27: note = Nischarin (324-332)
  source 1..27: mol_type = other RNA
gtggtcgacaacctgcagcacctctac

SEQ ID NO: 32939 - RNA, 27 nt, synthetic construct
  misc_feature 1..27: note = F-box only protein 31 (26-34)
  source 1..27: mol_type = other RNA
gtgtacgccaagctgctccaccgctac

SEQ ID NO: 32940 - RNA, 27 nt, synthetic construct
  misc_feature 1..27: note = DNA replication licensing factor MCM7 (101-109)
  source 1..27: mol_type = other RNA
gtgtacatcgagcaccgcctgatgatg

SEQ ID NO: 32941 - RNA, 27 nt, synthetic construct
  misc_feature 1..27: note = MORN repeat-containing protein 1 (31-39)
  source 1..27: mol_type = other RNA
gtgtaccccaacagcttcttccgctac

SEQ ID NO: 32942 - RNA, 30 nt, synthetic construct
  misc_feature 1..30: note = Glycoprotein endo-alpha-1,2-mannosidase-like protein (101-110)
  source 1..30: mol_type = other RNA
gtgtacagcgacctgcacgccttctactac

SEQ ID NO: 32943 - RNA, 30 nt, synthetic construct
  misc_feature 1..30: note = Prolyl endopeptidase (178-187)
  source 1..30: mol_type = other RNA
tggacccacgacggcaaggggatgttctac

SEQ ID NO: 32944 - RNA, 27 nt, synthetic construct
  misc_feature 1..27: note = Vimentin (53-61)
  source 1..27: mol_type = other RNA
tacgccagctcccccggcggggtgtac

SEQ ID NO: 32945 - RNA, 27 nt, synthetic construct
  misc_feature 1..27: note = NmrA-like family domain-containing protein 1 (73-81)
  source 1..27: mol_type = other RNA
tacgccaccttcatcgtgaccaactac

SEQ ID NO: 32946 - RNA, 27 nt, synthetic construct
  misc_feature 1..27: note = Leukocyte receptor cluster member 8 (111-119)
  source 1..27: mol_type = other RNA
tacgcctacccctacagctactactac

SEQ ID NO: 32947 - RNA, 36 nt, synthetic construct
  misc_feature 1..36: note = RNMT-activating mini protein (107-118)
  source 1..36: mol_type = other RNA
tacggctacaaccagcgccccccgtacgggtactac

SEQ ID NO: 32948 - RNA, 27 nt, synthetic construct
  misc_feature 1..27: note = Serine/threonine-protein kinase NLK (415-423)
  source 1..27: mol_type = other RNA
tacctggacgagggccgcctccggtac

SEQ ID NO: 32949 - RNA, 27 nt, synthetic construct
  misc_feature 1..27: note = chromosome 1 open reading frame 9, isoform CRA_e (1086-1094)
  source 1..27: mol_type = other RNA
tacctggaggagctcagccagcgctac

SEQ ID NO: 32950 - RNA, 27 nt, synthetic construct
  misc_feature 1..27: note = Chromodomain-helicase-DNA-binding protein 1-like (385-393)
  source 1..27: mol_type = other RNA
tacatggactaccgcggctacagctac

SEQ ID NO: 32951 - RNA, 30 nt, synthetic construct
  misc_feature 1..30: note = RNMT-activating mini protein (109-118)
  source 1..30: mol_type = other RNA
tacaaccagcgccccccgtacggctactac

SEQ ID NO: 32952 - RNA, 30 nt, synthetic construct
  misc_feature 1..30: note = ATP-dependent RNA helicase DDX3X (643-652)
  source 1..30: mol_type = other RNA
tacaacagcgacggctacgggggcaactac

SEQ ID NO: 32953 - RNA, 27 nt, synthetic construct
  misc_feature 1..27: note = Histone acetyltransferase KAT6B (551-559)
  source 1..27: mol_type = other RNA
tacagctccccctacccgcaggagtac

SEQ ID NO: 32954 - RNA, 27 nt, synthetic construct
  misc_feature 1..27: note = RNA-binding protein EWS (21-29)
  source 1..27: mol_type = other RNA
tacaccgcccagcccacccagggctac

SEQ ID NO: 32955 - RNA, 30 nt, synthetic construct
  misc_feature 1..30: note = Protein FAM26F (92-101)
  source 1..30: mol_type = other RNA
tacaccttcaaccccaagggccagtactac

SEQ ID NO: 32956 - RNA, 27 nt, synthetic construct
  misc_feature 1..27: note = MORN repeat-containing protein 2 (30-38)
  source 1..27: mol_type = other RNA
tacaccttccccaacggcgccaagtac

SEQ ID NO: 32957 - RNA, 27 nt, synthetic construct
  misc_feature 1..27: note = Probable ATP-dependent RNA helicase YTHDC2 (389-397)
  source 1..27: mol_type = other RNA
tacaccaacaaggagatgctgaagtac

SEQ ID NO: 32958 - RNA, 27 nt, synthetic construct
  misc_feature 1..27: note = Probable dolichyl pyrophosphate Glc1Man9GlcNAc2 alpha-1,3-glucosyltransferase (204-212)
  source 1..27: mol_type = other RNA
tacgtggcccccgcctacggcgtctac

SEQ ID NO: 32959 - RNA, 27 nt, synthetic construct
  misc_feature 1..27: note = Filamin-A (1581-1589)
  source 1..27: mol_type = other RNA
tacgtgcccgacgtcaccggccgctac

SEQ ID NO: 32960 - RNA, 27 nt, synthetic construct
  misc_feature 1..27: note = Leucine-rich repeat-containing protein 1 (26-34)
  source 1..27: mol_type = other RNA
tacgtgcccgaggagatctaccgctac

SEQ ID NO: 32961 - RNA, 27 nt, synthetic construct
  misc_feature 1..27: note = Ectopic P granules protein 5 homolog (664-672)
  source 1..27: mol_type = other RNA
tacgtgagcgaccactgggcccagtac

SEQ ID NO: 32962 - RNA, 27 nt, synthetic construct
  misc_feature 1..27: note = Sphingomyelin phosphodiesterase 2 (133-141)
  source 1..27: mol_type = other RNA
tacgtgacccacctgcacgccgagtac

SEQ ID NO: 32963 - RNA, 30 nt, synthetic construct
  misc_feature 1..30: note = MORN repeat-containing protein 1 (30-39)
  source 1..30: mol_type = other RNA
tacgtgtaccccaacagcttcttccgctac

SEQ ID NO: 32964 - RNA, 27 nt, synthetic construct
  misc_feature 1..27: note = Protein polybromo-1 (132-140)
  source 1..27: mol_type = other RNA
tactacaagcccgacagcccggagtac

SEQ ID NO: 32965 - RNA, 27 nt, synthetic construct
  misc_feature 1..27: note = V-type proton ATPase subunit d 1 (7-15)
  source 1..27: mol_type = other RNA
tactaccccgagtacaagctgctcttc

SEQ ID NO: 32966 - RNA, 51 nt, synthetic construct
  misc_feature 1..51: note = Calmodulin (133-149)
  source 1..51: mol_type = other RNA
ggcgacgggcaggtgaactacgaggagttcgtccagatgatgaccgccaag

SEQ ID NO: 32967 - RNA, 69 nt, synthetic construct
  misc_feature 1..69: note = Myosin regulatory light chain 12B (150-172)
  source 1..69: mol_type = other RNA
aagaagggcaacttcaactacatcgagttcacccgcatcctgaagcacggggccaaggacaaggacgac

SEQ ID NO: 32968 - RNA, 63 nt, synthetic construct
  misc_feature 1..63: note = HLA class I histocompatibility antigen, B-55 alpha chain (52-72)
  source 1..63: mol_type = other RNA
gtggacgacacccagttcgtccgcttcgacagcgacgccgcctccccccgggaggagccgcgc

SEQ ID NO: 32969 - RNA, 39 nt, synthetic construct
  misc_feature 1..39: note = Sorting nexin-6 (245-257)
  source 1..39: mol_type = other RNA
gccgccgacgactacaaccgcatcggcagctccctgtac

SEQ ID NO: 32970 - RNA, 27 nt, synthetic construct
  misc_feature 1..27: note = Peptidyl-prolyl cis-trans isomerase-like 2 (27-35)
  source 1..27: mol_type = other RNA
gccatcgacgaggacgtgctgcgctac

SEQ ID NO: 32971 - RNA, 27 nt, synthetic construct
  misc_feature 1..27: note = Nucleolar GTP-binding protein 2 (416-424)
  source 1..27: mol_type = other RNA
gccctggacgagaagatcgccaagtac

SEQ ID NO: 32972 - RNA, 30 nt, synthetic construct
  misc_feature 1..30: note = Serine/threonine-protein kinase MRCK alpha (1203-1212)
  source 1..30: mol_type = other RNA
gccctggacggccgcgagaccgacttctac

SEQ ID NO: 32973 - RNA, 36 nt, synthetic construct
  misc_feature 1..36: note = Cleavage stimulation factor subunit 3 (120-131)
  source 1..36: mol_type = other RNA
gccctggacaagatcggcatggagatcatgagctac

SEQ ID NO: 32974 - RNA, 36 nt, synthetic construct
  misc_feature 1..36: note = 2-oxoisovalerate dehydrogenase subunit alpha, mitochondrial (80-91)
  source 1..36: mol_type = other RNA
gccctggacaacaccgacctcgtgttcggccagtac

SEQ ID NO: 32975 - RNA, 39 nt, synthetic construct
  misc_feature 1..39: note = Structural maintenance of chromosomes protein 1A (1161-1173)
  source 1..39: mol_type = other RNA
gccctggacaacaccaacatcggcaaggtggccaactac

SEQ ID NO: 32976 - RNA, 27 nt, synthetic construct
  misc_feature 1..27: note = Ubiquitin-like modifier-activating enzyme 6 (331-339)
  source 1..27: mol_type = other RNA
gccctggaccagttccaggagaagtac

SEQ ID NO: 32977 - RNA, 27 nt, synthetic construct
  misc_feature 1..27: note = SWI/SNF-related matrix-associated actin-dependent regulator of chromatin subfamily A member 5 (920-928)
  source 1..27: mol_type = other RNA
gccctggacaccaagatcggccgctac

SEQ ID NO: 32978 - RNA, 27 nt, synthetic construct
  misc_feature 1..27: note = Eukaryotic translation initiation factor 3 subunit E (54-62)
  source 1..27: mol_type = other RNA
gccatggacgtgtacaagaacctgtac

SEQ ID NO: 32979 - RNA, 27 nt, synthetic construct
  misc_feature 1..27: note = SAFB-like transcription modulator (735-743)
  source 1..27: mol_type = other RNA
gcccgcttcggccacgggagcgactac

SEQ ID NO: 32980 - RNA, 30 nt, synthetic construct
  misc_feature 1..30: note = Putative heat shock protein HSP 90-beta 2 (88-97)
  source 1..30: mol_type = other RNA
gccagcgacgccctggacaagatccgctac

SEQ ID NO: 32981 - RNA, 30 nt, synthetic construct
  misc_feature 1..30: note = Gelsolin (362-371)
  source 1..30: mol_type = other RNA
gccagcgacttcatcaccaagatggactac

SEQ ID NO: 32982 - RNA, 27 nt, synthetic construct
  misc_feature 1..27: note = Ubiquitin-like protein 3 (32-40)
  source 1..27: mol_type = other RNA
gccagcgacatcgccaagcacgtgtac

SEQ ID NO: 32983 - RNA, 33 nt, synthetic construct
  misc_feature 1..33: note = Proteasome-associated protein ECM29 homolog (1073-1083)
  source 1..33: mol_type = other RNA
gccagcgacctgtcccagcccgacctcgtgtac

SEQ ID NO: 32984 - RNA, 27 nt, synthetic construct
  misc_feature 1..27: note = Kelch repeat and BTB domain-containing protein 6 (147-155)
  source 1..27: mol_type = other RNA
gccagcgacatgctgcagctcgagtac

SEQ ID NO: 32985 - RNA, 27 nt, synthetic construct
  misc_feature 1..27: note = GPN-loop GTPase 2 (210-218)
  source 1..27: mol_type = other RNA
gccagcgaccccttcttccgccactac

SEQ ID NO: 32986 - RNA, 33 nt, synthetic construct
  misc_feature 1..33: note = WD repeat-containing protein 81 (817-827)
  source 1..33: mol_type = other RNA
gccagcgaccccatccacaccttcgacctgtac

SEQ ID NO: 32987 - RNA, 27 nt, synthetic construct
  misc_feature 1..27: note = DNA-directed RNA polymerase II subunit RPB2 (1103-1111)
  source 1..27: mol_type = other RNA
gccagcgacccctaccaggtgcacgtc

SEQ ID NO: 32988 - RNA, 27 nt, synthetic construct
  misc_feature 1..27: note = DDB1- and CUL4-associated factor 13 (368-376)
  source 1..27: mol_type = other RNA
gccagcgaccgcaacatcgtgctgtac

SEQ ID NO: 32989 - RNA, 30 nt, synthetic construct
  misc_feature 1..30: note = Probable ATP-dependent RNA helicase DHX37 (105-114)
  source 1..30: mol_type = other RNA
gccagcgaggccgagatgcgcctgttctac

SEQ ID NO: 32990 - RNA, 36 nt, synthetic construct
  misc_feature 1..36: note = Platelet-activating factor acetylhydrolase IB subunit alpha (4-15)
  source 1..36: mol_type = other RNA
gccagcgaggacgccaccatcaaggtgtgggactac

SEQ ID NO: 32991 - RNA, 30 nt, synthetic construct
  misc_feature 1..30: note = T-complex protein 11-like protein 1 (271-280)
  source 1..30: mol_type = other RNA
gccagcgaggacctgatgacccagaagtac

SEQ ID NO: 32992 - RNA, 30 nt, synthetic construct
  misc_feature 1..30: note = Splicing factor 3B subunit 3 (350-359)
  source 1..30: mol_type = other RNA
gccagcgagttcggcaaccactacctgtac

SEQ ID NO: 32993 - RNA, 39 nt, synthetic construct
  misc_feature 1..39: note = Aspartate-tRNA ligase, cytoplasmic (226-238)
  source 1..39: mol_type = other RNA
gccagcgagggcggggccaacgtgttcaccgtctcctac

SEQ ID NO: 32994 - RNA, 42 nt, synthetic construct
  misc_feature 1..42: note = MAP kinase-activated protein kinase 2 (163-176)
  source 1..42: mol_type = other RNA
gccagcgagatcatgaagtccatcggcgaggccatccagtac

SEQ ID NO: 32995 - RNA, 39 nt, synthetic construct
  misc_feature 1..39: note = Thyroid receptor-interacting protein 11 (84-96)
  source 1..39: mol_type = other RNA
gccagcgagatccagatcaagcagcagtccaccagctac

SEQ ID NO: 32996 - RNA, 36 nt, synthetic construct
  misc_feature 1..36: note = Clusterin-associated protein 1 (160-171)
  source 1..36: mol_type = other RNA
gccagcgagatcacctccaagggcgccagcctgtac

SEQ ID NO: 32997 - RNA, 27 nt, synthetic construct
  misc_feature 1..27: note = Cleavage stimulation factor subunit 3 (70-78)
  source 1..27: mol_type = other RNA
gccagcgagctgaaggccctcggctac

SEQ ID NO: 32998 - RNA, 36 nt, synthetic construct
  misc_feature 1..36: note = DNA-dependent protein kinase catalytic subunit (2173-2184)
  source 1..36: mol_type = other RNA
gccagcgagaacaacggcggggagggcatccactac

SEQ ID NO: 32999 - RNA, 30 nt, synthetic construct
  misc_feature 1..30: note = Exocyst complex component 4 (72-81)
  source 1..30: mol_type = other RNA
gccagcgagccctccgcccagctgagctac

SEQ ID NO: 33000 - RNA, 36 nt, synthetic construct
  misc_feature 1..36: note = Nucleoporin NUP188 homolog (766-777)
  source 1..36: mol_type = other RNA
gccagcgagcagcaggccctgcacaccgtgcagtac

SEQ ID NO: 33001 - RNA, 33 nt, synthetic construct
  misc_feature 1..33: note = Ubiquitin carboxyl-terminal hydrolase 32 (141-151)
  source 1..33: mol_type = other RNA
gccagcgagaccgccggctccgggttcctgtac

SEQ ID NO: 33002 - RNA, 30 nt, synthetic construct
  misc_feature 1..30: note = Low-density lipoprotein receptor class A domain-containing protein 3 (250-259)
  source 1..30: mol_type = other RNA
gccagcgaggtgggctcccccccgagctac

SEQ ID NO: 33003 - RNA, 27 nt, synthetic construct
  misc_feature 1..27: note = Homeodomain-interacting protein kinase 2 (404-412)
  source 1..27: mol_type = other RNA
gccagcgagtacgaccagatccgctac

SEQ ID NO: 33004 - RNA, 36 nt, synthetic construct
  misc_feature 1..36: note = Amyloid protein-binding protein 2 (330-341)
  source 1..36: mol_type = other RNA
gccaccgcccacgaggacctggcgtacagctcctac

SEQ ID NO: 33005 - RNA, 39 nt, synthetic construct
  misc_feature 1..39: note = Zinc finger protein 318 (1381-1393)
  source 1..39: mol_type = other RNA
gccaccgccaacgcgaaggacctgtacgacatcttctac

SEQ ID NO: 33006 - RNA, 39 nt, synthetic construct
  misc_feature 1..39: note = E3 ubiquitin-protein ligase BRE1B (85-97)
  source 1..39: mol_type = other RNA
gccaccgacgacgccaccctgctcatcgtgaaccgctac

SEQ ID NO: 33007 - RNA, 27 nt, synthetic construct
  misc_feature 1..27: note = O-acetyl-ADP-ribose deacetylase 1 (142-150)
  source 1..27: mol_type = other RNA
gccaccgacatcaagatcaccgtgtac

SEQ ID NO: 33008 - RNA, 27 nt, synthetic construct
  misc_feature 1..27: note = Coiled-coil domain-containing protein 141 (498-506)
  source 1..27: mol_type = other RNA
gccaccgacctggcccagcacctctac

SEQ ID NO: 33009 - RNA, 30 nt, synthetic construct
  misc_feature 1..30: note = Endoribonuclease Dicer (239-248)
  source 1..30: mol_type = other RNA
gccaccgacctggtggtcctcgaccgctac

SEQ ID NO: 33010 - RNA, 30 nt, synthetic construct
  misc_feature 1..30: note = EVI5-like protein (131-140)
  source 1..30: mol_type = other RNA
gccaccgacatgcccgtgaagaaccagtac

SEQ ID NO: 33011 - RNA, 27 nt, synthetic construct
  misc_feature 1..27: note = Dystonin (4021-4029)
  source 1..27: mol_type = other RNA
gccaccgaccgcttccggagcctgtac

SEQ ID NO: 33012 - RNA, 39 nt, synthetic construct
  misc_feature 1..39: note = MAP kinase-interacting serine/threonine-protein kinase 2 (71-83)
  source 1..39: mol_type = other RNA
gccaccgacagcttctccggccgcttcgaggacgtgtac

SEQ ID NO: 33013 - RNA, 30 nt, synthetic construct
  misc_feature 1..30: note = Nicotinamide phosphoribosyltransferase (14-23)
  source 1..30: mol_type = other RNA
gccaccgacagctacaaggtgacccactac

SEQ ID NO: 33014 - RNA, 39 nt, synthetic construct
  misc_feature 1..39: note = Spectrin beta chain, non-erythrocytic 1 (6-18)
  source 1..39: mol_type = other RNA
gccaccgactacgacaacatcgagatccagcagcagtac

SEQ ID NO: 33015 - RNA, 27 nt, synthetic construct
  misc_feature 1..27: note = Fibronectin type III domain-containing protein 3B (348-356)
  source 1..27: mol_type = other RNA
gccaccgactaccacgtgcgcgtctac

SEQ ID NO: 33016 - RNA, 33 nt, synthetic construct
  misc_feature 1..33: note = Coatomer subunit beta' (480-490)
  source 1..33: mol_type = other RNA
gccaccgaggagagcttcttcatcctgaagtac

SEQ ID NO: 33017 - RNA, 27 nt, synthetic construct
  misc_feature 1..27: note = Cytoplasmic dynein 1 heavy chain 1 (3596-3604)
  source 1..27: mol_type = other RNA
gccaccgagttcatcatgaacgagtac

SEQ ID NO: 33018 - RNA, 39 nt, synthetic construct
  misc_feature 1..39: note = T-complex protein 1 subunit theta (414-426)
  source 1..39: mol_type = other RNA
gccaccgagatcgagctggccaagcagatcaccagctac

SEQ ID NO: 33019 - RNA, 42 nt, synthetic construct
  misc_feature 1..42: note = Protein PRRC2A (1894-1907)
  source 1..42: mol_type = other RNA
gccaccgagctgggcaagctccccgccgggggcgtgctgtac

SEQ ID NO: 33020 - RNA, 27 nt, synthetic construct
  misc_feature 1..27: note = Eukaryotic translation initiation factor 3 subunit D (422-430)
  source 1..27: mol_type = other RNA
gccaccgagctgaagaacaacagctac

SEQ ID NO: 33021 - RNA, 27 nt, synthetic construct
  misc_feature 1..27: note = Serine/threonine-protein kinase SMG1 (2701-2709)
  source 1..27: mol_type = other RNA
gccaccgagatgaccctgcagcgctac

SEQ ID NO: 33022 - RNA, 36 nt, synthetic construct
  misc_feature 1..36: note = Protein phosphatase 1G (149-160)
  source 1..36: mol_type = other RNA
gccaccatgaccatcgaggagctgctcacgcgctac

SEQ ID NO: 33023 - RNA, 33 nt, synthetic construct
  misc_feature 1..33: note = Alpha-catulin (401-411)
  source 1..33: mol_type = other RNA
gccacccagctggccgcggacctcctgaagtac

SEQ ID NO: 33024 - RNA, 30 nt, synthetic construct
  misc_feature 1..30: note = 60S ribosomal protein L8 (27-36)
  source 1..30: mol_type = other RNA
gccgtggacttcgccgagcgccacggctac

SEQ ID NO: 33025 - RNA, 30 nt, synthetic construct
  misc_feature 1..30: note = Nuclear pore complex protein Nup160 (1036-1045)
  source 1..30: mol_type = other RNA
gccgtggacctgatgacccacaactactac

SEQ ID NO: 33026 - RNA, 27 nt, synthetic construct
  misc_feature 1..27: note = Chromodomain-helicase-DNA-binding protein 8 (2348-2356)
  source 1..27: mol_type = other RNA
gccgtggacccccgcttcctggcctac

SEQ ID NO: 33027 - RNA, 36 nt, synthetic construct
  misc_feature 1..36: note = Short transient receptor potential channel 4-associated protein (530-541)
  source 1..36: mol_type = other RNA
gccgtggagagcttcctgcgcggcaccacctcctac

SEQ ID NO: 33028 - RNA, 30 nt, synthetic construct
  misc_feature 1..30: note = TOX high mobility group box family member 4 (107-116)
  source 1..30: mol_type = other RNA
gacctggaccacagcatcggcacccagtac

SEQ ID NO: 33029 - RNA, 33 nt, synthetic construct
  misc_feature 1..33: note = Nuclear factor of activated T-cells 5 (12-22)
  source 1..33: mol_type = other RNA
gacctggacctcgagagccccaagtccctgtac

SEQ ID NO: 33030 - RNA, 27 nt, synthetic construct
  misc_feature 1..27: note = Myocyte-specific enhancer factor 2A (61-69)
  source 1..27: mol_type = other RNA
gacatggacaaggtgctgctcaagtac

SEQ ID NO: 33031 - RNA, 30 nt, synthetic construct
  misc_feature 1..30: note = Elongator complex protein 5 (57-66)
  source 1..30: mol_type = other RNA
gacagcgacatcaacaaccgcctggtgtac

SEQ ID NO: 33032 - RNA, 36 nt, synthetic construct
  misc_feature 1..36: note = Tubulin beta chain (39-50)
  source 1..36: mol_type = other RNA
gacagcgacctgcagctcgaccgcatctccgtgtac

SEQ ID NO: 33033 - RNA, 39 nt, synthetic construct
  misc_feature 1..39: note = Tubulin beta chain (39-51)
  source 1..39: mol_type = other RNA
gacagcgacctgcagctcgaccgcatctccgtgtactac

SEQ ID NO: 33034 - RNA, 39 nt, synthetic construct
  misc_feature 1..39: note = Protein FAM13A (271-283)
  source 1..39: mol_type = other RNA
gacagcgaccccatgctgtccccgcgcttctacgcctac

SEQ ID NO: 33035 - RNA, 39 nt, synthetic construct
  misc_feature 1..39: note = Eukaryotic translation initiation factor 4B (229-241)
  source 1..39: mol_type = other RNA
gacagcgaccgctaccgggacggctaccgcgacgggtac

SEQ ID NO: 33036 - RNA, 36 nt, synthetic construct
  misc_feature 1..36: note = Eukaryotic translation initiation factor 4 gamma 3 (1501-1512)
  source 1..36: mol_type = other RNA
gacagcgacaccgagaaggagctgcaggccctctac

SEQ ID NO: 33037 - RNA, 36 nt, synthetic construct
  misc_feature 1..36: note = GPI transamidase component PIG-T (51-62)
  source 1..36: mol_type = other RNA
gacagcgagctgcagcgcgagggcgtgtcccactac

SEQ ID NO: 33038 - RNA, 30 nt, synthetic construct
  misc_feature 1..30: note = Inositol 1,4,5-trisphosphate receptor type 1 (2098-2107)
  source 1..30: mol_type = other RNA
gacagcgagaacgccgagcgcatcctgtac

SEQ ID NO: 33039 - RNA, 27 nt, synthetic construct
  misc_feature 1..27: note = Transcription factor E2F3 (290-298)
  source 1..27: mol_type = other RNA
gacagcgagaaccagcgcctggcctac

SEQ ID NO: 33040 - RNA, 36 nt, synthetic construct
  misc_feature 1..36: note = Zinc finger MYND domain-containing protein 11 (140-151)
  source 1..36: mol_type = other RNA
gacagcgagcaggccgacatcgcccgcatgctgtac

SEQ ID NO: 33041 - RNA, 27 nt, synthetic construct
  misc_feature 1..27: note = Tubulin-specific chaperone cofactor E-like protein (299-307)
  source 1..27: mol_type = other RNA
gacagcgagcgcttcttcatccggtac

SEQ ID NO: 33042 - RNA, 33 nt, synthetic construct
  misc_feature 1..33: note = Matrin-3 (233-243)
  source 1..33: mol_type = other RNA
gacagcttcttcggcgagacctcccacaactac

SEQ ID NO: 33043 - RNA, 33 nt, synthetic construct
  misc_feature 1..33: note = Calcium and integrin-binding protein 1 (100-110)
  source 1..33: mol_type = other RNA
gacaccgccacccccgacatcaagagccactac

SEQ ID NO: 33044 - RNA, 36 nt, synthetic construct
  misc_feature 1..36: note = SAFB-like transcription modulator (732-743)
  source 1..36: mol_type = other RNA
gacaccgacgcccgcttcggccacgggagcgactac

SEQ ID NO: 33045 - RNA, 27 nt, synthetic construct
  misc_feature 1..27: note = Calnexin (92-100)
  source 1..27: mol_type = other RNA
gacaccgacgacgagatcgccaagtac

SEQ ID NO: 33046 - RNA, 30 nt, synthetic construct
  misc_feature 1..30: note = Phospholipid scramblase 4 (159-168)
  source 1..30: mol_type = other RNA
gacaccgacgacttcacccgcaacgcctac

SEQ ID NO: 33047 - RNA, 36 nt, synthetic construct
  misc_feature 1..36: note = Complex I intermediate-associated protein 30, mitochondrial (226-237)
  source 1..36: mol_type = other RNA
gacaccgacttcttccagcgcaccaaccagatgtac

SEQ ID NO: 33048 - RNA, 30 nt, synthetic construct
  misc_feature 1..30: note = Aspartate-tRNA ligase, cytoplasmic (384-393)
  source 1..30: mol_type = other RNA
gacaccgacttctacatcctggacaagtac

SEQ ID NO: 33049 - RNA, 27 nt, synthetic construct
  misc_feature 1..27: note = Replication protein A 70 kDa DNA-binding subunit (504-512)
  source 1..27: mol_type = other RNA
gacaccgagttccccaacttcaagtac

SEQ ID NO: 33050 - RNA, 27 nt, synthetic construct
  misc_feature 1..27: note = Adenylyl cyclase-associated protein 1 (344-352)
  source 1..27: mol_type = other RNA
gacaccgagctgaagcaggtggcctac

SEQ ID NO: 33051 - RNA, 27 nt, synthetic construct
  misc_feature 1..27: note = Actin, cytoplasmic 2 (77-85)
  source 1..27: mol_type = other RNA
gacgtggacatccgcaaggacctgtac

SEQ ID NO: 33052 - RNA, 27 nt, synthetic construct
  misc_feature 1..27: note = Heterogeneous nuclear ribonucleoprotein C-like 1 (32-40)
  source 1..27: mol_type = other RNA
gacgtggaggccatcttcagcaagtac

SEQ ID NO: 33053 - RNA, 30 nt, synthetic construct
  misc_feature 1..30: note = Protein arginine N-methyltransferase 7 (368-377)
  source 1..30: mol_type = other RNA
gaggccgagccccacccgctgtgggagtac

SEQ ID NO: 33054 - RNA, 27 nt, synthetic construct
  misc_feature 1..27: note = Melanoma-associated antigen D2 (338-346)
  source 1..27: mol_type = other RNA
gagatcgacaagaacgaccacctgtac

SEQ ID NO: 33055 - RNA, 33 nt, synthetic construct
  misc_feature 1..33: note = Annexin A1 (305-315)
  source 1..33: mol_type = other RNA
gagatcgacatgaacgacatcaaggccttctac

SEQ ID NO: 33056 - RNA, 30 nt, synthetic construct
  misc_feature 1..30: note = LIM domain kinase 2 (716-725)
  source 1..30: mol_type = other RNA
gagctggaccacaccgtgagcatgcagtac

SEQ ID NO: 33057 - RNA, 33 nt, synthetic construct
  misc_feature 1..33: note = NADPH-cytochrome P450 reductase (304-314)
  source 1..33: mol_type = other RNA
gagctggacatcagcgactccaagatccgctac

SEQ ID NO: 33058 - RNA, 33 nt, synthetic construct
  misc_feature 1..33: note = Splicing factor 3B subunit 2 (811-821)
  source 1..33: mol_type = other RNA
gagctggaccccatggccatgacccagaagtac

SEQ ID NO: 33059 - RNA, 33 nt, synthetic construct
  misc_feature 1..33: note = Peptidyl-prolyl cis-trans isomerase D (301-311)
  source 1..33: mol_type = other RNA
gagctggaccccagcaacaccaaggccctctac

SEQ ID NO: 33060 - RNA, 27 nt, synthetic construct
  misc_feature 1..27: note = Ankyrin repeat and IBR domain-containing protein 1 (229-237)
  source 1..27: mol_type = other RNA
gagctggaccgcttcatgcactactac

SEQ ID NO: 33061 - RNA, 27 nt, synthetic construct
  misc_feature 1..27: note = Plectin (502-510)
  source 1..27: mol_type = other RNA
gagctggaggacagcaccctccgctac

SEQ ID NO: 33062 - RNA, 30 nt, synthetic construct
  misc_feature 1..30: note = Small G protein signaling modulator 2 (307-316)
  source 1..30: mol_type = other RNA
gagctggagaagagcgtgtactgggactac

SEQ ID NO: 33063 - RNA, 30 nt, synthetic construct
  misc_feature 1..30: note = GPI transamidase component PIG-T (53-62)
  source 1..30: mol_type = other RNA
gagctgcagcgcgagggcgtgagccactac

SEQ ID NO: 33064 - RNA, 33 nt, synthetic construct
  misc_feature 1..33: note = 60S ribosomal protein L4 (254-264)
  source 1..33: mol_type = other RNA
gagagcgccttccgcaagctggacgagctctac

SEQ ID NO: 33065 - RNA, 30 nt, synthetic construct
  misc_feature 1..30: note = Protein-glutamate O-methyltransferase (101-110)
  source 1..30: mol_type = other RNA
gagagcgacggcaagtcccgctggttctac

SEQ ID NO: 33066 - RNA, 27 nt, synthetic construct
  misc_feature 1..27: note = Guanine nucleotide-binding protein subunit beta-5 (239-247)
  source 1..27: mol_type = other RNA
gagagcgacatcaactccgtgcgctac

SEQ ID NO: 33067 - RNA, 27 nt, synthetic construct
  misc_feature 1..27: note = Zinc transporter 5 (26-34)
  source 1..27: mol_type = other RNA
gagagcgactcccgccagatcttctac

SEQ ID NO: 33068 - RNA, 42 nt, synthetic construct
  misc_feature 1..42: note = Proteasome activator complex subunit 3 (182-195)
  source 1..42: mol_type = other RNA
gagagcgaggccgcctcctacctggaccagatcagccgctac

SEQ ID NO: 33069 - RNA, 36 nt, synthetic construct
  misc_feature 1..36: note = Myotubularin-related protein 5 (821-832)
  source 1..36: mol_type = other RNA
gagagcgagaaccgctcctacgagggcaccctgtac

SEQ ID NO: 33070 - RNA, 30 nt, synthetic construct
  misc_feature 1..30: note = Asparagine synthetase (glutamine-hydrolyzing) (389-398)
  source 1..30: mol_type = other RNA
gagagcgagcgcctgctccgggagctgtac

SEQ ID NO: 33071 - RNA, 33 nt, synthetic construct
  misc_feature 1..33: note = Peptidyl-prolyl cis-trans isomerase FKBP8 (167-177)
  source 1..33: mol_type = other RNA
gagaccgccatggtgaccgccgacagcaagtac

SEQ ID NO: 33072 - RNA, 30 nt, synthetic construct
  misc_feature 1..30: note = Eyes absent homolog 3 (87-96)
  source 1..30: mol_type = other RNA
gagaccgcctaccccggccagacccagtac

SEQ ID NO: 33073 - RNA, 30 nt, synthetic construct
  misc_feature 1..30: note = ATP-dependent RNA helicase DDX24 (571-580)
  source 1..30: mol_type = other RNA
gagaccgacgagaaggacttctacctgtac

SEQ ID NO: 33074 - RNA, 33 nt, synthetic construct
  misc_feature 1..33: note = TFIIH basal transcription factor complex helicase XPD subunit (251-261)
  source 1..33: mol_type = other RNA
gagaccgacgagcagcgcctgcgggacgagtac

SEQ ID NO: 33075 - RNA, 30 nt, synthetic construct
  misc_feature 1..30: note = Nicotinamide riboside kinase 1 (46-55)
  source 1..30: mol_type = other RNA
gagaccgacaagaacggcttcctgcagtac

SEQ ID NO: 33076 - RNA, 27 nt, synthetic construct
  misc_feature 1..27: note = RNA binding motif protein 22 (245-253)
  source 1..27: mol_type = other RNA
gagaccgacctgcgcaaccacttctac

SEQ ID NO: 33077 - RNA, 42 nt, synthetic construct
  misc_feature 1..42: note = PCNA-interacting partner (146-159)
  source 1..42: mol_type = other RNA
gagaccgacctgagcatccccacctccccgacgagcaagtac

SEQ ID NO: 33078 - RNA, 27 nt, synthetic construct
  misc_feature 1..27: note = Beta-mannosidase (118-126)
  source 1..27: mol_type = other RNA
gagaccgacaacatgttcaaccgctac

SEQ ID NO: 33079 - RNA, 39 nt, synthetic construct
  misc_feature 1..39: note = Probable ATP-dependent RNA helicase DDX17 (61-73)
  source 1..39: mol_type = other RNA
gagaccgaccgcgccggctacgccaacgggagcggctac

SEQ ID NO: 33080 - RNA, 27 nt, synthetic construct
  misc_feature 1..27: note = Synergin gamma (1198-1206)
  source 1..27: mol_type = other RNA
gagaccgacagcttcaagctggcctac

SEQ ID NO: 33081 - RNA, 33 nt, synthetic construct
  misc_feature 1..33: note = Probable ATP-dependent RNA helicase DDX56 (239-249)
  source 1..33: mol_type = other RNA
gagaccgaggaggacaagttcctgctcctgtac

SEQ ID NO: 33082 - RNA, 30 nt, synthetic construct
  misc_feature 1..30: note = Kremen protein 2 (104-113)
  source 1..30: mol_type = other RNA
gagaccgaggagggcatctactggcgctac

SEQ ID NO: 33083 - RNA, 27 nt, synthetic construct
  misc_feature 1..27: note = Intron-binding protein aquarius (887-895)
  source 1..27: mol_type = other RNA
gagaccgagaaggacttcagccgctac

SEQ ID NO: 33084 - RNA, 36 nt, synthetic construct
  misc_feature 1..36: note = Guanine nucleotide exchange factor VAV3 (683-694)
  source 1..36: mol_type = other RNA
gagaccgagctgatcaaccgcgtgaacagcacctac

SEQ ID NO: 33085 - RNA, 39 nt, synthetic construct
  misc_feature 1..39: note = DNA polymerase zeta catalytic subunit (827-839)
  source 1..39: mol_type = other RNA
gagaccgagcagagcttcggcctgtacgggaacaagtac

SEQ ID NO: 33086 - RNA, 33 nt, synthetic construct
  misc_feature 1..33: note = Protein transport protein Sec16A (1244-1254)
  source 1..33: mol_type = other RNA
gagaccgagcgcttccgggagctgctcctgtac

SEQ ID NO: 33087 - RNA, 27 nt, synthetic construct
  misc_feature 1..27: note = Dynamin-2 (455-463)
  source 1..27: mol_type = other RNA
gagaccgagcgcatcgtgaccacgtac

SEQ ID NO: 33088 - RNA, 27 nt, synthetic construct
  misc_feature 1..27: note = Integrin alpha-3 (1043-1051)
  source 1..27: mol_type = other RNA
gagaccgagcgcctgaccgacgactac

SEQ ID NO: 33089 - RNA, 33 nt, synthetic construct
  misc_feature 1..33: note = DnaJ homolog subfamily C member 7 (29-39)
  source 1..33: mol_type = other RNA
gagaccttcaaggagcagggcaacgcctactac

SEQ ID NO: 33090 - RNA, 33 nt, synthetic construct
  misc_feature 1..33: note = HLA class I histocompatibility antigen, B-8 alpha chain (21-31)
  source 1..33: mol_type = other RNA
gagacctgggccggcagccactccatgcgctac

SEQ ID NO: 33091 - RNA, 30 nt, synthetic construct
  misc_feature 1..30: note = Lamin-B1 (229-238)
  source 1..30: mol_type = other RNA
gaggtggacagcggccgccagatcgagtac

SEQ ID NO: 33092 - RNA, 30 nt, synthetic construct
  misc_feature 1..30: note = Fatty acid synthase (1244-1253)
  source 1..30: mol_type = other RNA
gaggtgctggccggccacgggcacctctac

SEQ ID NO: 33093 - RNA, 33 nt, synthetic construct
  misc_feature 1..33: note = Histone acetyltransferase type B catalytic subunit (191-201)
  source 1..33: mol_type = other RNA
ttcatcgacgtggacgacgagcgctggcactac

SEQ ID NO: 33094 - RNA, 33 nt, synthetic construct
  misc_feature 1..33: note = Protein Smaug homolog 2 (118-128)
  source 1..33: mol_type = other RNA
ttcatcgaggagagccgccagctgctctcctac

SEQ ID NO: 33095 - RNA, 36 nt, synthetic construct
  misc_feature 1..36: note = Interferon regulatory factor 2-binding protein-like (420-431)
  source 1..36: mol_type = other RNA
ttcatcgagtaccccaccggcagcgggaacgtgtac

SEQ ID NO: 33096 - RNA, 39 nt, synthetic construct
  misc_feature 1..39: note = Protein YIF1B (69-81)
  source 1..39: mol_type = other RNA
ttcctggccgaccccgtgagcaacatggccatggcgtac

SEQ ID NO: 33097 - RNA, 27 nt, synthetic construct
  misc_feature 1..27: note = Asparagine synthetase (glutamine-hydrolyzing) (337-345)
  source 1..27: mol_type = other RNA
ttcctggaccaccgcttcagctcctac

SEQ ID NO: 33098 - RNA, 30 nt, synthetic construct
  misc_feature 1..30: note = Phosphatidylinositol-binding clathrin assembly protein (109-118)
  source 1..30: mol_type = other RNA
ttcctggacaagagcggcctccaggggtac

SEQ ID NO: 33099 - RNA, 33 nt, synthetic construct
  misc_feature 1..33: note = Rho GTPase-activating protein 35 (733-743)
  source 1..33: mol_type = other RNA
ttcctggaccccgccagcgccggcatcgggtac

SEQ ID NO: 33100 - RNA, 33 nt, synthetic construct
  misc_feature 1..33: note = Ubiquitin carboxyl-terminal hydrolase 8 (552-562)
  source 1..33: mol_type = other RNA
ttcctggaccccatcaccggcaccttccgctac

SEQ ID NO: 33101 - RNA, 36 nt, synthetic construct
  misc_feature 1..36: note = Group XV phospholipase A2 (126-137)
  source 1..36: mol_type = other RNA
ttcctggaccccagcaagtccagcgtgggctcctac

SEQ ID NO: 33102 - RNA, 33 nt, synthetic construct
  misc_feature 1..33: note = Microtubule-associated protein 4 (103-113)
  source 1..33: mol_type = other RNA
ttcctggaggagaagatggcctaccaggagtac

SEQ ID NO: 33103 - RNA, 36 nt, synthetic construct
  misc_feature 1..36: note = Histone H4 (31-42)
  source 1..36: mol_type = other RNA
ttcctggagaacgtgatccgcgacgccgtcacctac

SEQ ID NO: 33104 - RNA, 30 nt, synthetic construct
  misc_feature 1..30: note = Adenylate cyclase type 3 (615-624)
  source 1..30: mol_type = other RNA
ttcatggaccccgagatggagacccgctac

SEQ ID NO: 33105 - RNA, 30 nt, synthetic construct
  misc_feature 1..30: note = Probable C-mannosyltransferase DPY19L1 (397-406)
  source 1..30: mol_type = other RNA
ttcatggagaaggagacccccctgcgctac

SEQ ID NO: 33106 - RNA, 36 nt, synthetic construct
  misc_feature 1..36: note = Probable E3 ubiquitin-protein ligase HERC1 (402-413)
  source 1..36: mol_type = other RNA
ttcagcgacgcccagaccatcgaggccggccagtac

SEQ ID NO: 33107 - RNA, 30 nt, synthetic construct
  misc_feature 1..30: note = Iduronate 2-sulfatase (424-433)
  source 1..30: mol_type = other RNA
ttcagcgacatccacgccggcgagctgtac

SEQ ID NO: 33108 - RNA, 33 nt, synthetic construct
  misc_feature 1..33: note = Iduronate 2-sulfatase (424-434)
  source 1..33: mol_type = other RNA
ttcagcgacatccacgccggcgagctgtacttc

SEQ ID NO: 33109 - RNA, 30 nt, synthetic construct
  misc_feature 1..30: note = Type 2 lactosamine alpha-2,3-sialyltransferase (283-292)
  source 1..30: mol_type = other RNA
ttcagcgacctgaagtcccccctccactac

SEQ ID NO: 33110 - RNA, 33 nt, synthetic construct
  misc_feature 1..33: note = Type 2 lactosamine alpha-2,3-sialyltransferase (175-185)
  source 1..33: mol_type = other RNA
ttcagcgacctgaagtcccccctccactactac

SEQ ID NO: 33111 - RNA, 33 nt, synthetic construct
  misc_feature 1..33: note = Rab GTPase-activating protein 1-like (338-348)
  source 1..33: mol_type = other RNA
ttcagcgacctgaacctcgaggcccacatgtac

SEQ ID NO: 33112 - RNA, 33 nt, synthetic construct
  misc_feature 1..33: note = DAZ-associated protein 1 (363-373)
  source 1..33: mol_type = other RNA
ttcagcgacccctcccagcagccgcccagctac

SEQ ID NO: 33113 - RNA, 27 nt, synthetic construct
  misc_feature 1..27: note = Nipped-B-like protein (37-45)
  source 1..27: mol_type = other RNA
ttcagcgactccaagatccagaagtac

SEQ ID NO: 33114 - RNA, 33 nt, synthetic construct
  misc_feature 1..33: note = Protein FAM65B (671-681)
  source 1..33: mol_type = other RNA
ttcagcgacaccgagaccgagaagcactcctac

SEQ ID NO: 33115 - RNA, 33 nt, synthetic construct
  misc_feature 1..33: note = Probable E3 ubiquitin-protein ligase HERC1 (3591-3601)
  source 1..33: mol_type = other RNA
ttcagcgaggaccgccccttcgccgtgggctac

SEQ ID NO: 33116 - RNA, 30 nt, synthetic construct
  misc_feature 1..30: note = Programmed cell death protein 6 (82-91)
  source 1..30: mol_type = other RNA
ttcagcgagttcaccggcgtgtggaagtac

SEQ ID NO: 33117 - RNA, 27 nt, synthetic construct
  misc_feature 1..27: note = Ubiquitin carboxyl-terminal hydrolase 32 (135-143)
  source 1..27: mol_type = other RNA
ttcagcgagggcgagaaggtgaactac

SEQ ID NO: 33118 - RNA, 33 nt, synthetic construct
  misc_feature 1..33: note = Heat shock protein HSP 90-beta (342-352)
  source 1..33: mol_type = other RNA
ttcagcgagctggccgaggacaaggagaactac

SEQ ID NO: 33119 - RNA, 33 nt, synthetic construct
  misc_feature 1..33: note = Uncharacterized protein C14orf119 (120-130)
  source 1..33: mol_type = other RNA
ttcagcgagcccgacttcgtggccaagttctac

SEQ ID NO: 33120 - RNA, 33 nt, synthetic construct
  misc_feature 1..33: note = Fc receptor-like A (67-77)
  source 1..33: mol_type = other RNA
ttcagcgagcccttccacctgatcgtgtcctac

SEQ ID NO: 33121 - RNA, 27 nt, synthetic construct
  misc_feature 1..27: note = cAMP-dependent protein kinase catalytic subunit alpha (131-139)
  source 1..27: mol_type = other RNA
ttcagcgagccccacgcccgcttctac

SEQ ID NO: 33122 - RNA, 27 nt, synthetic construct
  misc_feature 1..27: note = Serine/threonine-protein kinase N1 (718-726)
  source 1..27: mol_type = other RNA
ttcagcgagccccgcgccatcttctac

SEQ ID NO: 33123 - RNA, 33 nt, synthetic construct
  misc_feature 1..33: note = Protein C-ets-1 (175-185)
  source 1..33: mol_type = other RNA
ttcagcgagccctccttcatcaccgagagctac

SEQ ID NO: 33124 - RNA, 27 nt, synthetic construct
  misc_feature 1..27: note = Protein RCC2 (314-322)
  source 1..27: mol_type = other RNA
ttcagcgagcaggtggccatgggctac

SEQ ID NO: 33125 - RNA, 36 nt, synthetic construct
  misc_feature 1..36: note = DNA ligase 3 (127-138)
  source 1..36: mol_type = other RNA
ttcagcgagtccggcggggacatgaaggagtggtac

SEQ ID NO: 33126 - RNA, 30 nt, synthetic construct
  misc_feature 1..30: note = ETS translocation variant 5 (318-327)
  source 1..30: mol_type = other RNA
ttcagctccagccacgagggcttctcctac

SEQ ID NO: 33127 - RNA, 27 nt, synthetic construct
  misc_feature 1..27: note = FAS-associated factor 1 (337-345)
  source 1..27: mol_type = other RNA
ttcaccgccgagttcagctcccgctac

SEQ ID NO: 33128 - RNA, 27 nt, synthetic construct
  misc_feature 1..27: note = Staphylococcal nuclease domain-containing protein 1 (607-615)
  source 1..27: mol_type = other RNA
ttcaccgccgagcgcagctcctactac

SEQ ID NO: 33129 - RNA, 27 nt, synthetic construct
  misc_feature 1..27: note = LanC-like protein 1 (199-207)
  source 1..27: mol_type = other RNA
ttcaccgccaagagccccctgatgtac

SEQ ID NO: 33130 - RNA, 27 nt, synthetic construct
  misc_feature 1..27: note = Cytochrome c oxidase subunit 2 (184-192)
  source 1..27: mol_type = other RNA
ttcaccgccacccgccccggcgtgtac

SEQ ID NO: 33131 - RNA, 33 nt, synthetic construct
  misc_feature 1..33: note = Splicing factor 3A subunit 3 (130-140)
  source 1..33: mol_type = other RNA
ttcaccgacgaggagggctacgggcgctacctg

SEQ ID NO: 33132 - RNA, 24 nt, synthetic construct
  misc_feature 1..24: note = Gem-associated protein 5 (895-902)
  source 1..24: mol_type = other RNA
ttcaccgaccgcgccaccctgtac

SEQ ID NO: 33133 - RNA, 39 nt, synthetic construct
  misc_feature 1..39: note = Geranylgeranyl transferase type-2 subunit alpha (166-178)
  source 1..39: mol_type = other RNA
ttcaccgacagcctgatcacccgcaacttctccaactac

SEQ ID NO: 33134 - RNA, 30 nt, synthetic construct
  misc_feature 1..30: note = CLIP-associating protein 2 (80-89)
  source 1..30: mol_type = other RNA
ttcaccgacgtgcccagcatccagatctac

SEQ ID NO: 33135 - RNA, 36 nt, synthetic construct
  misc_feature 1..36: note = Basic leucine zipper and W2 domain-containing protein 1 (149-160)
  source 1..36: mol_type = other RNA
ttcaccgaggccggcctgaaggagctcagcgagtac

SEQ ID NO: 33136 - RNA, 33 nt, synthetic construct
  misc_feature 1..33: note = Heat shock protein HSP 90-alpha (546-556)
  source 1..33: mol_type = other RNA
ttcaccgagctggccgaggacaaggagaactac

SEQ ID NO: 33137 - RNA, 33 nt, synthetic construct
  misc_feature 1..33: note = Zinc finger protein 746 (547-557)
  source 1..33: mol_type = other RNA
ttcaccgagcgcagcaagctgatcgaccactac

SEQ ID NO: 33138 - RNA, 36 nt, synthetic construct
  misc_feature 1..36: note = Coatomer subunit gamma-1 (402-413)
  source 1..36: mol_type = other RNA
ttcaccatgctgcgcgaggagggcgggttcgagtac

SEQ ID NO: 33139 - RNA, 27 nt, synthetic construct
  misc_feature 1..27: note = Cytoplasmic dynein 1 heavy chain 1 (2784-2792)
  source 1..27: mol_type = other RNA
ttcacccaggacacccagccccactac

SEQ ID NO: 33140 - RNA, 33 nt, synthetic construct
  misc_feature 1..33: note Dolichyl-diphosphooligosaccharide-proteinosyltransferase subunit 2 (449-459)
  source 1..33: mol_type = other RNA
ttcgtggccgagcccgacaacaagaacgtctac

SEQ ID NO: 33141 - RNA, 36 nt, synthetic construct
  misc_feature 1..36: note = G patch domain and KOW motifs-containing protein (365-376)
  source 1..36: mol_type = other RNA
ttcgtggacaacatgtacaagggcgggcagtactac

SEQ ID NO: 33142 - RNA, 36 nt, synthetic construct
  misc_feature 1..36: note = Retinoid-inducible serine carboxypeptidase (63-74)
  source 1..36: mol_type = other RNA
ttcgtggacaaccccgtcggcaccgggttcagctac

SEQ ID NO: 33143 - RNA, 30 nt, synthetic construct
  misc_feature 1..30: note = Kelch-like protein 15 (325-334)
  source 1..30: mol_type = other RNA
ttcgtggacccctacccggtcaacaagtac

SEQ ID NO: 33144 - RNA, 30 nt, synthetic construct
  misc_feature 1..30: note = Abhydrolase domain-containing protein 2 (146-155)
  source 1..30: mol_type = other RNA
ttcgtggactacgcccagaagaacggctac

SEQ ID NO: 33145 - RNA, 39 nt, synthetic construct
  misc_feature 1..39: note = Trafficking protein particle complex subunit 3 (115-127)
  source 1..39: mol_type = other RNA
ttcgtggagctgcccgacaaccacagctccctcatctac

SEQ ID NO: 33146 - RNA, 36 nt, synthetic construct
  misc_feature 1..36: note = ADP-ribosylation factor 5 (24-35)
  source 1..36: mol_type = other RNA
ggcctggacgccgccgggaagaccaccatcctctac

SEQ ID NO: 33147 - RNA, 27 nt, synthetic construct
  misc_feature 1..27: note = Exosome complex exonuclease RRP44 (757-765)
  source 1..27: mol_type = other RNA
ggcatggacaacgacttccaccactac

SEQ ID NO: 33148 - RNA, 27 nt, synthetic construct
  misc_feature 1..27: note = Archaemetzincin-2 (148-156)
  source 1..27: mol_type = other RNA
ggcagcgacttctactccatgcactac

SEQ ID NO: 33149 - RNA, 39 nt, synthetic construct
  misc_feature 1..39: note = Xaa-Pro aminopeptidase 1 (256-268)
  source 1..39: mol_type = other RNA
ggcagcgacgtggagcacaaccccgtcttcttctcctac

SEQ ID NO: 33150 - RNA, 27 nt, synthetic construct
  misc_feature 1..27: note = Sorbitol dehydrogenase (46-54)
  source 1..27: mol_type = other RNA
ggcagcgacgtgcactactgggagtac

SEQ ID NO: 33151 - RNA, 27 nt, synthetic construct
  misc_feature 1..27: note = Eukaryotic translation initiation factor 3 subunit D (443-451)
  source 1..27: mol_type = other RNA
ggcagcgagtacctgaagctcgggtac

SEQ ID NO: 33152 - RNA, 39 nt, synthetic construct
  misc_feature 1..39: note = PMS1 protein homolog 1 (39-51)
  source 1..39: mol_type = other RNA
ggcaccgccgtgatgaacaacatggagagcttccagtac

SEQ ID NO: 33153 - RNA, 30 nt, synthetic construct
  misc_feature 1..30: note = SEC23-interacting protein (313-322)
  source 1..30: mol_type = other RNA
ggcaccgacgggggccgctacgacgtgtac

SEQ ID NO: 33154 - RNA, 27 nt, synthetic construct
  misc_feature 1..27: note = Syndetin (394-402)
  source 1..27: mol_type = other RNA
ggcaccgacctgagcatcttcaagtac

SEQ ID NO: 33155 - RNA, 36 nt, synthetic construct
  misc_feature 1..36: note = X-ray repair cross-complementing protein 5 (63-74)
  source 1..36: mol_type = other RNA
ggcaccgacaaccccctgagcgggggcgaccagtac

SEQ ID NO: 33156 - RNA, 33 nt, synthetic construct
  misc_feature 1..33: note = DNA replication licensing factor MCM5 (45-55)
  source 1..33: mol_type = other RNA
ggcaccgaccgcaccgggttcacgttcaagtac

SEQ ID NO: 33157 - RNA, 27 nt, synthetic construct
  misc_feature 1..27: note = WD repeat-containing protein 19 (157-165)
  source 1..27: mol_type = other RNA
ggcaccgacaccggggtggtccagtac

SEQ ID NO: 33158 - RNA, 42 nt, synthetic construct
  misc_feature 1..42: note = E3 ubiquitin-protein ligase MYCBP2 (1371-1384)
  source 1..42: mol_type = other RNA
ggcaccgacgtgaacgccgggcagatcccccagctgctctac

SEQ ID NO: 33159 - RNA, 39 nt, synthetic construct
  misc_feature 1..39: note = CDK5 regulatory subunit-associated protein 3 (77-89)
  source 1..39: mol_type = other RNA
ggcaccgaggccagcaccaagaacatcttcgggcgctac

SEQ ID NO: 33160 - RNA, 30 nt, synthetic construct
  misc_feature 1..30: note = Endophilin-B1 (5-14)
  source 1..30: mol_type = other RNA
ggcaccgagttcgggcccggcaccgcctac

SEQ ID NO: 33161 - RNA, 36 nt, synthetic construct
  misc_feature 1..36: note = GON-4-like protein (39-50)
  source 1..36: mol_type = other RNA
ggcaccgagttccccaacccgctgatcagcaagtac

SEQ ID NO: 33162 - RNA, 36 nt, synthetic construct
  misc_feature 1..36: note = Nucleolin (451-462)
  source 1..36: mol_type = other RNA
ggcaccgagatcgacgggcgcagcatctccctgtac

SEQ ID NO: 33163 - RNA, 39 nt, synthetic construct
  misc_feature 1..39: note = Nucleolin (451-463)
  source 1..39: mol_type = other RNA
ggcaccgagatcgacgggcgcagcatctccctgtactac

SEQ ID NO: 33164 - RNA, 30 nt, synthetic construct
  misc_feature 1..30: note = MHC class I polypeptide-related sequence A (50-59)
  source 1..30: mol_type = other RNA
cacctggacggccagcccttcctccgctac

SEQ ID NO: 33165 - RNA, 30 nt, synthetic construct
  misc_feature 1..30: note = Zinc finger protein with KRAB and SCAN domains 5 (234-243)
  source 1..30: mol_type = other RNA
cacctggaccagagccagaagtccctctac

SEQ ID NO: 33166 - RNA, 27 nt, synthetic construct
  misc_feature 1..27: note = Zinc finger CW-type PWWP domain protein 1 (230-238)
  source 1..27: mol_type = other RNA
cacctggacagcctcccctccaagtac

SEQ ID NO: 33167 - RNA, 36 nt, synthetic construct
  misc_feature 1..36: note = Conserved oligomeric Golgi complex subunit 6 (528-539)
  source 1..36: mol_type = other RNA
cacctggacaccctcatcaacgagcaggccagctac

SEQ ID NO: 33168 - RNA, 30 nt, synthetic construct
  misc_feature 1..30: note = Unconventional myosin-Va (41-50)
  source 1..30: mol_type = other RNA
cacctggaggagggcaaggacctcgagtac

SEQ ID NO: 33169 - RNA, 30 nt, synthetic construct
  misc_feature 1..30: note = N6-adenosine-methyltransferase 70 kDa subunit (322-331)
  source 1..30: mol_type = other RNA
cacatggacacctgcaagtacgtgcactac

SEQ ID NO: 33170 - RNA, 30 nt, synthetic construct
  misc_feature 1..30: note = 5'-nucleotidase domain-containing protein 1 (266-275)
  source 1..30: mol_type = other RNA
cacagcgacatcttccccgcccgccactac

SEQ ID NO: 33171 - RNA, 27 nt, synthetic construct
  misc_feature 1..27: note = Endoribonuclease Dicer (118-126)
  source 1..27: mol_type = other RNA
cacagcgacctgaaggtgggcgagtac

SEQ ID NO: 33172 - RNA, 30 nt, synthetic construct
  misc_feature 1..30: note = Arylamine N-acetyltransferase 1 (177-186)
  source 1..30: mol_type = other RNA
cacagcgacctgctcgaggactccaagtac

SEQ ID NO: 33173 - RNA, 36 nt, synthetic construct
  misc_feature 1..36: note = Protein virilizer homolog (783-794)
  source 1..36: mol_type = other RNA
cacagcgacctgctcggcaccctgcacaacctgtac

SEQ ID NO: 33174 - RNA, 33 nt, synthetic construct
  misc_feature 1..33: note = CD82 antigen (257-267)
  source 1..33: mol_type = other RNA
cacagcgaggactactccaaggtgcccaagtac

SEQ ID NO: 33175 - RNA, 36 nt, synthetic construct
  misc_feature 1..36: note = Ribonucleoside-diphosphate reductase subunit M2 B (68-79)
  source 1..36: mol_type = other RNA
cacagcgagatgtactccctgctcatcgacacctac

SEQ ID NO: 33176 - RNA, 27 nt, synthetic construct
  misc_feature 1..27: note = Histone deacetylase 5 (338-346)
  source 1..27: mol_type = other RNA
cacagcgagtaccacaccctgctctac

SEQ ID NO: 33177 - RNA, 36 nt, synthetic construct
  misc_feature 1..36: note = Acyl-CoA desaturase (302-313)
  source 1..36: mol_type = other RNA
cacagcttcccctacgactactccgccagcgagtac

SEQ ID NO: 33178 - RNA, 30 nt, synthetic construct
  misc_feature 1..30: note = Elongation factor Tu, mitochondrial (124-133)
  source 1..30: mol_type = other RNA
cacaccgactgccccggccacgccgactac

SEQ ID NO: 33179 - RNA, 30 nt, synthetic construct
  misc_feature 1..30: note = Lathosterol oxidase (229-238)
  source 1..30: mol_type = other RNA
cacaccgaccaccacatgttcttcgactac

SEQ ID NO: 33180 - RNA, 30 nt, synthetic construct
  misc_feature 1..30: note = NADPH-cytochrome P450 reductase (250-259)
  source 1..30: mol_type = other RNA
cacaccgacatcgacgccgccaaggtgtac

SEQ ID NO: 33181 - RNA, 30 nt, synthetic construct
  misc_feature 1..30: note = Synembryn-B (153-162)
  source 1..30: mol_type = other RNA
cacaccgacatccgcagccagctgcggtac

SEQ ID NO: 33182 - RNA, 30 nt, synthetic construct
  misc_feature 1..30: note = Mitochondrial enolase superfamily member 1 (29-38)
  source 1..30: mol_type = other RNA
cacaccgaccccgactacagcgccgcctac

SEQ ID NO: 33183 - RNA, 39 nt, synthetic construct
  misc_feature 1..39: note = Serine/threonine-protein kinase N2 (593-605)
  source 1..39: mol_type = other RNA
cacaccgacgtgttcagcgagccccgcgccgtcttctac

SEQ ID NO: 33184 - RNA, 33 nt, synthetic construct
  misc_feature 1..33: note = RNA polymerase II subunit A C-terminal domain phosphatase (601-611)
  source 1..33: mol_type = other RNA
cacaccgactactacgccaagtacgaccgctac

SEQ ID NO: 33185 - RNA, 39 nt, synthetic construct
  misc_feature 1..39: note = Hermansky-Pudlak syndrome 1 protein (98-110)
  source 1..39: mol_type = other RNA
cacaccgagagcgagggcgacctgcgccggaagctctac

SEQ ID NO: 33186 - RNA, 27 nt, synthetic construct
  misc_feature 1..27: note = Protein 4.1 (461-469)
  source 1..27: mol_type = other RNA
cacaccgagaccaagacgatcacctac

SEQ ID NO: 33187 - RNA, 33 nt, synthetic construct
  misc_feature 1..33: note = Histone-lysine N-methyltransferase, H3 lysine-79 specific (273-283)
  source 1..33: mol_type = other RNA
cacaccatcgaccgcaccatcctggagaactac

SEQ ID NO: 33188 - RNA, 33 nt, synthetic construct
  misc_feature 1..33: note = Lysine-specific demethylase 2A (212-222)
  source 1..33: mol_type = other RNA
cacgtggacttcggcgggaccagcgtctggtac

SEQ ID NO: 33189 - RNA, 36 nt, synthetic construct
  misc_feature 1..36: note = MICOS complex subunit MIC27 (90-101)
  source 1..36: mol_type = other RNA
atcatggacaccgtgcagttcggcaaggacgcctac

SEQ ID NO: 33190 - RNA, 39 nt, synthetic construct
  misc_feature 1..39: note = TP53-regulating kinase (188-200)
  source 1..39: mol_type = other RNA
atcagcgccctgcccgaggacaagggcgtggacctctac

SEQ ID NO: 33191 - RNA, 39 nt, synthetic construct
  misc_feature 1..39: note = Tubulin beta-4B chain (24-36)
  source 1..39: mol_type = other RNA
atcagcgacgagcacggcatcgaccccaccgggacctac

SEQ ID NO: 33192 - RNA, 36 nt, synthetic construct
  misc_feature 1..36: note = Integrin alpha-V (214-225)
  source 1..36: mol_type = other RNA
atcagcgaccaggtggccgagatcgtctccaagtac

SEQ ID NO: 33193 - RNA, 27 nt, synthetic construct
  misc_feature 1..27: note = Reticulon-4 (90-98)
  source 1..27: mol_type = other RNA
atcagcgaggagctggtgcagaagtac

SEQ ID NO: 33194 - RNA, 39 nt, synthetic construct
  misc_feature 1..39: note = Adenosylhomocysteinase (155-167)
  source 1..39: mol_type = other RNA
atcagcgaggagaccaccacgggcgtgcacaacctgtac

SEQ ID NO: 33195 - RNA, 27 nt, synthetic construct
  misc_feature 1..27: note = Protein disulfide-isomerase A5 (349-357)
  source 1..27: mol_type = other RNA
atcagcgagttccccaccctgaagtac

SEQ ID NO: 33196 - RNA, 33 nt, synthetic construct
  misc_feature 1..33: note = ATP-citrate synthase (6-16)
  source 1..33: mol_type = other RNA
atcagcgagcagaccggcaaggagctgctctac

SEQ ID NO: 33197 - RNA, 33 nt, synthetic construct
  misc_feature 1..33: note = Oligoribonuclease, mitochondrial (168-178)
  source 1..33: mol_type = other RNA
atcagcgagtccatcaaggagctgcagttctac

SEQ ID NO: 33198 - RNA, 33 nt, synthetic construct
  misc_feature 1..33: note = Protein furry homolog-like (546-556)
  source 1..33: mol_type = other RNA
atcagcgagacccccatcatcggcaacaagtac

SEQ ID NO: 33199 - RNA, 27 nt, synthetic construct
  misc_feature 1..27: note = Bone morphogenetic protein receptor type-2 (374-382)
  source 1..27: mol_type = other RNA
atcagcgaggtgggcaccatccgctac

SEQ ID NO: 33200 - RNA, 33 nt, synthetic construct
  misc_feature 1..33: note = Beta-hexosaminidase subunit alpha (436-446)
  source 1..33: mol_type = other RNA
atcagctacggccccgactggaaggacttctac

SEQ ID NO: 33201 - RNA, 33 nt, synthetic construct
  misc_feature 1..33: note = N-alpha-acetyltransferase 16, NatA auxiliary subunit (155-165)
  source 1..33: mol_type = other RNA
atcaccgacgaccagttcgacttccacacctac

SEQ ID NO: 33202 - RNA, 30 nt, synthetic construct
  misc_feature 1..30: note = Trophinin (580-589)
  source 1..30: mol_type = other RNA
atcaccgacgagttcgtgaagcagaagtac

SEQ ID NO: 33203 - RNA, 24 nt, synthetic construct
  misc_feature 1..24: note = Vacuolar protein sorting-associated protein 13C (155-162)
  source 1..24: mol_type = other RNA
atcaccgacatccacatcaagtac

SEQ ID NO: 33204 - RNA, 39 nt, synthetic construct
  misc_feature 1..39: note = Filamin-A (1793-1805)
  source 1..39: mol_type = other RNA
atcaccgacaacaaggacggcaccgtgacggtccgctac

SEQ ID NO: 33205 - RNA, 42 nt, synthetic construct
  misc_feature 1..42: note = Sorting nexin-1 (149-162)
  source 1..42: mol_type = other RNA
atcaccgaccccgagaagatcggcgacgggatgaacgcctac

SEQ ID NO: 33206 - RNA, 36 nt, synthetic construct
  misc_feature 1..36: note = F-box/LRR-repeat protein 14 (130-141)
  source 1..36: mol_type = other RNA
atcaccgacagctccctgggccgcatcgcccagtac

SEQ ID NO: 33207 - RNA, 39 nt, synthetic construct
  misc_feature 1..39: note = Coatomer subunit gamma-1 (131-143)
  source 1..39: mol_type = other RNA
atcaccgacagcaccatgctgcaggccatcgagcgctac

SEQ ID NO: 33208 - RNA, 36 nt, synthetic construct
  misc_feature 1..36: note = F-box/LRR-repeat protein 17 (206-217)
  source 1..36: mol_type = other RNA
atcaccgactacgccctgatcgccatcggccgctac

SEQ ID NO: 33209 - RNA, 39 nt, synthetic construct
  misc_feature 1..39: note = T-complex protein 1 subunit gamma (291-303)
  source 1..39: mol_type = other RNA
atcaccgagaagggcatcagcgacctggcccagcactac

SEQ ID NO: 33210 - RNA, 33 nt, synthetic construct
  misc_feature 1..33: note = Tubulin alpha-1C chain (58-68)
  source 1..33: mol_type = other RNA
atcaccggcaaggaggacgccgccaacaactac

SEQ ID NO: 33211 - RNA, 30 nt, synthetic construct
  misc_feature 1..30: note = Transmembrane protein 218 (3-12)
  source 1..30: mol_type = other RNA
atcgtggacgacttcttcatcggccgctac

SEQ ID NO: 33212 - RNA, 27 nt, synthetic construct
  misc_feature 1..27: note = Protein unc-13 homolog B (372-380)
  source 1..27: mol_type = other RNA
atcgtggacgagttcgccatgcgctac

SEQ ID NO: 33213 - RNA, 36 nt, synthetic construct
  misc_feature 1..36: note = 116 kDa U5 small nuclear ribonucleoprotein component (281-292)
  source 1..36: mol_type = other RNA
atcgtggacgaggtcaacggcctgatcagcatgtac

SEQ ID NO: 33214 - RNA, 27 nt, synthetic construct
  misc_feature 1..27: note = Putative eukaryotic translation initiation factor 2 subunit 3-like protein (421-429)
  source 1..27: mol_type = other RNA
aaggccgacctgggcaagatcgtgctc

SEQ ID NO: 33215 - RNA, 42 nt, synthetic construct
  misc_feature 1..42: note = Heterogeneous nuclear ribonucleoprotein L (552-565)
  source 1..42: mol_type = other RNA
aagagcgacgccctggagaccctcggcttcctgaaccactac

SEQ ID NO: 33216 - RNA, 33 nt, synthetic construct
  misc_feature 1..33: note = Heterogeneous nuclear ribonucleoprotein C-like 1 (30-40)
  source 1..33: mol_type = other RNA
aagagcgacgtggaggccatcttctccaagtac

SEQ ID NO: 33217 - RNA, 33 nt, synthetic construct
  misc_feature 1..33: note = RNA-binding protein Raly (35-45)
  source 1..33: mol_type = other RNA
aagagcgacgtggagaccatcttctccaagtac

SEQ ID NO: 33218 - RNA, 30 nt, synthetic construct
  misc_feature 1..30: note = Interferon-induced protein with tetratricopeptide repeats 1 (393-402)
  source 1..30: mol_type = other RNA
aagagcgacgtgaacgccatcatccactac

SEQ ID NO: 33219 - RNA, 33 nt, synthetic construct
  misc_feature 1..33: note = Ras GTPase-activating protein-binding protein 1 (353-363)
  source 1..33: mol_type = other RNA
aagagcgagctgaaggacttcttccagtcctac

SEQ ID NO: 33220 - RNA, 30 nt, synthetic construct
  misc_feature 1..30: note = Mitochondrial import receptor subunit TOM70 (576-585)
  source 1..30: mol_type = other RNA
aagagcgagatggagatggcccacctgtac

SEQ ID NO: 33221 - RNA, 27 nt, synthetic construct
  misc_feature 1..27: note = Epidermal growth factor receptor substrate 15-like 1 (284-292)
  source 1..27: mol_type = other RNA
aagaccgacctggacctcgacggctac

SEQ ID NO: 33222 - RNA, 36 nt, synthetic construct
  misc_feature 1..36: note = Myosin-9 (289-300)
  source 1..36: mol_type = other RNA
aagaccgacctgctcctggagccctacaacaagtac

SEQ ID NO: 33223 - RNA, 33 nt, synthetic construct
  misc_feature 1..33: note = Unconventional myosin-Id (307-317)
  source 1..33: mol_type = other RNA
aagaccgacatggtggagaaggccctgctctac

SEQ ID NO: 33224 - RNA, 36 nt, synthetic construct
  misc_feature 1..36: note = RNA polymerase II-associated factor 1 homolog (123-134)
  source 1..36: mol_type = other RNA
aagaccgagtacatcagcaccgagttcaaccgctac

SEQ ID NO: 33225 - RNA, 33 nt, synthetic construct
  misc_feature 1..33: note = Cytokine receptor-like factor 3 (197-207)
  source 1..33: mol_type = other RNA
aaggtggacgacgacttcaccgcccaggactac

SEQ ID NO: 33226 - RNA, 27 nt, synthetic construct
  misc_feature 1..27: note = X-ray repair cross-complementing protein 5 (221-229)
  source 1..27: mol_type = other RNA
aaggtggacgaggagcagatgaagtac

SEQ ID NO: 33227 - RNA, 27 nt, synthetic construct
  misc_feature 1..27: note Dolichyl-diphosphooligosaccharide-proteinosyltransferase 48 kDa subunit (391-399)
  source 1..27: mol_type = other RNA
aaggtggactacaaccgcctgggctac

SEQ ID NO: 33228 - RNA, 30 nt, synthetic construct
  misc_feature 1..30: note = Cytosol aminopeptidase (431-440)
  source 1..30: mol_type = other RNA
ctggccgacgtgaacaacatcggcaagtac

SEQ ID NO: 33229 - RNA, 33 nt, synthetic construct
  misc_feature 1..33: note = Double-stranded RNA-specific adenosine deaminase (334-344)
  source 1..33: mol_type = other RNA
ctgatcgacatggagcgccagggcgacgtgtac

SEQ ID NO: 33230 - RNA, 30 nt, synthetic construct
  misc_feature 1..30: note = Annexin A2 (190-199)
  source 1..30: mol_type = other RNA
ctgatcgaccaggacgcccgcgacctctac

SEQ ID NO: 33231 - RNA, 33 nt, synthetic construct
  misc_feature 1..33: note = Protein zyg-11 homolog B (425-435)
  source 1..33: mol_type = other RNA
ctgatcgaggagggcgggctccagcacctgtac

SEQ ID NO: 33232 - RNA, 42 nt, synthetic construct
  misc_feature 1..42: note = N-acetylglucosamine-1-phosphotransferase subunits alpha/beta (903-916)
  source 1..42: mol_type = other RNA
ctgctcgacgaggaggagagcctgaagacccagctggcctac

SEQ ID NO: 33233 - RNA, 30 nt, synthetic construct
  misc_feature 1..30: note = Protein transport protein Sec61 subunit alpha isoform 1 (164-173)
  source 1..30: mol_type = other RNA
ctgctcgacgagctgctgcagaagggctac

SEQ ID NO: 33234 - RNA, 36 nt, synthetic construct
  misc_feature 1..36: note = Mitogen-activated protein kinase kinase kinase 7 (547-558)
  source 1..36: mol_type = other RNA
ctgctcgacgagaacaagagcctgtccacctactac

SEQ ID NO: 33235 - RNA, 33 nt, synthetic construct
  misc_feature 1..33: note = Syntaxin-binding protein 2 (253-263)
  source 1..33: mol_type = other RNA
ctgctcgacatcgagcaggacacctaccgctac

SEQ ID NO: 33236 - RNA, 30 nt, synthetic construct
  misc_feature 1..30: note = Intraflagellar transport protein 43 homolog (4-13)
  source 1..30: mol_type = other RNA
ctgctcgacctggacgaggagctgcgctac

SEQ ID NO: 33237 - RNA, 30 nt, synthetic construct
  misc_feature 1..30: note = Zinc finger protein 627 (79-88)
  source 1..30: mol_type = other RNA
ctgctcgaccccagccagaagaacctgtac

SEQ ID NO: 33238 - RNA, 30 nt, synthetic construct
  misc_feature 1..30: note = Zinc finger protein 614 (24-33)
  source 1..30: mol_type = other RNA
ctgctcgacaccgcccagaagaacctgtac

SEQ ID NO: 33239 - RNA, 30 nt, synthetic construct
  misc_feature 1..30: note = Zinc finger protein 324B (17-26)
  source 1..30: mol_type = other RNA
ctgctcgacaccgcccagcgcgccctgtac

SEQ ID NO: 33240 - RNA, 36 nt, synthetic construct
  misc_feature 1..36: note = S100P-binding protein (91-102)
  source 1..36: mol_type = other RNA
ctgctcgacaccccccgcgagaagaacagctcctac

SEQ ID NO: 33241 - RNA, 39 nt, synthetic construct
  misc_feature 1..39: note = Chromodomain-helicase-DNA-binding protein 4 (1078-1090)
  source 1..39: mol_type = other RNA
ctgctcgaggacttcctggagcacgagggctacaagtac

SEQ ID NO: 33242 - RNA, 27 nt, synthetic construct
  misc_feature 1..27: note = SWI/SNF-related matrix-associated actin-dependent regulator of chromatin subfamily A member 5 (784-792)
  source 1..27: mol_type = other RNA
ctgctcgagaaggagatcctgttctac

SEQ ID NO: 33243 - RNA, 30 nt, synthetic construct
  misc_feature 1..30: note = Early endosome antigen 1 (541-550)
  source 1..30: mol_type = other RNA
ctgctcgagaaggagcgcgaggacctgtac

SEQ ID NO: 33244 - RNA, 33 nt, synthetic construct
  misc_feature 1..33: note = E3 ubiquitin-protein ligase HUWE1 (982-992)
  source 1..33: mol_type = other RNA
ctgctcgagaacgacgtgagcaccctgggctac

SEQ ID NO: 33245 - RNA, 36 nt, synthetic construct
  misc_feature 1..36: note = Ankyrin repeat and LEM domain-containing protein 2 (110-121)
  source 1..36: mol_type = other RNA
ctgctcgagcagggcgggcgcctgagctccttctac

SEQ ID NO: 33246 - RNA, 42 nt, synthetic construct
  misc_feature 1..42: note = Phospholipid scramblase 1 (116-129)
  source 1..42: mol_type = other RNA
ctgctcgaggtgctgaccggcttcgagaccaacaacaagtac

SEQ ID NO: 33247 - RNA, 30 nt, synthetic construct
  misc_feature 1..30: note = Signal recognition particle subunit SRP68 (128-137)
  source 1..30: mol_type = other RNA
ctgatggacgccgagcgcgcctggagctac

SEQ ID NO: 33248 - RNA, 33 nt, synthetic construct
  misc_feature 1..33: note = Sialidase-1 (232-242)
  source 1..33: mol_type = other RNA
ctgagcgacgaccacggcgcctcctggcgctac

SEQ ID NO: 33249 - RNA, 24 nt, synthetic construct
  misc_feature 1..24: note = Melanoma inhibitory activity protein 3 (136-143)
  source 1..24: mol_type = other RNA
ctgagcgacgaggccatcaagtac

SEQ ID NO: 33250 - RNA, 27 nt, synthetic construct
  misc_feature 1..27: note = FACT complex subunit SSRP1 (85-93)
  source 1..27: mol_type = other RNA
ctgagcgacttcttcaagacccactac

SEQ ID NO: 33251 - RNA, 30 nt, synthetic construct
  misc_feature 1..30: note = Inhibitor of nuclear factor kappa-B kinase subunit beta (67-76)
  source 1..30: mol_type = other RNA
ctgagcgacatcgcctccgccctccgctac

SEQ ID NO: 33252 - RNA, 27 nt, synthetic construct
  misc_feature 1..27: note = Deoxyribose-phosphate aldolase (312-320)
  source 1..27: mol_type = other RNA
ctgagcgacatcgagcgccagatctac

SEQ ID NO: 33253 - RNA, 30 nt, synthetic construct
  misc_feature 1..30: note = Inhibitor of nuclear factor kappa-B kinase subunit alpha (94-103)
  source 1..30: mol_type = other RNA
ctgagcgacatcggctccgggatccgctac

SEQ ID NO: 33254 - RNA, 27 nt, synthetic construct
  misc_feature 1..27: note = Rho-related BTB domain-containing protein 3 (340-348)
  source 1..27: mol_type = other RNA
ctgagcgacatcctccgcttcatctac

SEQ ID NO: 33255 - RNA, 39 nt, synthetic construct
  misc_feature 1..39: note = DnaJ homolog subfamily C member 11 (69-81)
  source 1..39: mol_type = other RNA
ctgagcgacccccagacccgcgccatctacgacatctac

SEQ ID NO: 33256 - RNA, 30 nt, synthetic construct
  misc_feature 1..30: note = Ribosomal protein S6 kinase delta-1 (155-164)
  source 1..30: mol_type = other RNA
ctgagcgacccctccggcccgaagagctac

SEQ ID NO: 33257 - RNA, 36 nt, synthetic construct
  misc_feature 1..36: note = Nucleoporin NDC1 (58-69)
  source 1..36: mol_type = other RNA
ctgagcgactccttcagcgacctctactccagctac

SEQ ID NO: 33258 - RNA, 33 nt, synthetic construct
  misc_feature 1..33: note = Importin-7 (681-691)
  source 1..33: mol_type = other RNA
ctgagcgacaccaagtacctcgagatgatctac

SEQ ID NO: 33259 - RNA, 36 nt, synthetic construct
  misc_feature 1..36: note = DNA polymerase zeta catalytic subunit (2423-2434)
  source 1..36: mol_type = other RNA
ctgagcgactggttcgacaacaagaccgacctctac

SEQ ID NO: 33260 - RNA, 33 nt, synthetic construct
  misc_feature 1..33: note = Cyclin-dependent kinase 2-associated protein 1 (39-49)
  source 1..33: mol_type = other RNA
ctgagcgactacggccccccgtccctcgggtac

SEQ ID NO: 33261 - RNA, 27 nt, synthetic construct
  misc_feature 1..27: note = PAS domain-containing serine/threonine-protein kinase (64-72)
  source 1..27: mol_type = other RNA
ctgagcgaggaccgctggtccagctac

SEQ ID NO: 33262 - RNA, 27 nt, synthetic construct
  misc_feature 1..27: note = Vacuolar protein sorting-associated protein 18 homolog (306-314)
  source 1..27: mol_type = other RNA
ctgagcgaggagcgcgtgtgggagtac

SEQ ID NO: 33263 - RNA, 27 nt, synthetic construct
  misc_feature 1..27: note = Transmembrane and TPR repeat-containing protein 3 (84-92)
  source 1..27: mol_type = other RNA
ctgagcgagctcaagcccatgtcctac

SEQ ID NO: 33264 - RNA, 36 nt, synthetic construct
  misc_feature 1..36: note = DmX-like protein 1 (783-794)
  source 1..36: mol_type = other RNA
ctgagcgagctctccaaccccgagatcagcaagtac

SEQ ID NO: 33265 - RNA, 27 nt, synthetic construct
  misc_feature 1..27: note = Alpha/beta hydrolase domain-containing protein 17B (50-58)
  source 1..27: mol_type = other RNA
ctgagcgagcgcgccgactggcagtac

SEQ ID NO: 33266 - RNA, 27 nt, synthetic construct
  misc_feature 1..27: note = Immediate early response gene 5-like protein (48-56)
  source 1..27: mol_type = other RNA
ctgagcgagcgctacgccgagctctac

SEQ ID NO: 33267 - RNA, 30 nt, synthetic construct
  misc_feature 1..30: note = Signal peptidase complex subunit 1 (5-14)
  source 1..30: mol_type = other RNA
ctgagctccctccccacccagatggactac

SEQ ID NO: 33268 - RNA, 45 nt, synthetic construct
  misc_feature 1..45: note = Coatomer subunit epsilon (43-57)
  source 1..45: mol_type = other RNA
ctgagctcccccgagcgcgacgtggagcgggacgtcttcctctac

SEQ ID NO: 33269 - RNA, 33 nt, synthetic construct
  misc_feature 1..33: note = 26S proteasome non-ATPase regulatory subunit 2 (391-401)
  source 1..33: mol_type = other RNA
ctgaccgacgacggcaacaagtggctctacaag

SEQ ID NO: 33270 - RNA, 27 nt, synthetic construct
  misc_feature 1..27: note = Casein kinase II subunit alpha' (129-137)
  source 1..27: mol_type = other RNA
ctgaccgacttcgacatccgcttctac

SEQ ID NO: 33271 - RNA, 24 nt, synthetic construct
  misc_feature 1..24: note = Lysine-tRNA ligase (133-140)
  source 1..24: mol_type = other RNA
ctgaccgacttcatccagaagtac

SEQ ID NO: 33272 - RNA, 27 nt, synthetic construct
  misc_feature 1..27: note = DNA excision repair protein ERCC-6-like 2 (214-222)
  source 1..27: mol_type = other RNA
ctgaccgacttccagaaggccgtgtac

SEQ ID NO: 33273 - RNA, 30 nt, synthetic construct
  misc_feature 1..30: note = Thyroid adenoma-associated protein (45-54)
  source 1..30: mol_type = other RNA
ctgaccgacggcgtgagccagatccactac

SEQ ID NO: 33274 - RNA, 33 nt, synthetic construct
  misc_feature 1..33: note = 3'(2'),5'-bisphosphate nucleotidase 1 (262-272)
  source 1..33: mol_type = other RNA
ctgaccgacatccacggcaacgtgctccagtac

SEQ ID NO: 33275 - RNA, 30 nt, synthetic construct
  misc_feature 1..30: note = Myotubularin-related protein 5 (70-79)
  source 1..30: mol_type = other RNA
ctgaccgacatcaacagcgagcgccactac

SEQ ID NO: 33276 - RNA, 36 nt, synthetic construct
  misc_feature 1..36: note = E3 ubiquitin-protein ligase UBR4 (278-289)
  source 1..36: mol_type = other RNA
ctgaccgacaaggccgtgaaggactacagcgcctac

SEQ ID NO: 33277 - RNA, 33 nt, synthetic construct
  misc_feature 1..33: note = MAP kinase-activating death domain protein (81-91)
  source 1..33: mol_type = other RNA
ctgaccgacaaggacaccggcgtgacgcgctac

SEQ ID NO: 33278 - RNA, 30 nt, synthetic construct
  misc_feature 1..30: note = Dynactin subunit 2 (168-177)
  source 1..30: mol_type = other RNA
ctgaccgaccccgacggcgccctcgccaag

SEQ ID NO: 33279 - RNA, 30 nt, synthetic construct
  misc_feature 1..30: note = Mucosa-associated lymphoid tissue lymphoma translocation protein 1 (876-885)
  source 1..30: mol_type = other RNA
ctgaccgaccccatccagggcaccgagtac

SEQ ID NO: 33280 - RNA, 30 nt, synthetic construct
  misc_feature 1..30: note = Putative deoxyribonuclease TATDN1 (13-22)
  source 1..30: mol_type = other RNA
ctgaccgaccccatgttccgcggcatctac

SEQ ID NO: 33281 - RNA, 27 nt, synthetic construct
  misc_feature 1..27: note = Interferon regulatory factor 3 (252-260)
  source 1..27: mol_type = other RNA
ctgaccgaccgcggcgtgatgagctac

SEQ ID NO: 33282 - RNA, 30 nt, synthetic construct
  misc_feature 1..30: note = Tubulin polyglutamylase complex subunit 2 (125-134)
  source 1..30: mol_type = other RNA
ctgaccgacaccttcacggcctactaccgc

SEQ ID NO: 33283 - RNA, 39 nt, synthetic construct
  misc_feature 1..39: note = Peroxisomal multifunctional enzyme type 2 (493-505)
  source 1..39: mol_type = other RNA
ctgaccgacaccacgagcctcaaccaggccgccctgtac

SEQ ID NO: 33284 - RNA, 27 nt, synthetic construct
  misc_feature 1..27: note = DNA polymerase zeta catalytic subunit (928-936)
  source 1..27: mol_type = other RNA
ctgaccgaggagaagatggagctctac

SEQ ID NO: 33285 - RNA, 33 nt, synthetic construct
  misc_feature 1..33: note = Regulator of microtubule dynamics protein 3 (316-326)
  source 1..33: mol_type = other RNA
ctgaccgaggaggtgagcgagaagaagtcctac

SEQ ID NO: 33286 - RNA, 33 nt, synthetic construct
  misc_feature 1..33: note = Protein FAM65B (122-132)
  source 1..33: mol_type = other RNA
ctgaccgagatcaaccgcagcttcaaggagtac

SEQ ID NO: 33287 - RNA, 39 nt, synthetic construct
  misc_feature 1..39: note = Probable histidine-tRNA ligase, mitochondrial (104-116)
  source 1..39: mol_type = other RNA
ctgaccgagaagtacggcgaggacagcgggctcatgtac

SEQ ID NO: 33288 - RNA, 30 nt, synthetic construct
  misc_feature 1..30: note = ATP synthase subunit alpha, mitochondrial (467-476)
  source 1..30: mol_type = other RNA
ctgaccgagctcctgaagcagggccagtac

SEQ ID NO: 33289 - RNA, 27 nt, synthetic construct
  misc_feature 1..27: note = 39S ribosomal protein L52, mitochondrial (43-51)
  source 1..27: mol_type = other RNA
ctgaccgagctccccgactggagctac

SEQ ID NO: 33290 - RNA, 27 nt, synthetic construct
  misc_feature 1..27: note = Tectonin beta-propeller repeat-containing protein 2 (950-958)
  source 1..27: mol_type = other RNA
ctgaccgagcagcgcgccctcctgtac

SEQ ID NO: 33291 - RNA, 30 nt, synthetic construct
  misc_feature 1..30: note = 7SK snRNA methylphosphate capping enzyme (629-638)
  source 1..30: mol_type = other RNA
ctgaccgagaccatctacaagaactactac

SEQ ID NO: 33292 - RNA, 39 nt, synthetic construct
  misc_feature 1..39: note = HLA class I histocompatibility antigen, B-8 alpha chain (19-31)
  source 1..39: mol_type = other RNA
ctgaccgagacctgggccggcagccactccatgcgctac

SEQ ID NO: 33293 - RNA, 30 nt, synthetic construct
  misc_feature 1..30: note = Proline-rich nuclear receptor coactivator 1 (270-279)
  source 1..30: mol_type = other RNA
ctgaccgaggtgagccagaaggagaactac

SEQ ID NO: 33294 - RNA, 39 nt, synthetic construct
  misc_feature 1..39: note = TOX high mobility group box family member 4 (104-116)
  source 1..39: mol_type = other RNA
ctgaccatggacctcgaccacagcatcggcacccagtac

SEQ ID NO: 33295 - RNA, 33 nt, synthetic construct
  misc_feature 1..33: note = Ubiquinone biosynthesis protein COQ9, mitochondrial (105-115)
  source 1..33: mol_type = other RNA
ctgaccagcatggtggacgacatgtggcactac

SEQ ID NO: 33296 - RNA, 30 nt, synthetic construct
  misc_feature 1..30: note = Clustered mitochondria protein homolog (608-617)
  source 1..30: mol_type = other RNA
ctggtggacgccttcgtcgagcaccgctac

SEQ ID NO: 33297 - RNA, 36 nt, synthetic construct
  misc_feature 1..36: note = Poly (ADP-ribose) polymerase 1 (559-570)
  source 1..36: mol_type = other RNA
ctggtggacatcgtcaagggcaccaacagctactac

SEQ ID NO: 33298 - RNA, 27 nt, synthetic construct
  misc_feature 1..27: note = Alsin (683-691)
  source 1..27: mol_type = other RNA
ctggtggacaagaacatcatgggctac

SEQ ID NO: 33299 - RNA, 39 nt, synthetic construct
  misc_feature 1..39: note = Dexamethasone-induced protein (67-79)
  source 1..39: mol_type = other RNA
ctggtggacctcggcgtcctgagcgaccccgggtccggc

SEQ ID NO: 33300 - RNA, 45 nt, synthetic construct
  misc_feature 1..45: note = Dexamethasone-induced protein (67-81)
  source 1..45: mol_type = other RNA
ctggtggacctcggcgtcctgagcgaccccgggtccggcctgtac

SEQ ID NO: 33301 - RNA, 27 nt, synthetic construct
  misc_feature 1..27: note = Zinc finger FYVE domain-containing protein 16 (1229-1237)
  source 1..27: mol_type = other RNA
ctggtggacctccgcaactaccagtac

SEQ ID NO: 33302 - RNA, 30 nt, synthetic construct
  misc_feature 1..30: note = Semaphorin-4F (69-78)
  source 1..30: mol_type = other RNA
ctggtggaccccgccagccacaccctctac

SEQ ID NO: 33303 - RNA, 30 nt, synthetic construct
  misc_feature 1..30: note = Fatty acid-binding protein, epidermal (13-22)
  source 1..30: mol_type = other RNA
ctggtggacagcaagggcttcgacgagtac

SEQ ID NO: 33304 - RNA, 27 nt, synthetic construct
  misc_feature 1..27: note = Probable C-mannosyltransferase DPY19L1 (398-406)
  source 1..27: mol_type = other RNA
atggagaaggagacccccctgcgctac

SEQ ID NO: 33305 - RNA, 30 nt, synthetic construct
  misc_feature 1..30: note = MICOS complex subunit MIC60 (261-270)
  source 1..30: mol_type = other RNA
atgatcgacgagacccgcaacagcctgtac

SEQ ID NO: 33306 - RNA, 27 nt, synthetic construct
  misc_feature 1..27: note = SWI/SNF-related matrix-associated actin-dependent regulator of chromatin subfamily D member 2 (247-255)
  source 1..27: mol_type = other RNA
atgctggaccaccagcccccgcagtac

SEQ ID NO: 33307 - RNA, 27 nt, synthetic construct
  misc_feature 1..27: note = Acylamino-acid-releasing enzyme (544-552)
  source 1..27: mol_type = other RNA
atgctggacaagagccccatccgctac

SEQ ID NO: 33308 - RNA, 27 nt, synthetic construct
  misc_feature 1..27: note = Cytoplasmic dynein 1 heavy chain 1 (3043-3051)
  source 1..27: mol_type = other RNA
atgctggacagccacgaggagctctac

SEQ ID NO: 33309 - RNA, 36 nt, synthetic construct
  misc_feature 1..36: note = Zinc finger MYM-type protein 4 (480-491)
  source 1..36: mol_type = other RNA
atgagcgacggctccatccgcaacttctgcagctac

SEQ ID NO: 33310 - RNA, 30 nt, synthetic construct
  misc_feature 1..30: note = YTH domain-containing family protein 3 (52-61)
  source 1..30: mol_type = other RNA
atgagcgacccctacatgccgtcctactac

SEQ ID NO: 33311 - RNA, 24 nt, synthetic construct
  misc_feature 1..24: note = trabeculin-alpha (2316-2323)
  source 1..24: mol_type = other RNA
atgagcgacgtgaacctgaagtac

SEQ ID NO: 33312 - RNA, 30 nt, synthetic construct
  misc_feature 1..30: note = A-kinase anchor protein 6 (990-999)
  source 1..30: mol_type = other RNA
atgagcgaggagcagcagcagcacctgtac

SEQ ID NO: 33313 - RNA, 27 nt, synthetic construct
  misc_feature 1..27: note = Lambda-crystallin homolog (224-232)
  source 1..27: mol_type = other RNA
atgagcgagggcctggggatgcgctac

SEQ ID NO: 33314 - RNA, 30 nt, synthetic construct
  misc_feature 1..30: note = Talin-1 (289-298)
  source 1..30: mol_type = other RNA
atgagcgagatcgaggccaaggtgcgctac

SEQ ID NO: 33315 - RNA, 39 nt, synthetic construct
  misc_feature 1..39: note = Kelch-like protein 13 (423-435)
  source 1..39: mol_type = other RNA
atgagcgagccccactacggccacgccgggaccgtgtac

SEQ ID NO: 33316 - RNA, 27 nt, synthetic construct
  misc_feature 1..27: note = Antigen KI-67 (1611-1619)
  source 1..27: mol_type = other RNA
atgaccgacgacaagatcaccgaggtg

SEQ ID NO: 33317 - RNA, 33 nt, synthetic construct
  misc_feature 1..33: note = Telomerase protein component 1 (365-375)
  source 1..33: mol_type = other RNA
atgaccgacaagttcgcccagttcgacgagtac

SEQ ID NO: 33318 - RNA, 36 nt, synthetic construct
  misc_feature 1..36: note = DNA helicase B (287-298)
  source 1..36: mol_type = other RNA
atgaccgacctggagaagaacgccctcatcatgtac

SEQ ID NO: 33319 - RNA, 39 nt, synthetic construct
  misc_feature 1..39: note = TAR DNA-binding protein 43 (202-214)
  source 1..39: mol_type = other RNA
atgaccgaggacgagctgcgcgagttcttcagccagtac

SEQ ID NO: 33320 - RNA, 39 nt, synthetic construct
  misc_feature 1..39: note = Muskelin (98-110)
  source 1..39: mol_type = other RNA
atgaccgagctgctcagctccggcctgaagaacgactac

SEQ ID NO: 33321 - RNA, 30 nt, synthetic construct
  misc_feature 1..30: note = Presenilin-1 (1-10)
  source 1..30: mol_type = other RNA
atgaccgagctgcccgccccgctcagctac

SEQ ID NO: 33322 - RNA, 30 nt, synthetic construct
  misc_feature 1..30: note = Prolyl endopeptidase (67-76)
  source 1..30: mol_type = other RNA
atgaccgagctgtacgactaccccaagtac

SEQ ID NO: 33323 - RNA, 27 nt, synthetic construct
  misc_feature 1..27: note = E3 ubiquitin-protein ligase UBR5 (2723-2731)
  source 1..27: mol_type = other RNA
atgaccgagcgccaggacctggtgtac

SEQ ID NO: 33324 - RNA, 30 nt, synthetic construct
  misc_feature 1..30: note = Protein Spindly (51-60)
  source 1..30: mol_type = other RNA
atgaccgagagctacgagcaggagaagtac

SEQ ID NO: 33325 - RNA, 39 nt, synthetic construct
  misc_feature 1..39: note = Zinc finger protein 428 (44-56)
  source 1..39: mol_type = other RNA
atgaccgagacccgcgagcccgccgagacgggcgggtac

SEQ ID NO: 33326 - RNA, 36 nt, synthetic construct
  misc_feature 1..36: note = NF-kappa-B-repressing factor (190-201)
  source 1..36: mol_type = other RNA
atgaccagcggctccgacaagatcaactacacctac

SEQ ID NO: 33327 - RNA, 27 nt, synthetic construct
  misc_feature 1..27: note = Probable ATP-dependent RNA helicase DHX35 (162-170)
  source 1..27: mol_type = other RNA
atggtggaccccctgctcaccaagtac

SEQ ID NO: 33328 - RNA, 33 nt, synthetic construct
  misc_feature 1..33: note = Cytochrome c oxidase subunit 1 (484-494)
  source 1..33: mol_type = other RNA
atggtggaggagcccagcatgaacctggagtgg

SEQ ID NO: 33329 - RNA, 36 nt, synthetic construct
  misc_feature 1..36: note = Lysocardiolipin acyltransferase 1 (88-99)
  source 1..36: mol_type = other RNA
aacctggacgccgtgcacgacatcaccgtcgcctac

SEQ ID NO: 33330 - RNA, 36 nt, synthetic construct
  misc_feature 1..36: note = Prolyl 3-hydroxylase OGFOD1 (84-95)
  source 1..36: mol_type = other RNA
aacctggacttccacgagaagtacaacgacctctac

SEQ ID NO: 33331 - RNA, 27 nt, synthetic construct
  misc_feature 1..27: note = Tubulin alpha-1C chain (181-189)
  source 1..27: mol_type = other RNA
aacctggacatcgagcgccccacctac

SEQ ID NO: 33332 - RNA, 36 nt, synthetic construct
  misc_feature 1..36: note = Splicing factor 3B subunit 4 (106-117)
  source 1..36: mol_type = other RNA
aacctggaccccgagatcgacgagaagctcctgtac

SEQ ID NO: 33333 - RNA, 27 nt, synthetic construct
  misc_feature 1..27: note = N-alpha-acetyltransferase 20 (7-15)
  source 1..27: mol_type = other RNA
aacctggaccccctcaccgagacctac

SEQ ID NO: 33334 - RNA, 30 nt, synthetic construct
  misc_feature 1..30: note = E3 ubiquitin-protein ligase RNF135 (381-390)
  source 1..30: mol_type = other RNA
aacctggaggagggcaagctcgccttctac

SEQ ID NO: 33335 - RNA, 27 nt, synthetic construct
  misc_feature 1..27: note = Basigin (111-119)
  source 1..27: mol_type = other RNA
aacatggaggccgaccccggccagtac

SEQ ID NO: 33336 - RNA, 42 nt, synthetic construct
  misc_feature 1..42: note = Ribonucleoside-diphosphate reductase large subunit (35-48)
  source 1..42: mol_type = other RNA
aacagcgccatcatctacgaccgcgacttctcctacaactac

SEQ ID NO: 33337 - RNA, 30 nt, synthetic construct
  misc_feature 1..30: note = Thrombospondin-3 (640-649)
  source 1..30: mol_type = other RNA
aacagcgaccccggcctggccgtggggtac

SEQ ID NO: 33338 - RNA, 36 nt, synthetic construct
  misc_feature 1..36: note = NADH-ubiquinone oxidoreductase chain 5 (109-120)
  source 1..36: mol_type = other RNA
aacagcgaccccaacatcaaccagttcttcaagtac

SEQ ID NO: 33339 - RNA, 33 nt, synthetic construct
  misc_feature 1..33: note = 52 kDa repressor of the inhibitor of the protein kinase (452-462)
  source 1..33: mol_type = other RNA
aacagcgacaccaacatccgctggaacaactac

SEQ ID NO: 33340 - RNA, 27 nt, synthetic construct
  misc_feature 1..27: note = Homeodomain-interacting protein kinase 1 (604-612)
  source 1..27: mol_type = other RNA
aacagcgacgtgtccctgctcaactac

SEQ ID NO: 33341 - RNA, 30 nt, synthetic construct
  misc_feature 1..30: note = Serine/threonine-protein kinase RIO3 (378-387)
  source 1..30: mol_type = other RNA
aacagcgaggagatgaaggaggcctactac

SEQ ID NO: 33342 - RNA, 42 nt, synthetic construct
  misc_feature 1..42: note = Cerebellar degeneration-related protein 2 (286-299)
  source 1..42: mol_type = other RNA
aacagcgagctggagcagcagctcggcgccaccggggcctac

SEQ ID NO: 33343 - RNA, 30 nt, synthetic construct
  misc_feature 1..30: note = YY1-associated protein 1 (320-329)
  source 1..30: mol_type = other RNA
aacagcgagctgggctccgagacccgctac

SEQ ID NO: 33344 - RNA, 27 nt, synthetic construct
  misc_feature 1..27: note = Myosin-14 (29-37)
  source 1..27: mol_type = other RNA
aacagcgagctgctcaacgaccgctac

SEQ ID NO: 33345 - RNA, 27 nt, synthetic construct
  misc_feature 1..27: note = Thymidylate synthase (205-213)
  source 1..27: mol_type = other RNA
aacagcgagctgtcctgccagctctac

SEQ ID NO: 33346 - RNA, 42 nt, synthetic construct
  misc_feature 1..42: note = Neuroblastoma-amplified sequence (1978-1991)
  source 1..42: mol_type = other RNA
aacagcgagcaggagaccctgcagaagtactcccacctctac

SEQ ID NO: 33347 - RNA, 39 nt, synthetic construct
  misc_feature 1..39: note = Cytochrome c oxidase subunit 1 (360-372)
  source 1..39: mol_type = other RNA
aacagctccctggacatcgtgctccacgacacctactac

SEQ ID NO: 33348 - RNA, 33 nt, synthetic construct
  misc_feature 1..33: note = LIM domain and actin-binding protein 1 (82-92)
  source 1..33: mol_type = other RNA
aacaccgacgccagcggcaagatcgagaagtac

SEQ ID NO: 33349 - RNA, 33 nt, synthetic construct
  misc_feature 1..33: note = Zinc finger protein 462 (265-275)
  source 1..33: mol_type = other RNA
aacaccgacttcggcgacagcgggcgcctgtac

SEQ ID NO: 33350 - RNA, 36 nt, synthetic construct
  misc_feature 1..36: note = Zinc finger protein 462 (265-276)
  source 1..36: mol_type = other RNA
aacaccgacttcggcgacagcgggcgcctgtactac

SEQ ID NO: 33351 - RNA, 27 nt, synthetic construct
  misc_feature 1..27: note = Protein YIPF5 (8-16)
  source 1..27: mol_type = other RNA
aacaccgacttctaccagaccagctac

SEQ ID NO: 33352 - RNA, 27 nt, synthetic construct
  misc_feature 1..27: note = 2-oxoisovalerate dehydrogenase subunit alpha, mitochondrial (83-91)
  source 1..27: mol_type = other RNA
aacaccgacctggtgttcggccagtac

SEQ ID NO: 33353 - RNA, 33 nt, synthetic construct
  misc_feature 1..33: note = Protein TASOR (346-356)
  source 1..33: mol_type = other RNA
aacaccgaccgcaacatcgacaagtacaactac

SEQ ID NO: 33354 - RNA, 36 nt, synthetic construct
  misc_feature 1..36: note = 26S proteasome non-ATPase regulatory subunit 13 (227-238)
  source 1..36: mol_type = other RNA
aacaccgaccgccagtggctgatcgacaccctctac

SEQ ID NO: 33355 - RNA, 33 nt, synthetic construct
  misc_feature 1..33: note = Pericentriolar material 1 protein (1414-1424)
  source 1..33: mol_type = other RNA
aacaccgactacctgcgccagcgggccctctac

SEQ ID NO: 33356 - RNA, 36 nt, synthetic construct
  misc_feature 1..36: note = DnaJ homolog subfamily C member 3 (221-232)
  source 1..36: mol_type = other RNA
aacaccgaggccttctacaagatcagcaccctgtac

SEQ ID NO: 33357 - RNA, 39 nt, synthetic construct
  misc_feature 1..39: note = Polypyrimidine tract-binding protein 1 (102-114)
  source 1..39: mol_type = other RNA
aacaccgaggaggccgccaacaccatggtgaactactac

SEQ ID NO: 33358 - RNA, 39 nt, synthetic construct
  misc_feature 1..39: note = DNA-directed RNA polymerase I subunit RPA1 (1579-1591)
  source 1..39: mol_type = other RNA
aacaccgagggcatcaacctgcccgagctcttcaagtac

SEQ ID NO: 33359 - RNA, 27 nt, synthetic construct
  misc_feature 1..27: note = Putative SMEK homolog 3 (187-195)
  source 1..27: mol_type = other RNA
aacaccgagggcctgcaccacctctac

SEQ ID NO: 33360 - RNA, 39 nt, synthetic construct
  misc_feature 1..39: note = Condensin complex subunit 1 (509-521)
  source 1..39: mol_type = other RNA
aacaccgagaccacggaggacgtgaagggccgcatctac

SEQ ID NO: 33361 - RNA, 30 nt, synthetic construct
  misc_feature 1..30: note = Charged multivesicular body protein 4b (102-111)
  source 1..30: mol_type = other RNA
aacaccgaggtgctgaagaacatgggctac

SEQ ID NO: 33362 - RNA, 39 nt, synthetic construct
  misc_feature 1..39: note = Solute carrier family 25 member 46 (374-386)
  source 1..39: mol_type = other RNA
aacaccatccgccaggaggagggcgtgttcgggttctac

SEQ ID NO: 33363 - RNA, 39 nt, synthetic construct
  misc_feature 1..39: note = Microphthalmia-associated transcription factor (237-249)
  source 1..39: mol_type = other RNA
aacaccctgcccgtgagcggcaacctcatcgacctgtac

SEQ ID NO: 33364 - RNA, 33 nt, synthetic construct
  misc_feature 1..33: note = AT-rich interactive domain-containing protein 1A (858-868)
  source 1..33: mol_type = other RNA
aacaccagcgacatgatgggccgcatgtcctac

SEQ ID NO: 33365 - RNA, 39 nt, synthetic construct
  misc_feature 1..39: note = Lysine-specific demethylase 5A (460-472)
  source 1..39: mol_type = other RNA
aacgtggacatcagcggcatgaaggtcccctggctgtac

SEQ ID NO: 33366 - RNA, 36 nt, synthetic construct
  misc_feature 1..36: note = Anaphase-promoting complex subunit 7 (270-281)
  source 1..36: mol_type = other RNA
aacgtggacctgctcggcagcctggccgacctgtac

SEQ ID NO: 33367 - RNA, 27 nt, synthetic construct
  misc_feature 1..27: note = 60S ribosomal protein L13a (184-192)
  source 1..27: mol_type = other RNA
aacgtggagaagaagatcgacaagtac

SEQ ID NO: 33368 - RNA, 30 nt, synthetic construct
  misc_feature 1..30: note = Unhealthy ribosome biogenesis protein 2 homolog (1354-1363)
  source 1..30: mol_type = other RNA
cccctggaccacctcaagccgctggagtac

SEQ ID NO: 33369 - RNA, 30 nt, synthetic construct
  misc_feature 1..30: note = Nardilysin (107-116)
  source 1..30: mol_type = other RNA
cccagcgacccgaagcagtaccgctacatc

SEQ ID NO: 33370 - RNA, 33 nt, synthetic construct
  misc_feature 1..33: note = Probable 28S rRNA (cytosine-C(5))-methyltransferase (291-301)
  source 1..33: mol_type = other RNA
cccagcgacccgcgctaccacgaggtgcactac

SEQ ID NO: 33371 - RNA, 27 nt, synthetic construct
  misc_feature 1..27: note = Vesicle-associated membrane protein 7 (37-45)
  source 1..27: mol_type = other RNA
cccagcgagaacaacaagctgacctac

SEQ ID NO: 33372 - RNA, 36 nt, synthetic construct
  misc_feature 1..36: note = ELAV-like protein 1 (98-109)
  source 1..36: mol_type = other RNA
cccagctccgaggtgatcaaggacgccaacctgtac

SEQ ID NO: 33373 - RNA, 27 nt, synthetic construct
  misc_feature 1..27: note = Copine-1 (299-307)
  source 1..27: mol_type = other RNA
cccagctccccggacagcctgcactac

SEQ ID NO: 33374 - RNA, 27 nt, synthetic construct
  misc_feature 1..27: note = Leucyl-cystinyl aminopeptidase (155-163)
  source 1..27: mol_type = other RNA
cccaccgccgtggtcccgctgcgctac

SEQ ID NO: 33375 - RNA, 36 nt, synthetic construct
  misc_feature 1..36: note = Mitogen-activated protein kinase kinase kinase kinase 2 (799-810)
  source 1..36: mol_type = other RNA
cccaccgacaacccggaggcccacagcaacctgtac

SEQ ID NO: 33376 - RNA, 33 nt, synthetic construct
  misc_feature 1..33: note = GRAM domain-containing protein 4 (500-510)
  source 1..33: mol_type = other RNA
cccaccgactacatccgcaacggcgtgctgtac

SEQ ID NO: 33377 - RNA, 30 nt, synthetic construct
  misc_feature 1..30: note = Vam6/Vps39-like protein (288-297)
  source 1..30: mol_type = other RNA
cccaccgactaccgcaagcagctgcagtac

SEQ ID NO: 33378 - RNA, 27 nt, synthetic construct
  misc_feature 1..27: note = Syntaxin-binding protein 5 (645-653)
  source 1..27: mol_type = other RNA
cccaccgagatccagcgcctgacctac

SEQ ID NO: 33379 - RNA, 36 nt, synthetic construct
  misc_feature 1..36: note = Mitochondrial import receptor subunit TOM70 (145-156)
  source 1..36: mol_type = other RNA
cccaccgagaagaacgtggacctgagcaccttctac

SEQ ID NO: 33380 - RNA, 36 nt, synthetic construct
  misc_feature 1..36: note = Nuclear factor erythroid 2-related factor 1 (309-320)
  source 1..36: mol_type = other RNA
cccgtggaggagttcaacgagctgctcagcaagtac

SEQ ID NO: 33381 - RNA, 33 nt, synthetic construct
  misc_feature 1..33: note = Uncharacterized protein KIAA2013 (534-544)
  source 1..33: mol_type = other RNA
caggccgaccccgacgtgctgcacaacagctac

SEQ ID NO: 33382 - RNA, 30 nt, synthetic construct
  misc_feature 1..30: note = Lysophospholipid acyltransferase LPCAT4 (420-429)
  source 1..30: mol_type = other RNA
caggccgagggccccaaccgcctgctctac

SEQ ID NO: 33383 - RNA, 39 nt, synthetic construct
  misc_feature 1..39: note = Actin-related protein 6 (44-56)
  source 1..39: mol_type = other RNA
cagatcgacgagatcaaggaccccagcggcctgttctac

SEQ ID NO: 33384 - RNA, 27 nt, synthetic construct
  misc_feature 1..27: note = Hepatocyte growth factor-regulated tyrosine kinase substrate (459-467)
  source 1..27: mol_type = other RNA
cagctggacgagcgccggctctactac

SEQ ID NO: 33385 - RNA, 27 nt, synthetic construct
  misc_feature 1..27: note = Speriolin-like protein (48-56)
  source 1..27: mol_type = other RNA
cagctggaccgccggatcctcgcctac

SEQ ID NO: 33386 - RNA, 30 nt, synthetic construct
  misc_feature 1..30: note = Zinc finger protein 74 (59-68)
  source 1..30: mol_type = other RNA
cagctggacagcccccagcgcgccctctac

SEQ ID NO: 33387 - RNA, 27 nt, synthetic construct
  misc_feature 1..27: note = trabeculin-alpha (4357-4365)
  source 1..27: mol_type = other RNA
cagctggacacccacatggagctctac

SEQ ID NO: 33388 - RNA, 33 nt, synthetic construct
  misc_feature 1..33: note = Phosphofurin acidic cluster sorting protein 1 (106-116)
  source 1..33: mol_type = other RNA
cagctggacgtggccggccgcgtcatgcagtac

SEQ ID NO: 33389 - RNA, 33 nt, synthetic construct
  misc_feature 1..33: note = Ubiquitin-40S ribosomal protein S27a (69-79)
  source 1..33: mol_type = other RNA
cagctggaggacggccgcaccctcagcgactac

SEQ ID NO: 33390 - RNA, 36 nt, synthetic construct
  misc_feature 1..36: note = PH domain leucine-rich repeat-containing protein phosphatase 2 (23-34)
  source 1..36: mol_type = other RNA
cagctggagcgccccggcgggctcgacaccctgtac

SEQ ID NO: 33391 - RNA, 27 nt, synthetic construct
  misc_feature 1..27: note = Transketolase (102-110)
  source 1..27: mol_type = other RNA
cagagcgaccccgccccgctgcagcac

SEQ ID NO: 33392 - RNA, 30 nt, synthetic construct
  misc_feature 1..30: note = HMG box-containing protein 1 (66-75)
  source 1..30: mol_type = other RNA
cagagcgaccccacccagtccggcatgtac

SEQ ID NO: 33393 - RNA, 30 nt, synthetic construct
  misc_feature 1..30: note = Aryl hydrocarbon receptor (150-159)
  source 1..30: mol_type = other RNA
cagagcgacgtgatccaccagtccgtctac

SEQ ID NO: 33394 - RNA, 39 nt, synthetic construct
  misc_feature 1..39: note = HLA class I histocompatibility antigen, A-1 alpha chain (86-98)
  source 1..39: mol_type = other RNA
cagagcgaggacggctcccacaccatccagatcatgtac

SEQ ID NO: 33395 - RNA, 33 nt, synthetic construct
  misc_feature 1..33: note = Pre-mRNA-splicing factor ISY1 homolog (275-285)
  source 1..33: mol_type = other RNA
cagagcgaggaggcccgccggctgctcggctac

SEQ ID NO: 33396 - RNA, 30 nt, synthetic construct
  misc_feature 1..30: note = LIM and SH3 domain protein 1 (77-86)
  source 1..30: mol_type = other RNA
cagagcgagctgcagtcccaggtgcgctac

SEQ ID NO: 33397 - RNA, 27 nt, synthetic construct
  misc_feature 1..27: note = Dynamin-1-like protein (672-680)
  source 1..27: mol_type = other RNA
cagagcgagctggtgggccagctctac

SEQ ID NO: 33398 - RNA, 36 nt, synthetic construct
  misc_feature 1..36: note = E3 ubiquitin-protein ligase synoviolin (163-174)
  source 1..36: mol_type = other RNA
cagagcgagaacccctgggacaacaaggccgtgtac

SEQ ID NO: 33399 - RNA, 27 nt, synthetic construct
  misc_feature 1..27: note = Vacuolar protein sorting-associated protein 13D (1153-1161)
  source 1..27: mol_type = other RNA
cagagcgagcgcgagtacatccggtac

SEQ ID NO: 33400 - RNA, 30 nt, synthetic construct
  misc_feature 1..30: note = Ubiquitin carboxyl-terminal hydrolase 25 (71-80)
  source 1..30: mol_type = other RNA
cagaccgccctgcccggcaacgaccgctac

SEQ ID NO: 33401 - RNA, 30 nt, synthetic construct
  misc_feature 1..30: note = Zinc finger MYM-type protein 2 (609-618)
  source 1..30: mol_type = other RNA
cagaccgacgacacctggcgcacggagtac

SEQ ID NO: 33402 - RNA, 27 nt, synthetic construct
  misc_feature 1..27: note = Disintegrin and metalloproteinase domain-containing protein 10 (227-235)
  source 1..27: mol_type = other RNA
cagaccgaccacctgttcttcaagtac

SEQ ID NO: 33403 - RNA, 33 nt, synthetic construct
  misc_feature 1..33: note = RNA polymerase-associated protein CTR9 homolog (424-434)
  source 1..33: mol_type = other RNA
cagaccgacatccagggcgccctgagcgcctac

SEQ ID NO: 33404 - RNA, 36 nt, synthetic construct
  misc_feature 1..36: note = AP-1 complex subunit beta-1 (59-70)
  source 1..36: mol_type = other RNA
cagaccgacaacctggagctcaagaagctggtgtac

SEQ ID NO: 33405 - RNA, 30 nt, synthetic construct
  misc_feature 1..30: note = Charged multivesicular body protein 7 (274-283)
  source 1..30: mol_type = other RNA
cagaccgaccagatggtgttcaacgcctac

SEQ ID NO: 33406 - RNA, 33 nt, synthetic construct
  misc_feature 1..33: note = Midasin (362-372)
  source 1..33: mol_type = other RNA
cagaccgacagcaagatgctgctcggcatgtac

SEQ ID NO: 33407 - RNA, 30 nt, synthetic construct
  misc_feature 1..30: note = RAB6A-GEF complex partner protein 2 (260-269)
  source 1..30: mol_type = other RNA
cagaccgaggagcgcgtgcagcccgagtac

SEQ ID NO: 33408 - RNA, 33 nt, synthetic construct
  misc_feature 1..33: note = UDP-glucose:glycoprotein glucosyltransferase 1 (1328-1338)
  source 1..33: mol_type = other RNA
cagaccgagaagcagcgcatcatctggggctac

SEQ ID NO: 33409 - RNA, 30 nt, synthetic construct
  misc_feature 1..30: note = Probable cation-transporting ATPase 13A3 (131-140)
  source 1..30: mol_type = other RNA
cagaccgagagccagcagatccgctacttc

SEQ ID NO: 33410 - RNA, 36 nt, synthetic construct
  misc_feature 1..36: note = Intraflagellar transport protein 81 homolog (447-458)
  source 1..36: mol_type = other RNA
cagaccatggaggagaagaagggcatcagcgggtac

SEQ ID NO: 33411 - RNA, 27 nt, synthetic construct
  misc_feature 1..27: note = Importin subunit alpha-5 (516-524)
  source 1..27: mol_type = other RNA
caggtggacctgaaccagcagcagtac

SEQ ID NO: 33412 - RNA, 30 nt, synthetic construct
  misc_feature 1..30: note = Protein PRR14L (815-824)
  source 1..30: mol_type = other RNA
caggtggacaacagcctgatcaccaagtac

SEQ ID NO: 33413 - RNA, 30 nt, synthetic construct
  misc_feature 1..30: note = DNA-directed RNA polymerase II subunit RPB9 (103-112)
  source 1..30: mol_type = other RNA
cgcgccgaggacgccatgcggctgtactac

SEQ ID NO: 33414 - RNA, 27 nt, synthetic construct
  misc_feature 1..27: note = CDK5 regulatory subunit-associated protein 2 (1335-1343)
  source 1..27: mol_type = other RNA
cgcatcgaggaggacaacctgacctac

SEQ ID NO: 33415 - RNA, 27 nt, synthetic construct
  misc_feature 1..27: note = Vacuole membrane protein 1 (105-113)
  source 1..27: mol_type = other RNA
cgcatcgagaagcagttcctgctctac

SEQ ID NO: 33416 - RNA, 27 nt, synthetic construct
  misc_feature 1..27: note = Lanosterol 14-alpha demethylase (418-426)
  source 1..27: mol_type = other RNA
cgcctggacttcaaccccgaccggtac

SEQ ID NO: 33417 - RNA, 30 nt, synthetic construct
  misc_feature 1..30: note = Tubulin alpha-1C chain (355-364)
  source 1..30: mol_type = other RNA
cgcctggaccacaagttcgacctcatgtac

SEQ ID NO: 33418 - RNA, 36 nt, synthetic construct
  misc_feature 1..36: note = Nitric oxide synthase, endothelial (782-793)
  source 1..36: mol_type = other RNA
cgcctggacaccggcgggcaggagggcctccagtac

SEQ ID NO: 33419 - RNA, 33 nt, synthetic construct
  misc_feature 1..33: note = Transmembrane emp24 domain-containing protein 7 (68-78)
  source 1..33: mol_type = other RNA
cgcctggaggaccccgacggcaaggtgctctac

SEQ ID NO: 33420 - RNA, 30 nt, synthetic construct
  misc_feature 1..30: note = Peptidyl-prolyl cis-trans isomerase FKBP3 (189-198)
  source 1..30: mol_type = other RNA
cgcctggagatcgagcccgagtgggcctac

SEQ ID NO: 33421 - RNA, 33 nt, synthetic construct
  misc_feature 1..33: note = Ubiquitin carboxyl-terminal hydrolase 15 (403-413)
  source 1..33: mol_type = other RNA
cgcatggaccccctgaccaagccgatgcagtac

SEQ ID NO: 33422 - RNA, 36 nt, synthetic construct
  misc_feature 1..36: note = WASH complex subunit strumpellin (230-241)
  source 1..36: mol_type = other RNA
cgcagcgacgacatctacaaccaggtgtccgcctac

SEQ ID NO: 33423 - RNA, 30 nt, synthetic construct
  misc_feature 1..30: note = Selenocysteine insertion sequence-binding protein 2-like (379-388)
  source 1..30: mol_type = other RNA
cgcagcgaccccaactccgagagcctgtac

SEQ ID NO: 33424 - RNA, 33 nt, synthetic construct
  misc_feature 1..33: note = Nuclear cap-binding protein subunit 2 (10-20)
  source 1..33: mol_type = other RNA
cgcagcgactcctacgtggagctgagccagtac

SEQ ID NO: 33425 - RNA, 36 nt, synthetic construct
  misc_feature 1..36: note = Methyltransferase-like protein 22 (16-27)
  source 1..36: mol_type = other RNA
cgcagcgacaccgtgctgtccgacgtccacctctac

SEQ ID NO: 33426 - RNA, 45 nt, synthetic construct
  misc_feature 1..45: note = Eukaryotic translation initiation factor 3 subunit E (431-445)
  source 1..45: mol_type = other RNA
cgcagcgaggcccccaactgggccacccaggactccggcttctac

SEQ ID NO: 33427 - RNA, 30 nt, synthetic construct
  misc_feature 1..30: note = F-box only protein 9 (210-219)
  source 1..30: mol_type = other RNA
cgcaccgacgccatcctgctcggccactac

SEQ ID NO: 33428 - RNA, 33 nt, synthetic construct
  misc_feature 1..33: note = General transcription factor II-I repeat domain-containing protein 2B (69-79)
  source 1..33: mol_type = other RNA
cgcaccgacttccagaaggacttcgccaagtac

SEQ ID NO: 33429 - RNA, 27 nt, synthetic construct
  misc_feature 1..27: note = Cytoplasmic dynein 1 heavy chain 1 (3544-3552)
  source 1..27: mol_type = other RNA
cgcaccgacatcgcccggaccgagtac

SEQ ID NO: 33430 - RNA, 36 nt, synthetic construct
  misc_feature 1..36: note = ERI1 exoribonuclease 3 (98-109)
  source 1..36: mol_type = other RNA
cgcaccatggagatcgagagcaccttccacatgtac

SEQ ID NO: 33431 - RNA, 30 nt, synthetic construct
  misc_feature 1..30: note = U5 small nuclear ribonucleoprotein 200 kDa helicase (666-675)
  source 1..30: mol_type = other RNA
cgcgtggaccccgccaagggcctgttctac

SEQ ID NO: 33432 - RNA, 30 nt, synthetic construct
  misc_feature 1..30: note = DmX-like protein 2 (729-738)
  source 1..30: mol_type = other RNA
cgcgtggaccccatcggcccgctgagctac

SEQ ID NO: 33433 - RNA, 27 nt, synthetic construct
  misc_feature 1..27: note = Serine/threonine-protein kinase SMG1 (32-40)
  source 1..27: mol_type = other RNA
agcgccgaccccggcaacctgaagtac

SEQ ID NO: 33434 - RNA, 27 nt, synthetic construct
  misc_feature 1..27: note = DNA mismatch repair protein Msh6 (340-348)
  source 1..27: mol_type = other RNA
agcgactccctggtgcagaagggctac

SEQ ID NO: 33435 - RNA, 33 nt, synthetic construct
  misc_feature 1..33: note = GPI transamidase component PIG-T (52-62)
  source 1..33: mol_type = other RNA
agcgagctgcagcgcgagggcgtgtcccactac

SEQ ID NO: 33436 - RNA, 33 nt, synthetic construct
  misc_feature 1..33: note = Ectonucleotide pyrophosphatase/phosphodiesterase family member 2 (308-318)
  source 1..33: mol_type = other RNA
agcgagcagcccgacttctccggccacaagtac

SEQ ID NO: 33437 - RNA, 30 nt, synthetic construct
  misc_feature 1..30: note = Protein YIPF5 (17-26)
  source 1..30: mol_type = other RNA
agcatcgacgaccagtcccagcagagctac

SEQ ID NO: 33438 - RNA, 30 nt, synthetic construct
  misc_feature 1..30: note = E3 ubiquitin-protein ligase HECTD1 (532-541)
  source 1..30: mol_type = other RNA
agcatcgagcgcctgcccctccacctgtac

SEQ ID NO: 33439 - RNA, 33 nt, synthetic construct
  misc_feature 1..33: note = Creatine kinase B-type (164-174)
  source 1..33: mol_type = other RNA
agcctggacggcgacctcgccgggcgctactac

SEQ ID NO: 33440 - RNA, 33 nt, synthetic construct
  misc_feature 1..33: note = Protein FAM91A1 (206-216)
  source 1..33: mol_type = other RNA
agcctggactacaacgtggtccactccctctac

SEQ ID NO: 33441 - RNA, 27 nt, synthetic construct
  misc_feature 1..27: note = Cytochrome c oxidase subunit 4 isoform 1, mitochondrial (36-44)
  source 1..27: mol_type = other RNA
agcatggacgagaaggtggagctgtac

SEQ ID NO: 33442 - RNA, 30 nt, synthetic construct
  misc_feature 1..30: note = Paired box protein Pax-3 (312-321)
  source 1..30: mol_type = other RNA
agcatggaccccgtgaccggctaccagtac

SEQ ID NO: 33443 - RNA, 30 nt, synthetic construct
  misc_feature 1..30: note = Heat shock protein HSP 90-alpha (174-183)
  source 1..30: mol_type = other RNA
agctccgacgccctggacaagatccgctac

SEQ ID NO: 33444 - RNA, 33 nt, synthetic construct
  misc_feature 1..33: note = Integrin beta-3 (536-546)
  source 1..33: mol_type = other RNA
agctccgacttcggcaagatcaccgggaagtac

SEQ ID NO: 33445 - RNA, 33 nt, synthetic construct
  misc_feature 1..33: note = Protein SEC13 homolog (124-134)
  source 1..33: mol_type = other RNA
agctccgacggcgccatcagcctgctcacctac

SEQ ID NO: 33446 - RNA, 30 nt, synthetic construct
  misc_feature 1..30: note = Nucleoporin GLE1 (16-25)
  source 1..30: mol_type = other RNA
agctccgacaagggccgcctgtgctactac

SEQ ID NO: 33447 - RNA, 27 nt, synthetic construct
  misc_feature 1..27: note = Histone-lysine N-methyltransferase SETDB2 (309-317)
  source 1..27: mol_type = other RNA
agctccgacaagatcaccaccggctac

SEQ ID NO: 33448 - RNA, 30 nt, synthetic construct
  misc_feature 1..30: note = Scm-like with four MBT domains protein 1 (201-210)
  source 1..30: mol_type = other RNA
agctccgacaactacgagcactggctgtac

SEQ ID NO: 33449 - RNA, 30 nt, synthetic construct
  misc_feature 1..30: note = Forkhead box protein M1 (39-48)
  source 1..30: mol_type = other RNA
agctccgaccccgccagccagctgtcctac

SEQ ID NO: 33450 - RNA, 33 nt, synthetic construct
  misc_feature 1..33: note = Protein kinase C and casein kinase substrate in neurons protein 2 (14-24)
  source 1..33: mol_type = other RNA
agctccgacagcttctgggaggtgggcaactac

SEQ ID NO: 33451 - RNA, 36 nt, synthetic construct
  misc_feature 1..36: note = Vacuolar protein sorting-associated protein 51 homolog (377-388)
  source 1..36: mol_type = other RNA
agctccgacagctccaagcgcaccttcagcgtgtac

SEQ ID NO: 33452 - RNA, 30 nt, synthetic construct
  misc_feature 1..30: note = Clathrin interactor 1 (163-172)
  source 1..30: mol_type = other RNA
agctccgacagcgtgggcgggttccgctac

SEQ ID NO: 33453 - RNA, 33 nt, synthetic construct
  misc_feature 1..33: note = Protein FAM189B (167-177)
  source 1..33: mol_type = other RNA
agctccgacaccgccgacttccgcgacctgtac

SEQ ID NO: 33454 - RNA, 33 nt, synthetic construct
  misc_feature 1..33: note = WD40 repeat-containing protein SMU1 (7-17)
  source 1..33: mol_type = other RNA
agctccgacgtgatccgcctgatcatgcagtac

SEQ ID NO: 33455 - RNA, 30 nt, synthetic construct
  misc_feature 1..30: note = Archaemetzincin-2 (168-177)
  source 1..30: mol_type = other RNA
agctccgactacagcatcttcgacaactac

SEQ ID NO: 33456 - RNA, 27 nt, synthetic construct
  misc_feature 1..27: note = Nuclear receptor-interacting protein 1 (271-279)
  source 1..27: mol_type = other RNA
agctccgaggcccacctgcagcagtac

SEQ ID NO: 33457 - RNA, 27 nt, synthetic construct
  misc_feature 1..27: note = KIF1-binding protein (164-172)
  source 1..27: mol_type = other RNA
agctccgaggccctgtacaaccagtac

SEQ ID NO: 33458 - RNA, 39 nt, synthetic construct
  misc_feature 1..39: note = DNA-dependent protein kinase catalytic subunit (3366-3378)
  source 1..39: mol_type = other RNA
agctccgaggacagcgagaaggtgatcgccggcctgtac

SEQ ID NO: 33459 - RNA, 30 nt, synthetic construct
  misc_feature 1..30: note = Protein C-ets-1 (192-201)
  source 1..30: mol_type = other RNA
agctccgaggagctgctcagcctgaagtac

SEQ ID NO: 33460 - RNA, 33 nt, synthetic construct
  misc_feature 1..33: note = UPF0769 protein C21orf59 (235-245)
  source 1..33: mol_type = other RNA
agctccgaggagcagaagcagctgatgctctac

SEQ ID NO: 33461 - RNA, 33 nt, synthetic construct
  misc_feature 1..33: note = Protein-glutamate O-methyltransferase (271-281)
  source 1..33: mol_type = other RNA
agctccgagctggccaccgaggtgcacttctac

SEQ ID NO: 33462 - RNA, 27 nt, synthetic construct
  misc_feature 1..27: note = Trafficking protein particle complex subunit 3 (15-23)
  source 1..27: mol_type = other RNA
agctccgagctgttcaccctcacctac

SEQ ID NO: 33463 - RNA, 30 nt, synthetic construct
  misc_feature 1..30: note = Centriole, cilia and spindle-associated protein (253-262)
  source 1..30: mol_type = other RNA
agctccgagaacccctggatgaccgagtac

SEQ ID NO: 33464 - RNA, 33 nt, synthetic construct
  misc_feature 1..33: note = Proline and serine-rich protein 1 (34-44)
  source 1..33: mol_type = other RNA
agctccgagcaggtggtcgacctgctccgctac

SEQ ID NO: 33465 - RNA, 30 nt, synthetic construct
  misc_feature 1..30: note = Ubiquitin carboxyl-terminal hydrolase 38 (207-216)
  source 1..30: mol_type = other RNA
agctccgagagcggccactactactcctac

SEQ ID NO: 33466 - RNA, 30 nt, synthetic construct
  misc_feature 1..30: note = DNA-dependent protein kinase catalytic subunit (556-565)
  source 1..30: mol_type = other RNA
agctccgagagcctgaaccacctcctgtac

SEQ ID NO: 33467 - RNA, 42 nt, synthetic construct
  misc_feature 1..42: note = Single Ig IL-1-related receptor (382-395)
  source 1..42: mol_type = other RNA
agctccgaggtggacgtcagcgacctgggctcccgcaactac

SEQ ID NO: 33468 - RNA, 33 nt, synthetic construct
  misc_feature 1..33: note = ELAV-like protein 1 (99-109)
  source 1..33: mol_type = other RNA
agctccgaggtgatcaaggacgccaacctgtac

SEQ ID NO: 33469 - RNA, 33 nt, synthetic construct
  misc_feature 1..33: note = Protein FAM65B (857-867)
  source 1..33: mol_type = other RNA
agctccgaggtggtcaccgtgttccagtactac

SEQ ID NO: 33470 - RNA, 36 nt, synthetic construct
  misc_feature 1..36: note = Interferon-induced, double-stranded RNA-activated protein kinase (420-431)
  source 1..36: mol_type = other RNA
agctcccaggactacggcaaggaggtggacctgtac

SEQ ID NO: 33471 - RNA, 36 nt, synthetic construct
  misc_feature 1..36: note = Histone-arginine methyltransferase CARM1 (405-416)
  source 1..36: mol_type = other RNA
agcaccgcccccaccgagccgctgacgcactggtac

SEQ ID NO: 33472 - RNA, 39 nt, synthetic construct
  misc_feature 1..39: note = Protein HIRA (392-404)
  source 1..39: mol_type = other RNA
agcaccgccgtgatcgagaaccccgagatgctgaagtac

SEQ ID NO: 33473 - RNA, 33 nt, synthetic construct
  misc_feature 1..33: note = Nucleoprotein TPR (1876-1886)
  source 1..33: mol_type = other RNA
agcaccgacggcgaggtggagacccaggtctac

SEQ ID NO: 33474 - RNA, 30 nt, synthetic construct
  misc_feature 1..30: note = Recombining binding protein suppressor of hairless (318-327)
  source 1..30: mol_type = other RNA
agcaccgacaaggccgagtacaccttctac

SEQ ID NO: 33475 - RNA, 33 nt, synthetic construct
  misc_feature 1..33: note = Holliday junction recognition protein (523-533)
  source 1..33: mol_type = other RNA
agcaccgacaaggcctccatggaggtgcgctac

SEQ ID NO: 33476 - RNA, 24 nt, synthetic construct
  misc_feature 1..24: note = Eukaryotic translation initiation factor 3 subunit I (111-118)
  source 1..24: mol_type = other RNA
agcaccgacaagcagatgggctac

SEQ ID NO: 33477 - RNA, 33 nt, synthetic construct
  misc_feature 1..33: note = Myocyte-specific enhancer factor 2A (59-69)
  source 1..33: mol_type = other RNA
agcaccgacatggacaaggtgctgctcaagtac

SEQ ID NO: 33478 - RNA, 33 nt, synthetic construct
  misc_feature 1..33: note = Integrin alpha-5 (179-189)
  source 1..33: mol_type = other RNA
agcaccgacaacttcacccgcatcctggagtac

SEQ ID NO: 33479 - RNA, 30 nt, synthetic construct
  misc_feature 1..30: note = Nuclear pore complex protein Nup93 (541-550)
  source 1..30: mol_type = other RNA
agcaccgacccccgcgaggccctgcagtac

SEQ ID NO: 33480 - RNA, 30 nt, synthetic construct
  misc_feature 1..30: note = Immunoglobulin superfamily member 8 (131-140)
  source 1..30: mol_type = other RNA
agcaccgacacccgctacctgggctcctac

SEQ ID NO: 33481 - RNA, 45 nt, synthetic construct
  misc_feature 1..45: note = RNA-binding protein FUS (44-58)
  source 1..45: mol_type = other RNA
agcaccgacacctccggctacgggcagagctcctacagctcctac

SEQ ID NO: 33482 - RNA, 30 nt, synthetic construct
  misc_feature 1..30: note = Signal-induced proliferation-associated 1-like protein 1 (909-918)
  source 1..30: mol_type = other RNA
agcaccgacacctccctgaagatcttctac

SEQ ID NO: 33483 - RNA, 36 nt, synthetic construct
  misc_feature 1..36: note = Eukaryotic translation initiation factor 2A (264-275)
  source 1..36: mol_type = other RNA
agcaccgacgtggacaagaccggcgcctcctactac

SEQ ID NO: 33484 - RNA, 33 nt, synthetic construct
  misc_feature 1..33: note = 26S proteasome non-ATPase regulatory subunit 8 (239-249)
  source 1..33: mol_type = other RNA
agcaccgagctggccaagcaggtgatcgagtac

SEQ ID NO: 33485 - RNA, 27 nt, synthetic construct
  misc_feature 1..27: note = Asparagine-tRNA ligase, cytoplasmic (174-182)
  source 1..27: mol_type = other RNA
agcaccgagtccagcgtggccgtctac

SEQ ID NO: 33486 - RNA, 36 nt, synthetic construct
  misc_feature 1..36: note = Mitochondrial import inner membrane translocase subunit Tim17-A (156-167)
  source 1..36: mol_type = other RNA
agcacccagctgccctccagcccgttcggcgactac

SEQ ID NO: 33487 - RNA, 27 nt, synthetic construct
  misc_feature 1..27: note = Zinc finger protein 106 (662-670)
  source 1..27: mol_type = other RNA
agcacctccgagatcggcacccgctac

SEQ ID NO: 33488 - RNA, 27 nt, synthetic construct
  misc_feature 1..27: note = Protein strawberry notch homolog 1 (1169-1177)
  source 1..27: mol_type = other RNA
agcacctccggccacgtggagctgtac

SEQ ID NO: 33489 - RNA, 33 nt, synthetic construct
  misc_feature 1..33: note = T-complex protein 1 subunit epsilon (270-280)
  source 1..33: mol_type = other RNA
agcgtggaggactacaaggccctgcagaagtac

SEQ ID NO: 33490 - RNA, 30 nt, synthetic construct
  misc_feature 1..30: note = Glutamine-fructose-6-phosphate aminotransferase (isomerizing) 1 (444-453)
  source 1..30: mol_type = other RNA
accgccgacaccctgatgggcctccgctac

SEQ ID NO: 33491 - RNA, 36 nt, synthetic construct
  misc_feature 1..36: note = Splicing factor 3B subunit 6 (31-42)
  source 1..36: mol_type = other RNA
accgccgaggagatgtacgacatcttcggcaagtac

SEQ ID NO: 33492 - RNA, 30 nt, synthetic construct
  misc_feature 1..30: note = Annexin A11 (431-440)
  source 1..30: mol_type = other RNA
accgacctgctcgacatccgcagcgagtac

SEQ ID NO: 33493 - RNA, 30 nt, synthetic construct
  misc_feature 1..30: note = RNA binding motif protein 22 (244-253)
  source 1..30: mol_type = other RNA
accgagaccgacctgcgcaaccacttctac

SEQ ID NO: 33494 - RNA, 33 nt, synthetic construct
  misc_feature 1..33: note = Glutamine-tRNA ligase (47-57)
  source 1..33: mol_type = other RNA
accatcgacaaggccaccggcatcctgctctac

SEQ ID NO: 33495 - RNA, 30 nt, synthetic construct
  misc_feature 1..30: note = Pre-mRNA-splicing factor ATP-dependent RNA helicase DHX15 (294-303)
  source 1..30: mol_type = other RNA
accctggacgccggcaagttccagatctac

SEQ ID NO: 33496 - RNA, 30 nt, synthetic construct
  misc_feature 1..30: note = ATP-dependent RNA helicase DHX8 (717-726)
  source 1..30: mol_type = other RNA
accctggacgccgtgaagttcagccagtac

SEQ ID NO: 33497 - RNA, 30 nt, synthetic construct
  misc_feature 1..30: note = BRCA2-interacting transcriptional repressor EMSY (945-954)
  source 1..30: mol_type = other RNA
accctggacccccagaccggcctcttctac

SEQ ID NO: 33498 - RNA, 39 nt, synthetic construct
  misc_feature 1..39: note = A-kinase anchor protein 11 (1443-1455)
  source 1..39: mol_type = other RNA
accctggacccctaccgcaacgaggtgagccagctctac

SEQ ID NO: 33499 - RNA, 27 nt, synthetic construct
  misc_feature 1..27: note = E3 SUMO-protein ligase NSE2 (70-78)
  source 1..27: mol_type = other RNA
accctggaccgccagctcaaccactac

SEQ ID NO: 33500 - RNA, 36 nt, synthetic construct
  misc_feature 1..36: note = TOX high mobility group box family member 4 (105-116)
  source 1..36: mol_type = other RNA
accatggacctggaccacagcatcggcacccagtac

SEQ ID NO: 33501 - RNA, 30 nt, synthetic construct
  misc_feature 1..30: note = Dynein light chain roadblock-type 1 (40-49)
  source 1..30: mol_type = other RNA
accatggacaaccccaccacgacccagtac

SEQ ID NO: 33502 - RNA, 33 nt, synthetic construct
  misc_feature 1..33: note = Retinal dehydrogenase 1 (105-115)
  source 1..33: mol_type = other RNA
accatggagagcatgaacggcgggaagctgtac

SEQ ID NO: 33503 - RNA, 42 nt, synthetic construct
  misc_feature 1..42: note = Alpha-N-acetylglucosaminidase (545-558)
  source 1..42: mol_type = other RNA
accagcgccccctccctggccaccagcccggcgttccgctac

SEQ ID NO: 33504 - RNA, 30 nt, synthetic construct
  misc_feature 1..30: note = Cytoplasmic dynein 1 heavy chain 1 (1163-1172)
  source 1..30: mol_type = other RNA
accagcgacgccgtgaccttcatcacgtac

SEQ ID NO: 33505 - RNA, 30 nt, synthetic construct
  misc_feature 1..30: note = G1/S-specific cyclin-E2 (81-90)
  source 1..30: mol_type = other RNA
accagcgacttctcccgcttcaccaactac

SEQ ID NO: 33506 - RNA, 33 nt, synthetic construct
  misc_feature 1..33: note = E3 SUMO-protein ligase RanBP2 (1071-1081)
  source 1..33: mol_type = other RNA
accagcgacaagcccctgcagggcgacgggtac

SEQ ID NO: 33507 - RNA, 33 nt, synthetic construct
  misc_feature 1..33: note = Endoplasmic reticulum metallopeptidase 1 (361-371)
  source 1..33: mol_type = other RNA
accagcgacatgctggccgccgcgtccaagtac

SEQ ID NO: 33508 - RNA, 33 nt, synthetic construct
  misc_feature 1..33: note = Fizzy-related protein homolog (81-91)
  source 1..33: mol_type = other RNA
accagcgacaacggcaaggacgggctggcctac

SEQ ID NO: 33509 - RNA, 27 nt, synthetic construct
  misc_feature 1..27: note = Beta-hexosaminidase subunit alpha (32-40)
  source 1..27: mol_type = other RNA
accagcgaccagcgctacgtgctgtac

SEQ ID NO: 33510 - RNA, 30 nt, synthetic construct
  misc_feature 1..30: note = Leucine-rich repeat flightless-interacting protein 1 (241-250)
  source 1..30: mol_type = other RNA
accagcgacaccctgaacaacgtgggctac

SEQ ID NO: 33511 - RNA, 33 nt, synthetic construct
  misc_feature 1..33: note = Protein SDE2 homolog (58-68)
  source 1..33: mol_type = other RNA
accagcgacaccgtgcagcacggcgccgtctac

SEQ ID NO: 33512 - RNA, 36 nt, synthetic construct
  misc_feature 1..36: note = Uncharacterized protein C15orf41 (61-72)
  source 1..36: mol_type = other RNA
accagcgaggccatcgagtcctactaccagcgctac

SEQ ID NO: 33513 - RNA, 27 nt, synthetic construct
  misc_feature 1..27: note = High affinity cAMP-specific and IBMX-insensitive 3',5'-cyclic phosphodiesterase 8A (115-123)
  source 1..27: mol_type = other RNA
accagcgaggaccgcttcatccagtac

SEQ ID NO: 33514 - RNA, 36 nt, synthetic construct
  misc_feature 1..36: note = Caprin-1 (438-449)
  source 1..36: mol_type = other RNA
accagcgagggctacaccgcctcccagcccctgtac

SEQ ID NO: 33515 - RNA, 39 nt, synthetic construct
  misc_feature 1..39: note = Endoplasmin (188-200)
  source 1..39: mol_type = other RNA
accagcgagctgatcggccagttcggggtgggcttctac

SEQ ID NO: 33516 - RNA, 33 nt, synthetic construct
  misc_feature 1..33: note = Sodium/potassium-transporting ATPase subunit alpha-2 (19-29)
  source 1..33: mol_type = other RNA
accagcgagcagctggacgacatcctcaagtac

SEQ ID NO: 33517 - RNA, 27 nt, synthetic construct
  misc_feature 1..27: note = Putative pre-mRNA-splicing factor ATP-dependent RNA helicase DHX16 (487-495)
  source 1..27: mol_type = other RNA
accagcgagcgcaccgtgctgcggtac

SEQ ID NO: 33518 - RNA, 27 nt, synthetic construct
  misc_feature 1..27: note = Neuroplastin (57-65)
  source 1..27: mol_type = other RNA
accagctccagccacaccctgacgtac

SEQ ID NO: 33519 - RNA, 36 nt, synthetic construct
  misc_feature 1..36: note = Unconventional myosin-Va (1775-1786)
  source 1..36: mol_type = other RNA
accaccgcccagatcgtgaaggtcctgaacctctac

SEQ ID NO: 33520 - RNA, 30 nt, synthetic construct
  misc_feature 1..30: note = Leukotriene A-4 hydrolase (421-430)
  source 1..30: mol_type = other RNA
accaccgacgactggaaggacttcctgtac

SEQ ID NO: 33521 - RNA, 33 nt, synthetic construct
  misc_feature 1..33: note = DNA-directed RNA polymerases I and III subunit RPAC1 (26-36)
  source 1..33: mol_type = other RNA
accaccgacttccccggcaactacagcgggtac

SEQ ID NO: 33522 - RNA, 27 nt, synthetic construct
  misc_feature 1..27: note = Mitotic spindle assembly checkpoint protein MAD2A (56-64)
  source 1..27: mol_type = other RNA
accaccgacctggagctcatcaagtac

SEQ ID NO: 33523 - RNA, 30 nt, synthetic construct
  misc_feature 1..30: note = Ubiquitin-like modifier-activating enzyme 6 (145-154)
  source 1..30: mol_type = other RNA
accaccgacctgagcttcctcgacaagtac

SEQ ID NO: 33524 - RNA, 39 nt, synthetic construct
  misc_feature 1..39: note = Exosome complex component RRP4 (34-46)
  source 1..39: mol_type = other RNA
accaccgacacgggcttcatgcgcgggcacggcacctac

SEQ ID NO: 33525 - RNA, 27 nt, synthetic construct
  misc_feature 1..27: note = SET domain-containing protein 4 (60-68)
  source 1..27: mol_type = other RNA
accaccgacacggtgatccgcagctac

SEQ ID NO: 33526 - RNA, 30 nt, synthetic construct
  misc_feature 1..30: note = Transmembrane protein 70, mitochondrial (28-37)
  source 1..30: mol_type = other RNA
accaccgacacgtacaaggccatcacctac

SEQ ID NO: 33527 - RNA, 27 nt, synthetic construct
  misc_feature 1..27: note = Enhancer of filamentation 1 (432-440)
  source 1..27: mol_type = other RNA
accaccgactggcgctgctacggctac

SEQ ID NO: 33528 - RNA, 36 nt, synthetic construct
  misc_feature 1..36: note = Matrin-3 (444-455)
  source 1..36: mol_type = other RNA
accaccgaggacgcccaggccgcggtggactactac

SEQ ID NO: 33529 - RNA, 30 nt, synthetic construct
  misc_feature 1..30: note = Superkiller viralicidic activity 2-like 2 (229-238)
  source 1..30: mol_type = other RNA
accaccgagatcctgcgcagcatgctctac

SEQ ID NO: 33530 - RNA, 36 nt, synthetic construct
  misc_feature 1..36: note = TBCC domain-containing protein 1 (479-490)
  source 1..36: mol_type = other RNA
accaccgagatccccggcgggctgccgagcgtgtac

SEQ ID NO: 33531 - RNA, 39 nt, synthetic construct
  misc_feature 1..39: note = DNA damage-binding protein 1 (894-906)
  source 1..39: mol_type = other RNA
accaccgagaaggagctgcgcacggagtgcaaccactac

SEQ ID NO: 33532 - RNA, 36 nt, synthetic construct
  misc_feature 1..36: note = Mitotic spindle assembly checkpoint protein MAD1 (643-654)
  source 1..36: mol_type = other RNA
accaccgagaaccagtaccgcctgacgagcctctac

SEQ ID NO: 33533 - RNA, 39 nt, synthetic construct
  misc_feature 1..39: note = Akirin-2 (77-89)
  source 1..39: mol_type = other RNA
accaccgagcagatcctgtacaacatcaagcaggagtac

SEQ ID NO: 33534 - RNA, 30 nt, synthetic construct
  misc_feature 1..30: note = vacuolar protein sorting-associated protein 26A isoform 3 (217-226)
  source 1..30: mol_type = other RNA
accaccgagacggagaccatcgccaagtac

SEQ ID NO: 33535 - RNA, 39 nt, synthetic construct
  misc_feature 1..39: note = BCL2/adenovirus E1B 19 kDa protein-interacting protein 2 (168-180)
  source 1..39: mol_type = other RNA
accaccgaggtgatccgcaagggcagcatcacggagtac

SEQ ID NO: 33536 - RNA, 27 nt, synthetic construct
  misc_feature 1..27: note = ADP-sugar pyrophosphatase (192-200)
  source 1..27: mol_type = other RNA
accgtggacgcccgcgtctacagctac

SEQ ID NO: 33537 - RNA, 27 nt, synthetic construct
  misc_feature 1..27: note = U3 small nucleolar RNA-associated protein 15 homolog (108-116)
  source 1..27: mol_type = other RNA
accgtggacttcaccgccgacaagtac

SEQ ID NO: 33538 - RNA, 30 nt, synthetic construct
  misc_feature 1..30: note = Fascin (484-493)
  source 1..30: mol_type = other RNA
accgtggaccccgccagcctgtgggagtac

SEQ ID NO: 33539 - RNA, 30 nt, synthetic construct
  misc_feature 1..30: note = Proteasome subunit alpha type-7 (97-106)
  source 1..30: mol_type = other RNA
accgtggaggaccccgtcaccgtggagtac

SEQ ID NO: 33540 - RNA, 36 nt, synthetic construct
  misc_feature 1..36: note = 14-3-3 protein epsilon (38-49)
  source 1..36: mol_type = other RNA
accgtggaggagcgcaacctgctcagcgtcgcctac

SEQ ID NO: 33541 - RNA, 36 nt, synthetic construct
  misc_feature 1..36: note = Importin-11 (432-443)
  source 1..36: mol_type = other RNA
accgtggaggagaccggcggggacagctggaagtac

SEQ ID NO: 33542 - RNA, 36 nt, synthetic construct
  misc_feature 1..36: note = Nodal modulator 2 (271-282)
  source 1..36: mol_type = other RNA
accgtgagccgcgaggacggctccttcagcttctac

SEQ ID NO: 33543 - RNA, 33 nt, synthetic construct
  misc_feature 1..33: note = Tetratricopeptide repeat protein 13 (506-516)
  source 1..33: mol_type = other RNA
gtggccgaccgcctgggcagcctcatgcagtac

SEQ ID NO: 33544 - RNA, 39 nt, synthetic construct
  misc_feature 1..39: note = Proteasome subunit beta type-4 (85-97)
  source 1..39: mol_type = other RNA
gtgatcgacgaggagctgctcggcgacgggcacagctac

SEQ ID NO: 33545 - RNA, 30 nt, synthetic construct
  misc_feature 1..30: note = Tubulin alpha-1C chain (144-153)
  source 1..30: mol_type = other RNA
gtgatcgacgaggtccgcaccggcacctac

SEQ ID NO: 33546 - RNA, 36 nt, synthetic construct
  misc_feature 1..36: note = Spindlin-3 (381-392)
  source 1..36: mol_type = other RNA
gtgatcgacagcctggtcggcaagcaggtggagtac

SEQ ID NO: 33547 - RNA, 30 nt, synthetic construct
  misc_feature 1..30: note = Protein HIRA (395-404)
  source 1..30: mol_type = other RNA
gtgatcgagaaccccgagatgctgaagtac

SEQ ID NO: 33548 - RNA, 27 nt, synthetic construct
  misc_feature 1..27: note = Beta-hexosaminidase subunit alpha (60-68)
  source 1..27: mol_type = other RNA
gtgctggacgaggccttccagcgctac

SEQ ID NO: 33549 - RNA, 27 nt, synthetic construct
  misc_feature 1..27: note = LETM1 and EF-hand domain-containing protein 1, mitochondrial (157-165)
  source 1..27: mol_type = other RNA
gtgctggacgagctcaagcactactac

SEQ ID NO: 33550 - RNA, 27 nt, synthetic construct
  misc_feature 1..27: note = Activating signal cointegrator 1 complex subunit 2 (386-394)
  source 1..27: mol_type = other RNA
gtgctggacgagacccgcaccgcctac

SEQ ID NO: 33551 - RNA, 36 nt, synthetic construct
  misc_feature 1..36: note = DNA-directed RNA polymerase I subunit RPA1 (748-759)
  source 1..36: mol_type = other RNA
gtgctggacaaggcccactacggcagctccgcctac

SEQ ID NO: 33552 - RNA, 36 nt, synthetic construct
  misc_feature 1..36: note = Nucleolar protein 14 (322-333)
  source 1..36: mol_type = other RNA
gtgctggacaaggacgaccgccggctcctgagctac

SEQ ID NO: 33553 - RNA, 30 nt, synthetic construct
  misc_feature 1..30: note = ATP-binding cassette sub-family B member 10, mitochondrial (194-203)
  source 1..30: mol_type = other RNA
gtgctggaccagggcaagatcaccgagtac

SEQ ID NO: 33554 - RNA, 27 nt, synthetic construct
  misc_feature 1..27: note = Kinesin-like protein KIF18B (102-110)
  source 1..27: mol_type = other RNA
gtgctggacagcttcctccagggctac

SEQ ID NO: 33555 - RNA, 27 nt, synthetic construct
  misc_feature 1..27: note = Ubiquitin-conjugating enzyme E2 Z (270-278)
  source 1..27: mol_type = other RNA
gtgatggagaagagcttcctggagtac

SEQ ID NO: 33556 - RNA, 27 nt, synthetic construct
  misc_feature 1..27: note = Elongator complex protein 1 (872-880)
  source 1..27: mol_type = other RNA
gtgagcgccgaggaggccctgaagtac

SEQ ID NO: 33557 - RNA, 36 nt, synthetic construct
  misc_feature 1..36: note = DNA repair protein XRCC4 (166-177)
  source 1..36: mol_type = other RNA
gtgagcgccaaggaggccctggagaccgacctctac

SEQ ID NO: 33558 - RNA, 27 nt, synthetic construct
  misc_feature 1..27: note = FERM domain-containing protein 4A (924-932)
  source 1..27: mol_type = other RNA
gtgagcgacgagctgcgccagtggtac

SEQ ID NO: 33559 - RNA, 30 nt, synthetic construct
  misc_feature 1..30: note = Constitutive coactivator of peroxisome proliferator-activated receptor gamma (279-288)
  source 1..30: mol_type = other RNA
gtgagcgaccacatctccaaggtcctgtac

SEQ ID NO: 33560 - RNA, 36 nt, synthetic construct
  misc_feature 1..36: note = Importin-5 (842-853)
  source 1..36: mol_type = other RNA
gtgagcgacatcctgcactccatcttcagctcctac

SEQ ID NO: 33561 - RNA, 36 nt, synthetic construct
  misc_feature 1..36: note = Splicing factor 1 (136-147)
  source 1..36: mol_type = other RNA
gtgagcgacaaggtcatgatcccccaggacgagtac

SEQ ID NO: 33562 - RNA, 27 nt, synthetic construct
  misc_feature 1..27: note = Phosphatidylinositol 4-phosphate 3-kinase C2 domain-containing subunit beta (917-925)
  source 1..27: mol_type = other RNA
gtgagcgacctgcgcgtcacccactac

SEQ ID NO: 33563 - RNA, 30 nt, synthetic construct
  misc_feature 1..30: note = Acetyl-coenzyme A transporter 1 (439-448)
  source 1..30: mol_type = other RNA
gtgagcgaccccctgatcggcgggacctac

SEQ ID NO: 33564 - RNA, 39 nt, synthetic construct
  misc_feature 1..39: note = Zinc finger protein 275 (31-43)
  source 1..39: mol_type = other RNA
gtgagcgacccctccccgaacaccgaccccgccaagtac

SEQ ID NO: 33565 - RNA, 36 nt, synthetic construct
  misc_feature 1..36: note = Tripeptidyl-peptidase 1 (68-79)
  source 1..36: mol_type = other RNA
gtgagcgacccctccagcccgcagtacggcaagtac

SEQ ID NO: 33566 - RNA, 39 nt, synthetic construct
  misc_feature 1..39: note = Tripeptidyl-peptidase 1 (68-80)
  source 1..39: mol_type = other RNA
gtgagcgacccctccagcccgcagtacggcaagtacctg

SEQ ID NO: 33567 - RNA, 33 nt, synthetic construct
  misc_feature 1..33: note = Cleavage and polyadenylation specificity factor subunit 1 (1271-1281)
  source 1..33: mol_type = other RNA
gtgagcgaccgcgaccggaacctgatggtctac

SEQ ID NO: 33568 - RNA, 36 nt, synthetic construct
  misc_feature 1..36: note = TELO2-interacting protein 1 homolog (40-51)
  source 1..36: mol_type = other RNA
gtgagcgactccgccctgcaggagctccagcagtac

SEQ ID NO: 33569 - RNA, 30 nt, synthetic construct
  misc_feature 1..30: note = E3 ubiquitin-protein ligase HACE1 (749-758)
  source 1..30: mol_type = other RNA
gtgagcgactggatcaagaacaccgagtac

SEQ ID NO: 33570 - RNA, 27 nt, synthetic construct
  misc_feature 1..27: note = AT-rich interactive domain-containing protein 2 (138-146)
  source 1..27: mol_type = other RNA
gtgagcgactacctgcgccagtcctac

SEQ ID NO: 33571 - RNA, 33 nt, synthetic construct
  misc_feature 1..33: note Dolichyl-diphosphooligosaccharide-proteinosyltransferase subunit 2 (116-126)
  source 1..33: mol_type = other RNA
gtgagcgaggactccagcgtcacccagatctac

SEQ ID NO: 33572 - RNA, 33 nt, synthetic construct
  misc_feature 1..33: note = Histone H2B type 1-A (113-123)
  source 1..33: mol_type = other RNA
gtgagcgagggcaccaaggccgtcaccaagtac

SEQ ID NO: 33573 - RNA, 36 nt, synthetic construct
  misc_feature 1..36: note = Tetraspanin-33 (126-137)
  source 1..36: mol_type = other RNA
gtgagcgagatcatcaacaacgccatcgtccactac

SEQ ID NO: 33574 - RNA, 27 nt, synthetic construct
  misc_feature 1..27: note = Peroxisome assembly factor 2 (962-970)
  source 1..27: mol_type = other RNA
gtgagcgagcaggagctgctccgctac

SEQ ID NO: 33575 - RNA, 30 nt, synthetic construct
  misc_feature 1..30: note = TraB domain-containing protein (260-269)
  source 1..30: mol_type = other RNA
gtgagcgagcgcgacgtctacctgacctac

SEQ ID NO: 33576 - RNA, 39 nt, synthetic construct
  misc_feature 1..39: note = Paired amphipathic helix protein Sin3a (44-56)
  source 1..39: mol_type = other RNA
gtgagcgagaccatgcagtccgccaccggcatccagtac

SEQ ID NO: 33577 - RNA, 45 nt, synthetic construct
  misc_feature 1..45: note = Nuclear pore complex protein Nup160 (1171-1185)
  source 1..45: mol_type = other RNA
gtgagcgagtacgtcgacgccgtgctgggcaaggggcaccagtac

SEQ ID NO: 33578 - RNA, 36 nt, synthetic construct
  misc_feature 1..36: note = Oral-facial-digital syndrome 1 protein (787-798)
  source 1..36: mol_type = other RNA
gtgagctcccccccggagcagaaggtcggcctgtac

SEQ ID NO: 33579 - RNA, 33 nt, synthetic construct
  misc_feature 1..33: note = Zinc finger protein 106 (703-713)
  source 1..33: mol_type = other RNA
gtgagctccaccagcgagatcggcacccgctac

SEQ ID NO: 33580 - RNA, 39 nt, synthetic construct
  misc_feature 1..39: note = Nuclear factor of activated T-cells, cytoplasmic 1 (282-294)
  source 1..39: mol_type = other RNA
gtgaccgacgacagctggctgggcaacaccacgcagtac

SEQ ID NO: 33581 - RNA, 36 nt, synthetic construct
  misc_feature 1..36: note = Mediator of RNA polymerase II transcription subunit 27 (204-215)
  source 1..36: mol_type = other RNA
gtgaccgaccacgccaccacggccctgctccactac

SEQ ID NO: 33582 - RNA, 30 nt, synthetic construct
  misc_feature 1..30: note = DnaJ homolog subfamily B member 12 (287-296)
  source 1..30: mol_type = other RNA
gtgaccgaccacctgggcgtcgtgtactac

SEQ ID NO: 33583 - RNA, 33 nt, synthetic construct
  misc_feature 1..33: note = Telomerase protein component 1 (1368-1378)
  source 1..33: mol_type = other RNA
gtgaccgaccacctgcgcctcttcaccctgtac

SEQ ID NO: 33584 - RNA, 36 nt, synthetic construct
  misc_feature 1..36: note = TBC1 domain family member 8 (757-768)
  source 1..36: mol_type = other RNA
gtgaccgacatcagcgacctgatccgcgactcctac

SEQ ID NO: 33585 - RNA, 30 nt, synthetic construct
  misc_feature 1..30: note = Protein MEF2BNB (13-22)
  source 1..30: mol_type = other RNA
gtgaccgacaagttcaccgagagcgtctac

SEQ ID NO: 33586 - RNA, 36 nt, synthetic construct
  misc_feature 1..36: note = Complex I assembly factor TMEM126B, mitochondrial (46-57)
  source 1..36: mol_type = other RNA
gtgaccgacaagctgttcgtcatcgacgccctctac

SEQ ID NO: 33587 - RNA, 39 nt, synthetic construct
  misc_feature 1..39: note = Histone acetyltransferase type B catalytic subunit (339-351)
  source 1..39: mol_type = other RNA
gtgaccgacatgagcgacgccgagcagtaccgctcctac

SEQ ID NO: 33588 - RNA, 36 nt, synthetic construct
  misc_feature 1..36: note = Afadin (762-773)
  source 1..36: mol_type = other RNA
gtgaccgaccccgacagcggcctgtgctcccactac

SEQ ID NO: 33589 - RNA, 30 nt, synthetic construct
  misc_feature 1..30: note = Cation-independent mannose-6-phosphate receptor (769-778)
  source 1..30: mol_type = other RNA
gtgaccgaccccagcaccctggagcagtac

SEQ ID NO: 33590 - RNA, 30 nt, synthetic construct
  misc_feature 1..30: note = DNA polymerase delta subunit 3 (14-23)
  source 1..30: mol_type = other RNA
gtgaccgaccagaacaagatcgtcacctac

SEQ ID NO: 33591 - RNA, 33 nt, synthetic construct
  misc_feature 1..33: note = Gamma-secretase subunit APH-1A (59-69)
  source 1..33: mol_type = other RNA
gtgaccgaccgcagcgacgcccggctgcagtac

SEQ ID NO: 33592 - RNA, 30 nt, synthetic construct
  misc_feature 1..30: note = DNA topoisomerase 2-alpha (1118-1127)
  source 1..30: mol_type = other RNA
gtgaccgacagcggccccaccttcaactac

SEQ ID NO: 33593 - RNA, 30 nt, synthetic construct
  misc_feature 1..30: note = Bcl-2-modifying factor (88-97)
  source 1..30: mol_type = other RNA
gtgaccgaggagccccagcgcctgttctac

SEQ ID NO: 33594 - RNA, 33 nt, synthetic construct
  misc_feature 1..33: note = Protein SET (135-145)
  source 1..33: mol_type = other RNA
gtgaccgagttcgaggacatcaagagcggctac

SEQ ID NO: 33595 - RNA, 27 nt, synthetic construct
  misc_feature 1..27: note = Epididymis-specific alpha-mannosidase (660-668)
  source 1..27: mol_type = other RNA
gtgaccgagatccgccagtacttctac

SEQ ID NO: 33596 - RNA, 33 nt, synthetic construct
  misc_feature 1..33: note = Ras association domain-containing protein 3 (64-74)
  source 1..33: mol_type = other RNA
gtgaccgagagccccgccaagttcgccctgtac

SEQ ID NO: 33597 - RNA, 30 nt, synthetic construct
  misc_feature 1..30: note = WD repeat-containing protein 63 (174-183)
  source 1..30: mol_type = other RNA
gtgaccgagagcaccaagcagatcacgtac

SEQ ID NO: 33598 - RNA, 27 nt, synthetic construct
  misc_feature 1..27: note = Uncharacterized protein C15orf61 (132-140)
  source 1..27: mol_type = other RNA
gtgaccgagaccgtccacacgagctac

SEQ ID NO: 33599 - RNA, 36 nt, synthetic construct
  misc_feature 1..36: note = Nesprin-2 (266-277)
  source 1..36: mol_type = other RNA
gtggtcgaccccgacgagaagagcatcatgacctac

SEQ ID NO: 33600 - RNA, 36 nt, synthetic construct
  misc_feature 1..36: note = Spindlin-1 (194-205)
  source 1..36: mol_type = other RNA
gtggtcgacagcctggtgggcaagcaggtggagtac

SEQ ID NO: 33601 - RNA, 39 nt, synthetic construct
  misc_feature 1..39: note = Protein transport protein Sec61 subunit alpha isoform 1 (324-336)
  source 1..39: mol_type = other RNA
tggagcgacacctccagcggcgggcccgcccgcgcctac

SEQ ID NO: 33602 - RNA, 30 nt, synthetic construct
  misc_feature 1..30: note = Cholinesterase (404-413)
  source 1..30: mol_type = other RNA
tgggtggacgaccagcgccccgagaactac

SEQ ID NO: 33603 - RNA, 39 nt, synthetic construct
  misc_feature 1..39: note = Acetyl-CoA carboxylase 1 (1775-1787)
  source 1..39: mol_type = other RNA
tgggtggaccccgaggacccgtacaagggctaccgctac

SEQ ID NO: 33604 - RNA, 30 nt, synthetic construct
  misc_feature 1..30: note = Proteasome subunit beta type-4 (129-138)
  source 1..30: mol_type = other RNA
tacgccgacggcgagagcttcctggggtac

SEQ ID NO: 33605 - RNA, 30 nt, synthetic construct
  misc_feature 1..30: note = DNA polymerase epsilon catalytic subunit A (1792-1801)
  source 1..30: mol_type = other RNA
tacgccgacaaccaggtgatgcacttctac

SEQ ID NO: 33606 - RNA, 33 nt, synthetic construct
  misc_feature 1..33: note = Sorting nexin-4 (300-310)
  source 1..33: mol_type = other RNA
tacgccgaccagctgaaggagtacctcttctac

SEQ ID NO: 33607 - RNA, 33 nt, synthetic construct
  misc_feature 1..33: note = Cleavage stimulation factor subunit 3 (337-347)
  source 1..33: mol_type = other RNA
tacgccgactacgaggagagccgcatgaagtac

SEQ ID NO: 33608 - RNA, 27 nt, synthetic construct
  misc_feature 1..27: note = Transmembrane protein 87A (216-224)
  source 1..27: mol_type = other RNA
tacgccgagttccagaacatccgctac

SEQ ID NO: 33609 - RNA, 27 nt, synthetic construct
  misc_feature 1..27: note = Transcription elongation factor SPT6 (993-1001)
  source 1..27: mol_type = other RNA
tacggcgacaagcacatcaccctgtac

SEQ ID NO: 33610 - RNA, 33 nt, synthetic construct
  misc_feature 1..33: note = Lysyl oxidase homolog 3 (543-553)
  source 1..33: mol_type = other RNA
tacatcgaggaccgccccctgcacatgctctac

SEQ ID NO: 33611 - RNA, 36 nt, synthetic construct
  misc_feature 1..36: note = High mobility group protein 20A (39-50)
  source 1..36: mol_type = other RNA
tacctggacgaggccgaccgcgacaaggagcggtac

SEQ ID NO: 33612 - RNA, 36 nt, synthetic construct
  misc_feature 1..36: note = SWI/SNF-related matrix-associated actin-dependent regulator of chromatin subfamily E member 1-related (119-130)
  source 1..36: mol_type = other RNA
tacctggacgaggccgagcgcgagaagcagcagtac

SEQ ID NO: 33613 - RNA, 27 nt, synthetic construct
  misc_feature 1..27: note = Prostamide/prostaglandin F synthase (122-130)
  source 1..27: mol_type = other RNA
tacctggacgagagcaagcagctctac

SEQ ID NO: 33614 - RNA, 27 nt, synthetic construct
  misc_feature 1..27: note = putative RHO/RAC effector protein (1124-1132)
  source 1..27: mol_type = other RNA
tacctggacatccccaacccgcgctac

SEQ ID NO: 33615 - RNA, 24 nt, synthetic construct
  misc_feature 1..24: note = Proteasome activator complex subunit 3 (188-195)
  source 1..24: mol_type = other RNA
tacctggaccagatcagccgctac

SEQ ID NO: 33616 - RNA, 36 nt, synthetic construct
  misc_feature 1..36: note = E3 ubiquitin-protein ligase TRIM4 (423-434)
  source 1..36: mol_type = other RNA
tacctggaccgcggcaccgggaacgtgagcttctac

SEQ ID NO: 33617 - RNA, 33 nt, synthetic construct
  misc_feature 1..33: note = U3 small nucleolar RNA-associated protein 6 homolog (480-490)
  source 1..33: mol_type = other RNA
tacctggactgggcctaccgcagcggcgggtac

SEQ ID NO: 33618 - RNA, 33 nt, synthetic construct
  misc_feature 1..33: note = E3 ubiquitin-protein ligase UBR2 (1583-1593)
  source 1..33: mol_type = other RNA
tacctggagggcgagcgcgacgccatccggtac

SEQ ID NO: 33619 - RNA, 36 nt, synthetic construct
  misc_feature 1..36: note = MAGUK p55 subfamily member 2 (440-451)
  source 1..36: mol_type = other RNA
tacctggagcacggcgagtacgaggggaacctctac

SEQ ID NO: 33620 - RNA, 39 nt, synthetic construct
  misc_feature 1..39: note = DNA-directed RNA polymerase II subunit RPB1 (657-669)
  source 1..39: mol_type = other RNA
tacctggagatgggccacgacatcacccgcctcttctac

SEQ ID NO: 33621 - RNA, 36 nt, synthetic construct
  misc_feature 1..36: note = KIF1-binding protein (161-172)
  source 1..36: mol_type = other RNA
tacctggagagctccgaggccctctacaaccagtac

SEQ ID NO: 33622 - RNA, 30 nt, synthetic construct
  misc_feature 1..30: note = Immediate early response gene 5-like protein (47-56)
  source 1..30: mol_type = other RNA
tacctgagcgagcgctacgccgagctctac

SEQ ID NO: 33623 - RNA, 27 nt, synthetic construct
  misc_feature 1..27: note = Cullin-1 (42-50)
  source 1..27: mol_type = other RNA
tacatggagctgtacacccacgtgtac

SEQ ID NO: 33624 - RNA, 27 nt, synthetic construct
  misc_feature 1..27: note = Far upstream element-binding protein 1 (632-640)
  source 1..27: mol_type = other RNA
tacagcgccgcctgggcggagtactac

SEQ ID NO: 33625 - RNA, 39 nt, synthetic construct
  misc_feature 1..39: note = Nuclear factor erythroid 2-related factor 1 (12-24)
  source 1..39: mol_type = other RNA
tacagcgcccccccgggcgaccccctgtccaccaactac

SEQ ID NO: 33626 - RNA, 39 nt, synthetic construct
  misc_feature 1..39: note = Cohesin subunit SA-2 (319-331)
  source 1..39: mol_type = other RNA
tacagcgacgccttcctgaacgactcctacctcaagtac

SEQ ID NO: 33627 - RNA, 30 nt, synthetic construct
  misc_feature 1..30: note = Dimethylaniline monooxygenase (N-oxide-forming) 4 (69-78)
  source 1..30: mol_type = other RNA
tacagcgacttccccttccacgaggactac

SEQ ID NO: 33628 - RNA, 36 nt, synthetic construct
  misc_feature 1..36: note = Dihydropyrimidine dehydrogenase (NADP(+)) (211-222)
  source 1..36: mol_type = other RNA
tacagcgacatcaccatcttcgagaagcaggagtac

SEQ ID NO: 33629 - RNA, 36 nt, synthetic construct
  misc_feature 1..36: note = Cyclin-dependent kinases regulatory subunit 2 (8-19)
  source 1..36: mol_type = other RNA
tacagcgacaagtacttcgacgagcactacgagtac

SEQ ID NO: 33630 - RNA, 33 nt, synthetic construct
  misc_feature 1..33: note = Spermatogenesis-associated protein 20 (357-367)
  source 1..33: mol_type = other RNA
tacagcgacgtggccaagggcatcctgcagtac

SEQ ID NO: 33631 - RNA, 33 nt, synthetic construct
  misc_feature 1..33: note = F-box only protein 3 (79-89)
  source 1..33: mol_type = other RNA
tacagcgacgtgggccgctacatcgaccactac

SEQ ID NO: 33632 - RNA, 27 nt, synthetic construct
  misc_feature 1..27: note = AN1-type zinc finger protein 6 (175-183)
  source 1..27: mol_type = other RNA
tacagcgacgtgcacaactgctcctac

SEQ ID NO: 33633 - RNA, 36 nt, synthetic construct
  misc_feature 1..36: note = YTH domain-containing family protein 1 (300-311)
  source 1..36: mol_type = other RNA
tacagcgaggacgacatccaccgctccatcaagtac

SEQ ID NO: 33634 - RNA, 30 nt, synthetic construct
  misc_feature 1..30: note = Intraflagellar transport protein 122 homolog (415-424)
  source 1..30: mol_type = other RNA
tacagcgaggacctgtccgacatgcactac

SEQ ID NO: 33635 - RNA, 33 nt, synthetic construct
  misc_feature 1..33: note = SUN domain-containing protein 2 (38-48)
  source 1..33: mol_type = other RNA
tacagcgaggaccgcatcggcctggccgactac

SEQ ID NO: 33636 - RNA, 33 nt, synthetic construct
  misc_feature 1..33: note = MICOS complex subunit MIC60 (615-625)
  source 1..33: mol_type = other RNA
tacagcgaggagaccctgcgcgcccggttctac

SEQ ID NO: 33637 - RNA, 39 nt, synthetic construct
  misc_feature 1..39: note = 45 kDa calcium-binding protein (340-352)
  source 1..39: mol_type = other RNA
tacagcgagttcttcaccggctccaagctggtggactac

SEQ ID NO: 33638 - RNA, 30 nt, synthetic construct
  misc_feature 1..30: note = Protein artemis (322-331)
  source 1..30: mol_type = other RNA
tacagcgagatcaaggacttcctgtcctac

SEQ ID NO: 33639 - RNA, 30 nt, synthetic construct
  misc_feature 1..30: note = Integrator complex subunit 6 (86-95)
  source 1..30: mol_type = other RNA
tacagcgagctgggccaccccttcgggtac

SEQ ID NO: 33640 - RNA, 33 nt, synthetic construct
  misc_feature 1..33: note = Plectin (1309-1319)
  source 1..33: mol_type = other RNA
tacagcgagctgaccaccctcacgtcccagtac

SEQ ID NO: 33641 - RNA, 30 nt, synthetic construct
  misc_feature 1..30: note = Vacuolar protein sorting-associated protein 13C (3362-3371)
  source 1..30: mol_type = other RNA
tacagcgagcagttcctgaagcagatgtac

SEQ ID NO: 33642 - RNA, 27 nt, synthetic construct
  misc_feature 1..27: note = Protein Lines homolog 1 (181-189)
  source 1..27: mol_type = other RNA
tacagcgagtccaacaaggccatctac

SEQ ID NO: 33643 - RNA, 36 nt, synthetic construct
  misc_feature 1..36: note = Proline-rich protein 7 (145-156)
  source 1..36: mol_type = other RNA
tacagcgaggtgctgaccgacacccgcggcctctac

SEQ ID NO: 33644 - RNA, 30 nt, synthetic construct
  misc_feature 1..30: note = Zinc finger MIZ domain-containing protein 2 (269-278)
  source 1..30: mol_type = other RNA
tacagcgaggtgtaccccggccagcagtac

SEQ ID NO: 33645 - RNA, 36 nt, synthetic construct
  misc_feature 1..36: note = Annexin A4 (298-309)
  source 1..36: mol_type = other RNA
tacagcttcatcaagggcgacacctccggggactac

SEQ ID NO: 33646 - RNA, 30 nt, synthetic construct
  misc_feature 1..30: note = Nucleoporin NUP188 homolog (239-248)
  source 1..30: mol_type = other RNA
tacagcttcctggacaagatgtccttctac

SEQ ID NO: 33647 - RNA, 27 nt, synthetic construct
  misc_feature 1..27: note = RNA-binding protein 5 (374-382)
  source 1..27: mol_type = other RNA
tacagccaggactaccagcagttctac

SEQ ID NO: 33648 - RNA, 36 nt, synthetic construct
  misc_feature 1..36: note = Serine/arginine-rich splicing factor 10 (105-116)
  source 1..36: mol_type = other RNA
tacagctccagccgctacgacgactacgaccggtac

SEQ ID NO: 33649 - RNA, 27 nt, synthetic construct
  misc_feature 1..27: note = Interferon-induced helicase C domain-containing protein 1 (5-13)
  source 1..27: mol_type = other RNA
tacagcaccgacgagaacttccgctac

SEQ ID NO: 33650 - RNA, 27 nt, synthetic construct
  misc_feature 1..27: note = Filamin-A (1685-1693)
  source 1..27: mol_type = other RNA
tacaccgccccccagccgggcaagtac

SEQ ID NO: 33651 - RNA, 36 nt, synthetic construct
  misc_feature 1..36: note = DAZ-associated protein 2 (35-46)
  source 1..36: mol_type = other RNA
tacaccgacgcccccccggcctacagcgagctgtac

SEQ ID NO: 33652 - RNA, 24 nt, synthetic construct
  misc_feature 1..24: note = Tetraspanin-4 (107-114)
  source 1..24: mol_type = other RNA
tacaccgacaagatcgaccgctac

SEQ ID NO: 33653 - RNA, 30 nt, synthetic construct
  misc_feature 1..30: note = Serine/threonine-protein phosphatase PP1-beta catalytic subunit (68-77)
  source 1..30: mol_type = other RNA
tacaccgacctgctccgcctgttcgagtac

SEQ ID NO: 33654 - RNA, 36 nt, synthetic construct
  misc_feature 1..36: note = E3 ubiquitin-protein ligase HUWE1 (157-168)
  source 1..36: mol_type = other RNA
tacaccgacatggagagcgaggactaccacttctac

SEQ ID NO: 33655 - RNA, 33 nt, synthetic construct
  misc_feature 1..33: note = Chromodomain-helicase-DNA-binding protein 8 (513-523)
  source 1..33: mol_type = other RNA
tacaccgaggccgaggagttcttcgtgaagtac

SEQ ID NO: 33656 - RNA, 30 nt, synthetic construct
  misc_feature 1..30: note = Protein transport protein Sec61 subunit beta (59-68)
  source 1..30: mol_type = other RNA
tacaccgaggacagccccggcctgaaggtg

SEQ ID NO: 33657 - RNA, 39 nt, synthetic construct
  misc_feature 1..39: note = DNA-directed RNA polymerases I, II, and III subunit RPABC5 (29-41)
  source 1..39: mol_type = other RNA
tacaccgagggcgacgccctggacgccctcgggctgaag

SEQ ID NO: 33658 - RNA, 45 nt, synthetic construct
  misc_feature 1..45: note = DNA-directed RNA polymerases I, II, and III subunit RPABC5 (29-43)
  source 1..45: mol_type = other RNA
tacaccgagggcgacgccctggacgccctcgggctgaagcgctac

SEQ ID NO: 33659 - RNA, 33 nt, synthetic construct
  misc_feature 1..33: note = Ribosomal RNA small subunit methyltransferase NEP1 (207-217)
  source 1..33: mol_type = other RNA
tacaccgagaagatggtgagcatctccaactac

SEQ ID NO: 33660 - RNA, 30 nt, synthetic construct
  misc_feature 1..30: note = Presenilin-2 (112-121)
  source 1..30: mol_type = other RNA
tacaccgagaagaacggccagctgatctac

SEQ ID NO: 33661 - RNA, 33 nt, synthetic construct
  misc_feature 1..33: note = Exocyst complex component 4 (66-76)
  source 1..33: mol_type = other RNA
tacaccgagctgaccacggccatccgcacctac

SEQ ID NO: 33662 - RNA, 30 nt, synthetic construct
  misc_feature 1..30: note = Prolyl 3-hydroxylase 2 (212-221)
  source 1..30: mol_type = other RNA
tacaccgagcccaactactggatccgctac

SEQ ID NO: 33663 - RNA, 33 nt, synthetic construct
  misc_feature 1..33: note = Mitogen-activated protein kinase kinase kinase 1 (1349-1359)
  source 1..33: mol_type = other RNA
tacaccgagcagctgctccgcggcctgagctac

SEQ ID NO: 33664 - RNA, 36 nt, synthetic construct
  misc_feature 1..36: note = Coiled-coil domain-containing protein 121 (212-223)
  source 1..36: mol_type = other RNA
tacaccgagcagcccgagaaggtgtggaacagctac

SEQ ID NO: 33665 - RNA, 30 nt, synthetic construct
  misc_feature 1..30: note = Gamma-secretase subunit PEN-2 (47-56)
  source 1..30: mol_type = other RNA
tacaccgagcagagccagatcaagggctac

SEQ ID NO: 33666 - RNA, 27 nt, synthetic construct
  misc_feature 1..27: note = Vacuolar protein sorting-associated protein 18 homolog (381-389)
  source 1..27: mol_type = other RNA
tacaccgagcgcgccgtgttccggtac

SEQ ID NO: 33667 - RNA, 36 nt, synthetic construct
  misc_feature 1..36: note = Osteoclast-stimulating factor 1 (21-32)
  source 1..36: mol_type = other RNA
tacaccttcgagccccgcaccccggacgagctgtac

SEQ ID NO: 33668 - RNA, 30 nt, synthetic construct
  misc_feature 1..30: note = Cleavage and polyadenylation specificity factor subunit 5 (45-54)
  source 1..30: mol_type = other RNA
tacaccttcggcaccaaggagcccctgtac

SEQ ID NO: 33669 - RNA, 27 nt, synthetic construct
  misc_feature 1..27: note = Coatomer subunit alpha (543-551)
  source 1..27: mol_type = other RNA
tacaccaccagcaaccacatcaagtac

SEQ ID NO: 33670 - RNA, 33 nt, synthetic construct
  misc_feature 1..33: note = Nodal modulator 2 (270-280)
  source 1..33: mol_type = other RNA
tacaccgtgagccgcgaggacggctccttcagc

SEQ ID NO: 33671 - RNA, 39 nt, synthetic construct
  misc_feature 1..39: note = Nodal modulator 2 (270-282)
  source 1..39: mol_type = other RNA
tacaccgtgagccgcgaggacggctccttcagcttctac

SEQ ID NO: 33672 - RNA, 36 nt, synthetic construct
  misc_feature 1..36: note = Nuclear pore complex protein Nup160 (1174-1185)
  source 1..36: mol_type = other RNA
tacgtggacgccgtcctgggcaaggggcaccagtac

SEQ ID NO: 33673 - RNA, 30 nt, synthetic construct
  misc_feature 1..30: note = General transcription factor 3C polypeptide 1 (627-636)
  source 1..30: mol_type = other RNA
tacgtggacgacgccagctggatgcgctac

SEQ ID NO: 33674 - RNA, 27 nt, synthetic construct
  misc_feature 1..27: note = 39S ribosomal protein L35, mitochondrial (172-180)
  source 1..27: mol_type = other RNA
tacgtggacgacccctaccagaagtac

SEQ ID NO: 33675 - RNA, 30 nt, synthetic construct
  misc_feature 1..30: note = UDP-N-acetylhexosamine pyrophosphorylase-like protein 1 (277-286)
  source 1..30: mol_type = other RNA
tacgtggacgaggagggcaacctggtcaag

SEQ ID NO: 33676 - RNA, 36 nt, synthetic construct
  misc_feature 1..36: note = RNA-binding protein 39 (436-447)
  source 1..36: mol_type = other RNA
tacgtggacaagaacagcgcccagggcaacgtctac

SEQ ID NO: 33677 - RNA, 27 nt, synthetic construct
  misc_feature 1..27: note = Thioredoxin-like protein AAED1 (118-126)
  source 1..27: mol_type = other RNA
tacgtggaccccgagcgcgagatctac

SEQ ID NO: 33678 - RNA, 33 nt, synthetic construct
  misc_feature 1..33: note = Transmembrane emp24 domain-containing protein 3 (68-78)
  source 1..33: mol_type = other RNA
tacgtggaggacccccagggcaacaccatctac

SEQ ID NO: 33679 - RNA, 27 nt, synthetic construct
  misc_feature 1..27: note = Vacuole membrane protein 1 (94-102)
  source 1..27: mol_type = other RNA
tacgtggagggcgtccaccagcagtac

SEQ ID NO: 33680 - RNA, 33 nt, synthetic construct
  misc_feature 1..33: note = Eukaryotic translation initiation factor 3 subunit K (32-42)
  source 1..33: mol_type = other RNA
tacgtggagacccaggccaaggagaacgcctac

SEQ ID NO: 33681 - RNA, 30 nt, synthetic construct
  misc_feature 1..30: note = Serine/threonine-protein kinase mTOR (89-98)
  source 1..30: mol_type = other RNA
gccatcgccagcctgatcggcgtggagggg

SEQ ID NO: 33682 - RNA, 27 nt, synthetic construct
  misc_feature 1..27: note = Eukaryotic translation initiation factor 4 gamma 1 (1248-1256)
  source 1..27: mol_type = other RNA
gccatcatcgaggagtacctgcacctc

SEQ ID NO: 33683 - RNA, 27 nt, synthetic construct
  misc_feature 1..27: note = Protein timeless homolog (848-856)
  source 1..27: mol_type = other RNA
gccatcctggcccacctcaacaccgtg

SEQ ID NO: 33684 - RNA, 27 nt, synthetic construct
  misc_feature 1..27: note = Zinc finger and BTB domain-containing protein 6 (396-404)
  source 1..27: mol_type = other RNA
gccctgaagaagcacctcaccagcgtg

SEQ ID NO: 33685 - RNA, 27 nt, synthetic construct
  misc_feature 1..27: note = Small subunit processome component 20 homolog (626-634)
  source 1..27: mol_type = other RNA
gccctgatggagctcttccccaagctg

SEQ ID NO: 33686 - RNA, 27 nt, synthetic construct
  misc_feature 1..27: note = Ribosome-binding protein 1 (124-132)
  source 1..27: mol_type = other RNA
gccctgcagaagcgcctcgacgaggtg

SEQ ID NO: 33687 - RNA, 30 nt, synthetic construct
  misc_feature 1..30: note = Cytochrome c oxidase subunit 7A2, mitochondrial (74-83)
  source 1..30: mol_type = other RNA
gccgtggccagcttccccaagaagcaggag

SEQ ID NO: 33688 - RNA, 27 nt, synthetic construct
  misc_feature 1..27: note = DNA-dependent protein kinase catalytic subunit (145-153)
  source 1..27: mol_type = other RNA
gacgagttcaagatcggcgagctgttc

SEQ ID NO: 33689 - RNA, 27 nt, synthetic construct
  misc_feature 1..27: note = Exosome component 10 (58-66)
  source 1..27: mol_type = other RNA
gacgagtacgacttctaccgcagcttc

SEQ ID NO: 33690 - RNA, 42 nt, synthetic construct
  misc_feature 1..42: note = Peptidyl-prolyl cis-trans isomerase A (9-22)
  source 1..42: mol_type = other RNA
gacatcgccgtggacggcgagcccctggggcgcgtcagcttc

SEQ ID NO: 33691 - RNA, 63 nt, synthetic construct
  misc_feature 1..63: note = Endoplasmin (783-803)
  source 1..63: mol_type = other RNA
gacgtgggcaccgacgaggaggaggagaccgccaaggagagcacggccgagaaggacgagctg

SEQ ID NO: 33692 - RNA, 27 nt, synthetic construct
  misc_feature 1..27: note = Zinc finger protein 638 (1756-1764)
  source 1..27: mol_type = other RNA
gaggaggacgaggacagcctggccgac

SEQ ID NO: 33693 - RNA, 27 nt, synthetic construct
  misc_feature 1..27: note = Inner centromere protein (48-56)
  source 1..27: mol_type = other RNA
gagttcagcaaggagcccgagctgatg

SEQ ID NO: 33694 - RNA, 27 nt, synthetic construct
  misc_feature 1..27: note = ATP-binding cassette sub-family A member 3 (1686-1694)
  source 1..27: mol_type = other RNA
gagcaggtgttcctgagcttcgcccac

SEQ ID NO: 33695 - RNA, 30 nt, synthetic construct
  misc_feature 1..30: note = Vinculin (10-19)
  source 1..30: mol_type = other RNA
gagagcatcctggagcccgtggcccagcag

SEQ ID NO: 33696 - RNA, 27 nt, synthetic construct
  misc_feature 1..27: note = Microtubule-associated protein 1A (806-814)
  source 1..27: mol_type = other RNA
gagaccgagctgacctaccccacgaac

SEQ ID NO: 33697 - RNA, 30 nt, synthetic construct
  misc_feature 1..30: note = C-Jun-amino-terminal kinase-interacting protein 2 (683-692)
  source 1..30: mol_type = other RNA
ttcgacgtgcagttcctgggcagcgtcgag

SEQ ID NO: 33698 - RNA, 57 nt, synthetic construct
  misc_feature 1..57: note = Cytochrome c oxidase subunit 7C, mitochondrial (45-63)
  source 1..57: mol_type = other RNA
ttcggcagcgccttcgccacccccttcctggtggtccgccaccagctcctgaagacc

SEQ ID NO: 33699 - RNA, 75 nt, synthetic construct
  misc_feature 1..75: note = Peptidyl-prolyl cis-trans isomerase A (88-112)
  source 1..75: mol_type = other RNA
ttcatcctgaagcacaccggccccgggatcctcagcatggccaacgccggcccgaacaccaacgggtcccagttc

SEQ ID NO: 33700 - RNA, 30 nt, synthetic construct
  misc_feature 1..30: note = Elongation factor 1-alpha 1 (415-424)
  source 1..30: mol_type = other RNA
ttcagcgactaccccccgctgggccgcttc

SEQ ID NO: 33701 - RNA, 42 nt, synthetic construct
  misc_feature 1..42: note = Elongation factor 1-beta (2-15)
  source 1..42: mol_type = other RNA
ggcttcggggacctgaagagccccgccggcctccaggtgctg

SEQ ID NO: 33702 - RNA, 69 nt, synthetic construct
  misc_feature 1..69: note = Elongation factor 1-beta (2-24)
  source 1..69: mol_type = other RNA
ggcttcggggacctgaagagccccgccggcctccaggtgctgaacgactacctggccgacaagtcctac

SEQ ID NO: 33703 - RNA, 30 nt, synthetic construct
  misc_feature 1..30: note = Plakophilin-2 (581-590)
  source 1..30: mol_type = other RNA
ggcctgatcgacagcctcgtgcactacgtc

SEQ ID NO: 33704 - RNA, 45 nt, synthetic construct
  misc_feature 1..45: note = Peptidyl-prolyl cis-trans isomerase A (10-24)
  source 1..45: mol_type = other RNA
atcgccgtggacggcgagcccctggggcgcgtcagcttcgagctc

SEQ ID NO: 33705 - RNA, 27 nt, synthetic construct
  misc_feature 1..27: note = 39S ribosomal protein L34, mitochondrial (58-66)
  source 1..27: mol_type = other RNA
atcaagcgcaagaacaagcacggctgg

SEQ ID NO: 33706 - RNA, 27 nt, synthetic construct
  misc_feature 1..27: note = Centrosome-associated protein 350 (2297-2305)
  source 1..27: mol_type = other RNA
atcctgagcaagaaggacctccccctg

SEQ ID NO: 33707 - RNA, 48 nt, synthetic construct
  misc_feature 1..48: note = Glyceraldehyde-3-phosphate dehydrogenase (269-284)
  source 1..48: mol_type = other RNA
atcagctggtacgacaacgagttcggctactccaaccgcgtggtcgac

SEQ ID NO: 33708 - RNA, 57 nt, synthetic construct
  misc_feature 1..57: note = Macrophage migration inhibitory factor (3-21)
  source 1..57: mol_type = other RNA
atcgtgaacaccaacgtcccccgcgccagcgtgccggacggcttcctgtccgagctc

SEQ ID NO: 33709 - RNA, 27 nt, synthetic construct
  misc_feature 1..27: note = T-complex protein 1 subunit theta (234-242)
  source 1..27: mol_type = other RNA
aagtacaacatcatgctggtgcgcctc

SEQ ID NO: 33710 - RNA, 27 nt, synthetic construct
  misc_feature 1..27: note = Ras-related protein Rab-27A (178-186)
  source 1..27: mol_type = other RNA
ctggacctcatcatgaagcgcatggag

SEQ ID NO: 33711 - RNA, 27 nt, synthetic construct
  misc_feature 1..27: note = Uncharacterized protein C18orf8 (501-509)
  source 1..27: mol_type = other RNA
ctgcacgagctcgtgatcaagaccctg

SEQ ID NO: 33712 - RNA, 27 nt, synthetic construct
  misc_feature 1..27: note = ER membrane protein complex subunit 1 (641-649)
  source 1..27: mol_type = other RNA
ctgctcatcgacgacgagtacaaggtg

SEQ ID NO: 33713 - RNA, 27 nt, synthetic construct
  misc_feature 1..27: note = DNA-dependent protein kinase catalytic subunit (2836-2844)
  source 1..27: mol_type = other RNA
ctgctccaggacttcaaccgcttcctg

SEQ ID NO: 33714 - RNA, 27 nt, synthetic construct
  misc_feature 1..27: note = Acyl-CoA desaturase (132-140)
  source 1..27: mol_type = other RNA
ctgcccctccgcctgttcctgatcatc

SEQ ID NO: 33715 - RNA, 27 nt, synthetic construct
  misc_feature 1..27: note = Serine/threonine-protein kinase tousled-like 1 (49-57)
  source 1..27: mol_type = other RNA
atggacgagctggccagcctcgacccc

SEQ ID NO: 33716 - RNA, 42 nt, synthetic construct
  misc_feature 1..42: note = Protein S100-A4 (59-72)
  source 1..42: mol_type = other RNA
atgagcaacctggactccaaccgcgacaacgaggtggacttc

SEQ ID NO: 33717 - RNA, 27 nt, synthetic construct
  misc_feature 1..27: note = Centriolin (2174-2182)
  source 1..27: mol_type = other RNA
aacctgaaccagttcctccccgagctg

SEQ ID NO: 33718 - RNA, 27 nt, synthetic construct
  misc_feature 1..27: note = Transcriptional repressor CTCF (102-110)
  source 1..27: mol_type = other RNA
aacatggaggagcagcccatcaacatc

SEQ ID NO: 33719 - RNA, 27 nt, synthetic construct
  misc_feature 1..27: note = Golgin subfamily A member 3 (875-883)
  source 1..27: mol_type = other RNA
cgcctggacagcgagctcaaggagctg

SEQ ID NO: 33720 - RNA, 66 nt, synthetic construct
  misc_feature 1..66: note = Cytochrome c oxidase subunit 7C, mitochondrial (17-38)
  source 1..66: mol_type = other RNA
agccactacgaggagggccccgggaagaacctgccgttctccgtggagaacaagtggagcctcctg

SEQ ID NO: 33721 - RNA, 33 nt, synthetic construct
  misc_feature 1..33: note = Midasin (1471-1481)
  source 1..33: mol_type = other RNA
agcctggccgacgactccgtgctcgagcgcctg

SEQ ID NO: 33722 - RNA, 27 nt, synthetic construct
  misc_feature 1..27: note = Cullin-7 (999-1007)
  source 1..27: mol_type = other RNA
agcctgcacaccgagctcaactccgtg

SEQ ID NO: 33723 - RNA, 27 nt, synthetic construct
  misc_feature 1..27: note = Small subunit processome component 20 homolog (299-307)
  source 1..27: mol_type = other RNA
agcctgctcgacctgcacaccaaggtg

SEQ ID NO: 33724 - RNA, 33 nt, synthetic construct
  misc_feature 1..33: note = Death-inducer obliterator 1 (941-951)
  source 1..33: mol_type = other RNA
agccccctggaggacctctccccgtgccccgcc

SEQ ID NO: 33725 - RNA, 33 nt, synthetic construct
  misc_feature 1..33: note = Glycogen debranching enzyme (980-990)
  source 1..33: mol_type = other RNA
accatcgccgaggtgggcaagtggctgcaggcc

SEQ ID NO: 33726 - RNA, 27 nt, synthetic construct
  misc_feature 1..27: note = Inositol 1,4,5-trisphosphate receptor type 3 (2354-2362)
  source 1..27: mol_type = other RNA
accctgttcaacgtgatcaagagcgtc

SEQ ID NO: 33727 - RNA, 27 nt, synthetic construct
  misc_feature 1..27: note = Transmembrane protein 181 (304-312)
  source 1..27: mol_type = other RNA
acctacaaccccgccttcagccgcctg

SEQ ID NO: 33728 - RNA, 30 nt, synthetic construct
  misc_feature 1..30: note = A-kinase anchor protein 9 (1398-1407)
  source 1..30: mol_type = other RNA
gtggacagcgtcgtgatcaccgagtccgac

SEQ ID NO: 33729 - RNA, 27 nt, synthetic construct
  misc_feature 1..27: note = Signal peptidase complex catalytic subunit SEC11A (146-154)
  source 1..27: mol_type = other RNA
gtgccctacatcggcatcgtcaccatc

SEQ ID NO: 33730 - RNA, 27 nt, synthetic construct
  misc_feature 1..27: note = E3 ubiquitin-protein ligase MYLIP (431-439)
  source 1..27: mol_type = other RNA
gtgtacctgcccacccacaccagcctc

SEQ ID NO: 33731 - RNA, 27 nt, synthetic construct
  misc_feature 1..27: note = Guanine nucleotide-binding protein G(i) subunit alpha-2 (155-163)
  source 1..27: mol_type = other RNA
tactacctgaacgacctcgagcgcatc

SEQ ID NO: 33732 - RNA, 27 nt, synthetic construct
  misc_feature 1..27: note = Peptidyl-prolyl cis-trans isomerase FKBP4 (372-380)
  source 1..27: mol_type = other RNA
gcccgcgccgacttccagaaggtgctg

SEQ ID NO: 33733 - RNA, 27 nt, synthetic construct
  misc_feature 1..27: note = Metaxin-1 (300-308)
  source 1..27: mol_type = other RNA
gcccgcgcccccggcacccggaccctg

SEQ ID NO: 33734 - RNA, 27 nt, synthetic construct
  misc_feature 1..27: note = Exosome component 10 (437-445)
  source 1..27: mol_type = other RNA
gcccgcgacgacacccactacctgctc

SEQ ID NO: 33735 - RNA, 33 nt, synthetic construct
  misc_feature 1..33: note = Annexin A2 (195-205)
  source 1..33: mol_type = other RNA
gcccgcgacctgtacgacgccggcgtgaagcgg

SEQ ID NO: 33736 - RNA, 27 nt, synthetic construct
  misc_feature 1..27: note = Coronin-1C (333-341)
  source 1..27: mol_type = other RNA
gcccgcttcttcaagctgcacgagcgg

SEQ ID NO: 33737 - RNA, 27 nt, synthetic construct
  misc_feature 1..27: note = Uncharacterized protein KIAA1143 (19-27)
  source 1..27: mol_type = other RNA
gcccgcttcaaggagcgggtgggctac

SEQ ID NO: 33738 - RNA, 30 nt, synthetic construct
  misc_feature 1..30: note = Disabled homolog 2 (41-50)
  source 1..30: mol_type = other RNA
gcccgcttcaagggcgacggggtgaagtac

SEQ ID NO: 33739 - RNA, 30 nt, synthetic construct
  misc_feature 1..30: note = Serine/threonine-protein kinase tousled-like 2 (17-26)
  source 1..30: mol_type = other RNA
gcccgcttcaccggcgtgggggtcagcaag

SEQ ID NO: 33740 - RNA, 27 nt, synthetic construct
  misc_feature 1..27: note = ER degradation-enhancing alpha-mannosidase-like protein 1 (134-142)
  source 1..27: mol_type = other RNA
gcccgcggcatgttcgtgttcgggtac

SEQ ID NO: 33741 - RNA, 36 nt, synthetic construct
  misc_feature 1..36: note = Lon protease homolog 2, peroxisomal (291-302)
  source 1..36: mol_type = other RNA
gcccgcatcctgctcgacaacgaccactacgccatg

SEQ ID NO: 33742 - RNA, 27 nt, synthetic construct
  misc_feature 1..27: note = Chromodomain-helicase-DNA-binding protein 4 (1901-1909)
  source 1..27: mol_type = other RNA
gcccgcatccccccggtggccgtccgg

SEQ ID NO: 33743 - RNA, 30 nt, synthetic construct
  misc_feature 1..30: note = Actin-related protein 2/3 complex subunit 4 (157-166)
  source 1..30: mol_type = other RNA
gcccgcatcgtggccgaggagttcctgaag

SEQ ID NO: 33744 - RNA, 27 nt, synthetic construct
  misc_feature 1..27: note = Coiled-coil domain-containing protein 85B (34-42)
  source 1..27: mol_type = other RNA
gcccgcctggccgcgctcgtgcagcgg

SEQ ID NO: 33745 - RNA, 33 nt, synthetic construct
  misc_feature 1..33: note = THO complex subunit 5 homolog (189-199)
  source 1..33: mol_type = other RNA
gcccgcctggactgggagctcgagcagcggaag

SEQ ID NO: 33746 - RNA, 30 nt, synthetic construct
  misc_feature 1..30: note = Squamous cell carcinoma antigen recognized by T-cells 3 (242-251)
  source 1..30: mol_type = other RNA
gcccgcctggagaaggtgcacagcctcttc

SEQ ID NO: 33747 - RNA, 27 nt, synthetic construct
  misc_feature 1..27: note = G patch domain-containing protein 4 (161-169)
  source 1..27: mol_type = other RNA
gcccgcctgggcatcaccatgaaggcc

SEQ ID NO: 33748 - RNA, 27 nt, synthetic construct
  misc_feature 1..27: note = Natural resistance-associated macrophage protein 2 (119-127)
  source 1..27: mol_type = other RNA
gcccgcctgggcgtggtcaccgggctc

SEQ ID NO: 33749 - RNA, 30 nt, synthetic construct
  misc_feature 1..30: note = WD repeat-containing protein 36 (93-102)
  source 1..30: mol_type = other RNA
gcccgcaacaaggagatcgtgcacaccttc

SEQ ID NO: 33750 - RNA, 27 nt, synthetic construct
  misc_feature 1..27: note = General transcription factor 3C polypeptide 1 (196-204)
  source 1..27: mol_type = other RNA
gcccgcagcgagctgctcaccaccgtg

SEQ ID NO: 33751 - RNA, 27 nt, synthetic construct
  misc_feature 1..27: note = Nucleolin (392-400)
  source 1..27: mol_type = other RNA
gcccgcaccctgctcgccaagaacctg

SEQ ID NO: 33752 - RNA, 27 nt, synthetic construct
  misc_feature 1..27: note = S-adenosyl-L-methionine-dependent tRNA 4-demethylwyosine synthase (634-642)
  source 1..27: mol_type = other RNA
gcccgcaccccccactgggccctgttc

SEQ ID NO: 33753 - RNA, 27 nt, synthetic construct
  misc_feature 1..27: note = Puromycin-sensitive aminopeptidase (236-244)
  source 1..27: mol_type = other RNA
gcccgcacccccgtgatgagcacctac

SEQ ID NO: 33754 - RNA, 27 nt, synthetic construct
  misc_feature 1..27: note = Puromycin-sensitive aminopeptidase-like protein (236-244)
  source 1..27: mol_type = other RNA
gcccgcacccccgtgaccagcacgtac

SEQ ID NO: 33755 - RNA, 27 nt, synthetic construct
  misc_feature 1..27: note = Protocadherin gamma-A11 (880-888)
  source 1..27: mol_type = other RNA
gcccgctacggcccccagttcaccctg

SEQ ID NO: 33756 - RNA, 27 nt, synthetic construct
  misc_feature 1..27: note = Protein ELYS (743-751)
  source 1..27: mol_type = other RNA
gagcgcatcgagaagctgtggaagcgg

SEQ ID NO: 33757 - RNA, 27 nt, synthetic construct
  misc_feature 1..27: note = Unconventional myosin-Ic (223-231)
  source 1..27: mol_type = other RNA
gagcgcaacccccagagctacctgtac

SEQ ID NO: 33758 - RNA, 27 nt, synthetic construct
  misc_feature 1..27: note = TRPM8 channel-associated factor 1 (164-172)
  source 1..27: mol_type = other RNA
ttccgcggccccctggtgatcaaccgg

SEQ ID NO: 33759 - RNA, 27 nt, synthetic construct
  misc_feature 1..27: note = Translocon-associated protein subunit alpha (124-132)
  source 1..27: mol_type = other RNA
ttccgctacccccaggactaccagttc

SEQ ID NO: 33760 - RNA, 30 nt, synthetic construct
  misc_feature 1..30: note = Protein DEK (128-137)
  source 1..30: mol_type = other RNA
ggccagttcagcgggttccccttcgagaag

SEQ ID NO: 33761 - RNA, 27 nt, synthetic construct
  misc_feature 1..27: note = DAZ-associated protein 2 (5-13)
  source 1..27: mol_type = other RNA
ggccagtaccccacccagccgacctac

SEQ ID NO: 33762 - RNA, 30 nt, synthetic construct
  misc_feature 1..30: note = Sorting and assembly machinery component 50 homolog (154-163)
  source 1..30: mol_type = other RNA
ggccgcgccgagaaggtgaccttccagttc

SEQ ID NO: 33763 - RNA, 30 nt, synthetic construct
  misc_feature 1..30: note = Replication protein A 32 kDa subunit (83-92)
  source 1..30: mol_type = other RNA
ggccgcgcccccatcagcaacccggggatg

SEQ ID NO: 33764 - RNA, 27 nt, synthetic construct
  misc_feature 1..27: note = Eukaryotic peptide chain release factor GTP-binding subunit ERF3A (142-150)
  source 1..27: mol_type = other RNA
ggccgcgcctacttcgagaccgagaag

SEQ ID NO: 33765 - RNA, 27 nt, synthetic construct
  misc_feature 1..27: note = Actin, gamma-enteric smooth muscle (140-148)
  source 1..27: mol_type = other RNA
ggccgcgacctgaccgactacctcatg

SEQ ID NO: 33766 - RNA, 27 nt, synthetic construct
  misc_feature 1..27: note = Protocadherin Fat 1 (1957-1965)
  source 1..27: mol_type = other RNA
ggccgcttcgccgggctgaccagcgtg

SEQ ID NO: 33767 - RNA, 30 nt, synthetic construct
  misc_feature 1..30: note = H(+)/Cl(-) exchange transporter 7 (345-354)
  source 1..30: mol_type = other RNA
ggccgcttcgacagcgagaagatggcctac

SEQ ID NO: 33768 - RNA, 30 nt, synthetic construct
  misc_feature 1..30: note = Zinc finger protein 407 (271-280)
  source 1..30: mol_type = other RNA
ggccgcttcgacagctccatcatccggatc

SEQ ID NO: 33769 - RNA, 30 nt, synthetic construct
  misc_feature 1..30: note = U2 small nuclear ribonucleoprotein B'' (185-194)
  source 1..30: mol_type = other RNA
ggccgccacgacatcgccttcgtggagttc

SEQ ID NO: 33770 - RNA, 33 nt, synthetic construct
  misc_feature 1..33: note = 40S ribosomal protein S4, X isoform (171-181)
  source 1..33: mol_type = other RNA
ggccgcatcggggtgatcaccaaccgggagcgc

SEQ ID NO: 33771 - RNA, 33 nt, synthetic construct
  misc_feature 1..33: note = 40S ribosomal protein S11 (70-80)
  source 1..33: mol_type = other RNA
ggccgcatcctgagcggggtggtcaccaagatg

SEQ ID NO: 33772 - RNA, 33 nt, synthetic construct
  misc_feature 1..33: note = Desmoplakin (1624-1634)
  source 1..33: mol_type = other RNA
ggccgcatcagcaccgaggaggccatccggaag

SEQ ID NO: 33773 - RNA, 27 nt, synthetic construct
  misc_feature 1..27: note = Protein PML (295-303)
  source 1..27: mol_type = other RNA
ggccgcctggacgccgtgctccagcgg

SEQ ID NO: 33774 - RNA, 30 nt, synthetic construct
  misc_feature 1..30: note = Plectin (581-590)
  source 1..30: mol_type = other RNA
ggccgcctggacctccagtacgccaagctg

SEQ ID NO: 33775 - RNA, 27 nt, synthetic construct
  misc_feature 1..27: note = Kelch-like protein 7 (492-500)
  source 1..27: mol_type = other RNA
ggccgcctggggcacatcctcgagtac

SEQ ID NO: 33776 - RNA, 27 nt, synthetic construct
  misc_feature 1..27: note = H(+)/Cl(-) exchange transporter 3 (772-780)
  source 1..27: mol_type = other RNA
ggccgcctgctcgggatcatcaccaag

SEQ ID NO: 33777 - RNA, 33 nt, synthetic construct
  misc_feature 1..33: note = Heat shock cognate 71 kDa protein (508-518)
  source 1..33: mol_type = other RNA
ggccgcctgagcaaggaggacatcgagcggatg

SEQ ID NO: 33778 - RNA, 30 nt, synthetic construct
  misc_feature 1..30: note = Protein phosphatase 1 regulatory subunit 3C (303-312)
  source 1..30: mol_type = other RNA
ggccgcatggagaacctggccagctaccgg

SEQ ID NO: 33779 - RNA, 27 nt, synthetic construct
  misc_feature 1..27: note = Integrin-linked protein kinase (45-53)
  source 1..27: mol_type = other RNA
ggccgcagcgccgtggtcgagatgctg

SEQ ID NO: 33780 - RNA, 27 nt, synthetic construct
  misc_feature 1..27: note = Interleukin-17 receptor C (13-21)
  source 1..27: mol_type = other RNA
ggccgcagccccgtggtcctgtccctc

SEQ ID NO: 33781 - RNA, 30 nt, synthetic construct
  misc_feature 1..30: note = Solute carrier family 22 member 18 (21-30)
  source 1..30: mol_type = other RNA
ggccgcagctccgtgatcctgctcacctac

SEQ ID NO: 33782 - RNA, 33 nt, synthetic construct
  misc_feature 1..33: note = Insulin receptor substrate 2 (717-727)
  source 1..33: mol_type = other RNA
ggccgcaccttccccgccagcgggggcgggtac

SEQ ID NO: 33783 - RNA, 27 nt, synthetic construct
  misc_feature 1..27: note = Sodium/potassium-transporting ATPase subunit beta-1 (26-34)
  source 1..27: mol_type = other RNA
ggccgcaccgggggcagctggttcaag

SEQ ID NO: 33784 - RNA, 27 nt, synthetic construct
  misc_feature 1..27: note = ATP-binding cassette sub-family B member 8, mitochondrial (643-651)
  source 1..27: mol_type = other RNA
ggccgcaccgtgctggtcatcgcccac

SEQ ID NO: 33785 - RNA, 27 nt, synthetic construct
  misc_feature 1..27: note = ATP-dependent RNA helicase A (565-573)
  source 1..27: mol_type = other RNA
ggccgcacctaccccgtgcaggagtac

SEQ ID NO: 33786 - RNA, 30 nt, synthetic construct
  misc_feature 1..30: note = Sorbin and SH3 domain-containing protein 2 (299-308)
  source 1..30: mol_type = other RNA
ggccgcgtggggatcttccccatcagctac

SEQ ID NO: 33787 - RNA, 33 nt, synthetic construct
  misc_feature 1..33: note = Poly (ADP-ribose) polymerase 1 (590-600)
  source 1..33: mol_type = other RNA
ggccgcgtggggaccgtcatcggcagcaacaag

SEQ ID NO: 33788 - RNA, 27 nt, synthetic construct
  misc_feature 1..27: note = Intraflagellar transport protein 172 homolog (293-301)
  source 1..27: mol_type = other RNA
ggccgctgggagcaggcccacaagctg

SEQ ID NO: 33789 - RNA, 27 nt, synthetic construct
  misc_feature 1..27: note = Histidine-tRNA ligase, cytoplasmic (247-255)
  source 1..27: mol_type = other RNA
ggccgctacgacgggctggtgggcatg

SEQ ID NO: 33790 - RNA, 30 nt, synthetic construct
  misc_feature 1..30: note = DNA mismatch repair protein Msh6 (337-346)
  source 1..30: mol_type = other RNA
ggccgctacagcgactccctggtgcagaag

SEQ ID NO: 33791 - RNA, 33 nt, synthetic construct
  misc_feature 1..33: note = Anion exchange protein 2 (262-272)
  source 1..33: mol_type = other RNA
caccgcttcgaggacgtgcccggcgtccggcgc

SEQ ID NO: 33792 - RNA, 27 nt, synthetic construct
  misc_feature 1..27: note = Probable cation-transporting ATPase 13A2 (626-634)
  source 1..27: mol_type = other RNA
caccgcttccccttcagctccgccctg

SEQ ID NO: 33793 - RNA, 27 nt, synthetic construct
  misc_feature 1..27: note = 26S proteasome non-ATPase regulatory subunit 13 (23-31)
  source 1..27: mol_type = other RNA
caccgcctggaggagctctacaccaag

SEQ ID NO: 33794 - RNA, 30 nt, synthetic construct
  misc_feature 1..30: note = 26S proteasome non-ATPase regulatory subunit 13 (23-32)
  source 1..30: mol_type = other RNA
caccgcctggaggagctctacaccaagaag

SEQ ID NO: 33795 - RNA, 27 nt, synthetic construct
  misc_feature 1..27: note = 40S ribosomal protein S16 (83-91)
  source 1..27: mol_type = other RNA
atccgccagagcatctccaaggccctg

SEQ ID NO: 33796 - RNA, 27 nt, synthetic construct
  misc_feature 1..27: note = RNA-binding motif protein 22 (258-266)
  source 1..27: mol_type = other RNA
atccgcaccatcaccgtggtccagcgg

SEQ ID NO: 33797 - RNA, 27 nt, synthetic construct
  misc_feature 1..27: note = Protein MCM10 homolog (426-434)
  source 1..27: mol_type = other RNA
aagcgcgccgacctgcagagcaccttc

SEQ ID NO: 33798 - RNA, 30 nt, synthetic construct
  misc_feature 1..30: note = Signal peptidase complex subunit 2 (164-173)
  source 1..30: mol_type = other RNA
aagcgcttcgacgacaagtacaccctgaag

SEQ ID NO: 33799 - RNA, 33 nt, synthetic construct
  misc_feature 1..33: note = Unconventional myosin-Ib (37-47)
  source 1..33: mol_type = other RNA
aagcgcttcgaccacagcgagatctacacctac

SEQ ID NO: 33800 - RNA, 27 nt, synthetic construct
  misc_feature 1..27: note = Eukaryotic translation initiation factor 3 subunit C-like protein (55-63)
  source 1..27: mol_type = other RNA
aagcgcttcgaggagctgaccaacctc

SEQ ID NO: 33801 - RNA, 27 nt, synthetic construct
  misc_feature 1..27: note = KIF1-binding protein (201-209)
  source 1..27: mol_type = other RNA
aagcgcttcgagaaggtgtacacccac

SEQ ID NO: 33802 - RNA, 27 nt, synthetic construct
  misc_feature 1..27: note = NADH dehydrogenase (ubiquinone) iron-sulfur protein 5 (8-16)
  source 1..27: mol_type = other RNA
aagcgcttcggcctgaacatcgaccgg

SEQ ID NO: 33803 - RNA, 27 nt, synthetic construct
  misc_feature 1..27: note = Peptidyl-prolyl cis-trans isomerase FKBP3 (70-78)
  source 1..27: mol_type = other RNA
aagcgcttcaagggcaccgagagcatc

SEQ ID NO: 33804 - RNA, 30 nt, synthetic construct
  misc_feature 1..30: note = Intron-binding protein aquarius (24-33)
  source 1..30: mol_type = other RNA
aagcgccacgacctggtgaagctcggcttc

SEQ ID NO: 33805 - RNA, 27 nt, synthetic construct
  misc_feature 1..27: note = THO complex subunit 5 homolog (342-350)
  source 1..27: mol_type = other RNA
aagcgccaccccctgagcgtgatgctc

SEQ ID NO: 33806 - RNA, 27 nt, synthetic construct
  misc_feature 1..27: note = MAP/microtubule affinity-regulating kinase 3 (330-338)
  source 1..27: mol_type = other RNA
aagcgcatcgacatcatggtgggcatg

SEQ ID NO: 33807 - RNA, 30 nt, synthetic construct
  misc_feature 1..30: note = NADH dehydrogenase (ubiquinone) flavoprotein 2, mitochondrial (61-70)
  source 1..30: mol_type = other RNA
aagcgcatcgaggccatcgtgaagaactac

SEQ ID NO: 33808 - RNA, 27 nt, synthetic construct
  misc_feature 1..27: note = ATP-binding cassette sub-family F member 2 (275-283)
  source 1..27: mol_type = other RNA
aagcgcatcctggtgctcgtcagccac

SEQ ID NO: 33809 - RNA, 27 nt, synthetic construct
  misc_feature 1..27: note = Ceramide synthase 5 (210-218)
  source 1..27: mol_type = other RNA
aagcgcaaggacttcctgatcatgttc

SEQ ID NO: 33810 - RNA, 27 nt, synthetic construct
  misc_feature 1..27: note = Probable ATP-dependent RNA helicase DDX47 (296-304)
  source 1..27: mol_type = other RNA
aagcgcctgggcagcctcaacaagttc

SEQ ID NO: 33811 - RNA, 27 nt, synthetic construct
  misc_feature 1..27: note = Transcription intermediary factor 1-beta (207-215)
  source 1..27: mol_type = other RNA
aagcgcgtgcaggtcgacgtgaagatg

SEQ ID NO: 33812 - RNA, 27 nt, synthetic construct
  misc_feature 1..27: note = Arginine-tRNA ligase, cytoplasmic (579-587)
  source 1..27: mol_type = other RNA
ctgcgcttccccgagatcctccagaag

SEQ ID NO: 33813 - RNA, 27 nt, synthetic construct
  misc_feature 1..27: note = Neurosecretory protein VGF (4-12)
  source 1..27: mol_type = other RNA
ctgcgcctcagcgcctccgccctgttc

SEQ ID NO: 33814 - RNA, 27 nt, synthetic construct
  misc_feature 1..27: note = Large proline-rich protein BAG6 (1102-1110)
  source 1..27: mol_type = other RNA
ctgcgcagcgacatccagaagcggctc

SEQ ID NO: 33815 - RNA, 33 nt, synthetic construct
  misc_feature 1..33: note = Ribonucleoside-diphosphate reductase subunit M2 (271-281)
  source 1..33: mol_type = other RNA
ctgcgctggatcggcgacaaggaggccacctac

SEQ ID NO: 33816 - RNA, 30 nt, synthetic construct
  misc_feature 1..30: note = T-complex protein 1 subunit gamma (305-314)
  source 1..30: mol_type = other RNA
atgcgcgccaacatcaccgccatccggcgc

SEQ ID NO: 33817 - RNA, 27 nt, synthetic construct
  misc_feature 1..27: note = U8 snoRNA-decapping enzyme (48-56)
  source 1..27: mol_type = other RNA
atgcgcttcgacggccggctggggttc

SEQ ID NO: 33818 - RNA, 27 nt, synthetic construct
  misc_feature 1..27: note = Epididymal secretory protein E1 (1-9)
  source 1..27: mol_type = other RNA
atgcgcttcctggccgccaccttcctc

SEQ ID NO: 33819 - RNA, 27 nt, synthetic construct
  misc_feature 1..27: note = 26S proteasome non-ATPase regulatory subunit 2 (477-485)
  source 1..27: mol_type = other RNA
atgcgcctgggcagcatcttcgggctc

SEQ ID NO: 33820 - RNA, 27 nt, synthetic construct
  misc_feature 1..27: note = Translocon-associated protein subunit alpha (1-9)
  source 1..27: mol_type = other RNA
atgcgcctgctcccccggctgctgctc

SEQ ID NO: 33821 - RNA, 30 nt, synthetic construct
  misc_feature 1..30: note = Phenylalanine-tRNA ligase alpha subunit (94-103)
  source 1..30: mol_type = other RNA
atgcgcctgcccagcggcaaggtggggttc

SEQ ID NO: 33822 - RNA, 27 nt, synthetic construct
  misc_feature 1..27: note = Dipeptidyl peptidase 8 (31-39)
  source 1..27: mol_type = other RNA
aaccgcttcaagggcgtgaagtacttc

SEQ ID NO: 33823 - RNA, 27 nt, synthetic construct
  misc_feature 1..27: note = E3 ubiquitin-protein ligase UHRF1 (553-561)
  source 1..27: mol_type = other RNA
aaccgctacgacggcatctacaaggtg

SEQ ID NO: 33824 - RNA, 27 nt, synthetic construct
  misc_feature 1..27: note = ATP-dependent RNA helicase DDX19B (371-379)
  source 1..27: mol_type = other RNA
cagcgcgccgccgtgatcgagcggttc

SEQ ID NO: 33825 - RNA, 27 nt, synthetic construct
  misc_feature 1..27: note = V-type proton ATPase subunit H (106-114)
  source 1..27: mol_type = other RNA
cagcgcgtgagcatcttcttcgactac

SEQ ID NO: 33826 - RNA, 27 nt, synthetic construct
  misc_feature 1..27: note = Zinc finger protein 536 (380-388)
  source 1..27: mol_type = other RNA
cgccggttcaaggagccctggttcctg

SEQ ID NO: 33827 - RNA, 27 nt, synthetic construct
  misc_feature 1..27: note = F-box only protein 25 (53-61)
  source 1..27: mol_type = other RNA
cgccggttcaactacgtggtcaagctg

SEQ ID NO: 33828 - RNA, 27 nt, synthetic construct
  misc_feature 1..27: note = Myosin-9 (1209-1217)
  source 1..27: mol_type = other RNA
cgccggggcgacctgcccttcgtggtc

SEQ ID NO: 33829 - RNA, 33 nt, synthetic construct
  misc_feature 1..33: note = Plectin (1853-1863)
  source 1..33: mol_type = other RNA
cgccggctggccgaggacgaggccttccagcgc

SEQ ID NO: 33830 - RNA, 33 nt, synthetic construct
  misc_feature 1..33: note = 60S ribosomal protein L15 (143-153)
  source 1..33: mol_type = other RNA
cgccggaaccccgacacccagtggatcaccaag

SEQ ID NO: 33831 - RNA, 27 nt, synthetic construct
  misc_feature 1..27: note = E3 SUMO-protein ligase RanBP2 (1126-1134)
  source 1..27: mol_type = other RNA
cgccggagcgacgacatgttcaccttc

SEQ ID NO: 33832 - RNA, 27 nt, synthetic construct
  misc_feature 1..27: note = F-box only protein 21 (295-303)
  source 1..27: mol_type = other RNA
cgccggaccggcatccccatcagcatg

SEQ ID NO: 33833 - RNA, 27 nt, synthetic construct
  misc_feature 1..27: note = Prelamin-A/C (40-48)
  source 1..27: mol_type = other RNA
cgccgggtggacgccgagaaccgcctg

SEQ ID NO: 33834 - RNA, 30 nt, synthetic construct
  misc_feature 1..30: note = Polymerase I and transcript release factor (137-146)
  source 1..30: mol_type = other RNA
cgccgggtggacgacttcaagaaggccttc

SEQ ID NO: 33835 - RNA, 36 nt, synthetic construct
  misc_feature 1..36: note = Polymerase I and transcript release factor (137-148)
  source 1..36: mol_type = other RNA
cgccgggtggacgacttcaagaaggccttcagcaag

SEQ ID NO: 33836 - RNA, 30 nt, synthetic construct
  misc_feature 1..30: note = Hsp90 co-chaperone Cdc37 (166-175)
  source 1..30: mol_type = other RNA
cgccggtgggacgacagccagaagtacctg

SEQ ID NO: 33837 - RNA, 27 nt, synthetic construct
  misc_feature 1..27: note = Vascular endothelial growth factor A (62-70)
  source 1..27: mol_type = other RNA
agccgcttcggcggggccgtggtccgg

SEQ ID NO: 33838 - RNA, 27 nt, synthetic construct
  misc_feature 1..27: note = Lysosomal protective protein (472-480)
  source 1..27: mol_type = other RNA
agccgcttcctgaacaagcagccctac

SEQ ID NO: 33839 - RNA, 27 nt, synthetic construct
  misc_feature 1..27: note = Decapping and exoribonuclease protein (154-162)
  source 1..27: mol_type = other RNA
agccgcttccagggcaccctgtacctc

SEQ ID NO: 33840 - RNA, 30 nt, synthetic construct
  misc_feature 1..30: note = Glia-derived nexin (207-216)
  source 1..30: mol_type = other RNA
agccgcttccagcccgagaacaccaagaag

SEQ ID NO: 33841 - RNA, 27 nt, synthetic construct
  misc_feature 1..27: note = Signal transducer and activator of transcription 1-alpha/beta (69-77)
  source 1..27: mol_type = other RNA
agccgcttctccctggagaacaacttc

SEQ ID NO: 33842 - RNA, 27 nt, synthetic construct
  misc_feature 1..27: note = PITH domain-containing protein 1 (143-151)
  source 1..27: mol_type = other RNA
agccgcttctccaacgtgtaccacctg

SEQ ID NO: 33843 - RNA, 27 nt, synthetic construct
  misc_feature 1..27: note = Gamma-aminobutyric acid receptor subunit beta-3 (452-460)
  source 1..27: mol_type = other RNA
agccgcatcgtgttccccttcaccttc

SEQ ID NO: 33844 - RNA, 24 nt, synthetic construct
  misc_feature 1..24: note = Probable dolichyl pyrophosphate Glc1Man9GlcNAc2 alpha-1,3-glucosyltransferase (267-274)
  source 1..24: mol_type = other RNA
agccgcctgttccccttcaagcgg

SEQ ID NO: 33845 - RNA, 27 nt, synthetic construct
  misc_feature 1..27: note = Lysine-specific demethylase 3B (1181-1189)
  source 1..27: mol_type = other RNA
agccgcctgccctcctacttcgtgcgg

SEQ ID NO: 33846 - RNA, 27 nt, synthetic construct
  misc_feature 1..27: note = Arginine-tRNA ligase, cytoplasmic (78-86)
  source 1..27: mol_type = other RNA
agccgcctgcaggaggtgttcggccac

SEQ ID NO: 33847 - RNA, 30 nt, synthetic construct
  misc_feature 1..30: note = Myeloid leukemia factor 2 (28-37)
  source 1..30: mol_type = other RNA
agccgcatgctgtccggcgggttcggctac

SEQ ID NO: 33848 - RNA, 27 nt, synthetic construct
  misc_feature 1..27: note = Protein diaphanous homolog 2 (855-863)
  source 1..27: mol_type = other RNA
agccgcaacgcccagtccctgggcttc

SEQ ID NO: 33849 - RNA, 27 nt, synthetic construct
  misc_feature 1..27: note = Catenin beta-1 (646-654)
  source 1..27: mol_type = other RNA
agccgcaacgagggcgtggccacctac

SEQ ID NO: 33850 - RNA, 27 nt, synthetic construct
  misc_feature 1..27: note = Nuclear protein localization protein 4 homolog (328-336)
  source 1..27: mol_type = other RNA
agccgcaacaaggacacctacttcctg

SEQ ID NO: 33851 - RNA, 33 nt, synthetic construct
  misc_feature 1..33: note = TOX high mobility group box family member 4 (588-598)
  source 1..33: mol_type = other RNA
agccgcaactccaacaccgtggtcttcgtgaag

SEQ ID NO: 33852 - RNA, 27 nt, synthetic construct
  misc_feature 1..27: note = Spectrin beta chain, non-erythrocytic 1 (903-911)
  source 1..27: mol_type = other RNA
agccgcgtggccgtcgtgaaccagatc

SEQ ID NO: 33853 - RNA, 30 nt, synthetic construct
  misc_feature 1..30: note = Aldehyde dehydrogenase family 1 member A3 (318-327)
  source 1..30: mol_type = other RNA
agccgcgtgttcgtcgaggagcaggtgtac

SEQ ID NO: 33854 - RNA, 27 nt, synthetic construct
  misc_feature 1..27: note = Dystonin (6683-6691)
  source 1..27: mol_type = other RNA
agccgctgggagaaggtggtccagcgg

SEQ ID NO: 33855 - RNA, 33 nt, synthetic construct
  misc_feature 1..33: note = Phosphatidylinositol-binding clathrin assembly protein (128-138)
  source 1..33: mol_type = other RNA
agccgctacctgaacgagaaggccgtgtcctac

SEQ ID NO: 33856 - RNA, 30 nt, synthetic construct
  misc_feature 1..30: note = TRPM8 channel-associated factor 1 (46-55)
  source 1..30: mol_type = other RNA
agccgctaccggctgcccgtggccacccgc

SEQ ID NO: 33857 - RNA, 27 nt, synthetic construct
  misc_feature 1..27: note = Protein yippee-like 5 (33-41)
  source 1..27: mol_type = other RNA
acccgcttcaccggcgccacggggcgg

SEQ ID NO: 33858 - RNA, 27 nt, synthetic construct
  misc_feature 1..27: note = 78 kDa glucose-regulated protein (364-372)
  source 1..27: mol_type = other RNA
acccgcatccccaagatccagcagctg

SEQ ID NO: 33859 - RNA, 27 nt, synthetic construct
  misc_feature 1..27: note = Ubiquitin-like protein 5 (37-45)
  source 1..27: mol_type = other RNA
acccgctggaacaagatcgtgctgaag

SEQ ID NO: 33860 - RNA, 27 nt, synthetic construct
  misc_feature 1..27: note = Zinc finger BED domain-containing protein 5 (574-582)
  source 1..27: mol_type = other RNA
gtgcgcaaccccttcaccgtcaccgtg

SEQ ID NO: 33861 - RNA, 30 nt, synthetic construct
  misc_feature 1..30: note = Proteasome subunit beta type-4 (223-232)
  source 1..30: mol_type = other RNA
taccgcgacgcccggagctacaaccgcttc

SEQ ID NO: 33862 - RNA, 30 nt, synthetic construct
  misc_feature 1..30: note = Proteasome subunit beta type-4 (22-31)
  source 1..30: mol_type = other RNA
taccgcatccccagcaccccggactccttc

SEQ ID NO: 33863 - RNA, 30 nt, synthetic construct
  misc_feature 1..30: note = Rho GTPase-activating protein 5 (1010-1019)
  source 1..30: mol_type = other RNA
taccgcctggacctcgagggcaacgagtac

SEQ ID NO: 33864 - RNA, 27 nt, synthetic construct
  misc_feature 1..27: note = Pre-mRNA-processing-splicing factor 8 (1786-1794)
  source 1..27: mol_type = other RNA
taccgcgtgaccatccacaagaccttc

SEQ ID NO: 33865 - RNA, 27 nt, synthetic construct
  misc_feature 1..27: note = Arginine-glutamic acid dipeptide repeats protein (336-344)
  source 1..27: mol_type = other RNA
gccgccgcgtacccccacaccagcctg

SEQ ID NO: 33866 - RNA, 30 nt, synthetic construct
  misc_feature 1..30: note = Lon protease homolog 2, peroxisomal (789-798)
  source 1..30: mol_type = other RNA
gccgccttcgacggcgggttcaccgtgaag

SEQ ID NO: 33867 - RNA, 27 nt, synthetic construct
  misc_feature 1..27: note = Double-stranded RNA-binding protein Staufen homolog 2 (139-147)
  source 1..27: mol_type = other RNA
gccgccatgaaggcgctgcaggccctc

SEQ ID NO: 33868 - RNA, 30 nt, synthetic construct
  misc_feature 1..30: note = 26S proteasome non-ATPase regulatory subunit 14 (301-310)
  source 1..30: mol_type = other RNA
gccgccatgctggacaccgtggtcttcaag

SEQ ID NO: 33869 - RNA, 27 nt, synthetic construct
  misc_feature 1..27: note = 40S ribosomal protein S17 (12-20)
  source 1..27: mol_type = other RNA
gccgcccgcgtgatcatcgagaagtac

SEQ ID NO: 33870 - RNA, 27 nt, synthetic construct
  misc_feature 1..27: note = Endoplasmic reticulum resident protein 29 (3-11)
  source 1..27: mol_type = other RNA
gccgccgtgccccgcgcggccttcctg

SEQ ID NO: 33871 - RNA, 27 nt, synthetic construct
  misc_feature 1..27: note = Tyrosine-protein phosphatase non-receptor type 1 (264-272)
  source 1..27: mol_type = other RNA
gccgaccagctgcgcttcagctacctc

SEQ ID NO: 33872 - RNA, 27 nt, synthetic construct
  misc_feature 1..27: note = ATP-dependent RNA helicase DDX18 (335-343)
  source 1..27: mol_type = other RNA
gccgaccgcatcctggacgtgggcttc

SEQ ID NO: 33873 - RNA, 27 nt, synthetic construct
  misc_feature 1..27: note = Spectrin alpha chain, non-erythrocytic 1 (781-789)
  source 1..27: mol_type = other RNA
gccgacagcctgcgcctccagcagctg

SEQ ID NO: 33874 - RNA, 24 nt, synthetic construct
  misc_feature 1..24: note = Exosome complex exonuclease RRP44 (753-760)
  source 1..24: mol_type = other RNA
gccgacgtgatcgtccaccgcctg

SEQ ID NO: 33875 - RNA, 27 nt, synthetic construct
  misc_feature 1..27: note = Trafficking protein particle complex subunit 4 (26-34)
  source 1..27: mol_type = other RNA
gccgaggccgagaagaccttcagctac

SEQ ID NO: 33876 - RNA, 27 nt, synthetic construct
  misc_feature 1..27: note = Plectin (2624-2632)
  source 1..27: mol_type = other RNA
gccgaggccgagcccgagcacagcttc

SEQ ID NO: 33877 - RNA, 30 nt, synthetic construct
  misc_feature 1..30: note = Spectrin beta chain, non-erythrocytic 1 (1181-1190)
  source 1..30: mol_type = other RNA
gccgaggccttcctgaacaaccaggagtac

SEQ ID NO: 33878 - RNA, 33 nt, synthetic construct
  misc_feature 1..33: note = Structural maintenance of chromosomes protein 2 (370-380)
  source 1..33: mol_type = other RNA
gccgaggccctggcggccgcccagcagcacttc

SEQ ID NO: 33879 - RNA, 27 nt, synthetic construct
  misc_feature 1..27: note = Coatomer subunit alpha (1048-1056)
  source 1..27: mol_type = other RNA
gccgaggcccagcagctgatcaccatc

SEQ ID NO: 33880 - RNA, 33 nt, synthetic construct
  misc_feature 1..33: note = Dihydropyrimidinase-related protein 1 (233-243)
  source 1..33: mol_type = other RNA
gccgaggccgtgttccgcgcgatcaccatcgcc

SEQ ID NO: 33881 - RNA, 27 nt, synthetic construct
  misc_feature 1..27: note = Mitochondrial import receptor subunit TOM20 homolog (63-71)
  source 1..27: mol_type = other RNA
gccgaggccgtgcagaagttcttcctg

SEQ ID NO: 33882 - RNA, 33 nt, synthetic construct
  misc_feature 1..33: note = ADP-ribosylation factor 3 (112-122)
  source 1..33: mol_type = other RNA
gccgaggacgagctgcgcgacgccgtgctcctg

SEQ ID NO: 33883 - RNA, 30 nt, synthetic construct
  misc_feature 1..30: note = WD repeat-containing protein 26 (246-255)
  source 1..30: mol_type = other RNA
gccgaggacctgcgcgccaaggcggagtgg

SEQ ID NO: 33884 - RNA, 27 nt, synthetic construct
  misc_feature 1..27: note = Mitogen-activated protein kinase kinase kinase 3 (613-621)
  source 1..27: mol_type = other RNA
gccgaggagctgctcacccaccacttc

SEQ ID NO: 33885 - RNA, 30 nt, synthetic construct
  misc_feature 1..30: note = LisH domain-containing protein ARMC9 (22-31)
  source 1..30: mol_type = other RNA
gccgagttcgaggacaccctgaagaccttc

SEQ ID NO: 33886 - RNA, 30 nt, synthetic construct
  misc_feature 1..30: note = RNA-binding protein 28 (545-554)
  source 1..30: mol_type = other RNA
gccgagttccaggagcacgagcacgccctg

SEQ ID NO: 33887 - RNA, 27 nt, synthetic construct
  misc_feature 1..27: note = Tubulin alpha-1C chain (243-251)
  source 1..27: mol_type = other RNA
gccgagaaggcctaccacgagcagctg

SEQ ID NO: 33888 - RNA, 27 nt, synthetic construct
  misc_feature 1..27: note = Junction plakoglobin (137-145)
  source 1..27: mol_type = other RNA
gccgagctggccacccgcgcgctcccc

SEQ ID NO: 33889 - RNA, 27 nt, synthetic construct
  misc_feature 1..27: note = Zinc finger protein 579 (465-473)
  source 1..27: mol_type = other RNA
gccgagctggagcgcgccgcggccctc

SEQ ID NO: 33890 - RNA, 30 nt, synthetic construct
  misc_feature 1..30: note = Myosin-9 (780-789)
  source 1..30: mol_type = other RNA
gccgagctggagcgcctcaacaagcagttc

SEQ ID NO: 33891 - RNA, 27 nt, synthetic construct
  misc_feature 1..27: note = F-box/LRR-repeat protein 5 (165-173)
  source 1..27: mol_type = other RNA
gccgagctgctccgcggcctgagcctg

SEQ ID NO: 33892 - RNA, 33 nt, synthetic construct
  misc_feature 1..33: note = Cyclin-dependent kinase inhibitor 1C (51-61)
  source 1..33: mol_type = other RNA
gccgagctgaacgccgaggaccagaaccgctgg

SEQ ID NO: 33893 - RNA, 30 nt, synthetic construct
  misc_feature 1..30: note = Calmodulin (104-113)
  source 1..30: mol_type = other RNA
gccgagctgcgccacgtgatgaccaacctc

SEQ ID NO: 33894 - RNA, 27 nt, synthetic construct
  misc_feature 1..27: note = Uridine phosphorylase 1 (195-203)
  source 1..27: mol_type = other RNA
gccgagctgagcgagttcaccaccgtg

SEQ ID NO: 33895 - RNA, 27 nt, synthetic construct
  misc_feature 1..27: note = U5 small nuclear ribonucleoprotein 200 kDa helicase (318-326)
  source 1..27: mol_type = other RNA
gccgagctgaccggcgaccaccagctc

SEQ ID NO: 33896 - RNA, 27 nt, synthetic construct
  misc_feature 1..27: note = E3 ubiquitin/ISG15 ligase TRIM25 (482-490)
  source 1..27: mol_type = other RNA
gccgagatgccccagaactaccgcccg

SEQ ID NO: 33897 - RNA, 27 nt, synthetic construct
  misc_feature 1..27: note = Heterogeneous nuclear ribonucleoprotein U (399-407)
  source 1..27: mol_type = other RNA
gccgagaaccccggcaagtacaacatc

SEQ ID NO: 33898 - RNA, 27 nt, synthetic construct
  misc_feature 1..27: note = Nuclear pore complex protein Nup160 (377-385)
  source 1..27: mol_type = other RNA
gccgagaaccagaccgtggtcaagtac

SEQ ID NO: 33899 - RNA, 27 nt, synthetic construct
  misc_feature 1..27: note = MORF4 family-associated protein 1 (10-18)
  source 1..27: mol_type = other RNA
gccgagcccgaggaggtggaggtcctg

SEQ ID NO: 33900 - RNA, 30 nt, synthetic construct
  misc_feature 1..30: note = Matrin-3 (229-238)
  source 1..30: mol_type = other RNA
gccgagccctacggcaagatcaagaactac

SEQ ID NO: 33901 - RNA, 27 nt, synthetic construct
  misc_feature 1..27: note = Exocyst complex component 1 (513-521)
  source 1..27: mol_type = other RNA
gccgagcaggacttcatcagcaagttc

SEQ ID NO: 33902 - RNA, 33 nt, synthetic construct
  misc_feature 1..33: note = Keratin, type I cytoskeletal 10 (133-143)
  source 1..33: mol_type = other RNA
gccgagcagaaccgcaaggacgccgaggcgtgg

SEQ ID NO: 33903 - RNA, 30 nt, synthetic construct
  misc_feature 1..30: note = 14 kDa phosphohistidine phosphatase (38-47)
  source 1..30: mol_type = other RNA
gccgagagcaaggagatcgtgcgcggctac

SEQ ID NO: 33904 - RNA, 27 nt, synthetic construct
  misc_feature 1..27: note = Heterogeneous nuclear ribonucleoproteins A2/B1 (61-69)
  source 1..27: mol_type = other RNA
gccgaggtggacgccgcgatggccgcc

SEQ ID NO: 33905 - RNA, 27 nt, synthetic construct
  misc_feature 1..27: note = Rho GTPase-activating protein 18 (654-662)
  source 1..27: mol_type = other RNA
gccgagtgggtgatcaagagcaagccc

SEQ ID NO: 33906 - RNA, 27 nt, synthetic construct
  misc_feature 1..27: note = RNA-binding protein 8A (94-102)
  source 1..27: mol_type = other RNA
gccgagtacggcgagatcaagaacatc

SEQ ID NO: 33907 - RNA, 30 nt, synthetic construct
  misc_feature 1..30: note = Mitotic checkpoint serine/threonine-protein kinase BUB1 (76-85)
  source 1..30: mol_type = other RNA
gccgagtacaacagcgacctgcaccagttc

SEQ ID NO: 33908 - RNA, 33 nt, synthetic construct
  misc_feature 1..33: note = T-complex protein 1 subunit eta (249-259)
  source 1..33: mol_type = other RNA
gccggcttcgacgccaccaacatcctgaacaag

SEQ ID NO: 33909 - RNA, 27 nt, synthetic construct
  misc_feature 1..27: note = Eukaryotic translation initiation factor 4 gamma 1 (1268-1276)
  source 1..27: mol_type = other RNA
gccggccacctgagcaccgcccagtac

SEQ ID NO: 33910 - RNA, 36 nt, synthetic construct
  misc_feature 1..36: note = Cytoplasmic dynein 1 heavy chain 1 (3396-3407)
  source 1..36: mol_type = other RNA
gccatcgcccagctgaactacgcggacatgctcaag

SEQ ID NO: 33911 - RNA, 33 nt, synthetic construct
  misc_feature 1..33: note = Transmembrane protein 131 (804-814)
  source 1..33: mol_type = other RNA
gccatcttcgaggtgaacaccgacctgcagaag

SEQ ID NO: 33912 - RNA, 27 nt, synthetic construct
  misc_feature 1..27: note = Mortality factor 4-like protein 1 (34-42)
  source 1..27: mol_type = other RNA
gccatcaaggacaagcaggtgaagtac

SEQ ID NO: 33913 - RNA, 27 nt, synthetic construct
  misc_feature 1..27: note = Endoribonuclease Dicer (608-616)
  source 1..27: mol_type = other RNA
gccatcctggactacctcatcaccaag

SEQ ID NO: 33914 - RNA, 27 nt, synthetic construct
  misc_feature 1..27: note = Ceramide synthase 6 (81-89)
  source 1..27: mol_type = other RNA
gccatcctggagaaggtgttcaccgcc

SEQ ID NO: 33915 - RNA, 33 nt, synthetic construct
  misc_feature 1..33: note = Aryl hydrocarbon receptor (422-432)
  source 1..33: mol_type = other RNA
gccatcatggaccccctgccgctccgcaccaag

SEQ ID NO: 33916 - RNA, 27 nt, synthetic construct
  misc_feature 1..27: note = MICOS complex subunit MIC25 (96-104)
  source 1..27: mol_type = other RNA
gccatccaggacaagctgttccaggtg

SEQ ID NO: 33917 - RNA, 27 nt, synthetic construct
  misc_feature 1..27: note = DNA mismatch repair protein Msh2 (765-773)
  source 1..27: mol_type = other RNA
gccatcagcgagtacatcgccaccaag

SEQ ID NO: 33918 - RNA, 30 nt, synthetic construct
  misc_feature 1..30: note = Cytochrome b-c1 complex subunit 9 (42-51)
  source 1..30: mol_type = other RNA
gccatctacgaccacatcaacgagggcaag

SEQ ID NO: 33919 - RNA, 36 nt, synthetic construct
  misc_feature 1..36: note = Cytochrome c oxidase subunit 7A2, mitochondrial (69-80)
  source 1..36: mol_type = other RNA
gccatctacgagctggccgtggcgagcttccccaag

SEQ ID NO: 33920 - RNA, 33 nt, synthetic construct
  misc_feature 1..33: note = BCL-6 corepressor (147-157)
  source 1..33: mol_type = other RNA
gccatctacaagacccccccgggcatccagaag

SEQ ID NO: 33921 - RNA, 27 nt, synthetic construct
  misc_feature 1..27: note = Apolipoprotein L2 (101-109)
  source 1..27: mol_type = other RNA
gccctggccgaggaggtggagcaggtc

SEQ ID NO: 33922 - RNA, 30 nt, synthetic construct
  misc_feature 1..30: note = Epidermal growth factor receptor substrate 15 (283-292)
  source 1..30: mol_type = other RNA
gccctggccttccacctcatcagccagaag

SEQ ID NO: 33923 - RNA, 27 nt, synthetic construct
  misc_feature 1..27: note = E3 ubiquitin-protein ligase RNF114 (70-78)
  source 1..27: mol_type = other RNA
gccctggcccccggcgtgcgcgcggtc

SEQ ID NO: 33924 - RNA, 27 nt, synthetic construct
  misc_feature 1..27: note = Neudesin (124-132)
  source 1..27: mol_type = other RNA
gccctggacgaggtgttcaccaaggtc

SEQ ID NO: 33925 - RNA, 27 nt, synthetic construct
  misc_feature 1..27: note = JNK1/MAPK8-associated membrane protein (109-117)
  source 1..27: mol_type = other RNA
gccctgttccagcacatcaccgccctc

SEQ ID NO: 33926 - RNA, 27 nt, synthetic construct
  misc_feature 1..27: note = Set1/Ash2 histone methyltransferase complex subunit ASH2 (290-298)
  source 1..27: mol_type = other RNA
gccctgcacgaccgcgccccccagctc

SEQ ID NO: 33927 - RNA, 27 nt, synthetic construct
  misc_feature 1..27: note = Coiled-coil domain-containing protein 14 (24-32)
  source 1..27: mol_type = other RNA
gccctgatcgaggacgagcacaacctc

SEQ ID NO: 33928 - RNA, 27 nt, synthetic construct
  misc_feature 1..27: note = Clustered mitochondria protein homolog (826-834)
  source 1..27: mol_type = other RNA
gccctgctcgacaacaacatcggcctg

SEQ ID NO: 33929 - RNA, 30 nt, synthetic construct
  misc_feature 1..30: note = Lysine-specific demethylase 5C (683-692)
  source 1..30: mol_type = other RNA
gccctgctcgagaagggcatcaccgaggcc

SEQ ID NO: 33930 - RNA, 27 nt, synthetic construct
  misc_feature 1..27: note = Cleft lip and palate transmembrane protein 1 (348-356)
  source 1..27: mol_type = other RNA
gccctgctcgagaccaacccctacctg

SEQ ID NO: 33931 - RNA, 27 nt, synthetic construct
  misc_feature 1..27: note = S100P-binding protein (349-357)
  source 1..27: mol_type = other RNA
gccctgatggaccaggtgcaccacatg

SEQ ID NO: 33932 - RNA, 27 nt, synthetic construct
  misc_feature 1..27: note = Brefeldin A-inhibited guanine nucleotide-exchange protein 2 (869-877)
  source 1..27: mol_type = other RNA
gccctgatggaggccgtgagccacgcg

SEQ ID NO: 33933 - RNA, 27 nt, synthetic construct
  misc_feature 1..27: note = Exosome complex component MTR3 (214-222)
  source 1..27: mol_type = other RNA
gccctgatgcccgtgctcaaccaggtc

SEQ ID NO: 33934 - RNA, 33 nt, synthetic construct
  misc_feature 1..33: note = Endoplasmic reticulum resident protein 29 (38-48)
  source 1..33: mol_type = other RNA
gccctgcccctcgacaccgtgaccttctacaag

SEQ ID NO: 33935 - RNA, 27 nt, synthetic construct
  misc_feature 1..27: note = Vimentin (268-276)
  source 1..27: mol_type = other RNA
gccctgcgcgacgtgcggcagcagtac

SEQ ID NO: 33936 - RNA, 27 nt, synthetic construct
  misc_feature 1..27: note = Interferon regulatory factor 2-binding protein 1 (300-308)
  source 1..27: mol_type = other RNA
gccctgcgcgagcccggcaaggccctc

SEQ ID NO: 33937 - RNA, 27 nt, synthetic construct
  misc_feature 1..27: note = PR domain zinc finger protein 4 (284-292)
  source 1..27: mol_type = other RNA
gccctgagcgactccatccacaccgtg

SEQ ID NO: 33938 - RNA, 27 nt, synthetic construct
  misc_feature 1..27: note = Annexin A2 (108-116)
  source 1..27: mol_type = other RNA
gccctgagcggccacctcgagaccgtg

SEQ ID NO: 33939 - RNA, 27 nt, synthetic construct
  misc_feature 1..27: note = Protein CutA (89-97)
  source 1..27: mol_type = other RNA
gccctgaccgacttcgtgcgcagcgtc

SEQ ID NO: 33940 - RNA, 30 nt, synthetic construct
  misc_feature 1..30: note = Trafficking protein particle complex subunit 2-like protein (19-28)
  source 1..30: mol_type = other RNA
gccctggtggaccagcgcgagctctacctg

SEQ ID NO: 33941 - RNA, 27 nt, synthetic construct
  misc_feature 1..27: note = Flap endonuclease 1 (165-173)
  source 1..27: mol_type = other RNA
gccctggtgaaggccggcaaggtctac

SEQ ID NO: 33942 - RNA, 30 nt, synthetic construct
  misc_feature 1..30: note = Cofilin-1 (83-92)
  source 1..30: mol_type = other RNA
gccctgtacgacgccacctacgagaccaag

SEQ ID NO: 33943 - RNA, 27 nt, synthetic construct
  misc_feature 1..27: note = COP9 signalosome complex subunit 2 (216-224)
  source 1..27: mol_type = other RNA
gccctgtacgagcagagcctccacatc

SEQ ID NO: 33944 - RNA, 39 nt, synthetic construct
  misc_feature 1..39: note = TGF-beta-activated kinase 1 and MAP3K7-binding protein 1 (311-323)
  source 1..39: mol_type = other RNA
gccatgatcgacaccgagttcgccaagcagaccagcctg

SEQ ID NO: 33945 - RNA, 42 nt, synthetic construct
  misc_feature 1..42: note = Cyclin-dependent kinase 2-associated protein 2 (6-19)
  source 1..42: mol_type = other RNA
gccatgaagcccccgggcgcccaggggagccagtccacctac

SEQ ID NO: 33946 - RNA, 27 nt, synthetic construct
  misc_feature 1..27: note = Poly(rC)-binding protein 1 (249-257)
  source 1..27: mol_type = other RNA
gccatgatgcacggcgggaccggcttc

SEQ ID NO: 33947 - RNA, 27 nt, synthetic construct
  misc_feature 1..27: note = Eyes absent homolog 3 (200-208)
  source 1..27: mol_type = other RNA
gcccccgccccggcggcccagcgcctg

SEQ ID NO: 33948 - RNA, 27 nt, synthetic construct
  misc_feature 1..27: note = Homocysteine-responsive endoplasmic reticulum-resident ubiquitin-like domain member 1 protein (211-219)
  source 1..27: mol_type = other RNA
gcccccgccccgatccacaaccagttc

SEQ ID NO: 33949 - RNA, 27 nt, synthetic construct
  misc_feature 1..27: note = Wings apart-like protein homolog (598-606)
  source 1..27: mol_type = other RNA
gcccccgccccgcccagcaaggtgatc

SEQ ID NO: 33950 - RNA, 27 nt, synthetic construct
  misc_feature 1..27: note = Pre-mRNA-splicing factor ATP-dependent RNA helicase PRP16 (41-49)
  source 1..27: mol_type = other RNA
gcccccgccccgcgccccagcctgctc

SEQ ID NO: 33951 - RNA, 27 nt, synthetic construct
  misc_feature 1..27: note = Two pore calcium channel protein 1 (59-67)
  source 1..27: mol_type = other RNA
gcccccgccgtgccggcgctgcgcctc

SEQ ID NO: 33952 - RNA, 27 nt, synthetic construct
  misc_feature 1..27: note = Structural maintenance of chromosomes protein 3 (150-158)
  source 1..27: mol_type = other RNA
gcccccgacagccagcgcctgaagctc

SEQ ID NO: 33953 - RNA, 27 nt, synthetic construct
  misc_feature 1..27: note = Integrator complex subunit 3 (30-38)
  source 1..27: mol_type = other RNA
gcccccggcgggggccgcctgctcctg

SEQ ID NO: 33954 - RNA, 51 nt, synthetic construct
  misc_feature 1..51: note = Fructose-bisphosphate aldolase A (79-95)
  source 1..51: mol_type = other RNA
gcccccggcaaggggatcctggccgcggacgagagcaccggctccatcgcc

SEQ ID NO: 33955 - RNA, 27 nt, synthetic construct
  misc_feature 1..27: note = DNA/RNA-binding protein KIN17 (338-346)
  source 1..27: mol_type = other RNA
gcccccggcaagcgcatcctggtgctc

SEQ ID NO: 33956 - RNA, 30 nt, synthetic construct
  misc_feature 1..30: note = Ribonucleoprotein PTB-binding 1 (298-307)
  source 1..30: mol_type = other RNA
gcccccggcccgcccgggcgcagcatgctg

SEQ ID NO: 33957 - RNA, 27 nt, synthetic construct
  misc_feature 1..27: note = Sterol regulatory element-binding protein 1 (1104-1112)
  source 1..27: mol_type = other RNA
gcccccggccagcgcgtggggatgctg

SEQ ID NO: 33958 - RNA, 27 nt, synthetic construct
  misc_feature 1..27: note = E3 ubiquitin-protein ligase RNF114 (72-80)
  source 1..27: mol_type = other RNA
gcccccggcgtgcgcgccgtcgagctg

SEQ ID NO: 33959 - RNA, 27 nt, synthetic construct
  misc_feature 1..27: note = LIM domain and actin-binding protein 1 (397-405)
  source 1..27: mol_type = other RNA
gcccccatcgccaaggtgggcgtcctg

SEQ ID NO: 33960 - RNA, 27 nt, synthetic construct
  misc_feature 1..27: note = Destrin (109-117)
  source 1..27: mol_type = other RNA
gcccccctgaagagcaagatgatctac

SEQ ID NO: 33961 - RNA, 33 nt, synthetic construct
  misc_feature 1..33: note = Talin-1 (1688-1698)
  source 1..33: mol_type = other RNA
gccccccgcgagggcatcagccaggaggccctg

SEQ ID NO: 33962 - RNA, 30 nt, synthetic construct
  misc_feature 1..30: note = NADH dehydrogenase (ubiquinone) 1 alpha subcomplex assembly factor 4 (30-39)
  source 1..30: mol_type = other RNA
gccccccgccacccgagcaccaactccctg

SEQ ID NO: 33963 - RNA, 33 nt, synthetic construct
  misc_feature 1..33: note = Proline-rich nuclear receptor coactivator 2 (5-15)
  source 1..33: mol_type = other RNA
gccccccgcctgaacagcgccgaccggccgatg

SEQ ID NO: 33964 - RNA, 27 nt, synthetic construct
  misc_feature 1..27: note = Zinc finger protein 526 (559-567)
  source 1..27: mol_type = other RNA
gccccccgcctgccgatcaccggcctc

SEQ ID NO: 33965 - RNA, 27 nt, synthetic construct
  misc_feature 1..27: note = Protein Wiz (126-134)
  source 1..27: mol_type = other RNA
gccccccgcccgggcctgctcagcctg

SEQ ID NO: 33966 - RNA, 33 nt, synthetic construct
  misc_feature 1..33: note = Coiled-coil-helix-coiled-coil-helix domain-containing protein 2 (49-59)
  source 1..33: mol_type = other RNA
gccccccgccagccgggcctgatggcccagatg

SEQ ID NO: 33967 - RNA, 33 nt, synthetic construct
  misc_feature 1..33: note = PHD finger protein 23 (80-90)
  source 1..33: mol_type = other RNA
gcccccagcgacctgcgcaccatccagaccttc

SEQ ID NO: 33968 - RNA, 30 nt, synthetic construct
  misc_feature 1..30: note = Aladin (253-262)
  source 1..30: mol_type = other RNA
gcccccagcggcgggcgcctgctctccgcc

SEQ ID NO: 33969 - RNA, 27 nt, synthetic construct
  misc_feature 1..27: note = SWI/SNF-related matrix-associated actin-dependent regulator of chromatin subfamily A member 5 (16-24)
  source 1..27: mol_type = other RNA
gcccccagcaagccggccgcgtccatc

SEQ ID NO: 33970 - RNA, 27 nt, synthetic construct
  misc_feature 1..27: note = Pre-mRNA-processing-splicing factor 8 (2018-2026)
  source 1..27: mol_type = other RNA
gcccccagccagcagcgccagcagatc

SEQ ID NO: 33971 - RNA, 30 nt, synthetic construct
  misc_feature 1..30: note Dolichyl-diphosphooligosaccharide-proteinosyltransferase 48 kDa subunit (183-192)
  source 1..30: mol_type = other RNA
gcccccaccatcgtgggcaagagctccctg

SEQ ID NO: 33972 - RNA, 39 nt, synthetic construct
  misc_feature 1..39: note = Eukaryotic initiation factor 4A-II (75-87)
  source 1..39: mol_type = other RNA
gcccaggcccagagcggcaccgggaagaccgcgacgttc

SEQ ID NO: 33973 - RNA, 45 nt, synthetic construct
  misc_feature 1..45: note = Crooked neck-like protein 1 (704-718)
  source 1..45: mol_type = other RNA
gcccagttcgagctgagctccggcaaggaggggagcctcaccaag

SEQ ID NO: 33974 - RNA, 27 nt, synthetic construct
  misc_feature 1..27: note = Carboxymethylenebutenolidase homolog (123-131)
  source 1..27: mol_type = other RNA
gcccagaagatcggcatcgtggggttc

SEQ ID NO: 33975 - RNA, 27 nt, synthetic construct
  misc_feature 1..27: note = Suppressor of SWI4 1 homolog (17-25)
  source 1..27: mol_type = other RNA
gcccagctgcgcaacctcgaggcctac

SEQ ID NO: 33976 - RNA, 30 nt, synthetic construct
  misc_feature 1..30: note = Hsc70-interacting protein (339-348)
  source 1..30: mol_type = other RNA
gcccagaaccccgccaacatgagcaagtac

SEQ ID NO: 33977 - RNA, 27 nt, synthetic construct
  misc_feature 1..27: note = Protein phosphatase 1 regulatory subunit 15B (54-62)
  source 1..27: mol_type = other RNA
gcccagcccgagacccgcgtgagctac

SEQ ID NO: 33978 - RNA, 36 nt, synthetic construct
  misc_feature 1..36: note = Putative PIP5K1A and PSMD4-like protein (282-293)
  source 1..36: mol_type = other RNA
gcccagcgcgagcccctgagctccgagacccagtac

SEQ ID NO: 33979 - RNA, 27 nt, synthetic construct
  misc_feature 1..27: note = Ras-related C3 botulinum toxin substrate 1 (44-52)
  source 1..27: mol_type = other RNA
gccagcttcgagaacgtgcgcgccaag

SEQ ID NO: 33980 - RNA, 30 nt, synthetic construct
  misc_feature 1..30: note = Dynein light chain roadblock-type 1 (43-52)
  source 1..30: mol_type = other RNA
gccagcctgatgcactccttcatcctcaag

SEQ ID NO: 33981 - RNA, 33 nt, synthetic construct
  misc_feature 1..33: note = Heterogeneous nuclear ribonucleoprotein H (160-170)
  source 1..33: mol_type = other RNA
gccagccaggagatcgccgagaaggcgctgaag

SEQ ID NO: 33982 - RNA, 27 nt, synthetic construct
  misc_feature 1..27: note = (19-27)
  source 1..27: mol_type = other RNA
gccagctacaccaagatcgtggtcaag

SEQ ID NO: 33983 - RNA, 33 nt, synthetic construct
  misc_feature 1..33: note = Catenin alpha-1 (826-836)
  source 1..33: mol_type = other RNA
gccagctacgtggcctccaccaagtaccagaag

SEQ ID NO: 33984 - RNA, 27 nt, synthetic construct
  misc_feature 1..27: note = Acyl-protein thioesterase 1 (20-28)
  source 1..27: mol_type = other RNA
gccaccgccgcggtgatcttcctgcac

SEQ ID NO: 33985 - RNA, 36 nt, synthetic construct
  misc_feature 1..36: note = Prohibitin (229-240)
  source 1..36: mol_type = other RNA
gccaccgccggcgacgggctgatcgagctccgcaag

SEQ ID NO: 33986 - RNA, 30 nt, synthetic construct
  misc_feature 1..30: note = Major facilitator superfamily domain-containing protein 10 (72-81)
  source 1..30: mol_type = other RNA
gccaccgccatcggcatgcccgtggagaag

SEQ ID NO: 33987 - RNA, 27 nt, synthetic construct
  misc_feature 1..27: note = Biogenesis of lysosome-related organelles complex 1 subunit 1 (109-117)
  source 1..27: mol_type = other RNA
gccaccgccctggagtacgtgtacaag

SEQ ID NO: 33988 - RNA, 39 nt, synthetic construct
  misc_feature 1..39: note = E3 ubiquitin-protein ligase BRE1A (84-96)
  source 1..39: mol_type = other RNA
gccaccgacgacgccagcctgctcatcgtgaaccgctac

SEQ ID NO: 33989 - RNA, 27 nt, synthetic construct
  misc_feature 1..27: note = Alpha-1,2-mannosyltransferase ALG9 (450-458)
  source 1..27: mol_type = other RNA
gccaccgaccccaccatccacacggtg

SEQ ID NO: 33990 - RNA, 33 nt, synthetic construct
  misc_feature 1..33: note = Probable ATP-dependent RNA helicase DDX56 (198-208)
  source 1..33: mol_type = other RNA
gccaccttcaacgaggacgtgcaggccctgaag

SEQ ID NO: 33991 - RNA, 27 nt, synthetic construct
  misc_feature 1..27: note = Major facilitator superfamily domain-containing protein 10 (320-328)
  source 1..27: mol_type = other RNA
gccaccatccagggcgcctacgcgcgc

SEQ ID NO: 33992 - RNA, 27 nt, synthetic construct
  misc_feature 1..27: note = E3 ubiquitin-protein ligase MYLIP (151-159)
  source 1..27: mol_type = other RNA
gccaccctgaacagcatcgtggccaag

SEQ ID NO: 33993 - RNA, 27 nt, synthetic construct
  misc_feature 1..27: note = Ankyrin repeat domain-containing protein 10 (82-90)
  source 1..27: mol_type = other RNA
gccaccctgaacgtgagcaccacgcgc

SEQ ID NO: 33994 - RNA, 30 nt, synthetic construct
  misc_feature 1..30: note = Filamin-A (829-838)
  source 1..30: mol_type = other RNA
gccacccccaccagcccgatccgcgtgaag

SEQ ID NO: 33995 - RNA, 33 nt, synthetic construct
  misc_feature 1..33: note = Nucleolar protein 14 (841-851)
  source 1..33: mol_type = other RNA
gccacccaggagggcgagtggaaggccctgaag

SEQ ID NO: 33996 - RNA, 27 nt, synthetic construct
  misc_feature 1..27: note = Cullin-7 (1690-1698)
  source 1..27: mol_type = other RNA
gccacccagagcttctccaccttccgc

SEQ ID NO: 33997 - RNA, 30 nt, synthetic construct
  misc_feature 1..30: note = Gamma-interferon-inducible protein 16 (234-243)
  source 1..30: mol_type = other RNA
gccacccagacccagttcttccacgtgaag

SEQ ID NO: 33998 - RNA, 27 nt, synthetic construct
  misc_feature 1..27: note = Vesicle transport protein SEC20 (257-265)
  source 1..27: mol_type = other RNA
gccaccgtgctgtacatcgtcaagaag

SEQ ID NO: 33999 - RNA, 36 nt, synthetic construct
  misc_feature 1..36: note = Glycerol-3-phosphate dehydrogenase, mitochondrial (373-384)
  source 1..36: mol_type = other RNA
gccacctacggcgacaaggccttcgaggtggcgaag

SEQ ID NO: 34000 - RNA, 27 nt, synthetic construct
  misc_feature 1..27: note = DNA (cytosine-5)-methyltransferase 3A (168-176)
  source 1..27: mol_type = other RNA
gccacctacaacaagcagcccatgtac

SEQ ID NO: 34001 - RNA, 27 nt, synthetic construct
  misc_feature 1..27: note = Cytoplasmic dynein 1 heavy chain 1 (156-164)
  source 1..27: mol_type = other RNA
gccgtggcccccttcttcaagagctac

SEQ ID NO: 34002 - RNA, 27 nt, synthetic construct
  misc_feature 1..27: note = Triple functional domain protein (2585-2593)
  source 1..27: mol_type = other RNA
gccgtggccaccaagttcgtcaacaag

SEQ ID NO: 34003 - RNA, 27 nt, synthetic construct
  misc_feature 1..27: note = Cleavage stimulation factor subunit 1 (359-367)
  source 1..27: mol_type = other RNA
gccgtgttcaaccacaccgaggactac

SEQ ID NO: 34004 - RNA, 30 nt, synthetic construct
  misc_feature 1..30: note = Inositol hexakisphosphate and diphosphoinositol-pentakisphosphate kinase 1 (189-198)
  source 1..30: mol_type = other RNA
gccgtgttccccaagccgttcgtcgagaag

SEQ ID NO: 34005 - RNA, 33 nt, synthetic construct
  misc_feature 1..33: note = POTE ankyrin domain family member F (729-739)
  source 1..33: mol_type = other RNA
gccgtgttccccagcatcgtcggccgcccgcgg

SEQ ID NO: 34006 - RNA, 27 nt, synthetic construct
  misc_feature 1..27: note = Probable ATP-dependent RNA helicase DDX10 (63-71)
  source 1..27: mol_type = other RNA
gccgtgatcgagaacctgcccaagaag

SEQ ID NO: 34007 - RNA, 33 nt, synthetic construct
  misc_feature 1..33: note = Zinc finger protein 292 (1897-1907)
  source 1..33: mol_type = other RNA
gccgtgatccccgagaagcagctggtcgagaag

SEQ ID NO: 34008 - RNA, 27 nt, synthetic construct
  misc_feature 1..27: note = Leucine-rich repeat and calponin homology domain-containing protein 3 (504-512)
  source 1..27: mol_type = other RNA
gccgtgctggacttcgtcaagcagaag

SEQ ID NO: 34009 - RNA, 33 nt, synthetic construct
  misc_feature 1..33: note = Calcium-binding protein 39 (24-34)
  source 1..33: mol_type = other RNA
gccgtgctggagaagcaggacatcagcgacaag

SEQ ID NO: 34010 - RNA, 27 nt, synthetic construct
  misc_feature 1..27: note = Small integral membrane protein 15 (38-46)
  source 1..27: mol_type = other RNA
gccgtgctgagctggaagctcgccaag

SEQ ID NO: 34011 - RNA, 33 nt, synthetic construct
  misc_feature 1..33: note = Cytoskeleton-associated protein 5 (403-413)
  source 1..33: mol_type = other RNA
gccgtgatggacaacaagaaccccaccatcaag

SEQ ID NO: 34012 - RNA, 39 nt, synthetic construct
  misc_feature 1..39: note = MICOS complex subunit MIC60 (234-246)
  source 1..39: mol_type = other RNA
gccgtgcaggccgtcaacgcgcacagcaacatcctgaag

SEQ ID NO: 34013 - RNA, 36 nt, synthetic construct
  misc_feature 1..36: note = Ran GTPase-activating protein 1 (489-500)
  source 1..36: mol_type = other RNA
gccgtgcaggacgccgtcgacgcgctgatgcagaag

SEQ ID NO: 34014 - RNA, 27 nt, synthetic construct
  misc_feature 1..27: note = PRELI domain-containing protein 1, mitochondrial (142-150)
  source 1..27: mol_type = other RNA
gccgtgcaggagttcggcctggcccgc

SEQ ID NO: 34015 - RNA, 30 nt, synthetic construct
  misc_feature 1..30: note = V-type proton ATPase subunit E 1 (147-156)
  source 1..30: mol_type = other RNA
gccgtgcagaaggccatccccatgtacaag

SEQ ID NO: 34016 - RNA, 27 nt, synthetic construct
  misc_feature 1..27: note = Lamin-B receptor (364-372)
  source 1..27: mol_type = other RNA
gccgtgtacgacttcttcatcggccgc

SEQ ID NO: 34017 - RNA, 39 nt, synthetic construct
  misc_feature 1..39: note = Protein phosphatase 1A (57-69)
  source 1..39: mol_type = other RNA
gccgtgtacgacggccacgccgggagccaggtcgcgaag

SEQ ID NO: 34018 - RNA, 27 nt, synthetic construct
  misc_feature 1..27: note = ATPase family AAA domain-containing protein 2 (1085-1093)
  source 1..27: mol_type = other RNA
gcctacgccatcatcaaggaggagctg

SEQ ID NO: 34019 - RNA, 27 nt, synthetic construct
  misc_feature 1..27: note = ATP-dependent RNA helicase DHX29 (855-863)
  source 1..27: mol_type = other RNA
gcctacctggacaagagcccccagttc

SEQ ID NO: 34020 - RNA, 27 nt, synthetic construct
  misc_feature 1..27: note = Structural maintenance of chromosomes protein 6 (494-502)
  source 1..27: mol_type = other RNA
gcctaccgccagggccacttcacctac

SEQ ID NO: 34021 - RNA, 27 nt, synthetic construct
  misc_feature 1..27: note = Protein PRRC2C (846-854)
  source 1..27: mol_type = other RNA
gcctacagcgtggagcacaaccagctg

SEQ ID NO: 34022 - RNA, 24 nt, synthetic construct
  misc_feature 1..24: note = Coatomer subunit alpha (194-201)
  source 1..24: mol_type = other RNA
gacgccgtggtcaagcacgtgctg

SEQ ID NO: 34023 - RNA, 24 nt, synthetic construct
  misc_feature 1..24: note = Talin-1 (1943-1950)
  source 1..24: mol_type = other RNA
gacgcctacaccaagaaggagctg

SEQ ID NO: 34024 - RNA, 24 nt, synthetic construct
  misc_feature 1..24: note = Spindlin-1 (249-256)
  source 1..24: mol_type = other RNA
gacgacttccacatctacgtgtac

SEQ ID NO: 34025 - RNA, 27 nt, synthetic construct
  misc_feature 1..27: note = Caldesmon (92-100)
  source 1..27: mol_type = other RNA
gacgaggccgccttcctggagcgcctc

SEQ ID NO: 34026 - RNA, 33 nt, synthetic construct
  misc_feature 1..33: note = E3 ubiquitin-protein ligase CHIP (39-49)
  source 1..33: mol_type = other RNA
gacgaggccatcgccaacctgcagcgcgcgtac

SEQ ID NO: 34027 - RNA, 30 nt, synthetic construct
  misc_feature 1..30: note = REST corepressor 1 (472-481)
  source 1..30: mol_type = other RNA
gacgaggcccccgtgctggacgtccgctac

SEQ ID NO: 34028 - RNA, 27 nt, synthetic construct
  misc_feature 1..27: note = Peptidyl-prolyl cis-trans isomerase-like 2 (267-275)
  source 1..27: mol_type = other RNA
gacgaggacgtgctgcgctaccagttc

SEQ ID NO: 34029 - RNA, 27 nt, synthetic construct
  misc_feature 1..27: note = Annexin A5 (190-198)
  source 1..27: mol_type = other RNA
gacgaggagaagttcatcaccatcttc

SEQ ID NO: 34030 - RNA, 27 nt, synthetic construct
  misc_feature 1..27: note = Coatomer subunit gamma-1 (781-789)
  source 1..27: mol_type = other RNA
gacgagttcgagaaggaggagaccttc

SEQ ID NO: 34031 - RNA, 27 nt, synthetic construct
  misc_feature 1..27: note = Pre-mRNA-splicing factor ATP-dependent RNA helicase PRP16 (334-342)
  source 1..27: mol_type = other RNA
gacgagttccacaaccccctggcctac

SEQ ID NO: 34032 - RNA, 27 nt, synthetic construct
  misc_feature 1..27: note = Calmodulin-like protein 4 (136-144)
  source 1..27: mol_type = other RNA
gacgagttcatccacaagatcaccctg

SEQ ID NO: 34033 - RNA, 24 nt, synthetic construct
  misc_feature 1..24: note = Coatomer subunit gamma-1 (373-380)
  source 1..24: mol_type = other RNA
gacgagttcaaggtggtcgtggtg

SEQ ID NO: 34034 - RNA, 27 nt, synthetic construct
  misc_feature 1..27: note = Eukaryotic translation initiation factor 4 gamma 3 (1231-1239)
  source 1..27: mol_type = other RNA
gacgagttcctgcacatcaacgacttc

SEQ ID NO: 34035 - RNA, 27 nt, synthetic construct
  misc_feature 1..27: note = F-box/WD repeat-containing protein 5 (42-50)
  source 1..27: mol_type = other RNA
gacgagttcctgtggcgcgagcagttc

SEQ ID NO: 34036 - RNA, 27 nt, synthetic construct
  misc_feature 1..27: note = Calreticulin (166-174)
  source 1..27: mol_type = other RNA
gacgagttcacccacctgtacaccctc

SEQ ID NO: 34037 - RNA, 24 nt, synthetic construct
  misc_feature 1..24: note = Zinc finger RNA-binding protein (575-582)
  source 1..24: mol_type = other RNA
gacgagggcaaggtgatccgcttc

SEQ ID NO: 34038 - RNA, 27 nt, synthetic construct
  misc_feature 1..27: note = Sterol O-acyltransferase 1 (163-171)
  source 1..27: mol_type = other RNA
gacgagggccgcctggtgctcgagttc

SEQ ID NO: 34039 - RNA, 24 nt, synthetic construct
  misc_feature 1..24: note = L-aminoadipate-semialdehyde dehydrogenase-phosphopantetheinyl transferase (236-243)
  source 1..24: mol_type = other RNA
gacgagcaccacttcgtggccgtc

SEQ ID NO: 34040 - RNA, 27 nt, synthetic construct
  misc_feature 1..27: note = Menin (320-328)
  source 1..27: mol_type = other RNA
gacgagcacatctacccctacatgtac

SEQ ID NO: 34041 - RNA, 24 nt, synthetic construct
  misc_feature 1..24: note = U5 small nuclear ribonucleoprotein 200 kDa helicase (1248-1255)
  source 1..24: mol_type = other RNA
gacgagcacctgatcaccttcttc

SEQ ID NO: 34042 - RNA, 24 nt, synthetic construct
  misc_feature 1..24: note = Oxysterol-binding protein-related protein 9 (560-567)
  source 1..24: mol_type = other RNA
gacgagcactacatcctgaccttc

SEQ ID NO: 34043 - RNA, 30 nt, synthetic construct
  misc_feature 1..30: note = Ras GTPase-activating-like protein IQGAP1 (124-133)
  source 1..30: mol_type = other RNA
gacgagatcggcctgcccaagatcttctac

SEQ ID NO: 34044 - RNA, 27 nt, synthetic construct
  misc_feature 1..27: note = Hom s 5 (293-301)
  source 1..27: mol_type = other RNA
gacgagatcaacttcctgcgcgccctc

SEQ ID NO: 34045 - RNA, 30 nt, synthetic construct
  misc_feature 1..30: note = Hom s 5 (293-302)
  source 1..30: mol_type = other RNA
gacgagatcaacttcctgcgcgccctctac

SEQ ID NO: 34046 - RNA, 27 nt, synthetic construct
  misc_feature 1..27: note = Harmonin (132-140)
  source 1..27: mol_type = other RNA
gacgagatcgtgcgcatcaacggctac

SEQ ID NO: 34047 - RNA, 27 nt, synthetic construct
  misc_feature 1..27: note = Splicing factor 3B subunit 4 (112-120)
  source 1..27: mol_type = other RNA
gacgagaagctgctctacgacaccttc

SEQ ID NO: 34048 - RNA, 24 nt, synthetic construct
  misc_feature 1..24: note = Plectin (380-387)
  source 1..24: mol_type = other RNA
gacgagaagagcatcatcacctac

SEQ ID NO: 34049 - RNA, 33 nt, synthetic construct
  misc_feature 1..33: note = 60 kDa heat shock protein, mitochondrial (209-219)
  source 1..33: mol_type = other RNA
gacgagctggagatcatcgagggcatgaagttc

SEQ ID NO: 34050 - RNA, 27 nt, synthetic construct
  misc_feature 1..27: note = tRNA selenocysteine 1-associated protein 1 (146-154)
  source 1..27: mol_type = other RNA
gacgagctggagcagaagcgcgccctc

SEQ ID NO: 34051 - RNA, 27 nt, synthetic construct
  misc_feature 1..27: note = Vacuolar protein sorting-associated protein 35 (72-80)
  source 1..27: mol_type = other RNA
gacgagctgcactacctcgaggtgtac

SEQ ID NO: 34052 - RNA, 24 nt, synthetic construct
  misc_feature 1..24: note = Exocyst complex component 4 (59-66)
  source 1..24: mol_type = other RNA
gacgagctgatcgtgcagcactac

SEQ ID NO: 34053 - RNA, 27 nt, synthetic construct
  misc_feature 1..27: note = Signal transducer and activator of transcription 2 (704-712)
  source 1..27: mol_type = other RNA
gacgagctgcagcagcccctcgagctg

SEQ ID NO: 34054 - RNA, 24 nt, synthetic construct
  misc_feature 1..24: note = Spectrin beta chain, non-erythrocytic 1 (545-552)
  source 1..24: mol_type = other RNA
gacgagatgaaggtgctggtcctc

SEQ ID NO: 34055 - RNA, 24 nt, synthetic construct
  misc_feature 1..24: note = Eukaryotic initiation factor 4A-I (185-192)
  source 1..24: mol_type = other RNA
gacgagatgctgagccgcggcttc

SEQ ID NO: 34056 - RNA, 24 nt, synthetic construct
  misc_feature 1..24: note = Myosin light polypeptide 6 (58-65)
  source 1..24: mol_type = other RNA
gacgagatgaacgtgaaggtcctg

SEQ ID NO: 34057 - RNA, 27 nt, synthetic construct
  misc_feature 1..27: note = Ras GTPase-activating protein-binding protein 2 (343-351)
  source 1..27: mol_type = other RNA
gacgagaacgagctgaaggagttcttc

SEQ ID NO: 34058 - RNA, 27 nt, synthetic construct
  misc_feature 1..27: note = Pyruvate kinase PKM (153-161)
  source 1..27: mol_type = other RNA
gacgagaacatcctgtggctcgactac

SEQ ID NO: 34059 - RNA, 27 nt, synthetic construct
  misc_feature 1..27: note = Argininosuccinate synthase (182-190)
  source 1..27: mol_type = other RNA
gacgagaacctgatgcacatcagctac

SEQ ID NO: 34060 - RNA, 30 nt, synthetic construct
  misc_feature 1..30: note = HLA class II histocompatibility antigen, DR alpha chain (196-205)
  source 1..30: mol_type = other RNA
gacgagcccctgctcaagcactgggagttc

SEQ ID NO: 34061 - RNA, 27 nt, synthetic construct
  misc_feature 1..27: note = RNA-binding protein 3 (18-26)
  source 1..27: mol_type = other RNA
gacgagcaggccctggaggaccacttc

SEQ ID NO: 34062 - RNA, 27 nt, synthetic construct
  misc_feature 1..27: note = 40S ribosomal protein S6 (20-28)
  source 1..27: mol_type = other RNA
gacgagcgcaagctgcggaccttctac

SEQ ID NO: 34063 - RNA, 27 nt, synthetic construct
  misc_feature 1..27: note = Myosin-11 (1867-1875)
  source 1..27: mol_type = other RNA
gacgagcgcaagatggccgagcagtac

SEQ ID NO: 34064 - RNA, 27 nt, synthetic construct
  misc_feature 1..27: note = Carbonic anhydrase 12 (281-289)
  source 1..27: mol_type = other RNA
gacgagcgcctggtgtacaccagcttc

SEQ ID NO: 34065 - RNA, 27 nt, synthetic construct
  misc_feature 1..27: note = Myosin-10 (277-285)
  source 1..27: mol_type = other RNA
gacgagcgcaccttccacatcttctac

SEQ ID NO: 34066 - RNA, 27 nt, synthetic construct
  misc_feature 1..27: note = Carboxy-terminal domain RNA polymerase II polypeptide A small phosphatase 2 (109-117)
  source 1..27: mol_type = other RNA
gacgagaccctggtgcacagctccttc

SEQ ID NO: 34067 - RNA, 33 nt, synthetic construct
  misc_feature 1..33: note = Alpha-ketoglutarate-dependent dioxygenase FTO (189-199)
  source 1..33: mol_type = other RNA
gacgaggtggacatcaagagccgcgccgcctac

SEQ ID NO: 34068 - RNA, 24 nt, synthetic construct
  misc_feature 1..24: note = FACT complex subunit SPT16 (838-845)
  source 1..24: mol_type = other RNA
gacgaggtggagctgatccacttc

SEQ ID NO: 34069 - RNA, 27 nt, synthetic construct
  misc_feature 1..27: note = Electrogenic sodium bicarbonate cotransporter 1 (306-314)
  source 1..27: mol_type = other RNA
gacgaggtgttccacgacatcgcctac

SEQ ID NO: 34070 - RNA, 24 nt, synthetic construct
  misc_feature 1..24: note = Annexin A4 (191-198)
  source 1..24: mol_type = other RNA
gacgaggtgaagttcctgaccgtc

SEQ ID NO: 34071 - RNA, 27 nt, synthetic construct
  misc_feature 1..27: note = Annexin A4 (191-199)
  source 1..27: mol_type = other RNA
gacgaggtgaagttcctgaccgtcctc

SEQ ID NO: 34072 - RNA, 27 nt, synthetic construct
  misc_feature 1..27: note = Polymerase I and transcript release factor (158-166)
  source 1..27: mol_type = other RNA
gacgaggtgaagctgcccgccaagctc

SEQ ID NO: 34073 - RNA, 24 nt, synthetic construct
  misc_feature 1..24: note = Protein arginine N-methyltransferase 1 (69-76)
  source 1..24: mol_type = other RNA
gacgaggtgcgcaccctgacctac

SEQ ID NO: 34074 - RNA, 42 nt, synthetic construct
  misc_feature 1..42: note = Annexin A2 (52-65)
  source 1..42: mol_type = other RNA
gacgaggtgaccatcgtcaacatcctgaccaaccgcagcaac

SEQ ID NO: 34075 - RNA, 27 nt, synthetic construct
  misc_feature 1..27: note = Deoxyribose-phosphate aldolase (278-286)
  source 1..27: mol_type = other RNA
gacgagtggctgaagcccgagctcttc

SEQ ID NO: 34076 - RNA, 27 nt, synthetic construct
  misc_feature 1..27: note = Cell cycle progression protein 1 (726-734)
  source 1..27: mol_type = other RNA
gacgagtacatctaccgccacttcttc

SEQ ID NO: 34077 - RNA, 30 nt, synthetic construct
  misc_feature 1..30: note = Epidermal growth factor receptor (1014-1023)
  source 1..30: mol_type = other RNA
gacgagtacctgatcccccagcagggcttc

SEQ ID NO: 34078 - RNA, 27 nt, synthetic construct
  misc_feature 1..27: note = 39S ribosomal protein L49, mitochondrial (43-51)
  source 1..27: mol_type = other RNA
gacgagtaccagttcgtggagcgcctg

SEQ ID NO: 34079 - RNA, 27 nt, synthetic construct
  misc_feature 1..27: note = Talin-1 (125-133)
  source 1..27: mol_type = other RNA
gacgagtacagcctggtgcgcgagctc

SEQ ID NO: 34080 - RNA, 45 nt, synthetic construct
  misc_feature 1..45: note = Peptidyl-prolyl cis-trans isomerase A (9-23)
  source 1..45: mol_type = other RNA
gacatcgccgtggacggcgagcccctggggcgcgtcagcttcgag

SEQ ID NO: 34081 - RNA, 27 nt, synthetic construct
  misc_feature 1..27: note = DNA (cytosine-5)-methyltransferase 1 (811-819)
  source 1..27: mol_type = other RNA
gacctggacagccgcgtgctctactac

SEQ ID NO: 34082 - RNA, 27 nt, synthetic construct
  misc_feature 1..27: note = ELKS/Rab6-interacting/CAST family member 1 (356-364)
  source 1..27: mol_type = other RNA
gacctgaaggagaaggtgagcctcctg

SEQ ID NO: 34083 - RNA, 27 nt, synthetic construct
  misc_feature 1..27: note = Alpha-taxilin (480-488)
  source 1..27: mol_type = other RNA
gacctgaacaagcgcgtgcaggacctc

SEQ ID NO: 34084 - RNA, 24 nt, synthetic construct
  misc_feature 1..24: note = DnaJ homolog subfamily A member 1 (244-251)
  source 1..24: mol_type = other RNA
gaccagaaggaccacgccgtgttc

SEQ ID NO: 34085 - RNA, 27 nt, synthetic construct
  misc_feature 1..27: note = Statherin (20-28)
  source 1..27: mol_type = other RNA
gacagctccgaggagaagttcctgcgc

SEQ ID NO: 34086 - RNA, 30 nt, synthetic construct
  misc_feature 1..30: note = Protein S100-A9 (67-76)
  source 1..30: mol_type = other RNA
gacaccaacgccgacaagcagctgagcttc

SEQ ID NO: 34087 - RNA, 24 nt, synthetic construct
  misc_feature 1..24: note = Myosin light polypeptide 6 (148-155)
  source 1..24: mol_type = other RNA
gaggccttcgtgcgccacatcctg

SEQ ID NO: 34088 - RNA, 30 nt, synthetic construct
  misc_feature 1..30: note = ATP-dependent RNA helicase DDX1 (481-490)
  source 1..30: mol_type = other RNA
gaggccatcaagatcctgaagggcgagtac

SEQ ID NO: 34089 - RNA, 27 nt, synthetic construct
  misc_feature 1..27: note = 6-phosphofructo-2-kinase/fructose-2,6-bisphosphatase 3 (57-65)
  source 1..27: mol_type = other RNA
gaggccgtgaagcagtacagctcctac

SEQ ID NO: 34090 - RNA, 27 nt, synthetic construct
  misc_feature 1..27: note = Formin-like protein 3 (893-901)
  source 1..27: mol_type = other RNA
gaggcctacaacgccgtggtccgctac

SEQ ID NO: 34091 - RNA, 27 nt, synthetic construct
  misc_feature 1..27: note = Elongator complex protein 2 (246-254)
  source 1..27: mol_type = other RNA
gaggactggatccgcggcgtggagtgg

SEQ ID NO: 34092 - RNA, 30 nt, synthetic construct
  misc_feature 1..30: note = Vimentin (197-206)
  source 1..30: mol_type = other RNA
gaggaggccgagaacaccctgcagagcttc

SEQ ID NO: 34093 - RNA, 27 nt, synthetic construct
  misc_feature 1..27: note = X-ray repair cross-complementing protein 5 (699-707)
  source 1..27: mol_type = other RNA
gaggaggccaagaagttcctggccccc

SEQ ID NO: 34094 - RNA, 27 nt, synthetic construct
  misc_feature 1..27: note = Prostaglandin G/H synthase 1 (266-274)
  source 1..27: mol_type = other RNA
gaggaggcccccgtgctgatgcactac

SEQ ID NO: 34095 - RNA, 30 nt, synthetic construct
  misc_feature 1..30: note = ATP-dependent DNA helicase Q5 (961-970)
  source 1..30: mol_type = other RNA
gaggaggcccagaacctgatccgccacttc

SEQ ID NO: 34096 - RNA, 30 nt, synthetic construct
  misc_feature 1..30: note = Chromodomain-helicase-DNA-binding protein 4 (166-175)
  source 1..30: mol_type = other RNA
gaggaggactaccgcaccctgaccaactac

SEQ ID NO: 34097 - RNA, 30 nt, synthetic construct
  misc_feature 1..30: note = Nucleolar protein 10 (434-443)
  source 1..30: mol_type = other RNA
gaggaggaggagaagcagaagagcacctgg

SEQ ID NO: 34098 - RNA, 27 nt, synthetic construct
  misc_feature 1..27: note = Thioredoxin-like protein 1 (254-262)
  source 1..27: mol_type = other RNA
gaggaggagaccacccgcatcagctac

SEQ ID NO: 34099 - RNA, 27 nt, synthetic construct
  misc_feature 1..27: note = ETS translocation variant 3 (48-56)
  source 1..27: mol_type = other RNA
gaggagttccgccacgtgatcgcctgg

SEQ ID NO: 34100 - RNA, 30 nt, synthetic construct
  misc_feature 1..30: note = Pre-mRNA-processing-splicing factor 8 (1205-1214)
  source 1..30: mol_type = other RNA
gaggagttcacccacaaggacggcgtgtgg

SEQ ID NO: 34101 - RNA, 24 nt, synthetic construct
  misc_feature 1..24: note = Interferon-induced transmembrane protein 1 (4-11)
  source 1..24: mol_type = other RNA
gaggagcacgaggtggccgtcctg

SEQ ID NO: 34102 - RNA, 30 nt, synthetic construct
  misc_feature 1..30: note = Actin, alpha skeletal muscle (101-110)
  source 1..30: mol_type = other RNA
gaggagcaccccaccctgctcaccgaggcc

SEQ ID NO: 34103 - RNA, 27 nt, synthetic construct
  misc_feature 1..27: note = KAT8 regulatory NSL complex subunit 3 (37-45)
  source 1..27: mol_type = other RNA
gaggagcacgtgaaccgcaccggctgg

SEQ ID NO: 34104 - RNA, 24 nt, synthetic construct
  misc_feature 1..24: note = General transcription factor II-I (535-542)
  source 1..24: mol_type = other RNA
gaggagatcttcaacctgaagttc

SEQ ID NO: 34105 - RNA, 27 nt, synthetic construct
  misc_feature 1..27: note = Neutral and basic amino acid transport protein rBAT (294-302)
  source 1..27: mol_type = other RNA
gaggagatcaaggagatcctgcgcttc

SEQ ID NO: 34106 - RNA, 30 nt, synthetic construct
  misc_feature 1..30: note = Calmodulin (87-96)
  source 1..30: mol_type = other RNA
gaggagatccgcgaggccttccgggtgttc

SEQ ID NO: 34107 - RNA, 27 nt, synthetic construct
  misc_feature 1..27: note = Protein PRR14L (198-206)
  source 1..27: mol_type = other RNA
gaggagatctacaccaacaagaactac

SEQ ID NO: 34108 - RNA, 33 nt, synthetic construct
  misc_feature 1..33: note = Choline-phosphate cytidylyltransferase A (268-278)
  source 1..33: mol_type = other RNA
gaggagaagagcatcgacctgatccagaagtgg

SEQ ID NO: 34109 - RNA, 27 nt, synthetic construct
  misc_feature 1..27: note = Myotubularin-related protein 2 (253-261)
  source 1..27: mol_type = other RNA
gaggagctgaagcgcgtggccagcttc

SEQ ID NO: 34110 - RNA, 30 nt, synthetic construct
  misc_feature 1..30: note = Glutathione S-transferase Mu 4 (129-138)
  source 1..30: mol_type = other RNA
gaggagctgcccaccatgatgcagcacttc

SEQ ID NO: 34111 - RNA, 24 nt, synthetic construct
  misc_feature 1..24: note = DNA polymerase epsilon subunit 3 (74-81)
  source 1..24: mol_type = other RNA
gaggagatggagttccagcgcttc

SEQ ID NO: 34112 - RNA, 27 nt, synthetic construct
  misc_feature 1..27: note = DNA replication licensing factor MCM3 (760-768)
  source 1..27: mol_type = other RNA
gaggagatgccccaggtgcacaccccg

SEQ ID NO: 34113 - RNA, 27 nt, synthetic construct
  misc_feature 1..27: note = Serine hydroxymethyltransferase, cytosolic (187-195)
  source 1..27: mol_type = other RNA
gaggagaacgcccgcctgttccacccc

SEQ ID NO: 34114 - RNA, 24 nt, synthetic construct
  misc_feature 1..24: note = Vimentin (348-355)
  source 1..24: mol_type = other RNA
gaggagaacttcgccgtggaggcc

SEQ ID NO: 34115 - RNA, 27 nt, synthetic construct
  misc_feature 1..27: note = ADP-ribosylation factor-like protein 2-binding protein (56-64)
  source 1..27: mol_type = other RNA
gaggagaacaagctgatctacaccccc

SEQ ID NO: 34116 - RNA, 24 nt, synthetic construct
  misc_feature 1..24: note = Signal transducer and activator of transcription 3 (306-313)
  source 1..24: mol_type = other RNA
gaggagcgcatcgtggagctgttc

SEQ ID NO: 34117 - RNA, 27 nt, synthetic construct
  misc_feature 1..27: note = A-kinase-interacting protein 1 (76-84)
  source 1..27: mol_type = other RNA
gaggagcgccccccgaccctgagcgcc

SEQ ID NO: 34118 - RNA, 27 nt, synthetic construct
  misc_feature 1..27: note = Calnexin (478-486)
  source 1..27: mol_type = other RNA
gaggagcgcccctggctgtgggtggtc

SEQ ID NO: 34119 - RNA, 27 nt, synthetic construct
  misc_feature 1..27: note = WASH complex subunit strumpellin (506-514)
  source 1..27: mol_type = other RNA
gaggaggtgcaggagttccaccagctg

SEQ ID NO: 34120 - RNA, 27 nt, synthetic construct
  misc_feature 1..27: note = Cytoplasmic FMR1-interacting protein 2 (432-440)
  source 1..27: mol_type = other RNA
gaggagtacgagcgcgccacccggtac

SEQ ID NO: 34121 - RNA, 33 nt, synthetic construct
  misc_feature 1..33: note = Sorting nexin-7 (294-304)
  source 1..33: mol_type = other RNA
gagctggacagcaaggtggaggtcctcacctac

SEQ ID NO: 34122 - RNA, 27 nt, synthetic construct
  misc_feature 1..27: note = Serine-protein kinase ATM (744-752)
  source 1..27: mol_type = other RNA
gagctgttccagaaggccaagagcctc

SEQ ID NO: 34123 - RNA, 45 nt, synthetic construct
  misc_feature 1..45: note = Heat shock cognate 71 kDa protein (446-460)
  source 1..45: mol_type = other RNA
gagcgcgccatgaccaaggacaacaacctgctcggcaagttcgag

SEQ ID NO: 34124 - RNA, 60 nt, synthetic construct
  misc_feature 1..60: note = Heat shock protein beta-1 (186-205)
  source 1..60: mol_type = other RNA
gagagccgcgcccagctgggcgggcccgaggccgcgaagtccgacgagaccgccgccaag

SEQ ID NO: 34125 - RNA, 27 nt, synthetic construct
  misc_feature 1..27: note = 40S ribosomal protein S7 (169-177)
  source 1..27: mol_type = other RNA
gagaccttcagcggcgtgtacaagaag

SEQ ID NO: 34126 - RNA, 27 nt, synthetic construct
  misc_feature 1..27: note = Kelch-like protein 15 (308-316)
  source 1..27: mol_type = other RNA
gagaccttctacagcaccgagcgctac

SEQ ID NO: 34127 - RNA, 27 nt, synthetic construct
  misc_feature 1..27: note = Poly (ADP-ribose) polymerase (202-210)
  source 1..27: mol_type = other RNA
gagtacaacaccatcaaggacaagttc

SEQ ID NO: 34128 - RNA, 27 nt, synthetic construct
  misc_feature 1..27: note = Dynamin-like 120 kDa protein, mitochondrial (717-725)
  source 1..27: mol_type = other RNA
ttcgccgaggacagcctgcgcgtgatc

SEQ ID NO: 34129 - RNA, 27 nt, synthetic construct
  misc_feature 1..27: note = Transcription factor AP-1 (110-118)
  source 1..27: mol_type = other RNA
ttcgccgagggcttcgtgcgcgccctg

SEQ ID NO: 34130 - RNA, 27 nt, synthetic construct
  misc_feature 1..27: note = Piezo-type mechanosensitive ion channel component 1 (1665-1673)
  source 1..27: mol_type = other RNA
ttcgccgagggccaggggcgcgccctg

SEQ ID NO: 34131 - RNA, 27 nt, synthetic construct
  misc_feature 1..27: note = Sister chromatid cohesion protein PDS5 homolog A (273-281)
  source 1..27: mol_type = other RNA
ttcgccatcgacccccacctgctcctg

SEQ ID NO: 34132 - RNA, 27 nt, synthetic construct
  misc_feature 1..27: note = Spermatid perinuclear RNA-binding protein (7-15)
  source 1..27: mol_type = other RNA
ttcgccaacgacgaccgccacgtgatg

SEQ ID NO: 34133 - RNA, 27 nt, synthetic construct
  misc_feature 1..27: note = Multidrug resistance-associated protein 1 (1201-1209)
  source 1..27: mol_type = other RNA
ttcgccgtgatcagccgccactccctg

SEQ ID NO: 34134 - RNA, 30 nt, synthetic construct
  misc_feature 1..30: note = Glutathione-specific gamma-glutamylcyclotransferase 1 (89-98)
  source 1..30: mol_type = other RNA
ttcgcctacagcgactcccgcgtgggcttc

SEQ ID NO: 34135 - RNA, 45 nt, synthetic construct
  misc_feature 1..45: note = Peptidyl-prolyl cis-trans isomerase A (8-22)
  source 1..45: mol_type = other RNA
ttcgacatcgccgtggacggcgagcccctggggcgcgtcagcttc

SEQ ID NO: 34136 - RNA, 51 nt, synthetic construct
  misc_feature 1..51: note = Peptidyl-prolyl cis-trans isomerase A (8-24)
  source 1..51: mol_type = other RNA
ttcgacatcgccgtggacggcgagcccctggggcgcgtcagcttcgagctc

SEQ ID NO: 34137 - RNA, 30 nt, synthetic construct
  misc_feature 1..30: note = Probable ATP-dependent RNA helicase DDX56 (464-473)
  source 1..30: mol_type = other RNA
ttcgaggacaacccccgcgacctgcagctc

SEQ ID NO: 34138 - RNA, 27 nt, synthetic construct
  misc_feature 1..27: note = Inhibitor of growth protein 4 (19-27)
  source 1..27: mol_type = other RNA
ttcgagctgcagcgcaacttccagctc

SEQ ID NO: 34139 - RNA, 30 nt, synthetic construct
  misc_feature 1..30: note = Macrophage metalloelastase (449-458)
  source 1..30: mol_type = other RNA
ttcgagtacgacttcctgctccagcgcatc

SEQ ID NO: 34140 - RNA, 27 nt, synthetic construct
  misc_feature 1..27: note = SURP and G-patch domain-containing protein 1 (604-612)
  source 1..27: mol_type = other RNA
ttcggcatcgaccgccccgccgagctg

SEQ ID NO: 34141 - RNA, 27 nt, synthetic construct
  misc_feature 1..27: note = Signal-induced proliferation-associated 1-like protein 2 (760-768)
  source 1..27: mol_type = other RNA
ttcggccccccgatccccaagggggtg

SEQ ID NO: 34142 - RNA, 24 nt, synthetic construct
  misc_feature 1..24: note = Factor VIII intron 22 protein (50-57)
  source 1..24: mol_type = other RNA
ttcggccagctggggcgcgagctc

SEQ ID NO: 34143 - RNA, 27 nt, synthetic construct
  misc_feature 1..27: note = Disintegrin and metalloproteinase domain-containing protein 10 (19-27)
  source 1..27: mol_type = other RNA
ttcatccagacccgcggcgggaccttc

SEQ ID NO: 34144 - RNA, 27 nt, synthetic construct
  misc_feature 1..27: note = 2'-5'-oligoadenylate synthase 1 (278-286)
  source 1..27: mol_type = other RNA
ttcaagaaccccatcatcgagaagtac

SEQ ID NO: 34145 - RNA, 57 nt, synthetic construct
  misc_feature 1..57: note = Alpha-enolase (261-279)
  source 1..57: mol_type = other RNA
ttcaagagccccgacgacccgtcccgctacatcagccccgaccagctggccgacctc

SEQ ID NO: 34146 - RNA, 27 nt, synthetic construct
  misc_feature 1..27: note = Sacsin (89-97)
  source 1..27: mol_type = other RNA
ttcctggccgacatcgtgcagaagctc

SEQ ID NO: 34147 - RNA, 27 nt, synthetic construct
  misc_feature 1..27: note = Serine-protein kinase ATM (1077-1085)
  source 1..27: mol_type = other RNA
ttcctggccgacaaccaccaccaggtg

SEQ ID NO: 34148 - RNA, 30 nt, synthetic construct
  misc_feature 1..30: note = Epithelial discoidin domain-containing receptor 1 (885-894)
  source 1..30: mol_type = other RNA
ttcctggccgaggacgccctcaacaccgtg

SEQ ID NO: 34149 - RNA, 27 nt, synthetic construct
  misc_feature 1..27: note = T-complex protein 1 subunit theta (105-113)
  source 1..27: mol_type = other RNA
ttcctggccaagctcatcgcccaggcg

SEQ ID NO: 34150 - RNA, 30 nt, synthetic construct
  misc_feature 1..30: note = Phospholipid transfer protein (8-17)
  source 1..30: mol_type = other RNA
ttcctggccctcctggccggcgcgcacgcc

SEQ ID NO: 34151 - RNA, 27 nt, synthetic construct
  misc_feature 1..27: note = Pseudouridylate synthase 7 homolog-like protein (128-136)
  source 1..27: mol_type = other RNA
ttcctggacgagaagacccacgagctc

SEQ ID NO: 34152 - RNA, 33 nt, synthetic construct
  misc_feature 1..33: note = RuvB-like 2 (433-443)
  source 1..33: mol_type = other RNA
ttcctggacgagagccgctccacccagtacatg

SEQ ID NO: 34153 - RNA, 30 nt, synthetic construct
  misc_feature 1..30: note = La-related protein 1 (530-539)
  source 1..30: mol_type = other RNA
ttcctgttcgacgaggagatggagcagatg

SEQ ID NO: 34154 - RNA, 27 nt, synthetic construct
  misc_feature 1..27: note = Alpha-2-macroglobulin receptor-associated protein (22-30)
  source 1..27: mol_type = other RNA
ttcctgggcccctggccggccgccagc

SEQ ID NO: 34155 - RNA, 27 nt, synthetic construct
  misc_feature 1..27: note = Sterol regulatory element-binding protein 2 (1033-1041)
  source 1..27: mol_type = other RNA
ttcctgcacgaggccaccgtgcgcctc

SEQ ID NO: 34156 - RNA, 30 nt, synthetic construct
  misc_feature 1..30: note = Adenylate kinase 2, mitochondrial (96-105)
  source 1..30: mol_type = other RNA
ttcctgctcgacggcttcccccgcaccgtg

SEQ ID NO: 34157 - RNA, 33 nt, synthetic construct
  misc_feature 1..33: note = ATR-interacting protein (164-174)
  source 1..33: mol_type = other RNA
ttcctgctcgagcaggagaagacccaggccctg

SEQ ID NO: 34158 - RNA, 27 nt, synthetic construct
  misc_feature 1..27: note = YY1-associated protein 1 (323-331)
  source 1..27: mol_type = other RNA
ttcctgaaccccctcatcagcaagtac

SEQ ID NO: 34159 - RNA, 33 nt, synthetic construct
  misc_feature 1..33: note = BRCA1-A complex subunit BRE (92-102)
  source 1..33: mol_type = other RNA
ttcctgcccgacccgagcgccctccagaacctg

SEQ ID NO: 34160 - RNA, 27 nt, synthetic construct
  misc_feature 1..27: note = Nesprin-2 (5714-5722)
  source 1..27: mol_type = other RNA
ttcctgaccgacaccagccacctcctg

SEQ ID NO: 34161 - RNA, 27 nt, synthetic construct
  misc_feature 1..27: note = Transmembrane protein 41B (141-149)
  source 1..27: mol_type = other RNA
ttcctgtaccccttcccgctcgccctg

SEQ ID NO: 34162 - RNA, 27 nt, synthetic construct
  misc_feature 1..27: note = Zinc finger RNA-binding protein (569-577)
  source 1..27: mol_type = other RNA
ttcaacgaccccaacgccaaggagatg

SEQ ID NO: 34163 - RNA, 27 nt, synthetic construct
  misc_feature 1..27: note = Fc receptor-like A (169-177)
  source 1..27: mol_type = other RNA
ttccccgccccgatcctgcgcgccgtg

SEQ ID NO: 34164 - RNA, 27 nt, synthetic construct
  misc_feature 1..27: note = Sphingolipid delta(4)-desaturase DES1 (265-273)
  source 1..27: mol_type = other RNA
ttccccaacatcccgggcaagagcctg

SEQ ID NO: 34165 - RNA, 33 nt, synthetic construct
  misc_feature 1..33: note = Protein SZT2 (903-913)
  source 1..33: mol_type = other RNA
ttcccccgcagcccgggccagccctccagcctg

SEQ ID NO: 34166 - RNA, 30 nt, synthetic construct
  misc_feature 1..30: note = Dipeptidyl peptidase 8 (180-189)
  source 1..30: mol_type = other RNA
ttccaggccggcagcgggatctaccacgtg

SEQ ID NO: 34167 - RNA, 27 nt, synthetic construct
  misc_feature 1..27: note = Transient receptor potential cation channel subfamily V member 2 (517-525)
  source 1..27: mol_type = other RNA
ttccagcacaccggcatctacagcgtg

SEQ ID NO: 34168 - RNA, 24 nt, synthetic construct
  misc_feature 1..24: note = Elongation factor 1-gamma (423-430)
  source 1..24: mol_type = other RNA
ttccagcacgtgggcaaggccttc

SEQ ID NO: 34169 - RNA, 27 nt, synthetic construct
  misc_feature 1..27: note = Phosphatidylcholine translocator ABCB4 (241-249)
  source 1..27: mol_type = other RNA
ttcagcgacaaggagctggccgcctac

SEQ ID NO: 34170 - RNA, 24 nt, synthetic construct
  misc_feature 1..24: note = Ras GTPase-activating-like protein IQGAP2 (196-203)
  source 1..24: mol_type = other RNA
ttcagcaagatcggcgggatcctg

SEQ ID NO: 34171 - RNA, 27 nt, synthetic construct
  misc_feature 1..27: note = RNA-binding protein 4B (186-194)
  source 1..27: mol_type = other RNA
ttcaccgagcagtacaacgagcagtac

SEQ ID NO: 34172 - RNA, 27 nt, synthetic construct
  misc_feature 1..27: note = F-box DNA helicase 1 (553-561)
  source 1..27: mol_type = other RNA
ttcaccgtgccccacacccacgtcttc

SEQ ID NO: 34173 - RNA, 30 nt, synthetic construct
  misc_feature 1..30: note = Fas apoptotic inhibitory molecule 1 (167-176)
  source 1..30: mol_type = other RNA
ttcgtggacgacggcaccgagacccacttc

SEQ ID NO: 34174 - RNA, 27 nt, synthetic construct
  misc_feature 1..27: note = DNA damage-binding protein 1 (451-459)
  source 1..27: mol_type = other RNA
ttcgtggacgaccagcagaccttcttc

SEQ ID NO: 34175 - RNA, 27 nt, synthetic construct
  misc_feature 1..27: note = Interferon regulatory factor 2-binding protein 2 (51-59)
  source 1..27: mol_type = other RNA
ttcgtgatcgagaccgcccgccagctg

SEQ ID NO: 34176 - RNA, 27 nt, synthetic construct
  misc_feature 1..27: note = Inactive serine/threonine-protein kinase VRK3 (37-45)
  source 1..27: mol_type = other RNA
ttcgtgaacccccacgtcagctccttc

SEQ ID NO: 34177 - RNA, 27 nt, synthetic construct
  misc_feature 1..27: note = DNA polymerase epsilon catalytic subunit A (732-740)
  source 1..27: mol_type = other RNA
ttctacgtggacaccgtccgcgccttc

SEQ ID NO: 34178 - RNA, 33 nt, synthetic construct
  misc_feature 1..33: note = NADH dehydrogenase (ubiquinone) flavoprotein 2, mitochondrial (33-43)
  source 1..33: mol_type = other RNA
ggcgccgggggcgccctgttcgtgcaccgcgac

SEQ ID NO: 34179 - RNA, 27 nt, synthetic construct
  misc_feature 1..27: note = Complement C1q tumor necrosis factor-related protein 3 (229-237)
  source 1..27: mol_type = other RNA
ggcgaccaccagcgcttcagcaccttc

SEQ ID NO: 34180 - RNA, 27 nt, synthetic construct
  misc_feature 1..27: note = Deoxyribose-phosphate aldolase (201-209)
  source 1..27: mol_type = other RNA
ggcgaggcccacctgaagaccatcctc

SEQ ID NO: 34181 - RNA, 33 nt, synthetic construct
  misc_feature 1..33: note = ATPase family AAA domain-containing protein 2 (286-296)
  source 1..33: mol_type = other RNA
ggcgaggaggagaaccagaagcgctactacctg

SEQ ID NO: 34182 - RNA, 27 nt, synthetic construct
  misc_feature 1..27: note = Interferon regulatory factor 2-binding protein-like (561-569)
  source 1..27: mol_type = other RNA
ggcgaggagcagcagcgccagcagtgg

SEQ ID NO: 34183 - RNA, 27 nt, synthetic construct
  misc_feature 1..27: note = NADPH-cytochrome P450 reductase (240-248)
  source 1..27: mol_type = other RNA
ggcgaggagagctccatccgccagtac

SEQ ID NO: 34184 - RNA, 30 nt, synthetic construct
  misc_feature 1..30: note = Coiled-coil domain-containing protein 106 (234-243)
  source 1..30: mol_type = other RNA
ggcgagttcgaccccagcaaggagcgcctg

SEQ ID NO: 34185 - RNA, 27 nt, synthetic construct
  misc_feature 1..27: note = LIM and senescent cell antigen-like-containing domain protein 1 (75-83)
  source 1..27: mol_type = other RNA
ggcgagttcatcatcgggcgcgtgatc

SEQ ID NO: 34186 - RNA, 33 nt, synthetic construct
  misc_feature 1..33: note = Thioredoxin (66-76)
  source 1..33: mol_type = other RNA
ggcgagttcagcggggccaacaaggagaagctg

SEQ ID NO: 34187 - RNA, 36 nt, synthetic construct
  misc_feature 1..36: note = Fibrinogen alpha chain (23-34)
  source 1..36: mol_type = other RNA
ggcgagggggacttcctggccgagggcgggggcgtg

SEQ ID NO: 34188 - RNA, 27 nt, synthetic construct
  misc_feature 1..27: note = Cytospin-B (579-587)
  source 1..27: mol_type = other RNA
ggcgagatcaagcacgtgagctccctg

SEQ ID NO: 34189 - RNA, 27 nt, synthetic construct
  misc_feature 1..27: note = Filamin-B (1758-1766)
  source 1..27: mol_type = other RNA
ggcgagatcaccggggaggtgcacatg

SEQ ID NO: 34190 - RNA, 27 nt, synthetic construct
  misc_feature 1..27: note = DNA-directed RNA polymerase III subunit RPC7 (24-32)
  source 1..27: mol_type = other RNA
ggcgagaagctgcccgacgtggtcctc

SEQ ID NO: 34191 - RNA, 33 nt, synthetic construct
  misc_feature 1..33: note = Regulator of nonsense transcripts 1 (585-595)
  source 1..33: mol_type = other RNA
ggcgagctgagctccgccgacgagaagcgctac

SEQ ID NO: 34192 - RNA, 36 nt, synthetic construct
  misc_feature 1..36: note = Heat shock protein HSP 90-beta (172-183)
  source 1..36: mol_type = other RNA
ggcgagcccatcgggcgcggcaccaaggtgatcctg

SEQ ID NO: 34193 - RNA, 30 nt, synthetic construct
  misc_feature 1..30: note = 60S ribosomal protein L4 (15-24)
  source 1..30: mol_type = other RNA
ggcgagagctccgggaagaacgtgaccctg

SEQ ID NO: 34194 - RNA, 27 nt, synthetic construct
  misc_feature 1..27: note = Prefoldin subunit 6 (11-19)
  source 1..27: mol_type = other RNA
ggcgaggtggagaagtaccagcagctg

SEQ ID NO: 34195 - RNA, 30 nt, synthetic construct
  misc_feature 1..30: note = 60S ribosomal protein L3 (319-328)
  source 1..30: mol_type = other RNA
ggcgaggtgaccaacgacttcgtcatgctg

SEQ ID NO: 34196 - RNA, 27 nt, synthetic construct
  misc_feature 1..27: note = Eukaryotic translation initiation factor 3 subunit L (258-266)
  source 1..27: mol_type = other RNA
ggcgagtacgggcgccacagcctgtac

SEQ ID NO: 34197 - RNA, 48 nt, synthetic construct
  misc_feature 1..48: note = Keratin, type II cytoskeletal 2 epidermal (142-157)
  source 1..48: mol_type = other RNA
ggcgggcccggcgggttcggcccggggggctaccccggcgggatccac

SEQ ID NO: 34198 - RNA, 33 nt, synthetic construct
  misc_feature 1..33: note = Actin, cytoplasmic 2 (12-22)
  source 1..33: mol_type = other RNA
ggcatccacgagaccaccttcaacagcatcatg

SEQ ID NO: 34199 - RNA, 33 nt, synthetic construct
  misc_feature 1..33: note = Glyceraldehyde-3-phosphate dehydrogenase (2-12)
  source 1..33: mol_type = other RNA
ggcaaggtgaaggtcggggtgaacggcttcggg

SEQ ID NO: 34200 - RNA, 27 nt, synthetic construct
  misc_feature 1..27: note = E3 ubiquitin-protein ligase RNF213 (2847-2855)
  source 1..27: mol_type = other RNA
ggcctggccgaggacagccccaagatg

SEQ ID NO: 34201 - RNA, 27 nt, synthetic construct
  misc_feature 1..27: note = Gem-associated protein 4 (541-549)
  source 1..27: mol_type = other RNA
ggcctggccaaggccgtggcgagcgtc

SEQ ID NO: 34202 - RNA, 27 nt, synthetic construct
  misc_feature 1..27: note = Histone-lysine N-methyltransferase ASH1L (2026-2034)
  source 1..27: mol_type = other RNA
ggcctgttccccgccccgatccacgtg

SEQ ID NO: 34203 - RNA, 27 nt, synthetic construct
  misc_feature 1..27: note = Signal-induced proliferation-associated 1-like protein 2 (957-965)
  source 1..27: mol_type = other RNA
ggcctggggcagctcggcttccacgtg

SEQ ID NO: 34204 - RNA, 27 nt, synthetic construct
  misc_feature 1..27: note = Plectin (4147-4155)
  source 1..27: mol_type = other RNA
ggcctgatcgaccaccagacctacctc

SEQ ID NO: 34205 - RNA, 30 nt, synthetic construct
  misc_feature 1..30: note = Protein strawberry notch homolog 1 (1078-1087)
  source 1..30: mol_type = other RNA
ggcctgatcggggtgggcctcatcaacgtc

SEQ ID NO: 34206 - RNA, 27 nt, synthetic construct
  misc_feature 1..27: note = Elongation factor 2 (343-351)
  source 1..27: mol_type = other RNA
ggcctgaaggaggggatccccgccctc

SEQ ID NO: 34207 - RNA, 27 nt, synthetic construct
  misc_feature 1..27: note = Coatomer subunit alpha (991-999)
  source 1..27: mol_type = other RNA
ggcctgaagaacggggtgcccgccgtc

SEQ ID NO: 34208 - RNA, 27 nt, synthetic construct
  misc_feature 1..27: note = Serine/threonine-protein kinase 17A (41-49)
  source 1..27: mol_type = other RNA
ggcctgctcaccgagatccgcgccgtg

SEQ ID NO: 34209 - RNA, 27 nt, synthetic construct
  misc_feature 1..27: note = Nuclear receptor corepressor 2 (413-421)
  source 1..27: mol_type = other RNA
ggcctgatggccgaccccatgaaggtg

SEQ ID NO: 34210 - RNA, 27 nt, synthetic construct
  misc_feature 1..27: note = Serine/threonine-protein kinase Sgk1 (62-70)
  source 1..27: mol_type = other RNA
ggcctgaacgacttcatccagaagatc

SEQ ID NO: 34211 - RNA, 27 nt, synthetic construct
  misc_feature 1..27: note = MORC family CW-type zinc finger protein 4 (519-527)
  source 1..27: mol_type = other RNA
ggcctgaacaacaagaccatcgggtac

SEQ ID NO: 34212 - RNA, 33 nt, synthetic construct
  misc_feature 1..33: note = DNA polymerase alpha subunit B (470-480)
  source 1..33: mol_type = other RNA
ggcctgaccagcaccgacctcctgttccacctg

SEQ ID NO: 34213 - RNA, 33 nt, synthetic construct
  misc_feature 1..33: note = C-terminal-binding protein 2 (814-824)
  source 1..33: mol_type = other RNA
ggcctggtggacgagaaggccctcgcccaggcg

SEQ ID NO: 34214 - RNA, 30 nt, synthetic construct
  misc_feature 1..30: note = Staphylococcal nuclease domain-containing protein 1 (829-838)
  source 1..30: mol_type = other RNA
ggcctggtgaaggaggggctcgtcatggtg

SEQ ID NO: 34215 - RNA, 30 nt, synthetic construct
  misc_feature 1..30: note = Basic salivary proline-rich protein 2 (70-79)
  source 1..30: mol_type = other RNA
ggccccccgcccccccccgggaagccgcag

SEQ ID NO: 34216 - RNA, 33 nt, synthetic construct
  misc_feature 1..33: note = Salivary acidic proline-rich phosphoprotein 1/2 (137-147)
  source 1..33: mol_type = other RNA
ggccccccgcccccccccccggggaagccccag

SEQ ID NO: 34217 - RNA, 36 nt, synthetic construct
  misc_feature 1..36: note = Salivary acidic proline-rich phosphoprotein 1/2 (110-121)
  source 1..36: mol_type = other RNA
ggccccccgcagcaggggggccacccccgccccccc

SEQ ID NO: 34218 - RNA, 27 nt, synthetic construct
  misc_feature 1..27: note = Nuclear receptor corepressor 1 (1455-1463)
  source 1..27: mol_type = other RNA
ggccccagcgtgctgcgctccaccctc

SEQ ID NO: 34219 - RNA, 27 nt, synthetic construct
  misc_feature 1..27: note = Histone chaperone ASF1A (103-111)
  source 1..27: mol_type = other RNA
ggccaggagttcatccgcgtggggtac

SEQ ID NO: 34220 - RNA, 27 nt, synthetic construct
  misc_feature 1..27: note = Beclin-1 (280-288)
  source 1..27: mol_type = other RNA
ggccagttcgggaccatcaacaacttc

SEQ ID NO: 34221 - RNA, 36 nt, synthetic construct
  misc_feature 1..36: note = Putative methyltransferase-like protein 15P1 (77-88)
  source 1..36: mol_type = other RNA
ggccagttcagccaggccgaggccctgctcatgaag

SEQ ID NO: 34222 - RNA, 27 nt, synthetic construct
  misc_feature 1..27: note = Dual specificity tyrosine-phosphorylation-regulated kinase 1A (32-40)
  source 1..27: mol_type = other RNA
ggccagatgccccacagccaccagtac

SEQ ID NO: 34223 - RNA, 33 nt, synthetic construct
  misc_feature 1..33: note = Myosin light polypeptide 6 (46-56)
  source 1..33: mol_type = other RNA
ggccagaaccccaccaacgccgaggtgctgaag

SEQ ID NO: 34224 - RNA, 36 nt, synthetic construct
  misc_feature 1..36: note = RNA-binding protein EWS (221-232)
  source 1..36: mol_type = other RNA
ggccagcagagctcctacgggcagcagagctcctac

SEQ ID NO: 34225 - RNA, 27 nt, synthetic construct
  misc_feature 1..27: note = Putative peripheral benzodiazepine receptor-related protein (21-29)
  source 1..27: mol_type = other RNA
ggccagtgggggggcgggagccactac

SEQ ID NO: 34226 - RNA, 33 nt, synthetic construct
  misc_feature 1..33: note = Store-operated calcium entry-associated regulatory factor (197-207)
  source 1..33: mol_type = other RNA
ggccagtacagccccccgccctactccgagtac

SEQ ID NO: 34227 - RNA, 30 nt, synthetic construct
  misc_feature 1..30: note = EH domain-containing protein 1 (65-74)
  source 1..30: mol_type = other RNA
ggccagtacagcaccgggaagaccacgttc

SEQ ID NO: 34228 - RNA, 27 nt, synthetic construct
  misc_feature 1..27: note = Protein FAM216A (60-68)
  source 1..27: mol_type = other RNA
ggcagcgaccgcatcaaggacgggtac

SEQ ID NO: 34229 - RNA, 27 nt, synthetic construct
  misc_feature 1..27: note = Splicing factor 3B subunit 1 (46-54)
  source 1..27: mol_type = other RNA
ggcagcgactcccgcttcgccgggtac

SEQ ID NO: 34230 - RNA, 27 nt, synthetic construct
  misc_feature 1..27: note = AP-2 complex subunit beta (568-576)
  source 1..27: mol_type = other RNA
ggcagcctggcctccgtgtaccacaag

SEQ ID NO: 34231 - RNA, 27 nt, synthetic construct
  misc_feature 1..27: note = L-lactate dehydrogenase A chain (68-76)
  source 1..27: mol_type = other RNA
ggcagcctgttcctccgcacccccaag

SEQ ID NO: 34232 - RNA, 27 nt, synthetic construct
  misc_feature 1..27: note = PHD and RING finger domain-containing protein 1 (519-527)
  source 1..27: mol_type = other RNA
ggcagctccgacgtgatcatccaccgc

SEQ ID NO: 34233 - RNA, 30 nt, synthetic construct
  misc_feature 1..30: note = E3 ubiquitin-protein ligase TRAF7 (378-387)
  source 1..30: mol_type = other RNA
ggcagctacgacccccagcagatcttcaag

SEQ ID NO: 34234 - RNA, 33 nt, synthetic construct
  misc_feature 1..33: note = Voltage-dependent anion-selective channel protein 3 (187-197)
  source 1..33: mol_type = other RNA
ggcaccgagttcgggggcagcatctaccagaag

SEQ ID NO: 34235 - RNA, 33 nt, synthetic construct
  misc_feature 1..33: note = Iron-responsive element-binding protein 2 (740-750)
  source 1..33: mol_type = other RNA
ggcaccttcgccaacatcaagctgttcaacaag

SEQ ID NO: 34236 - RNA, 33 nt, synthetic construct
  misc_feature 1..33: note = Cyclin-dependent kinase 1 (191-201)
  source 1..33: mol_type = other RNA
ggcaccatcttcgccgagctggccaccaagaag

SEQ ID NO: 34237 - RNA, 27 nt, synthetic construct
  misc_feature 1..27: note = AP-1 complex subunit beta-1 (568-576)
  source 1..27: mol_type = other RNA
ggcaccctggccagcgtgtaccacaag

SEQ ID NO: 34238 - RNA, 27 nt, synthetic construct
  misc_feature 1..27: note = Alpha-ketoglutarate-dependent dioxygenase FTO (329-337)
  source 1..27: mol_type = other RNA
ggcaccctggactacatcctccagcgc

SEQ ID NO: 34239 - RNA, 36 nt, synthetic construct
  misc_feature 1..36: note = Structural maintenance of chromosomes protein 4 (663-674)
  source 1..36: mol_type = other RNA
ggcaccatgaccgggggcgggagcaaggtgatgaag

SEQ ID NO: 34240 - RNA, 27 nt, synthetic construct
  misc_feature 1..27: note = Sigma non-opioid intracellular receptor 1 (31-39)
  source 1..27: mol_type = other RNA
ggcacccagagcttcgtgttccagcgc

SEQ ID NO: 34241 - RNA, 27 nt, synthetic construct
  misc_feature 1..27: note = F-box/WD repeat-containing protein 11 (19-27)
  source 1..27: mol_type = other RNA
ggcaccagctccgtgatcgtcagccgc

SEQ ID NO: 34242 - RNA, 33 nt, synthetic construct
  misc_feature 1..33: note = Protein O-GlcNAcase (729-739)
  source 1..33: mol_type = other RNA
ggcaccgtggacgtcacccccttcatcaagaag

SEQ ID NO: 34243 - RNA, 30 nt, synthetic construct
  misc_feature 1..30: note = Transcription factor BTF3 (75-84)
  source 1..30: mol_type = other RNA
ggcaccgtgatccacttcaacaaccccaag

SEQ ID NO: 34244 - RNA, 27 nt, synthetic construct
  misc_feature 1..27: note = Peptidyl-prolyl cis-trans isomerase FKBP4 (277-285)
  source 1..27: mol_type = other RNA
ggcaccgtgtacttcaaggaggggaag

SEQ ID NO: 34245 - RNA, 27 nt, synthetic construct
  misc_feature 1..27: note = Tubulin-folding cofactor B (7-15)
  source 1..27: mol_type = other RNA
ggcgtggacgacaagttctacagcaag

SEQ ID NO: 34246 - RNA, 33 nt, synthetic construct
  misc_feature 1..33: note = Activating signal cointegrator 1 complex subunit 1 (166-176)
  source 1..33: mol_type = other RNA
ggcgtggacagctccatcttccagaaccccaag

SEQ ID NO: 34247 - RNA, 27 nt, synthetic construct
  misc_feature 1..27: note = Eukaryotic translation initiation factor 4 gamma 1 (757-765)
  source 1..27: mol_type = other RNA
ggcgtgatcgacctgatcttcgagaag

SEQ ID NO: 34248 - RNA, 27 nt, synthetic construct
  misc_feature 1..27: note = 40S ribosomal protein S19 (86-94)
  source 1..27: mol_type = other RNA
ggcgtgatgcccagccacttctcccgc

SEQ ID NO: 34249 - RNA, 27 nt, synthetic construct
  misc_feature 1..27: note = Heat shock cognate 71 kDa protein (408-416)
  source 1..27: mol_type = other RNA
ggcgtgatgaccgtcctgatcaagcgc

SEQ ID NO: 34250 - RNA, 27 nt, synthetic construct
  misc_feature 1..27: note = Polypyrimidine tract-binding protein 3 (285-293)
  source 1..27: mol_type = other RNA
ggcgtgtacggggacgtccaccgcgtg

SEQ ID NO: 34251 - RNA, 30 nt, synthetic construct
  misc_feature 1..30: note = Polypyrimidine tract-binding protein 2 (308-317)
  source 1..30: mol_type = other RNA
ggcgtgtacggggacgtccagcgcgtgaag

SEQ ID NO: 34252 - RNA, 27 nt, synthetic construct
  misc_feature 1..27: note = Mitochondrial genome maintenance exonuclease 1 (204-212)
  source 1..27: mol_type = other RNA
ggctacatcgagagcgtgcagcacatc

SEQ ID NO: 34253 - RNA, 27 nt, synthetic construct
  misc_feature 1..27: note = Catenin beta-1 (186-194)
  source 1..27: mol_type = other RNA
cacgccatcatgcgcagcccccagatg

SEQ ID NO: 34254 - RNA, 27 nt, synthetic construct
  misc_feature 1..27: note = Adenylyl cyclase-associated protein 1 (417-425)
  source 1..27: mol_type = other RNA
cacgcctacctgagcaagaactccctc

SEQ ID NO: 34255 - RNA, 27 nt, synthetic construct
  misc_feature 1..27: note = Surfeit locus protein 4 (232-240)
  source 1..27: mol_type = other RNA
cacgacttcctgaagtacgacttcttc

SEQ ID NO: 34256 - RNA, 27 nt, synthetic construct
  misc_feature 1..27: note = NEDD4-binding protein 2-like 1 (64-72)
  source 1..27: mol_type = other RNA
cacgacttcccccgcgccctgatcttc

SEQ ID NO: 34257 - RNA, 27 nt, synthetic construct
  misc_feature 1..27: note = Cold shock domain-containing protein E1 (507-515)
  source 1..27: mol_type = other RNA
cacgacaaggagatcttcttccactac

SEQ ID NO: 34258 - RNA, 27 nt, synthetic construct
  misc_feature 1..27: note = Protein Niban (200-208)
  source 1..27: mol_type = other RNA
cacgactacatgaagcagatgaccttc

SEQ ID NO: 34259 - RNA, 27 nt, synthetic construct
  misc_feature 1..27: note = Zinc finger and BTB domain-containing protein 38 (210-218)
  source 1..27: mol_type = other RNA
cacgaggccgagcccgtgcgcaccctg

SEQ ID NO: 34260 - RNA, 30 nt, synthetic construct
  misc_feature 1..30: note = Synaptic vesicle membrane protein VAT-1 homolog (222-231)
  source 1..30: mol_type = other RNA
cacgaggccctgaaggagaacggcgtgacc

SEQ ID NO: 34261 - RNA, 27 nt, synthetic construct
  misc_feature 1..27: note = Protein sel-1 homolog 3 (891-899)
  source 1..27: mol_type = other RNA
cacgaggccctgctctactacgtgctg

SEQ ID NO: 34262 - RNA, 30 nt, synthetic construct
  misc_feature 1..30: note = Nuclear migration protein nudC (79-88)
  source 1..30: mol_type = other RNA
cacgaggcccagctgaagaacggcagcctc

SEQ ID NO: 34263 - RNA, 27 nt, synthetic construct
  misc_feature 1..27: note = EH domain-containing protein 1 (210-218)
  source 1..27: mol_type = other RNA
cacgaggacaagatccgcgtggtcctg

SEQ ID NO: 34264 - RNA, 27 nt, synthetic construct
  misc_feature 1..27: note = Exosome complex exonuclease RRP44 (679-687)
  source 1..27: mol_type = other RNA
cacgaggagttcagcgagcacgccctg

SEQ ID NO: 34265 - RNA, 27 nt, synthetic construct
  misc_feature 1..27: note = Repressor of RNA polymerase III transcription MAF1 homolog (116-124)
  source 1..27: mol_type = other RNA
cacgagttcagccgcgagccctccctg

SEQ ID NO: 34266 - RNA, 27 nt, synthetic construct
  misc_feature 1..27: note = Versican core protein (1534-1542)
  source 1..27: mol_type = other RNA
cacgagcacaccgagcccgtgagcctg

SEQ ID NO: 34267 - RNA, 27 nt, synthetic construct
  misc_feature 1..27: note = Sphingolipid delta(4)-desaturase DES1 (89-97)
  source 1..27: mol_type = other RNA
cacgagatcgcccacaacgccgcgttc

SEQ ID NO: 34268 - RNA, 30 nt, synthetic construct
  misc_feature 1..30: note = Histone-lysine N-methyltransferase 2E (353-362)
  source 1..30: mol_type = other RNA
cacgagatccaggacggcaccatccacctg

SEQ ID NO: 34269 - RNA, 27 nt, synthetic construct
  misc_feature 1..27: note = Endothelial PAS domain-containing protein 1 (39-47)
  source 1..27: mol_type = other RNA
cacgagctgcccctcccgcacagcgtg

SEQ ID NO: 34270 - RNA, 30 nt, synthetic construct
  misc_feature 1..30: note = ATP-dependent RNA helicase DHX8 (1152-1161)
  source 1..30: mol_type = other RNA
cacgagctggtgctcaccaccaaggagtac

SEQ ID NO: 34271 - RNA, 24 nt, synthetic construct
  misc_feature 1..24: note = E3 ubiquitin-protein ligase RNF213 (1247-1254)
  source 1..24: mol_type = other RNA
cacgagatgatcatcctgaagctc

SEQ ID NO: 34272 - RNA, 27 nt, synthetic construct
  misc_feature 1..27: note = Histone-lysine N-methyltransferase NSD2 (449-457)
  source 1..27: mol_type = other RNA
cacgagaacgacatcacccacttctac

SEQ ID NO: 34273 - RNA, 27 nt, synthetic construct
  misc_feature 1..27: note = Sorting nexin-6 (212-220)
  source 1..27: mol_type = other RNA
cacgagcgcaccttcctgctcgagtac

SEQ ID NO: 34274 - RNA, 27 nt, synthetic construct
  misc_feature 1..27: note = Heterogeneous nuclear ribonucleoprotein K (415-423)
  source 1..27: mol_type = other RNA
cacgagagcggcgcctccatcaagatc

SEQ ID NO: 34275 - RNA, 27 nt, synthetic construct
  misc_feature 1..27: note = Amyloid-like protein 2 (692-700)
  source 1..27: mol_type = other RNA
cacggctacgagaaccccacctacaag

SEQ ID NO: 34276 - RNA, 27 nt, synthetic construct
  misc_feature 1..27: note = Transcription initiation factor TFIID subunit 4 (42-50)
  source 1..27: mol_type = other RNA
cacctggccccccgcaccccggaggtg

SEQ ID NO: 34277 - RNA, 27 nt, synthetic construct
  misc_feature 1..27: note = Cysteine and histidine-rich protein 1 (106-114)
  source 1..27: mol_type = other RNA
cacctgggccccgaggggcgcagcgtg

SEQ ID NO: 34278 - RNA, 30 nt, synthetic construct
  misc_feature 1..30: note = Formin-like protein 2 (244-253)
  source 1..30: mol_type = other RNA
cacccccacgccgtgaacgagatcgccctg

SEQ ID NO: 34279 - RNA, 27 nt, synthetic construct
  misc_feature 1..27: note = KRR1 small subunit processome component homolog (214-222)
  source 1..27: mol_type = other RNA
caccccatctacaacatcaagagcctg

SEQ ID NO: 34280 - RNA, 30 nt, synthetic construct
  misc_feature 1..30: note = HLA class I histocompatibility antigen, Cw-7 alpha chain (216-225)
  source 1..30: mol_type = other RNA
caccccctgagcgaccacgaggccaccctc

SEQ ID NO: 34281 - RNA, 27 nt, synthetic construct
  misc_feature 1..27: note = V-type proton ATPase 116 kDa subunit a isoform 3 (715-723)
  source 1..27: mol_type = other RNA
caccaggccatccacaccatcgagttc

SEQ ID NO: 34282 - RNA, 27 nt, synthetic construct
  misc_feature 1..27: note = Dymeclin (278-286)
  source 1..27: mol_type = other RNA
caccagaacagcaacatccgcacctac

SEQ ID NO: 34283 - RNA, 24 nt, synthetic construct
  misc_feature 1..24: note = WD repeat-containing protein 1 (59-66)
  source 1..24: mol_type = other RNA
caccaggtggtcgtggccaagtac

SEQ ID NO: 34284 - RNA, 27 nt, synthetic construct
  misc_feature 1..27: note = HLA class I histocompatibility antigen, A-2 alpha chain (73-81)
  source 1..27: mol_type = other RNA
caccgcgtggacctgggcaccctccgg

SEQ ID NO: 34285 - RNA, 24 nt, synthetic construct
  misc_feature 1..24: note = Endoplasmic reticulum resident protein 44 (95-102)
  source 1..24: mol_type = other RNA
cacagcgacatcgcccagcgctac

SEQ ID NO: 34286 - RNA, 27 nt, synthetic construct
  misc_feature 1..27: note = Histone deacetylase 4 (715-723)
  source 1..27: mol_type = other RNA
cacagcgaggcccacaccctgctctac

SEQ ID NO: 34287 - RNA, 27 nt, synthetic construct
  misc_feature 1..27: note = Nucleolar protein 10 (122-130)
  source 1..27: mol_type = other RNA
cacagccagtccggcttctactacaag

SEQ ID NO: 34288 - RNA, 24 nt, synthetic construct
  misc_feature 1..24: note = Eukaryotic translation initiation factor 3 subunit F (182-189)
  source 1..24: mol_type = other RNA
cacagcgtgctgatccacgagtac

SEQ ID NO: 34289 - RNA, 27 nt, synthetic construct
  misc_feature 1..27: note = Dual specificity protein phosphatase 5 (234-242)
  source 1..27: mol_type = other RNA
cacaccgccgacatcagctcccacttc

SEQ ID NO: 34290 - RNA, 30 nt, synthetic construct
  misc_feature 1..30: note = AP-3 complex subunit delta-1 (383-392)
  source 1..30: mol_type = other RNA
cacgtggacaaggccgagggcaccacctac

SEQ ID NO: 34291 - RNA, 27 nt, synthetic construct
  misc_feature 1..27: note = Rac GTPase-activating protein 1 (480-488)
  source 1..27: mol_type = other RNA
cacgtgatcgagaacagcaacgccttc

SEQ ID NO: 34292 - RNA, 27 nt, synthetic construct
  misc_feature 1..27: note = T-complex protein 1 subunit epsilon (135-143)
  source 1..27: mol_type = other RNA
cacgtgatcgagaccctgatcggcaag

SEQ ID NO: 34293 - RNA, 27 nt, synthetic construct
  misc_feature 1..27: note = Triple functional domain protein (477-485)
  source 1..27: mol_type = other RNA
cacgtgctggacgtcatccacgaggtg

SEQ ID NO: 34294 - RNA, 27 nt, synthetic construct
  misc_feature 1..27: note = Manganese-transporting ATPase 13A1 (956-964)
  source 1..27: mol_type = other RNA
atcgccgcccccttcaccagcaagctg

SEQ ID NO: 34295 - RNA, 45 nt, synthetic construct
  misc_feature 1..45: note = Solute carrier family 2, facilitated glucose transporter member 1 (21-35)
  source 1..45: mol_type = other RNA
atcgcccaggtgttcggcctggacagcatcatggggaacaaggac

SEQ ID NO: 34296 - RNA, 24 nt, synthetic construct
  misc_feature 1..24: note = Insulin receptor substrate 2 (1323-1330)
  source 1..24: mol_type = other RNA
atcgacttcctgagccaccacctc

SEQ ID NO: 34297 - RNA, 24 nt, synthetic construct
  misc_feature 1..24: note = Neuroblast differentiation-associated protein AHNAK (4419-4426)
  source 1..24: mol_type = other RNA
atcgacatcaagggccccagcctg

SEQ ID NO: 34298 - RNA, 27 nt, synthetic construct
  misc_feature 1..27: note = Tripeptidyl-peptidase 2 (1087-1095)
  source 1..27: mol_type = other RNA
atcgaccagaccgccctggccgtgtac

SEQ ID NO: 34299 - RNA, 33 nt, synthetic construct
  misc_feature 1..33: note = U5 small nuclear ribonucleoprotein 200 kDa helicase (803-813)
  source 1..33: mol_type = other RNA
atcgaggagcccagcgccaagatcaacgtgctg

SEQ ID NO: 34300 - RNA, 27 nt, synthetic construct
  misc_feature 1..27: note = Structural maintenance of chromosomes protein 1A (7-15)
  source 1..27: mol_type = other RNA
atcgagatcgagaacttcaagagctac

SEQ ID NO: 34301 - RNA, 24 nt, synthetic construct
  misc_feature 1..24: note = Casein kinase I isoform delta (51-58)
  source 1..24: mol_type = other RNA
atcgagagcaagatctacaagatg

SEQ ID NO: 34302 - RNA, 24 nt, synthetic construct
  misc_feature 1..24: note = Protein S100-A9 (12-19)
  source 1..24: mol_type = other RNA
atcgagaccatcatcaacaccttc

SEQ ID NO: 34303 - RNA, 30 nt, synthetic construct
  misc_feature 1..30: note = Probable UDP-sugar transporter protein SLC35A5 (264-273)
  source 1..30: mol_type = other RNA
atcttcatccagaacagcaagctgtacttc

SEQ ID NO: 34304 - RNA, 30 nt, synthetic construct
  misc_feature 1..30: note = Pre-mRNA-processing-splicing factor 8 (1809-1818)
  source 1..30: mol_type = other RNA
atcttcaacccccgcaccggccagctgttc

SEQ ID NO: 34305 - RNA, 39 nt, synthetic construct
  misc_feature 1..39: note = ATP synthase-coupling factor 6, mitochondrial (25-37)
  source 1..39: mol_type = other RNA
atcggcgtgaccgccgtcgccttcaacaaggagctggac

SEQ ID NO: 34306 - RNA, 27 nt, synthetic construct
  misc_feature 1..27: note = DNA damage-binding protein 1 (793-801)
  source 1..27: mol_type = other RNA
atcatcgaccagcacaccttcgaggtg

SEQ ID NO: 34307 - RNA, 27 nt, synthetic construct
  misc_feature 1..27: note = 26S proteasome non-ATPase regulatory subunit 2 (809-817)
  source 1..27: mol_type = other RNA
atcatcctgggcaagagccactacgtg

SEQ ID NO: 34308 - RNA, 36 nt, synthetic construct
  misc_feature 1..36: note = Elongation factor 1-alpha 1 (178-189)
  source 1..36: mol_type = other RNA
atcaagaagatcggctacaaccccgacaccgtggcc

SEQ ID NO: 34309 - RNA, 33 nt, synthetic construct
  misc_feature 1..33: note = Probable ATP-dependent RNA helicase DDX60-like (1497-1507)
  source 1..33: mol_type = other RNA
atcctggccgagctccccgaggacttcaaggcc

SEQ ID NO: 34310 - RNA, 27 nt, synthetic construct
  misc_feature 1..27: note = Interferon-induced GTP-binding protein Mx2 (436-444)
  source 1..27: mol_type = other RNA
atcctggccaccaacacccagaaggtg

SEQ ID NO: 34311 - RNA, 33 nt, synthetic construct
  misc_feature 1..33: note = Eukaryotic translation initiation factor 4 gamma 3 (389-399)
  source 1..33: mol_type = other RNA
atcctggagaaccccccggaggagatgaagctc

SEQ ID NO: 34312 - RNA, 27 nt, synthetic construct
  misc_feature 1..27: note = ATP-dependent RNA helicase DDX42 (333-341)
  source 1..27: mol_type = other RNA
atcctgatcgaccccatccgcgtggtc

SEQ ID NO: 34313 - RNA, 27 nt, synthetic construct
  misc_feature 1..27: note = Phosphorylated CTD-interacting factor 1 (267-275)
  source 1..27: mol_type = other RNA
atcatgaacgacatccccatccgcctg

SEQ ID NO: 34314 - RNA, 27 nt, synthetic construct
  misc_feature 1..27: note = RNA polymerase-associated protein CTR9 homolog (124-132)
  source 1..27: mol_type = other RNA
atcatgtacgaccagaaccacctgctc

SEQ ID NO: 34315 - RNA, 51 nt, synthetic construct
  misc_feature 1..51: note = Cystatin-A (2-18)
  source 1..51: mol_type = other RNA
atccccggcgggctgagcgaggccaagccggccacccccgagatccaggag

SEQ ID NO: 34316 - RNA, 30 nt, synthetic construct
  misc_feature 1..30: note = Splicing factor U2AF 65 kDa subunit (413-422)
  source 1..30: mol_type = other RNA
atcccccgcccggtggacggcgtcgaggtg

SEQ ID NO: 34317 - RNA, 27 nt, synthetic construct
  misc_feature 1..27: note = Membrane-bound transcription factor site-1 protease (189-197)
  source 1..27: mol_type = other RNA
atcccccgccaggtggcccagaccctg

SEQ ID NO: 34318 - RNA, 33 nt, synthetic construct
  misc_feature 1..33: note = Cytospin-A (862-872)
  source 1..33: mol_type = other RNA
atcccccgcaccccgctgagcccctcccccatg

SEQ ID NO: 34319 - RNA, 33 nt, synthetic construct
  misc_feature 1..33: note = Filamin-A (1569-1579)
  source 1..33: mol_type = other RNA
atccaggacaaccacgacggcacctacaccgtg

SEQ ID NO: 34320 - RNA, 33 nt, synthetic construct
  misc_feature 1..33: note = UBX domain-containing protein 4 (322-332)
  source 1..33: mol_type = other RNA
atccagttccgcctgcccgacggcagctccttc

SEQ ID NO: 34321 - RNA, 30 nt, synthetic construct
  misc_feature 1..30: note = Thyroid receptor-interacting protein 11 (87-96)
  source 1..30: mol_type = other RNA
atccagatcaagcagcagagcacctcctac

SEQ ID NO: 34322 - RNA, 27 nt, synthetic construct
  misc_feature 1..27: note = Coatomer subunit delta (393-401)
  source 1..27: mol_type = other RNA
atccaggtgaccaaggtcacccaggtg

SEQ ID NO: 34323 - RNA, 27 nt, synthetic construct
  misc_feature 1..27: note = Kinesin-like protein KIF11 (400-408)
  source 1..27: mol_type = other RNA
atcagcgaggagaacttccgcgtgatg

SEQ ID NO: 34324 - RNA, 42 nt, synthetic construct
  misc_feature 1..42: note = FAST kinase domain-containing protein 2 (542-555)
  source 1..42: mol_type = other RNA
atcagcgagctgctcacctccgacgacatgaagaacgcctac

SEQ ID NO: 34325 - RNA, 27 nt, synthetic construct
  misc_feature 1..27: note = LEM domain-containing protein 2 (23-31)
  source 1..27: mol_type = other RNA
atcaccgacaccacgcgcgacgtgtac

SEQ ID NO: 34326 - RNA, 48 nt, synthetic construct
  misc_feature 1..48: note = Galectin-3 (132-147)
  source 1..48: mol_type = other RNA
atcaccatcctgggcaccgtgaagcccaacgccaaccgcatcgccctc

SEQ ID NO: 34327 - RNA, 27 nt, synthetic construct
  misc_feature 1..27: note = NADH dehydrogenase (ubiquinone) 1 beta subcomplex subunit 10 (34-42)
  source 1..27: mol_type = other RNA
atcgtggaccgccccgtcaccctggtg

SEQ ID NO: 34328 - RNA, 27 nt, synthetic construct
  misc_feature 1..27: note = Cell division cycle protein 27 homolog (695-703)
  source 1..27: mol_type = other RNA
atcgtgatcgaccccaagaacccgctg

SEQ ID NO: 34329 - RNA, 42 nt, synthetic construct
  misc_feature 1..42: note = Macrophage migration inhibitory factor (3-16)
  source 1..42: mol_type = other RNA
atcgtgaacaccaacgtcccccgcgccagcgtgccggacggc

SEQ ID NO: 34330 - RNA, 30 nt, synthetic construct
  misc_feature 1..30: note = Solute carrier family 12 member 6 (219-228)
  source 1..30: mol_type = other RNA
atctacgccggcgccatcaagagctccttc

SEQ ID NO: 34331 - RNA, 27 nt, synthetic construct
  misc_feature 1..27: note = ATP-dependent RNA helicase DHX29 (1317-1325)
  source 1..27: mol_type = other RNA
atctacttccaggcccccgtgaagatc

SEQ ID NO: 34332 - RNA, 27 nt, synthetic construct
  misc_feature 1..27: note = Tripeptidyl-peptidase 2 (478-486)
  source 1..27: mol_type = other RNA
atctacctgcgcgaccccgtgcaggtc

SEQ ID NO: 34333 - RNA, 27 nt, synthetic construct
  misc_feature 1..27: note = BCL2/adenovirus E1B 19 kDa protein-interacting protein 3 (38-46)
  source 1..27: mol_type = other RNA
atctacaacggcgacatggagaagatc

SEQ ID NO: 34334 - RNA, 27 nt, synthetic construct
  misc_feature 1..27: note = Serine/threonine-protein phosphatase 2A 56 kDa regulatory subunit gamma isoform (91-99)
  source 1..27: mol_type = other RNA
atctaccccgaggtggtccacatgttc

SEQ ID NO: 34335 - RNA, 33 nt, synthetic construct
  misc_feature 1..33: note = Flotillin-2 (104-114)
  source 1..33: mol_type = other RNA
atctaccaggaccgcgaccagttcgccaagctg

SEQ ID NO: 34336 - RNA, 27 nt, synthetic construct
  misc_feature 1..27: note = Bardet-Biedl syndrome 4 protein (45-53)
  source 1..27: mol_type = other RNA
atctaccagaaggccttcgagcacctg

SEQ ID NO: 34337 - RNA, 27 nt, synthetic construct
  misc_feature 1..27: note = Signal transducer and activator of transcription 6 (87-95)
  source 1..27: mol_type = other RNA
atctaccagcgcgaccccctgaagctc

SEQ ID NO: 34338 - RNA, 27 nt, synthetic construct
  misc_feature 1..27: note = Progestin and adipoQ receptor family member 4 (52-60)
  source 1..27: mol_type = other RNA
atctacacccacggcctggccctcctg

SEQ ID NO: 34339 - RNA, 24 nt, synthetic construct
  misc_feature 1..24: note = 40S ribosomal protein S23 (29-36)
  source 1..24: mol_type = other RNA
aaggcccacctgggcaccgccctc

SEQ ID NO: 34340 - RNA, 27 nt, synthetic construct
  misc_feature 1..27: note = Peroxisomal membrane protein PMP34 (213-221)
  source 1..27: mol_type = other RNA
aaggccatcgccaccaccgtgacgtac

SEQ ID NO: 34341 - RNA, 27 nt, synthetic construct
  misc_feature 1..27: note = Protein PRRC2C (2255-2263)
  source 1..27: mol_type = other RNA
aaggcctgggagaacagccccaacgtg

SEQ ID NO: 34342 - RNA, 30 nt, synthetic construct
  misc_feature 1..30: note = Polycystic kidney disease and receptor for egg jelly-related protein (701-710)
  source 1..30: mol_type = other RNA
aaggacttcctgcccgccggctacctcctg

SEQ ID NO: 34343 - RNA, 27 nt, synthetic construct
  misc_feature 1..27: note = FERM domain-containing protein 6 (545-553)
  source 1..27: mol_type = other RNA
aaggacttcctgcgcatcgccggcctc

SEQ ID NO: 34344 - RNA, 33 nt, synthetic construct
  misc_feature 1..33: note = Microtubule-actin cross-linking factor 1, isoforms 1/2/3/5 (2405-2415)
  source 1..33: mol_type = other RNA
aaggacaagctgaaggacgccaccgagcgctac

SEQ ID NO: 34345 - RNA, 27 nt, synthetic construct
  misc_feature 1..27: note = Calcium-binding protein 39 (189-197)
  source 1..27: mol_type = other RNA
aaggacctgctcacccgccacaagctg

SEQ ID NO: 34346 - RNA, 27 nt, synthetic construct
  misc_feature 1..27: note = Ribonucleoside-diphosphate reductase subunit M2 B (73-81)
  source 1..27: mol_type = other RNA
aaggacctgccccactggaacaagctc

SEQ ID NO: 34347 - RNA, 27 nt, synthetic construct
  misc_feature 1..27: note = Spectrin beta chain, non-erythrocytic 1 (655-663)
  source 1..27: mol_type = other RNA
aaggacctgaccagcgtgatgcgcctc

SEQ ID NO: 34348 - RNA, 27 nt, synthetic construct
  misc_feature 1..27: note = Plastin-3 (18-26)
  source 1..27: mol_type = other RNA
aaggaggccttcgccaaggtggacctg

SEQ ID NO: 34349 - RNA, 27 nt, synthetic construct
  misc_feature 1..27: note = Protein Red (496-504)
  source 1..27: mol_type = other RNA
aaggaggccctgcccaaggccgcgttc

SEQ ID NO: 34350 - RNA, 30 nt, synthetic construct
  misc_feature 1..30: note = Protein KHNYN (158-167)
  source 1..30: mol_type = other RNA
aaggaggccctgcaggaccccttcaccctc

SEQ ID NO: 34351 - RNA, 27 nt, synthetic construct
  misc_feature 1..27: note = 40S ribosomal protein S15 (65-73)
  source 1..27: mol_type = other RNA
aaggaggcccccccgatggagaagccc

SEQ ID NO: 34352 - RNA, 27 nt, synthetic construct
  misc_feature 1..27: note = Protein transport protein Sec23B (564-572)
  source 1..27: mol_type = other RNA
aaggaggaccccaccagcttccgcctg

SEQ ID NO: 34353 - RNA, 33 nt, synthetic construct
  misc_feature 1..33: note = Tropomyosin alpha-4 chain (228-238)
  source 1..33: mol_type = other RNA
aaggaggagaacgtgggcctgcaccagaccctc

SEQ ID NO: 34354 - RNA, 30 nt, synthetic construct
  misc_feature 1..30: note = Putative methyltransferase NSUN6 (163-172)
  source 1..30: mol_type = other RNA
aaggagttcgacggcaccaaggtgttcctg

SEQ ID NO: 34355 - RNA, 30 nt, synthetic construct
  misc_feature 1..30: note = Sin3 histone deacetylase corepressor complex component SDS3 (137-146)
  source 1..30: mol_type = other RNA
aaggagttcgaggacaagaaggtggagctg

SEQ ID NO: 34356 - RNA, 27 nt, synthetic construct
  misc_feature 1..27: note = Heat shock protein HSP 90-alpha (656-664)
  source 1..27: mol_type = other RNA
aaggagttcgagggcaagaccctggtg

SEQ ID NO: 34357 - RNA, 27 nt, synthetic construct
  misc_feature 1..27: note = Protein S100-A10 (37-45)
  source 1..27: mol_type = other RNA
aaggagttccccggcttcctggagaac

SEQ ID NO: 34358 - RNA, 36 nt, synthetic construct
  misc_feature 1..36: note = Serine palmitoyltransferase 2 (526-537)
  source 1..36: mol_type = other RNA
aaggagatcgacgaggtgggcgacctgctccagctg

SEQ ID NO: 34359 - RNA, 27 nt, synthetic construct
  misc_feature 1..27: note = Melanoma-associated antigen D4 (471-479)
  source 1..27: mol_type = other RNA
aaggagatcgacaaggaggagcacctg

SEQ ID NO: 34360 - RNA, 39 nt, synthetic construct
  misc_feature 1..39: note = Spectrin beta chain, non-erythrocytic 1 (1434-1446)
  source 1..39: mol_type = other RNA
aaggagatcgaggagctgcagagccaggcccaggccctc

SEQ ID NO: 34361 - RNA, 36 nt, synthetic construct
  misc_feature 1..36: note = Calcium/calmodulin-dependent protein kinase type IV (135-146)
  source 1..36: mol_type = other RNA
aaggagatcttcgagacccccaccgagatcagcctg

SEQ ID NO: 34362 - RNA, 27 nt, synthetic construct
  misc_feature 1..27: note = E3 ubiquitin-protein ligase RNF19B (187-195)
  source 1..27: mol_type = other RNA
aaggagatcagcgacctgcactacctc

SEQ ID NO: 34363 - RNA, 27 nt, synthetic construct
  misc_feature 1..27: note = Centromere protein F (392-400)
  source 1..27: mol_type = other RNA
aaggagaaggagttccaggaggagctg

SEQ ID NO: 34364 - RNA, 30 nt, synthetic construct
  misc_feature 1..30: note = Girdin (728-737)
  source 1..30: mol_type = other RNA
aaggagctggagagcgagaaggagcagctc

SEQ ID NO: 34365 - RNA, 30 nt, synthetic construct
  misc_feature 1..30: note = Testin (173-182)
  source 1..30: mol_type = other RNA
aaggagatggagcagttcgtgaagaagtac

SEQ ID NO: 34366 - RNA, 30 nt, synthetic construct
  misc_feature 1..30: note = Leucine-tRNA ligase, cytoplasmic (775-784)
  source 1..30: mol_type = other RNA
aaggagatggtggccaactgggacagcctg

SEQ ID NO: 34367 - RNA, 30 nt, synthetic construct
  misc_feature 1..30: note = SWI/SNF-related matrix-associated actin-dependent regulator of chromatin subfamily B member 1 (277-286)
  source 1..30: mol_type = other RNA
aaggagaacagccccgagaagttcgccctg

SEQ ID NO: 34368 - RNA, 33 nt, synthetic construct
  misc_feature 1..33: note = Squalene monooxygenase (157-167)
  source 1..33: mol_type = other RNA
aaggagcccgaccgcatcgtgggcgagttcctg

SEQ ID NO: 34369 - RNA, 27 nt, synthetic construct
  misc_feature 1..27: note = Calcium uptake protein 2, mitochondrial (204-212)
  source 1..27: mol_type = other RNA
aaggagcccgagatcaacaccaccctg

SEQ ID NO: 34370 - RNA, 27 nt, synthetic construct
  misc_feature 1..27: note = Farnesyl pyrophosphate synthase (39-47)
  source 1..27: mol_type = other RNA
aaggaggtgctggagtacaacgccatc

SEQ ID NO: 34371 - RNA, 24 nt, synthetic construct
  misc_feature 1..24: note = Tetratricopeptide repeat protein 25 (351-358)
  source 1..24: mol_type = other RNA
aaggagtacgacctgcccgacgcc

SEQ ID NO: 34372 - RNA, 30 nt, synthetic construct
  misc_feature 1..30: note = Inhibitor of growth protein 5 (76-85)
  source 1..30: mol_type = other RNA
aaggagtacagcgacgacaaggtgcagctg

SEQ ID NO: 34373 - RNA, 27 nt, synthetic construct
  misc_feature 1..27: note = Son of sevenless homolog 2 (677-685)
  source 1..27: mol_type = other RNA
aaggagtacgtgcagcccgtccagctg

SEQ ID NO: 34374 - RNA, 27 nt, synthetic construct
  misc_feature 1..27: note = Nodal modulator 2 (392-400)
  source 1..27: mol_type = other RNA
aagatcgcccccaacaccccgcagctg

SEQ ID NO: 34375 - RNA, 30 nt, synthetic construct
  misc_feature 1..30: note = Trans-Golgi network integral membrane protein 2 (408-417)
  source 1..30: mol_type = other RNA
aagatcatcgccttcgtgctggagggcaag

SEQ ID NO: 34376 - RNA, 27 nt, synthetic construct
  misc_feature 1..27: note = Interleukin enhancer-binding factor 2 (127-135)
  source 1..27: mol_type = other RNA
aagatcctgcccaccctcgaggccgtg

SEQ ID NO: 34377 - RNA, 27 nt, synthetic construct
  misc_feature 1..27: note = Insulin-like growth factor 2 mRNA-binding protein 3 (552-560)
  source 1..27: mol_type = other RNA
aagatccaggagatcctgacccaggtg

SEQ ID NO: 34378 - RNA, 30 nt, synthetic construct
  misc_feature 1..30: note = WD repeat-containing protein 1 (119-128)
  source 1..30: mol_type = other RNA
aagatctgggacgtgagcgtcaactccgtg

SEQ ID NO: 34379 - RNA, 27 nt, synthetic construct
  misc_feature 1..27: note = Transcription factor SOX-8 (1-9)
  source 1..27: mol_type = other RNA
aagctggccgaccagtacccccacctc

SEQ ID NO: 34380 - RNA, 27 nt, synthetic construct
  misc_feature 1..27: note = 14-3-3 protein theta (11-19)
  source 1..27: mol_type = other RNA
aagctggccgagcaggccgagcgctac

SEQ ID NO: 34381 - RNA, 27 nt, synthetic construct
  misc_feature 1..27: note = Akirin-1 (163-171)
  source 1..27: mol_type = other RNA
aagctggccgagcagtacgagagcttc

SEQ ID NO: 34382 - RNA, 33 nt, synthetic construct
  misc_feature 1..33: note = Akirin-1 (163-173)
  source 1..33: mol_type = other RNA
aagctggccgagcagtacgagagcttcgtgaag

SEQ ID NO: 34383 - RNA, 27 nt, synthetic construct
  misc_feature 1..27: note = V-type proton ATPase subunit C 1 (25-33)
  source 1..27: mol_type = other RNA
aagctggacgccttcgtggagggcgtc

SEQ ID NO: 34384 - RNA, 27 nt, synthetic construct
  misc_feature 1..27: note = Kinetochore-associated protein 1 (1298-1306)
  source 1..27: mol_type = other RNA
aagctgttcggcgagaccaccctcgtg

SEQ ID NO: 34385 - RNA, 27 nt, synthetic construct
  misc_feature 1..27: note = Heterogeneous nuclear ribonucleoprotein A0 (8-16)
  source 1..27: mol_type = other RNA
aagctgttcatcggcgggctcaacgtg

SEQ ID NO: 34386 - RNA, 27 nt, synthetic construct
  misc_feature 1..27: note = Heterogeneous nuclear ribonucleoprotein A1 (15-23)
  source 1..27: mol_type = other RNA
aagctgttcatcggcgggctcagcttc

SEQ ID NO: 34387 - RNA, 30 nt, synthetic construct
  misc_feature 1..30: note = Serine/threonine-protein kinase DCLK2 (534-543)
  source 1..30: mol_type = other RNA
aagctgggcgacttcgggctcgccaccgtg

SEQ ID NO: 34388 - RNA, 27 nt, synthetic construct
  misc_feature 1..27: note = TRPM8 channel-associated factor 1 (199-207)
  source 1..27: mol_type = other RNA
aagctgggcagcgtgcccgtcaccgtg

SEQ ID NO: 34389 - RNA, 27 nt, synthetic construct
  misc_feature 1..27: note = Transformation/transcription domain-associated protein (911-919)
  source 1..27: mol_type = other RNA
aagctgcactacgtggtcaccgaggtg

SEQ ID NO: 34390 - RNA, 33 nt, synthetic construct
  misc_feature 1..33: note = E3 ubiquitin-protein ligase UBR4 (1375-1385)
  source 1..33: mol_type = other RNA
aagctgatcgacgagacccaggacatgctcctg

SEQ ID NO: 34391 - RNA, 27 nt, synthetic construct
  misc_feature 1..27: note = Pericentriolar material 1 protein (412-420)
  source 1..27: mol_type = other RNA
aagctgctcggcgagctgcacaccctg

SEQ ID NO: 34392 - RNA, 27 nt, synthetic construct
  misc_feature 1..27: note = Peptidyl-prolyl cis-trans isomerase FKBP3 (42-50)
  source 1..27: mol_type = other RNA
aagctgctcggcaacatcaagaacgtg

SEQ ID NO: 34393 - RNA, 27 nt, synthetic construct
  misc_feature 1..27: note = Calnexin (166-174)
  source 1..27: mol_type = other RNA
aagctgctcagcaagacccccgagctg

SEQ ID NO: 34394 - RNA, 27 nt, synthetic construct
  misc_feature 1..27: note = Golgin subfamily A member 5 (484-492)
  source 1..27: mol_type = other RNA
aagctgatgggccagatccaccagctc

SEQ ID NO: 34395 - RNA, 27 nt, synthetic construct
  misc_feature 1..27: note = TBC1 domain family member 13 (39-47)
  source 1..27: mol_type = other RNA
aagctgaaccccggcatcgcctacgtg

SEQ ID NO: 34396 - RNA, 27 nt, synthetic construct
  misc_feature 1..27: note = E3 ubiquitin-protein ligase TRIP12 (912-920)
  source 1..27: mol_type = other RNA
aagctgcccgacatcttcagcgtgtac

SEQ ID NO: 34397 - RNA, 30 nt, synthetic construct
  misc_feature 1..30: note = Kelch-like protein 24 (347-356)
  source 1..30: mol_type = other RNA
aagctgcccgagttcaccaagagcgagtac

SEQ ID NO: 34398 - RNA, 27 nt, synthetic construct
  misc_feature 1..27: note = Transmembrane and coiled-coil domain-containing protein 1 (116-124)
  source 1..27: mol_type = other RNA
aagctgcccttcaccccgctcagctac

SEQ ID NO: 34399 - RNA, 30 nt, synthetic construct
  misc_feature 1..30: note = HLA class II histocompatibility antigen, DR beta 5 chain (5-14)
  source 1..30: mol_type = other RNA
aagctgcccggcgggagctacatggccaag

SEQ ID NO: 34400 - RNA, 27 nt, synthetic construct
  misc_feature 1..27: note = Fanconi anemia group I protein (16-24)
  source 1..27: mol_type = other RNA
aagctgcaggagttcctccagaccctg

SEQ ID NO: 34401 - RNA, 27 nt, synthetic construct
  misc_feature 1..27: note = Tyrosine-protein kinase BAZ1B (379-387)
  source 1..27: mol_type = other RNA
aagctgagcgagatccccctcaccctg

SEQ ID NO: 34402 - RNA, 27 nt, synthetic construct
  misc_feature 1..27: note = E3 SUMO-protein ligase CBX4 (347-355)
  source 1..27: mol_type = other RNA
aagctgagccccaccaaggaggccttc

SEQ ID NO: 34403 - RNA, 27 nt, synthetic construct
  misc_feature 1..27: note = PWWP domain-containing protein MUM1 (574-582)
  source 1..27: mol_type = other RNA
aagctggtggagtacatcgtcaaggcc

SEQ ID NO: 34404 - RNA, 27 nt, synthetic construct
  misc_feature 1..27: note = Minor histocompatibility protein HA-1 (532-540)
  source 1..27: mol_type = other RNA
aagctgtacgaccccggccagcagtac

SEQ ID NO: 34405 - RNA, 27 nt, synthetic construct
  misc_feature 1..27: note = Replication factor C subunit 5 (304-312)
  source 1..27: mol_type = other RNA
aagatggccgacatcgagtaccgcctg

SEQ ID NO: 34406 - RNA, 36 nt, synthetic construct
  misc_feature 1..36: note = Interferon-induced transmembrane protein 2 (87-98)
  source 1..36: mol_type = other RNA
aagatggtgggcgacgtcaccggggcccaggcctac

SEQ ID NO: 34407 - RNA, 33 nt, synthetic construct
  misc_feature 1..33: note = U1 small nuclear ribonucleoprotein 70 kDa (87-97)
  source 1..33: mol_type = other RNA
aagatgtgggacccccacaacgacccgaacgcc

SEQ ID NO: 34408 - RNA, 33 nt, synthetic construct
  misc_feature 1..33: note = Myosin-9 (517-527)
  source 1..33: mol_type = other RNA
aagcccgccggcccgcccgggatcctggccctc

SEQ ID NO: 34409 - RNA, 30 nt, synthetic construct
  misc_feature 1..30: note = Transketolase (6-15)
  source 1..30: mol_type = other RNA
aagcccgaccagcagaagctgcaggccctc

SEQ ID NO: 34410 - RNA, 30 nt, synthetic construct
  misc_feature 1..30: note = Calponin-3 (156-165)
  source 1..30: mol_type = other RNA
aagcccttcgaccagaccaccatcagcctg

SEQ ID NO: 34411 - RNA, 33 nt, synthetic construct
  misc_feature 1..33: note = DNA polymerase kappa (36-46)
  source 1..33: mol_type = other RNA
aagcccatcgccgtgggcagcatgtccatgctg

SEQ ID NO: 34412 - RNA, 27 nt, synthetic construct
  misc_feature 1..27: note = Elongation factor 2 (445-453)
  source 1..27: mol_type = other RNA
aagcccatccagcgcaccatcctgatg

SEQ ID NO: 34413 - RNA, 27 nt, synthetic construct
  misc_feature 1..27: note = Galectin-3 (139-147)
  source 1..27: mol_type = other RNA
aagcccaacgccaaccgcatcgccctg

SEQ ID NO: 34414 - RNA, 33 nt, synthetic construct
  misc_feature 1..33: note = Spectrin beta chain, non-erythrocytic 1 (1939-1949)
  source 1..33: mol_type = other RNA
aagccccgcgacgtgagctccgtcgagctgctc

SEQ ID NO: 34415 - RNA, 30 nt, synthetic construct
  misc_feature 1..30: note = Methionine synthase (342-351)
  source 1..30: mol_type = other RNA
aagccccgcgtgccgcccgccaccgccttc

SEQ ID NO: 34416 - RNA, 27 nt, synthetic construct
  misc_feature 1..27: note = Peroxisomal multifunctional enzyme type 2 (565-573)
  source 1..27: mol_type = other RNA
aagcccgtgtacccgggccagaccctg

SEQ ID NO: 34417 - RNA, 24 nt, synthetic construct
  misc_feature 1..24: note = SWI/SNF-related matrix-associated actin-dependent regulator of chromatin subfamily A containing DEAD/H box 1 (68-75)
  source 1..24: mol_type = other RNA
aagccctaccagaaggtgggcctg

SEQ ID NO: 34418 - RNA, 27 nt, synthetic construct
  misc_feature 1..27: note = Programmed cell death protein 6 (116-124)
  source 1..27: mol_type = other RNA
aagcaggccctgagcggcttcgggtac

SEQ ID NO: 34419 - RNA, 27 nt, synthetic construct
  misc_feature 1..27: note = Ubiquitin-associated protein 2-like (939-947)
  source 1..27: mol_type = other RNA
aagcagcacggcgtgaacgtcagcgtg

SEQ ID NO: 34420 - RNA, 27 nt, synthetic construct
  misc_feature 1..27: note = DnaJ homolog subfamily A member 1 (46-54)
  source 1..27: mol_type = other RNA
aagcagatcagccaggcctacgaggtg

SEQ ID NO: 34421 - RNA, 27 nt, synthetic construct
  misc_feature 1..27: note = E3 ubiquitin-protein ligase MGRN1 (240-248)
  source 1..27: mol_type = other RNA
aagcagatcgtggaccgcgtcagctac

SEQ ID NO: 34422 - RNA, 30 nt, synthetic construct
  misc_feature 1..30: note = MICOS complex subunit MIC60 (724-733)
  source 1..30: mol_type = other RNA
aagcagatcgtggagatcctgaccgcctac

SEQ ID NO: 34423 - RNA, 27 nt, synthetic construct
  misc_feature 1..27: note = Transgelin-2 (88-96)
  source 1..27: mol_type = other RNA
aagcagatggagcagatcagccagttc

SEQ ID NO: 34424 - RNA, 30 nt, synthetic construct
  misc_feature 1..30: note = Transgelin-2 (88-97)
  source 1..30: mol_type = other RNA
aagcagatggagcagatcagccagttcctg

SEQ ID NO: 34425 - RNA, 27 nt, synthetic construct
  misc_feature 1..27: note = Zinc finger MIZ domain-containing protein 2 (174-182)
  source 1..27: mol_type = other RNA
aagcagagccaggagctgtcccagtac

SEQ ID NO: 34426 - RNA, 27 nt, synthetic construct
  misc_feature 1..27: note = Heat shock cognate 71 kDa protein (423-431)
  source 1..27: mol_type = other RNA
aagcagacccagaccttcacgacctac

SEQ ID NO: 34427 - RNA, 27 nt, synthetic construct
  misc_feature 1..27: note = Heterogeneous nuclear ribonucleoprotein K (456-464)
  source 1..27: mol_type = other RNA
aagcagtacgccgacgtggagggcttc

SEQ ID NO: 34428 - RNA, 27 nt, synthetic construct
  misc_feature 1..27: note = T-complex protein 1 subunit theta (98-106)
  source 1..27: mol_type = other RNA
aagcagtacggcaacgaggtgttcctg

SEQ ID NO: 34429 - RNA, 27 nt, synthetic construct
  misc_feature 1..27: note = Coatomer subunit beta' (386-394)
  source 1..27: mol_type = other RNA
aagagcttcggctccgcccaggagttc

SEQ ID NO: 34430 - RNA, 33 nt, synthetic construct
  misc_feature 1..33: note = Elongation factor 1-alpha 1 (20-30)
  source 1..33: mol_type = other RNA
aagagcaccaccacgggccacctgatctacaag

SEQ ID NO: 34431 - RNA, 27 nt, synthetic construct
  misc_feature 1..27: note = Translocation protein SEC63 homolog (95-103)
  source 1..27: mol_type = other RNA
aagaccgaccgcgagtaccaggagtac

SEQ ID NO: 34432 - RNA, 27 nt, synthetic construct
  misc_feature 1..27: note = E3 ubiquitin-protein ligase RBBP6 (1474-1482)
  source 1..27: mol_type = other RNA
aagaccgactacgacacccgcgagtac

SEQ ID NO: 34433 - RNA, 33 nt, synthetic construct
  misc_feature 1..33: note = Probable ATP-dependent RNA helicase DDX47 (195-205)
  source 1..33: mol_type = other RNA
aagaccttcctgttcagcgccaccatgacgaag

SEQ ID NO: 34434 - RNA, 27 nt, synthetic construct
  misc_feature 1..27: note = Cytoplasmic dynein 1 heavy chain 1 (872-880)
  source 1..27: mol_type = other RNA
aagaccttcagcgagatcctgaaccgc

SEQ ID NO: 34435 - RNA, 27 nt, synthetic construct
  misc_feature 1..27: note = Chromodomain Y-like protein (93-101)
  source 1..27: mol_type = other RNA
aagaccagccccaaggccctggtgatc

SEQ ID NO: 34436 - RNA, 36 nt, synthetic construct
  misc_feature 1..36: note = Protein polybromo-1 (260-271)
  source 1..36: mol_type = other RNA
aagacctacaacgagcccggcagccaggtgttcaag

SEQ ID NO: 34437 - RNA, 27 nt, synthetic construct
  misc_feature 1..27: note = 60S ribosomal protein L7a (11-19)
  source 1..27: mol_type = other RNA
aaggtggcccccgccccggcggtcgtg

SEQ ID NO: 34438 - RNA, 27 nt, synthetic construct
  misc_feature 1..27: note = Procollagen-lysine,2-oxoglutarate 5-dioxygenase 2 (109-117)
  source 1..27: mol_type = other RNA
aaggtgttcgccggctactacaccaag

SEQ ID NO: 34439 - RNA, 27 nt, synthetic construct
  misc_feature 1..27: note = Nucleolin (370-378)
  source 1..27: mol_type = other RNA
aaggtgttcggcaacgagatcaagctg

SEQ ID NO: 34440 - RNA, 27 nt, synthetic construct
  misc_feature 1..27: note = F-box only protein 28 (103-111)
  source 1..27: mol_type = other RNA
aaggtgatcgacgagatctaccgcgtc

SEQ ID NO: 34441 - RNA, 27 nt, synthetic construct
  misc_feature 1..27: note = Trafficking protein particle complex subunit 5 (81-89)
  source 1..27: mol_type = other RNA
aaggtgctgggcgccctcctgttcgtc

SEQ ID NO: 34442 - RNA, 30 nt, synthetic construct
  misc_feature 1..30: note = Long-chain-fatty-acid-CoA ligase 4 (347-356)
  source 1..30: mol_type = other RNA
aaggtgcaggagatgaactacatccagaag

SEQ ID NO: 34443 - RNA, 27 nt, synthetic construct
  misc_feature 1..27: note = 78 kDa glucose-regulated protein (146-154)
  source 1..27: mol_type = other RNA
aaggtgacccacgccgtcgtgaccgtg

SEQ ID NO: 34444 - RNA, 27 nt, synthetic construct
  misc_feature 1..27: note = 26S proteasome non-ATPase regulatory subunit 11 (409-417)
  source 1..27: mol_type = other RNA
aaggtggtcgacagcctgtacaacaag

SEQ ID NO: 34445 - RNA, 27 nt, synthetic construct
  misc_feature 1..27: note = Tripartite motif-containing protein 34 (162-170)
  source 1..27: mol_type = other RNA
aagtacggcgtgttcgaggagagcctg

SEQ ID NO: 34446 - RNA, 27 nt, synthetic construct
  misc_feature 1..27: note = Tubulin-tyrosine ligase (184-192)
  source 1..27: mol_type = other RNA
aagtacctggagcaccccctcctgctg

SEQ ID NO: 34447 - RNA, 27 nt, synthetic construct
  misc_feature 1..27: note = DNA topoisomerase 3-beta-1 (425-433)
  source 1..27: mol_type = other RNA
aagtacctgcagagcaccatctccttc

SEQ ID NO: 34448 - RNA, 27 nt, synthetic construct
  misc_feature 1..27: note = Lysine-specific demethylase 2A (48-56)
  source 1..27: mol_type = other RNA
aagtacaacgccaacttcgtgaccttc

SEQ ID NO: 34449 - RNA, 27 nt, synthetic construct
  misc_feature 1..27: note = Hermansky-Pudlak syndrome 3 protein (16-24)
  source 1..27: mol_type = other RNA
aagtaccagatcatcaacgaggagttc

SEQ ID NO: 34450 - RNA, 27 nt, synthetic construct
  misc_feature 1..27: note = G/T mismatch-specific thymine DNAosylase (221-229)
  source 1..27: mol_type = other RNA
aagtaccagccccgcatcgccgtgttc

SEQ ID NO: 34451 - RNA, 27 nt, synthetic construct
  misc_feature 1..27: note = Casein kinase II subunit alpha (49-57)
  source 1..27: mol_type = other RNA
aagtacagcgaggtgttcgaggccatc

SEQ ID NO: 34452 - RNA, 36 nt, synthetic construct
  misc_feature 1..36: note = Eukaryotic translation initiation factor 3 subunit D (58-69)
  source 1..36: mol_type = other RNA
aagtacagctcccagttcggcgggggcagccagtac

SEQ ID NO: 34453 - RNA, 27 nt, synthetic construct
  misc_feature 1..27: note = E3 ubiquitin-protein ligase listerin (1408-1416)
  source 1..27: mol_type = other RNA
aagtacgtgagctccgtcctgagcttc

SEQ ID NO: 34454 - RNA, 51 nt, synthetic construct
  misc_feature 1..51: note = Glutathione S-transferase P (194-210)
  source 1..51: mol_type = other RNA
ctggccagccccgagtacgtgaacctcccgatcaacggcaacgggaagcag

SEQ ID NO: 34455 - RNA, 27 nt, synthetic construct
  misc_feature 1..27: note = Msx2-interacting protein (2085-2093)
  source 1..27: mol_type = other RNA
ctggccgtggacaagagcgcctccctc

SEQ ID NO: 34456 - RNA, 24 nt, synthetic construct
  misc_feature 1..24: note = Transducin beta-like protein 3 (781-788)
  source 1..24: mol_type = other RNA
ctggacttcctctggcacaacatg

SEQ ID NO: 34457 - RNA, 27 nt, synthetic construct
  misc_feature 1..27: note = Negative regulator of reactive oxygen species (186-194)
  source 1..27: mol_type = other RNA
ctggacctccagcgcaactacatcttc

SEQ ID NO: 34458 - RNA, 27 nt, synthetic construct
  misc_feature 1..27: note = Protein S100-A9 (66-74)
  source 1..27: mol_type = other RNA
ctggacaccaacgccgacaagcagctc

SEQ ID NO: 34459 - RNA, 30 nt, synthetic construct
  misc_feature 1..30: note = Ubiquitin-60S ribosomal protein L40 (55-64)
  source 1..30: mol_type = other RNA
ctggaggacggccgcaccctcagcgactac

SEQ ID NO: 34460 - RNA, 27 nt, synthetic construct
  misc_feature 1..27: note = Microtubule-actin cross-linking factor 1 isoform X1 (2426-2434)
  source 1..27: mol_type = other RNA
ctggaggaggacagcgcccgcgagatc

SEQ ID NO: 34461 - RNA, 24 nt, synthetic construct
  misc_feature 1..24: note = Coatomer subunit zeta-1 (62-69)
  source 1..24: mol_type = other RNA
ctggagggcctcaccgtggtctac

SEQ ID NO: 34462 - RNA, 27 nt, synthetic construct
  misc_feature 1..27: note = Phosphatidylinositol 4-kinase alpha (113-121)
  source 1..27: mol_type = other RNA
ctggagatccaggacaaggagtacctc

SEQ ID NO: 34463 - RNA, 24 nt, synthetic construct
  misc_feature 1..24: note = Vimentin (220-227)
  source 1..24: mol_type = other RNA
ctggagcgcaaggtggagagcctc

SEQ ID NO: 34464 - RNA, 27 nt, synthetic construct
  misc_feature 1..27: note = BAG family molecular chaperone regulator 2 (29-37)
  source 1..27: mol_type = other RNA
ctggagagcctcgaccagctggagctg

SEQ ID NO: 34465 - RNA, 27 nt, synthetic construct
  misc_feature 1..27: note = Ubiquitin carboxyl-terminal hydrolase 11 (266-274)
  source 1..27: mol_type = other RNA
ctggagaccggccagctcatcatcatg

SEQ ID NO: 34466 - RNA, 27 nt, synthetic construct
  misc_feature 1..27: note = ATP-dependent RNA helicase DDX1 (284-292)
  source 1..27: mol_type = other RNA
ctgatcgtggagcccagccgcgagctc

SEQ ID NO: 34467 - RNA, 27 nt, synthetic construct
  misc_feature 1..27: note = 60S acidic ribosomal protein P0 (102-110)
  source 1..27: mol_type = other RNA
ctgctcgccaacaaggtgcccgccgcg

SEQ ID NO: 34468 - RNA, 27 nt, synthetic construct
  misc_feature 1..27: note = Ras GTPase-activating-like protein IQGAP2 (984-992)
  source 1..27: mol_type = other RNA
ctgctcgcccccgtggtcaaggagatc

SEQ ID NO: 34469 - RNA, 27 nt, synthetic construct
  misc_feature 1..27: note = Nucleolar complex protein 4 homolog (333-341)
  source 1..27: mol_type = other RNA
ctgctcgaccccagcgtgttccacgtc

SEQ ID NO: 34470 - RNA, 27 nt, synthetic construct
  misc_feature 1..27: note = Inositol hexakisphosphate kinase 2 (76-84)
  source 1..27: mol_type = other RNA
ctgctcgagcccttcgtgcaccaggtc

SEQ ID NO: 34471 - RNA, 27 nt, synthetic construct
  misc_feature 1..27: note = TBC1 domain family member 9B (211-219)
  source 1..27: mol_type = other RNA
ctgctcttccccgagagcatccgcgtg

SEQ ID NO: 34472 - RNA, 27 nt, synthetic construct
  misc_feature 1..27: note = Ganglioside GM2 activator (15-23)
  source 1..27: mol_type = other RNA
ctgctcctggccgcccccgcgcaggcc

SEQ ID NO: 34473 - RNA, 27 nt, synthetic construct
  misc_feature 1..27: note = DNA damage-binding protein 1 (1050-1058)
  source 1..27: mol_type = other RNA
ctgctcctggacatgcagaaccgcctg

SEQ ID NO: 34474 - RNA, 27 nt, synthetic construct
  misc_feature 1..27: note = Retinoblastoma-associated protein (476-484)
  source 1..27: mol_type = other RNA
ctgctcaacgacaacatcttccacatg

SEQ ID NO: 34475 - RNA, 30 nt, synthetic construct
  misc_feature 1..30: note = RNA-binding protein 12B (432-441)
  source 1..30: mol_type = other RNA
ctgctctacgacgacaagggcgtggggctg

SEQ ID NO: 34476 - RNA, 27 nt, synthetic construct
  misc_feature 1..27: note = Beta-galactoside alpha-2,6-sialyltransferase 1 (371-379)
  source 1..27: mol_type = other RNA
ctgctctacgagaagaacctggtgaag

SEQ ID NO: 34477 - RNA, 33 nt, synthetic construct
  misc_feature 1..33: note = Junction plakoglobin (16-26)
  source 1..33: mol_type = other RNA
ctgctctaccaggagggcgccaagatggccgtg

SEQ ID NO: 34478 - RNA, 36 nt, synthetic construct
  misc_feature 1..36: note = General transcription factor IIH subunit 5 (60-71)
  source 1..36: mol_type = other RNA
ctgatggaccagaacgccttcagcctcacccagaag

SEQ ID NO: 34479 - RNA, 30 nt, synthetic construct
  misc_feature 1..30: note = Dynactin subunit 5 (164-173)
  source 1..30: mol_type = other RNA
ctgatgatcgacgtgaccaagagctactac

SEQ ID NO: 34480 - RNA, 27 nt, synthetic construct
  misc_feature 1..27: note = Protein SSXT (79-87)
  source 1..27: mol_type = other RNA
ctgcccgccccgcccacccagaacatg

SEQ ID NO: 34481 - RNA, 27 nt, synthetic construct
  misc_feature 1..27: note = N-terminal Xaa-Pro-Lys N-methyltransferase 1 (211-219)
  source 1..27: mol_type = other RNA
ctgcccgacgagatctaccacgtgtac

SEQ ID NO: 34482 - RNA, 27 nt, synthetic construct
  misc_feature 1..27: note = Ran-binding protein 9 (350-358)
  source 1..27: mol_type = other RNA
ctgcccaagcagccgcccctcgccctg

SEQ ID NO: 34483 - RNA, 27 nt, synthetic construct
  misc_feature 1..27: note = E3 ubiquitin-protein ligase RNF216 (406-414)
  source 1..27: mol_type = other RNA
ctgccccgcccggtgccccagaacctc

SEQ ID NO: 34484 - RNA, 30 nt, synthetic construct
  misc_feature 1..30: note = SET domain-containing protein 5 (1382-1391)
  source 1..30: mol_type = other RNA
ctgcccagcgacctccgcaccatctccctg

SEQ ID NO: 34485 - RNA, 27 nt, synthetic construct
  misc_feature 1..27: note = Anaphase-promoting complex subunit 7 (132-140)
  source 1..27: mol_type = other RNA
ctgcccagcgagatcgaggtgaagtac

SEQ ID NO: 34486 - RNA, 27 nt, synthetic construct
  misc_feature 1..27: note = F-box/WD repeat-containing protein 7 (467-475)
  source 1..27: mol_type = other RNA
ctgcagttcgacggcatccacgtggtc

SEQ ID NO: 34487 - RNA, 39 nt, synthetic construct
  misc_feature 1..39: note = Keratin, type I cytoskeletal 10 (222-234)
  source 1..39: mol_type = other RNA
ctgcagatcgacaacgcccgcctcgccgcggacgacttc

SEQ ID NO: 34488 - RNA, 30 nt, synthetic construct
  misc_feature 1..30: note = Double-stranded RNA-binding protein Staufen homolog 1 (119-128)
  source 1..30: mol_type = other RNA
ctgcagaacgagcccctcccggagcgcctg

SEQ ID NO: 34489 - RNA, 45 nt, synthetic construct
  misc_feature 1..45: note = HLA class I histocompatibility antigen, Cw-3 alpha chain (296-310)
  source 1..45: mol_type = other RNA
ctgcgctgggagcccagctcccagccgaccatccccatcgtgggc

SEQ ID NO: 34490 - RNA, 24 nt, synthetic construct
  misc_feature 1..24: note = TRIO and F-actin-binding protein (42-49)
  source 1..24: mol_type = other RNA
ctgaccgacagctccctcaagtac

SEQ ID NO: 34491 - RNA, 27 nt, synthetic construct
  misc_feature 1..27: note = Pleckstrin homology domain-containing family A member 2 (315-323)
  source 1..27: mol_type = other RNA
ctgacccgccccggcagctccagcctc

SEQ ID NO: 34492 - RNA, 27 nt, synthetic construct
  misc_feature 1..27: note = DNA topoisomerase 2-beta (566-574)
  source 1..27: mol_type = other RNA
ctgacctacaacgacttcatcaacaag

SEQ ID NO: 34493 - RNA, 27 nt, synthetic construct
  misc_feature 1..27: note = Suppressor of SWI4 1 homolog (117-125)
  source 1..27: mol_type = other RNA
ctggtgcgcgacgtcgtgagctccctc

SEQ ID NO: 34494 - RNA, 30 nt, synthetic construct
  misc_feature 1..30: note = Leucine-rich repeat-containing protein 20 (34-43)
  source 1..30: mol_type = other RNA
ctggtgagcttccccatcggcatctacaag

SEQ ID NO: 34495 - RNA, 33 nt, synthetic construct
  misc_feature 1..33: note = Beta-actin-like protein 2 (9-19)
  source 1..33: mol_type = other RNA
ctggtggtcgacaacggcagcgggatgtgcaag

SEQ ID NO: 34496 - RNA, 27 nt, synthetic construct
  misc_feature 1..27: note = Peptidyl-prolyl cis-trans isomerase FKBP4 (410-418)
  source 1..27: mol_type = other RNA
ctgtacgccaacatgttcgagcgcctc

SEQ ID NO: 34497 - RNA, 27 nt, synthetic construct
  misc_feature 1..27: note = AKT-interacting protein (201-209)
  source 1..27: mol_type = other RNA
ctgtacgagaaggacatccagctcttc

SEQ ID NO: 34498 - RNA, 27 nt, synthetic construct
  misc_feature 1..27: note = Serine palmitoyltransferase 2 (282-290)
  source 1..27: mol_type = other RNA
ctgtacctcgacgaggcccacagcatc

SEQ ID NO: 34499 - RNA, 27 nt, synthetic construct
  misc_feature 1..27: note = DNA-dependent protein kinase catalytic subunit (3377-3385)
  source 1..27: mol_type = other RNA
ctgtaccagcgcgccttccagcacctc

SEQ ID NO: 34500 - RNA, 27 nt, synthetic construct
  misc_feature 1..27: note = Stimulator of interferon genes protein (214-222)
  source 1..27: mol_type = other RNA
atggccgaccccaacatccgcttcctg

SEQ ID NO: 34501 - RNA, 24 nt, synthetic construct
  misc_feature 1..24: note = Putative V-set and immunoglobulin domain-containing-like protein IGHV4OR15-8 (1-8)
  source 1..24: mol_type = other RNA
atggacctgctccacaagaacatg

SEQ ID NO: 34502 - RNA, 27 nt, synthetic construct
  misc_feature 1..27: note = Ig kappa chain V-I region HK102 (1-9)
  source 1..27: mol_type = other RNA
atggacatgcgcgtgcccgcccagctg

SEQ ID NO: 34503 - RNA, 27 nt, synthetic construct
  misc_feature 1..27: note = Hypoxia-inducible factor 1-alpha (632-640)
  source 1..27: mol_type = other RNA
atggaggacatcaagatcctgatcgcc

SEQ ID NO: 34504 - RNA, 24 nt, synthetic construct
  misc_feature 1..24: note = Ras GTPase-activating protein-binding protein 1 (183-190)
  source 1..24: mol_type = other RNA
atggaggagcacctggaggagccc

SEQ ID NO: 34505 - RNA, 27 nt, synthetic construct
  misc_feature 1..27: note = Vimentin (347-355)
  source 1..27: mol_type = other RNA
atggaggagaacttcgccgtggaggcc

SEQ ID NO: 34506 - RNA, 30 nt, synthetic construct
  misc_feature 1..30: note = Protein S100-A10 (5-14)
  source 1..30: mol_type = other RNA
atggagcacgccatggagaccatgatgttc

SEQ ID NO: 34507 - RNA, 27 nt, synthetic construct
  misc_feature 1..27: note = Actin, alpha skeletal muscle (84-92)
  source 1..27: mol_type = other RNA
atggagaagatctggcaccacaccttc

SEQ ID NO: 34508 - RNA, 27 nt, synthetic construct
  misc_feature 1..27: note = Arachidonate 5-lipoxygenase (186-194)
  source 1..27: mol_type = other RNA
atggagaacctgttcatcaaccgcttc

SEQ ID NO: 34509 - RNA, 27 nt, synthetic construct
  misc_feature 1..27: note = Protein diaphanous homolog 1 (496-504)
  source 1..27: mol_type = other RNA
atggagagcgacttcgagcagaagctg

SEQ ID NO: 34510 - RNA, 27 nt, synthetic construct
  misc_feature 1..27: note = Cytochrome c oxidase subunit 2 (20-28)
  source 1..27: mol_type = other RNA
atggagaccgtgtggaccatcctgccc

SEQ ID NO: 34511 - RNA, 27 nt, synthetic construct
  misc_feature 1..27: note = Poly(A)-specific ribonuclease PARN (243-251)
  source 1..27: mol_type = other RNA
atgctgctcgacgtgatgcacaccgtc

SEQ ID NO: 34512 - RNA, 27 nt, synthetic construct
  misc_feature 1..27: note = DNA ligase 1 (393-401)
  source 1..27: mol_type = other RNA
atgctgcccccgccccccctcaccgcc

SEQ ID NO: 34513 - RNA, 30 nt, synthetic construct
  misc_feature 1..30: note = Eukaryotic translation initiation factor 3 subunit A (514-523)
  source 1..30: mol_type = other RNA
atgcccagcgagcagatccgcaaccagctg

SEQ ID NO: 34514 - RNA, 27 nt, synthetic construct
  misc_feature 1..27: note = U2 snRNP-associated SURP motif-containing protein (392-400)
  source 1..27: mol_type = other RNA
atgaccgagagcaagttctccaagtac

SEQ ID NO: 34515 - RNA, 27 nt, synthetic construct
  misc_feature 1..27: note = Probable ATP-dependent RNA helicase DDX6 (168-176)
  source 1..27: mol_type = other RNA
atggtgatcgtccccacccgcgagctg

SEQ ID NO: 34516 - RNA, 27 nt, synthetic construct
  misc_feature 1..27: note = Staphylococcal nuclease domain-containing protein 1 (327-335)
  source 1..27: mol_type = other RNA
aacgccgacgccatcgtggtcaagctg

SEQ ID NO: 34517 - RNA, 30 nt, synthetic construct
  misc_feature 1..30: note = Ceruloplasmin (651-660)
  source 1..30: mol_type = other RNA
aacgaggccgacgtgcacggcatctacttc

SEQ ID NO: 34518 - RNA, 27 nt, synthetic construct
  misc_feature 1..27: note = HLA class I histocompatibility antigen, A-3 alpha chain (151-159)
  source 1..27: mol_type = other RNA
aacgaggacctgcgcagctggaccgcc

SEQ ID NO: 34519 - RNA, 33 nt, synthetic construct
  misc_feature 1..33: note = Nuclear pore complex protein Nup50 (371-381)
  source 1..33: mol_type = other RNA
aacgagttcaaggagaagggcatcgggaccctg

SEQ ID NO: 34520 - RNA, 24 nt, synthetic construct
  misc_feature 1..24: note = 40S ribosomal protein S3 (22-29)
  source 1..24: mol_type = other RNA
aacgagttcctgacccgcgagctc

SEQ ID NO: 34521 - RNA, 27 nt, synthetic construct
  misc_feature 1..27: note = Adenylyl cyclase-associated protein 1 (449-457)
  source 1..27: mol_type = other RNA
aacgagttccccgtgccggagcagttc

SEQ ID NO: 34522 - RNA, 30 nt, synthetic construct
  misc_feature 1..30: note = Protein C-ets-1 (86-95)
  source 1..30: mol_type = other RNA
aacgagttcagcctgaagggcgtggacttc

SEQ ID NO: 34523 - RNA, 27 nt, synthetic construct
  misc_feature 1..27: note = Midasin (329-337)
  source 1..27: mol_type = other RNA
aacgagatcctgggcagcctccgctgg

SEQ ID NO: 34524 - RNA, 24 nt, synthetic construct
  misc_feature 1..24: note = Guanine nucleotide-binding protein-like 3-like protein (192-199)
  source 1..24: mol_type = other RNA
aacgagctgcccaccgtggccttc

SEQ ID NO: 34525 - RNA, 30 nt, synthetic construct
  misc_feature 1..30: note = Trinucleotide repeat-containing gene 6B protein (723-732)
  source 1..30: mol_type = other RNA
aacgagaaccccagcaaggaccagggctgg

SEQ ID NO: 34526 - RNA, 30 nt, synthetic construct
  misc_feature 1..30: note = DNA dC-dU-editing enzyme APOBEC-3B (23-32)
  source 1..30: mol_type = other RNA
aacgagcccatcctgtacggccgcagctac

SEQ ID NO: 34527 - RNA, 27 nt, synthetic construct
  misc_feature 1..27: note = Catenin alpha-1 (169-177)
  source 1..27: mol_type = other RNA
aacgagcaggacctgggcatccagtac

SEQ ID NO: 34528 - RNA, 30 nt, synthetic construct
  misc_feature 1..30: note = Cytoplasmic FMR1-interacting protein 2 (99-108)
  source 1..30: mol_type = other RNA
aacgagcagcccaaccgcgtggagatctac

SEQ ID NO: 34529 - RNA, 27 nt, synthetic construct
  misc_feature 1..27: note = Four and a half LIM domains protein 2 (121-129)
  source 1..27: mol_type = other RNA
aacgagagcctgttcggcaagaagtac

SEQ ID NO: 34530 - RNA, 24 nt, synthetic construct
  misc_feature 1..24: note = Protein disulfide-isomerase (430-437)
  source 1..24: mol_type = other RNA
aacgaggtggaggccgtcaaggtg

SEQ ID NO: 34531 - RNA, 27 nt, synthetic construct
  misc_feature 1..27: note = Radial spoke head protein 3 homolog (440-448)
  source 1..27: mol_type = other RNA
aacgaggtggagaagaccatggagtac

SEQ ID NO: 34532 - RNA, 24 nt, synthetic construct
  misc_feature 1..24: note = Nucleosome assembly protein 1-like 1 (226-233)
  source 1..24: mol_type = other RNA
aacgaggtgctgaccaagacctac

SEQ ID NO: 34533 - RNA, 27 nt, synthetic construct
  misc_feature 1..27: note = Collagen alpha-3(VI) chain (2246-2254)
  source 1..27: mol_type = other RNA
aacgaggtgaccaccgagatccgcttc

SEQ ID NO: 34534 - RNA, 24 nt, synthetic construct
  misc_feature 1..24: note = 60S ribosomal protein L31 (18-25)
  source 1..24: mol_type = other RNA
aacgaggtggtcacccgcgagtac

SEQ ID NO: 34535 - RNA, 27 nt, synthetic construct
  misc_feature 1..27: note = Synaptobrevin homolog YKT6 (83-91)
  source 1..27: mol_type = other RNA
aacgagtaccccagccgcgtggccttc

SEQ ID NO: 34536 - RNA, 27 nt, synthetic construct
  misc_feature 1..27: note = 26S proteasome non-ATPase regulatory subunit 4 (18-26)
  source 1..27: mol_type = other RNA
aacggcgacttcctgcccacccgcctc

SEQ ID NO: 34537 - RNA, 39 nt, synthetic construct
  misc_feature 1..39: note = Eukaryotic translation initiation factor 3 subunit D (57-69)
  source 1..39: mol_type = other RNA
aacaagtacagctcccagttcggcgggggcagccagtac

SEQ ID NO: 34538 - RNA, 30 nt, synthetic construct
  misc_feature 1..30: note = Structural maintenance of chromosomes protein 4 (634-643)
  source 1..30: mol_type = other RNA
aacctggaccaggccacccgcgtggcctac

SEQ ID NO: 34539 - RNA, 27 nt, synthetic construct
  misc_feature 1..27: note = Heterogeneous nuclear ribonucleoprotein U-like protein 2 (358-366)
  source 1..27: mol_type = other RNA
aaccccgagaagcgctacaacgtgctg

SEQ ID NO: 34540 - RNA, 27 nt, synthetic construct
  misc_feature 1..27: note = 2'-5'-oligoadenylate synthase 1 (128-136)
  source 1..27: mol_type = other RNA
aacccccgcgccctgagcttcgtgctc

SEQ ID NO: 34541 - RNA, 30 nt, synthetic construct
  misc_feature 1..30: note = Cleavage and polyadenylation specificity factor subunit 3 (308-317)
  source 1..30: mol_type = other RNA
aacccccgcaacaccgaggccgtgaccctg

SEQ ID NO: 34542 - RNA, 27 nt, synthetic construct
  misc_feature 1..27: note = ETS translocation variant 5 (210-218)
  source 1..27: mol_type = other RNA
aaccagtaccccagcgagcagcgcttc

SEQ ID NO: 34543 - RNA, 27 nt, synthetic construct
  misc_feature 1..27: note = Protein TASOR (346-354)
  source 1..27: mol_type = other RNA
aacaccgaccgcaacatcgacaagtac

SEQ ID NO: 34544 - RNA, 51 nt, synthetic construct
  misc_feature 1..51: note = Actin, cytoplasmic 2 (35-51)
  source 1..51: mol_type = other RNA
aacaccgtgctgagcggcgggaccacgatgtaccccggcatcgccgaccgc

SEQ ID NO: 34545 - RNA, 27 nt, synthetic construct
  misc_feature 1..27: note = ORM1-like protein 2 (53-61)
  source 1..27: mol_type = other RNA
aacgtgatccacaacctggccacctac

SEQ ID NO: 34546 - RNA, 27 nt, synthetic construct
  misc_feature 1..27: note = Unconventional myosin-Ic (852-860)
  source 1..27: mol_type = other RNA
aactacccccagagcgtgccgcgcctg

SEQ ID NO: 34547 - RNA, 27 nt, synthetic construct
  misc_feature 1..27: note = Myotubularin-related protein 6 (104-112)
  source 1..27: mol_type = other RNA
aactacagcaacatccgcttccagttc

SEQ ID NO: 34548 - RNA, 27 nt, synthetic construct
  misc_feature 1..27: note = Actin-related protein 2/3 complex subunit 3 (2-10)
  source 1..27: mol_type = other RNA
cccgcctaccacagctccctgatggac

SEQ ID NO: 34549 - RNA, 30 nt, synthetic construct
  misc_feature 1..30: note = NADH dehydrogenase (ubiquinone) 1 beta subcomplex subunit 11, mitochondrial (144-153)
  source 1..30: mol_type = other RNA
cccagcaagatccagctgccggaggacgag

SEQ ID NO: 34550 - RNA, 27 nt, synthetic construct
  misc_feature 1..27: note = Probable helicase with zinc finger domain (955-963)
  source 1..27: mol_type = other RNA
ccctacgccgaccaggtgttccgcatc

SEQ ID NO: 34551 - RNA, 27 nt, synthetic construct
  misc_feature 1..27: note = Polypeptide N-acetylgalactosaminyltransferase 2 (407-415)
  source 1..27: mol_type = other RNA
ccctacggcaacatccagagccgcctg

SEQ ID NO: 34552 - RNA, 27 nt, synthetic construct
  misc_feature 1..27: note = Nucleolin (401-409)
  source 1..27: mol_type = other RNA
ccctacaaggtgacccaggacgagctg

SEQ ID NO: 34553 - RNA, 48 nt, synthetic construct
  misc_feature 1..48: note = Cytochrome c oxidase subunit 5B, mitochondrial (61-76)
  source 1..48: mol_type = other RNA
ccctacaacgtgctggccccgaagggcgccagcgggacccgcgaggac

SEQ ID NO: 34554 - RNA, 27 nt, synthetic construct
  misc_feature 1..27: note = Dol-P-Man:Man(7)GlcNAc(2)-PP-Dol alpha-1,6-mannosyltransferase (29-37)
  source 1..27: mol_type = other RNA
ccctacaccaaggtggaggagagcttc

SEQ ID NO: 34555 - RNA, 27 nt, synthetic construct
  misc_feature 1..27: note = Serglycin (81-89)
  source 1..27: mol_type = other RNA
caggacctgaaccgcatcttccccctc

SEQ ID NO: 34556 - RNA, 27 nt, synthetic construct
  misc_feature 1..27: note = Paraneoplastic antigen Ma1 (117-125)
  source 1..27: mol_type = other RNA
caggacgtggcccgcgtcctgggcttc

SEQ ID NO: 34557 - RNA, 27 nt, synthetic construct
  misc_feature 1..27: note = UDP-glucuronic acid decarboxylase 1 (248-256)
  source 1..27: mol_type = other RNA
caggagggcgtggaggtccgcgtggcc

SEQ ID NO: 34558 - RNA, 27 nt, synthetic construct
  misc_feature 1..27: note = Talin-1 (1707-1715)
  source 1..27: mol_type = other RNA
caggagatcagccacctgatcgagccc

SEQ ID NO: 34559 - RNA, 27 nt, synthetic construct
  misc_feature 1..27: note = Integrin beta-2 (422-430)
  source 1..27: mol_type = other RNA
caggagcagagcttcgtgatccgcgcc

SEQ ID NO: 34560 - RNA, 27 nt, synthetic construct
  misc_feature 1..27: note = Forkhead-associated domain-containing protein 1 (519-527)
  source 1..27: mol_type = other RNA
cagctgatcgagaagatcacccaggtg

SEQ ID NO: 34561 - RNA, 27 nt, synthetic construct
  misc_feature 1..27: note = Integrin alpha-V (217-225)
  source 1..27: mol_type = other RNA
caggtggccgagatcgtcagcaagtac

SEQ ID NO: 34562 - RNA, 27 nt, synthetic construct
  misc_feature 1..27: note = Biogenesis of lysosome-related organelles complex 1 subunit 1 (64-72)
  source 1..27: mol_type = other RNA
caggtgcaggccgcccagttcgcgaag

SEQ ID NO: 34563 - RNA, 27 nt, synthetic construct
  misc_feature 1..27: note = CCR4-NOT transcription complex subunit 1 (465-473)
  source 1..27: mol_type = other RNA
cagtacgagcaggtgaagcagctgttc

SEQ ID NO: 34564 - RNA, 27 nt, synthetic construct
  misc_feature 1..27: note = Phosphatidylinositol 3,4,5-trisphosphate-dependent Rac exchanger 1 protein (1095-1103)
  source 1..27: mol_type = other RNA
cagtacgtgacccagatcaaccgcctg

SEQ ID NO: 34565 - RNA, 36 nt, synthetic construct
  misc_feature 1..36: note = Non-POU domain-containing octamer-binding protein (367-378)
  source 1..36: mol_type = other RNA
cgcgccgcccccggcgcggagttcgccccgaacaag

SEQ ID NO: 34566 - RNA, 27 nt, synthetic construct
  misc_feature 1..27: note = SWI/SNF-related matrix-associated actin-dependent regulator of chromatin subfamily E member 1-related (135-143)
  source 1..27: mol_type = other RNA
cgcgcctaccagcagagcgaggcctac

SEQ ID NO: 34567 - RNA, 24 nt, synthetic construct
  misc_feature 1..24: note = Zinc finger protein 36, C3H1 type-like 2 (239-246)
  source 1..24: mol_type = other RNA
cgcgacgccctgcacctcggcttc

SEQ ID NO: 34568 - RNA, 27 nt, synthetic construct
  misc_feature 1..27: note = Chloride intracellular channel protein 6 (640-648)
  source 1..27: mol_type = other RNA
cgcgacttcgagttccccagcgagatg

SEQ ID NO: 34569 - RNA, 24 nt, synthetic construct
  misc_feature 1..24: note = Rab3 GTPase-activating protein non-catalytic subunit (18-25)
  source 1..24: mol_type = other RNA
cgcgacttcctgttcccccacctc

SEQ ID NO: 34570 - RNA, 24 nt, synthetic construct
  misc_feature 1..24: note = 60S ribosomal protein L9 (36-43)
  source 1..24: mol_type = other RNA
cgcgacttcaaccacatcaacgtg

SEQ ID NO: 34571 - RNA, 27 nt, synthetic construct
  misc_feature 1..27: note = Guanylate-binding protein 4 (196-204)
  source 1..27: mol_type = other RNA
cgcgacttcaccctggagctcaagctg

SEQ ID NO: 34572 - RNA, 27 nt, synthetic construct
  misc_feature 1..27: note = Alkyldihydroxyacetonephosphate synthase, peroxisomal (515-523)
  source 1..27: mol_type = other RNA
cgcgacctggccctcgagtactacgtg

SEQ ID NO: 34573 - RNA, 24 nt, synthetic construct
  misc_feature 1..24: note = Cell division control protein 42 homolog (147-154)
  source 1..24: mol_type = other RNA
cgcgacctgaaggccgtgaagtac

SEQ ID NO: 34574 - RNA, 24 nt, synthetic construct
  misc_feature 1..24: note = 40S ribosomal protein S27-like (5-12)
  source 1..24: mol_type = other RNA
cgcgacctgctccaccccagcctg

SEQ ID NO: 34575 - RNA, 27 nt, synthetic construct
  misc_feature 1..27: note = Septin-9 (519-527)
  source 1..27: mol_type = other RNA
cgcgacctgctcatccggacccacatg

SEQ ID NO: 34576 - RNA, 27 nt, synthetic construct
  misc_feature 1..27: note = Eukaryotic translation initiation factor 3 subunit C (586-594)
  source 1..27: mol_type = other RNA
cgcgacctgatgctcatgagccacctg

SEQ ID NO: 34577 - RNA, 33 nt, synthetic construct
  misc_feature 1..33: note = Macrosialin (238-248)
  source 1..33: mol_type = other RNA
cgcgacctgcaggcccccctcggccagagcttc

SEQ ID NO: 34578 - RNA, 27 nt, synthetic construct
  misc_feature 1..27: note = E3 ubiquitin-protein ligase RNF213 (160-168)
  source 1..27: mol_type = other RNA
cgcgacctgagccacatcctcggcatc

SEQ ID NO: 34579 - RNA, 27 nt, synthetic construct
  misc_feature 1..27: note = Serine/threonine-protein kinase RIO1 (201-209)
  source 1..27: mol_type = other RNA
cgcgacatggacatcatcatgaagctg

SEQ ID NO: 34580 - RNA, 27 nt, synthetic construct
  misc_feature 1..27: note = Transcription factor 25 (650-658)
  source 1..27: mol_type = other RNA
cgcgacatgatggccaacttccacctg

SEQ ID NO: 34581 - RNA, 24 nt, synthetic construct
  misc_feature 1..24: note = Transcription elongation factor A protein 1 (123-130)
  source 1..24: mol_type = other RNA
cgcgacacctacgtgagctccttc

SEQ ID NO: 34582 - RNA, 27 nt, synthetic construct
  misc_feature 1..27: note = Growth arrest and DNA damage-inducible protein GADD45 alpha (67-75)
  source 1..27: mol_type = other RNA
cgcgacgtggccctgcagatccacttc

SEQ ID NO: 34583 - RNA, 24 nt, synthetic construct
  misc_feature 1..24: note = Transmembrane protein 14A (51-58)
  source 1..24: mol_type = other RNA
cgcgacgtgaaggtcagcctgttc

SEQ ID NO: 34584 - RNA, 27 nt, synthetic construct
  misc_feature 1..27: note = TraB domain-containing protein (259-267)
  source 1..27: mol_type = other RNA
cgcgacgtgtacctgacctacatgctc

SEQ ID NO: 34585 - RNA, 30 nt, synthetic construct
  misc_feature 1..30: note = Pyruvate kinase PKM (383-392)
  source 1..30: mol_type = other RNA
cgcgaggccgaggccgcgatctaccacctg

SEQ ID NO: 34586 - RNA, 27 nt, synthetic construct
  misc_feature 1..27: note = Protein nepro homolog (226-234)
  source 1..27: mol_type = other RNA
cgcgaggccgagagcttcacccagctg

SEQ ID NO: 34587 - RNA, 30 nt, synthetic construct
  misc_feature 1..30: note = 40S ribosomal protein S4, X isoform (39-48)
  source 1..30: mol_type = other RNA
cgcgagtgcctgcccctcatcatcttcctg

SEQ ID NO: 34588 - RNA, 27 nt, synthetic construct
  misc_feature 1..27: note = T-complex protein 1 subunit gamma (260-268)
  source 1..27: mol_type = other RNA
cgcgaggaggacttcacccggatcctg

SEQ ID NO: 34589 - RNA, 33 nt, synthetic construct
  misc_feature 1..33: note = Transcription factor E2F7 (433-443)
  source 1..33: mol_type = other RNA
cgcgaggagcagggcagcgggggctactccctg

SEQ ID NO: 34590 - RNA, 24 nt, synthetic construct
  misc_feature 1..24: note = Ribonucleoside-diphosphate reductase subunit M2 (190-197)
  source 1..24: mol_type = other RNA
cgcgagttcctgttcaacgccatc

SEQ ID NO: 34591 - RNA, 27 nt, synthetic construct
  misc_feature 1..27: note = DNA-dependent protein kinase catalytic subunit (1087-1095)
  source 1..27: mol_type = other RNA
cgcgagttccgggaggaggagagcctg

SEQ ID NO: 34592 - RNA, 24 nt, synthetic construct
  misc_feature 1..24: note = Vacuolar protein sorting-associated protein 51 homolog (490-497)
  source 1..24: mol_type = other RNA
cgcgagggcctgatcgtggggttc

SEQ ID NO: 34593 - RNA, 27 nt, synthetic construct
  misc_feature 1..27: note = Torsin-4A (350-358)
  source 1..27: mol_type = other RNA
cgcgagcaccccctgtggcaggccgcc

SEQ ID NO: 34594 - RNA, 27 nt, synthetic construct
  misc_feature 1..27: note = Vimentin (186-194)
  source 1..27: mol_type = other RNA
cgcgagaagctgcaggaggagatgctc

SEQ ID NO: 34595 - RNA, 27 nt, synthetic construct
  misc_feature 1..27: note = Protein CEBPZOS (68-76)
  source 1..27: mol_type = other RNA
cgcgagctggaccagaagacctggctc

SEQ ID NO: 34596 - RNA, 27 nt, synthetic construct
  misc_feature 1..27: note = Extended synaptotagmin-1 (125-133)
  source 1..27: mol_type = other RNA
cgcgagctgcccgcctgggtgagcttc

SEQ ID NO: 34597 - RNA, 27 nt, synthetic construct
  misc_feature 1..27: note = DNA-directed RNA polymerase II subunit RPB1 (1380-1388)
  source 1..27: mol_type = other RNA
cgcgagctgtaccacgtgatcagcttc

SEQ ID NO: 34598 - RNA, 24 nt, synthetic construct
  misc_feature 1..24: note = HLA class I histocompatibility antigen, B-57 alpha chain (99-106)
  source 1..24: mol_type = other RNA
cgcgagaacctgcggatcgccctc

SEQ ID NO: 34599 - RNA, 27 nt, synthetic construct
  misc_feature 1..27: note = Ras-related protein M-Ras (116-124)
  source 1..27: mol_type = other RNA
cgcgagagcttccccatgatcctggtg

SEQ ID NO: 34600 - RNA, 27 nt, synthetic construct
  misc_feature 1..27: note = Large proline-rich protein BAG6 (814-822)
  source 1..27: mol_type = other RNA
cgcgagagcttctccctggtgcaggtc

SEQ ID NO: 34601 - RNA, 27 nt, synthetic construct
  misc_feature 1..27: note = Vimentin (424-432)
  source 1..27: mol_type = other RNA
cgcgagaccaacctggacagcctcccc

SEQ ID NO: 34602 - RNA, 30 nt, synthetic construct
  misc_feature 1..30: note = DNA polymerase delta subunit 2 (109-118)
  source 1..30: mol_type = other RNA
cgcgaggtgagcgaggagcacaacctgctc

SEQ ID NO: 34603 - RNA, 27 nt, synthetic construct
  misc_feature 1..27: note = Zinc finger protein 343 (243-251)
  source 1..27: mol_type = other RNA
cgcgagtacgagcccgaccacaacctg

SEQ ID NO: 34604 - RNA, 27 nt, synthetic construct
  misc_feature 1..27: note = Desmin (386-394)
  source 1..27: mol_type = other RNA
cgcgagtaccaggacctgctcaacgtg

SEQ ID NO: 34605 - RNA, 27 nt, synthetic construct
  misc_feature 1..27: note = ADP-ribosylation factor 6 (95-103)
  source 1..27: mol_type = other RNA
cgcatcgacgaggcccggcaggagctg

SEQ ID NO: 34606 - RNA, 42 nt, synthetic construct
  misc_feature 1..42: note = Heat shock 70 kDa protein 1-like (173-186)
  source 1..42: mol_type = other RNA
cgcatcatcaacgagcccaccgccgccgcgatcgcctacggc

SEQ ID NO: 34607 - RNA, 27 nt, synthetic construct
  misc_feature 1..27: note = Chromobox protein homolog 6 (91-99)
  source 1..27: mol_type = other RNA
cgcatcagcgacgtgcacttctccgtc

SEQ ID NO: 34608 - RNA, 27 nt, synthetic construct
  misc_feature 1..27: note = Vimentin (410-418)
  source 1..27: mol_type = other RNA
cgcatcagcctgcccctcccgaacttc

SEQ ID NO: 34609 - RNA, 30 nt, synthetic construct
  misc_feature 1..30: note = Discoidin, CUB and LCCL domain-containing protein 2 (86-95)
  source 1..30: mol_type = other RNA
cgcatctacaacggcatcggggtgagccgg

SEQ ID NO: 34610 - RNA, 27 nt, synthetic construct
  misc_feature 1..27: note = Polyribonucleotide 5'-hydroxyl-kinase Clp1 (206-214)
  source 1..27: mol_type = other RNA
cgcctggccgacgtgttcaaccagcgg

SEQ ID NO: 34611 - RNA, 27 nt, synthetic construct
  misc_feature 1..27: note = Clathrin heavy chain 1 (1226-1234)
  source 1..27: mol_type = other RNA
cgcctggccagcaccctcgtgcacctg

SEQ ID NO: 34612 - RNA, 27 nt, synthetic construct
  misc_feature 1..27: note = Transcription elongation factor SPT6 (292-300)
  source 1..27: mol_type = other RNA
cgcctgttcgagaagatgcaggcctac

SEQ ID NO: 34613 - RNA, 33 nt, synthetic construct
  misc_feature 1..33: note = Deoxyhypusine synthase (263-273)
  source 1..33: mol_type = other RNA
cgcctgatcaacacccaggccatcttcgccaag

SEQ ID NO: 34614 - RNA, 27 nt, synthetic construct
  misc_feature 1..27: note = Lysophospholipid acyltransferase 5 (293-301)
  source 1..27: mol_type = other RNA
cgcctgatccaggagagccccaccctc

SEQ ID NO: 34615 - RNA, 27 nt, synthetic construct
  misc_feature 1..27: note = trabeculin-alpha (476-484)
  source 1..27: mol_type = other RNA
cgcctgcaggacgagctcgtgaccctg

SEQ ID NO: 34616 - RNA, 27 nt, synthetic construct
  misc_feature 1..27: note = Gamma-tubulin complex component 5 (326-334)
  source 1..27: mol_type = other RNA
cgcctgcaggagttcatcgacgaggtg

SEQ ID NO: 34617 - RNA, 27 nt, synthetic construct
  misc_feature 1..27: note = Nuclear cap-binding protein subunit 1 (694-702)
  source 1..27: mol_type = other RNA
cgcctgcaggagaaggtggagagcgcc

SEQ ID NO: 34618 - RNA, 27 nt, synthetic construct
  misc_feature 1..27: note = Integrin beta-7 (181-189)
  source 1..27: mol_type = other RNA
cgcctgcaggaggtgacccacagcgtc

SEQ ID NO: 34619 - RNA, 27 nt, synthetic construct
  misc_feature 1..27: note = 40S ribosomal protein S27 (87-95)
  source 1..27: mol_type = other RNA
cgcctggtgcagagccccaactcctac

SEQ ID NO: 34620 - RNA, 30 nt, synthetic construct
  misc_feature 1..30: note = Serpin H1 (133-142)
  source 1..30: mol_type = other RNA
cgcctgtacggccccagctccgtgagcttc

SEQ ID NO: 34621 - RNA, 27 nt, synthetic construct
  misc_feature 1..27: note = Tetratricopeptide repeat protein 30A (82-90)
  source 1..27: mol_type = other RNA
cgcctgtaccaggcccaggccctctac

SEQ ID NO: 34622 - RNA, 27 nt, synthetic construct
  misc_feature 1..27: note = DNA mismatch repair protein Msh2 (406-414)
  source 1..27: mol_type = other RNA
cgcctgtaccagggcatcaaccagctc

SEQ ID NO: 34623 - RNA, 27 nt, synthetic construct
  misc_feature 1..27: note = Probable 18S rRNA (guanine-N(7))-methyltransferase (31-39)
  source 1..27: mol_type = other RNA
cgcatgatcgacatccagacccggatg

SEQ ID NO: 34624 - RNA, 27 nt, synthetic construct
  misc_feature 1..27: note = 26S protease regulatory subunit 4 (411-419)
  source 1..27: mol_type = other RNA
cgcatgaaggtgaccaacgaggacttc

SEQ ID NO: 34625 - RNA, 27 nt, synthetic construct
  misc_feature 1..27: note = A-kinase anchor protein 8-like (199-207)
  source 1..27: mol_type = other RNA
cgcatgtgggaggaccccatgggcgcc

SEQ ID NO: 34626 - RNA, 33 nt, synthetic construct
  misc_feature 1..33: note = Keratin, type I cytoskeletal 10 (99-109)
  source 1..33: mol_type = other RNA
cgcaacgtgagcaccggcgacgtcaacgtggag

SEQ ID NO: 34627 - RNA, 27 nt, synthetic construct
  misc_feature 1..27: note = Ubiquitin-like modifier-activating enzyme 1 (325-333)
  source 1..27: mol_type = other RNA
cgccccgcccagctgcacatcggcttc

SEQ ID NO: 34628 - RNA, 33 nt, synthetic construct
  misc_feature 1..33: note = Eukaryotic translation initiation factor 4 gamma 1 (191-201)
  source 1..33: mol_type = other RNA
cgccccgacgaccggagccagggcgccatcatc

SEQ ID NO: 34629 - RNA, 27 nt, synthetic construct
  misc_feature 1..27: note = Microtubule-associated protein 4 (670-678)
  source 1..27: mol_type = other RNA
cgccccgaggagggccggccggtggtc

SEQ ID NO: 34630 - RNA, 27 nt, synthetic construct
  misc_feature 1..27: note = Syntenin-1 (193-201)
  source 1..27: mol_type = other RNA
cgccccttcgagcggaccatcaccatg

SEQ ID NO: 34631 - RNA, 27 nt, synthetic construct
  misc_feature 1..27: note = Cellular tumor antigen p53 (25-33)
  source 1..27: mol_type = other RNA
cgccccatcctgaccatcatcaccctc

SEQ ID NO: 34632 - RNA, 27 nt, synthetic construct
  misc_feature 1..27: note = Methionine adenosyltransferase 2 subunit beta (277-285)
  source 1..27: mol_type = other RNA
cgccccatcaccgacagcccggtgctg

SEQ ID NO: 34633 - RNA, 27 nt, synthetic construct
  misc_feature 1..27: note = U2 snRNP-associated SURP motif-containing protein (430-438)
  source 1..27: mol_type = other RNA
cgccccaagaagccgggccagagcttc

SEQ ID NO: 34634 - RNA, 27 nt, synthetic construct
  misc_feature 1..27: note = Methionine-tRNA ligase, cytoplasmic (45-53)
  source 1..27: mol_type = other RNA
cgccccaaggtgccggtcctgcagctc

SEQ ID NO: 34635 - RNA, 27 nt, synthetic construct
  misc_feature 1..27: note = Actin-related protein 3 (262-270)
  source 1..27: mol_type = other RNA
cgccccctgtacaagaacatcgtgctc

SEQ ID NO: 34636 - RNA, 24 nt, synthetic construct
  misc_feature 1..24: note = Proline-rich nuclear receptor coactivator 2 (13-20)
  source 1..24: mol_type = other RNA
cgccccatgaagaccagcgtgctg

SEQ ID NO: 34637 - RNA, 27 nt, synthetic construct
  misc_feature 1..27: note = DNA damage-binding protein 1 (753-761)
  source 1..27: mol_type = other RNA
cgccccagcgcctccacccaggccctg

SEQ ID NO: 34638 - RNA, 30 nt, synthetic construct
  misc_feature 1..30: note = Inositol-tetrakisphosphate 1-kinase (256-265)
  source 1..30: mol_type = other RNA
cgccccagcgacgaggtgatccgggagctg

SEQ ID NO: 34639 - RNA, 27 nt, synthetic construct
  misc_feature 1..27: note = Nucleoprotein TPR (1808-1816)
  source 1..27: mol_type = other RNA
cgccccagcacctccaccgccgtgttc

SEQ ID NO: 34640 - RNA, 30 nt, synthetic construct
  misc_feature 1..30: note = Nuclear pore complex protein Nup214 (1284-1293)
  source 1..30: mol_type = other RNA
cgccccgtggccccgagcggcaccgccctg

SEQ ID NO: 34641 - RNA, 27 nt, synthetic construct
  misc_feature 1..27: note = 60S ribosomal protein L15 (73-81)
  source 1..27: mol_type = other RNA
cgccccgtgccgaagggcgccacctac

SEQ ID NO: 34642 - RNA, 27 nt, synthetic construct
  misc_feature 1..27: note = STE20-related kinase adapter protein alpha (358-366)
  source 1..27: mol_type = other RNA
cgccccgtgaccccgatcaccaacttc

SEQ ID NO: 34643 - RNA, 27 nt, synthetic construct
  misc_feature 1..27: note = Grancalcin (145-153)
  source 1..27: mol_type = other RNA
cgccaggccatcggcctgatggggtac

SEQ ID NO: 34644 - RNA, 30 nt, synthetic construct
  misc_feature 1..30: note = Transcriptional repressor p66-beta (415-424)
  source 1..30: mol_type = other RNA
cgccaggccccccagccgcagagctccctg

SEQ ID NO: 34645 - RNA, 36 nt, synthetic construct
  misc_feature 1..36: note = UBX domain-containing protein 4 (346-357)
  source 1..36: mol_type = other RNA
cgccagttcgccgcccagaccgtgggcaacacctac

SEQ ID NO: 34646 - RNA, 27 nt, synthetic construct
  misc_feature 1..27: note = Spectrin alpha chain, non-erythrocytic 1 (1012-1020)
  source 1..27: mol_type = other RNA
cgccagggcttcgtgcccgccgcctac

SEQ ID NO: 34647 - RNA, 24 nt, synthetic construct
  misc_feature 1..24: note = Fragile X mental retardation syndrome-related protein 1 (376-383)
  source 1..24: mol_type = other RNA
cgccagatcggcagccggtcctac

SEQ ID NO: 34648 - RNA, 27 nt, synthetic construct
  misc_feature 1..27: note = Sialidase-1 (69-77)
  source 1..27: mol_type = other RNA
cgccagatcggcagcgtggacaccttc

SEQ ID NO: 34649 - RNA, 27 nt, synthetic construct
  misc_feature 1..27: note = Cytochrome b-245 heavy chain (92-100)
  source 1..27: mol_type = other RNA
cgccagctggaccggaacctcaccttc

SEQ ID NO: 34650 - RNA, 27 nt, synthetic construct
  misc_feature 1..27: note = Vacuole membrane protein 1 (48-56)
  source 1..27: mol_type = other RNA
cgccagcccctgatcaccctccagtac

SEQ ID NO: 34651 - RNA, 27 nt, synthetic construct
  misc_feature 1..27: note = Lanosterol synthase (234-242)
  source 1..27: mol_type = other RNA
cgccaggtgtacctgcccatgagctac

SEQ ID NO: 34652 - RNA, 24 nt, synthetic construct
  misc_feature 1..24: note = Eukaryotic translation initiation factor 3 subunit L (38-45)
  source 1..24: mol_type = other RNA
cgccagtacgagcagcagacctac

SEQ ID NO: 34653 - RNA, 27 nt, synthetic construct
  misc_feature 1..27: note = Protein CDV3 homolog (7-15)
  source 1..27: mol_type = other RNA
cgcagcctggacaacttcttcgccaag

SEQ ID NO: 34654 - RNA, 33 nt, synthetic construct
  misc_feature 1..33: note = Cation-independent mannose-6-phosphate receptor (2345-2355)
  source 1..33: mol_type = other RNA
cgcagctccaacgtgagctacaagtactccaag

SEQ ID NO: 34655 - RNA, 27 nt, synthetic construct
  misc_feature 1..27: note = Protein phosphatase 1 regulatory subunit 12A (704-712)
  source 1..27: mol_type = other RNA
cgcacctacgacgagacctaccagcgg

SEQ ID NO: 34656 - RNA, 33 nt, synthetic construct
  misc_feature 1..33: note = Protein FAM168A (83-93)
  source 1..33: mol_type = other RNA
cgcacctaccaggccagctccgccgcgttccgg

SEQ ID NO: 34657 - RNA, 27 nt, synthetic construct
  misc_feature 1..27: note = Manganese-transporting ATPase 13A1 (839-847)
  source 1..27: mol_type = other RNA
cgcgtggcccccaagcagaaggagttc

SEQ ID NO: 34658 - RNA, 27 nt, synthetic construct
  misc_feature 1..27: note = Alpha-adducin (27-35)
  source 1..27: mol_type = other RNA
cgcgtggacgagaacaaccccgagtac

SEQ ID NO: 34659 - RNA, 27 nt, synthetic construct
  misc_feature 1..27: note = DNA damage-binding protein 1 (263-271)
  source 1..27: mol_type = other RNA
cgcgtggaccccaacggcagccggtac

SEQ ID NO: 34660 - RNA, 30 nt, synthetic construct
  misc_feature 1..30: note = Eukaryotic translation initiation factor 3 subunit C-like protein (873-882)
  source 1..30: mol_type = other RNA
cgcgtgttcgaccacaagcagggcacctac

SEQ ID NO: 34661 - RNA, 39 nt, synthetic construct
  misc_feature 1..39: note = LIM and senescent cell antigen-like-containing domain protein 1 (319-331)
  source 1..39: mol_type = other RNA
cgcgtgatcgagggcgacgtcgtgagcgccctgaacaag

SEQ ID NO: 34662 - RNA, 27 nt, synthetic construct
  misc_feature 1..27: note = Ran GTPase-activating protein 1 (205-213)
  source 1..27: mol_type = other RNA
cgcgtgatcggcaccctggaggaggtc

SEQ ID NO: 34663 - RNA, 27 nt, synthetic construct
  misc_feature 1..27: note = HLA class II histocompatibility antigen, DRB1-16 beta chain (89-97)
  source 1..27: mol_type = other RNA
cgcgtgcagcccaaggtcaccgtgtac

SEQ ID NO: 34664 - RNA, 33 nt, synthetic construct
  misc_feature 1..33: note = Glucose-6-phosphate 1-dehydrogenase (240-250)
  source 1..33: mol_type = other RNA
cgcgtgcagcccaacgaggccgtctacaccaag

SEQ ID NO: 34665 - RNA, 27 nt, synthetic construct
  misc_feature 1..27: note = Rotatin (803-811)
  source 1..27: mol_type = other RNA
cgcgtgaccgacctgttcatcggcaag

SEQ ID NO: 34666 - RNA, 45 nt, synthetic construct
  misc_feature 1..45: note = Histone H2A type 1-B/E (100-114)
  source 1..45: mol_type = other RNA
cgcgtgaccatcgcccagggcggggtcctgcccaacatccaggcc

SEQ ID NO: 34667 - RNA, 42 nt, synthetic construct
  misc_feature 1..42: note = SH3 domain-binding glutamic acid-rich-like protein (4-17)
  source 1..42: mol_type = other RNA
cgcgtgtacatcgccagctccagcggctccaccgccatcaag

SEQ ID NO: 34668 - RNA, 33 nt, synthetic construct
  misc_feature 1..33: note = WD repeat domain phosphoinositide-interacting protein 3 (34-44)
  source 1..33: mol_type = other RNA
cgcgtgtacaacaccgaccccctgaaggagaag

SEQ ID NO: 34669 - RNA, 30 nt, synthetic construct
  misc_feature 1..30: note = Serine/arginine-rich splicing factor 9 (181-190)
  source 1..30: mol_type = other RNA
cgcgtgtaccccgagcggagcacctcctac

SEQ ID NO: 34670 - RNA, 27 nt, synthetic construct
  misc_feature 1..27: note = Lysine-specific demethylase 6B (135-143)
  source 1..27: mol_type = other RNA
cgctacggcgggagcttcgccgagctg

SEQ ID NO: 34671 - RNA, 27 nt, synthetic construct
  misc_feature 1..27: note = Ras GTPase-activating protein-binding protein 2 (293-301)
  source 1..27: mol_type = other RNA
cgctaccccgacagccaccagctgttc

SEQ ID NO: 34672 - RNA, 27 nt, synthetic construct
  misc_feature 1..27: note = Eukaryotic translation initiation factor 3 subunit L (328-336)
  source 1..27: mol_type = other RNA
cgctaccaggacgccatccgggtgttc

SEQ ID NO: 34673 - RNA, 27 nt, synthetic construct
  misc_feature 1..27: note = Poly (ADP-ribose) polymerase 8 (33-41)
  source 1..27: mol_type = other RNA
cgctacagcgactccaccttcaccttc

SEQ ID NO: 34674 - RNA, 33 nt, synthetic construct
  misc_feature 1..33: note = ATPase family AAA domain-containing protein 2 (163-173)
  source 1..33: mol_type = other RNA
cgctacagcggcgtgaaccagtccatgctgttc

SEQ ID NO: 34675 - RNA, 27 nt, synthetic construct
  misc_feature 1..27: note = Heterogeneous nuclear ribonucleoprotein H (23-31)
  source 1..27: mol_type = other RNA
agcgccgacgaggtgcagcgcttcttc

SEQ ID NO: 34676 - RNA, 27 nt, synthetic construct
  misc_feature 1..27: note = Intraflagellar transport protein 25 homolog (121-129)
  source 1..27: mol_type = other RNA
agcgccttcgaccacttcgcctccgtg

SEQ ID NO: 34677 - RNA, 27 nt, synthetic construct
  misc_feature 1..27: note = Histone-lysine N-methyltransferase setd3 (403-411)
  source 1..27: mol_type = other RNA
agcgccatcgaccgcatcttcaccctg

SEQ ID NO: 34678 - RNA, 27 nt, synthetic construct
  misc_feature 1..27: note = Rho guanine nucleotide exchange factor 12 (613-621)
  source 1..27: mol_type = other RNA
agcgccatcggccgcgccatggagctg

SEQ ID NO: 34679 - RNA, 27 nt, synthetic construct
  misc_feature 1..27: note = Cell division cycle protein 16 homolog (483-491)
  source 1..27: mol_type = other RNA
agcgccatcggctacatccactccctg

SEQ ID NO: 34680 - RNA, 27 nt, synthetic construct
  misc_feature 1..27: note = Transient receptor potential cation channel subfamily V member 2 (165-173)
  source 1..27: mol_type = other RNA
agcgccctgcacatcgccatcgagaag

SEQ ID NO: 34681 - RNA, 27 nt, synthetic construct
  misc_feature 1..27: note = ATP-dependent zinc metalloprotease YME1L1 (158-166)
  source 1..27: mol_type = other RNA
agcgcccagtccttcttcgagaacaag

SEQ ID NO: 34682 - RNA, 27 nt, synthetic construct
  misc_feature 1..27: note = Putative annexin A2-like protein (22-30)
  source 1..27: mol_type = other RNA
agcgcctacggctccgtgaaggcctac

SEQ ID NO: 34683 - RNA, 27 nt, synthetic construct
  misc_feature 1..27: note = Guanine nucleotide-binding protein G(I)/G(S)/G(T) subunit beta-1 (245-253)
  source 1..27: mol_type = other RNA
agcgacgacgccacctgccgcctgttc

SEQ ID NO: 34684 - RNA, 27 nt, synthetic construct
  misc_feature 1..27: note = Ubiquitin thioesterase OTUB1 (215-223)
  source 1..27: mol_type = other RNA
agcgaccacatccacatcatcgccctg

SEQ ID NO: 34685 - RNA, 27 nt, synthetic construct
  misc_feature 1..27: note = Homeobox-containing protein 1 (316-324)
  source 1..27: mol_type = other RNA
agcgacctggagcgcgtgacctccctc

SEQ ID NO: 34686 - RNA, 27 nt, synthetic construct
  misc_feature 1..27: note = Protein FAM162A (32-40)
  source 1..27: mol_type = other RNA
agcgacctgaagcgcatcaacggcttc

SEQ ID NO: 34687 - RNA, 27 nt, synthetic construct
  misc_feature 1..27: note = Group XIIB secretory phospholipase A2-like protein (142-150)
  source 1..27: mol_type = other RNA
agcgacctgaagcgctccctcggcttc

SEQ ID NO: 34688 - RNA, 27 nt, synthetic construct
  misc_feature 1..27: note = SH3 domain-binding protein 2 (218-226)
  source 1..27: mol_type = other RNA
agcgacatgccccgcgcccactccttc

SEQ ID NO: 34689 - RNA, 33 nt, synthetic construct
  misc_feature 1..33: note = Vimentin (299-309)
  source 1..33: mol_type = other RNA
agcgaggccgccaaccgcaacaacgacgcgctg

SEQ ID NO: 34690 - RNA, 27 nt, synthetic construct
  misc_feature 1..27: note = 14-3-3 protein eta (80-88)
  source 1..27: mol_type = other RNA
agcgaggccgcctacaaggaggcgttc

SEQ ID NO: 34691 - RNA, 27 nt, synthetic construct
  misc_feature 1..27: note = WD repeat-containing protein 6 (1032-1040)
  source 1..27: mol_type = other RNA
agcgaggacggctccctgcacgtgttc

SEQ ID NO: 34692 - RNA, 30 nt, synthetic construct
  misc_feature 1..30: note = 60S ribosomal protein L7a (85-94)
  source 1..30: mol_type = other RNA
agcgaggacaagggcgccctggccaagctc

SEQ ID NO: 34693 - RNA, 27 nt, synthetic construct
  misc_feature 1..27: note = Cofilin-1 (41-49)
  source 1..27: mol_type = other RNA
agcgaggacaagaagaacatcatcctg

SEQ ID NO: 34694 - RNA, 27 nt, synthetic construct
  misc_feature 1..27: note = Coatomer subunit alpha (268-276)
  source 1..27: mol_type = other RNA
agcgaggacaagtccatccgcgtgtgg

SEQ ID NO: 34695 - RNA, 33 nt, synthetic construct
  misc_feature 1..33: note = 26S proteasome non-ATPase regulatory subunit 2 (436-446)
  source 1..33: mol_type = other RNA
agcgaggactacatcaagtccggcgccctgctc

SEQ ID NO: 34696 - RNA, 27 nt, synthetic construct
  misc_feature 1..27: note = Calmodulin (82-90)
  source 1..27: mol_type = other RNA
agcgaggaggagatccgcgaggccttc

SEQ ID NO: 34697 - RNA, 30 nt, synthetic construct
  misc_feature 1..30: note = Nucleolar transcription factor 1 (115-124)
  source 1..30: mol_type = other RNA
agcgaggagggcatcaccaagtccaccctg

SEQ ID NO: 34698 - RNA, 27 nt, synthetic construct
  misc_feature 1..27: note = Nucleoside diphosphate kinase 3 (61-69)
  source 1..27: mol_type = other RNA
agcgaggagctgctccgcgagcactac

SEQ ID NO: 34699 - RNA, 27 nt, synthetic construct
  misc_feature 1..27: note = A-kinase anchor protein 6 (991-999)
  source 1..27: mol_type = other RNA
agcgaggagcagcagcagcacctgtac

SEQ ID NO: 34700 - RNA, 30 nt, synthetic construct
  misc_feature 1..30: note = 14-3-3 protein zeta/delta (227-236)
  source 1..30: mol_type = other RNA
agcgaggagtcctacaaggacagcaccctg

SEQ ID NO: 34701 - RNA, 30 nt, synthetic construct
  misc_feature 1..30: note = CTTNBP2 N-terminal-like protein (259-268)
  source 1..30: mol_type = other RNA
agcgagttcgacatcgagcgcgagcagctg

SEQ ID NO: 34702 - RNA, 27 nt, synthetic construct
  misc_feature 1..27: note = Alpha-enolase (79-87)
  source 1..27: mol_type = other RNA
agcgagttcttccgctccggcaagtac

SEQ ID NO: 34703 - RNA, 27 nt, synthetic construct
  misc_feature 1..27: note = Dynamin-like 120 kDa protein, mitochondrial (351-359)
  source 1..27: mol_type = other RNA
agcgagggcccccaccacgtggccctg

SEQ ID NO: 34704 - RNA, 30 nt, synthetic construct
  misc_feature 1..30: note = Cyclic AMP-dependent transcription factor ATF-6 beta (8-17)
  source 1..30: mol_type = other RNA
agcgagatcgccgaccccacccgcttcttc

SEQ ID NO: 34705 - RNA, 27 nt, synthetic construct
  misc_feature 1..27: note = Claspin (704-712)
  source 1..27: mol_type = other RNA
agcgagatcggcaaggccgtggggttc

SEQ ID NO: 34706 - RNA, 27 nt, synthetic construct
  misc_feature 1..27: note = ATP-dependent zinc metalloprotease YME1L1 (695-703)
  source 1..27: mol_type = other RNA
agcgagaagctgggcgtgatgacctac

SEQ ID NO: 34707 - RNA, 24 nt, synthetic construct
  misc_feature 1..24: note = Protein yippee-like 5 (28-35)
  source 1..24: mol_type = other RNA
agcgagctgatctccacccgcttc

SEQ ID NO: 34708 - RNA, 27 nt, synthetic construct
  misc_feature 1..27: note = Ubiquitin carboxyl-terminal hydrolase 7 (778-786)
  source 1..27: mol_type = other RNA
agcgagctgcccaccgccaaggagtac

SEQ ID NO: 34709 - RNA, 27 nt, synthetic construct
  misc_feature 1..27: note = Mitochondrial import receptor subunit TOM70 (577-585)
  source 1..27: mol_type = other RNA
agcgagatggagatggcccacctgtac

SEQ ID NO: 34710 - RNA, 27 nt, synthetic construct
  misc_feature 1..27: note = ADP-ribosylation factor 4 (137-145)
  source 1..27: mol_type = other RNA
agcgagatgaccgacaagctgggcctc

SEQ ID NO: 34711 - RNA, 27 nt, synthetic construct
  misc_feature 1..27: note = Geranylgeranyl transferase type-1 subunit beta (168-176)
  source 1..27: mol_type = other RNA
agcgagaacgacatgcgcttcgtgtac

SEQ ID NO: 34712 - RNA, 27 nt, synthetic construct
  misc_feature 1..27: note = Nuclear pore complex protein Nup153 (1194-1202)
  source 1..27: mol_type = other RNA
agcgagcagcccgccaaggccaccttc

SEQ ID NO: 34713 - RNA, 27 nt, synthetic construct
  misc_feature 1..27: note = Coatomer subunit gamma-1 (353-361)
  source 1..27: mol_type = other RNA
agcgagtccagcatcgaccgcctgatg

SEQ ID NO: 34714 - RNA, 24 nt, synthetic construct
  misc_feature 1..24: note = T-complex protein 1 subunit zeta (155-162)
  source 1..24: mol_type = other RNA
agcgagaccgacacctccctgatc

SEQ ID NO: 34715 - RNA, 24 nt, synthetic construct
  misc_feature 1..24: note = Caprin-1 (287-294)
  source 1..24: mol_type = other RNA
agcgaggtggagtccaccgagtac

SEQ ID NO: 34716 - RNA, 27 nt, synthetic construct
  misc_feature 1..27: note = Galectin-2 (80-88)
  source 1..27: mol_type = other RNA
agcgaggtgaagttcaccgtcaccttc

SEQ ID NO: 34717 - RNA, 30 nt, synthetic construct
  misc_feature 1..30: note = Serpin B8 (75-84)
  source 1..30: mol_type = other RNA
agcgaggtgaaccgcaccggcacccagtac

SEQ ID NO: 34718 - RNA, 27 nt, synthetic construct
  misc_feature 1..27: note = Protein yippee-like 5 (54-62)
  source 1..27: mol_type = other RNA
agcgaggtgcaggaccgcgtcatgctg

SEQ ID NO: 34719 - RNA, 39 nt, synthetic construct
  misc_feature 1..39: note = Heterogeneous nuclear ribonucleoproteins A2/B1 (266-278)
  source 1..39: mol_type = other RNA
agcggcaacttcgggggctcccgcaacatggggggcccc

SEQ ID NO: 34720 - RNA, 27 nt, synthetic construct
  misc_feature 1..27: note = Protein PRRC2C (661-669)
  source 1..27: mol_type = other RNA
agcggctacttcaagcagttccagaag

SEQ ID NO: 34721 - RNA, 27 nt, synthetic construct
  misc_feature 1..27: note = CAAX prenyl protease 1 homolog (244-252)
  source 1..27: mol_type = other RNA
agcatcgacttccccctgaccaaggtg

SEQ ID NO: 34722 - RNA, 27 nt, synthetic construct
  misc_feature 1..27: note = Signal transducer and activator of transcription 2 (358-366)
  source 1..27: mol_type = other RNA
agcatcgaccgcaaccccccgcagctg

SEQ ID NO: 34723 - RNA, 36 nt, synthetic construct
  misc_feature 1..36: note = Phospholipase D1 (579-590)
  source 1..36: mol_type = other RNA
agcatcgactccaccagctcctacttcaaccactac

SEQ ID NO: 34724 - RNA, 33 nt, synthetic construct
  misc_feature 1..33: note = Double-stranded RNA-specific adenosine deaminase (938-948)
  source 1..33: mol_type = other RNA
agcatcttcgagcccgccaagggcggggagaag

SEQ ID NO: 34725 - RNA, 36 nt, synthetic construct
  misc_feature 1..36: note = DNA-directed RNA polymerase III subunit RPC4 (107-118)
  source 1..36: mol_type = other RNA
agcatcttcgagcagggccccgccgagatgatgaag

SEQ ID NO: 34726 - RNA, 27 nt, synthetic construct
  misc_feature 1..27: note = Serine/threonine-protein kinase MARK2 (578-586)
  source 1..27: mol_type = other RNA
agcatcttctccaagttcaccagcaag

SEQ ID NO: 34727 - RNA, 30 nt, synthetic construct
  misc_feature 1..30: note = Mortality factor 4-like protein 1 (192-201)
  source 1..30: mol_type = other RNA
agcatcctggaggactacgccaactacaag

SEQ ID NO: 34728 - RNA, 27 nt, synthetic construct
  misc_feature 1..27: note = Transmembrane protein 41B (276-284)
  source 1..27: mol_type = other RNA
agcatcctgcccgccatcttccagaag

SEQ ID NO: 34729 - RNA, 27 nt, synthetic construct
  misc_feature 1..27: note = DNA polymerase delta subunit 3 (419-427)
  source 1..27: mol_type = other RNA
agcatcaccggcttcttccagcgcaag

SEQ ID NO: 34730 - RNA, 36 nt, synthetic construct
  misc_feature 1..36: note = Double-stranded RNA-specific adenosine deaminase (134-145)
  source 1..36: mol_type = other RNA
agcatctaccaggaccaggagcagcgcatcctgaag

SEQ ID NO: 34731 - RNA, 27 nt, synthetic construct
  misc_feature 1..27: note = Histone H2B type 2-E (14-22)
  source 1..27: mol_type = other RNA
agcatctacgtgtacaaggtcctgaag

SEQ ID NO: 34732 - RNA, 27 nt, synthetic construct
  misc_feature 1..27: note = Serine/threonine-protein kinase Nek6 (66-74)
  source 1..27: mol_type = other RNA
agcctggccgacttccagatcgagaag

SEQ ID NO: 34733 - RNA, 27 nt, synthetic construct
  misc_feature 1..27: note = Poly(rC)-binding protein 2 (315-323)
  source 1..27: mol_type = other RNA
agcctggcccagtacctcatcaacgtg

SEQ ID NO: 34734 - RNA, 27 nt, synthetic construct
  misc_feature 1..27: note = Eukaryotic translation initiation factor 3 subunit C-like protein (835-843)
  source 1..27: mol_type = other RNA
agcctggaccagcccacccagaccgtg

SEQ ID NO: 34735 - RNA, 27 nt, synthetic construct
  misc_feature 1..27: note = FGFR1 oncogene partner 2 (28-36)
  source 1..27: mol_type = other RNA
agcctgatcgagcagaccaccgccctc

SEQ ID NO: 34736 - RNA, 27 nt, synthetic construct
  misc_feature 1..27: note = 60S ribosomal protein L10a (115-123)
  source 1..27: mol_type = other RNA
agcctgatcaagcagatcccccgcatc

SEQ ID NO: 34737 - RNA, 27 nt, synthetic construct
  misc_feature 1..27: note = Protein zyg-11 homolog B (362-370)
  source 1..27: mol_type = other RNA
agcctgctcgacgacctgcactccgcc

SEQ ID NO: 34738 - RNA, 33 nt, synthetic construct
  misc_feature 1..33: note = 4F2 cell-surface antigen heavy chain (289-299)
  source 1..33: mol_type = other RNA
agcctgctcgagtccaacaaggacctgctgctc

SEQ ID NO: 34739 - RNA, 30 nt, synthetic construct
  misc_feature 1..30: note = Homocysteine-responsive endoplasmic reticulum-resident ubiquitin-like domain member 1 protein (221-230)
  source 1..30: mol_type = other RNA
agcctgctccccgagggcccgcccgccatc

SEQ ID NO: 34740 - RNA, 27 nt, synthetic construct
  misc_feature 1..27: note = Bromodomain-containing protein 8 (139-147)
  source 1..27: mol_type = other RNA
agcctgctccccacctccccgcgcctg

SEQ ID NO: 34741 - RNA, 39 nt, synthetic construct
  misc_feature 1..39: note = Mitochondrial coenzyme A transporter SLC25A42 (36-48)
  source 1..39: mol_type = other RNA
agcctgctctccggcgccctggccggggcgctggccaag

SEQ ID NO: 34742 - RNA, 27 nt, synthetic construct
  misc_feature 1..27: note = Mediator of RNA polymerase II transcription subunit 12 (1321-1329)
  source 1..27: mol_type = other RNA
agcctgctctcccagcagcccttcctg

SEQ ID NO: 34743 - RNA, 30 nt, synthetic construct
  misc_feature 1..30: note = Ganglioside GM2 activator (3-12)
  source 1..30: mol_type = other RNA
agcctgatgcaggcccccctcctgatcgcc

SEQ ID NO: 34744 - RNA, 27 nt, synthetic construct
  misc_feature 1..27: note = Terminal uridylyltransferase 7 (826-834)
  source 1..27: mol_type = other RNA
agcctgaaccacttcacccactccgtg

SEQ ID NO: 34745 - RNA, 27 nt, synthetic construct
  misc_feature 1..27: note = Signal transducer and activator of transcription 6 (256-264)
  source 1..27: mol_type = other RNA
agcctgaccggccgcctcgacgaggtg

SEQ ID NO: 34746 - RNA, 27 nt, synthetic construct
  misc_feature 1..27: note = Hyccin (36-44)
  source 1..27: mol_type = other RNA
agcctggtgtccagcctctacaaggtc

SEQ ID NO: 34747 - RNA, 30 nt, synthetic construct
  misc_feature 1..30: note = Keratin, type II cytoskeletal 2 epidermal (342-351)
  source 1..30: mol_type = other RNA
agcatggacaactcccgcaacctggacctc

SEQ ID NO: 34748 - RNA, 30 nt, synthetic construct
  misc_feature 1..30: note = Serine/threonine-protein phosphatase 2B catalytic subunit beta isoform (116-125)
  source 1..30: mol_type = other RNA
agccccgccaacacccgctacctgttcctc

SEQ ID NO: 34749 - RNA, 27 nt, synthetic construct
  misc_feature 1..27: note = Treacle protein (700-708)
  source 1..27: mol_type = other RNA
agccccgcccaggtgaagacctccgtc

SEQ ID NO: 34750 - RNA, 51 nt, synthetic construct
  misc_feature 1..51: note = Alpha-enolase (263-279)
  source 1..51: mol_type = other RNA
agccccgacgacccgtcccgctacatcagccccgaccagctggccgacctc

SEQ ID NO: 34751 - RNA, 27 nt, synthetic construct
  misc_feature 1..27: note = LIM domain and actin-binding protein 1 (264-272)
  source 1..27: mol_type = other RNA
agccccgactcccgcgccagctccctg

SEQ ID NO: 34752 - RNA, 27 nt, synthetic construct
  misc_feature 1..27: note = Sterol regulatory element-binding protein 2 (1098-1106)
  source 1..27: mol_type = other RNA
agccccggccagcgcgccgtgctgctc

SEQ ID NO: 34753 - RNA, 27 nt, synthetic construct
  misc_feature 1..27: note = Midasin (1754-1762)
  source 1..27: mol_type = other RNA
agccccggcgtggggaagacctccctg

SEQ ID NO: 34754 - RNA, 30 nt, synthetic construct
  misc_feature 1..30: note = Nucleophosmin (70-79)
  source 1..30: mol_type = other RNA
agccccatcaaggtgaccctggccaccctc

SEQ ID NO: 34755 - RNA, 33 nt, synthetic construct
  misc_feature 1..33: note = Cation-independent mannose-6-phosphate receptor (554-564)
  source 1..33: mol_type = other RNA
agccccatgaaggagaagggcaacatccagctg

SEQ ID NO: 34756 - RNA, 27 nt, synthetic construct
  misc_feature 1..27: note = Transcription factor SOX-9 (199-207)
  source 1..27: mol_type = other RNA
agccccaacgccatcttcaaggccctg

SEQ ID NO: 34757 - RNA, 27 nt, synthetic construct
  misc_feature 1..27: note = F-box/LRR-repeat protein 6 (377-385)
  source 1..27: mol_type = other RNA
agccccaacctgcgcctcctggacctg

SEQ ID NO: 34758 - RNA, 27 nt, synthetic construct
  misc_feature 1..27: note = Adiponectin receptor protein 1 (231-239)
  source 1..27: mol_type = other RNA
agcccccagccgcgcctgatctacctc

SEQ ID NO: 34759 - RNA, 33 nt, synthetic construct
  misc_feature 1..33: note = Ribosomal protein S6 kinase beta-1 (418-428)
  source 1..33: mol_type = other RNA
agcccccgcaccccggtgtcccccgtcaagttc

SEQ ID NO: 34760 - RNA, 27 nt, synthetic construct
  misc_feature 1..27: note = Zinc finger protein 655 (12-20)
  source 1..27: mol_type = other RNA
agcccccgcgtgcagttccagtccctg

SEQ ID NO: 34761 - RNA, 33 nt, synthetic construct
  misc_feature 1..33: note = Probable aminopeptidase NPEPL1 (88-98)
  source 1..33: mol_type = other RNA
agcccctccgccgcccacttcatcacccgcctg

SEQ ID NO: 34762 - RNA, 33 nt, synthetic construct
  misc_feature 1..33: note = Activating transcription factor 7-interacting protein 1 (907-917)
  source 1..33: mol_type = other RNA
agcccctccaccaaccgcggcccgatccagatg

SEQ ID NO: 34763 - RNA, 30 nt, synthetic construct
  misc_feature 1..30: note = Protein transport protein Sec24A (613-622)
  source 1..30: mol_type = other RNA
agccccaccggcgggcgcatgtccgtgttc

SEQ ID NO: 34764 - RNA, 24 nt, synthetic construct
  misc_feature 1..24: note = Exportin-5 (826-833)
  source 1..24: mol_type = other RNA
agccccgtgttcaagaccgtcctg

SEQ ID NO: 34765 - RNA, 33 nt, synthetic construct
  misc_feature 1..33: note = Vacuolar protein sorting-associated protein 41 homolog (371-381)
  source 1..33: mol_type = other RNA
agcccctacctgccgcgcggcgaccccgtgctc

SEQ ID NO: 34766 - RNA, 30 nt, synthetic construct
  misc_feature 1..30: note Dolichyl-diphosphooligosaccharide-proteinosyltransferase subunit 1 (164-173)
  source 1..30: mol_type = other RNA
agcccctacccgaccaagacccagacgatg

SEQ ID NO: 34767 - RNA, 33 nt, synthetic construct
  misc_feature 1..33: note = Cell division control protein 6 homolog (6-16)
  source 1..33: mol_type = other RNA
agccaggcccaggccaccatctccttccccaag

SEQ ID NO: 34768 - RNA, 30 nt, synthetic construct
  misc_feature 1..30: note = Nuclear transcription factor Y subunit gamma (290-299)
  source 1..30: mol_type = other RNA
agccagttcaccgacggccagcagctgtac

SEQ ID NO: 34769 - RNA, 27 nt, synthetic construct
  misc_feature 1..27: note = Inactive serine/threonine-protein kinase VRK3 (34-42)
  source 1..27: mol_type = other RNA
agccagaccttcgtgaacccccacgtc

SEQ ID NO: 34770 - RNA, 27 nt, synthetic construct
  misc_feature 1..27: note = Vacuolar protein sorting-associated protein 13B (2936-2944)
  source 1..27: mol_type = other RNA
agccagtgggactcccccatgcgcgtg

SEQ ID NO: 34771 - RNA, 36 nt, synthetic construct
  misc_feature 1..36: note = Zinc finger MIZ domain-containing protein 2 (180-191)
  source 1..36: mol_type = other RNA
agccagtacggcgccatgggggccggccagtccttc

SEQ ID NO: 34772 - RNA, 27 nt, synthetic construct
  misc_feature 1..27: note = Methylsterol monooxygenase 1 (145-153)
  source 1..27: mol_type = other RNA
agccagtacaacgcctacaacgagaag

SEQ ID NO: 34773 - RNA, 30 nt, synthetic construct
  misc_feature 1..30: note = COUP transcription factor 2 (198-207)
  source 1..30: mol_type = other RNA
agccagtaccccaaccagccgacccgcttc

SEQ ID NO: 34774 - RNA, 27 nt, synthetic construct
  misc_feature 1..27: note = SUN domain-containing protein 2 (62-70)
  source 1..27: mol_type = other RNA
agctccgacgcccacaccagctactac

SEQ ID NO: 34775 - RNA, 27 nt, synthetic construct
  misc_feature 1..27: note = E3 ISG15-protein ligase HERC5 (113-121)
  source 1..27: mol_type = other RNA
agctccgacggcaagcccttcgagtac

SEQ ID NO: 34776 - RNA, 27 nt, synthetic construct
  misc_feature 1..27: note = Serrate RNA effector molecule homolog (88-96)
  source 1..27: mol_type = other RNA
agctccgacccctaccacagcggctac

SEQ ID NO: 34777 - RNA, 27 nt, synthetic construct
  misc_feature 1..27: note = Chromodomain-helicase-DNA-binding protein 1 (1545-1553)
  source 1..27: mol_type = other RNA
agctccgaccgccacctgacccagtac

SEQ ID NO: 34778 - RNA, 27 nt, synthetic construct
  misc_feature 1..27: note = Glycogen phosphorylase, brain form (813-821)
  source 1..27: mol_type = other RNA
agctccgaccgcaccatcaccgagtac

SEQ ID NO: 34779 - RNA, 27 nt, synthetic construct
  misc_feature 1..27: note = HMG box-containing protein 1 (78-86)
  source 1..27: mol_type = other RNA
agctccgacgtgagccaccaggagtac

SEQ ID NO: 34780 - RNA, 27 nt, synthetic construct
  misc_feature 1..27: note = Disintegrin and metalloproteinase domain-containing protein 23 (174-182)
  source 1..27: mol_type = other RNA
agctccgactacgtggagatccactac

SEQ ID NO: 34781 - RNA, 27 nt, synthetic construct
  misc_feature 1..27: note = Insulin-like growth factor I (5-13)
  source 1..27: mol_type = other RNA
agctccctgcccacccagctcttcaag

SEQ ID NO: 34782 - RNA, 33 nt, synthetic construct
  misc_feature 1..33: note = Keratin, type I cytoskeletal 10 (37-47)
  source 1..33: mol_type = other RNA
agctccagcaagggctccctggggggcgggttc

SEQ ID NO: 34783 - RNA, 63 nt, synthetic construct
  misc_feature 1..63: note = Keratin, type I cytoskeletal 10 (37-57)
  source 1..63: mol_type = other RNA
agctccagcaagggctccctggggggcgggttcagctccggcgggttcagcggcggctccttc

SEQ ID NO: 34784 - RNA, 45 nt, synthetic construct
  misc_feature 1..45: note = Keratin, type I cytoskeletal 10 (568-582)
  source 1..45: mol_type = other RNA
agctccagctccggcagcgtgggggagtccagctccaagggcccc

SEQ ID NO: 34785 - RNA, 27 nt, synthetic construct
  misc_feature 1..27: note = 40S ribosomal protein S19 (59-67)
  source 1..27: mol_type = other RNA
agcaccgcccgccacctgtacctccgg

SEQ ID NO: 34786 - RNA, 27 nt, synthetic construct
  misc_feature 1..27: note = Putative elongation factor 1-alpha-like 3 (157-165)
  source 1..27: mol_type = other RNA
agcaccgagcccccgtactcccagaag

SEQ ID NO: 34787 - RNA, 30 nt, synthetic construct
  misc_feature 1..30: note = DNA-dependent protein kinase catalytic subunit (1861-1870)
  source 1..30: mol_type = other RNA
agcaccttcgacacccagatcacgaagaag

SEQ ID NO: 34788 - RNA, 27 nt, synthetic construct
  misc_feature 1..27: note = Sentrin-specific protease 2 (440-448)
  source 1..27: mol_type = other RNA
agcaccttcttctaccccaagctgaag

SEQ ID NO: 34789 - RNA, 30 nt, synthetic construct
  misc_feature 1..30: note = Actin, alpha cardiac muscle 1 (22-31)
  source 1..30: mol_type = other RNA
agcaccttccagcagatgtggatctccaag

SEQ ID NO: 34790 - RNA, 27 nt, synthetic construct
  misc_feature 1..27: note = Transketolase (258-266)
  source 1..27: mol_type = other RNA
agcaccttctccgagatcttcaagaag

SEQ ID NO: 34791 - RNA, 30 nt, synthetic construct
  misc_feature 1..30: note = Syntenin-1 (205-214)
  source 1..30: mol_type = other RNA
agcaccggccacgtggggttcatcttcaag

SEQ ID NO: 34792 - RNA, 27 nt, synthetic construct
  misc_feature 1..27: note = E3 ubiquitin-protein ligase HECTD1 (455-463)
  source 1..27: mol_type = other RNA
agcaccatcttctactacgtgcagaag

SEQ ID NO: 34793 - RNA, 33 nt, synthetic construct
  misc_feature 1..33: note = Hexokinase-2 (408-418)
  source 1..33: mol_type = other RNA
agcaccatcggcgtggacgggtccgtctacaag

SEQ ID NO: 34794 - RNA, 27 nt, synthetic construct
  misc_feature 1..27: note = Heat shock protein HSP 90-beta (541-549)
  source 1..27: mol_type = other RNA
agcaccatgggctacatgatggccaag

SEQ ID NO: 34795 - RNA, 33 nt, synthetic construct
  misc_feature 1..33: note = Actin-related protein 2 (307-317)
  source 1..33: mol_type = other RNA
agcaccatgtaccccggcctgccgtcccgcctc

SEQ ID NO: 34796 - RNA, 36 nt, synthetic construct
  misc_feature 1..36: note = Adenosylhomocysteinase (85-96)
  source 1..36: mol_type = other RNA
agcacccaggaccacgccgccgcggccatcgccaag

SEQ ID NO: 34797 - RNA, 33 nt, synthetic construct
  misc_feature 1..33: note = Apoptosis-inducing factor 1, mitochondrial (76-86)
  source 1..33: mol_type = other RNA
agcaccgtgggcgccggggcctacgcgtacaag

SEQ ID NO: 34798 - RNA, 27 nt, synthetic construct
  misc_feature 1..27: note = Denticleless protein homolog (404-412)
  source 1..27: mol_type = other RNA
agcaccgtgggctgggcctcccagaag

SEQ ID NO: 34799 - RNA, 27 nt, synthetic construct
  misc_feature 1..27: note = WD repeat-containing protein 48 (319-327)
  source 1..27: mol_type = other RNA
agcaccgtgaacaagtggaccctgaag

SEQ ID NO: 34800 - RNA, 33 nt, synthetic construct
  misc_feature 1..33: note = Sarcoplasmic/endoplasmic reticulum calcium ATPase 2 (387-397)
  source 1..33: mol_type = other RNA
agcacctacgcccccatcggcgaggtgcacaag

SEQ ID NO: 34801 - RNA, 33 nt, synthetic construct
  misc_feature 1..33: note = Integrator complex subunit 11 (175-185)
  source 1..33: mol_type = other RNA
agcacctacgccaccacgatccgcgactccaag

SEQ ID NO: 34802 - RNA, 33 nt, synthetic construct
  misc_feature 1..33: note = Nucleolar RNA helicase 2 (324-334)
  source 1..33: mol_type = other RNA
agcacctacgagcaggtggacctgatcggcaag

SEQ ID NO: 34803 - RNA, 30 nt, synthetic construct
  misc_feature 1..30: note = Eukaryotic translation initiation factor 3 subunit H (119-128)
  source 1..30: mol_type = other RNA
agcacctactacggctccttcgtgacccgc

SEQ ID NO: 34804 - RNA, 27 nt, synthetic construct
  misc_feature 1..27: note = Heterogeneous nuclear ribonucleoprotein A1-like 2 (5-13)
  source 1..27: mol_type = other RNA
agcgtggacaagatcgtcatccagaag

SEQ ID NO: 34805 - RNA, 30 nt, synthetic construct
  misc_feature 1..30: note = Mitochondrial import inner membrane translocase subunit TIM50 (213-222)
  source 1..30: mol_type = other RNA
agcgtggacccccacggcttcatctcctac

SEQ ID NO: 34806 - RNA, 27 nt, synthetic construct
  misc_feature 1..27: note = Lysine-tRNA ligase (98-106)
  source 1..27: mol_type = other RNA
agcgtggaccccaaccagtactacaag

SEQ ID NO: 34807 - RNA, 33 nt, synthetic construct
  misc_feature 1..33: note = 39S ribosomal protein L43, mitochondrial (93-103)
  source 1..33: mol_type = other RNA
agcgtggaggagatctccaccctggtccagaag

SEQ ID NO: 34808 - RNA, 33 nt, synthetic construct
  misc_feature 1..33: note = Chromodomain-helicase-DNA-binding protein 3 (1189-1199)
  source 1..33: mol_type = other RNA
agcgtggaggagcgcatcacccaggtcgccaag

SEQ ID NO: 34809 - RNA, 39 nt, synthetic construct
  misc_feature 1..39: note = Cirhin (180-192)
  source 1..39: mol_type = other RNA
agcgtgttcgacgtcaagtccggcagcgccgtgcacaag

SEQ ID NO: 34810 - RNA, 36 nt, synthetic construct
  misc_feature 1..36: note = Histone-lysine N-methyltransferase EHMT1 (87-98)
  source 1..36: mol_type = other RNA
agcgtgatcggctccaacgggtacatcctgaacaag

SEQ ID NO: 34811 - RNA, 30 nt, synthetic construct
  misc_feature 1..30: note = Integrin alpha-4 (81-90)
  source 1..30: mol_type = other RNA
agcgtgatcaaccccggcgccatctaccgc

SEQ ID NO: 34812 - RNA, 48 nt, synthetic construct
  misc_feature 1..48: note = Protein S100-A9 (23-38)
  source 1..48: mol_type = other RNA
agcgtgaagctgggccaccccgacaccctcaaccagggggagttcaag

SEQ ID NO: 34813 - RNA, 27 nt, synthetic construct
  misc_feature 1..27: note = Mediator of RNA polymerase II transcription subunit 6 (28-36)
  source 1..27: mol_type = other RNA
agcgtgctggactacttctccgagcgc

SEQ ID NO: 34814 - RNA, 39 nt, synthetic construct
  misc_feature 1..39: note = Gelsolin (378-390)
  source 1..39: mol_type = other RNA
agcgtgctgcccgagggcggggagaccccgctcttcaag

SEQ ID NO: 34815 - RNA, 33 nt, synthetic construct
  misc_feature 1..33: note = Heat shock 70 kDa protein 14 (206-216)
  source 1..33: mol_type = other RNA
agcgtgatggaggtcaactccggcatctaccgc

SEQ ID NO: 34816 - RNA, 30 nt, synthetic construct
  misc_feature 1..30: note = Basic leucine zipper and W2 domain-containing protein 1 (215-224)
  source 1..30: mol_type = other RNA
agcgtgatgtccaccgtcgagtggaacaag

SEQ ID NO: 34817 - RNA, 27 nt, synthetic construct
  misc_feature 1..27: note = 60S ribosomal protein L7 (149-157)
  source 1..27: mol_type = other RNA
agcgtgaacgagctgatctacaagcgc

SEQ ID NO: 34818 - RNA, 36 nt, synthetic construct
  misc_feature 1..36: note = Chromatin complexes subunit BAP18 (122-133)
  source 1..36: mol_type = other RNA
agcgtgcccgaggccggcgggccgcccatcaagaag

SEQ ID NO: 34819 - RNA, 27 nt, synthetic construct
  misc_feature 1..27: note = ADP/ATP translocase 2 (180-188)
  source 1..27: mol_type = other RNA
agcgtgcagggcatcatcatctaccgc

SEQ ID NO: 34820 - RNA, 27 nt, synthetic construct
  misc_feature 1..27: note = Anaphase-promoting complex subunit 16 (24-32)
  source 1..27: mol_type = other RNA
agcgtgtccgacctggcccccccgcgc

SEQ ID NO: 34821 - RNA, 27 nt, synthetic construct
  misc_feature 1..27: note = Nesprin-2 (1819-1827)
  source 1..27: mol_type = other RNA
agcgtgtccgacctgttcaacaccaag

SEQ ID NO: 34822 - RNA, 36 nt, synthetic construct
  misc_feature 1..36: note = A-kinase anchor protein 1, mitochondrial (874-885)
  source 1..36: mol_type = other RNA
agcgtggtcggcgacgaggtggtgctgatcaaccgc

SEQ ID NO: 34823 - RNA, 36 nt, synthetic construct
  misc_feature 1..36: note = Exocyst complex component 6 (35-46)
  source 1..36: mol_type = other RNA
agcgtgtacgacgaccagcccaacgcccacaagaag

SEQ ID NO: 34824 - RNA, 30 nt, synthetic construct
  misc_feature 1..30: note = Dehydrodolichyl diphosphate syntase complex subunit NUS1 (133-142)
  source 1..30: mol_type = other RNA
agcgtgtacgaccaccagggcatcttcaag

SEQ ID NO: 34825 - RNA, 33 nt, synthetic construct
  misc_feature 1..33: note = Dehydrodolichyl diphosphate syntase complex subunit NUS1 (133-143)
  source 1..33: mol_type = other RNA
agcgtgtacgaccaccagggcatcttcaagcgc

SEQ ID NO: 34826 - RNA, 48 nt, synthetic construct
  misc_feature 1..48: note = Actin, alpha skeletal muscle (35-50)
  source 1..48: mol_type = other RNA
agctacgagctgcccgacggccaggtgatcaccatcgggaacgagcgc

SEQ ID NO: 34827 - RNA, 30 nt, synthetic construct
  misc_feature 1..30: note = Tetratricopeptide repeat protein 27 (18-27)
  source 1..30: mol_type = other RNA
agctacctggagaagcaggtggtcaccttc

SEQ ID NO: 34828 - RNA, 27 nt, synthetic construct
  misc_feature 1..27: note = U5 small nuclear ribonucleoprotein 200 kDa helicase (1958-1966)
  source 1..27: mol_type = other RNA
agctacctgaagcagctcccccacttc

SEQ ID NO: 34829 - RNA, 27 nt, synthetic construct
  misc_feature 1..27: note = Intraflagellar transport protein 122 homolog (100-108)
  source 1..27: mol_type = other RNA
agctacaaccccatcacccaccagctg

SEQ ID NO: 34830 - RNA, 27 nt, synthetic construct
  misc_feature 1..27: note = Constitutive coactivator of peroxisome proliferator-activated receptor gamma (261-269)
  source 1..27: mol_type = other RNA
agctacacctccgtgaaggagaacttc

SEQ ID NO: 34831 - RNA, 24 nt, synthetic construct
  misc_feature 1..24: note = 60S ribosomal protein L24 (24-31)
  source 1..24: mol_type = other RNA
accgacggcaaggtgttccagttc

SEQ ID NO: 34832 - RNA, 27 nt, synthetic construct
  misc_feature 1..27: note = DNA-directed RNA polymerase II subunit RPB11-b2 (113-121)
  source 1..27: mol_type = other RNA
accgacctgatccgcgagctcagcctg

SEQ ID NO: 34833 - RNA, 27 nt, synthetic construct
  misc_feature 1..27: note = WD repeat-containing protein (630-638)
  source 1..27: mol_type = other RNA
accgacctgatgcgcctcaaggagatc

SEQ ID NO: 34834 - RNA, 27 nt, synthetic construct
  misc_feature 1..27: note = Protein disulfide-isomerase (296-304)
  source 1..27: mol_type = other RNA
accgacaaccagcgcatcctggagttc

SEQ ID NO: 34835 - RNA, 27 nt, synthetic construct
  misc_feature 1..27: note = Tensin-1 (1649-1657)
  source 1..27: mol_type = other RNA
accgacaaccagcgcaagctgttcttc

SEQ ID NO: 34836 - RNA, 27 nt, synthetic construct
  misc_feature 1..27: note = Keratin, type I cytoskeletal 19 (327-335)
  source 1..27: mol_type = other RNA
accgaggcccgcttcggcgcccagctg

SEQ ID NO: 34837 - RNA, 27 nt, synthetic construct
  misc_feature 1..27: note = Nucleolin (584-592)
  source 1..27: mol_type = other RNA
accgaggagaccctgaaggagagcttc

SEQ ID NO: 34838 - RNA, 27 nt, synthetic construct
  misc_feature 1..27: note = UPF0568 protein C14orf166 (23-31)
  source 1..27: mol_type = other RNA
accgagttccgcaacttcatcgtgtgg

SEQ ID NO: 34839 - RNA, 27 nt, synthetic construct
  misc_feature 1..27: note = Cytoplasmic dynein 1 heavy chain 1 (1693-1701)
  source 1..27: mol_type = other RNA
accgagcaccccaagatcaacgagtgg

SEQ ID NO: 34840 - RNA, 27 nt, synthetic construct
  misc_feature 1..27: note = Disheveled-associated activator of morphogenesis 1 (629-637)
  source 1..27: mol_type = other RNA
accgagatcgacgacaccaaggtgttc

SEQ ID NO: 34841 - RNA, 27 nt, synthetic construct
  misc_feature 1..27: note = Proteasome activator complex subunit 3 (207-215)
  source 1..27: mol_type = other RNA
accgagatcgacgagaaggagtacatc

SEQ ID NO: 34842 - RNA, 33 nt, synthetic construct
  misc_feature 1..33: note = Nucleolin (452-462)
  source 1..33: mol_type = other RNA
accgagatcgacggccgcagcatctccctgtac

SEQ ID NO: 34843 - RNA, 30 nt, synthetic construct
  misc_feature 1..30: note = Coatomer subunit alpha (1207-1216)
  source 1..30: mol_type = other RNA
accgagatcggcaaggacgtgatcgggctg

SEQ ID NO: 34844 - RNA, 27 nt, synthetic construct
  misc_feature 1..27: note = Thiopurine S-methyltransferase (113-121)
  source 1..27: mol_type = other RNA
accgagatccccggcaccaaggtgttc

SEQ ID NO: 34845 - RNA, 30 nt, synthetic construct
  misc_feature 1..30: note = Angiomotin (467-476)
  source 1..30: mol_type = other RNA
accgagatccagcgcgtgagcgaggcctac

SEQ ID NO: 34846 - RNA, 27 nt, synthetic construct
  misc_feature 1..27: note = Eukaryotic translation initiation factor 3 subunit C-like protein (323-331)
  source 1..27: mol_type = other RNA
accgagatcacccacgccgtggtcatc

SEQ ID NO: 34847 - RNA, 27 nt, synthetic construct
  misc_feature 1..27: note = Fructose-bisphosphate aldolase A (206-214)
  source 1..27: mol_type = other RNA
accgagaaggtgctggccgccgtctac

SEQ ID NO: 34848 - RNA, 27 nt, synthetic construct
  misc_feature 1..27: note = Staphylococcal nuclease domain-containing protein 1 (260-268)
  source 1..27: mol_type = other RNA
accgagctgctcctgaaggagggcttc

SEQ ID NO: 34849 - RNA, 27 nt, synthetic construct
  misc_feature 1..27: note = Sorting nexin-5 (292-300)
  source 1..27: mol_type = other RNA
accgagctgctccgctactacatgctg

SEQ ID NO: 34850 - RNA, 27 nt, synthetic construct
  misc_feature 1..27: note = Tuftelin (365-373)
  source 1..27: mol_type = other RNA
accgagaaccccggcagcatccgcatc

SEQ ID NO: 34851 - RNA, 27 nt, synthetic construct
  misc_feature 1..27: note = KN motif and ankyrin repeat domain-containing protein 2 (612-620)
  source 1..27: mol_type = other RNA
accgagcgcgagctgaaggtggcctac

SEQ ID NO: 34852 - RNA, 27 nt, synthetic construct
  misc_feature 1..27: note = Tensin-1 (19-27)
  source 1..27: mol_type = other RNA
accgagcgcatcatcgccgtgagcttc

SEQ ID NO: 34853 - RNA, 30 nt, synthetic construct
  misc_feature 1..30: note = Microtubule-actin cross-linking factor 1, isoforms 1/2/3/5 (327-336)
  source 1..30: mol_type = other RNA
accgaggtggacagccgctggcaggagtac

SEQ ID NO: 34854 - RNA, 27 nt, synthetic construct
  misc_feature 1..27: note = Melanoma-associated antigen D2 (67-75)
  source 1..27: mol_type = other RNA
accgaggtgagcaagacccccgaggcc

SEQ ID NO: 34855 - RNA, 33 nt, synthetic construct
  misc_feature 1..33: note = Cytoplasmic dynein 1 heavy chain 1 (3550-3560)
  source 1..33: mol_type = other RNA
accgagtacctgagcaacgccgacgagcgcctc

SEQ ID NO: 34856 - RNA, 30 nt, synthetic construct
  misc_feature 1..30: note = Autophagy-related protein 9A (6-15)
  source 1..30: mol_type = other RNA
accgagtaccagcgcctggaggccagctac

SEQ ID NO: 34857 - RNA, 39 nt, synthetic construct
  misc_feature 1..39: note = Glyceraldehyde-3-phosphate dehydrogenase (3-15)
  source 1..39: mol_type = other RNA
accttcgacgccggcgccgggatcgcgctgaacgaccac

SEQ ID NO: 34858 - RNA, 27 nt, synthetic construct
  misc_feature 1..27: note = Hydroxymethylglutaryl-CoA synthase, cytoplasmic (131-139)
  source 1..27: mol_type = other RNA
accatcatcgacaagagcaagtccgtg

SEQ ID NO: 34859 - RNA, 33 nt, synthetic construct
  misc_feature 1..33: note = Histone H3.3 (119-129)
  source 1..33: mol_type = other RNA
accatcatgcccaaggacatccagctggcccgc

SEQ ID NO: 34860 - RNA, 30 nt, synthetic construct
  misc_feature 1..30: note = NADH dehydrogenase (ubiquinone) iron-sulfur protein 5 (19-28)
  source 1..30: mol_type = other RNA
accatccagagcggcgagcagccctacaag

SEQ ID NO: 34861 - RNA, 30 nt, synthetic construct
  misc_feature 1..30: note = T-complex protein 1 subunit zeta-2 (204-213)
  source 1..30: mol_type = other RNA
accaaggaggtgaacagcggcttcttctac

SEQ ID NO: 34862 - RNA, 27 nt, synthetic construct
  misc_feature 1..27: note = Serine/threonine-protein phosphatase 6 regulatory ankyrin repeat subunit C (603-611)
  source 1..27: mol_type = other RNA
accctggccgagaccctcgtgaacctg

SEQ ID NO: 34863 - RNA, 27 nt, synthetic construct
  misc_feature 1..27: note = Leucine-rich repeat-containing protein 41 (19-27)
  source 1..27: mol_type = other RNA
accctggccagctccctccacaccctg

SEQ ID NO: 34864 - RNA, 27 nt, synthetic construct
  misc_feature 1..27: note = MOB kinase activator 1A (130-138)
  source 1..27: mol_type = other RNA
accctgttccccagcaagatcggcgtg

SEQ ID NO: 34865 - RNA, 27 nt, synthetic construct
  misc_feature 1..27: note = A-kinase anchor protein 11 (1555-1563)
  source 1..27: mol_type = other RNA
accctgggcagcaccgtgttccgcgtc

SEQ ID NO: 34866 - RNA, 27 nt, synthetic construct
  misc_feature 1..27: note = Nucleosome-remodeling factor subunit BPTF (281-289)
  source 1..27: mol_type = other RNA
accctgatggccgagatgcacgtggtc

SEQ ID NO: 34867 - RNA, 27 nt, synthetic construct
  misc_feature 1..27: note = WD repeat-containing protein 81 (157-165)
  source 1..27: mol_type = other RNA
accctgatggacatcctcccccgcatc

SEQ ID NO: 34868 - RNA, 27 nt, synthetic construct
  misc_feature 1..27: note = Exportin-1 (346-354)
  source 1..27: mol_type = other RNA
accctgatggaggccctccactacatg

SEQ ID NO: 34869 - RNA, 27 nt, synthetic construct
  misc_feature 1..27: note = Splicing factor 3A subunit 1 (521-529)
  source 1..27: mol_type = other RNA
accctgcaggagcagatcgaggccatc

SEQ ID NO: 34870 - RNA, 27 nt, synthetic construct
  misc_feature 1..27: note = Replication protein A 32 kDa subunit (58-66)
  source 1..27: mol_type = other RNA
accctggtggacgaggtcttccgcatc

SEQ ID NO: 34871 - RNA, 27 nt, synthetic construct
  misc_feature 1..27: note = Elongator complex protein 2 (406-414)
  source 1..27: mol_type = other RNA
accctgtggcccgaggtgcagaagctc

SEQ ID NO: 34872 - RNA, 27 nt, synthetic construct
  misc_feature 1..27: note = Exosome complex component RRP42 (108-116)
  source 1..27: mol_type = other RNA
accctgtaccgcatcttcaacaacaag

SEQ ID NO: 34873 - RNA, 27 nt, synthetic construct
  misc_feature 1..27: note = Transmembrane protein 50A (48-56)
  source 1..27: mol_type = other RNA
accatgaaggacttcaaccacagctac

SEQ ID NO: 34874 - RNA, 27 nt, synthetic construct
  misc_feature 1..27: note = snRNA-activating protein complex subunit 4 (1152-1160)
  source 1..27: mol_type = other RNA
acccccgccccgcccacccacgccctg

SEQ ID NO: 34875 - RNA, 30 nt, synthetic construct
  misc_feature 1..30: note = Spectrin beta chain, non-erythrocytic 1 (2320-2329)
  source 1..30: mol_type = other RNA
acccccgccagctcccgcgcccagaccctg

SEQ ID NO: 34876 - RNA, 33 nt, synthetic construct
  misc_feature 1..33: note = 26S proteasome non-ATPase regulatory subunit 4 (65-75)
  source 1..33: mol_type = other RNA
acccccgacaccggccgcatcctgagcaagctc

SEQ ID NO: 34877 - RNA, 27 nt, synthetic construct
  misc_feature 1..27: note = ATP-dependent zinc metalloprotease YME1L1 (25-33)
  source 1..27: mol_type = other RNA
acccccaagaacaccagcgtgtccctg

SEQ ID NO: 34878 - RNA, 27 nt, synthetic construct
  misc_feature 1..27: note = Galectin-8 (193-201)
  source 1..27: mol_type = other RNA
acccccatgggcccggggcgcaccgtg

SEQ ID NO: 34879 - RNA, 27 nt, synthetic construct
  misc_feature 1..27: note = WAS/WASL-interacting protein family member 1 (331-339)
  source 1..27: mol_type = other RNA
accccccgcctgccgcagcggaacctc

SEQ ID NO: 34880 - RNA, 33 nt, synthetic construct
  misc_feature 1..33: note = ATP synthase F(0) complex subunit C2, mitochondrial (26-36)
  source 1..33: mol_type = other RNA
acccccagcctggtgaagtccaccagccagctc

SEQ ID NO: 34881 - RNA, 27 nt, synthetic construct
  misc_feature 1..27: note = Ubiquitin carboxyl-terminal hydrolase 48 (860-868)
  source 1..27: mol_type = other RNA
acccaggccaccatctacgtgcacaag

SEQ ID NO: 34882 - RNA, 33 nt, synthetic construct
  misc_feature 1..33: note = HLA class I histocompatibility antigen, B-13 alpha chain (63-73)
  source 1..33: mol_type = other RNA
acccagatcagcaagaccaacacgcagacctac

SEQ ID NO: 34883 - RNA, 30 nt, synthetic construct
  misc_feature 1..30: note = rRNA-processing protein FCF1 homolog (61-70)
  source 1..30: mol_type = other RNA
acccagctgggccccccgtaccacatcctc

SEQ ID NO: 34884 - RNA, 27 nt, synthetic construct
  misc_feature 1..27: note = 14-3-3 protein gamma (115-123)
  source 1..27: mol_type = other RNA
acccagtacgagagcaaggtgttctac

SEQ ID NO: 34885 - RNA, 27 nt, synthetic construct
  misc_feature 1..27: note = Gamma-interferon-inducible protein 16 (419-427)
  source 1..27: mol_type = other RNA
accaccttccccgagagccacctgcgc

SEQ ID NO: 34886 - RNA, 27 nt, synthetic construct
  misc_feature 1..27: note = MIT domain-containing protein 1 (236-244)
  source 1..27: mol_type = other RNA
accaccgtggacatcttccacaagaag

SEQ ID NO: 34887 - RNA, 27 nt, synthetic construct
  misc_feature 1..27: note = Lys-63-specific deubiquitinase BRCC36 (66-74)
  source 1..27: mol_type = other RNA
accgtggccgagaaggtcgacgccgtg

SEQ ID NO: 34888 - RNA, 27 nt, synthetic construct
  misc_feature 1..27: note = 28S ribosomal protein S24, mitochondrial (78-86)
  source 1..27: mol_type = other RNA
accgtggaggacgtcttcctgcgcaag

SEQ ID NO: 34889 - RNA, 36 nt, synthetic construct
  misc_feature 1..36: note = Phosphatidylinositol-4,5-bisphosphate 4-phosphatase 2 (39-50)
  source 1..36: mol_type = other RNA
accgtggagagccccgagctgcaggtcccgtacaag

SEQ ID NO: 34890 - RNA, 27 nt, synthetic construct
  misc_feature 1..27: note = Glycine-tRNA ligase (533-541)
  source 1..27: mol_type = other RNA
accgtgttcgagcacaccttccacgtc

SEQ ID NO: 34891 - RNA, 33 nt, synthetic construct
  misc_feature 1..33: note = Tubulin alpha-1C chain (38-48)
  source 1..33: mol_type = other RNA
accgtgatcgacgaggtccgcaccggcacgtac

SEQ ID NO: 34892 - RNA, 27 nt, synthetic construct
  misc_feature 1..27: note = Transcription factor BTF3 (76-84)
  source 1..27: mol_type = other RNA
accgtgatccacttcaacaaccccaag

SEQ ID NO: 34893 - RNA, 33 nt, synthetic construct
  misc_feature 1..33: note = DNA replication licensing factor MCM6 (163-173)
  source 1..33: mol_type = other RNA
accgtgatccgcgacgtcgagcagcagttcaag

SEQ ID NO: 34894 - RNA, 33 nt, synthetic construct
  misc_feature 1..33: note Dolichyl-diphosphooligosaccharide-proteinosyltransferase subunit 2 (165-175)
  source 1..33: mol_type = other RNA
accgtgctggagagccgctccctcttcagcaag

SEQ ID NO: 34895 - RNA, 48 nt, synthetic construct
  misc_feature 1..48: note = Actin, cytoplasmic 2 (36-51)
  source 1..48: mol_type = other RNA
accgtgctgagcggcgggaccacgatgtaccccggcatcgccgaccgc

SEQ ID NO: 34896 - RNA, 27 nt, synthetic construct
  misc_feature 1..27: note = Ubiquitin-protein ligase E3A (325-333)
  source 1..27: mol_type = other RNA
acctacaaggtgatcagcaacgagttc

SEQ ID NO: 34897 - RNA, 27 nt, synthetic construct
  misc_feature 1..27: note = Vacuolar protein sorting-associated protein 51 homolog (480-488)
  source 1..27: mol_type = other RNA
gtggccgacgaggagctggtccacctc

SEQ ID NO: 34898 - RNA, 24 nt, synthetic construct
  misc_feature 1..24: note = Eukaryotic translation initiation factor 3 subunit H (221-228)
  source 1..24: mol_type = other RNA
gtggccgacaagcacgagctgctc

SEQ ID NO: 34899 - RNA, 27 nt, synthetic construct
  misc_feature 1..27: note = Bifunctional polynucleotide phosphatase/kinase (54-62)
  source 1..27: mol_type = other RNA
gtggccgaccccgagacccgcaccgtc

SEQ ID NO: 34900 - RNA, 27 nt, synthetic construct
  misc_feature 1..27: note = Serine/threonine-protein kinase PLK2 (471-479)
  source 1..27: mol_type = other RNA
gtggccgacaccgtcgcccgcgtgctg

SEQ ID NO: 34901 - RNA, 27 nt, synthetic construct
  misc_feature 1..27: note = Ubiquitin carboxyl-terminal hydrolase 16 (733-741)
  source 1..27: mol_type = other RNA
gtggccgaggagaacacccgcgtcctg

SEQ ID NO: 34902 - RNA, 27 nt, synthetic construct
  misc_feature 1..27: note = HLA class I histocompatibility antigen, B-8 alpha chain (151-159)
  source 1..27: mol_type = other RNA
gtggccgagcaggaccgcgcctacctg

SEQ ID NO: 34903 - RNA, 27 nt, synthetic construct
  misc_feature 1..27: note = Mitochondrial import receptor subunit TOM5 homolog (35-43)
  source 1..27: mol_type = other RNA
gtggccctgctccgcgtcacccccttc

SEQ ID NO: 34904 - RNA, 54 nt, synthetic construct
  misc_feature 1..54: note = Actin, cytoplasmic 1 (13-30)
  source 1..54: mol_type = other RNA
gtggcccccgaggagcacccggtcctgctcaccgaggcccccctgaaccccaag

SEQ ID NO: 34905 - RNA, 24 nt, synthetic construct
  misc_feature 1..24: note = Polymerase I and transcript release factor (229-236)
  source 1..24: mol_type = other RNA
gtggacgacttcaagaaggccttc

SEQ ID NO: 34906 - RNA, 27 nt, synthetic construct
  misc_feature 1..27: note = Cholesteryl ester transfer protein (230-238)
  source 1..27: mol_type = other RNA
gtggacatcagcctgaccggcgacccc

SEQ ID NO: 34907 - RNA, 24 nt, synthetic construct
  misc_feature 1..24: note = Heterogeneous nuclear ribonucleoproteins C1/C2 (33-40)
  source 1..24: mol_type = other RNA
gtggaggccatcttcagcaagtac

SEQ ID NO: 34908 - RNA, 27 nt, synthetic construct
  misc_feature 1..27: note = Sodium/potassium-transporting ATPase subunit alpha-1 (701-709)
  source 1..27: mol_type = other RNA
gtggaggacagctacggccagcagtgg

SEQ ID NO: 34909 - RNA, 30 nt, synthetic construct
  misc_feature 1..30: note = 116 kDa U5 small nuclear ribonucleoprotein component (621-630)
  source 1..30: mol_type = other RNA
gtggaggagagcggcgagcacgtcatcctg

SEQ ID NO: 34910 - RNA, 33 nt, synthetic construct
  misc_feature 1..33: note = Adenosylhomocysteinase 2 (222-232)
  source 1..33: mol_type = other RNA
gtggaggagagcgtcaccggcgtgcaccgcctg

SEQ ID NO: 34911 - RNA, 36 nt, synthetic construct
  misc_feature 1..36: note = ATP synthase subunit alpha, mitochondrial (96-107)
  source 1..36: mol_type = other RNA
gtggagttcagctccggcctgaaggggatgagcctc

SEQ ID NO: 34912 - RNA, 27 nt, synthetic construct
  misc_feature 1..27: note = HLA class II histocompatibility antigen, DRB1-4 beta chain (204-212)
  source 1..27: mol_type = other RNA
gtggagcaccccagcctgacctccccg

SEQ ID NO: 34913 - RNA, 33 nt, synthetic construct
  misc_feature 1..33: note = Protein disulfide-isomerase A6 (411-421)
  source 1..33: mol_type = other RNA
gtggagctggacgacctcggcaaggacgagctg

SEQ ID NO: 34914 - RNA, 27 nt, synthetic construct
  misc_feature 1..27: note = Galectin-3 (204-212)
  source 1..27: mol_type = other RNA
gtggagcccgaccacttcaaggtcgcc

SEQ ID NO: 34915 - RNA, 24 nt, synthetic construct
  misc_feature 1..24: note = SARM1 protein (269-276)
  source 1..24: mol_type = other RNA
gtggagcgcgaggtcgagcaggtg

SEQ ID NO: 34916 - RNA, 24 nt, synthetic construct
  misc_feature 1..24: note = N6-adenosine-methyltransferase 70 kDa subunit (116-123)
  source 1..24: mol_type = other RNA
gtggagagcctgctccagaagttc

SEQ ID NO: 34917 - RNA, 27 nt, synthetic construct
  misc_feature 1..27: note = Protein RMD5 homolog B (280-288)
  source 1..27: mol_type = other RNA
gtggagagccccctgtccgtcagcttc

SEQ ID NO: 34918 - RNA, 33 nt, synthetic construct
  misc_feature 1..33: note = Nucleosome assembly protein 1-like 1 (60-70)
  source 1..33: mol_type = other RNA
gtggagacccccaccggctacatcgagagcctg

SEQ ID NO: 34919 - RNA, 27 nt, synthetic construct
  misc_feature 1..27: note = Influenza virus NS1A-binding protein (83-91)
  source 1..27: mol_type = other RNA
gtggaggtcctgctcaactacgcctac

SEQ ID NO: 34920 - RNA, 27 nt, synthetic construct
  misc_feature 1..27: note = Rho GDP-dissociation inhibitor 1 (108-116)
  source 1..27: mol_type = other RNA
gtggagtaccgcatcaagatcagcttc

SEQ ID NO: 34921 - RNA, 51 nt, synthetic construct
  misc_feature 1..51: note = 40S ribosomal protein S3a (66-82)
  source 1..51: mol_type = other RNA
gtgttcgaggtcagcctggccgacctccagaacgacgaggtggccttccgc

SEQ ID NO: 34922 - RNA, 27 nt, synthetic construct
  misc_feature 1..27: note = 40S ribosomal protein S23 (112-120)
  source 1..27: mol_type = other RNA
gtgggcgacatccccggggtccgcttc

SEQ ID NO: 34923 - RNA, 27 nt, synthetic construct
  misc_feature 1..27: note = AT-rich interactive domain-containing protein 1A (1378-1386)
  source 1..27: mol_type = other RNA
gtgggcgaccccgggcagcgcaccctg

SEQ ID NO: 34924 - RNA, 27 nt, synthetic construct
  misc_feature 1..27: note = Bromodomain-containing protein 8 (239-247)
  source 1..27: mol_type = other RNA
gtgggcgacccccacaccgtcaccgtg

SEQ ID NO: 34925 - RNA, 27 nt, synthetic construct
  misc_feature 1..27: note = F-box/LRR-repeat protein 19 (440-448)
  source 1..27: mol_type = other RNA
gtgggcgaccccagcgtccacctgctc

SEQ ID NO: 34926 - RNA, 27 nt, synthetic construct
  misc_feature 1..27: note = Nucleolar protein 56 (117-125)
  source 1..27: mol_type = other RNA
gtgatcgccgagatcctgcgcggcgtc

SEQ ID NO: 34927 - RNA, 27 nt, synthetic construct
  misc_feature 1..27: note = Kelch-like ECH-associated protein 1 (420-428)
  source 1..27: mol_type = other RNA
gtgatcgacggccacatctacgccgtc

SEQ ID NO: 34928 - RNA, 27 nt, synthetic construct
  misc_feature 1..27: note = Eukaryotic translation initiation factor 3 subunit L (83-91)
  source 1..27: mol_type = other RNA
gtgatcgaccagaaggtctacgagatc

SEQ ID NO: 34929 - RNA, 27 nt, synthetic construct
  misc_feature 1..27: note = E3 ubiquitin-protein ligase RNF213 (1305-1313)
  source 1..27: mol_type = other RNA
gtgatcttcaaggacttcgtcaacaag

SEQ ID NO: 34930 - RNA, 27 nt, synthetic construct
  misc_feature 1..27: note = MICOS complex subunit MIC27 (158-166)
  source 1..27: mol_type = other RNA
gtgatcatcgccaaggtcaccgccaag

SEQ ID NO: 34931 - RNA, 39 nt, synthetic construct
  misc_feature 1..39: note = Elongation factor 1-alpha 1 (344-356)
  source 1..39: mol_type = other RNA
gtgatcatcctgaaccaccccggccagatcagcgccggg

SEQ ID NO: 34932 - RNA, 27 nt, synthetic construct
  misc_feature 1..27: note = Plectin (1820-1828)
  source 1..27: mol_type = other RNA
gtgctggccgagaagctcgccgcgatc

SEQ ID NO: 34933 - RNA, 24 nt, synthetic construct
  misc_feature 1..24: note = Lysine-specific demethylase 5A (1593-1600)
  source 1..24: mol_type = other RNA
gtgctggacatccccagcaagtac

SEQ ID NO: 34934 - RNA, 27 nt, synthetic construct
  misc_feature 1..27: note = Integrin-linked protein kinase (219-227)
  source 1..27: mol_type = other RNA
gtgctgcacgagggcaccaacttcgtc

SEQ ID NO: 34935 - RNA, 27 nt, synthetic construct
  misc_feature 1..27: note = Interleukin-12 subunit alpha (14-22)
  source 1..27: mol_type = other RNA
gtgctgctcgaccacctgagcctggcc

SEQ ID NO: 34936 - RNA, 33 nt, synthetic construct
  misc_feature 1..33: note = Tumor necrosis factor receptor superfamily member 19 (5-15)
  source 1..33: mol_type = other RNA
gtgctgctcgagcaggagaagaccttcttcacc

SEQ ID NO: 34937 - RNA, 30 nt, synthetic construct
  misc_feature 1..30: note = Protein CNPPD1 (210-219)
  source 1..30: mol_type = other RNA
gtgctgctcgagcagcccacctggcagctg

SEQ ID NO: 34938 - RNA, 30 nt, synthetic construct
  misc_feature 1..30: note = Fatty acid synthase (2105-2114)
  source 1..30: mol_type = other RNA
gtgctgagctccttcgtcctcgccgagaag

SEQ ID NO: 34939 - RNA, 27 nt, synthetic construct
  misc_feature 1..27: note = 2'-deoxynucleoside 5'-phosphate N-hydrolase 1 (52-60)
  source 1..27: mol_type = other RNA
gtgctgaccgagcacgtcgccgccgcg

SEQ ID NO: 34940 - RNA, 30 nt, synthetic construct
  misc_feature 1..30: note = AKT-interacting protein (200-209)
  source 1..30: mol_type = other RNA
gtgctgtacgagaaggacatccagctcttc

SEQ ID NO: 34941 - RNA, 27 nt, synthetic construct
  misc_feature 1..27: note = Thioredoxin-like protein 4A (44-52)
  source 1..27: mol_type = other RNA
gtgctgtacagcatcgccgagaaggtc

SEQ ID NO: 34942 - RNA, 33 nt, synthetic construct
  misc_feature 1..33: note = Putative PIP5K1A and PSMD4-like protein (813-823)
  source 1..33: mol_type = other RNA
gtgatgcaggaccccgagttcctgcagagcgtc

SEQ ID NO: 34943 - RNA, 48 nt, synthetic construct
  misc_feature 1..48: note = 78 kDa glucose-regulated protein (177-192)
  source 1..48: mol_type = other RNA
gtgatgcgcatcatcaacgagcccaccgccgccgcgatcgcctacggc

SEQ ID NO: 34944 - RNA, 33 nt, synthetic construct
  misc_feature 1..33: note = Glutathione S-transferase P (200-210)
  source 1..33: mol_type = other RNA
gtgaacctgcccatcaacggcaacgggaagcag

SEQ ID NO: 34945 - RNA, 27 nt, synthetic construct
  misc_feature 1..27: note = Eukaryotic translation initiation factor 3 subunit E (109-117)
  source 1..27: mol_type = other RNA
gtgcccgccaccgaccgcaacgccctg

SEQ ID NO: 34946 - RNA, 33 nt, synthetic construct
  misc_feature 1..33: note = Protein UXT (95-105)
  source 1..33: mol_type = other RNA
gtgcccgacaccagccgcatctacgtcgccctg

SEQ ID NO: 34947 - RNA, 33 nt, synthetic construct
  misc_feature 1..33: note = A-kinase-interacting protein 1 (107-117)
  source 1..33: mol_type = other RNA
gtgcccgaggagggcggggccacccacgtctac

SEQ ID NO: 34948 - RNA, 27 nt, synthetic construct
  misc_feature 1..27: note = N-alpha-acetyltransferase 10 (67-75)
  source 1..27: mol_type = other RNA
gtgccccacggccacatcaccagcctg

SEQ ID NO: 34949 - RNA, 27 nt, synthetic construct
  misc_feature 1..27: note = Tubulin beta chain (80-88)
  source 1..27: mol_type = other RNA
gtgccccgcgccatcctggtcgacctc

SEQ ID NO: 34950 - RNA, 27 nt, synthetic construct
  misc_feature 1..27: note = Protein phosphatase 1 regulatory subunit 15A (126-134)
  source 1..27: mol_type = other RNA
gtgccccgcggccaggggagccagttc

SEQ ID NO: 34951 - RNA, 27 nt, synthetic construct
  misc_feature 1..27: note = Protein Wiz (759-767)
  source 1..27: mol_type = other RNA
gtgccccgcccgccccagaccagcctg

SEQ ID NO: 34952 - RNA, 24 nt, synthetic construct
  misc_feature 1..24: note = Transmembrane protein 140 (75-82)
  source 1..24: mol_type = other RNA
gtgccccgcgtcggcctggggctc

SEQ ID NO: 34953 - RNA, 27 nt, synthetic construct
  misc_feature 1..27: note = Nucleolar transcription factor 1 (161-169)
  source 1..27: mol_type = other RNA
gtgcccagcaccgagcgcatggtcctg

SEQ ID NO: 34954 - RNA, 27 nt, synthetic construct
  misc_feature 1..27: note = Replication protein A 70 kDa DNA-binding subunit (383-391)
  source 1..27: mol_type = other RNA
gtgagcgacttcggcgggcgctccctg

SEQ ID NO: 34955 - RNA, 27 nt, synthetic construct
  misc_feature 1..27: note = Cytosolic non-specific dipeptidase (386-394)
  source 1..27: mol_type = other RNA
gtgagcgacttctcccacccccactac

SEQ ID NO: 34956 - RNA, 27 nt, synthetic construct
  misc_feature 1..27: note = Sister chromatid cohesion protein PDS5 homolog A (258-266)
  source 1..27: mol_type = other RNA
gtgagcgacctgtccgagcacgtcttc

SEQ ID NO: 34957 - RNA, 24 nt, synthetic construct
  misc_feature 1..24: note = DNA damage-inducible transcript 4 protein (124-131)
  source 1..24: mol_type = other RNA
gtgagccaggtcggcaaggagctg

SEQ ID NO: 34958 - RNA, 30 nt, synthetic construct
  misc_feature 1..30: note = Tetratricopeptide repeat protein 28 (985-994)
  source 1..30: mol_type = other RNA
gtgaccgaccccaccggcttcctgcgcatg

SEQ ID NO: 34959 - RNA, 27 nt, synthetic construct
  misc_feature 1..27: note = Beta-2-syntrophin (352-360)
  source 1..27: mol_type = other RNA
gtgaccgagaaggacctgctcctgtac

SEQ ID NO: 34960 - RNA, 30 nt, synthetic construct
  misc_feature 1..30: note = T-complex protein 1 subunit epsilon (13-22)
  source 1..30: mol_type = other RNA
gtgaccatcttcatccgcggcgggaacaag

SEQ ID NO: 34961 - RNA, 30 nt, synthetic construct
  misc_feature 1..30: note = NHP2-like protein 1 (104-113)
  source 1..30: mol_type = other RNA
gtgaccatcaaggagggcagccagctgaag

SEQ ID NO: 34962 - RNA, 36 nt, synthetic construct
  misc_feature 1..36: note = T-complex protein 1 subunit delta (68-79)
  source 1..36: mol_type = other RNA
gtgaccatcaccaacgacggcgccacgatcctgaag

SEQ ID NO: 34963 - RNA, 27 nt, synthetic construct
  misc_feature 1..27: note = HLA class I histocompatibility antigen, alpha chain E (313-321)
  source 1..27: mol_type = other RNA
gtggtcgccgccgtgatctggcgcaag

SEQ ID NO: 34964 - RNA, 27 nt, synthetic construct
  misc_feature 1..27: note = Jouberin (370-378)
  source 1..27: mol_type = other RNA
gtggtcgacgagcacaccggccagtac

SEQ ID NO: 34965 - RNA, 27 nt, synthetic construct
  misc_feature 1..27: note = WASH complex subunit 7 (157-165)
  source 1..27: mol_type = other RNA
gtggtcatgaacgtggtgcaccagctg

SEQ ID NO: 34966 - RNA, 33 nt, synthetic construct
  misc_feature 1..33: note = Cyclin-G-associated kinase (580-590)
  source 1..33: mol_type = other RNA
gtggtcatgacccccgtgccgctgttcagcaag

SEQ ID NO: 34967 - RNA, 30 nt, synthetic construct
  misc_feature 1..30: note = Exportin-6 (715-724)
  source 1..30: mol_type = other RNA
gtggtccaggagcccggccaggtgttcaag

SEQ ID NO: 34968 - RNA, 27 nt, synthetic construct
  misc_feature 1..27: note = DNA damage-binding protein 1 (508-516)
  source 1..27: mol_type = other RNA
gtggtcgtggccgtgggccgcgccctg

SEQ ID NO: 34969 - RNA, 33 nt, synthetic construct
  misc_feature 1..33: note = rRNA 2'-O-methyltransferase fibrillarin (305-315)
  source 1..33: mol_type = other RNA
gtggtcgtgggcgtgtaccgccccccgcccaag

SEQ ID NO: 34970 - RNA, 27 nt, synthetic construct
  misc_feature 1..27: note = Transmembrane protein 41B (174-182)
  source 1..27: mol_type = other RNA
gtggtctacaagtacctgaccgagaag

SEQ ID NO: 34971 - RNA, 27 nt, synthetic construct
  misc_feature 1..27: note = Ribose-phosphate pyrophosphokinase 1 (40-48)
  source 1..27: mol_type = other RNA
gtgtacgccatcctgacccacggcatc

SEQ ID NO: 34972 - RNA, 30 nt, synthetic construct
  misc_feature 1..30: note = ATP synthase mitochondrial F1 complex assembly factor 1 (87-96)
  source 1..30: mol_type = other RNA
gtgtacgccgtcatccccgccgagaagttc

SEQ ID NO: 34973 - RNA, 27 nt, synthetic construct
  misc_feature 1..27: note = Antizyme inhibitor 1 (320-328)
  source 1..27: mol_type = other RNA
gtgtacggcagcttcgcctccaagctg

SEQ ID NO: 34974 - RNA, 30 nt, synthetic construct
  misc_feature 1..30: note = ATP-dependent RNA helicase DHX8 (1133-1142)
  source 1..30: mol_type = other RNA
gtgtacatccaccccagctccgccctgttc

SEQ ID NO: 34975 - RNA, 27 nt, synthetic construct
  misc_feature 1..27: note = Adenosylhomocysteinase 2 (207-215)
  source 1..27: mol_type = other RNA
gtgtacaagaagtaccccaacgtcttc

SEQ ID NO: 34976 - RNA, 27 nt, synthetic construct
  misc_feature 1..27: note = Inactive tyrosine-protein kinase 7 (955-963)
  source 1..27: mol_type = other RNA
gtgtacaacagcgagtactaccacttc

SEQ ID NO: 34977 - RNA, 27 nt, synthetic construct
  misc_feature 1..27: note = 2'-5'-oligoadenylate synthase 3 (865-873)
  source 1..27: mol_type = other RNA
tgggagaacccccgcgtgctgagcttc

SEQ ID NO: 34978 - RNA, 21 nt, synthetic construct
  misc_feature 1..21: note = Actin, aortic smooth muscle (358-364)
  source 1..21: mol_type = other RNA
tggatcagcaagcaggagtac

SEQ ID NO: 34979 - RNA, 27 nt, synthetic construct
  misc_feature 1..27: note = Protein LYRIC (404-412)
  source 1..27: mol_type = other RNA
tgggtggacgaggagcgcgccagcctg

SEQ ID NO: 34980 - RNA, 30 nt, synthetic construct
  misc_feature 1..30: note = General transcription factor 3C polypeptide 5 (51-60)
  source 1..30: mol_type = other RNA
tacgccgaccccaccaagcgcctggagctc

SEQ ID NO: 34981 - RNA, 27 nt, synthetic construct
  misc_feature 1..27: note = Translocon-associated protein subunit delta (67-75)
  source 1..27: mol_type = other RNA
tacgccgacgtgggcgggaagcagttc

SEQ ID NO: 34982 - RNA, 30 nt, synthetic construct
  misc_feature 1..30: note = U5 small nuclear ribonucleoprotein 200 kDa helicase (1245-1254)
  source 1..30: mol_type = other RNA
tacgcccaggacgagcacctgatcaccttc

SEQ ID NO: 34983 - RNA, 33 nt, synthetic construct
  misc_feature 1..33: note = HLA class I histocompatibility antigen, alpha chain G (137-147)
  source 1..33: mol_type = other RNA
tacgcctacgacggcaaggactacctggccctc

SEQ ID NO: 34984 - RNA, 45 nt, synthetic construct
  misc_feature 1..45: note = Cofilin-1 (85-99)
  source 1..45: mol_type = other RNA
tacgacgccacctacgagaccaaggagagcaagaaggaggacctg

SEQ ID NO: 34985 - RNA, 27 nt, synthetic construct
  misc_feature 1..27: note = Transcriptional adapter 2-alpha (431-439)
  source 1..27: mol_type = other RNA
tacgacttcctgatccgcgagggctac

SEQ ID NO: 34986 - RNA, 27 nt, synthetic construct
  misc_feature 1..27: note = Myeloid cell nuclear differentiation antigen (31-39)
  source 1..27: mol_type = other RNA
tacgacctgggcctcaccaccaagatg

SEQ ID NO: 34987 - RNA, 27 nt, synthetic construct
  misc_feature 1..27: note = Dual specificity tyrosine-phosphorylation-regulated kinase 1A (246-254)
  source 1..27: mol_type = other RNA
tacgacctgctccgcaacaccaacttc

SEQ ID NO: 34988 - RNA, 24 nt, synthetic construct
  misc_feature 1..24: note = Renin receptor (335-342)
  source 1..24: mol_type = other RNA
tacgacagcatcatctaccgcatg

SEQ ID NO: 34989 - RNA, 27 nt, synthetic construct
  misc_feature 1..27: note = Integrin beta-1 (314-322)
  source 1..27: mol_type = other RNA
tacgactaccccagcatcgcccacctg

SEQ ID NO: 34990 - RNA, 27 nt, synthetic construct
  misc_feature 1..27: note = ATP-dependent RNA helicase DDX3X (283-291)
  source 1..27: mol_type = other RNA
tacgaggaggcccgcaagttcagctac

SEQ ID NO: 34991 - RNA, 27 nt, synthetic construct
  misc_feature 1..27: note = Cytochrome c oxidase subunit 7C, mitochondrial (19-27)
  source 1..27: mol_type = other RNA
tacgaggagggccccgggaagaacctg

SEQ ID NO: 34992 - RNA, 27 nt, synthetic construct
  misc_feature 1..27: note = Spectrin beta chain, non-erythrocytic 1 (461-469)
  source 1..27: mol_type = other RNA
tacgaggagcgcgtgcaggccgtcgtg

SEQ ID NO: 34993 - RNA, 33 nt, synthetic construct
  misc_feature 1..33: note = La-related protein 1 (633-643)
  source 1..33: mol_type = other RNA
tacgagatcgacgaccgcgacgtgaacaagatc

SEQ ID NO: 34994 - RNA, 30 nt, synthetic construct
  misc_feature 1..30: note = Nodal modulator 2 (181-190)
  source 1..30: mol_type = other RNA
tacgagatcctggccacccaccccacctgg

SEQ ID NO: 34995 - RNA, 27 nt, synthetic construct
  misc_feature 1..27: note = Keratin, type I cytoskeletal 10 (42-50)
  source 1..27: mol_type = other RNA
tacgagaacgaggtggccctgcgccag

SEQ ID NO: 34996 - RNA, 27 nt, synthetic construct
  misc_feature 1..27: note = Ubiquitin carboxyl-terminal hydrolase 22 (258-266)
  source 1..27: mol_type = other RNA
tacgagcagcaggacgcccacgagttc

SEQ ID NO: 34997 - RNA, 30 nt, synthetic construct
  misc_feature 1..30: note = Regulator of microtubule dynamics protein 1 (94-103)
  source 1..30: mol_type = other RNA
tacgagagcggcgagaccgagaagctgtac

SEQ ID NO: 34998 - RNA, 27 nt, synthetic construct
  misc_feature 1..27: note = Thioredoxin-interacting protein (97-105)
  source 1..27: mol_type = other RNA
tacgagtacaagttcggcttcgagctg

SEQ ID NO: 34999 - RNA, 33 nt, synthetic construct
  misc_feature 1..33: note = Hemoglobin subunit alpha (25-35)
  source 1..33: mol_type = other RNA
tacggcgccgaggccctggagcgcatgttcctc

SEQ ID NO: 35000 - RNA, 27 nt, synthetic construct
  misc_feature 1..27: note = Solute carrier family 25 member 43 (300-308)
  source 1..27: mol_type = other RNA
tacatcctgagccccctctcctacaag

SEQ ID NO: 35001 - RNA, 30 nt, synthetic construct
  misc_feature 1..30: note = UDP-N-acetylglucosamine transporter (266-275)
  source 1..30: mol_type = other RNA
tacatctacgacggcgagctggtgagcaag

SEQ ID NO: 35002 - RNA, 30 nt, synthetic construct
  misc_feature 1..30: note = Zinc finger protein 573 (42-51)
  source 1..30: mol_type = other RNA
tacctggaccccaaccagcgcgacctctac

SEQ ID NO: 35003 - RNA, 27 nt, synthetic construct
  misc_feature 1..27: note = Splicing factor 3A subunit 3 (192-200)
  source 1..27: mol_type = other RNA
tacctgcaggactacaccgaccgcgtg

SEQ ID NO: 35004 - RNA, 33 nt, synthetic construct
  misc_feature 1..33: note = Regulator of microtubule dynamics protein 1 (92-102)
  source 1..33: mol_type = other RNA
tacctgtacgagagcggcgagaccgagaagctc

SEQ ID NO: 35005 - RNA, 27 nt, synthetic construct
  misc_feature 1..27: note = Myc proto-oncogene protein (334-342)
  source 1..27: mol_type = other RNA
taccccgccgccaagcgcgtgaagctg

SEQ ID NO: 35006 - RNA, 27 nt, synthetic construct
  misc_feature 1..27: note = Exportin-T (608-616)
  source 1..27: mol_type = other RNA
taccccgccgagcgcaagcaggccctg

SEQ ID NO: 35007 - RNA, 30 nt, synthetic construct
  misc_feature 1..30: note = Ubiquitin-conjugating enzyme E2 D2 (59-68)
  source 1..30: mol_type = other RNA
taccccttcaagccgcccaaggtggccttc

SEQ ID NO: 35008 - RNA, 30 nt, synthetic construct
  misc_feature 1..30: note = Ubiquitin-conjugating enzyme E2 E1 (89-98)
  source 1..30: mol_type = other RNA
taccccttcaagccgcccaaggtgaccttc

SEQ ID NO: 35009 - RNA, 27 nt, synthetic construct
  misc_feature 1..27: note = ATP-dependent RNA helicase DDX24 (383-391)
  source 1..27: mol_type = other RNA
taccccaagcgcccgctgctcggcctg

SEQ ID NO: 35010 - RNA, 27 nt, synthetic construct
  misc_feature 1..27: note = All-trans-retinol 13,14-reductase (15-23)
  source 1..27: mol_type = other RNA
tacccccgcggcgggagctccgagatc

SEQ ID NO: 35011 - RNA, 27 nt, synthetic construct
  misc_feature 1..27: note = Laminin subunit gamma-1 (615-623)
  source 1..27: mol_type = other RNA
taccccagcgagaccaccgtgaagtac

SEQ ID NO: 35012 - RNA, 27 nt, synthetic construct
  misc_feature 1..27: note = Eukaryotic translation initiation factor 3 subunit E (62-70)
  source 1..27: mol_type = other RNA
tacagcgacgacatcccccacgccctg

SEQ ID NO: 35013 - RNA, 36 nt, synthetic construct
  misc_feature 1..36: note = Bromodomain and WD repeat-containing protein 1 (854-865)
  source 1..36: mol_type = other RNA
tacagcgagtccagctccgacagctccagccgctac

SEQ ID NO: 35014 - RNA, 27 nt, synthetic construct
  misc_feature 1..27: note = Nuclear pore complex protein Nup160 (345-353)
  source 1..27: mol_type = other RNA
tacagcctggaccacatctccagcctc

SEQ ID NO: 35015 - RNA, 27 nt, synthetic construct
  misc_feature 1..27: note = ATP-dependent RNA helicase DDX51 (304-312)
  source 1..27: mol_type = other RNA
tacaccgacgccacccccctgcgcgtg

SEQ ID NO: 35016 - RNA, 24 nt, synthetic construct
  misc_feature 1..24: note = Cytosolic purine 5'-nucleotidase (255-262)
  source 1..24: mol_type = other RNA
tacaccgacaagatcatgacctac

SEQ ID NO: 35017 - RNA, 30 nt, synthetic construct
  misc_feature 1..30: note = Sterol regulatory element-binding protein cleavage-activating protein (160-169)
  source 1..30: mol_type = other RNA
tacaccgaccccgccggcctgcgcaactac

SEQ ID NO: 35018 - RNA, 27 nt, synthetic construct
  misc_feature 1..27: note = General transcription factor 3C polypeptide 2 (787-795)
  source 1..27: mol_type = other RNA
tacaccgagaccgtgaaccaccactac

SEQ ID NO: 35019 - RNA, 27 nt, synthetic construct
  misc_feature 1..27: note = Cytochrome c oxidase subunit 1 (403-411)
  source 1..27: mol_type = other RNA
tacaccctggaccagacctacgccaag

SEQ ID NO: 35020 - RNA, 27 nt, synthetic construct
  misc_feature 1..27: note = 3-phosphoinositide-dependent protein kinase 1 (486-494)
  source 1..27: mol_type = other RNA
tacgtggaccccgtcaacaaggtgctg

SEQ ID NO: 35021 - RNA, 30 nt, synthetic construct
  misc_feature 1..30: note = Alanine-tRNA ligase, cytoplasmic (497-506)
  source 1..30: mol_type = other RNA
tacgtgttcgagaacaccgtcgccaccgtg

SEQ ID NO: 35022 - RNA, 42 nt, synthetic construct
  misc_feature 1..42: note = Actin, aortic smooth muscle (55-68)
  source 1..42: mol_type = other RNA
tacgtgggcgacgaggcccagagcaagcgcgggatcctgacc

SEQ ID NO: 35023 - RNA, 27 nt, synthetic construct
  misc_feature 1..27: note = Exocyst complex component 2 (206-214)
  source 1..27: mol_type = other RNA
tactacgccgaggtggagacccgcatc

SEQ ID NO: 35024 - RNA, 27 nt, synthetic construct
  misc_feature 1..27: note = Nuclear receptor corepressor 2 (332-340)
  source 1..27: mol_type = other RNA
tactacgagaagcagttccccgagatc

SEQ ID NO: 35025 - RNA, 27 nt, synthetic construct
  misc_feature 1..27: note = Plexin-B2 (1-9)
  source 1..27: mol_type = other RNA
tactacaccgacatcatgcacaccctg

SEQ ID NO: 35026 - RNA, 27 nt, synthetic construct
  misc_feature 1..27: note = Tankyrase-1 (100-108)
  source 1..27: mol_type = other RNA
gccgccgcgcccgtggtcccggccgtg

SEQ ID NO: 35027 - RNA, 27 nt, synthetic construct
  misc_feature 1..27: note = Ubiquitin-conjugating enzyme E2 J2 (242-250)
  source 1..27: mol_type = other RNA
gccgccttcgcgtacaccgtgaagtac

SEQ ID NO: 35028 - RNA, 27 nt, synthetic construct
  misc_feature 1..27: note = DNA replication licensing factor MCM5 (326-334)
  source 1..27: mol_type = other RNA
gccgccctgcccaacgtgtacgaggtc

SEQ ID NO: 35029 - RNA, 27 nt, synthetic construct
  misc_feature 1..27: note = Heterogeneous nuclear ribonucleoprotein Q (215-223)
  source 1..27: mol_type = other RNA
gccgcccaggaggcggtgaagctgtac

SEQ ID NO: 35030 - RNA, 27 nt, synthetic construct
  misc_feature 1..27: note = Zinc finger protein 609 (360-368)
  source 1..27: mol_type = other RNA
gccgaggccgacaagatctacagcttc

SEQ ID NO: 35031 - RNA, 27 nt, synthetic construct
  misc_feature 1..27: note = M-phase inducer phosphatase 2 (285-293)
  source 1..27: mol_type = other RNA
gccgaggagcccaaggcccgcgtgctg

SEQ ID NO: 35032 - RNA, 30 nt, synthetic construct
  misc_feature 1..30: note = SHC SH2 domain-binding protein 1 (437-446)
  source 1..30: mol_type = other RNA
gccgagttcctgatgaagaacagcgacctc

SEQ ID NO: 35033 - RNA, 27 nt, synthetic construct
  misc_feature 1..27: note = Pre-mRNA-splicing factor ATP-dependent RNA helicase DHX15 (563-571)
  source 1..27: mol_type = other RNA
gccgagttccccctggacccgcagctc

SEQ ID NO: 35034 - RNA, 33 nt, synthetic construct
  misc_feature 1..33: note = Intraflagellar transport protein 81 homolog (43-53)
  source 1..33: mol_type = other RNA
gccgagatcgaccccaagcagctggtggacatc

SEQ ID NO: 35035 - RNA, 27 nt, synthetic construct
  misc_feature 1..27: note = Clathrin heavy chain 1 (493-501)
  source 1..27: mol_type = other RNA
gccgagaccggccaggtgcagaagatc

SEQ ID NO: 35036 - RNA, 27 nt, synthetic construct
  misc_feature 1..27: note = Uncharacterized protein C8orf59 (62-70)
  source 1..27: mol_type = other RNA
gcccacttcgccaagagcatctccctg

SEQ ID NO: 35037 - RNA, 27 nt, synthetic construct
  misc_feature 1..27: note = 60S ribosomal protein L9 (97-105)
  source 1..27: mol_type = other RNA
gcccacttccccatcaacgtggtcatc

SEQ ID NO: 35038 - RNA, 27 nt, synthetic construct
  misc_feature 1..27: note = Intraflagellar transport protein 27 homolog (30-38)
  source 1..27: mol_type = other RNA
gcccacttccagaagagctacaccctg

SEQ ID NO: 35039 - RNA, 27 nt, synthetic construct
  misc_feature 1..27: note = Xaa-Pro aminopeptidase 1 (333-341)
  source 1..27: mol_type = other RNA
gcccacatcaaggacgccgtggcgctg

SEQ ID NO: 35040 - RNA, 27 nt, synthetic construct
  misc_feature 1..27: note = CCR4-NOT transcription complex subunit 1 (2246-2254)
  source 1..27: mol_type = other RNA
gcccacatggacatcttccagaacctg

SEQ ID NO: 35041 - RNA, 27 nt, synthetic construct
  misc_feature 1..27: note = NEDD8 ultimate buster 1 (148-156)
  source 1..27: mol_type = other RNA
gcccacaacgtgaaggccatggtcctg

SEQ ID NO: 35042 - RNA, 30 nt, synthetic construct
  misc_feature 1..30: note = Peptidyl-prolyl cis-trans isomerase FKBP8 (230-239)
  source 1..30: mol_type = other RNA
gcccactaccagcgcgccgacttcgtgctg

SEQ ID NO: 35043 - RNA, 27 nt, synthetic construct
  misc_feature 1..27: note = Zinc phosphodiesterase ELAC protein 2 (230-238)
  source 1..27: mol_type = other RNA
gccatcgcccccatcatcgcggccgtg

SEQ ID NO: 35044 - RNA, 30 nt, synthetic construct
  misc_feature 1..30: note = Sister chromatid cohesion protein PDS5 homolog A (274-283)
  source 1..30: mol_type = other RNA
gccatcgacccccacctgctcctgagcgtg

SEQ ID NO: 35045 - RNA, 27 nt, synthetic construct
  misc_feature 1..27: note = RNA-binding motif, single-stranded-interacting protein 2 (87-95)
  source 1..27: mol_type = other RNA
gccatcctggacaagaccaccaacaag

SEQ ID NO: 35046 - RNA, 27 nt, synthetic construct
  misc_feature 1..27: note = S-phase kinase-associated protein 1 (53-61)
  source 1..27: mol_type = other RNA
gccatcctgaagaaggtgatccagtgg

SEQ ID NO: 35047 - RNA, 27 nt, synthetic construct
  misc_feature 1..27: note = Importin-11 (662-670)
  source 1..27: mol_type = other RNA
gccatcctgaccaccctcatccacctg

SEQ ID NO: 35048 - RNA, 27 nt, synthetic construct
  misc_feature 1..27: note = Probable ATP-dependent RNA helicase DDX5 (466-474)
  source 1..27: mol_type = other RNA
gccatcaaccccaagctgctccagctg

SEQ ID NO: 35049 - RNA, 27 nt, synthetic construct
  misc_feature 1..27: note = Mitochondrial fission process protein 1 (94-102)
  source 1..27: mol_type = other RNA
gccatccccggcttcaccatcaaccgc

SEQ ID NO: 35050 - RNA, 33 nt, synthetic construct
  misc_feature 1..33: note = Rab GDP dissociation inhibitor beta (163-173)
  source 1..33: mol_type = other RNA
gccatctacggcgggacctacatgctgaacaag

SEQ ID NO: 35051 - RNA, 27 nt, synthetic construct
  misc_feature 1..27: note = Protein SHQ1 homolog (400-408)
  source 1..27: mol_type = other RNA
gccctggccgaggcgctcaaggaggtg

SEQ ID NO: 35052 - RNA, 27 nt, synthetic construct
  misc_feature 1..27: note = DNA mismatch repair protein Msh2 (789-797)
  source 1..27: mol_type = other RNA
gccctggccaaccagatccccaccgtg

SEQ ID NO: 35053 - RNA, 27 nt, synthetic construct
  misc_feature 1..27: note = EH domain-containing protein 2 (507-515)
  source 1..27: mol_type = other RNA
gccctggccagccacctcatcgaggcg

SEQ ID NO: 35054 - RNA, 27 nt, synthetic construct
  misc_feature 1..27: note = Carboxypeptidase Q (122-130)
  source 1..27: mol_type = other RNA
gccctggccagcctcatccgctccgtg

SEQ ID NO: 35055 - RNA, 27 nt, synthetic construct
  misc_feature 1..27: note = (229-237)
  source 1..27: mol_type = other RNA
gccctggccagcgtgatcatgggcctc

SEQ ID NO: 35056 - RNA, 27 nt, synthetic construct
  misc_feature 1..27: note = Fidgetin-like protein 1 (133-141)
  source 1..27: mol_type = other RNA
gccctggccagcgtggtcatccacaag

SEQ ID NO: 35057 - RNA, 27 nt, synthetic construct
  misc_feature 1..27: note = Cleavage and polyadenylation specificity factor subunit 1 (195-203)
  source 1..27: mol_type = other RNA
gccctggacgagaagctcctgaacatc

SEQ ID NO: 35058 - RNA, 30 nt, synthetic construct
  misc_feature 1..30: note = Serine/threonine-protein kinase 10 (901-910)
  source 1..30: mol_type = other RNA
gccctggacgagagccacaaccagaacctc

SEQ ID NO: 35059 - RNA, 30 nt, synthetic construct
  misc_feature 1..30: note = Protein phosphatase 1 regulatory subunit 15B (166-175)
  source 1..30: mol_type = other RNA
gccctggaccccgccgcgcaggccttcctc

SEQ ID NO: 35060 - RNA, 33 nt, synthetic construct
  misc_feature 1..33: note = Cardiolipin synthase (CMP-forming) (167-177)
  source 1..33: mol_type = other RNA
gccctggaccccctcgccgacaagatcctgatc

SEQ ID NO: 35061 - RNA, 27 nt, synthetic construct
  misc_feature 1..27: note = Splicing regulatory glutamine/lysine-rich protein 1 (152-160)
  source 1..27: mol_type = other RNA
gccctggaccccaacatcgccaccctc

SEQ ID NO: 35062 - RNA, 27 nt, synthetic construct
  misc_feature 1..27: note = ATP-binding cassette sub-family A member 7 (273-281)
  source 1..27: mol_type = other RNA
gccctggacagccaccccctctcccgc

SEQ ID NO: 35063 - RNA, 27 nt, synthetic construct
  misc_feature 1..27: note = Ras-related protein Rab-11A (155-163)
  source 1..27: mol_type = other RNA
gccctggacagcaccaacgtggaggcc

SEQ ID NO: 35064 - RNA, 27 nt, synthetic construct
  misc_feature 1..27: note = AT-rich interactive domain-containing protein 1B (1641-1649)
  source 1..27: mol_type = other RNA
gccctggacaccatcaacatcctcctg

SEQ ID NO: 35065 - RNA, 30 nt, synthetic construct
  misc_feature 1..30: note = SWI/SNF-related matrix-associated actin-dependent regulator of chromatin subfamily A member 5 (920-929)
  source 1..30: mol_type = other RNA
gccctggacaccaagatcggccgctacaag

SEQ ID NO: 35066 - RNA, 27 nt, synthetic construct
  misc_feature 1..27: note = Glutamate carboxypeptidase 2 (718-726)
  source 1..27: mol_type = other RNA
gccctgttcgacatcgagagcaaggtg

SEQ ID NO: 35067 - RNA, 33 nt, synthetic construct
  misc_feature 1..33: note = Sodium/potassium-transporting ATPase subunit beta-3 (132-142)
  source 1..33: mol_type = other RNA
gccctgttcgagcagaagggccccgtgtacgtc

SEQ ID NO: 35068 - RNA, 30 nt, synthetic construct
  misc_feature 1..30: note = RING finger protein 214 (467-476)
  source 1..30: mol_type = other RNA
gccctgttccccgccccgctcgcgcagatc

SEQ ID NO: 35069 - RNA, 27 nt, synthetic construct
  misc_feature 1..27: note = Protein disulfide-isomerase A3 (7-15)
  source 1..27: mol_type = other RNA
gccctgttccccggcgtggccctcctg

SEQ ID NO: 35070 - RNA, 33 nt, synthetic construct
  misc_feature 1..33: note = Exportin-2 (684-694)
  source 1..33: mol_type = other RNA
gccctgttcccccacctcctgcagccggtgctg

SEQ ID NO: 35071 - RNA, 27 nt, synthetic construct
  misc_feature 1..27: note = Zinc finger BED domain-containing protein 1 (596-604)
  source 1..27: mol_type = other RNA
gccctgttccccctcctgccgaaggtg

SEQ ID NO: 35072 - RNA, 27 nt, synthetic construct
  misc_feature 1..27: note = UDP-glucuronosyltransferase 1-10 (322-330)
  source 1..27: mol_type = other RNA
gccctgggcaagatcccccagaccgtg

SEQ ID NO: 35073 - RNA, 30 nt, synthetic construct
  misc_feature 1..30: note = Developmentally-regulated GTP-binding protein 2 (66-75)
  source 1..30: mol_type = other RNA
gccctgatcggcttccccagcgtggggaag

SEQ ID NO: 35074 - RNA, 27 nt, synthetic construct
  misc_feature 1..27: note = Transcription factor Maf (116-124)
  source 1..27: mol_type = other RNA
gccctgatcagcaactcccaccagctc

SEQ ID NO: 35075 - RNA, 24 nt, synthetic construct
  misc_feature 1..24: note = U3 small nucleolar ribonucleoprotein protein IMP3 (78-85)
  source 1..24: mol_type = other RNA
gccctgctcgacaagctgtacgcc

SEQ ID NO: 35076 - RNA, 27 nt, synthetic construct
  misc_feature 1..27: note = microtubule-actin cross-linking factor 1 isoform X2 (1652-1660)
  source 1..27: mol_type = other RNA
gccctgctcgactgggtgaccagcgtc

SEQ ID NO: 35077 - RNA, 33 nt, synthetic construct
  misc_feature 1..33: note = Coatomer subunit zeta-1 (90-100)
  source 1..33: mol_type = other RNA
gccctgctcgagaacatggagggcctgttcctg

SEQ ID NO: 35078 - RNA, 30 nt, synthetic construct
  misc_feature 1..30: note = Serine/threonine-protein kinase 35 (192-201)
  source 1..30: mol_type = other RNA
gccctgctcgagaaccccaagatggagctg

SEQ ID NO: 35079 - RNA, 27 nt, synthetic construct
  misc_feature 1..27: note = GRIP and coiled-coil domain-containing protein 2 (277-285)
  source 1..27: mol_type = other RNA
gccctgctcgagaccgtgaaccgcctg

SEQ ID NO: 35080 - RNA, 27 nt, synthetic construct
  misc_feature 1..27: note = Progestin and adipoQ receptor family member 4 (146-154)
  source 1..27: mol_type = other RNA
gccctgctcggcgggctggtgaacgtc

SEQ ID NO: 35081 - RNA, 33 nt, synthetic construct
  misc_feature 1..33: note = Elongation of very long chain fatty acids protein 5 (14-24)
  source 1..33: mol_type = other RNA
gccctgctcggcccccgcgacacccgggtgaag

SEQ ID NO: 35082 - RNA, 27 nt, synthetic construct
  misc_feature 1..27: note = Minor histocompatibility antigen H13 (43-51)
  source 1..27: mol_type = other RNA
gccctgctccccatcttcttcggcgcc

SEQ ID NO: 35083 - RNA, 27 nt, synthetic construct
  misc_feature 1..27: note = Transcription factor IIIB 90 kDa subunit (582-590)
  source 1..27: mol_type = other RNA
gccctgctccccagctccccgaccctg

SEQ ID NO: 35084 - RNA, 27 nt, synthetic construct
  misc_feature 1..27: note = TAF6-like RNA polymerase II p300/CBP-associated factor-associated factor 65 kDa subunit 6L (191-199)
  source 1..27: mol_type = other RNA
gccctgctcccctacttcgtgtacgtc

SEQ ID NO: 35085 - RNA, 27 nt, synthetic construct
  misc_feature 1..27: note = Plectin (403-411)
  source 1..27: mol_type = other RNA
gccctgctccagagcgacgtgcgcctg

SEQ ID NO: 35086 - RNA, 27 nt, synthetic construct
  misc_feature 1..27: note = RNA-binding protein Raly (187-195)
  source 1..27: mol_type = other RNA
gccctgctcagccgcctggagcagatc

SEQ ID NO: 35087 - RNA, 27 nt, synthetic construct
  misc_feature 1..27: note = Serine/threonine-protein phosphatase 6 regulatory ankyrin repeat subunit B (148-156)
  source 1..27: mol_type = other RNA
gccctgaacggccacgtggagatggtc

SEQ ID NO: 35088 - RNA, 27 nt, synthetic construct
  misc_feature 1..27: note = Ankyrin repeat domain-containing protein 27 (605-613)
  source 1..27: mol_type = other RNA
gccctgaacagcaagatcctctccgtg

SEQ ID NO: 35089 - RNA, 27 nt, synthetic construct
  misc_feature 1..27: note = Zinc finger protein 148 (107-115)
  source 1..27: mol_type = other RNA
gccctgaacgtgcccatcagcgtcaag

SEQ ID NO: 35090 - RNA, 27 nt, synthetic construct
  misc_feature 1..27: note = Putative eukaryotic translation initiation factor 2 subunit 3-like protein (363-371)
  source 1..27: mol_type = other RNA
gccctgcccgagatcttcaccgagctc

SEQ ID NO: 35091 - RNA, 27 nt, synthetic construct
  misc_feature 1..27: note = La-related protein 1 (131-139)
  source 1..27: mol_type = other RNA
gccctgcccccggtgctcaccaccgtc

SEQ ID NO: 35092 - RNA, 27 nt, synthetic construct
  misc_feature 1..27: note = Importin subunit alpha-5 (339-347)
  source 1..27: mol_type = other RNA
gccctgcagagcctcctgcacctgctc

SEQ ID NO: 35093 - RNA, 27 nt, synthetic construct
  misc_feature 1..27: note = Nuclear receptor-interacting protein 1 (745-753)
  source 1..27: mol_type = other RNA
gccctgagcgagcagatcctcatggtg

SEQ ID NO: 35094 - RNA, 27 nt, synthetic construct
  misc_feature 1..27: note = Glutamate-rich WD repeat-containing protein 1 (434-442)
  source 1..27: mol_type = other RNA
gccctgagcggcttcaccatcttccgc

SEQ ID NO: 35095 - RNA, 27 nt, synthetic construct
  misc_feature 1..27: note = Fidgetin-like protein 1 (268-276)
  source 1..27: mol_type = other RNA
gccctgagcaaccccatcctcaacaag

SEQ ID NO: 35096 - RNA, 27 nt, synthetic construct
  misc_feature 1..27: note = TBC domain-containing protein kinase-like protein (116-124)
  source 1..27: mol_type = other RNA
gccctgagcccccacaacatcctcctg

SEQ ID NO: 35097 - RNA, 27 nt, synthetic construct
  misc_feature 1..27: note = Enhancer of mRNA-decapping protein 4 (739-747)
  source 1..27: mol_type = other RNA
gccctgagccaggacatccccgagatc

SEQ ID NO: 35098 - RNA, 27 nt, synthetic construct
  misc_feature 1..27: note = Quinone oxidoreductase-like protein 1 (41-49)
  source 1..27: mol_type = other RNA
gccctgagccagatcaacaccaagctc

SEQ ID NO: 35099 - RNA, 27 nt, synthetic construct
  misc_feature 1..27: note = Prelamin-A/C (147-155)
  source 1..27: mol_type = other RNA
gccctgagcaccgccctctccgagaag

SEQ ID NO: 35100 - RNA, 27 nt, synthetic construct
  misc_feature 1..27: note = Cyclin-dependent kinase 4 (96-104)
  source 1..27: mol_type = other RNA
gccctgacccccgtggtcgtgaccctc

SEQ ID NO: 35101 - RNA, 27 nt, synthetic construct
  misc_feature 1..27: note = Transcription initiation factor TFIID subunit 2 (948-956)
  source 1..27: mol_type = other RNA
gccctggtggaccagctctggaagctg

SEQ ID NO: 35102 - RNA, 27 nt, synthetic construct
  misc_feature 1..27: note = Beta-hexosaminidase subunit beta (22-30)
  source 1..27: mol_type = other RNA
gccctggtggtccaggtggccgaggcg

SEQ ID NO: 35103 - RNA, 27 nt, synthetic construct
  misc_feature 1..27: note = Nesprin-2 (1646-1654)
  source 1..27: mol_type = other RNA
gccctgtgggacaagctcttcaacctg

SEQ ID NO: 35104 - RNA, 33 nt, synthetic construct
  misc_feature 1..33: note = Transmembrane protein 234 (16-26)
  source 1..33: mol_type = other RNA
gccctgtggggcgggacccagcccctcctgaag

SEQ ID NO: 35105 - RNA, 27 nt, synthetic construct
  misc_feature 1..27: note = 28S ribosomal protein S29, mitochondrial (267-275)
  source 1..27: mol_type = other RNA
gccctgtggggccgcaccaccctcaag

SEQ ID NO: 35106 - RNA, 27 nt, synthetic construct
  misc_feature 1..27: note = Lamin-B receptor (434-442)
  source 1..27: mol_type = other RNA
gccctgtggaacgaggaggccctcctg

SEQ ID NO: 35107 - RNA, 27 nt, synthetic construct
  misc_feature 1..27: note = CAS1 domain-containing protein 1 (533-541)
  source 1..27: mol_type = other RNA
gccctgtggccccagatcatccagaag

SEQ ID NO: 35108 - RNA, 33 nt, synthetic construct
  misc_feature 1..33: note = Tetratricopeptide repeat protein 14 (349-359)
  source 1..33: mol_type = other RNA
gccctgtacgccaccaagggcagcctcaacaag

SEQ ID NO: 35109 - RNA, 27 nt, synthetic construct
  misc_feature 1..27: note = Ubiquitin carboxyl-terminal hydrolase 4 (552-560)
  source 1..27: mol_type = other RNA
gccctgtacggccagcccctcctgctg

SEQ ID NO: 35110 - RNA, 27 nt, synthetic construct
  misc_feature 1..27: note = Tyrosine-protein kinase Fyn (383-391)
  source 1..27: mol_type = other RNA
gccctgtacggccgcttcaccatcaag

SEQ ID NO: 35111 - RNA, 27 nt, synthetic construct
  misc_feature 1..27: note = Putative ATP-dependent RNA helicase DHX57 (1220-1228)
  source 1..27: mol_type = other RNA
gccctgtaccccaacgtggtccaggtg

SEQ ID NO: 35112 - RNA, 27 nt, synthetic construct
  misc_feature 1..27: note = Nuclear pore complex protein Nup155 (411-419)
  source 1..27: mol_type = other RNA
gccctgtacagcaagggcatcctcctg

SEQ ID NO: 35113 - RNA, 27 nt, synthetic construct
  misc_feature 1..27: note = Heterogeneous nuclear ribonucleoprotein A0 (64-72)
  source 1..27: mol_type = other RNA
gccatggccgcgagcccccacgccgtg

SEQ ID NO: 35114 - RNA, 27 nt, synthetic construct
  misc_feature 1..27: note = Synemin (1524-1532)
  source 1..27: mol_type = other RNA
gccatgttcgacaagaaggtgcagctg

SEQ ID NO: 35115 - RNA, 30 nt, synthetic construct
  misc_feature 1..30: note = DNA-dependent protein kinase catalytic subunit (1302-1311)
  source 1..30: mol_type = other RNA
gccatgcacgacatcatcgccgcggagaag

SEQ ID NO: 35116 - RNA, 27 nt, synthetic construct
  misc_feature 1..27: note = Methionine synthase (186-194)
  source 1..27: mol_type = other RNA
gccatgcacggcgtgttcctgtaccac

SEQ ID NO: 35117 - RNA, 27 nt, synthetic construct
  misc_feature 1..27: note = Transformation/transcription domain-associated protein (2516-2524)
  source 1..27: mol_type = other RNA
gccatgctgcccagcatcaccaacgtg

SEQ ID NO: 35118 - RNA, 27 nt, synthetic construct
  misc_feature 1..27: note = Heterogeneous nuclear ribonucleoprotein A1 (71-79)
  source 1..27: mol_type = other RNA
gccatgaacgcccgcccccacaaggtg

SEQ ID NO: 35119 - RNA, 30 nt, synthetic construct
  misc_feature 1..30: note = Double-strand-break repair protein rad21 homolog (467-476)
  source 1..30: mol_type = other RNA
gccatgcccccgccccccccccagggcgtg

SEQ ID NO: 35120 - RNA, 33 nt, synthetic construct
  misc_feature 1..33: note = Biogenesis of lysosome-related organelles complex 1 subunit 3 (99-109)
  source 1..33: mol_type = other RNA
gcccccgccccggcgcccgcccgcagcctgctc

SEQ ID NO: 35121 - RNA, 27 nt, synthetic construct
  misc_feature 1..27: note = Solute carrier family 23 member 2 (174-182)
  source 1..27: mol_type = other RNA
gcccccgcccgcgcgatcctgagcctc

SEQ ID NO: 35122 - RNA, 27 nt, synthetic construct
  misc_feature 1..27: note = ATP-binding cassette sub-family F member 3 (303-311)
  source 1..27: mol_type = other RNA
gcccccgcccgcgcgagcgtgatcctg

SEQ ID NO: 35123 - RNA, 27 nt, synthetic construct
  misc_feature 1..27: note = Syndecan-4 (2-10)
  source 1..27: mol_type = other RNA
gcccccgcccgcctgttcgcgctcctg

SEQ ID NO: 35124 - RNA, 30 nt, synthetic construct
  misc_feature 1..30: note = Ankyrin repeat domain-containing protein 11 (1778-1787)
  source 1..30: mol_type = other RNA
gcccccgcccgcccgctgagcaccaacctc

SEQ ID NO: 35125 - RNA, 27 nt, synthetic construct
  misc_feature 1..27: note = Solute carrier family 22 member 18 (145-153)
  source 1..27: mol_type = other RNA
gcccccgaggagcgcccggccgcgctg

SEQ ID NO: 35126 - RNA, 27 nt, synthetic construct
  misc_feature 1..27: note = Zinc fingers and homeoboxes protein 2 (415-423)
  source 1..27: mol_type = other RNA
gcccccgagccgaagcgcccccacatc

SEQ ID NO: 35127 - RNA, 30 nt, synthetic construct
  misc_feature 1..30: note = Hepatoma-derived growth factor (231-240)
  source 1..30: mol_type = other RNA
gcccccggcatccgcgaccacgagagcctg

SEQ ID NO: 35128 - RNA, 30 nt, synthetic construct
  misc_feature 1..30: note = Heterogeneous nuclear ribonucleoprotein M (460-469)
  source 1..30: mol_type = other RNA
gcccccatcgaccgcgtgggccagaccatc

SEQ ID NO: 35129 - RNA, 30 nt, synthetic construct
  misc_feature 1..30: note = Gamma-interferon-inducible protein 16 (685-694)
  source 1..30: mol_type = other RNA
gcccccaagagcggcaacaccggggagctg

SEQ ID NO: 35130 - RNA, 30 nt, synthetic construct
  misc_feature 1..30: note = Cancer/testis antigen 2 (114-123)
  source 1..30: mol_type = other RNA
gcccccctgccgcgccccggcgccgtgctc

SEQ ID NO: 35131 - RNA, 24 nt, synthetic construct
  misc_feature 1..24: note = Talin-1 (1328-1335)
  source 1..24: mol_type = other RNA
gcccccaacctgaagagccagctc

SEQ ID NO: 35132 - RNA, 30 nt, synthetic construct
  misc_feature 1..30: note = REST corepressor 1 (61-70)
  source 1..30: mol_type = other RNA
gcccccaacaacggccagaacaagagcctg

SEQ ID NO: 35133 - RNA, 27 nt, synthetic construct
  misc_feature 1..27: note = Histone deacetylase 6 (706-714)
  source 1..27: mol_type = other RNA
gccccccagccggccaagccccgcctg

SEQ ID NO: 35134 - RNA, 27 nt, synthetic construct
  misc_feature 1..27: note = BAG family molecular chaperone regulator 3 (130-138)
  source 1..27: mol_type = other RNA
gccccccagcgcagccagtccccgctg

SEQ ID NO: 35135 - RNA, 27 nt, synthetic construct
  misc_feature 1..27: note = Conserved oligomeric Golgi complex subunit 7 (287-295)
  source 1..27: mol_type = other RNA
gccccccgcgccgcgctgacccggctc

SEQ ID NO: 35136 - RNA, 33 nt, synthetic construct
  misc_feature 1..33: note = Protein PRRC2B (1519-1529)
  source 1..33: mol_type = other RNA
gccccccgcgccggcgagcagggggaggcgatg

SEQ ID NO: 35137 - RNA, 33 nt, synthetic construct
  misc_feature 1..33: note = Striatin-4 (219-229)
  source 1..33: mol_type = other RNA
gccccccgcgccccgcccggccccgcggggctg

SEQ ID NO: 35138 - RNA, 33 nt, synthetic construct
  misc_feature 1..33: note = Tricarboxylate transport protein, mitochondrial (3-13)
  source 1..33: mol_type = other RNA
gccccccgcgccccgcgggcgctggccgccgcc

SEQ ID NO: 35139 - RNA, 27 nt, synthetic construct
  misc_feature 1..27: note = Actin, gamma-enteric smooth muscle (27-35)
  source 1..27: mol_type = other RNA
gccccccgcgccgtgttcccgagcatc

SEQ ID NO: 35140 - RNA, 27 nt, synthetic construct
  misc_feature 1..27: note = General transcription factor IIF subunit 2 (77-85)
  source 1..27: mol_type = other RNA
gccccccgcgagcacccgttcgtgctg

SEQ ID NO: 35141 - RNA, 33 nt, synthetic construct
  misc_feature 1..33: note = Proteasome subunit beta type-8 (9-19)
  source 1..33: mol_type = other RNA
gccccccgcggccagcggccggagagcgccctg

SEQ ID NO: 35142 - RNA, 30 nt, synthetic construct
  misc_feature 1..30: note = 40S ribosomal protein S2 (198-207)
  source 1..30: mol_type = other RNA
gccccccgcggcaccgggatcgtgagcgcc

SEQ ID NO: 35143 - RNA, 30 nt, synthetic construct
  misc_feature 1..30: note = General transcription factor 3C polypeptide 2 (702-711)
  source 1..30: mol_type = other RNA
gccccccgcaagggcaccgtgtggagcctg

SEQ ID NO: 35144 - RNA, 27 nt, synthetic construct
  misc_feature 1..27: note = Coiled-coil domain-containing protein 12 (108-116)
  source 1..27: mol_type = other RNA
gccccccgcaagccggactgggacctg

SEQ ID NO: 35145 - RNA, 27 nt, synthetic construct
  misc_feature 1..27: note = RNA demethylase ALKBH5 (289-297)
  source 1..27: mol_type = other RNA
gccccccgcctggagaccaagagcctc

SEQ ID NO: 35146 - RNA, 33 nt, synthetic construct
  misc_feature 1..33: note = Phosphatidylinositide phosphatase SAC2 (898-908)
  source 1..33: mol_type = other RNA
gccccccgcctgggcagccggtcccagagcctc

SEQ ID NO: 35147 - RNA, 27 nt, synthetic construct
  misc_feature 1..27: note = Structural maintenance of chromosomes protein 4 (79-87)
  source 1..27: mol_type = other RNA
gccccccgcctgatgatcacccacatc

SEQ ID NO: 35148 - RNA, 27 nt, synthetic construct
  misc_feature 1..27: note = IST1 homolog (107-115)
  source 1..27: mol_type = other RNA
gccccccgcctgcagagcgaggtggcc

SEQ ID NO: 35149 - RNA, 33 nt, synthetic construct
  misc_feature 1..33: note = IST1 homolog (107-117)
  source 1..33: mol_type = other RNA
gccccccgcctgcagagcgaggtggccgagctc

SEQ ID NO: 35150 - RNA, 36 nt, synthetic construct
  misc_feature 1..36: note = 60S ribosomal protein L13 (47-58)
  source 1..36: mol_type = other RNA
gccccccgcccggccagcggccccatccggcccatc

SEQ ID NO: 35151 - RNA, 33 nt, synthetic construct
  misc_feature 1..33: note = Cold shock domain-containing protein E1 (762-772)
  source 1..33: mol_type = other RNA
gccccccgcccggaccggctggtgaaccgcctc

SEQ ID NO: 35152 - RNA, 33 nt, synthetic construct
  misc_feature 1..33: note = tRNA-splicing endonuclease subunit Sen34 (71-81)
  source 1..33: mol_type = other RNA
gccccccgcccggacagccggcaccactccctg

SEQ ID NO: 35153 - RNA, 27 nt, synthetic construct
  misc_feature 1..27: note = WAS/WASL-interacting protein family member 2 (122-130)
  source 1..27: mol_type = other RNA
gccccccgcccgcccgtgagcgccgcg

SEQ ID NO: 35154 - RNA, 27 nt, synthetic construct
  misc_feature 1..27: note = Rab GTPase-activating protein 1 (88-96)
  source 1..27: mol_type = other RNA
gccccccgcagcgaggtggaggccctg

SEQ ID NO: 35155 - RNA, 33 nt, synthetic construct
  misc_feature 1..33: note = HLA class II histocompatibility antigen, DP beta 1 chain (9-19)
  source 1..33: mol_type = other RNA
gccccccgcaccgtggccctgaccgcgctcctg

SEQ ID NO: 35156 - RNA, 33 nt, synthetic construct
  misc_feature 1..33: note = Protocadherin gamma-C3 (257-267)
  source 1..33: mol_type = other RNA
gcccccagcggcacccgcgtggtccaggtgctg

SEQ ID NO: 35157 - RNA, 30 nt, synthetic construct
  misc_feature 1..30: note = Rho GTPase-activating protein 7 (785-794)
  source 1..30: mol_type = other RNA
gcccccagcctgttccacctcaacaccctg

SEQ ID NO: 35158 - RNA, 33 nt, synthetic construct
  misc_feature 1..33: note = Round spermatid basic protein 1-like protein (94-104)
  source 1..33: mol_type = other RNA
gcccccagcccgtccagctcccgcagctccttc

SEQ ID NO: 35159 - RNA, 27 nt, synthetic construct
  misc_feature 1..27: note = intercellular adhesion molecule-1
  source 1..27: mol_type = other RNA
gcccccagctccccgcgccccgccctg

SEQ ID NO: 35160 - RNA, 30 nt, synthetic construct
  misc_feature 1..30: note = intercellular adhesion molecule-1 (2-11)
  source 1..30: mol_type = other RNA
gcccccagctccccgcgccccgccctgccc

SEQ ID NO: 35161 - RNA, 24 nt, synthetic construct
  misc_feature 1..24: note = Unconventional myosin-Ic (176-183)
  source 1..24: mol_type = other RNA
gcccccgtgggcgggcacatcctg

SEQ ID NO: 35162 - RNA, 27 nt, synthetic construct
  misc_feature 1..27: note = Alpha-mannosidase 2C1 (660-668)
  source 1..27: mol_type = other RNA
gcccccgtgccgccccccaccagcctg

SEQ ID NO: 35163 - RNA, 27 nt, synthetic construct
  misc_feature 1..27: note = Transcription factor p65 (247-255)
  source 1..27: mol_type = other RNA
gcccccgtgcgcgtcagcatgcagctg

SEQ ID NO: 35164 - RNA, 27 nt, synthetic construct
  misc_feature 1..27: note = Serine protease 23 (107-115)
  source 1..27: mol_type = other RNA
gccccctggaagccgacctggcccgcc

SEQ ID NO: 35165 - RNA, 27 nt, synthetic construct
  misc_feature 1..27: note = Splicing factor, arginine/serine-rich 15 (410-418)
  source 1..27: mol_type = other RNA
gcccagaacgagcccctgacccagaag

SEQ ID NO: 35166 - RNA, 30 nt, synthetic construct
  misc_feature 1..30: note = GTP-binding nuclear protein Ran (215-224)
  source 1..30: mol_type = other RNA
gcccagtacgagcacgacctggaggtggcc

SEQ ID NO: 35167 - RNA, 27 nt, synthetic construct
  misc_feature 1..27: note = Neuropathy target esterase (279-287)
  source 1..27: mol_type = other RNA
gcccgcgacagcaccgtgctgcggctc

SEQ ID NO: 35168 - RNA, 27 nt, synthetic construct
  misc_feature 1..27: note = Tubulin epsilon chain (273-281)
  source 1..27: mol_type = other RNA
gcccgcttcgagggcagcctgaacatg

SEQ ID NO: 35169 - RNA, 27 nt, synthetic construct
  misc_feature 1..27: note = Splicing factor 3A subunit 1 (306-314)
  source 1..27: mol_type = other RNA
gcccgcatcctgatccaggagcggtac

SEQ ID NO: 35170 - RNA, 27 nt, synthetic construct
  misc_feature 1..27: note = Dedicator of cytokinesis protein 7 (251-259)
  source 1..27: mol_type = other RNA
gcccgcgtgaagatgcaggtcaccatg

SEQ ID NO: 35171 - RNA, 27 nt, synthetic construct
  misc_feature 1..27: note = MICOS complex subunit MIC13 (3-11)
  source 1..27: mol_type = other RNA
gcccgcgtgtggagcctgatgcggttc

SEQ ID NO: 35172 - RNA, 27 nt, synthetic construct
  misc_feature 1..27: note = Endonuclease domain-containing 1 protein (4-12)
  source 1..27: mol_type = other RNA
gcccgctggctggccctcggcagcctg

SEQ ID NO: 35173 - RNA, 27 nt, synthetic construct
  misc_feature 1..27: note = Sodium-dependent phosphate transport protein 4 (18-26)
  source 1..27: mol_type = other RNA
gcccgctacggcatcgccctggtgctc

SEQ ID NO: 35174 - RNA, 33 nt, synthetic construct
  misc_feature 1..33: note = Deubiquitinating protein VCIP135 (28-38)
  source 1..33: mol_type = other RNA
gccagcgccgcggcctccggcgggctgctcaag

SEQ ID NO: 35175 - RNA, 27 nt, synthetic construct
  misc_feature 1..27: note = Kinase D-interacting substrate of 220 kDa (763-771)
  source 1..27: mol_type = other RNA
gccagcgacccccacatcatcatcaag

SEQ ID NO: 35176 - RNA, 30 nt, synthetic construct
  misc_feature 1..30: note = Multivesicular body subunit 12A (40-49)
  source 1..30: mol_type = other RNA
gccagcttcggcaagtccttcgcccagaag

SEQ ID NO: 35177 - RNA, 33 nt, synthetic construct
  misc_feature 1..33: note = Myosin-9 (366-376)
  source 1..33: mol_type = other RNA
gccagcatgcccgacaacaccgccgcgcagaag

SEQ ID NO: 35178 - RNA, 27 nt, synthetic construct
  misc_feature 1..27: note = Pro-interleukin-16 (1150-1158)
  source 1..27: mol_type = other RNA
gccagccaggagggcaccatccagaag

SEQ ID NO: 35179 - RNA, 27 nt, synthetic construct
  misc_feature 1..27: note = Cullin-4B (91-99)
  source 1..27: mol_type = other RNA
gccagctcccacgtgcccatccagaag

SEQ ID NO: 35180 - RNA, 33 nt, synthetic construct
  misc_feature 1..33: note = Vimentin (54-64)
  source 1..33: mol_type = other RNA
gccagctcccccggcggggtgtacgccacccgc

SEQ ID NO: 35181 - RNA, 27 nt, synthetic construct
  misc_feature 1..27: note = Heterogeneous nuclear ribonucleoprotein D-like (81-89)
  source 1..27: mol_type = other RNA
gccagcgtggacaaggtcctggagctc

SEQ ID NO: 35182 - RNA, 27 nt, synthetic construct
  misc_feature 1..27: note = Gamma-adducin (236-244)
  source 1..27: mol_type = other RNA
gccaccgccgcggtgagctccatgaag

SEQ ID NO: 35183 - RNA, 30 nt, synthetic construct
  misc_feature 1..30: note = Clathrin heavy chain 1 (311-320)
  source 1..30: mol_type = other RNA
gccaccgccggcatcatcggggtgaaccgc

SEQ ID NO: 35184 - RNA, 27 nt, synthetic construct
  misc_feature 1..27: note = WD repeat-containing protein 44 (93-101)
  source 1..27: mol_type = other RNA
gccaccgccagccccatcgtggcgcgc

SEQ ID NO: 35185 - RNA, 27 nt, synthetic construct
  misc_feature 1..27: note = Nucleotide exchange factor SIL1 (214-222)
  source 1..27: mol_type = other RNA
gccaccgagcagcccctgaccgccaag

SEQ ID NO: 35186 - RNA, 27 nt, synthetic construct
  misc_feature 1..27: note = Ankyrin repeat and KH domain-containing protein 1 (1541-1549)
  source 1..27: mol_type = other RNA
gccaccttcaccaacgtgttcggcaag

SEQ ID NO: 35187 - RNA, 30 nt, synthetic construct
  misc_feature 1..30: note = Protein artemis (555-564)
  source 1..30: mol_type = other RNA
gccaccggcgagagcatcgccgtgaagaag

SEQ ID NO: 35188 - RNA, 30 nt, synthetic construct
  misc_feature 1..30: note = Guanine nucleotide-binding protein G(I)/G(S)/G(T) subunit beta-1 (228-237)
  source 1..30: mol_type = other RNA
gccaccggcagctgggactccttcctgaag

SEQ ID NO: 35189 - RNA, 27 nt, synthetic construct
  misc_feature 1..27: note = Serine/threonine-protein kinase mTOR (800-808)
  source 1..27: mol_type = other RNA
gccaccatcggcgagctggcccaggtg

SEQ ID NO: 35190 - RNA, 33 nt, synthetic construct
  misc_feature 1..33: note = Interferon regulatory factor 2-binding protein-like (88-98)
  source 1..33: mol_type = other RNA
gccaccatcctggccggcgacgtgaaggtcaag

SEQ ID NO: 35191 - RNA, 27 nt, synthetic construct
  misc_feature 1..27: note = Protein FAM76B (209-217)
  source 1..27: mol_type = other RNA
gccaccatccagaacgagacccccaag

SEQ ID NO: 35192 - RNA, 33 nt, synthetic construct
  misc_feature 1..33: note = Paired amphipathic helix protein Sin3a (628-638)
  source 1..33: mol_type = other RNA
gccaccatccgcgtgctggaggccatccagaag

SEQ ID NO: 35193 - RNA, 36 nt, synthetic construct
  misc_feature 1..36: note = T-complex protein 1 subunit eta (44-55)
  source 1..36: mol_type = other RNA
gccaccatcagcaacgacggcgccaccatcctgaag

SEQ ID NO: 35194 - RNA, 27 nt, synthetic construct
  misc_feature 1..27: note = Hexokinase-1 (356-364)
  source 1..27: mol_type = other RNA
gccaccctgggcgccatcctcaaccgc

SEQ ID NO: 35195 - RNA, 27 nt, synthetic construct
  misc_feature 1..27: note = Nuclear mitotic apparatus protein 1 (150-158)
  source 1..27: mol_type = other RNA
gccaccctgcaggaggccctcgcgcac

SEQ ID NO: 35196 - RNA, 27 nt, synthetic construct
  misc_feature 1..27: note = Cytoplasmic dynein 1 heavy chain 1 (3080-3088)
  source 1..27: mol_type = other RNA
gccaccagccccgccctgttcaaccgc

SEQ ID NO: 35197 - RNA, 30 nt, synthetic construct
  misc_feature 1..30: note = Isoaspartyl peptidase/L-asparaginase (183-192)
  source 1..30: mol_type = other RNA
gccaccagcaccggcgggatcgtgaacaag

SEQ ID NO: 35198 - RNA, 27 nt, synthetic construct
  misc_feature 1..27: note = Ankyrin repeat domain-containing protein 17 (653-661)
  source 1..27: mol_type = other RNA
gccaccaccctgcccatccgcaacaag

SEQ ID NO: 35199 - RNA, 33 nt, synthetic construct
  misc_feature 1..33: note = Alsin (409-419)
  source 1..33: mol_type = other RNA
gccacctacgaggccggcgcgctgagcctcaag

SEQ ID NO: 35200 - RNA, 30 nt, synthetic construct
  misc_feature 1..30: note = Chromobox protein homolog 2 (418-427)
  source 1..30: mol_type = other RNA
gccgtggcccccccgacccccgcgagcaag

SEQ ID NO: 35201 - RNA, 36 nt, synthetic construct
  misc_feature 1..36: note = Guanine nucleotide-binding protein G(I)/G(S)/G(T) subunit beta-2 (326-337)
  source 1..36: mol_type = other RNA
gccgtggccaccggcagctgggactccttcctgaag

SEQ ID NO: 35202 - RNA, 30 nt, synthetic construct
  misc_feature 1..30: note = Cilia- and flagella-associated protein 97 (505-514)
  source 1..30: mol_type = other RNA
gccgtggaccccagctccggccacccgcgc

SEQ ID NO: 35203 - RNA, 36 nt, synthetic construct
  misc_feature 1..36: note = Heme-binding protein 1 (85-96)
  source 1..36: mol_type = other RNA
gccgtgttccccaacgaggacggcagcctgcagaag

SEQ ID NO: 35204 - RNA, 27 nt, synthetic construct
  misc_feature 1..27: note = SCY1-like protein 2 (22-30)
  source 1..27: mol_type = other RNA
gccgtgatgggcaaccccgtcacccgc

SEQ ID NO: 35205 - RNA, 27 nt, synthetic construct
  misc_feature 1..27: note = PH domain leucine-rich repeat-containing protein phosphatase 1 (285-293)
  source 1..27: mol_type = other RNA
gccgtgcgcaacgtccccgacgccctg

SEQ ID NO: 35206 - RNA, 33 nt, synthetic construct
  misc_feature 1..33: note = Histone H2B type 1-A (112-122)
  source 1..33: mol_type = other RNA
gccgtgagcgagggcaccaaggccgtcaccaag

SEQ ID NO: 35207 - RNA, 27 nt, synthetic construct
  misc_feature 1..27: note = E3 ubiquitin-protein ligase RNF123 (619-627)
  source 1..27: mol_type = other RNA
gccgtgaccggcatcctggtccagctc

SEQ ID NO: 35208 - RNA, 27 nt, synthetic construct
  misc_feature 1..27: note = Transcription termination factor 1 (809-817)
  source 1..27: mol_type = other RNA
gccgtgtacgtccccttctggcagaag

SEQ ID NO: 35209 - RNA, 27 nt, synthetic construct
  misc_feature 1..27: note = Tyrosine-protein kinase Fyn (324-332)
  source 1..27: mol_type = other RNA
gcctacatcgagcgcatgaactacatc

SEQ ID NO: 35210 - RNA, 27 nt, synthetic construct
  misc_feature 1..27: note = COP9 signalosome complex subunit 4 (165-173)
  source 1..27: mol_type = other RNA
gcctacatcaaccgcgccagcctgctc

SEQ ID NO: 35211 - RNA, 27 nt, synthetic construct
  misc_feature 1..27: note = UDP-N-acetylglucosamine-peptide N-acetylglucosaminyltransferase 110 kDa subunit (697-705)
  source 1..27: mol_type = other RNA
gcctacatgccccacaccttcttcatc

SEQ ID NO: 35212 - RNA, 27 nt, synthetic construct
  misc_feature 1..27: note = Translocating chain-associated membrane protein 1 (155-163)
  source 1..27: mol_type = other RNA
gcctacccccacaacctgatgaccttc

SEQ ID NO: 35213 - RNA, 27 nt, synthetic construct
  misc_feature 1..27: note = Dihydropyrimidine dehydrogenase (NADP(+)) (185-193)
  source 1..27: mol_type = other RNA
gcctacagcgccaagatcgcgctgttc

SEQ ID NO: 35214 - RNA, 27 nt, synthetic construct
  misc_feature 1..27: note = Double-stranded RNA-binding protein Staufen homolog 1 (70-78)
  source 1..27: mol_type = other RNA
gacgccgccgcgaaggccctgcgcatc

SEQ ID NO: 35215 - RNA, 24 nt, synthetic construct
  misc_feature 1..24: note = Minor histocompatibility antigen H13 (74-81)
  source 1..24: mol_type = other RNA
gacgccgcccgcttccccatcatc

SEQ ID NO: 35216 - RNA, 27 nt, synthetic construct
  misc_feature 1..27: note = Conserved oligomeric Golgi complex subunit 2 (338-346)
  source 1..27: mol_type = other RNA
gacgccttccacgagaagtacaccatc

SEQ ID NO: 35217 - RNA, 24 nt, synthetic construct
  misc_feature 1..24: note = AP-2 complex subunit mu (30-37)
  source 1..24: mol_type = other RNA
gacgccttccgcgtgaacgtcatc

SEQ ID NO: 35218 - RNA, 27 nt, synthetic construct
  misc_feature 1..27: note = UDP-N-acetylglucosamine-peptide N-acetylglucosaminyltransferase 110 kDa subunit (430-438)
  source 1..27: mol_type = other RNA
gacgcccacagcaacctggcctccatc

SEQ ID NO: 35219 - RNA, 24 nt, synthetic construct
  misc_feature 1..24: note = Neurobeachin-like protein 2 (378-385)
  source 1..24: mol_type = other RNA
gacgccatcgccgtgcacgtcgtg

SEQ ID NO: 35220 - RNA, 27 nt, synthetic construct
  misc_feature 1..27: note = Rho-associated protein kinase 2 (203-211)
  source 1..27: mol_type = other RNA
gacgccatccacagcatgggcctgatc

SEQ ID NO: 35221 - RNA, 27 nt, synthetic construct
  misc_feature 1..27: note = Ubiquitin carboxyl-terminal hydrolase 22 (496-504)
  source 1..27: mol_type = other RNA
gacgccatcatcaccaaggccagcatc

SEQ ID NO: 35222 - RNA, 27 nt, synthetic construct
  misc_feature 1..27: note = NF-kappa-B essential modulator (63-71)
  source 1..27: mol_type = other RNA
gacgccatccgccagagcaaccagatc

SEQ ID NO: 35223 - RNA, 24 nt, synthetic construct
  misc_feature 1..24: note = Uncharacterized protein C1orf43 (108-115)
  source 1..24: mol_type = other RNA
gacgccatccgcaccagcgagatc

SEQ ID NO: 35224 - RNA, 27 nt, synthetic construct
  misc_feature 1..27: note = Enhancer of filamentation 1 (541-549)
  source 1..27: mol_type = other RNA
gacgccaagcagctgaccaccacgatc

SEQ ID NO: 35225 - RNA, 27 nt, synthetic construct
  misc_feature 1..27: note = Endoplasmin (89-97)
  source 1..27: mol_type = other RNA
gacgccctggacaagatccgcctcatc

SEQ ID NO: 35226 - RNA, 27 nt, synthetic construct
  misc_feature 1..27: note = 60S ribosomal protein L23a (145-153)
  source 1..27: mol_type = other RNA
gacgccctggacgtggccaacaagatc

SEQ ID NO: 35227 - RNA, 27 nt, synthetic construct
  misc_feature 1..27: note = Peroxisome proliferator activated receptor interacting complex protein (2369-2377)
  source 1..27: mol_type = other RNA
gacgccctgggcaagctcatcagcatc

SEQ ID NO: 35228 - RNA, 24 nt, synthetic construct
  misc_feature 1..24: note = S-adenosylmethionine synthase isoform type-2 (220-227)
  source 1..24: mol_type = other RNA
gacgccctgaaggagaaggtgatc

SEQ ID NO: 35229 - RNA, 27 nt, synthetic construct
  misc_feature 1..27: note = Microtubule-actin cross-linking factor 1, isoforms 1/2/3/5 (533-541)
  source 1..27: mol_type = other RNA
gacgccctgaaggtgatcaacaaggtc

SEQ ID NO: 35230 - RNA, 27 nt, synthetic construct
  misc_feature 1..27: note = Bax inhibitor 1 (57-65)
  source 1..27: mol_type = other RNA
gacgccctgctcaagttcagccacatc

SEQ ID NO: 35231 - RNA, 27 nt, synthetic construct
  misc_feature 1..27: note = Spectrin beta chain, non-erythrocytic 1 (949-957)
  source 1..27: mol_type = other RNA
gacgccctgctcagcgccctgtccatc

SEQ ID NO: 35232 - RNA, 24 nt, synthetic construct
  misc_feature 1..24: note = Protein FAM179B (198-205)
  source 1..24: mol_type = other RNA
gacgccctgcagatcctccacatc

SEQ ID NO: 35233 - RNA, 24 nt, synthetic construct
  misc_feature 1..24: note = Isoleucine-tRNA ligase, cytoplasmic (621-628)
  source 1..24: mol_type = other RNA
gacgccctgcgcctctacctgatc

SEQ ID NO: 35234 - RNA, 27 nt, synthetic construct
  misc_feature 1..27: note = Programmed cell death protein 4 (72-80)
  source 1..27: mol_type = other RNA
gacgccctgcgcagcggcctcaccgtg

SEQ ID NO: 35235 - RNA, 27 nt, synthetic construct
  misc_feature 1..27: note = Methionine-tRNA ligase, cytoplasmic (281-289)
  source 1..27: mol_type = other RNA
gacgccctgcgcagcatcctcaccatc

SEQ ID NO: 35236 - RNA, 27 nt, synthetic construct
  misc_feature 1..27: note = ATP synthase subunit alpha, mitochondrial (164-172)
  source 1..27: mol_type = other RNA
gacgccatgaagtacaccatcgtggtc

SEQ ID NO: 35237 - RNA, 27 nt, synthetic construct
  misc_feature 1..27: note = Plectin (246-254)
  source 1..27: mol_type = other RNA
gacgccatgccccgcgtgccggacgtc

SEQ ID NO: 35238 - RNA, 24 nt, synthetic construct
  misc_feature 1..24: note = Cyclic AMP-responsive element-binding protein 1 (144-151)
  source 1..24: mol_type = other RNA
gacgcccccggcgtgccgcgcatc

SEQ ID NO: 35239 - RNA, 27 nt, synthetic construct
  misc_feature 1..27: note = Putative Polycomb group protein ASXL1 (26-34)
  source 1..27: mol_type = other RNA
gacgcccccatgaccccgaagcagatc

SEQ ID NO: 35240 - RNA, 27 nt, synthetic construct
  misc_feature 1..27: note = NEDD4 family-interacting protein 1 (37-45)
  source 1..27: mol_type = other RNA
gacgcccccccgccctacagctccatc

SEQ ID NO: 35241 - RNA, 24 nt, synthetic construct
  misc_feature 1..24: note = E3 ubiquitin-protein ligase MGRN1 (127-134)
  source 1..24: mol_type = other RNA
gacgcccgcgtggccatcaccatc

SEQ ID NO: 35242 - RNA, 27 nt, synthetic construct
  misc_feature 1..27: note = HLA class I histocompatibility antigen, A-1 alpha chain (115-123)
  source 1..27: mol_type = other RNA
gacgcctacgacggcaaggactacatc

SEQ ID NO: 35243 - RNA, 24 nt, synthetic construct
  misc_feature 1..24: note = Probable ATP-dependent RNA helicase DDX49 (232-239)
  source 1..24: mol_type = other RNA
gacgcctacctggtgcacctcatc

SEQ ID NO: 35244 - RNA, 27 nt, synthetic construct
  misc_feature 1..27: note = Endothelin-converting enzyme 1 (30-38)
  source 1..27: mol_type = other RNA
gacgcctaccccaacggcctgcaggtg

SEQ ID NO: 35245 - RNA, 27 nt, synthetic construct
  misc_feature 1..27: note = Cohesin subunit SA-2 (683-691)
  source 1..27: mol_type = other RNA
gacgcctaccaggtgctgagcaccctc

SEQ ID NO: 35246 - RNA, 27 nt, synthetic construct
  misc_feature 1..27: note = Torsin-1A-interacting protein 1 (432-440)
  source 1..27: mol_type = other RNA
gacgcctacagctccttccgcagcgtg

SEQ ID NO: 35247 - RNA, 27 nt, synthetic construct
  misc_feature 1..27: note = ATP-binding cassette sub-family E member 1 (434-442)
  source 1..27: mol_type = other RNA
gacgcctacacccacccccagttcgtg

SEQ ID NO: 35248 - RNA, 27 nt, synthetic construct
  misc_feature 1..27: note = Talin-1 (1943-1951)
  source 1..27: mol_type = other RNA
gacgcctacaccaagaaggagctgatc

SEQ ID NO: 35249 - RNA, 27 nt, synthetic construct
  misc_feature 1..27: note = Gelsolin (93-101)
  source 1..27: mol_type = other RNA
gacgcctacgtgatcctgaagaccgtc

SEQ ID NO: 35250 - RNA, 24 nt, synthetic construct
  misc_feature 1..24: note = 40S ribosomal protein S26 (60-67)
  source 1..24: mol_type = other RNA
gacgcctacgtgctgcccaagctc

SEQ ID NO: 35251 - RNA, 27 nt, synthetic construct
  misc_feature 1..27: note = 40S ribosomal protein S26 (60-68)
  source 1..27: mol_type = other RNA
gacgcctacgtgctgcccaagctctac

SEQ ID NO: 35252 - RNA, 27 nt, synthetic construct
  misc_feature 1..27: note = Intraflagellar transport protein 25 homolog (124-132)
  source 1..27: mol_type = other RNA
gaccacttcgccagcgtgcactccgtc

SEQ ID NO: 35253 - RNA, 27 nt, synthetic construct
  misc_feature 1..27: note = Vacuolar protein sorting-associated protein 13A (1926-1934)
  source 1..27: mol_type = other RNA
gaccacttcaacgccatgaccagcctg

SEQ ID NO: 35254 - RNA, 27 nt, synthetic construct
  misc_feature 1..27: note = Cytoplasmic FMR1-interacting protein 2 (355-363)
  source 1..27: mol_type = other RNA
gaccacatccgcttcatcagcgagctg

SEQ ID NO: 35255 - RNA, 27 nt, synthetic construct
  misc_feature 1..27: note = Protein zer-1 homolog (237-245)
  source 1..27: mol_type = other RNA
gaccacatccgcgtgatcgtccagctg

SEQ ID NO: 35256 - RNA, 27 nt, synthetic construct
  misc_feature 1..27: note = Cytoplasmic FMR1-interacting protein 1 (355-363)
  source 1..27: mol_type = other RNA
gaccacatgcgcttcatcagcgagctg

SEQ ID NO: 35257 - RNA, 30 nt, synthetic construct
  misc_feature 1..30: note = 60S ribosomal protein L9 (11-20)
  source 1..30: mol_type = other RNA
gacatccccgagaacgtggacatcaccctg

SEQ ID NO: 35258 - RNA, 27 nt, synthetic construct
  misc_feature 1..27: note = 5'-3' exoribonuclease 1 (835-843)
  source 1..27: mol_type = other RNA
gacatccgcgccttcgacagccggttc

SEQ ID NO: 35259 - RNA, 30 nt, synthetic construct
  misc_feature 1..30: note = MAX gene-associated protein (126-135)
  source 1..30: mol_type = other RNA
gacatcagccccgtggacaaccaccgctac

SEQ ID NO: 35260 - RNA, 30 nt, synthetic construct
  misc_feature 1..30: note = Protein MAK16 homolog (177-186)
  source 1..30: mol_type = other RNA
gacatctacaacttccccatccacgccttc

SEQ ID NO: 35261 - RNA, 27 nt, synthetic construct
  misc_feature 1..27: note = DNA-directed RNA polymerases I, II, and III subunit RPABC5 (54-62)
  source 1..27: mol_type = other RNA
gacctgatcgagaagctcctgaactac

SEQ ID NO: 35262 - RNA, 27 nt, synthetic construct
  misc_feature 1..27: note = TAR DNA-binding protein 43 (128-136)
  source 1..27: mol_type = other RNA
gacctgatcatcaagggcatcagcgtg

SEQ ID NO: 35263 - RNA, 27 nt, synthetic construct
  misc_feature 1..27: note = Arf-GAP with Rho-GAP domain, ANK repeat and PH domain-containing protein 3 (271-279)
  source 1..27: mol_type = other RNA
gacctgatcagcccctacgcctccttc

SEQ ID NO: 35264 - RNA, 27 nt, synthetic construct
  misc_feature 1..27: note = V-type proton ATPase subunit C 1 (62-70)
  source 1..27: mol_type = other RNA
gacctggtgacctacatcacccgcttc

SEQ ID NO: 35265 - RNA, 27 nt, synthetic construct
  misc_feature 1..27: note = Lysine-specific demethylase 5B (44-52)
  source 1..27: mol_type = other RNA
gaccccttcgccttcatccacaagatc

SEQ ID NO: 35266 - RNA, 27 nt, synthetic construct
  misc_feature 1..27: note = 116 kDa U5 small nuclear ribonucleoprotein component (910-918)
  source 1..27: mol_type = other RNA
gaccccctggacaagagcatcgtgatc

SEQ ID NO: 35267 - RNA, 27 nt, synthetic construct
  misc_feature 1..27: note = Signal recognition particle 9 kDa protein (21-29)
  source 1..27: mol_type = other RNA
gaccccatgaaggcccgcgtggtcctg

SEQ ID NO: 35268 - RNA, 27 nt, synthetic construct
  misc_feature 1..27: note = Probable 28S rRNA (cytosine-C(5))-methyltransferase (223-231)
  source 1..27: mol_type = other RNA
gaccccccgcccggcagccacgtgatc

SEQ ID NO: 35269 - RNA, 27 nt, synthetic construct
  misc_feature 1..27: note = Protein BTG2 (105-113)
  source 1..27: mol_type = other RNA
gacccctacgaggtgagctaccgcatc

SEQ ID NO: 35270 - RNA, 27 nt, synthetic construct
  misc_feature 1..27: note = Small integral membrane protein 15 (18-26)
  source 1..27: mol_type = other RNA
gacccctacggcttcctgaccaccgtg

SEQ ID NO: 35271 - RNA, 27 nt, synthetic construct
  misc_feature 1..27: note = Serine/threonine-protein kinase mTOR (895-903)
  source 1..27: mol_type = other RNA
gacccctacaagcacaaggtgaacatc

SEQ ID NO: 35272 - RNA, 24 nt, synthetic construct
  misc_feature 1..24: note = Serine/threonine-protein kinase tousled-like 2 (715-722)
  source 1..24: mol_type = other RNA
gacccctacctgctcccgcacatc

SEQ ID NO: 35273 - RNA, 24 nt, synthetic construct
  misc_feature 1..24: note = AP-3 complex subunit delta-1 isoform 3 (706-713)
  source 1..24: mol_type = other RNA
gacccctaccgcgccctggacatc

SEQ ID NO: 35274 - RNA, 24 nt, synthetic construct
  misc_feature 1..24: note = DnaJ homolog subfamily C member 16 (29-36)
  source 1..24: mol_type = other RNA
gacccctaccgcgtgctgggcgtc

SEQ ID NO: 35275 - RNA, 30 nt, synthetic construct
  misc_feature 1..30: note = CSC1-like protein 1 (174-183)
  source 1..30: mol_type = other RNA
gacccctacagcttcggccgcaccaccatc

SEQ ID NO: 35276 - RNA, 27 nt, synthetic construct
  misc_feature 1..27: note = Nuclear pore membraneoprotein 210 (430-438)
  source 1..27: mol_type = other RNA
gaccaggacggcggggtgcacatcctg

SEQ ID NO: 35277 - RNA, 27 nt, synthetic construct
  misc_feature 1..27: note = Ubiquitin carboxyl-terminal hydrolase 7 (365-373)
  source 1..27: mol_type = other RNA
gaccgcttcgagttccccgagcagctg

SEQ ID NO: 35278 - RNA, 30 nt, synthetic construct
  misc_feature 1..30: note = 39S ribosomal protein L38, mitochondrial (371-380)
  source 1..30: mol_type = other RNA
gacagccacgagcccacctacggcatctac

SEQ ID NO: 35279 - RNA, 30 nt, synthetic construct
  misc_feature 1..30: note = Golgin subfamily A member 2 (517-526)
  source 1..30: mol_type = other RNA
gacaccatcggcgagtacatcgccctgtac

SEQ ID NO: 35280 - RNA, 30 nt, synthetic construct
  misc_feature 1..30: note = N-alpha-acetyltransferase 25, NatB auxiliary subunit (540-549)
  source 1..30: mol_type = other RNA
gacaccatcggctacctgctcacccgctac

SEQ ID NO: 35281 - RNA, 27 nt, synthetic construct
  misc_feature 1..27: note = E3 ubiquitin-protein ligase RNF213 (545-553)
  source 1..27: mol_type = other RNA
gacaccatcaacctgaacagcttcttc

SEQ ID NO: 35282 - RNA, 27 nt, synthetic construct
  misc_feature 1..27: note = Gamma-interferon-inducible protein 16 (447-455)
  source 1..27: mol_type = other RNA
gacaccatcagcaagatgaacgacttc

SEQ ID NO: 35283 - RNA, 27 nt, synthetic construct
  misc_feature 1..27: note = ADP-ribosylation factor-like protein 2 (42-50)
  source 1..27: mol_type = other RNA
gacaccatcagccccaccctgggcttc

SEQ ID NO: 35284 - RNA, 27 nt, synthetic construct
  misc_feature 1..27: note = Protein Asterix (74-82)
  source 1..27: mol_type = other RNA
gacaccaagcagatgatgagctccttc

SEQ ID NO: 35285 - RNA, 27 nt, synthetic construct
  misc_feature 1..27: note = Long-chain-fatty-acid-CoA ligase 3 (86-94)
  source 1..27: mol_type = other RNA
gacaccctggacaaggtgttcacctac

SEQ ID NO: 35286 - RNA, 33 nt, synthetic construct
  misc_feature 1..33: note = Heterogeneous nuclear ribonucleoprotein A3 (178-188)
  source 1..33: mol_type = other RNA
gacaccgtggacaagatcgtcgtgcagaagtac

SEQ ID NO: 35287 - RNA, 27 nt, synthetic construct
  misc_feature 1..27: note = Protein SDE2 homolog (60-68)
  source 1..27: mol_type = other RNA
gacaccgtgcagcacggcgccgtctac

SEQ ID NO: 35288 - RNA, 33 nt, synthetic construct
  misc_feature 1..33: note = Heterogeneous nuclear ribonucleoprotein A0 (108-118)
  source 1..33: mol_type = other RNA
gacgtggccgagggcgacctgatcgagcacttc

SEQ ID NO: 35289 - RNA, 33 nt, synthetic construct
  misc_feature 1..33: note = Small ubiquitin-related modifier 2 isoform b precursor (61-71)
  source 1..33: mol_type = other RNA
gacgtgttccagcagcagaccggcggggtctac

SEQ ID NO: 35290 - RNA, 30 nt, synthetic construct
  misc_feature 1..30: note = Dapper homolog 1 (245-254)
  source 1..30: mol_type = other RNA
gacgtgatcgccgacgtcaaccccaagtac

SEQ ID NO: 35291 - RNA, 33 nt, synthetic construct
  misc_feature 1..33: note = Transmembrane protein 64 (301-311)
  source 1..33: mol_type = other RNA
gacgtgatcgccgagcagagcgtctccggctac

SEQ ID NO: 35292 - RNA, 30 nt, synthetic construct
  misc_feature 1..30: note = 60S acidic ribosomal protein P2 (53-62)
  source 1..30: mol_type = other RNA
gacgtgatcgcccagggcatcgggaagctg

SEQ ID NO: 35293 - RNA, 27 nt, synthetic construct
  misc_feature 1..27: note = Transcription factor EB (253-261)
  source 1..27: mol_type = other RNA
gacgtgatcgacaacatcatgcgcctg

SEQ ID NO: 35294 - RNA, 27 nt, synthetic construct
  misc_feature 1..27: note = Nipped-B-like protein (1331-1339)
  source 1..27: mol_type = other RNA
gacgtgatcgagcgcgtcatccagtac

SEQ ID NO: 35295 - RNA, 27 nt, synthetic construct
  misc_feature 1..27: note = Magnesium transporter NIPA2 (278-286)
  source 1..27: mol_type = other RNA
gacgtgatcggcaccctgagcgggttc

SEQ ID NO: 35296 - RNA, 27 nt, synthetic construct
  misc_feature 1..27: note = DnaJ homolog subfamily C member 8 (26-34)
  source 1..27: mol_type = other RNA
gacgtgatccaggccggcaaggagtac

SEQ ID NO: 35297 - RNA, 27 nt, synthetic construct
  misc_feature 1..27: note = Mitochondrial import receptor subunit TOM5 homolog (23-31)
  source 1..27: mol_type = other RNA
gacgtgatcagctccatccgcaacttc

SEQ ID NO: 35298 - RNA, 27 nt, synthetic construct
  misc_feature 1..27: note = Membrane-bound transcription factor site-2 protease (264-272)
  source 1..27: mol_type = other RNA
gacgtgaaggacctgatcggcttcttc

SEQ ID NO: 35299 - RNA, 27 nt, synthetic construct
  misc_feature 1..27: note = E3 ubiquitin-protein ligase RNF213 (4145-4153)
  source 1..27: mol_type = other RNA
gacgtgaaggactacatccaggagtac

SEQ ID NO: 35300 - RNA, 33 nt, synthetic construct
  misc_feature 1..33: note = Pre-mRNA-processing-splicing factor 8 (1650-1660)
  source 1..33: mol_type = other RNA
gacgtgatggacagcaccaccacgcagaagtac

SEQ ID NO: 35301 - RNA, 27 nt, synthetic construct
  misc_feature 1..27: note = Coiled-coil domain-containing protein 134 (67-75)
  source 1..27: mol_type = other RNA
gacgtgatgctgaagggcctcttcaag

SEQ ID NO: 35302 - RNA, 30 nt, synthetic construct
  misc_feature 1..30: note = Dipeptidyl peptidase 9 (772-781)
  source 1..30: mol_type = other RNA
gacgtgcccgagaacaaccagcacggctac

SEQ ID NO: 35303 - RNA, 27 nt, synthetic construct
  misc_feature 1..27: note = Vimentin (271-279)
  source 1..27: mol_type = other RNA
gacgtgcgccagcagtacgagagcgtc

SEQ ID NO: 35304 - RNA, 27 nt, synthetic construct
  misc_feature 1..27: note = Src substrate cortactin (289-297)
  source 1..27: mol_type = other RNA
gacgtgacccaggtcagctccgcctac

SEQ ID NO: 35305 - RNA, 27 nt, synthetic construct
  misc_feature 1..27: note = Kynurenine 3-monooxygenase (252-260)
  source 1..27: mol_type = other RNA
gacgtggtcgacttcttccagaagtac

SEQ ID NO: 35306 - RNA, 33 nt, synthetic construct
  misc_feature 1..33: note = Vigilin (521-531)
  source 1..33: mol_type = other RNA
gacgtggtcgacagcgaggccctgcaggtgtac

SEQ ID NO: 35307 - RNA, 27 nt, synthetic construct
  misc_feature 1..27: note = Clathrin heavy chain 1 (271-279)
  source 1..27: mol_type = other RNA
gacgtggtcttcctgatcaccaagtac

SEQ ID NO: 35308 - RNA, 27 nt, synthetic construct
  misc_feature 1..27: note = Peptidyl-prolyl cis-trans isomerase F, mitochondrial (179-187)
  source 1..27: mol_type = other RNA
gacgtggtcaagaagatcgagagcttc

SEQ ID NO: 35309 - RNA, 27 nt, synthetic construct
  misc_feature 1..27: note = GH3 domain-containing protein (366-374)
  source 1..27: mol_type = other RNA
gacgtggtccgcgtggtgggcgcctac

SEQ ID NO: 35310 - RNA, 30 nt, synthetic construct
  misc_feature 1..30: note = MAP kinase-activated protein kinase 2 (122-131)
  source 1..30: mol_type = other RNA
gacgtgtacgagaacctgtacgccggccgc

SEQ ID NO: 35311 - RNA, 30 nt, synthetic construct
  misc_feature 1..30: note = AF4/FMR2 family member 1 (32-41)
  source 1..30: mol_type = other RNA
gaggccttccccgagaagatcccgctgttc

SEQ ID NO: 35312 - RNA, 27 nt, synthetic construct
  misc_feature 1..27: note = Protein SHQ1 homolog (207-215)
  source 1..27: mol_type = other RNA
gaggccatcgagcagatcctgaagtac

SEQ ID NO: 35313 - RNA, 27 nt, synthetic construct
  misc_feature 1..27: note = Condensin complex subunit 1 (636-644)
  source 1..27: mol_type = other RNA
gaggccatcggcatcatcagcaagatg

SEQ ID NO: 35314 - RNA, 27 nt, synthetic construct
  misc_feature 1..27: note = Protein transport protein Sec16A (1405-1413)
  source 1..27: mol_type = other RNA
gaggccatccagcgcaccgaggcctac

SEQ ID NO: 35315 - RNA, 27 nt, synthetic construct
  misc_feature 1..27: note = Trafficking protein particle complex subunit 9 (320-328)
  source 1..27: mol_type = other RNA
gaggccatcagctactactccaagtac

SEQ ID NO: 35316 - RNA, 24 nt, synthetic construct
  misc_feature 1..24: note = Heat shock cognate 71 kDa protein (88-95)
  source 1..24: mol_type = other RNA
gaggcctacctgggcaagaccgtg

SEQ ID NO: 35317 - RNA, 27 nt, synthetic construct
  misc_feature 1..27: note = Calcineurin B homologous protein 1 (15-23)
  source 1..27: mol_type = other RNA
gaggagatcaagaaggagaccggcttc

SEQ ID NO: 35318 - RNA, 27 nt, synthetic construct
  misc_feature 1..27: note = Protein diaphanous homolog 1 (941-949)
  source 1..27: mol_type = other RNA
gaggagctgcgcaagagcgagtccttc

SEQ ID NO: 35319 - RNA, 27 nt, synthetic construct
  misc_feature 1..27: note = Plectin (1635-1643)
  source 1..27: mol_type = other RNA
gaggaggtggcccagcagaagagcctg

SEQ ID NO: 35320 - RNA, 27 nt, synthetic construct
  misc_feature 1..27: note = Poly(ADP-ribose)ohydrolase ARH3 (12-20)
  source 1..27: mol_type = other RNA
gagggcctggcccgccccctcccgctg

SEQ ID NO: 35321 - RNA, 27 nt, synthetic construct
  misc_feature 1..27: note = Mitochondrial enolase superfamily member 1 (393-401)
  source 1..27: mol_type = other RNA
gagcacttcaagtaccccgtgatgatc

SEQ ID NO: 35322 - RNA, 27 nt, synthetic construct
  misc_feature 1..27: note = TERF1-interacting nuclear factor 2 (29-37)
  source 1..27: mol_type = other RNA
gagcacttcccccgcgtgctggagttc

SEQ ID NO: 35323 - RNA, 33 nt, synthetic construct
  misc_feature 1..33: note = Basigin (50-60)
  source 1..33: mol_type = other RNA
gagcacatcaacgagggcgagaccgccatgctg

SEQ ID NO: 35324 - RNA, 27 nt, synthetic construct
  misc_feature 1..27: note = Prefoldin subunit 2 (53-61)
  source 1..27: mol_type = other RNA
gagcacagcctggtgatcgacaccctc

SEQ ID NO: 35325 - RNA, 27 nt, synthetic construct
  misc_feature 1..27: note = Regulator of microtubule dynamics protein 3 (350-358)
  source 1..27: mol_type = other RNA
gagcacgtggacaaggccatcgccctg

SEQ ID NO: 35326 - RNA, 27 nt, synthetic construct
  misc_feature 1..27: note = E3 ubiquitin-protein ligase MARCH6 (288-296)
  source 1..27: mol_type = other RNA
gagcacgtgttctgggtcgtgagcctg

SEQ ID NO: 35327 - RNA, 27 nt, synthetic construct
  misc_feature 1..27: note = Early endosome antigen 1 (171-179)
  source 1..27: mol_type = other RNA
gagatcgccgacatcaagagcaagtac

SEQ ID NO: 35328 - RNA, 27 nt, synthetic construct
  misc_feature 1..27: note = Heat shock 70 kDa protein 1B (129-137)
  source 1..27: mol_type = other RNA
gagatcgccgaggcctacctgggctac

SEQ ID NO: 35329 - RNA, 27 nt, synthetic construct
  misc_feature 1..27: note = Pumilio homolog 1 (848-856)
  source 1..27: mol_type = other RNA
gagatcgccggccacatcatggagttc

SEQ ID NO: 35330 - RNA, 30 nt, synthetic construct
  misc_feature 1..30: note = GMP synthase (glutamine-hydrolyzing) (148-157)
  source 1..30: mol_type = other RNA
gagatcttccccctggagaccccggccttc

SEQ ID NO: 35331 - RNA, 33 nt, synthetic construct
  misc_feature 1..33: note = ATP synthase subunit g, mitochondrial (91-101)
  source 1..33: mol_type = other RNA
gagatcatcggcaagcgcgggatcatcggctac

SEQ ID NO: 35332 - RNA, 27 nt, synthetic construct
  misc_feature 1..27: note = Serine/threonine-protein kinase 4 (69-77)
  source 1..27: mol_type = other RNA
gagatcatcaaggagatcagcatcatg

SEQ ID NO: 35333 - RNA, 27 nt, synthetic construct
  misc_feature 1..27: note = Protein furry homolog-like (472-480)
  source 1..27: mol_type = other RNA
gagatcatcaagatcatcggcaagtac

SEQ ID NO: 35334 - RNA, 27 nt, synthetic construct
  misc_feature 1..27: note = Arf-GAP with SH3 domain, ANK repeat and PH domain-containing protein 2 (422-430)
  source 1..27: mol_type = other RNA
gagatcatcagcgaggtgcagcgcatg

SEQ ID NO: 35335 - RNA, 27 nt, synthetic construct
  misc_feature 1..27: note = Structural maintenance of chromosomes flexible hinge domain-containing protein 1 (760-768)
  source 1..27: mol_type = other RNA
gagatcatcagccacatctcccagcac

SEQ ID NO: 35336 - RNA, 27 nt, synthetic construct
  misc_feature 1..27: note = Vacuolar protein sorting-associated protein 13C (916-924)
  source 1..27: mol_type = other RNA
gagatcaaggaggtgatcctggagttc

SEQ ID NO: 35337 - RNA, 27 nt, synthetic construct
  misc_feature 1..27: note = Pre-mRNA-processing-splicing factor 8 (2006-2014)
  source 1..27: mol_type = other RNA
gagatccgcgacatcatcctgggcatg

SEQ ID NO: 35338 - RNA, 30 nt, synthetic construct
  misc_feature 1..30: note = Filamin A (106-115)
  source 1..30: mol_type = other RNA
gagatcgtggagggcgagaaccacacctac

SEQ ID NO: 35339 - RNA, 27 nt, synthetic construct
  misc_feature 1..27: note = Putative elongation factor 1-alpha-like 3 (169-177)
  source 1..27: mol_type = other RNA
gagatcgtgaaggaggtcagcacctac

SEQ ID NO: 35340 - RNA, 30 nt, synthetic construct
  misc_feature 1..30: note = Bifunctional 3'-phosphoadenosine 5'-phosphosulfate synthase 1 (555-564)
  source 1..30: mol_type = other RNA
gagatcgtgcccttccgcgtcgccgcctac

SEQ ID NO: 35341 - RNA, 30 nt, synthetic construct
  misc_feature 1..30: note = Splicing factor 3B subunit 1 (42-51)
  source 1..30: mol_type = other RNA
gagatctacggcgggagcgactcccgcttc

SEQ ID NO: 35342 - RNA, 27 nt, synthetic construct
  misc_feature 1..27: note = Protein SET (73-81)
  source 1..27: mol_type = other RNA
gagctgatcgccaagatccccaacttc

SEQ ID NO: 35343 - RNA, 27 nt, synthetic construct
  misc_feature 1..27: note = Protein CMSS1 (152-160)
  source 1..27: mol_type = other RNA
gagctgatccgcagcatgaccgccttc

SEQ ID NO: 35344 - RNA, 24 nt, synthetic construct
  misc_feature 1..24: note = Beta-lactamase-like protein 2 (240-247)
  source 1..24: mol_type = other RNA
gagctggtgaagatcatctacaag

SEQ ID NO: 35345 - RNA, 27 nt, synthetic construct
  misc_feature 1..27: note = Structural maintenance of chromosomes flexible hinge domain-containing protein 1 (1904-1912)
  source 1..27: mol_type = other RNA
gagcagatcgacctgctccagcagtac

SEQ ID NO: 35346 - RNA, 33 nt, synthetic construct
  misc_feature 1..33: note = Glutamine-fructose-6-phosphate aminotransferase (isomerizing) 1 (443-453)
  source 1..33: mol_type = other RNA
gagaccgccgacaccctgatgggcctccgctac

SEQ ID NO: 35347 - RNA, 27 nt, synthetic construct
  misc_feature 1..27: note = Ezrin (109-117)
  source 1..27: mol_type = other RNA
gagaccgccgtgctgctcggcagctac

SEQ ID NO: 35348 - RNA, 30 nt, synthetic construct
  misc_feature 1..30: note = Mediator of RNA polymerase II transcription subunit 13 (1609-1618)
  source 1..30: mol_type = other RNA
gagaccttcggcgaggccgggcagaagtac

SEQ ID NO: 35349 - RNA, 33 nt, synthetic construct
  misc_feature 1..33: note = A-kinase anchor protein 13 (546-556)
  source 1..33: mol_type = other RNA
gagaccttcggcgggttcgacagccaccagatg

SEQ ID NO: 35350 - RNA, 30 nt, synthetic construct
  misc_feature 1..30: note = DnaJ homolog subfamily C member 7 (29-38)
  source 1..30: mol_type = other RNA
gagaccttcaaggagcagggcaacgcctac

SEQ ID NO: 35351 - RNA, 27 nt, synthetic construct
  misc_feature 1..27: note = ERO1-like protein alpha (51-59)
  source 1..27: mol_type = other RNA
gagaccatcgaccgcttcaacaactac

SEQ ID NO: 35352 - RNA, 30 nt, synthetic construct
  misc_feature 1..30: note = Protein SLX4IP (47-56)
  source 1..30: mol_type = other RNA
gagaccatcgacagccgcgtgcaggagtac

SEQ ID NO: 35353 - RNA, 27 nt, synthetic construct
  misc_feature 1..27: note = Pre-mRNA-processing-splicing factor 8 (1612-1620)
  source 1..27: mol_type = other RNA
gagaccatccacccccgcaagagctac

SEQ ID NO: 35354 - RNA, 27 nt, synthetic construct
  misc_feature 1..27: note = Far upstream element-binding protein 1 (396-404)
  source 1..27: mol_type = other RNA
gagaccatcaagagcatctcccagcag

SEQ ID NO: 35355 - RNA, 27 nt, synthetic construct
  misc_feature 1..27: note = Vacuolar protein sorting-associated protein 8 homolog (1056-1064)
  source 1..27: mol_type = other RNA
gagaccatccagatcacccagaagtac

SEQ ID NO: 35356 - RNA, 27 nt, synthetic construct
  misc_feature 1..27: note = RING finger protein 145 (166-174)
  source 1..27: mol_type = other RNA
gagaccatcgtgatcatcaacaagttc

SEQ ID NO: 35357 - RNA, 30 nt, synthetic construct
  misc_feature 1..30: note = RNA polymerase-associated protein CTR9 homolog (376-385)
  source 1..30: mol_type = other RNA
gagaccatgaagatcctgggcagcctctac

SEQ ID NO: 35358 - RNA, 30 nt, synthetic construct
  misc_feature 1..30: note = Protein phosphatase 1 regulatory subunit 12A (825-834)
  source 1..30: mol_type = other RNA
gagacccagaccgacagcatctcccgctac

SEQ ID NO: 35359 - RNA, 30 nt, synthetic construct
  misc_feature 1..30: note = WD repeat-containing protein 11 (1019-1028)
  source 1..30: mol_type = other RNA
gagaccagcgccgacaaccagcactactac

SEQ ID NO: 35360 - RNA, 33 nt, synthetic construct
  misc_feature 1..33: note = Heterogeneous nuclear ribonucleoproteins A2/B1 (19-29)
  source 1..33: mol_type = other RNA
gagaccaccgaggagagcctgcgcaactactac

SEQ ID NO: 35361 - RNA, 33 nt, synthetic construct
  misc_feature 1..33: note = Constitutive coactivator of PPAR-gamma-like protein 1 (893-903)
  source 1..33: mol_type = other RNA
gagaccgtggccaccggcccctaccgcgccttc

SEQ ID NO: 35362 - RNA, 30 nt, synthetic construct
  misc_feature 1..30: note = Type II inositol 1,4,5-trisphosphate 5-phosphatase (190-199)
  source 1..30: mol_type = other RNA
gagaccgtgggcaccgggatcatgggccgc

SEQ ID NO: 35363 - RNA, 27 nt, synthetic construct
  misc_feature 1..27: note = HLA class II histocompatibility antigen, DR alpha chain (35-43)
  source 1..27: mol_type = other RNA
gagaccgtgtggcgcctggaggagttc

SEQ ID NO: 35364 - RNA, 27 nt, synthetic construct
  misc_feature 1..27: note = Spectrin alpha chain, non-erythrocytic 1 (648-656)
  source 1..27: mol_type = other RNA
gaggtggccgcccgcatgaacgaggtc

SEQ ID NO: 35365 - RNA, 27 nt, synthetic construct
  misc_feature 1..27: note = Heterogeneous nuclear ribonucleoprotein M (10-18)
  source 1..27: mol_type = other RNA
gaggtggccgccaccgagatcaagatg

SEQ ID NO: 35366 - RNA, 30 nt, synthetic construct
  misc_feature 1..30: note = Transmembrane anterior posterior transformation protein 1 homolog (204-213)
  source 1..30: mol_type = other RNA
gaggtggccgaccgcctgttcagctccttc

SEQ ID NO: 35367 - RNA, 27 nt, synthetic construct
  misc_feature 1..27: note = Tankyrase-2 (792-800)
  source 1..27: mol_type = other RNA
gaggtggccgagtacctgctccagcac

SEQ ID NO: 35368 - RNA, 27 nt, synthetic construct
  misc_feature 1..27: note = Nuclear pore membraneoprotein 210 (776-784)
  source 1..27: mol_type = other RNA
gaggtggccggccacctgcgcacctac

SEQ ID NO: 35369 - RNA, 30 nt, synthetic construct
  misc_feature 1..30: note = Nucleoprotein TPR (1215-1224)
  source 1..30: mol_type = other RNA
gaggtggcccaggtcgagagcctgcgctac

SEQ ID NO: 35370 - RNA, 27 nt, synthetic construct
  misc_feature 1..27: note = Glutamyl-tRNA(Gln) amidotransferase subunit A, mitochondrial (334-342)
  source 1..27: mol_type = other RNA
gaggtggccagcaacatggcccgcttc

SEQ ID NO: 35371 - RNA, 30 nt, synthetic construct
  misc_feature 1..30: note = Rho guanine nucleotide exchange factor 1 (666-675)
  source 1..30: mol_type = other RNA
gaggtggccaccgaccacaaggccttctac

SEQ ID NO: 35372 - RNA, 30 nt, synthetic construct
  misc_feature 1..30: note = Disheveled-associated activator of morphogenesis 1 (1034-1043)
  source 1..30: mol_type = other RNA
gaggtgttcgacaaggacctgagcaagctc

SEQ ID NO: 35373 - RNA, 30 nt, synthetic construct
  misc_feature 1..30: note = Fatty acyl-CoA reductase 1 (146-155)
  source 1..30: mol_type = other RNA
gaggtgttcatgcacgtcagcaccgcctac

SEQ ID NO: 35374 - RNA, 30 nt, synthetic construct
  misc_feature 1..30: note = G1/S-specific cyclin-D2 (75-84)
  source 1..30: mol_type = other RNA
gaggtgttccccctggccatgaactacctc

SEQ ID NO: 35375 - RNA, 30 nt, synthetic construct
  misc_feature 1..30: note = Uncharacterized protein ZMYM6NB (45-54)
  source 1..30: mol_type = other RNA
gaggtgttccccctgaaggtcttcggctac

SEQ ID NO: 35376 - RNA, 30 nt, synthetic construct
  misc_feature 1..30: note = Mitotic spindle assembly checkpoint protein MAD1 (619-628)
  source 1..30: mol_type = other RNA
gaggtgttccagaccaagatccaggagttc

SEQ ID NO: 35377 - RNA, 27 nt, synthetic construct
  misc_feature 1..27: note = Zinc finger and BTB domain-containing protein 38 (82-90)
  source 1..27: mol_type = other RNA
gaggtgttcaccgagatcctgaactac

SEQ ID NO: 35378 - RNA, 27 nt, synthetic construct
  misc_feature 1..27: note = Peroxisomal multifunctional enzyme type 2 (214-222)
  source 1..27: mol_type = other RNA
gaggtgggcgccgggtggatcggcaag

SEQ ID NO: 35379 - RNA, 27 nt, synthetic construct
  misc_feature 1..27: note = Chromodomain-helicase-DNA-binding protein 1-like (232-240)
  source 1..27: mol_type = other RNA
gaggtgggcgacttcatccagcgctac

SEQ ID NO: 35380 - RNA, 27 nt, synthetic construct
  misc_feature 1..27: note = PERQ amino acid-rich with GYF domain-containing protein 2 (1163-1171)
  source 1..27: mol_type = other RNA
gaggtgcacgactacatccgcgcctac

SEQ ID NO: 35381 - RNA, 30 nt, synthetic construct
  misc_feature 1..30: note = Centrosomal protein of 55 kDa (275-284)
  source 1..30: mol_type = other RNA
gaggtgcacaacctgaaccagctcctgtac

SEQ ID NO: 35382 - RNA, 30 nt, synthetic construct
  misc_feature 1..30: note = Transcription termination factor 1, mitochondrial (99-108)
  source 1..30: mol_type = other RNA
gaggtgatcgccagcatcatctcccgctac

SEQ ID NO: 35383 - RNA, 27 nt, synthetic construct
  misc_feature 1..27: note = Sterol 26-hydroxylase, mitochondrial (180-188)
  source 1..27: mol_type = other RNA
gaggtgatcgacgacttcatgacccgc

SEQ ID NO: 35384 - RNA, 27 nt, synthetic construct
  misc_feature 1..27: note = Alpha/beta hydrolase domain-containing protein 17C (277-285)
  source 1..27: mol_type = other RNA
gaggtgatcgacttcagccacggcctg

SEQ ID NO: 35385 - RNA, 30 nt, synthetic construct
  misc_feature 1..30: note = PHD finger protein 10 (57-66)
  source 1..30: mol_type = other RNA
gaggtgatcgacctgatgatcaaggagtac

SEQ ID NO: 35386 - RNA, 30 nt, synthetic construct
  misc_feature 1..30: note = SNF-related serine/threonine-protein kinase (80-89)
  source 1..30: mol_type = other RNA
gaggtgatcgacacccagaccaagctgtac

SEQ ID NO: 35387 - RNA, 27 nt, synthetic construct
  misc_feature 1..27: note = Transcription initiation factor TFIID subunit 1-like (1043-1051)
  source 1..27: mol_type = other RNA
gaggtgatcgacgtcgtgcgcaccatg

SEQ ID NO: 35388 - RNA, 27 nt, synthetic construct
  misc_feature 1..27: note = Shootin-1 (164-172)
  source 1..27: mol_type = other RNA
gaggtgatcgaggaggtcaacaaggtg

SEQ ID NO: 35389 - RNA, 36 nt, synthetic construct
  misc_feature 1..36: note = Glucocorticoid receptor (538-549)
  source 1..36: mol_type = other RNA
gaggtgatcgagcccgaggtcctgtacgccggctac

SEQ ID NO: 35390 - RNA, 30 nt, synthetic construct
  misc_feature 1..30: note = Transformation/transcription domain-associated protein (3103-3112)
  source 1..30: mol_type = other RNA
gaggtgatcgagagcaccaacctgaagtac

SEQ ID NO: 35391 - RNA, 30 nt, synthetic construct
  misc_feature 1..30: note = Serine/threonine-protein kinase MARK2 (117-126)
  source 1..30: mol_type = other RNA
gaggtgatcgagaccgagaagaccctgtac

SEQ ID NO: 35392 - RNA, 30 nt, synthetic construct
  misc_feature 1..30: note = Histone H2A deubiquitinase MYSM1 (495-504)
  source 1..30: mol_type = other RNA
gaggtgatcggcctgctcgggggccgctac

SEQ ID NO: 35393 - RNA, 27 nt, synthetic construct
  misc_feature 1..27: note = CD9 antigen (116-124)
  source 1..27: mol_type = other RNA
gaggtgatcaaggaggtccaggagttc

SEQ ID NO: 35394 - RNA, 27 nt, synthetic construct
  misc_feature 1..27: note = Eukaryotic translation initiation factor 3 subunit L (50-58)
  source 1..27: mol_type = other RNA
gaggtgatcaagaacttcatccagtac

SEQ ID NO: 35395 - RNA, 30 nt, synthetic construct
  misc_feature 1..30: note = Calcium signal-modulating cyclophilin ligand (207-216)
  source 1..30: mol_type = other RNA
gaggtgatcaaccgcagcatggacacctac

SEQ ID NO: 35396 - RNA, 27 nt, synthetic construct
  misc_feature 1..27: note = NADH dehydrogenase (ubiquinone) 1 beta subcomplex subunit 6 (115-123)
  source 1..27: mol_type = other RNA
gaggtgatccccccgatgaaggagttc

SEQ ID NO: 35397 - RNA, 27 nt, synthetic construct
  misc_feature 1..27: note = Tyrosyl-DNA phosphodiesterase 2 (152-160)
  source 1..27: mol_type = other RNA
gaggtgatccccccgtactacagctac

SEQ ID NO: 35398 - RNA, 27 nt, synthetic construct
  misc_feature 1..27: note = 60 kDa SS-A/Ro ribonucleoprotein (72-80)
  source 1..27: mol_type = other RNA
gaggtgatccaggagatcaagagcttc

SEQ ID NO: 35399 - RNA, 27 nt, synthetic construct
  misc_feature 1..27: note = Insulin-degrading enzyme (951-959)
  source 1..27: mol_type = other RNA
gaggtgatccagaacatgaccgagttc

SEQ ID NO: 35400 - RNA, 27 nt, synthetic construct
  misc_feature 1..27: note = Cytosolic 5'-nucleotidase 3A (161-169)
  source 1..27: mol_type = other RNA
gaggtgatccgccaggccggcgtctac

SEQ ID NO: 35401 - RNA, 30 nt, synthetic construct
  misc_feature 1..30: note = Nucleoprotein TPR (531-540)
  source 1..30: mol_type = other RNA
gaggtgatcagccagcacctggtctcctac

SEQ ID NO: 35402 - RNA, 27 nt, synthetic construct
  misc_feature 1..27: note = Mediator of RNA polymerase II transcription subunit 26 (33-41)
  source 1..27: mol_type = other RNA
gaggtgatcagctccctggagaagtac

SEQ ID NO: 35403 - RNA, 27 nt, synthetic construct
  misc_feature 1..27: note = Bloom syndrome protein (1277-1285)
  source 1..27: mol_type = other RNA
gaggtgatcagcgtcctgcagaagtac

SEQ ID NO: 35404 - RNA, 33 nt, synthetic construct
  misc_feature 1..33: note = Ribosomal protein S6 kinase alpha-3 (14-24)
  source 1..33: mol_type = other RNA
gaggtgaaggaggacatcggcgtcgggagctac

SEQ ID NO: 35405 - RNA, 36 nt, synthetic construct
  misc_feature 1..36: note = Farnesyl pyrophosphate synthase (40-51)
  source 1..36: mol_type = other RNA
gaggtgctggagtacaacgccatcggcgggaagtac

SEQ ID NO: 35406 - RNA, 33 nt, synthetic construct
  misc_feature 1..33: note = Tight junction protein ZO-2 (118-128)
  source 1..33: mol_type = other RNA
gaggtgatggacgagttcgacggccgcagcttc

SEQ ID NO: 35407 - RNA, 27 nt, synthetic construct
  misc_feature 1..27: note = DNA polymerase eta (98-106)
  source 1..27: mol_type = other RNA
gaggtgatggagatcatgagccgcttc

SEQ ID NO: 35408 - RNA, 27 nt, synthetic construct
  misc_feature 1..27: note = 2',3'-cyclic-nucleotide 3'-phosphodiesterase (369-377)
  source 1..27: mol_type = other RNA
gaggtgcgcgccatcttcaccggctac

SEQ ID NO: 35409 - RNA, 30 nt, synthetic construct
  misc_feature 1..30: note = Fragile X mental retardation syndrome-related protein 1 (7-16)
  source 1..30: mol_type = other RNA
gaggtgcgcggcagcaacggggccttctac

SEQ ID NO: 35410 - RNA, 27 nt, synthetic construct
  misc_feature 1..27: note = Glycylpeptide N-tetradecanoyltransferase 1 (60-68)
  source 1..27: mol_type = other RNA
gaggtgaccgacttcctgagcttctac

SEQ ID NO: 35411 - RNA, 27 nt, synthetic construct
  misc_feature 1..27: note = A-kinase anchor protein 9 (664-672)
  source 1..27: mol_type = other RNA
gaggtgaccgagatcatcagccagttc

SEQ ID NO: 35412 - RNA, 27 nt, synthetic construct
  misc_feature 1..27: note = DNA-directed RNA polymerases I, II, and III subunit RPABC1 (155-163)
  source 1..27: mol_type = other RNA
gaggtgaccgagctgctcgcccgctac

SEQ ID NO: 35413 - RNA, 27 nt, synthetic construct
  misc_feature 1..27: note = DNA topoisomerase 2-alpha (74-82)
  source 1..27: mol_type = other RNA
gaggtgaccttcgtccccggcctgtac

SEQ ID NO: 35414 - RNA, 27 nt, synthetic construct
  misc_feature 1..27: note = Volume-regulated anion channel subunit LRRC8D (74-82)
  source 1..27: mol_type = other RNA
gaggtgaccaccaacatccccaagatg

SEQ ID NO: 35415 - RNA, 27 nt, synthetic construct
  misc_feature 1..27: note = Vacuolar protein sorting-associated protein 13D (1985-1993)
  source 1..27: mol_type = other RNA
gaggtggtcgccttcatccagcacttc

SEQ ID NO: 35416 - RNA, 27 nt, synthetic construct
  misc_feature 1..27: note = Mortality factor 4-like protein 1 (216-224)
  source 1..27: mol_type = other RNA
gaggtggtcgccggcatcaaggagtac

SEQ ID NO: 35417 - RNA, 30 nt, synthetic construct
  misc_feature 1..30: note = Mortality factor 4-like protein 1 (216-225)
  source 1..30: mol_type = other RNA
gaggtggtcgccggcatcaaggagtacttc

SEQ ID NO: 35418 - RNA, 27 nt, synthetic construct
  misc_feature 1..27: note = Nesprin-2 (1588-1596)
  source 1..27: mol_type = other RNA
gaggtggtcgacaagatcaaccaggtg

SEQ ID NO: 35419 - RNA, 27 nt, synthetic construct
  misc_feature 1..27: note = Peptide-N(4)-(N-acetyl-beta-glucosaminyl)asparagine amidase (383-391)
  source 1..27: mol_type = other RNA
gaggtggtcgacgtgacctggcgctac

SEQ ID NO: 35420 - RNA, 27 nt, synthetic construct
  misc_feature 1..27: note = GA-binding protein subunit beta-1 (118-126)
  source 1..27: mol_type = other RNA
gaggtggtcgagctgctcatcaagtac

SEQ ID NO: 35421 - RNA, 27 nt, synthetic construct
  misc_feature 1..27: note = Glucocorticoid receptor (728-736)
  source 1..27: mol_type = other RNA
gaggtggtcgagaacctgctcaactac

SEQ ID NO: 35422 - RNA, 27 nt, synthetic construct
  misc_feature 1..27: note = Inverted formin-2 (336-344)
  source 1..27: mol_type = other RNA
gaggtggtcgagcgcctgctcagcgtg

SEQ ID NO: 35423 - RNA, 27 nt, synthetic construct
  misc_feature 1..27: note = F-box only protein 22 (27-35)
  source 1..27: mol_type = other RNA
gaggtggtcgagcgcgtgctgaccttc

SEQ ID NO: 35424 - RNA, 33 nt, synthetic construct
  misc_feature 1..33: note = Actin-binding protein IPP (418-428)
  source 1..33: mol_type = other RNA
gaggtggtcggcaacatggccgtgagccgctac

SEQ ID NO: 35425 - RNA, 30 nt, synthetic construct
  misc_feature 1..30: note = 26S proteasome non-ATPase regulatory subunit 2 (581-590)
  source 1..30: mol_type = other RNA
gaggtggtcagcgagcccttccgctccttc

SEQ ID NO: 35426 - RNA, 30 nt, synthetic construct
  misc_feature 1..30: note = Cold shock domain-containing protein E1 (630-639)
  source 1..30: mol_type = other RNA
gaggtgtaccccttcggcatcgtcgggatg

SEQ ID NO: 35427 - RNA, 27 nt, synthetic construct
  misc_feature 1..27: note = Zinc finger MIZ domain-containing protein 2 (271-279)
  source 1..27: mol_type = other RNA
gaggtgtaccccggccagcagtacctg

SEQ ID NO: 35428 - RNA, 27 nt, synthetic construct
  misc_feature 1..27: note = Uncharacterized protein C18orf8 (437-445)
  source 1..27: mol_type = other RNA
gagtacatccgcagcctgaaccagttc

SEQ ID NO: 35429 - RNA, 27 nt, synthetic construct
  misc_feature 1..27: note = Oxysterol-binding protein (17-25)
  source 1..27: mol_type = other RNA
gagtacatggagcacgtgtacctgatc

SEQ ID NO: 35430 - RNA, 27 nt, synthetic construct
  misc_feature 1..27: note = Insulin receptor substrate 2 (597-605)
  source 1..27: mol_type = other RNA
gagtacaccctgatgcgcgccaccttc

SEQ ID NO: 35431 - RNA, 27 nt, synthetic construct
  misc_feature 1..27: note = Striatin-interacting protein 2 (594-602)
  source 1..27: mol_type = other RNA
gagtacgtgagccagcacctggtcttc

SEQ ID NO: 35432 - RNA, 27 nt, synthetic construct
  misc_feature 1..27: note = Phospholipid hydroperoxide glutathione peroxidase, mitochondrial (119-127)
  source 1..27: mol_type = other RNA
ttcgccgccggctacaacgtgaagttc

SEQ ID NO: 35433 - RNA, 24 nt, synthetic construct
  misc_feature 1..24: note = Tuftelin-interacting protein 11 (132-139)
  source 1..24: mol_type = other RNA
ttcgccggcgggaccaagagcttc

SEQ ID NO: 35434 - RNA, 33 nt, synthetic construct
  misc_feature 1..33: note = Sister chromatid cohesion protein PDS5 homolog A (273-283)
  source 1..33: mol_type = other RNA
ttcgccatcgacccccacctgctcctgagcgtg

SEQ ID NO: 35435 - RNA, 27 nt, synthetic construct
  misc_feature 1..27: note = ATP-dependent RNA helicase DDX24 (247-255)
  source 1..27: mol_type = other RNA
ttcgccatccccatgatccacgccgtg

SEQ ID NO: 35436 - RNA, 27 nt, synthetic construct
  misc_feature 1..27: note = Clathrin heavy chain 1 (1594-1602)
  source 1..27: mol_type = other RNA
ttcgccatgccctacttcatccaggtg

SEQ ID NO: 35437 - RNA, 27 nt, synthetic construct
  misc_feature 1..27: note = Splicing factor, proline- and glutamine-rich (486-494)
  source 1..27: mol_type = other RNA
ttcgagtacgagtacagccagcgctgg

SEQ ID NO: 35438 - RNA, 27 nt, synthetic construct
  misc_feature 1..27: note = Serine/threonine-protein phosphatase PP1-beta catalytic subunit (226-234)
  source 1..27: mol_type = other RNA
ttcggcgccgacgtggtcagcaagttc

SEQ ID NO: 35439 - RNA, 27 nt, synthetic construct
  misc_feature 1..27: note = Chromatin assembly factor 1 subunit B (228-236)
  source 1..27: mol_type = other RNA
ttccacgacgacagcatgaagtccttc

SEQ ID NO: 35440 - RNA, 27 nt, synthetic construct
  misc_feature 1..27: note = Endoplasmin (422-430)
  source 1..27: mol_type = other RNA
ttccacgacatgatgcccaagtacctg

SEQ ID NO: 35441 - RNA, 27 nt, synthetic construct
  misc_feature 1..27: note = Protein transport protein Sec23B (630-638)
  source 1..27: mol_type = other RNA
ttccacggccccccggagcccgtgctg

SEQ ID NO: 35442 - RNA, 27 nt, synthetic construct
  misc_feature 1..27: note = Coatomer subunit alpha (101-109)
  source 1..27: mol_type = other RNA
ttccaccacgagtacccctggatcctg

SEQ ID NO: 35443 - RNA, 27 nt, synthetic construct
  misc_feature 1..27: note = Putative heat shock protein HSP 90-alpha A5 (3-11)
  source 1..27: mol_type = other RNA
ttccaccacgtgggccaggccgggctg

SEQ ID NO: 35444 - RNA, 27 nt, synthetic construct
  misc_feature 1..27: note = Phosphatidylinositol 4,5-bisphosphate 3-kinase catalytic subunit gamma isoform (961-969)
  source 1..27: mol_type = other RNA
ttccacatcgacttcggccacatcctg

SEQ ID NO: 35445 - RNA, 27 nt, synthetic construct
  misc_feature 1..27: note = Fas apoptotic inhibitory molecule 3 (252-260)
  source 1..27: mol_type = other RNA
ttccacatcctgatccccaccatcctc

SEQ ID NO: 35446 - RNA, 27 nt, synthetic construct
  misc_feature 1..27: note = Rho GTPase-activating protein 4 (276-284)
  source 1..27: mol_type = other RNA
ttccacctggccctcggccaggtgctg

SEQ ID NO: 35447 - RNA, 30 nt, synthetic construct
  misc_feature 1..30: note = Proteasome subunit alpha type-5 (154-163)
  source 1..30: mol_type = other RNA
ttccacatggaccccagcggcaccttcgtg

SEQ ID NO: 35448 - RNA, 27 nt, synthetic construct
  misc_feature 1..27: note = Anaphase-promoting complex subunit 1 (1137-1145)
  source 1..27: mol_type = other RNA
ttccacaacggcgtggccgccgggctg

SEQ ID NO: 35449 - RNA, 27 nt, synthetic construct
  misc_feature 1..27: note = Ubiquitin-conjugating enzyme E2 J1 (237-245)
  source 1..27: mol_type = other RNA
ttccaccagcccacccagccggtggcc

SEQ ID NO: 35450 - RNA, 27 nt, synthetic construct
  misc_feature 1..27: note = Mitotic checkpoint serine/threonine-protein kinase BUB1 (438-446)
  source 1..27: mol_type = other RNA
ttccacaccacccccaacacgagcctg

SEQ ID NO: 35451 - RNA, 27 nt, synthetic construct
  misc_feature 1..27: note = WD repeat-containing protein 47 (348-356)
  source 1..27: mol_type = other RNA
ttccactaccccggcgtgcagaacctg

SEQ ID NO: 35452 - RNA, 30 nt, synthetic construct
  misc_feature 1..30: note = Probable ubiquitin carboxyl-terminal hydrolase FAF-X (1466-1475)
  source 1..30: mol_type = other RNA
ttcatcttccccgccagcaacgtgtacctg

SEQ ID NO: 35453 - RNA, 27 nt, synthetic construct
  misc_feature 1..27: note = Endoplasmic reticulum aminopeptidase 1 (249-257)
  source 1..27: mol_type = other RNA
ttcatcatcagcgacttcgagtccgtg

SEQ ID NO: 35454 - RNA, 27 nt, synthetic construct
  misc_feature 1..27: note = Protein kinase C-binding protein 1 (213-221)
  source 1..27: mol_type = other RNA
ttcctggccgacgccaagtggatcctc

SEQ ID NO: 35455 - RNA, 27 nt, synthetic construct
  misc_feature 1..27: note = Unconventional myosin-Ic (773-781)
  source 1..27: mol_type = other RNA
ttcctggaccacgtgcgcaccagcttc

SEQ ID NO: 35456 - RNA, 27 nt, synthetic construct
  misc_feature 1..27: note = E3 ubiquitin-protein ligase RNF216 (134-142)
  source 1..27: mol_type = other RNA
ttcctggacctcggccccccggggatc

SEQ ID NO: 35457 - RNA, 27 nt, synthetic construct
  misc_feature 1..27: note = UDP-glucose:glycoprotein glucosyltransferase 2 (97-105)
  source 1..27: mol_type = other RNA
ttcctggacaacctccacatcaacctg

SEQ ID NO: 35458 - RNA, 27 nt, synthetic construct
  misc_feature 1..27: note = Proteasome-associated protein ECM29 homolog (801-809)
  source 1..27: mol_type = other RNA
ttcctggacagcacctcccccctcctg

SEQ ID NO: 35459 - RNA, 27 nt, synthetic construct
  misc_feature 1..27: note = Eukaryotic translation initiation factor 3 subunit M (218-226)
  source 1..27: mol_type = other RNA
ttcctgttcgaccacctcctgaccctg

SEQ ID NO: 35460 - RNA, 27 nt, synthetic construct
  misc_feature 1..27: note = HEAT repeat-containing protein 1 (2003-2011)
  source 1..27: mol_type = other RNA
ttcctgttcgacacccagcacttcatc

SEQ ID NO: 35461 - RNA, 30 nt, synthetic construct
  misc_feature 1..30: note = Apolipoprotein L1 (239-248)
  source 1..30: mol_type = other RNA
ttcctgggcgagaacatcagcaacttcctc

SEQ ID NO: 35462 - RNA, 27 nt, synthetic construct
  misc_feature 1..27: note = WASH complex subunit strumpellin (1046-1054)
  source 1..27: mol_type = other RNA
ttcctgatcgcccagctccccaagctg

SEQ ID NO: 35463 - RNA, 30 nt, synthetic construct
  misc_feature 1..30: note = Tensin-1 (1527-1536)
  source 1..30: mol_type = other RNA
ttcctgatcgagaccggcccccgcggggtg

SEQ ID NO: 35464 - RNA, 27 nt, synthetic construct
  misc_feature 1..27: note = Plexin-B2 (395-403)
  source 1..27: mol_type = other RNA
ttcctgatcaacttcatccacaccctc

SEQ ID NO: 35465 - RNA, 27 nt, synthetic construct
  misc_feature 1..27: note = cAMP-specific 3',5'-cyclic phosphodiesterase 4B (382-390)
  source 1..27: mol_type = other RNA
ttcctgatcaacaccaacagcgagctc

SEQ ID NO: 35466 - RNA, 30 nt, synthetic construct
  misc_feature 1..30: note = Serine/threonine-protein kinase 11-interacting protein (316-325)
  source 1..30: mol_type = other RNA
ttcctgctcgacggcaaggtgctgagcctg

SEQ ID NO: 35467 - RNA, 33 nt, synthetic construct
  misc_feature 1..33: note = Tyrosine-protein kinase BAZ1B (291-301)
  source 1..33: mol_type = other RNA
ttcctgctcgacccctacaagtacatgaccctg

SEQ ID NO: 35468 - RNA, 30 nt, synthetic construct
  misc_feature 1..30: note = Transmembrane emp24 domain-containing protein 10 (22-31)
  source 1..30: mol_type = other RNA
ttcctgctcggcccccgcctggtgctggcc

SEQ ID NO: 35469 - RNA, 27 nt, synthetic construct
  misc_feature 1..27: note = TBC1 domain family member 13 (329-337)
  source 1..27: mol_type = other RNA
ttcctgctccccgacgtgatccgcatc

SEQ ID NO: 35470 - RNA, 30 nt, synthetic construct
  misc_feature 1..30: note = Atlastin-3 (263-272)
  source 1..30: mol_type = other RNA
ttcctgctcccccacccgggcctgcaggtg

SEQ ID NO: 35471 - RNA, 27 nt, synthetic construct
  misc_feature 1..27: note = Glycerol-3-phosphate acyltransferase 4 (174-182)
  source 1..27: mol_type = other RNA
ttcctgctccccctgcgcatcgccctg

SEQ ID NO: 35472 - RNA, 30 nt, synthetic construct
  misc_feature 1..30: note = ATP-dependent RNA helicase DDX24 (582-591)
  source 1..30: mol_type = other RNA
ttcctgatgcagtaccccggccgcagcctc

SEQ ID NO: 35473 - RNA, 27 nt, synthetic construct
  misc_feature 1..27: note = Quinone oxidoreductase-like protein 1 (284-292)
  source 1..27: mol_type = other RNA
ttcctgaacgacgaggtgtggaacctc

SEQ ID NO: 35474 - RNA, 27 nt, synthetic construct
  misc_feature 1..27: note = Spectrin beta chain, non-erythrocytic 1 (1184-1192)
  source 1..27: mol_type = other RNA
ttcctgaacaaccaggagtacgtgctc

SEQ ID NO: 35475 - RNA, 27 nt, synthetic construct
  misc_feature 1..27: note = Bifunctional coenzyme A synthase (125-133)
  source 1..27: mol_type = other RNA
ttcctgcccccgctccccaccagcgtg

SEQ ID NO: 35476 - RNA, 27 nt, synthetic construct
  misc_feature 1..27: note = RNA-binding protein EWS (550-558)
  source 1..27: mol_type = other RNA
ttcctgcccccgcccttcccccccccg

SEQ ID NO: 35477 - RNA, 27 nt, synthetic construct
  misc_feature 1..27: note = Arginyl aminopeptidase-like 1 (87-95)
  source 1..27: mol_type = other RNA
ttcctgcccccgagcttccccatcgtg

SEQ ID NO: 35478 - RNA, 30 nt, synthetic construct
  misc_feature 1..30: note = Exosome complex component RRP4 (134-143)
  source 1..30: mol_type = other RNA
ttcctgcaggagggcgacctcatcagcgcc

SEQ ID NO: 35479 - RNA, 30 nt, synthetic construct
  misc_feature 1..30: note = Cirhin (214-223)
  source 1..30: mol_type = other RNA
ttcctgagcgacggcaccatcatctccgtg

SEQ ID NO: 35480 - RNA, 27 nt, synthetic construct
  misc_feature 1..27: note = 26S proteasome non-ATPase regulatory subunit 1 (260-268)
  source 1..27: mol_type = other RNA
ttcctgagctccgtgatccagaacctc

SEQ ID NO: 35481 - RNA, 27 nt, synthetic construct
  misc_feature 1..27: note = Acidic leucine-rich nuclear phosphoprotein 32 family member A (46-54)
  source 1..27: mol_type = other RNA
ttcctgagcaccatcaacgtgggcctc

SEQ ID NO: 35482 - RNA, 30 nt, synthetic construct
  misc_feature 1..30: note = Mannosyl-oligosaccharide glucosidase (448-457)
  source 1..30: mol_type = other RNA
ttcctgtgggacgagggcttccaccagctc

SEQ ID NO: 35483 - RNA, 27 nt, synthetic construct
  misc_feature 1..27: note = rRNA methyltransferase 1, mitochondrial (246-254)
  source 1..27: mol_type = other RNA
ttcctgtgggagcgccccaccctcctg

SEQ ID NO: 35484 - RNA, 24 nt, synthetic construct
  misc_feature 1..24: note = Transmembrane protein 41B (141-148)
  source 1..24: mol_type = other RNA
ttcctgtaccccttcccgctcgcc

SEQ ID NO: 35485 - RNA, 27 nt, synthetic construct
  misc_feature 1..27: note = tRNA-splicing endonuclease subunit Sen15 (185-193)
  source 1..27: mol_type = other RNA
ttcatgctgcccgacccgcagaacatc

SEQ ID NO: 35486 - RNA, 33 nt, synthetic construct
  misc_feature 1..33: note = tRNA-splicing endonuclease subunit Sen15 (185-195)
  source 1..33: mol_type = other RNA
ttcatgctgcccgacccgcagaacatcagcctc

SEQ ID NO: 35487 - RNA, 27 nt, synthetic construct
  misc_feature 1..27: note = Intraflagellar transport protein 172 homolog (435-443)
  source 1..27: mol_type = other RNA
ttcatgaacccccacctgatcagcgtg

SEQ ID NO: 35488 - RNA, 27 nt, synthetic construct
  misc_feature 1..27: note = Ecto-NOX disulfide-thiol exchanger 1 (187-195)
  source 1..27: mol_type = other RNA
ttcatggtggacaaggccatctacctg

SEQ ID NO: 35489 - RNA, 27 nt, synthetic construct
  misc_feature 1..27: note = Integrin alpha-4 (949-957)
  source 1..27: mol_type = other RNA
ttccccgagccgaacccccgcgtgatc

SEQ ID NO: 35490 - RNA, 27 nt, synthetic construct
  misc_feature 1..27: note = Protein RRP5 homolog (1250-1258)
  source 1..27: mol_type = other RNA
ttccccttcggcaagatcgggaccgtg

SEQ ID NO: 35491 - RNA, 27 nt, synthetic construct
  misc_feature 1..27: note = Zinc finger protein 662 (74-82)
  source 1..27: mol_type = other RNA
ttccccttcccgaagcccgccctgatc

SEQ ID NO: 35492 - RNA, 30 nt, synthetic construct
  misc_feature 1..30: note = U2 small nuclear ribonucleoprotein B'' (72-81)
  source 1..30: mol_type = other RNA
ttccccttctacggcaagccgatgcgcatc

SEQ ID NO: 35493 - RNA, 27 nt, synthetic construct
  misc_feature 1..27: note = Cyclin-dependent kinase 9 (59-67)
  source 1..27: mol_type = other RNA
ttccccatcaccgccctgcgcgagatc

SEQ ID NO: 35494 - RNA, 24 nt, synthetic construct
  misc_feature 1..24: note = HLA class II histocompatibility antigen, DP alpha 1 chain (123-130)
  source 1..24: mol_type = other RNA
ttccccaaggagccggtggagctg

SEQ ID NO: 35495 - RNA, 27 nt, synthetic construct
  misc_feature 1..27: note = Poly(A)-specific ribonuclease PARN (273-281)
  source 1..27: mol_type = other RNA
ttcccccgcctgctcgacaccaagctg

SEQ ID NO: 35496 - RNA, 27 nt, synthetic construct
  misc_feature 1..27: note = Glutamine-fructose-6-phosphate aminotransferase (isomerizing) 2 (671-679)
  source 1..27: mol_type = other RNA
ttcccccgcaacctggccaagagcgtg

SEQ ID NO: 35497 - RNA, 27 nt, synthetic construct
  misc_feature 1..27: note = AT-rich interactive domain-containing protein 2 (669-677)
  source 1..27: mol_type = other RNA
ttccccgtgcagggcgtccacaccgtg

SEQ ID NO: 35498 - RNA, 27 nt, synthetic construct
  misc_feature 1..27: note = Putative heat shock protein HSP 90-beta 2 (17-25)
  source 1..27: mol_type = other RNA
ttccaggccgagatcgcccagctgatg

SEQ ID NO: 35499 - RNA, 27 nt, synthetic construct
  misc_feature 1..27: note = Transcription intermediary factor 1-alpha (890-898)
  source 1..27: mol_type = other RNA
ttccaggaccccgtgccgctgaccgtc

SEQ ID NO: 35500 - RNA, 27 nt, synthetic construct
  misc_feature 1..27: note = Integrin beta-7 (790-798)
  source 1..27: mol_type = other RNA
ttccaggaggccgacagccccaccctg

SEQ ID NO: 35501 - RNA, 27 nt, synthetic construct
  misc_feature 1..27: note = Nicotinate phosphoribosyltransferase (342-350)
  source 1..27: mol_type = other RNA
ttccaggtgccctggctggagagcgtc

SEQ ID NO: 35502 - RNA, 27 nt, synthetic construct
  misc_feature 1..27: note = 5-aminolevulinate synthase, nonspecific, mitochondrial (214-222)
  source 1..27: mol_type = other RNA
ttccagtacgaccgcttcttcgagaag

SEQ ID NO: 35503 - RNA, 27 nt, synthetic construct
  misc_feature 1..27: note = Asparagine synthetase (glutamine-hydrolyzing) (11-19)
  source 1..27: mol_type = other RNA
ttccgcttcgagaacgtgaacggctac

SEQ ID NO: 35504 - RNA, 30 nt, synthetic construct
  misc_feature 1..30: note = Probable ATP-dependent RNA helicase DDX5 (558-567)
  source 1..30: mol_type = other RNA
ttccgcaccggcaaccccaccgggacgtac

SEQ ID NO: 35505 - RNA, 30 nt, synthetic construct
  misc_feature 1..30: note = Protein transport protein Sec31A (398-407)
  source 1..30: mol_type = other RNA
ttcagcttcggcgggaagctggtgaccttc

SEQ ID NO: 35506 - RNA, 27 nt, synthetic construct
  misc_feature 1..27: note = Polymeric immunoglobulin receptor (132-140)
  source 1..27: mol_type = other RNA
ttcagcgtggtcatcaaccagctgcgc

SEQ ID NO: 35507 - RNA, 27 nt, synthetic construct
  misc_feature 1..27: note = Neutral amino acid transporter B(0) (89-97)
  source 1..27: mol_type = other RNA
ttcgtgttccccggcgagctgctcctg

SEQ ID NO: 35508 - RNA, 27 nt, synthetic construct
  misc_feature 1..27: note = Clathrin heavy chain 1 (783-791)
  source 1..27: mol_type = other RNA
ttcgtgcacgacctggtcctctacctg

SEQ ID NO: 35509 - RNA, 27 nt, synthetic construct
  misc_feature 1..27: note = Actin-binding protein anillin (958-966)
  source 1..27: mol_type = other RNA
ttcgtgctggacaaggtccccttcctc

SEQ ID NO: 35510 - RNA, 24 nt, synthetic construct
  misc_feature 1..24: note = Myosin light polypeptide 6 (150-157)
  source 1..24: mol_type = other RNA
ttcgtgcgccacatcctgagcggc

SEQ ID NO: 35511 - RNA, 33 nt, synthetic construct
  misc_feature 1..33: note = Alkyldihydroxyacetonephosphate synthase, peroxisomal (497-507)
  source 1..33: mol_type = other RNA
ggcgaggacaacgggcagcgcggctacctgctc

SEQ ID NO: 35512 - RNA, 27 nt, synthetic construct
  misc_feature 1..27: note = Putative deoxyribonuclease TATDN3 (48-56)
  source 1..27: mol_type = other RNA
ggcgagttcgagaagatcatgcagctg

SEQ ID NO: 35513 - RNA, 27 nt, synthetic construct
  misc_feature 1..27: note = Zinc finger protein 428 (174-182)
  source 1..27: mol_type = other RNA
ggcgagctgcacgggcacttcatgctc

SEQ ID NO: 35514 - RNA, 27 nt, synthetic construct
  misc_feature 1..27: note = Patatin-like phospholipase domain-containing protein 2 (124-132)
  source 1..27: mol_type = other RNA
ggcgagaacgtgatcatcagccacttc

SEQ ID NO: 35515 - RNA, 27 nt, synthetic construct
  misc_feature 1..27: note = DAZ-associated protein 1 (125-133)
  source 1..27: mol_type = other RNA
ggcgagaccgagctgcgcgagtacttc

SEQ ID NO: 35516 - RNA, 33 nt, synthetic construct
  misc_feature 1..33: note = Nuclear pore complex protein Nup93 (311-321)
  source 1..33: mol_type = other RNA
ggcgaggtggaggggcaccccgtctgggccctg

SEQ ID NO: 35517 - RNA, 27 nt, synthetic construct
  misc_feature 1..27: note = Elongation factor 2 (120-128)
  source 1..27: mol_type = other RNA
ggcgaggtgagcgcccgccaggagctg

SEQ ID NO: 35518 - RNA, 27 nt, synthetic construct
  misc_feature 1..27: note = WD repeat-containing protein 61 (188-196)
  source 1..27: mol_type = other RNA
ggccacgccatgcccatccgcagcctg

SEQ ID NO: 35519 - RNA, 27 nt, synthetic construct
  misc_feature 1..27: note = Elongator complex protein 2 (237-245)
  source 1..27: mol_type = other RNA
ggccacttcgacggggtgcaggacctg

SEQ ID NO: 35520 - RNA, 27 nt, synthetic construct
  misc_feature 1..27: note = Neuropathy target esterase (188-196)
  source 1..27: mol_type = other RNA
ggccacttcgagaagcccctgttcctc

SEQ ID NO: 35521 - RNA, 30 nt, synthetic construct
  misc_feature 1..30: note = Protein SCAF8 (919-928)
  source 1..30: mol_type = other RNA
ggcatcctggggatccagcccccgagcgtg

SEQ ID NO: 35522 - RNA, 30 nt, synthetic construct
  misc_feature 1..30: note = MKL/myocardin-like protein 2 (440-449)
  source 1..30: mol_type = other RNA
ggcctggccgccgggggcatcgtggcggtc

SEQ ID NO: 35523 - RNA, 30 nt, synthetic construct
  misc_feature 1..30: note = TRPM8 channel-associated factor 2 (73-82)
  source 1..30: mol_type = other RNA
ggcctggcccccttcctcctgaacgccgtg

SEQ ID NO: 35524 - RNA, 27 nt, synthetic construct
  misc_feature 1..27: note = Neurobeachin-like protein 2 (789-797)
  source 1..27: mol_type = other RNA
ggcctggcccccaagccggtgcaggtc

SEQ ID NO: 35525 - RNA, 27 nt, synthetic construct
  misc_feature 1..27: note = Rapamycin-insensitive companion of mTOR (711-719)
  source 1..27: mol_type = other RNA
ggcctggcccgcgtgatcctcagcaag

SEQ ID NO: 35526 - RNA, 33 nt, synthetic construct
  misc_feature 1..33: note = Nuclear pore complex protein Nup107 (915-925)
  source 1..33: mol_type = other RNA
ggcctggaccccctcgggtacgagatccagctg

SEQ ID NO: 35527 - RNA, 27 nt, synthetic construct
  misc_feature 1..27: note = Elongation factor 2 (217-225)
  source 1..27: mol_type = other RNA
ggcctgcacgggtgggccttcaccctc

SEQ ID NO: 35528 - RNA, 27 nt, synthetic construct
  misc_feature 1..27: note = CCR4-NOT transcription complex subunit 1 (373-381)
  source 1..27: mol_type = other RNA
ggcctgcacaacgtggtctacgggatc

SEQ ID NO: 35529 - RNA, 27 nt, synthetic construct
  misc_feature 1..27: note = DNA-dependent protein kinase catalytic subunit (2509-2517)
  source 1..27: mol_type = other RNA
ggcctgatcgacgagaaccccgggctc

SEQ ID NO: 35530 - RNA, 27 nt, synthetic construct
  misc_feature 1..27: note = Structural maintenance of chromosomes flexible hinge domain-containing protein 1 (829-837)
  source 1..27: mol_type = other RNA
ggcctgctcgacctgcccttccgcgtg

SEQ ID NO: 35531 - RNA, 30 nt, synthetic construct
  misc_feature 1..30: note = F-box only protein 22 (210-219)
  source 1..30: mol_type = other RNA
ggcctgctcgacaaccccgagctgcgcgtg

SEQ ID NO: 35532 - RNA, 33 nt, synthetic construct
  misc_feature 1..33: note = Nuclear receptor subfamily 2 group C member 2 (238-248)
  source 1..33: mol_type = other RNA
ggcctgctcgaccccgggatgctggtgaacatc

SEQ ID NO: 35533 - RNA, 27 nt, synthetic construct
  misc_feature 1..27: note = Protein zer-1 homolog (593-601)
  source 1..27: mol_type = other RNA
ggcctgctcgggaacgtggccgaggtc

SEQ ID NO: 35534 - RNA, 27 nt, synthetic construct
  misc_feature 1..27: note = Protein zyg-11 homolog B (299-307)
  source 1..27: mol_type = other RNA
ggcctgctcaacaacatcgccgaggtg

SEQ ID NO: 35535 - RNA, 27 nt, synthetic construct
  misc_feature 1..27: note = Lysophospholipid acyltransferase 7 (141-149)
  source 1..27: mol_type = other RNA
ggcctgctccccgacgtgccgagcctg

SEQ ID NO: 35536 - RNA, 27 nt, synthetic construct
  misc_feature 1..27: note = E3 ubiquitin-protein ligase UBR4 (1708-1716)
  source 1..27: mol_type = other RNA
ggcctgctccgcatcatcccctacctg

SEQ ID NO: 35537 - RNA, 27 nt, synthetic construct
  misc_feature 1..27: note = Protein ELYS (929-937)
  source 1..27: mol_type = other RNA
ggcctgatggaggacctcctgaagctg

SEQ ID NO: 35538 - RNA, 27 nt, synthetic construct
  misc_feature 1..27: note = Exocyst complex component 4 (173-181)
  source 1..27: mol_type = other RNA
ggcctgagcgacctccgcctggagctg

SEQ ID NO: 35539 - RNA, 27 nt, synthetic construct
  misc_feature 1..27: note = Nuclear pore complex protein Nup155 (139-147)
  source 1..27: mol_type = other RNA
ggcctgagcgagaccatcctcgccgtg

SEQ ID NO: 35540 - RNA, 27 nt, synthetic construct
  misc_feature 1..27: note = Leucine-rich repeat and calponin homology domain-containing protein 3 (750-758)
  source 1..27: mol_type = other RNA
ggcctgagccaggtggccgtcaccgtg

SEQ ID NO: 35541 - RNA, 27 nt, synthetic construct
  misc_feature 1..27: note = Glucocorticoid modulatory element-binding protein 1 (503-511)
  source 1..27: mol_type = other RNA
ggcctgaccagcgccatccaggccgtg

SEQ ID NO: 35542 - RNA, 30 nt, synthetic construct
  misc_feature 1..30: note = Complex I assembly factor TIMMDC1, mitochondrial (187-196)
  source 1..30: mol_type = other RNA
ggcctggtggccgggggcatcatcggggcc

SEQ ID NO: 35543 - RNA, 27 nt, synthetic construct
  misc_feature 1..27: note = Serine-tRNA ligase, cytoplasmic (31-39)
  source 1..27: mol_type = other RNA
ggcctggtggaccagctcgtcaaggcc

SEQ ID NO: 35544 - RNA, 27 nt, synthetic construct
  misc_feature 1..27: note = KATNB1-like protein 1 (274-282)
  source 1..27: mol_type = other RNA
ggcctgtgggagcaggagaaccacctc

SEQ ID NO: 35545 - RNA, 27 nt, synthetic construct
  misc_feature 1..27: note = Rotatin (1413-1421)
  source 1..27: mol_type = other RNA
ggcctgtgggggaccgtggtcaacatc

SEQ ID NO: 35546 - RNA, 30 nt, synthetic construct
  misc_feature 1..30: note = Melanoma-associated antigen 10 (254-263)
  source 1..30: mol_type = other RNA
ggcctgtacgacgggatggagcacctcatc

SEQ ID NO: 35547 - RNA, 27 nt, synthetic construct
  misc_feature 1..27: note = tRNA (adenine(58)-N(1))-methyltransferase non-catalytic subunit TRM6 (83-91)
  source 1..27: mol_type = other RNA
ggcctgtacgagttccccctcaacaag

SEQ ID NO: 35548 - RNA, 27 nt, synthetic construct
  misc_feature 1..27: note = Putative ATP-dependent RNA helicase DHX30 (983-991)
  source 1..27: mol_type = other RNA
ggcctgtaccccaacctcatccaggtg

SEQ ID NO: 35549 - RNA, 30 nt, synthetic construct
  misc_feature 1..30: note = Catenin alpha-1 (725-734)
  source 1..30: mol_type = other RNA
ggcatggccagcctgaacctccccgccgtg

SEQ ID NO: 35550 - RNA, 27 nt, synthetic construct
  misc_feature 1..27: note = RNA-binding protein 12 (509-517)
  source 1..27: mol_type = other RNA
ggcatgctggagaagatcgacatgatc

SEQ ID NO: 35551 - RNA, 27 nt, synthetic construct
  misc_feature 1..27: note = Probable ATP-dependent RNA helicase YTHDC2 (978-986)
  source 1..27: mol_type = other RNA
ggcatgtaccccaacctggtgcacgtc

SEQ ID NO: 35552 - RNA, 27 nt, synthetic construct
  misc_feature 1..27: note = Heterogeneous nuclear ribonucleoprotein M (480-488)
  source 1..27: mol_type = other RNA
ggccccgccatcgagcgcatggggctg

SEQ ID NO: 35553 - RNA, 27 nt, synthetic construct
  misc_feature 1..27: note = ETS translocation variant 5 (173-181)
  source 1..27: mol_type = other RNA
ggccccgccccggccccccacagcctg

SEQ ID NO: 35554 - RNA, 33 nt, synthetic construct
  misc_feature 1..33: note = Filamin-A (852-862)
  source 1..33: mol_type = other RNA
ggccccgggctgagccgcaccggcgtggagctc

SEQ ID NO: 35555 - RNA, 30 nt, synthetic construct
  misc_feature 1..30: note = Splicing factor, proline- and glutamine-rich (215-224)
  source 1..30: mol_type = other RNA
ggccccaagccggggggcgggcccggcctg

SEQ ID NO: 35556 - RNA, 27 nt, synthetic construct
  misc_feature 1..27: note = Peptidyl-prolyl cis-trans isomerase-like 2 (134-142)
  source 1..27: mol_type = other RNA
ggccccaacagcaaccgctcccagttc

SEQ ID NO: 35557 - RNA, 30 nt, synthetic construct
  misc_feature 1..30: note = RuvB-like 1 (70-79)
  source 1..30: mol_type = other RNA
ggccccccggggaccggcaagaccgccctg

SEQ ID NO: 35558 - RNA, 27 nt, synthetic construct
  misc_feature 1..27: note = Transmembrane protein 214 (461-469)
  source 1..27: mol_type = other RNA
ggcccccgcctgccgtggacccggctc

SEQ ID NO: 35559 - RNA, 27 nt, synthetic construct
  misc_feature 1..27: note = PHD finger protein 3 (205-213)
  source 1..27: mol_type = other RNA
ggccagatcgaggtggtccccgaggtg

SEQ ID NO: 35560 - RNA, 27 nt, synthetic construct
  misc_feature 1..27: note = Nucleolar RNA helicase 2 (190-198)
  source 1..27: mol_type = other RNA
ggccgcgccccccaggtgctggtcctc

SEQ ID NO: 35561 - RNA, 30 nt, synthetic construct
  misc_feature 1..30: note = Ran-binding protein 9 (76-85)
  source 1..30: mol_type = other RNA
ggccgcgacgggtacatgggcatcgggctg

SEQ ID NO: 35562 - RNA, 27 nt, synthetic construct
  misc_feature 1..27: note = COP9 signalosome complex subunit 5 (281-289)
  source 1..27: mol_type = other RNA
ggccgcgggagcttcatgctgggcctc

SEQ ID NO: 35563 - RNA, 27 nt, synthetic construct
  misc_feature 1..27: note = WD repeat-containing protein 81 (717-725)
  source 1..27: mol_type = other RNA
ggccgcatcctgctccccgaggggttc

SEQ ID NO: 35564 - RNA, 30 nt, synthetic construct
  misc_feature 1..30: note = Neutral amino acid transporter A (111-120)
  source 1..30: mol_type = other RNA
ggccgcctggggggcatcgccgtggcctac

SEQ ID NO: 35565 - RNA, 30 nt, synthetic construct
  misc_feature 1..30: note = Spectrin beta chain, non-erythrocytic 1 (822-831)
  source 1..30: mol_type = other RNA
ggccgcctgagcgggatcgaggagcggtac

SEQ ID NO: 35566 - RNA, 33 nt, synthetic construct
  misc_feature 1..33: note = ATP-binding cassette sub-family F member 3 (595-605)
  source 1..33: mol_type = other RNA
ggccgctacgggatcagcggcgagctggccatg

SEQ ID NO: 35567 - RNA, 27 nt, synthetic construct
  misc_feature 1..27: note = Stathmin 1/oncoprotein 18 (118-126)
  source 1..27: mol_type = other RNA
ggcagccacttcatctcccacctgagc

SEQ ID NO: 35568 - RNA, 27 nt, synthetic construct
  misc_feature 1..27: note = AP-5 complex subunit beta-1 (317-325)
  source 1..27: mol_type = other RNA
ggcaccgcccagctgaccctcctgcac

SEQ ID NO: 35569 - RNA, 27 nt, synthetic construct
  misc_feature 1..27: note = UPF0428 protein CXorf56 (73-81)
  source 1..27: mol_type = other RNA
ggcaccctgatcgacaaccagttcaag

SEQ ID NO: 35570 - RNA, 27 nt, synthetic construct
  misc_feature 1..27: note = PX domain-containing protein kinase-like protein (149-157)
  source 1..27: mol_type = other RNA
ggcaccctgaaggacctcatctacaag

SEQ ID NO: 35571 - RNA, 27 nt, synthetic construct
  misc_feature 1..27: note = Putative inactive carbonic anhydrase 5B-like protein (13-21)
  source 1..27: mol_type = other RNA
ggcaccctgagctcctggaacctcaag

SEQ ID NO: 35572 - RNA, 27 nt, synthetic construct
  misc_feature 1..27: note = Small integral membrane protein 4 (34-42)
  source 1..27: mol_type = other RNA
ggcaccatggagtggatcatgatcaag

SEQ ID NO: 35573 - RNA, 27 nt, synthetic construct
  misc_feature 1..27: note = Arf-GAP with SH3 domain, ANK repeat and PH domain-containing protein 2 (482-490)
  source 1..27: mol_type = other RNA
ggcaccagcgagctgctcctggccaag

SEQ ID NO: 35574 - RNA, 27 nt, synthetic construct
  misc_feature 1..27: note = DNA cross-link repair 1A protein (877-885)
  source 1..27: mol_type = other RNA
ggcacctacagcatcgggaaggagaag

SEQ ID NO: 35575 - RNA, 27 nt, synthetic construct
  misc_feature 1..27: note = Proteasome subunit beta type-3 (184-192)
  source 1..27: mol_type = other RNA
ggcgtgatcgtccacatcatcgagaag

SEQ ID NO: 35576 - RNA, 27 nt, synthetic construct
  misc_feature 1..27: note = Tensin-1 (71-79)
  source 1..27: mol_type = other RNA
cacgccaaggtgctggagttcggctgg

SEQ ID NO: 35577 - RNA, 27 nt, synthetic construct
  misc_feature 1..27: note = Mothers against decapentaplegic homolog 2 (291-299)
  source 1..27: mol_type = other RNA
cacgccagccagccctccctgaccgtg

SEQ ID NO: 35578 - RNA, 27 nt, synthetic construct
  misc_feature 1..27: note = TIP41-like protein (203-211)
  source 1..27: mol_type = other RNA
cacgaggccgacaagacctacatgctg

SEQ ID NO: 35579 - RNA, 27 nt, synthetic construct
  misc_feature 1..27: note = Zinc finger protein 655 (167-175)
  source 1..27: mol_type = other RNA
cacgagcccgagaagagcttctccctg

SEQ ID NO: 35580 - RNA, 24 nt, synthetic construct
  misc_feature 1..24: note = Retinol dehydrogenase 10 (221-228)
  source 1..24: mol_type = other RNA
cacgagagcctgtcccacgagctc

SEQ ID NO: 35581 - RNA, 27 nt, synthetic construct
  misc_feature 1..27: note = Hippocampus abundant transcript-like protein 1 (50-58)
  source 1..27: mol_type = other RNA
cacgagaccttcagccagcacaccttc

SEQ ID NO: 35582 - RNA, 27 nt, synthetic construct
  misc_feature 1..27: note = N-acetyltransferase 9 (4-12)
  source 1..27: mol_type = other RNA
cacgagtggatgaagagcgaggagctg

SEQ ID NO: 35583 - RNA, 27 nt, synthetic construct
  misc_feature 1..27: note = Tubulin beta-4B chain (28-36)
  source 1..27: mol_type = other RNA
cacggcatcgaccccaccgggacctac

SEQ ID NO: 35584 - RNA, 27 nt, synthetic construct
  misc_feature 1..27: note = MOB kinase activator 3A (169-177)
  source 1..27: mol_type = other RNA
caccacttcgaccgcatcgcccagatg

SEQ ID NO: 35585 - RNA, 27 nt, synthetic construct
  misc_feature 1..27: note = Fanconi anemia group I protein (98-106)
  source 1..27: mol_type = other RNA
caccacttccccggcccgctgctcgtg

SEQ ID NO: 35586 - RNA, 27 nt, synthetic construct
  misc_feature 1..27: note = Transcriptional repressor protein YY1 (78-86)
  source 1..27: mol_type = other RNA
caccaccaccccccgatgatcgccctg

SEQ ID NO: 35587 - RNA, 27 nt, synthetic construct
  misc_feature 1..27: note = Myotubularin-related protein 6 (51-59)
  source 1..27: mol_type = other RNA
caccacatcgccagcgtggagaagctg

SEQ ID NO: 35588 - RNA, 27 nt, synthetic construct
  misc_feature 1..27: note = Kelch-like protein 6 (219-227)
  source 1..27: mol_type = other RNA
caccacatcctgaagagcgacgacctc

SEQ ID NO: 35589 - RNA, 30 nt, synthetic construct
  misc_feature 1..30: note = Squalene synthase (268-277)
  source 1..30: mol_type = other RNA
caccacatccccgacgtgatcacctacctg

SEQ ID NO: 35590 - RNA, 24 nt, synthetic construct
  misc_feature 1..24: note = N-alpha-acetyltransferase 38, NatC auxiliary subunit (107-114)
  source 1..24: mol_type = other RNA
caccacatcgtgagcatcgaggtc

SEQ ID NO: 35591 - RNA, 30 nt, synthetic construct
  misc_feature 1..30: note = Fructose-bisphosphate aldolase A (220-229)
  source 1..30: mol_type = other RNA
caccacatctacctggagggcaccctcctg

SEQ ID NO: 35592 - RNA, 27 nt, synthetic construct
  misc_feature 1..27: note = Signal recognition particle 54 kDa protein (472-480)
  source 1..27: mol_type = other RNA
caccacatgggcgggatggccggcctg

SEQ ID NO: 35593 - RNA, 30 nt, synthetic construct
  misc_feature 1..30: note = U1 small nuclear ribonucleoprotein A (155-164)
  source 1..30: mol_type = other RNA
caccacatgcccggccagccgccctacatg

SEQ ID NO: 35594 - RNA, 24 nt, synthetic construct
  misc_feature 1..24: note = DNA topoisomerase 2-alpha (558-565)
  source 1..24: mol_type = other RNA
caccacaactggcccagcctgctc

SEQ ID NO: 35595 - RNA, 27 nt, synthetic construct
  misc_feature 1..27: note = Ubiquitin-associated protein 2-like (890-898)
  source 1..27: mol_type = other RNA
caccacaccacccagcagacgttcctg

SEQ ID NO: 35596 - RNA, 30 nt, synthetic construct
  misc_feature 1..30: note = Dedicator of cytokinesis protein 2 (573-582)
  source 1..30: mol_type = other RNA
caccacgtggagaacaagggcgccaccctg

SEQ ID NO: 35597 - RNA, 27 nt, synthetic construct
  misc_feature 1..27: note = Oxidative stress-induced growth inhibitor 2 (114-122)
  source 1..27: mol_type = other RNA
caccactacatcccccacgtggtcctg

SEQ ID NO: 35598 - RNA, 30 nt, synthetic construct
  misc_feature 1..30: note = 60S ribosomal protein L30 (72-81)
  source 1..30: mol_type = other RNA
caccactacagcggcaacaacatcgagctg

SEQ ID NO: 35599 - RNA, 27 nt, synthetic construct
  misc_feature 1..27: note = Ribosomal L1 domain-containing protein 1 (227-235)
  source 1..27: mol_type = other RNA
cacatcatcgagaacatcgtggccgtc

SEQ ID NO: 35600 - RNA, 27 nt, synthetic construct
  misc_feature 1..27: note = E3 ubiquitin-protein ligase TRIM11 (224-232)
  source 1..27: mol_type = other RNA
cacctggccgagctcatcgccgagctg

SEQ ID NO: 35601 - RNA, 27 nt, synthetic construct
  misc_feature 1..27: note = Probable E3 ubiquitin-protein ligase HERC1 (1903-1911)
  source 1..27: mol_type = other RNA
cacctgggcgacttcctcgtgttcctg

SEQ ID NO: 35602 - RNA, 27 nt, synthetic construct
  misc_feature 1..27: note = Talin-1 (1711-1719)
  source 1..27: mol_type = other RNA
cacctgatcgagcccctcgccaacgcc

SEQ ID NO: 35603 - RNA, 27 nt, synthetic construct
  misc_feature 1..27: note = Transmembrane protein 41B (196-204)
  source 1..27: mol_type = other RNA
cacctgatcaactacatcatcttcctc

SEQ ID NO: 35604 - RNA, 27 nt, synthetic construct
  misc_feature 1..27: note = tRNA-specific adenosine deaminase 1 (169-177)
  source 1..27: mol_type = other RNA
cacctgctcgaggagcccatctacctg

SEQ ID NO: 35605 - RNA, 27 nt, synthetic construct
  misc_feature 1..27: note = Nuclear pore complex protein Nup205 (808-816)
  source 1..27: mol_type = other RNA
cacctgctcaacgagagccccatgctg

SEQ ID NO: 35606 - RNA, 30 nt, synthetic construct
  misc_feature 1..30: note = Activating transcription factor 7-interacting protein 1 (1036-1045)
  source 1..30: mol_type = other RNA
cacctgctccccaccgccccgaccacggtg

SEQ ID NO: 35607 - RNA, 27 nt, synthetic construct
  misc_feature 1..27: note = Ras GTPase-activating-like protein IQGAP1 (1247-1255)
  source 1..27: mol_type = other RNA
cacctgagcatcatcaacgagtacctc

SEQ ID NO: 35608 - RNA, 27 nt, synthetic construct
  misc_feature 1..27: note = Nucleoprotein TPR (907-915)
  source 1..27: mol_type = other RNA
cacctgagcaacatggaggtgcaggtc

SEQ ID NO: 35609 - RNA, 27 nt, synthetic construct
  misc_feature 1..27: note = Next to BRCA1 gene 1 protein (330-338)
  source 1..27: mol_type = other RNA
cacctgtggaacagcatccacggcctc

SEQ ID NO: 35610 - RNA, 33 nt, synthetic construct
  misc_feature 1..33: note = E3 ubiquitin-protein ligase HUWE1 (111-121)
  source 1..33: mol_type = other RNA
cacctgtacagctccatcgagcacctcaccacc

SEQ ID NO: 35611 - RNA, 27 nt, synthetic construct
  misc_feature 1..27: note = Transmembrane protein 248 (135-143)
  source 1..27: mol_type = other RNA
cacctgtacagcaccatcctcggccac

SEQ ID NO: 35612 - RNA, 27 nt, synthetic construct
  misc_feature 1..27: note = E3 ubiquitin-protein ligase RNF167 (2-10)
  source 1..27: mol_type = other RNA
caccccgccgccttcccgctgcccgtg

SEQ ID NO: 35613 - RNA, 27 nt, synthetic construct
  misc_feature 1..27: note = T-complex protein 1 subunit theta (7-15)
  source 1..27: mol_type = other RNA
caccccgccgccaagatgatcgtgatg

SEQ ID NO: 35614 - RNA, 27 nt, synthetic construct
  misc_feature 1..27: note = Ras GTPase-activating protein-binding protein 1 (336-344)
  source 1..27: mol_type = other RNA
caccccgacagccaccagctgttcatc

SEQ ID NO: 35615 - RNA, 33 nt, synthetic construct
  misc_feature 1..33: note = Sterol regulatory element-binding protein 2 (512-522)
  source 1..33: mol_type = other RNA
cacccccacagcggctccgggcgcagcgtgctg

SEQ ID NO: 35616 - RNA, 27 nt, synthetic construct
  misc_feature 1..27: note = AP-2 complex subunit beta (191-199)
  source 1..27: mol_type = other RNA
caccccaacagcaacctgctcgacctg

SEQ ID NO: 35617 - RNA, 27 nt, synthetic construct
  misc_feature 1..27: note = Catenin beta-1 (499-507)
  source 1..27: mol_type = other RNA
caccccccgagccactggcccctgatc

SEQ ID NO: 35618 - RNA, 30 nt, synthetic construct
  misc_feature 1..30: note = Uncharacterized protein C20orf196 (108-117)
  source 1..30: mol_type = other RNA
cacccccagccgggcagcgccaactccctg

SEQ ID NO: 35619 - RNA, 27 nt, synthetic construct
  misc_feature 1..27: note = Polycomb protein EED (185-193)
  source 1..27: mol_type = other RNA
cacccccgcgacccgaacctgctcctg

SEQ ID NO: 35620 - RNA, 30 nt, synthetic construct
  misc_feature 1..30: note = Hypoxia-inducible factor 1-alpha (708-717)
  source 1..30: mol_type = other RNA
cacccccgcagcccgaacgtgctgtccgtc

SEQ ID NO: 35621 - RNA, 27 nt, synthetic construct
  misc_feature 1..27: note = Exosome complex component RRP46 (111-119)
  source 1..27: mol_type = other RNA
cacccccgcaccagcatcaccgtggtc

SEQ ID NO: 35622 - RNA, 27 nt, synthetic construct
  misc_feature 1..27: note = Kelch-like protein 11 (343-351)
  source 1..27: mol_type = other RNA
caccccaccagccacgtgtccctgctc

SEQ ID NO: 35623 - RNA, 27 nt, synthetic construct
  misc_feature 1..27: note = Cytoplasmic dynein 1 heavy chain 1 (331-339)
  source 1..27: mol_type = other RNA
caccgcctgctcctgatccaggccttc

SEQ ID NO: 35624 - RNA, 27 nt, synthetic construct
  misc_feature 1..27: note = Chromodomain-helicase-DNA-binding protein 3 (1077-1085)
  source 1..27: mol_type = other RNA
caccgcgtgctgatcttcagccagatg

SEQ ID NO: 35625 - RNA, 27 nt, synthetic construct
  misc_feature 1..27: note = Helicase SRCAP (1801-1809)
  source 1..27: mol_type = other RNA
caccgcgtgctgatcttcacccagatg

SEQ ID NO: 35626 - RNA, 27 nt, synthetic construct
  misc_feature 1..27: note = Endothelial PAS domain-containing protein 1 (15-23)
  source 1..27: mol_type = other RNA
cacagcatggacatgaagttcacctac

SEQ ID NO: 35627 - RNA, 30 nt, synthetic construct
  misc_feature 1..30: note = Histone-binding protein RBBP7 (375-384)
  source 1..30: mol_type = other RNA
cacaccgccaagatcagcgacttctcctgg

SEQ ID NO: 35628 - RNA, 27 nt, synthetic construct
  misc_feature 1..27: note = Adenylyl cyclase-associated protein 1 (23-31)
  source 1..27: mol_type = other RNA
cacaccagcgacatgcaccgcggctac

SEQ ID NO: 35629 - RNA, 27 nt, synthetic construct
  misc_feature 1..27: note = POTE ankyrin domain family member I (78-86)
  source 1..27: mol_type = other RNA
cacaccgtgcccatctacgagggctac

SEQ ID NO: 35630 - RNA, 30 nt, synthetic construct
  misc_feature 1..30: note = Thioredoxin-interacting protein (164-173)
  source 1..30: mol_type = other RNA
cacacctacctggccaacggccagaccaag

SEQ ID NO: 35631 - RNA, 27 nt, synthetic construct
  misc_feature 1..27: note = Activity-dependent neuroprotector homeobox protein (162-170)
  source 1..27: mol_type = other RNA
cacgtggccgccccctacatcgcgaag

SEQ ID NO: 35632 - RNA, 27 nt, synthetic construct
  misc_feature 1..27: note = DNA-binding protein inhibitor ID-4 (93-101)
  source 1..27: mol_type = other RNA
cacgtgatcgactacatcctggacctc

SEQ ID NO: 35633 - RNA, 30 nt, synthetic construct
  misc_feature 1..30: note = Secernin-2 (133-142)
  source 1..30: mol_type = other RNA
cacgtgatcaccggcctgctcgagcactac

SEQ ID NO: 35634 - RNA, 33 nt, synthetic construct
  misc_feature 1..33: note = ETS-related transcription factor Elf-1 (38-48)
  source 1..33: mol_type = other RNA
cacgtgcccggcgccgacatcctgaacagctac

SEQ ID NO: 35635 - RNA, 30 nt, synthetic construct
  misc_feature 1..30: note = Cholinesterase (154-163)
  source 1..30: mol_type = other RNA
cacgtgtacgacggcaagttcctggcccgc

SEQ ID NO: 35636 - RNA, 27 nt, synthetic construct
  misc_feature 1..27: note = TCDD-inducible poly (ADP-ribose) polymerase (387-395)
  source 1..27: mol_type = other RNA
cactacatcctgcacaacagcttcttc

SEQ ID NO: 35637 - RNA, 27 nt, synthetic construct
  misc_feature 1..27: note = Proliferation-associated protein 2G4 (20-28)
  source 1..27: mol_type = other RNA
atcgccttccccaccagcatctccgtg

SEQ ID NO: 35638 - RNA, 27 nt, synthetic construct
  misc_feature 1..27: note = Growth hormone-inducible transmembrane protein (143-151)
  source 1..27: mol_type = other RNA
atcgccatcagccgcacccccgtgctg

SEQ ID NO: 35639 - RNA, 30 nt, synthetic construct
  misc_feature 1..30: note = TRPM8 channel-associated factor 1 (376-385)
  source 1..30: mol_type = other RNA
atcgccctgtggcccccggtgcgcgagaag

SEQ ID NO: 35640 - RNA, 27 nt, synthetic construct
  misc_feature 1..27: note = Kinesin-like protein KIF18B (388-396)
  source 1..27: mol_type = other RNA
atcgcccgcctgcccagctccaccctc

SEQ ID NO: 35641 - RNA, 27 nt, synthetic construct
  misc_feature 1..27: note = Eukaryotic initiation factor 4A-II (97-105)
  source 1..27: mol_type = other RNA
atcgagttcaaggagacccaggccctg

SEQ ID NO: 35642 - RNA, 33 nt, synthetic construct
  misc_feature 1..33: note = Casein kinase II subunit alpha (263-273)
  source 1..33: mol_type = other RNA
atcgagctggacccccgcttcaacgacatcctc

SEQ ID NO: 35643 - RNA, 27 nt, synthetic construct
  misc_feature 1..27: note = Methionine adenosyltransferase 2 subunit beta (82-90)
  source 1..27: mol_type = other RNA
atccacgacttccagccccacgtgatc

SEQ ID NO: 35644 - RNA, 27 nt, synthetic construct
  misc_feature 1..27: note = Ubiquitin-like protein 5 (62-70)
  source 1..27: mol_type = other RNA
atccacgacggcatgaacctggagctc

SEQ ID NO: 35645 - RNA, 33 nt, synthetic construct
  misc_feature 1..33: note = NudC domain-containing protein 1 (119-129)
  source 1..33: mol_type = other RNA
atccacttcagctccagcacctgggtgaccctg

SEQ ID NO: 35646 - RNA, 27 nt, synthetic construct
  misc_feature 1..27: note = DNA topoisomerase 2-alpha (557-565)
  source 1..27: mol_type = other RNA
atccaccacaactggcccagcctgctc

SEQ ID NO: 35647 - RNA, 30 nt, synthetic construct
  misc_feature 1..30: note = Probable ATP-dependent RNA helicase DDX5 (298-307)
  source 1..30: mol_type = other RNA
atccacatcaacatcggcgccctggagctc

SEQ ID NO: 35648 - RNA, 27 nt, synthetic construct
  misc_feature 1..27: note = Nucleolar protein 58 (107-115)
  source 1..27: mol_type = other RNA
atccacagccccgtggtcaacgagctg

SEQ ID NO: 35649 - RNA, 27 nt, synthetic construct
  misc_feature 1..27: note = ATPase family AAA domain-containing protein 2B (521-529)
  source 1..27: mol_type = other RNA
atccacagctccatcgtgagcaccctg

SEQ ID NO: 35650 - RNA, 27 nt, synthetic construct
  misc_feature 1..27: note = RNA polymerase II-associated protein 3 (126-134)
  source 1..27: mol_type = other RNA
atccacgtggacagccagaaggccctg

SEQ ID NO: 35651 - RNA, 27 nt, synthetic construct
  misc_feature 1..27: note = Cytochrome c oxidase subunit 1 (311-319)
  source 1..27: mol_type = other RNA
atcatcgccatccccaccggcgtgaag

SEQ ID NO: 35652 - RNA, 27 nt, synthetic construct
  misc_feature 1..27: note = 40S ribosomal protein S7 (59-67)
  source 1..27: mol_type = other RNA
atcatcttcgtgcccgtcccgcagctg

SEQ ID NO: 35653 - RNA, 27 nt, synthetic construct
  misc_feature 1..27: note = Zinc fingers and homeoboxes protein 3 (566-574)
  source 1..27: mol_type = other RNA
atcatcatcgacagcgtgcccgaggtc

SEQ ID NO: 35654 - RNA, 27 nt, synthetic construct
  misc_feature 1..27: note = Dedicator of cytokinesis protein 7 (1109-1117)
  source 1..27: mol_type = other RNA
atcatcatggagaccgtgccccagctg

SEQ ID NO: 35655 - RNA, 27 nt, synthetic construct
  misc_feature 1..27: note = Ras GTPase-activating-like protein IQGAP1 (1302-1310)
  source 1..27: mol_type = other RNA
atcatcaacacccacaccctgctcctg

SEQ ID NO: 35656 - RNA, 27 nt, synthetic construct
  misc_feature 1..27: note = Intron-binding protein aquarius (273-281)
  source 1..27: mol_type = other RNA
atcctggacgacagccacctcctggtg

SEQ ID NO: 35657 - RNA, 27 nt, synthetic construct
  misc_feature 1..27: note = Coatomer subunit zeta-1 (5-13)
  source 1..27: mol_type = other RNA
atcctggagcccagcctctacaccgtg

SEQ ID NO: 35658 - RNA, 30 nt, synthetic construct
  misc_feature 1..30: note = Methylmalonyl-CoA mutase, mitochondrial (172-181)
  source 1..30: mol_type = other RNA
atcctgttcgacggcatccccctcgagaag

SEQ ID NO: 35659 - RNA, 27 nt, synthetic construct
  misc_feature 1..27: note = Asparagine synthetase (glutamine-hydrolyzing) (154-162)
  source 1..27: mol_type = other RNA
atcctgttcaacaacgccgtgaagaag

SEQ ID NO: 35660 - RNA, 27 nt, synthetic construct
  misc_feature 1..27: note = Protein SCAF8 (920-928)
  source 1..27: mol_type = other RNA
atcctgggcatccagcccccgagcgtg

SEQ ID NO: 35661 - RNA, 27 nt, synthetic construct
  misc_feature 1..27: note = CREB-binding protein (26-34)
  source 1..27: mol_type = other RNA
atcctgatcggctacctcgagtacgtg

SEQ ID NO: 35662 - RNA, 27 nt, synthetic construct
  misc_feature 1..27: note = Protein RRNAD1 (424-432)
  source 1..27: mol_type = other RNA
atcctgctcgaccgcctgctgtacctc

SEQ ID NO: 35663 - RNA, 24 nt, synthetic construct
  misc_feature 1..24: note = MAU2 chromatid cohesion factor homolog (246-253)
  source 1..24: mol_type = other RNA
atcctgctcgagcacatcatcatg

SEQ ID NO: 35664 - RNA, 27 nt, synthetic construct
  misc_feature 1..27: note = Phospholipase A-2-activating protein (517-525)
  source 1..27: mol_type = other RNA
atcctgctcgagaagatcctgagcctg

SEQ ID NO: 35665 - RNA, 27 nt, synthetic construct
  misc_feature 1..27: note = Serine-protein kinase ATM (144-152)
  source 1..27: mol_type = other RNA
atcctgctcaaggacatcctgagcgtg

SEQ ID NO: 35666 - RNA, 27 nt, synthetic construct
  misc_feature 1..27: note = Glycerol-3-phosphate acyltransferase 3 (22-30)
  source 1..27: mol_type = other RNA
atcctgctccccagcgtgttcggcgtc

SEQ ID NO: 35667 - RNA, 27 nt, synthetic construct
  misc_feature 1..27: note = Protein FAM122B (239-247)
  source 1..27: mol_type = other RNA
atcctgatggacgacctcagccccaag

SEQ ID NO: 35668 - RNA, 30 nt, synthetic construct
  misc_feature 1..30: note = DNA (cytosine-5)-methyltransferase 1 (382-391)
  source 1..30: mol_type = other RNA
atcctgatggaccccagcccggagtacgcc

SEQ ID NO: 35669 - RNA, 27 nt, synthetic construct
  misc_feature 1..27: note = A-kinase anchor protein 8-like (529-537)
  source 1..27: mol_type = other RNA
atcctgaacaacaagctcatcagcaag

SEQ ID NO: 35670 - RNA, 27 nt, synthetic construct
  misc_feature 1..27: note = Protein TASOR (898-906)
  source 1..27: mol_type = other RNA
atcctgaaccccgaggtggtcaccgtg

SEQ ID NO: 35671 - RNA, 30 nt, synthetic construct
  misc_feature 1..30: note = Anaphase-promoting complex subunit 1 (57-66)
  source 1..30: mol_type = other RNA
atcctgagcaaggacggcgtgctctacgtc

SEQ ID NO: 35672 - RNA, 27 nt, synthetic construct
  misc_feature 1..27: note = Uncharacterized protein KIAA1109 (858-866)
  source 1..27: mol_type = other RNA
atcctgagccccctcaacgtgttcgtc

SEQ ID NO: 35673 - RNA, 27 nt, synthetic construct
  misc_feature 1..27: note = General vesicular transport factor p115 (329-337)
  source 1..27: mol_type = other RNA
atcctgaccgagaccatcaacacggtg

SEQ ID NO: 35674 - RNA, 27 nt, synthetic construct
  misc_feature 1..27: note = ORM1-like protein 2 (28-36)
  source 1..27: mol_type = other RNA
atcctggtgggcctcctgcacatggtc

SEQ ID NO: 35675 - RNA, 27 nt, synthetic construct
  misc_feature 1..27: note = Fibronectin type III domain-containing protein 3B (1072-1080)
  source 1..27: mol_type = other RNA
atcctgtgggagaccgtgcccagcatg

SEQ ID NO: 35676 - RNA, 30 nt, synthetic construct
  misc_feature 1..30: note = Phenylalanine-tRNA ligase, mitochondrial (215-224)
  source 1..30: mol_type = other RNA
atcctgtacgacatccccgacatccgcctc

SEQ ID NO: 35677 - RNA, 27 nt, synthetic construct
  misc_feature 1..27: note = Serine/threonine-protein phosphatase 2B catalytic subunit alpha isoform (138-146)
  source 1..27: mol_type = other RNA
atcctgtaccccaagaccctcttcctg

SEQ ID NO: 35678 - RNA, 27 nt, synthetic construct
  misc_feature 1..27: note = Serine/threonine-protein phosphatase 2B catalytic subunit beta isoform (165-173)
  source 1..27: mol_type = other RNA
atcctgtaccccagcaccctcttcctg

SEQ ID NO: 35679 - RNA, 27 nt, synthetic construct
  misc_feature 1..27: note = Proteasome activator complex subunit 4 (38-46)
  source 1..27: mol_type = other RNA
atcctgtacagcaagaccgagcacctc

SEQ ID NO: 35680 - RNA, 27 nt, synthetic construct
  misc_feature 1..27: note = Vigilin (627-635)
  source 1..27: mol_type = other RNA
atccccgccaagctgcacaacagcctc

SEQ ID NO: 35681 - RNA, 27 nt, synthetic construct
  misc_feature 1..27: note = Thioredoxin domain-containing protein 11 (92-100)
  source 1..27: mol_type = other RNA
atccccgccaagccgcccgtgagcttc

SEQ ID NO: 35682 - RNA, 27 nt, synthetic construct
  misc_feature 1..27: note = RNA-binding protein 12B (28-36)
  source 1..27: mol_type = other RNA
atccccgacggcggggtgcacatcatc

SEQ ID NO: 35683 - RNA, 27 nt, synthetic construct
  misc_feature 1..27: note = Bifunctional glutamate/proline-tRNA ligase (709-717)
  source 1..27: mol_type = other RNA
atccccgacggccacaccaaggagatg

SEQ ID NO: 35684 - RNA, 27 nt, synthetic construct
  misc_feature 1..27: note = Plectin (3582-3590)
  source 1..27: mol_type = other RNA
atccccgaggagcagcgcgcccagctg

SEQ ID NO: 35685 - RNA, 24 nt, synthetic construct
  misc_feature 1..24: note = Filamin-A (1600-1607)
  source 1..24: mol_type = other RNA
atccccttcagcccgtaccgcgtg

SEQ ID NO: 35686 - RNA, 27 nt, synthetic construct
  misc_feature 1..27: note = Coatomer subunit beta' (567-575)
  source 1..27: mol_type = other RNA
atccccaaggacaaccgcctgtacctc

SEQ ID NO: 35687 - RNA, 27 nt, synthetic construct
  misc_feature 1..27: note = Bladder cancer-associated protein (13-21)
  source 1..27: mol_type = other RNA
atccccaagccgctgaaccccgccctc

SEQ ID NO: 35688 - RNA, 27 nt, synthetic construct
  misc_feature 1..27: note = Integrin beta-1 (92-100)
  source 1..27: mol_type = other RNA
atccccaagagcgccgtgggcaccctg

SEQ ID NO: 35689 - RNA, 30 nt, synthetic construct
  misc_feature 1..30: note = Sodium/potassium-transporting ATPase subunit alpha-1 (601-610)
  source 1..30: mol_type = other RNA
atccccctgccgctcggcaccgtgaccatc

SEQ ID NO: 35690 - RNA, 27 nt, synthetic construct
  misc_feature 1..27: note = Tubulin beta chain (365-373)
  source 1..27: mol_type = other RNA
atccccaacaacgtgaagaccgccgtc

SEQ ID NO: 35691 - RNA, 27 nt, synthetic construct
  misc_feature 1..27: note = Membrane cofactor protein (71-79)
  source 1..27: mol_type = other RNA
atccccccgctggccacccacaccatc

SEQ ID NO: 35692 - RNA, 24 nt, synthetic construct
  misc_feature 1..24: note = Chromodomain-helicase-DNA-binding protein 4 (1903-1910)
  source 1..24: mol_type = other RNA
atccccccggtggccgtccgcctg

SEQ ID NO: 35693 - RNA, 30 nt, synthetic construct
  misc_feature 1..30: note = V-type proton ATPase catalytic subunit A (118-127)
  source 1..30: mol_type = other RNA
atcccccgcggcgtgaacgtcagcgccctg

SEQ ID NO: 35694 - RNA, 27 nt, synthetic construct
  misc_feature 1..27: note = Ubiquitin-associated domain-containing protein 2 (32-40)
  source 1..27: mol_type = other RNA
atcccccgcgtgcaggtcgcccagatc

SEQ ID NO: 35695 - RNA, 27 nt, synthetic construct
  misc_feature 1..27: note = Probable ubiquitin carboxyl-terminal hydrolase FAF-X (1578-1586)
  source 1..27: mol_type = other RNA
atccccagcatccgcaacggcatcctg

SEQ ID NO: 35696 - RNA, 27 nt, synthetic construct
  misc_feature 1..27: note = Patatin-like phospholipase domain-containing protein 2 (212-220)
  source 1..27: mol_type = other RNA
atccagttcaacctgcgcaacctctac

SEQ ID NO: 35697 - RNA, 27 nt, synthetic construct
  misc_feature 1..27: note = Hypoxia-inducible factor 1-alpha (370-378)
  source 1..27: mol_type = other RNA
atccagcacgacctgatcttcagcctc

SEQ ID NO: 35698 - RNA, 27 nt, synthetic construct
  misc_feature 1..27: note = AN1-type zinc finger protein 5 (198-206)
  source 1..27: mol_type = other RNA
atccgcaaggagaaccccgtggtcgtg

SEQ ID NO: 35699 - RNA, 27 nt, synthetic construct
  misc_feature 1..27: note = Plectin (3944-3952)
  source 1..27: mol_type = other RNA
atccgccccggcaccgccttcgagctg

SEQ ID NO: 35700 - RNA, 27 nt, synthetic construct
  misc_feature 1..27: note = Nuclear factor of activated T-cells, cytoplasmic 2 (431-439)
  source 1..27: mol_type = other RNA
atccgcacccccgtgaaggtcaacttc

SEQ ID NO: 35701 - RNA, 27 nt, synthetic construct
  misc_feature 1..27: note = Cytospin-A (888-896)
  source 1..27: mol_type = other RNA
atcagcggccccatctccaccagcaag

SEQ ID NO: 35702 - RNA, 33 nt, synthetic construct
  misc_feature 1..33: note = Endothelin-converting enzyme 1 (719-729)
  source 1..33: mol_type = other RNA
atcaccgacccccacagcccgtcccgcttccgg

SEQ ID NO: 35703 - RNA, 27 nt, synthetic construct
  misc_feature 1..27: note = TRAF2 and NCK-interacting protein kinase (425-433)
  source 1..27: mol_type = other RNA
atcaccaaggacgtggtcctgcagtgg

SEQ ID NO: 35704 - RNA, 30 nt, synthetic construct
  misc_feature 1..30: note = Heat shock protein HSP 90-alpha (91-100)
  source 1..30: mol_type = other RNA
atcgtggacaccggcatcgggatgaccaag

SEQ ID NO: 35705 - RNA, 27 nt, synthetic construct
  misc_feature 1..27: note = Smith-Magenis syndrome chromosomal region candidate gene 8 protein (742-750)
  source 1..27: mol_type = other RNA
atcgtgcgcaagctggtcaccgccctc

SEQ ID NO: 35706 - RNA, 30 nt, synthetic construct
  misc_feature 1..30: note = Actin, cytoplasmic 2 (75-84)
  source 1..30: mol_type = other RNA
atcgtgaccaactgggacgacatggagaag

SEQ ID NO: 35707 - RNA, 27 nt, synthetic construct
  misc_feature 1..27: note = Importin subunit alpha-5 (492-500)
  source 1..27: mol_type = other RNA
atctaccagaaggccttcgacctgatc

SEQ ID NO: 35708 - RNA, 30 nt, synthetic construct
  misc_feature 1..30: note = Krueppel-like factor 3 (37-46)
  source 1..30: mol_type = other RNA
atctacagcacccccctgccggagaagttc

SEQ ID NO: 35709 - RNA, 27 nt, synthetic construct
  misc_feature 1..27: note = Butyrophilin subfamily 3 member A3 secreted isoform (315-323)
  source 1..27: mol_type = other RNA
atctacaccttcccccacgccagcttc

SEQ ID NO: 35710 - RNA, 27 nt, synthetic construct
  misc_feature 1..27: note = Probable C-mannosyltransferase DPY19L1 (119-127)
  source 1..27: mol_type = other RNA
atctacaccaagatcatggacctgatc

SEQ ID NO: 35711 - RNA, 27 nt, synthetic construct
  misc_feature 1..27: note = Basic leucine zipper and W2 domain-containing protein 2 (358-366)
  source 1..27: mol_type = other RNA
aaggccttccagaagatcgtggtcctg

SEQ ID NO: 35712 - RNA, 27 nt, synthetic construct
  misc_feature 1..27: note = Structural maintenance of chromosomes protein 1A (1026-1034)
  source 1..27: mol_type = other RNA
aaggccatggagaagctggagagcgtg

SEQ ID NO: 35713 - RNA, 27 nt, synthetic construct
  misc_feature 1..27: note = Histone H2B type 1-K (58-66)
  source 1..27: mol_type = other RNA
aaggccatgggcatcatgaacagcttc

SEQ ID NO: 35714 - RNA, 27 nt, synthetic construct
  misc_feature 1..27: note = Replication protein A 70 kDa DNA-binding subunit (157-165)
  source 1..27: mol_type = other RNA
aaggcctacggcgccagcaagaccttc

SEQ ID NO: 35715 - RNA, 27 nt, synthetic construct
  misc_feature 1..27: note = Protein arginine N-methyltransferase 3 (98-106)
  source 1..27: mol_type = other RNA
aaggaggagtacctgaagcccgtgctc

SEQ ID NO: 35716 - RNA, 33 nt, synthetic construct
  misc_feature 1..33: note = Heat shock protein HSP 90-alpha (656-666)
  source 1..33: mol_type = other RNA
aaggagttcgagggcaagaccctggtgagcgtc

SEQ ID NO: 35717 - RNA, 30 nt, synthetic construct
  misc_feature 1..30: note = Nuclear autoantigenic sperm protein (298-307)
  source 1..30: mol_type = other RNA
aaggagatcgaggagctgaaggagctcctg

SEQ ID NO: 35718 - RNA, 30 nt, synthetic construct
  misc_feature 1..30: note = Nucleoporin GLE1 (442-451)
  source 1..30: mol_type = other RNA
aaggagatcttcgacaagatccacagcctg

SEQ ID NO: 35719 - RNA, 33 nt, synthetic construct
  misc_feature 1..33: note = CDK5 and ABL1 enzyme substrate 1 (180-190)
  source 1..33: mol_type = other RNA
aaggagatcatcggcctggagggggtggagctc

SEQ ID NO: 35720 - RNA, 33 nt, synthetic construct
  misc_feature 1..33: note = 40S ribosomal protein S14 (7-17)
  source 1..33: mol_type = other RNA
aaggagaagaaggaggagcaggtgatcagcctg

SEQ ID NO: 35721 - RNA, 33 nt, synthetic construct
  misc_feature 1..33: note = 14-3-3 protein theta (158-168)
  source 1..33: mol_type = other RNA
aaggagatgcagcccacccacccgatccgcctg

SEQ ID NO: 35722 - RNA, 30 nt, synthetic construct
  misc_feature 1..30: note = Store-operated calcium entry-associated regulatory factor (86-95)
  source 1..30: mol_type = other RNA
aagggctgggacgggtacgacgtgcagtgg

SEQ ID NO: 35723 - RNA, 27 nt, synthetic construct
  misc_feature 1..27: note = Midasin (3076-3084)
  source 1..27: mol_type = other RNA
aagatcgcccagttcctggagagcgtg

SEQ ID NO: 35724 - RNA, 27 nt, synthetic construct
  misc_feature 1..27: note = Heme oxygenase 1 (149-157)
  source 1..27: mol_type = other RNA
aagatcgcccagaaggccctggacctc

SEQ ID NO: 35725 - RNA, 27 nt, synthetic construct
  misc_feature 1..27: note = WD repeat-containing protein 82 (84-92)
  source 1..27: mol_type = other RNA
aagatcgacgacaccatccgctacctg

SEQ ID NO: 35726 - RNA, 33 nt, synthetic construct
  misc_feature 1..33: note = Cytochrome c oxidase subunit 2 (217-227)
  source 1..33: mol_type = other RNA
aagatcttcgagatgggccccgtgttcaccctg

SEQ ID NO: 35727 - RNA, 27 nt, synthetic construct
  misc_feature 1..27: note = Poly (ADP-ribose) polymerase 14 (1060-1068)
  source 1..27: mol_type = other RNA
aagatcggcagcatcatcttccaggtg

SEQ ID NO: 35728 - RNA, 33 nt, synthetic construct
  misc_feature 1..33: note = KH domain-containing, RNA-binding, signal transduction-associated protein 1 (175-185)
  source 1..33: mol_type = other RNA
aagatcctgggcccccaggggaacaccatcaag

SEQ ID NO: 35729 - RNA, 27 nt, synthetic construct
  misc_feature 1..27: note = Nucleolar pre-ribosomal-associated protein 1 (278-286)
  source 1..27: mol_type = other RNA
aagatcctgcccgacctcaacaccgtg

SEQ ID NO: 35730 - RNA, 27 nt, synthetic construct
  misc_feature 1..27: note = Protein SON (1565-1573)
  source 1..27: mol_type = other RNA
aagatcctgcccaccagcgagaccaag

SEQ ID NO: 35731 - RNA, 27 nt, synthetic construct
  misc_feature 1..27: note = Phosphatidylinositol 4-phosphate 5-kinase type-1 beta (263-271)
  source 1..27: mol_type = other RNA
aagatcatggactacagcctgctcctg

SEQ ID NO: 35732 - RNA, 30 nt, synthetic construct
  misc_feature 1..30: note = Heat shock protein HSP 90-alpha (389-398)
  source 1..30: mol_type = other RNA
aagatcatgaaggacatcctggagaagaag

SEQ ID NO: 35733 - RNA, 27 nt, synthetic construct
  misc_feature 1..27: note = Mitotic checkpoint serine/threonine-protein kinase BUB1 beta (908-916)
  source 1..27: mol_type = other RNA
aagatcgtggacttcagctactccgtc

SEQ ID NO: 35734 - RNA, 27 nt, synthetic construct
  misc_feature 1..27: note = Tripeptidyl-peptidase 2 (81-89)
  source 1..27: mol_type = other RNA
aagatctgggaccccgtgcaccgcgtc

SEQ ID NO: 35735 - RNA, 33 nt, synthetic construct
  misc_feature 1..33: note = Cyclin-dependent kinase 16 (375-385)
  source 1..33: mol_type = other RNA
aagctggccgacttcggcctcgcccgcgcgaag

SEQ ID NO: 35736 - RNA, 30 nt, synthetic construct
  misc_feature 1..30: note = Probable RNA-binding protein 23 (357-366)
  source 1..30: mol_type = other RNA
aagctggccgagggcgccgggatccagctc

SEQ ID NO: 35737 - RNA, 30 nt, synthetic construct
  misc_feature 1..30: note = SAP domain-containing ribonucleoprotein (19-28)
  source 1..30: mol_type = other RNA
aagctggccgagctcaagcaggagtgcctg

SEQ ID NO: 35738 - RNA, 27 nt, synthetic construct
  misc_feature 1..27: note = LIM and senescent cell antigen-like-containing domain protein 1 (317-325)
  source 1..27: mol_type = other RNA
aagctggccgagaccctcggccgcaag

SEQ ID NO: 35739 - RNA, 27 nt, synthetic construct
  misc_feature 1..27: note = Protein NDRG1 (209-217)
  source 1..27: mol_type = other RNA
aagctggaccccaccaagaccacgctc

SEQ ID NO: 35740 - RNA, 33 nt, synthetic construct
  misc_feature 1..33: note = SEC14-like protein 1 (60-70)
  source 1..33: mol_type = other RNA
aagctggacgtggacgccccccgcctcctgaag

SEQ ID NO: 35741 - RNA, 27 nt, synthetic construct
  misc_feature 1..27: note = B-cell receptor-associated protein 31 (167-175)
  source 1..27: mol_type = other RNA
aagctggacgtgggcaacgccgaggtc

SEQ ID NO: 35742 - RNA, 27 nt, synthetic construct
  misc_feature 1..27: note = WAS protein family homolog 1 (210-218)
  source 1..27: mol_type = other RNA
aagctgttcgacgcccccctcagcatc

SEQ ID NO: 35743 - RNA, 33 nt, synthetic construct
  misc_feature 1..33: note = Putative WAS protein family homolog 3 (208-218)
  source 1..33: mol_type = other RNA
aagctgttcgacgcccccctcagcatctccaag

SEQ ID NO: 35744 - RNA, 30 nt, synthetic construct
  misc_feature 1..30: note = Oxysterol-binding protein-related protein 9 (138-147)
  source 1..30: mol_type = other RNA
aagctgttcgacgacaagctccagaactgc

SEQ ID NO: 35745 - RNA, 30 nt, synthetic construct
  misc_feature 1..30: note = FACT complex subunit SSRP1 (413-422)
  source 1..30: mol_type = other RNA
aagctgttcgacttcgtgaacgccaagaag

SEQ ID NO: 35746 - RNA, 36 nt, synthetic construct
  misc_feature 1..36: note = Eukaryotic translation initiation factor 3 subunit I (213-224)
  source 1..36: mol_type = other RNA
aagctgttcgacagcaccaccctcgagcaccagaag

SEQ ID NO: 35747 - RNA, 27 nt, synthetic construct
  misc_feature 1..27: note = Interferon regulatory factor 4 (356-364)
  source 1..27: mol_type = other RNA
aagctgttcgacacccagcagttcctc

SEQ ID NO: 35748 - RNA, 27 nt, synthetic construct
  misc_feature 1..27: note = Protein transport protein Sec61 subunit alpha isoform 2 (95-103)
  source 1..27: mol_type = other RNA
aagctgttcggcatgatcatcaccatc

SEQ ID NO: 35749 - RNA, 27 nt, synthetic construct
  misc_feature 1..27: note = Vacuolar fusion protein CCZ1 homolog (146-154)
  source 1..27: mol_type = other RNA
aagctgttcaacggcaccttcctcaag

SEQ ID NO: 35750 - RNA, 27 nt, synthetic construct
  misc_feature 1..27: note = Iron-responsive element-binding protein 2 (746-754)
  source 1..27: mol_type = other RNA
aagctgttcaacaagttcatcggcaag

SEQ ID NO: 35751 - RNA, 30 nt, synthetic construct
  misc_feature 1..30: note = Interleukin enhancer-binding factor 3 (591-600)
  source 1..30: mol_type = other RNA
aagctgttccccgacaccccgctcgccctg

SEQ ID NO: 35752 - RNA, 27 nt, synthetic construct
  misc_feature 1..27: note = DNA-directed DNA/RNA polymerase mu (238-246)
  source 1..27: mol_type = other RNA
aagctgttcacccagatcttcggcgtg

SEQ ID NO: 35753 - RNA, 33 nt, synthetic construct
  misc_feature 1..33: note = Serine/threonine-protein phosphatase 2A 65 kDa regulatory subunit A alpha isoform (188-198)
  source 1..33: mol_type = other RNA
aagctgggcgagttcgccaaggtgctcgagctg

SEQ ID NO: 35754 - RNA, 27 nt, synthetic construct
  misc_feature 1..27: note = ADP-ribosylation factor 5 (38-46)
  source 1..27: mol_type = other RNA
aagctgggcgagatcgtgaccaccatc

SEQ ID NO: 35755 - RNA, 24 nt, synthetic construct
  misc_feature 1..24: note = Ras GTPase-activating-like protein IQGAP2 (158-165)
  source 1..24: mol_type = other RNA
aagctgggcatcgccccccagatc

SEQ ID NO: 35756 - RNA, 27 nt, synthetic construct
  misc_feature 1..27: note = Actin-like protein 6A (337-345)
  source 1..27: mol_type = other RNA
aagctgatcgccaacaacaccaccgtg

SEQ ID NO: 35757 - RNA, 33 nt, synthetic construct
  misc_feature 1..33: note = Serine/threonine-protein kinase pim-2 (179-189)
  source 1..33: mol_type = other RNA
aagctgatcgacttcggcagcggggccctcctg

SEQ ID NO: 35758 - RNA, 36 nt, synthetic construct
  misc_feature 1..36: note = Serine/threonine-protein kinase pim-1 (274-285)
  source 1..36: mol_type = other RNA
aagctgatcgacttcggcagcggggccctcctgaag

SEQ ID NO: 35759 - RNA, 27 nt, synthetic construct
  misc_feature 1..27: note = Dedicator of cytokinesis protein 4 (165-173)
  source 1..27: mol_type = other RNA
aagctgatcgacaagctcgacagcctg

SEQ ID NO: 35760 - RNA, 27 nt, synthetic construct
  misc_feature 1..27: note = Protein furry homolog (375-383)
  source 1..27: mol_type = other RNA
aagctgatcggccaggtgcacgaggtc

SEQ ID NO: 35761 - RNA, 27 nt, synthetic construct
  misc_feature 1..27: note = Nodal modulator 3 (764-772)
  source 1..27: mol_type = other RNA
aagctgatccccctcctgctgcagctc

SEQ ID NO: 35762 - RNA, 30 nt, synthetic construct
  misc_feature 1..30: note = Nucleolar pre-ribosomal-associated protein 1 (172-181)
  source 1..30: mol_type = other RNA
aagctgatccagctccccgtggtctacgtg

SEQ ID NO: 35763 - RNA, 27 nt, synthetic construct
  misc_feature 1..27: note = Telomere-associated protein RIF1 (232-240)
  source 1..27: mol_type = other RNA
aagctgatcagcgagctccagaagctg

SEQ ID NO: 35764 - RNA, 30 nt, synthetic construct
  misc_feature 1..30: note = 26S protease regulatory subunit 6A (109-118)
  source 1..30: mol_type = other RNA
aagctgaagcccggcgacctcgtgggggtc

SEQ ID NO: 35765 - RNA, 33 nt, synthetic construct
  misc_feature 1..33: note = Ras association domain-containing protein 1 (139-149)
  source 1..33: mol_type = other RNA
aagctgctcgacgacgagcagcccctgcgcctg

SEQ ID NO: 35766 - RNA, 27 nt, synthetic construct
  misc_feature 1..27: note = Cytochrome P450 2J2 (182-190)
  source 1..27: mol_type = other RNA
aagctgctcgacgaggtgacctacctg

SEQ ID NO: 35767 - RNA, 30 nt, synthetic construct
  misc_feature 1..30: note = Phosphopantothenoylcysteine decarboxylase (39-48)
  source 1..30: mol_type = other RNA
aagctgctcgacatccccggcctggaggtg

SEQ ID NO: 35768 - RNA, 30 nt, synthetic construct
  misc_feature 1..30: note = Protein scribble homolog (779-788)
  source 1..30: mol_type = other RNA
aagctgctcgaggtgaacggcgtcgccctg

SEQ ID NO: 35769 - RNA, 27 nt, synthetic construct
  misc_feature 1..27: note = Integrator complex subunit 4-like protein 2 isoform X2 (94-102)
  source 1..27: mol_type = other RNA
aagctgctcggcagcatggagcaggtg

SEQ ID NO: 35770 - RNA, 27 nt, synthetic construct
  misc_feature 1..27: note = Nucleolar pre-ribosomal-associated protein 1 (170-178)
  source 1..27: mol_type = other RNA
aagctgctcaacaagatctacgaggcc

SEQ ID NO: 35771 - RNA, 27 nt, synthetic construct
  misc_feature 1..27: note = Acidic leucine-rich nuclear phosphoprotein 32 family member A (137-145)
  source 1..27: mol_type = other RNA
aagctgctcccccagctgacctacctg

SEQ ID NO: 35772 - RNA, 27 nt, synthetic construct
  misc_feature 1..27: note = Proheparin-binding EGF-like growth factor (2-10)
  source 1..27: mol_type = other RNA
aagctgctccccagcgtggtcctgaag

SEQ ID NO: 35773 - RNA, 30 nt, synthetic construct
  misc_feature 1..30: note = Transmembrane protein 43 (13-22)
  source 1..30: mol_type = other RNA
aagctgctcagcgaccccaactacggcgtg

SEQ ID NO: 35774 - RNA, 27 nt, synthetic construct
  misc_feature 1..27: note = Ubiquitin carboxyl-terminal hydrolase 48 (231-239)
  source 1..27: mol_type = other RNA
aagctgctcagcaagttctacgagctg

SEQ ID NO: 35775 - RNA, 33 nt, synthetic construct
  misc_feature 1..33: note = Cytosolic acyl coenzyme A thioester hydrolase (210-220)
  source 1..33: mol_type = other RNA
aagctgatggacgaggtggccggcatcgtcgcc

SEQ ID NO: 35776 - RNA, 27 nt, synthetic construct
  misc_feature 1..27: note = N-alpha-acetyltransferase 20 (79-87)
  source 1..27: mol_type = other RNA
aagctgatggagctcctggaggagatc

SEQ ID NO: 35777 - RNA, 27 nt, synthetic construct
  misc_feature 1..27: note = Transcription intermediary factor 1-alpha (341-349)
  source 1..27: mol_type = other RNA
aagctgatgcagcagcagcaggaggtg

SEQ ID NO: 35778 - RNA, 27 nt, synthetic construct
  misc_feature 1..27: note = Cohesin subunit SA-1 (228-236)
  source 1..27: mol_type = other RNA
aagctgatgaccgccctcgtgaacgtc

SEQ ID NO: 35779 - RNA, 27 nt, synthetic construct
  misc_feature 1..27: note = Proteasome subunit alpha type-5 (151-159)
  source 1..27: mol_type = other RNA
aagctgaacgccaccaacatcgagctc

SEQ ID NO: 35780 - RNA, 27 nt, synthetic construct
  misc_feature 1..27: note = Myomegalin (424-432)
  source 1..27: mol_type = other RNA
aagctgaacgagatgagctacgagctc

SEQ ID NO: 35781 - RNA, 27 nt, synthetic construct
  misc_feature 1..27: note = Twinfilin-1 (192-200)
  source 1..27: mol_type = other RNA
aagctgaacaaccgccagctcaactac

SEQ ID NO: 35782 - RNA, 30 nt, synthetic construct
  misc_feature 1..30: note = Stromal interaction molecule 1 (571-580)
  source 1..30: mol_type = other RNA
aagctgcccgacagcccggccctcgccaag

SEQ ID NO: 35783 - RNA, 27 nt, synthetic construct
  misc_feature 1..27: note = Probable U3 small nucleolar RNA-associated protein 11 (5-13)
  source 1..27: mol_type = other RNA
aagctgcaggacggcgtgcacatcatc

SEQ ID NO: 35784 - RNA, 27 nt, synthetic construct
  misc_feature 1..27: note = Hyaluronan mediated motility receptor (672-680)
  source 1..27: mol_type = other RNA
aagctgcaggaggagctcaacaaggtg

SEQ ID NO: 35785 - RNA, 27 nt, synthetic construct
  misc_feature 1..27: note = Centromere-associated protein E (1817-1825)
  source 1..27: mol_type = other RNA
aagctgcaggagaagatccaggagctc

SEQ ID NO: 35786 - RNA, 27 nt, synthetic construct
  misc_feature 1..27: note = Zinc finger C3H1 domain-containing protein (891-899)
  source 1..27: mol_type = other RNA
aagctgcaggagcagatccaccgcgtg

SEQ ID NO: 35787 - RNA, 30 nt, synthetic construct
  misc_feature 1..30: note = Transmembrane protein 131 (929-938)
  source 1..30: mol_type = other RNA
aagctgcgcgagcccaacttcaccctcaag

SEQ ID NO: 35788 - RNA, 27 nt, synthetic construct
  misc_feature 1..27: note = EF-hand domain-containing protein D1 (174-182)
  source 1..27: mol_type = other RNA
aagctgagcgagatcgacgtggccctc

SEQ ID NO: 35789 - RNA, 27 nt, synthetic construct
  misc_feature 1..27: note = Keratin, type II cytoskeletal 8 (148-156)
  source 1..27: mol_type = other RNA
aagctgagcgagctcgaggccgccctg

SEQ ID NO: 35790 - RNA, 27 nt, synthetic construct
  misc_feature 1..27: note = 78 kDa glucose-regulated protein (2-10)
  source 1..27: mol_type = other RNA
aagctgagcctcgtggccgccatgctg

SEQ ID NO: 35791 - RNA, 27 nt, synthetic construct
  misc_feature 1..27: note = Retrotransposon-derived protein PEG10 (112-120)
  source 1..27: mol_type = other RNA
aagctgaccgaggagaacaccacgctc

SEQ ID NO: 35792 - RNA, 27 nt, synthetic construct
  misc_feature 1..27: note = Zinc finger MYM-type protein 2 (166-174)
  source 1..27: mol_type = other RNA
aagctgaccgagatccgccacgaggtg

SEQ ID NO: 35793 - RNA, 30 nt, synthetic construct
  misc_feature 1..30: note = Cyclin-dependent kinase 2 (24-33)
  source 1..30: mol_type = other RNA
aagctgaccggcgaggtggtcgccctcaag

SEQ ID NO: 35794 - RNA, 30 nt, synthetic construct
  misc_feature 1..30: note = Transforming acidic coiled-coil-containing protein 3 (599-608)
  source 1..30: mol_type = other RNA
aagctggtggagttcgacttcctcggcgcc

SEQ ID NO: 35795 - RNA, 27 nt, synthetic construct
  misc_feature 1..27: note = Adenylyl cyclase-associated protein 1 (465-473)
  source 1..27: mol_type = other RNA
aagctggtgaccaccgtcacggagatc

SEQ ID NO: 35796 - RNA, 27 nt, synthetic construct
  misc_feature 1..27: note = Inactive hydroxysteroid dehydrogenase-like protein 1 (148-156)
  source 1..27: mol_type = other RNA
aagctgtgggacatcatcaacgtgaac

SEQ ID NO: 35797 - RNA, 27 nt, synthetic construct
  misc_feature 1..27: note = UBX domain-containing protein 11 (82-90)
  source 1..27: mol_type = other RNA
aagctgtgggacctcgagcagcaggtg

SEQ ID NO: 35798 - RNA, 27 nt, synthetic construct
  misc_feature 1..27: note = Pecanex-like protein 3 (1234-1242)
  source 1..27: mol_type = other RNA
aagctgtgggacctcctgtacaagctg

SEQ ID NO: 35799 - RNA, 27 nt, synthetic construct
  misc_feature 1..27: note = MORF4 family-associated protein 1-like 1 (56-64)
  source 1..27: mol_type = other RNA
aagctgtgggagatggacaacatgctc

SEQ ID NO: 35800 - RNA, 30 nt, synthetic construct
  misc_feature 1..30: note = MORF4 family-associated protein 1-like 1 (56-65)
  source 1..30: mol_type = other RNA
aagctgtgggagatggacaacatgctcatc

SEQ ID NO: 35801 - RNA, 33 nt, synthetic construct
  misc_feature 1..33: note = MORF4 family-associated protein 1-like 1 (56-66)
  source 1..33: mol_type = other RNA
aagctgtgggagatggacaacatgctcatccag

SEQ ID NO: 35802 - RNA, 27 nt, synthetic construct
  misc_feature 1..27: note = Rho guanine nucleotide exchange factor 3 (108-116)
  source 1..27: mol_type = other RNA
aagctgtggagcgagaccttcgacgtg

SEQ ID NO: 35803 - RNA, 27 nt, synthetic construct
  misc_feature 1..27: note = ADP-ribosylation factor-like protein 4C (157-165)
  source 1..27: mol_type = other RNA
aagctgtacgagatgatcctcaagcgc

SEQ ID NO: 35804 - RNA, 27 nt, synthetic construct
  misc_feature 1..27: note = Splicing factor 3B subunit 4 (78-86)
  source 1..27: mol_type = other RNA
aagctgtacggcaagcccatccgcgtg

SEQ ID NO: 35805 - RNA, 27 nt, synthetic construct
  misc_feature 1..27: note = Tuberin (574-582)
  source 1..27: mol_type = other RNA
aagctgtacaccctccccgccagccac

SEQ ID NO: 35806 - RNA, 33 nt, synthetic construct
  misc_feature 1..33: note = E3 ubiquitin-protein ligase BRE1A (694-704)
  source 1..33: mol_type = other RNA
aagatggccgacgaggacgccctgcgcaagatc

SEQ ID NO: 35807 - RNA, 27 nt, synthetic construct
  misc_feature 1..27: note = Melanoma-associated antigen 12 (112-120)
  source 1..27: mol_type = other RNA
aagatggccgagctggtgcacttcctc

SEQ ID NO: 35808 - RNA, 33 nt, synthetic construct
  misc_feature 1..33: note = Ribosome biogenesis protein BOP1 (115-125)
  source 1..33: mol_type = other RNA
aagatggacgaccccgactactggcgcaccgtg

SEQ ID NO: 35809 - RNA, 27 nt, synthetic construct
  misc_feature 1..27: note = Talin-1 (535-543)
  source 1..27: mol_type = other RNA
aagatggacgagagcaagcacgagatc

SEQ ID NO: 35810 - RNA, 27 nt, synthetic construct
  misc_feature 1..27: note = KDEL motif-containing protein 2 (215-223)
  source 1..27: mol_type = other RNA
aagatgttcagcgacgagatcctgctc

SEQ ID NO: 35811 - RNA, 30 nt, synthetic construct
  misc_feature 1..30: note = Structural maintenance of chromosomes protein 5 (378-387)
  source 1..30: mol_type = other RNA
aagatgatcgaggacctgcagaacgagctc

SEQ ID NO: 35812 - RNA, 36 nt, synthetic construct
  misc_feature 1..36: note = UPF0428 protein CXorf56 (70-81)
  source 1..36: mol_type = other RNA
aagatgaagggcaccctgatcgacaaccagttcaag

SEQ ID NO: 35813 - RNA, 33 nt, synthetic construct
  misc_feature 1..33: note = Tropomodulin-3 (307-317)
  source 1..33: mol_type = other RNA
aagatgctggaggagaacaccaacatcctcaag

SEQ ID NO: 35814 - RNA, 27 nt, synthetic construct
  misc_feature 1..27: note = HEAT repeat-containing protein 1 (682-690)
  source 1..27: mol_type = other RNA
aagatggtggaggacctgatcagcgtc

SEQ ID NO: 35815 - RNA, 27 nt, synthetic construct
  misc_feature 1..27: note = cAMP-dependent protein kinase type I-beta regulatory subunit (244-252)
  source 1..27: mol_type = other RNA
aagatgtacgaggagttcctgagcaag

SEQ ID NO: 35816 - RNA, 30 nt, synthetic construct
  misc_feature 1..30: note = La-related protein 4B (374-383)
  source 1..30: mol_type = other RNA
aagcccgccgccagcccgctgacctccctc

SEQ ID NO: 35817 - RNA, 27 nt, synthetic construct
  misc_feature 1..27: note = Myosin-9 (517-525)
  source 1..27: mol_type = other RNA
aagcccgccggcccgcccgggatcctg

SEQ ID NO: 35818 - RNA, 27 nt, synthetic construct
  misc_feature 1..27: note = Serine/threonine-protein kinase Nek6 (199-207)
  source 1..27: mol_type = other RNA
aagcccgccaacgtgttcatcaccgcc

SEQ ID NO: 35819 - RNA, 27 nt, synthetic construct
  misc_feature 1..27: note = Acid ceramidase (209-217)
  source 1..27: mol_type = other RNA
aagcccggcctgttcagcctcaccctg

SEQ ID NO: 35820 - RNA, 27 nt, synthetic construct
  misc_feature 1..27: note = BAG family molecular chaperone regulator 3 (324-332)
  source 1..27: mol_type = other RNA
aagcccggcccggtggggcccgagctg

SEQ ID NO: 35821 - RNA, 27 nt, synthetic construct
  misc_feature 1..27: note = Proteasome assembly chaperone 1 (230-238)
  source 1..27: mol_type = other RNA
aagcccatcctgagcacccgctccctc

SEQ ID NO: 35822 - RNA, 30 nt, synthetic construct
  misc_feature 1..30: note = Radixin (3-12)
  source 1..30: mol_type = other RNA
aagcccatcaacgtgcgcgtcaccaccatg

SEQ ID NO: 35823 - RNA, 27 nt, synthetic construct
  misc_feature 1..27: note = Retinoblastoma-binding protein 5 (324-332)
  source 1..27: mol_type = other RNA
aagcccaagaccaccaacatcgagctg

SEQ ID NO: 35824 - RNA, 27 nt, synthetic construct
  misc_feature 1..27: note = Transketolase (451-459)
  source 1..27: mol_type = other RNA
aagcccctggaccgcaagctcatcctg

SEQ ID NO: 35825 - RNA, 27 nt, synthetic construct
  misc_feature 1..27: note = Forkhead box protein N2 (170-178)
  source 1..27: mol_type = other RNA
aagcccctgccgctcaagaccgccctg

SEQ ID NO: 35826 - RNA, 33 nt, synthetic construct
  misc_feature 1..33: note = Galectin-3 (139-149)
  source 1..33: mol_type = other RNA
aagcccaacgccaaccgcatcgccctggacttc

SEQ ID NO: 35827 - RNA, 27 nt, synthetic construct
  misc_feature 1..27: note = Catenin beta-1 (666-674)
  source 1..27: mol_type = other RNA
aagccccaggactacaagaagcgcctg

SEQ ID NO: 35828 - RNA, 33 nt, synthetic construct
  misc_feature 1..33: note = Catenin beta-1 (666-676)
  source 1..33: mol_type = other RNA
aagccccaggactacaagaagcgcctgagcgtg

SEQ ID NO: 35829 - RNA, 27 nt, synthetic construct
  misc_feature 1..27: note = Serine/threonine-protein kinase tousled-like 2 (155-163)
  source 1..27: mol_type = other RNA
aagccccgcctggacaccgagcagctc

SEQ ID NO: 35830 - RNA, 27 nt, synthetic construct
  misc_feature 1..27: note = Retrotransposon-derived protein PEG10 (325-333)
  source 1..27: mol_type = other RNA
aagccccgcagcccgccccgggccctg

SEQ ID NO: 35831 - RNA, 33 nt, synthetic construct
  misc_feature 1..33: note = Retrotransposon-derived protein PEG10 (325-335)
  source 1..33: mol_type = other RNA
aagccccgcagcccgccccgggccctggtgctc

SEQ ID NO: 35832 - RNA, 27 nt, synthetic construct
  misc_feature 1..27: note = rRNA-processing protein UTP23 homolog (149-157)
  source 1..27: mol_type = other RNA
aagcccagcccgaagaccatcgccttc

SEQ ID NO: 35833 - RNA, 27 nt, synthetic construct
  misc_feature 1..27: note = 60S ribosomal protein L13a (130-138)
  source 1..27: mol_type = other RNA
aagcccacccgcaagttcgcctacctg

SEQ ID NO: 35834 - RNA, 30 nt, synthetic construct
  misc_feature 1..30: note = U3 small nucleolar ribonucleoprotein protein IMP3 (14-23)
  source 1..30: mol_type = other RNA
aagcaggtggacttcctgaactgggaggtc

SEQ ID NO: 35835 - RNA, 27 nt, synthetic construct
  misc_feature 1..27: note = Src kinase-associated phosphoprotein 2 (319-327)
  source 1..27: mol_type = other RNA
aagcgcggcgacgtgatctacatcctg

SEQ ID NO: 35836 - RNA, 30 nt, synthetic construct
  misc_feature 1..30: note = Guanylate-binding protein 4 (305-314)
  source 1..30: mol_type = other RNA
aagcgcctgggcaccctcgtggtcacctac

SEQ ID NO: 35837 - RNA, 33 nt, synthetic construct
  misc_feature 1..33: note = Eukaryotic translation initiation factor 4 gamma 1 (570-580)
  source 1..33: mol_type = other RNA
aagcgctacgaccgggagttcctgctcggcttc

SEQ ID NO: 35838 - RNA, 30 nt, synthetic construct
  misc_feature 1..30: note = Hom s 1 (791-800)
  source 1..30: mol_type = other RNA
aagagcatgaacgccaacaccatcaccaag

SEQ ID NO: 35839 - RNA, 33 nt, synthetic construct
  misc_feature 1..33: note = Prefoldin subunit 5 (107-117)
  source 1..33: mol_type = other RNA
aagaccgccgaggacgccaaggacttcttcaag

SEQ ID NO: 35840 - RNA, 33 nt, synthetic construct
  misc_feature 1..33: note = Death-inducer obliterator 1 (585-595)
  source 1..33: mol_type = other RNA
aagaccgcccccccgggcagcgccgtggggaag

SEQ ID NO: 35841 - RNA, 27 nt, synthetic construct
  misc_feature 1..27: note = Volume-regulated anion channel subunit LRRC8C (100-108)
  source 1..27: mol_type = other RNA
aagaccgacctggacctccagcagtac

SEQ ID NO: 35842 - RNA, 27 nt, synthetic construct
  misc_feature 1..27: note = Activating transcription factor 7-interacting protein 1 (394-402)
  source 1..27: mol_type = other RNA
aagaccatcgacgccagcgtgtccaag

SEQ ID NO: 35843 - RNA, 30 nt, synthetic construct
  misc_feature 1..30: note = Arfaptin-1 (216-225)
  source 1..30: mol_type = other RNA
aagaccatcgaggacaccctgatgacggtg

SEQ ID NO: 35844 - RNA, 36 nt, synthetic construct
  misc_feature 1..36: note = UPF0769 protein C21orf59 (114-125)
  source 1..36: mol_type = other RNA
aagaccatcgaggaggccaaggccatcatcagcaag

SEQ ID NO: 35845 - RNA, 33 nt, synthetic construct
  misc_feature 1..33: note = Acyl-CoA dehydrogenase family member 9, mitochondrial (521-531)
  source 1..33: mol_type = other RNA
aagaccatcatggaggagcagctggtgctcaag

SEQ ID NO: 35846 - RNA, 27 nt, synthetic construct
  misc_feature 1..27: note = Beta-synuclein (32-40)
  source 1..27: mol_type = other RNA
aagaccaaggagggcgtgctgtacgtc

SEQ ID NO: 35847 - RNA, 27 nt, synthetic construct
  misc_feature 1..27: note = Transcriptional repressor protein YY1 (213-221)
  source 1..27: mol_type = other RNA
aagaccctggagggcgagttcagcgtg

SEQ ID NO: 35848 - RNA, 30 nt, synthetic construct
  misc_feature 1..30: note = SWI/SNF-related matrix-associated actin-dependent regulator of chromatin subfamily A member 5 (112-121)
  source 1..30: mol_type = other RNA
aagacccccaccagcccgctgaagatgaag

SEQ ID NO: 35849 - RNA, 27 nt, synthetic construct
  misc_feature 1..27: note = Short coiled-coil protein (97-105)
  source 1..27: mol_type = other RNA
aagacccgcctgatcaaccaggtgctc

SEQ ID NO: 35850 - RNA, 27 nt, synthetic construct
  misc_feature 1..27: note = Collagen alpha-2(VI) chain (132-140)
  source 1..27: mol_type = other RNA
aagacccgcgtgttcgccgtcgtgatc

SEQ ID NO: 35851 - RNA, 27 nt, synthetic construct
  misc_feature 1..27: note = Ubinuclein-2 (526-534)
  source 1..27: mol_type = other RNA
aagaccagcgacaagcccctgatgtac

SEQ ID NO: 35852 - RNA, 27 nt, synthetic construct
  misc_feature 1..27: note = 26S proteasome non-ATPase regulatory subunit 6 (126-134)
  source 1..27: mol_type = other RNA
aagacctacgacaagaccgtggccctg

SEQ ID NO: 35853 - RNA, 30 nt, synthetic construct
  misc_feature 1..30: note = Coiled-coil domain-containing protein 14 (522-531)
  source 1..30: mol_type = other RNA
aagacctacgagaacgtgctgagctcccgc

SEQ ID NO: 35854 - RNA, 30 nt, synthetic construct
  misc_feature 1..30: note = Heterogeneous nuclear ribonucleoprotein L-like (486-495)
  source 1..30: mol_type = other RNA
aaggtgttcgacgccaagcccagcgccaag

SEQ ID NO: 35855 - RNA, 27 nt, synthetic construct
  misc_feature 1..27: note = Dihydroxyacetone phosphate acyltransferase (128-136)
  source 1..27: mol_type = other RNA
aaggtgttcaagcagatcttcagcaag

SEQ ID NO: 35856 - RNA, 30 nt, synthetic construct
  misc_feature 1..30: note = Ubiquitin carboxyl-terminal hydrolase 11 (139-148)
  source 1..30: mol_type = other RNA
aaggtgatcgagctgcccaacatccagaag

SEQ ID NO: 35857 - RNA, 27 nt, synthetic construct
  misc_feature 1..27: note = Syntenin-1 (14-22)
  source 1..27: mol_type = other RNA
aaggtgatccaggcccagaccgccttc

SEQ ID NO: 35858 - RNA, 27 nt, synthetic construct
  misc_feature 1..27: note = Plasmalemma vesicle-associated protein (164-172)
  source 1..27: mol_type = other RNA
aaggtgaagaccctggaggtcgagatc

SEQ ID NO: 35859 - RNA, 27 nt, synthetic construct
  misc_feature 1..27: note = Mitofusin-2 (84-92)
  source 1..27: mol_type = other RNA
aaggtgcgcggcatcagcgaggtcctg

SEQ ID NO: 35860 - RNA, 27 nt, synthetic construct
  misc_feature 1..27: note = Heterogeneous nuclear ribonucleoprotein R isoform 7 (155-163)
  source 1..27: mol_type = other RNA
aaggtgtggggcaacgtcgtgaccgtg

SEQ ID NO: 35861 - RNA, 30 nt, synthetic construct
  misc_feature 1..30: note = Small integral membrane protein 20 (58-67)
  source 1..30: mol_type = other RNA
aaggtgtggagcgaccccttcggccgcaag

SEQ ID NO: 35862 - RNA, 27 nt, synthetic construct
  misc_feature 1..27: note = Stromal interaction molecule 2 (478-486)
  source 1..27: mol_type = other RNA
aaggtgtacaacggcatcctggagaag

SEQ ID NO: 35863 - RNA, 27 nt, synthetic construct
  misc_feature 1..27: note = Homeobox-containing protein 1 (325-333)
  source 1..27: mol_type = other RNA
aaggtgtacaactggttcgccaaccgc

SEQ ID NO: 35864 - RNA, 27 nt, synthetic construct
  misc_feature 1..27: note = Threonylcarbamoyladenosine tRNA methylthiotransferase (405-413)
  source 1..27: mol_type = other RNA
aaggtgtacacccccagcatctccaag

SEQ ID NO: 35865 - RNA, 27 nt, synthetic construct
  misc_feature 1..27: note = WD repeat-containing protein 1 (65-73)
  source 1..27: mol_type = other RNA
aagtacgcccccagcggcttctacatc

SEQ ID NO: 35866 - RNA, 27 nt, synthetic construct
  misc_feature 1..27: note = Alpha-soluble NSF attachment protein (227-235)
  source 1..27: mol_type = other RNA
aagtacgaggagctgttccccgccttc

SEQ ID NO: 35867 - RNA, 27 nt, synthetic construct
  misc_feature 1..27: note = Putative E3 ubiquitin-protein ligase UBR7 (125-133)
  source 1..27: mol_type = other RNA
aagtacaacgacaacttcttcggcctg

SEQ ID NO: 35868 - RNA, 27 nt, synthetic construct
  misc_feature 1..27: note = Rho guanine nucleotide exchange factor 1 (516-524)
  source 1..27: mol_type = other RNA
aagtaccccctgctcctgcagagcatc

SEQ ID NO: 35869 - RNA, 27 nt, synthetic construct
  misc_feature 1..27: note = Zinc finger MYND domain-containing protein 11 (415-423)
  source 1..27: mol_type = other RNA
aagtacaccaagatcttcaacgacttc

SEQ ID NO: 35870 - RNA, 24 nt, synthetic construct
  misc_feature 1..24: note = Transformation/transcription domain-associated protein (379-386)
  source 1..24: mol_type = other RNA
ctggccgacctcgtgcaccacgtc

SEQ ID NO: 35871 - RNA, 24 nt, synthetic construct
  misc_feature 1..24: note = Ras GTPase-activating-like protein IQGAP1 (1072-1079)
  source 1..24: mol_type = other RNA
ctggcccccgtggtcaaggagatc

SEQ ID NO: 35872 - RNA, 27 nt, synthetic construct
  misc_feature 1..27: note = Vimentin (124-132)
  source 1..27: mol_type = other RNA
ctggagcagcagaacaagatcctcctg

SEQ ID NO: 35873 - RNA, 27 nt, synthetic construct
  misc_feature 1..27: note = HLA class II histocompatibility antigen, DRB1-15 beta chain (48-56)
  source 1..27: mol_type = other RNA
ctgggccgccccgacgccgagtactgg

SEQ ID NO: 35874 - RNA, 27 nt, synthetic construct
  misc_feature 1..27: note = U5 small nuclear ribonucleoprotein 200 kDa helicase (620-628)
  source 1..27: mol_type = other RNA
ctgcacgacgaccgcggccccgtgctc

SEQ ID NO: 35875 - RNA, 24 nt, synthetic construct
  misc_feature 1..24: note = Elongation factor 2 (218-225)
  source 1..24: mol_type = other RNA
ctgcacggctgggccttcaccctc

SEQ ID NO: 35876 - RNA, 27 nt, synthetic construct
  misc_feature 1..27: note = Importin subunit alpha-1 (260-268)
  source 1..27: mol_type = other RNA
ctgcaccacgacgaccccgaggtgctc

SEQ ID NO: 35877 - RNA, 27 nt, synthetic construct
  misc_feature 1..27: note = Protein kinase C delta type (286-294)
  source 1..27: mol_type = other RNA
ctgctcgccgaggccctgaaccaggtg

SEQ ID NO: 35878 - RNA, 27 nt, synthetic construct
  misc_feature 1..27: note = Protein sel-1 homolog 1 (580-588)
  source 1..27: mol_type = other RNA
ctgctcgccgagcagggctacgaggtg

SEQ ID NO: 35879 - RNA, 27 nt, synthetic construct
  misc_feature 1..27: note = BRCA1-associated ATM activator 1 (541-549)
  source 1..27: mol_type = other RNA
ctgctcgccagcgaggtgccccagctg

SEQ ID NO: 35880 - RNA, 27 nt, synthetic construct
  misc_feature 1..27: note = 15 kDa selenoprotein (21-29)
  source 1..27: mol_type = other RNA
ctgctcgccaccgtgctgcaggccgtc

SEQ ID NO: 35881 - RNA, 27 nt, synthetic construct
  misc_feature 1..27: note = Talin-1 (2250-2258)
  source 1..27: mol_type = other RNA
ctgctcgaccacgtgctgctgaccctc

SEQ ID NO: 35882 - RNA, 24 nt, synthetic construct
  misc_feature 1..24: note = Annexin A11 (433-440)
  source 1..24: mol_type = other RNA
ctgctcgacatccgcagcgagtac

SEQ ID NO: 35883 - RNA, 24 nt, synthetic construct
  misc_feature 1..24: note = U3 small nucleolar ribonucleoprotein protein IMP3 (79-86)
  source 1..24: mol_type = other RNA
ctgctcgacaagctgtacgccctg

SEQ ID NO: 35884 - RNA, 27 nt, synthetic construct
  misc_feature 1..27: note = WD repeat-containing protein 36 (605-613)
  source 1..27: mol_type = other RNA
ctgctcgacagcgcccccctgaacgtg

SEQ ID NO: 35885 - RNA, 27 nt, synthetic construct
  misc_feature 1..27: note = Group XIIA secretory phospholipase A2 (158-166)
  source 1..27: mol_type = other RNA
ctgctcttcgacagcgtgatccacctg

SEQ ID NO: 35886 - RNA, 27 nt, synthetic construct
  misc_feature 1..27: note = Ras-related GTP-binding protein A (204-212)
  source 1..27: mol_type = other RNA
ctgctcttcgagcgcgccaccttcctg

SEQ ID NO: 35887 - RNA, 27 nt, synthetic construct
  misc_feature 1..27: note = Transcription factor 20 (837-845)
  source 1..27: mol_type = other RNA
ctgctccacgaggagaacttcagcgtg

SEQ ID NO: 35888 - RNA, 27 nt, synthetic construct
  misc_feature 1..27: note = NADH dehydrogenase (ubiquinone) 1 alpha subcomplex subunit 1 (16-24)
  source 1..27: mol_type = other RNA
ctgctcatccccggcctggccaccgcc

SEQ ID NO: 35889 - RNA, 27 nt, synthetic construct
  misc_feature 1..27: note = ERO1-like protein alpha (260-268)
  source 1..27: mol_type = other RNA
ctgctcctggagatcctgcacgagatc

SEQ ID NO: 35890 - RNA, 27 nt, synthetic construct
  misc_feature 1..27: note = Staphylococcal nuclease domain-containing protein 1 (186-194)
  source 1..27: mol_type = other RNA
ctgctcctgcccgactactacctggtg

SEQ ID NO: 35891 - RNA, 33 nt, synthetic construct
  misc_feature 1..33: note = Staphylococcal nuclease domain-containing protein 1 (186-196)
  source 1..33: mol_type = other RNA
ctgctcctgcccgactactacctggtgaccgtc

SEQ ID NO: 35892 - RNA, 27 nt, synthetic construct
  misc_feature 1..27: note = Histone H2B type 2-F (101-109)
  source 1..27: mol_type = other RNA
ctgctcctgcccggcgagctggccaag

SEQ ID NO: 35893 - RNA, 27 nt, synthetic construct
  misc_feature 1..27: note = Clathrin heavy chain 1 (1422-1430)
  source 1..27: mol_type = other RNA
ctgctcatggtgctgagcccccgcctg

SEQ ID NO: 35894 - RNA, 27 nt, synthetic construct
  misc_feature 1..27: note = DNA-dependent protein kinase catalytic subunit (2454-2462)
  source 1..27: mol_type = other RNA
ctgctcaaccccgtggtcgagttcgtg

SEQ ID NO: 35895 - RNA, 27 nt, synthetic construct
  misc_feature 1..27: note = Superkiller viralicidic activity 2-like 2 (273-281)
  source 1..27: mol_type = other RNA
ctgctccccgacaacgtgcactacgtc

SEQ ID NO: 35896 - RNA, 27 nt, synthetic construct
  misc_feature 1..27: note = Homocysteine-responsive endoplasmic reticulum-resident ubiquitin-like domain member 1 protein (222-230)
  source 1..27: mol_type = other RNA
ctgctccccgagggcccgcccgccatc

SEQ ID NO: 35897 - RNA, 27 nt, synthetic construct
  misc_feature 1..27: note = Potassium channel subfamily K member 4 (365-373)
  source 1..27: mol_type = other RNA
ctgctccccccgcccccctgccccgcc

SEQ ID NO: 35898 - RNA, 27 nt, synthetic construct
  misc_feature 1..27: note = Casein kinase I isoform alpha (57-65)
  source 1..27: mol_type = other RNA
ctgctctacgagagcaagctgtacaag

SEQ ID NO: 35899 - RNA, 27 nt, synthetic construct
  misc_feature 1..27: note = Syntenin-1 (290-298)
  source 1..27: mol_type = other RNA
ctgatggaccacaccatccccgaggtg

SEQ ID NO: 35900 - RNA, 27 nt, synthetic construct
  misc_feature 1..27: note = Bombesin receptor-activated protein C6orf89 (120-128)
  source 1..27: mol_type = other RNA
ctgatgagcctccccatcgccaagaag

SEQ ID NO: 35901 - RNA, 27 nt, synthetic construct
  misc_feature 1..27: note = Constitutive coactivator of PPAR-gamma-like protein 1 (567-575)
  source 1..27: mol_type = other RNA
ctgatgtacccctacatcttccacgtg

SEQ ID NO: 35902 - RNA, 27 nt, synthetic construct
  misc_feature 1..27: note = Peripheral plasma membrane protein CASK (705-713)
  source 1..27: mol_type = other RNA
ctgcccgccttcaagcgcaagaccctc

SEQ ID NO: 35903 - RNA, 27 nt, synthetic construct
  misc_feature 1..27: note = Butyrophilin subfamily 3 member A3 secreted isoform (388-396)
  source 1..27: mol_type = other RNA
ctgcccgcccacccgggcgccgaggtg

SEQ ID NO: 35904 - RNA, 27 nt, synthetic construct
  misc_feature 1..27: note = FERM domain-containing protein 4A (166-174)
  source 1..27: mol_type = other RNA
ctgcccgccctcccgacccaggccctg

SEQ ID NO: 35905 - RNA, 27 nt, synthetic construct
  misc_feature 1..27: note = Proline-rich protein PRCC (42-50)
  source 1..27: mol_type = other RNA
ctgcccgccccgaagggccccgccctc

SEQ ID NO: 35906 - RNA, 27 nt, synthetic construct
  misc_feature 1..27: note = Serine/threonine-protein kinase SIK2 (446-454)
  source 1..27: mol_type = other RNA
ctgcccgccagcgtgcacccgcagctc

SEQ ID NO: 35907 - RNA, 33 nt, synthetic construct
  misc_feature 1..33: note = Host cell factor 1 (1377-1387)
  source 1..33: mol_type = other RNA
ctgcccgacgccaccagctcccaccgcaccgtg

SEQ ID NO: 35908 - RNA, 27 nt, synthetic construct
  misc_feature 1..27: note = Actin-related protein 2 (246-254)
  source 1..27: mol_type = other RNA
ctgcccgacggccgcatcatcaaggtg

SEQ ID NO: 35909 - RNA, 27 nt, synthetic construct
  misc_feature 1..27: note = Transducin-like enhancer protein 4 (517-525)
  source 1..27: mol_type = other RNA
ctgcccgacggccgcaccctcatcgtg

SEQ ID NO: 35910 - RNA, 33 nt, synthetic construct
  misc_feature 1..33: note = Biogenesis of lysosome-related organelles complex 1 subunit 6 (61-71)
  source 1..33: mol_type = other RNA
ctgcccgacctccagcgcagcaagcaggccctg

SEQ ID NO: 35911 - RNA, 27 nt, synthetic construct
  misc_feature 1..27: note = Integrator complex subunit 11 (441-449)
  source 1..27: mol_type = other RNA
ctgcccgaggccaagaagccgcgcctc

SEQ ID NO: 35912 - RNA, 27 nt, synthetic construct
  misc_feature 1..27: note = Queuine tRNA-ribosyltransferase subunit QTRTD1 (120-128)
  source 1..27: mol_type = other RNA
ctgcccgaggacaagccgcgcctcatc

SEQ ID NO: 35913 - RNA, 27 nt, synthetic construct
  misc_feature 1..27: note = Tyrosine-protein phosphatase non-receptor type 11 (283-291)
  source 1..27: mol_type = other RNA
ctgcccttcgaccacacccgcgtggtc

SEQ ID NO: 35914 - RNA, 27 nt, synthetic construct
  misc_feature 1..27: note = Polypyrimidine tract-binding protein 2 (91-99)
  source 1..27: mol_type = other RNA
ctgcccttcggcaaggtgaccaacatc

SEQ ID NO: 35915 - RNA, 27 nt, synthetic construct
  misc_feature 1..27: note = Nodal modulator 3 (615-623)
  source 1..27: mol_type = other RNA
ctgccccaccaccgcgtgatcgaggtc

SEQ ID NO: 35916 - RNA, 27 nt, synthetic construct
  misc_feature 1..27: note = RNA-binding protein 33 (711-719)
  source 1..27: mol_type = other RNA
ctgcccatcgccccgagccacgtgatc

SEQ ID NO: 35917 - RNA, 27 nt, synthetic construct
  misc_feature 1..27: note = Leucine-rich repeat-containing protein 59 (38-46)
  source 1..27: mol_type = other RNA
ctgcccaaggccaccatcctcgacctg

SEQ ID NO: 35918 - RNA, 27 nt, synthetic construct
  misc_feature 1..27: note = 26S proteasome non-ATPase regulatory subunit 6 (11-19)
  source 1..27: mol_type = other RNA
ctgcccaagaacccggacctccgcatc

SEQ ID NO: 35919 - RNA, 27 nt, synthetic construct
  misc_feature 1..27: note = Telomerase protein component 1 (671-679)
  source 1..27: mol_type = other RNA
ctgcccctcctgccgggccgcaccgtg

SEQ ID NO: 35920 - RNA, 27 nt, synthetic construct
  misc_feature 1..27: note = Transcription factor Sp3 (515-523)
  source 1..27: mol_type = other RNA
ctgcccaacctccagaccgtgaccgtc

SEQ ID NO: 35921 - RNA, 27 nt, synthetic construct
  misc_feature 1..27: note = Eukaryotic initiation factor 4A-III (354-362)
  source 1..27: mol_type = other RNA
ctgcccaacaaccgcgagctctacatc

SEQ ID NO: 35922 - RNA, 24 nt, synthetic construct
  misc_feature 1..24: note = eIF-2-alpha kinase activator GCN1 (1363-1370)
  source 1..24: mol_type = other RNA
ctgcccccgctcgtgcccgccatc

SEQ ID NO: 35923 - RNA, 27 nt, synthetic construct
  misc_feature 1..27: note = E3 ubiquitin-protein ligase RNF181 (50-58)
  source 1..27: mol_type = other RNA
ctgcccccgcccgccgccaagaccgtg

SEQ ID NO: 35924 - RNA, 27 nt, synthetic construct
  misc_feature 1..27: note = Mediator of RNA polymerase II transcription subunit 7 (10-18)
  source 1..27: mol_type = other RNA
ctgcccccgccccccatgcagtacatc

SEQ ID NO: 35925 - RNA, 27 nt, synthetic construct
  misc_feature 1..27: note = Crooked neck-like protein 1 (45-53)
  source 1..27: mol_type = other RNA
ctgcccccgcccccccagcagaagatc

SEQ ID NO: 35926 - RNA, 27 nt, synthetic construct
  misc_feature 1..27: note = Terminal uridylyltransferase 7 (284-292)
  source 1..27: mol_type = other RNA
ctgcccccgcccacccccagccagatc

SEQ ID NO: 35927 - RNA, 27 nt, synthetic construct
  misc_feature 1..27: note = Transcription elongation factor SPT4 (93-101)
  source 1..27: mol_type = other RNA
ctgccccagggcatcgtgcgcgagctc

SEQ ID NO: 35928 - RNA, 30 nt, synthetic construct
  misc_feature 1..30: note = Homeobox protein TGIF2 (105-114)
  source 1..30: mol_type = other RNA
ctgccccgcggcagctccccgagcgtgctc

SEQ ID NO: 35929 - RNA, 27 nt, synthetic construct
  misc_feature 1..27: note = ATP-dependent RNA helicase DHX36 (300-308)
  source 1..27: mol_type = other RNA
ctgccccgcaagcagggcagcatcctc

SEQ ID NO: 35930 - RNA, 27 nt, synthetic construct
  misc_feature 1..27: note = Carnitine O-palmitoyltransferase 1, liver isoform (171-179)
  source 1..27: mol_type = other RNA
ctgccccgcctcccggtgcccgccgtc

SEQ ID NO: 35931 - RNA, 30 nt, synthetic construct
  misc_feature 1..30: note = Beta-hexosaminidase subunit beta (8-17)
  source 1..30: mol_type = other RNA
ctgccccgcccgcccatgctcctggccctg

SEQ ID NO: 35932 - RNA, 27 nt, synthetic construct
  misc_feature 1..27: note = cGMP-inhibited 3',5'-cyclic phosphodiesterase B (240-248)
  source 1..27: mol_type = other RNA
ctgcccagcgccctccgcccgctgctg

SEQ ID NO: 35933 - RNA, 30 nt, synthetic construct
  misc_feature 1..30: note = Polymerase delta-interacting protein 3 (241-250)
  source 1..30: mol_type = other RNA
ctgcccagctccatccgcaccaaggccctc

SEQ ID NO: 35934 - RNA, 24 nt, synthetic construct
  misc_feature 1..24: note = Runt-related transcription factor 2 (116-123)
  source 1..24: mol_type = other RNA
ctgcccgtggccttcaaggtcgtg

SEQ ID NO: 35935 - RNA, 27 nt, synthetic construct
  misc_feature 1..27: note = THUMP domain-containing protein 3 (124-132)
  source 1..27: mol_type = other RNA
ctgccctggagcaacccgctcaaggtg

SEQ ID NO: 35936 - RNA, 27 nt, synthetic construct
  misc_feature 1..27: note = Peptidyl-prolyl cis-trans isomerase FKBP4 (200-208)
  source 1..27: mol_type = other RNA
ctgccctacggcctcgagcgcgccatc

SEQ ID NO: 35937 - RNA, 24 nt, synthetic construct
  misc_feature 1..24: note = eIF-2-alpha kinase activator GCN1 (2077-2084)
  source 1..24: mol_type = other RNA
ctgccctacctcgtgccgaagctg

SEQ ID NO: 35938 - RNA, 24 nt, synthetic construct
  misc_feature 1..24: note = E3 ubiquitin-protein ligase UBR4 (260-267)
  source 1..24: mol_type = other RNA
ctgccctaccagatcaagaagatc

SEQ ID NO: 35939 - RNA, 30 nt, synthetic construct
  misc_feature 1..30: note = Lysyl oxidase homolog 3 (408-417)
  source 1..30: mol_type = other RNA
ctgccctacaccggcgccgagacccgcatc

SEQ ID NO: 35940 - RNA, 27 nt, synthetic construct
  misc_feature 1..27: note = Histone acetyltransferase KAT6B (711-719)
  source 1..27: mol_type = other RNA
ctgagcgacctcggccgcctgtcctac

SEQ ID NO: 35941 - RNA, 27 nt, synthetic construct
  misc_feature 1..27: note = Phosphatidylinositide phosphatase SAC2 (667-675)
  source 1..27: mol_type = other RNA
ctgagcctcgagaacctggagaagatc

SEQ ID NO: 35942 - RNA, 33 nt, synthetic construct
  misc_feature 1..33: note = Serpin B6 (76-86)
  source 1..33: mol_type = other RNA
ctgaccgaggtgaacaagaccggcacgcagtac

SEQ ID NO: 35943 - RNA, 30 nt, synthetic construct
  misc_feature 1..30: note = Heat shock-related 70 kDa protein 2 (213-222)
  source 1..30: mol_type = other RNA
ctgaccatcgaggacggcatcttcgaggtg

SEQ ID NO: 35944 - RNA, 30 nt, synthetic construct
  misc_feature 1..30: note = Heat shock protein HSP 90-beta (36-45)
  source 1..30: mol_type = other RNA
ctggtggacaccggcatcgggatgaccaag

SEQ ID NO: 35945 - RNA, 27 nt, synthetic construct
  misc_feature 1..27: note = Interleukin-32 (97-105)
  source 1..27: mol_type = other RNA
ctggtgcacgccgtccaggccctctgg

SEQ ID NO: 35946 - RNA, 27 nt, synthetic construct
  misc_feature 1..27: note = Protein diaphanous homolog 1 (1090-1098)
  source 1..27: mol_type = other RNA
ctgtacaaggagctcggcgagtacttc

SEQ ID NO: 35947 - RNA, 27 nt, synthetic construct
  misc_feature 1..27: note = AKT-interacting protein (116-124)
  source 1..27: mol_type = other RNA
ctgtaccaggacggcgtgttcaagttc

SEQ ID NO: 35948 - RNA, 24 nt, synthetic construct
  misc_feature 1..24: note = HLA class I histocompatibility antigen, Cw-3 alpha chain (4-11)
  source 1..24: mol_type = other RNA
atggccccccgcaccctgatcctc

SEQ ID NO: 35949 - RNA, 27 nt, synthetic construct
  misc_feature 1..27: note = Charged multivesicular body protein 2a (127-135)
  source 1..27: mol_type = other RNA
atggagttcgagcgccaggccgagatc

SEQ ID NO: 35950 - RNA, 27 nt, synthetic construct
  misc_feature 1..27: note = Bifunctional glutamate/proline-tRNA ligase (487-495)
  source 1..27: mol_type = other RNA
atggagtgggacaagatctgggccttc

SEQ ID NO: 35951 - RNA, 27 nt, synthetic construct
  misc_feature 1..27: note = Sodium-coupled neutral amino acid transporter 1 (2-10)
  source 1..27: mol_type = other RNA
atgcacttcaagagcggcctggagctc

SEQ ID NO: 35952 - RNA, 27 nt, synthetic construct
  misc_feature 1..27: note = Nucleoside diphosphate kinase A (68-76)
  source 1..27: mol_type = other RNA
atgcacagcggccccgtggtcgccatg

SEQ ID NO: 35953 - RNA, 33 nt, synthetic construct
  misc_feature 1..33: note = Cytochrome b (53-63)
  source 1..33: mol_type = other RNA
atgcactacagccccgacgcctccaccgccttc

SEQ ID NO: 35954 - RNA, 27 nt, synthetic construct
  misc_feature 1..27: note = Lysosomal protective protein (1-9)
  source 1..27: mol_type = other RNA
atgatccgcgccgcccccccgcccctg

SEQ ID NO: 35955 - RNA, 27 nt, synthetic construct
  misc_feature 1..27: note = 78 kDa glucose-regulated protein (1-9)
  source 1..27: mol_type = other RNA
atgaagctgagcctcgtggccgccatg

SEQ ID NO: 35956 - RNA, 27 nt, synthetic construct
  misc_feature 1..27: note = Putative uncharacterized protein ZNF436-AS1 (1-9)
  source 1..27: mol_type = other RNA
atgctggccgtgcccgtccgcctcaag

SEQ ID NO: 35957 - RNA, 27 nt, synthetic construct
  misc_feature 1..27: note = Transformation/transcription domain-associated protein (1824-1832)
  source 1..27: mol_type = other RNA
atgctggacagcctccgcatctacctg

SEQ ID NO: 35958 - RNA, 33 nt, synthetic construct
  misc_feature 1..33: note = Ubiquitin carboxyl-terminal hydrolase 11 (568-578)
  source 1..33: mol_type = other RNA
atgctgttcggccaccccctcctggtgagcgtc

SEQ ID NO: 35959 - RNA, 24 nt, synthetic construct
  misc_feature 1..24: note = Beta-1-syntrophin (41-48)
  source 1..24: mol_type = other RNA
atgcccatcctgatcagcaagatc

SEQ ID NO: 35960 - RNA, 27 nt, synthetic construct
  misc_feature 1..27: note = Neuroblast differentiation-associated protein AHNAK (882-890)
  source 1..27: mol_type = other RNA
atgcccaagttcagcatgccgggcttc

SEQ ID NO: 35961 - RNA, 27 nt, synthetic construct
  misc_feature 1..27: note = Neuroblast differentiation-associated protein AHNAK (2766-2774)
  source 1..27: mol_type = other RNA
atgcccaagatcaagatgccgaagatc

SEQ ID NO: 35962 - RNA, 27 nt, synthetic construct
  misc_feature 1..27: note = Synergin gamma (422-430)
  source 1..27: mol_type = other RNA
atgcccctgccgggcaccaaggccctc

SEQ ID NO: 35963 - RNA, 27 nt, synthetic construct
  misc_feature 1..27: note = Cyclin-dependent kinase 6 (54-62)
  source 1..27: mol_type = other RNA
atgcccctgagcaccatccgcgaggtg

SEQ ID NO: 35964 - RNA, 27 nt, synthetic construct
  misc_feature 1..27: note = Type II inositol 3,4-bisphosphate 4-phosphatase (788-796)
  source 1..27: mol_type = other RNA
atgcccccggactacatcagccacttc

SEQ ID NO: 35965 - RNA, 27 nt, synthetic construct
  misc_feature 1..27: note = Double-strand-break repair protein rad21 homolog (468-476)
  source 1..27: mol_type = other RNA
atgcccccgccccccccccagggcgtg

SEQ ID NO: 35966 - RNA, 27 nt, synthetic construct
  misc_feature 1..27: note = Eukaryotic initiation factor 4A-III (311-319)
  source 1..27: mol_type = other RNA
atgccccagaaggagcgcgagagcatc

SEQ ID NO: 35967 - RNA, 30 nt, synthetic construct
  misc_feature 1..30: note = Mitotic-spindle organizing protein 2A (99-108)
  source 1..30: mol_type = other RNA
atgccccgccagccgagcgccacccggctg

SEQ ID NO: 35968 - RNA, 27 nt, synthetic construct
  misc_feature 1..27: note = UDP-N-acetylglucosamine-peptide N-acetylglucosaminyltransferase 110 kDa subunit (774-782)
  source 1..27: mol_type = other RNA
atgcccgtgatcccgatgaacaccatc

SEQ ID NO: 35969 - RNA, 27 nt, synthetic construct
  misc_feature 1..27: note = Protein diaphanous homolog 1 (845-853)
  source 1..27: mol_type = other RNA
atgccctaccaggagatcaagaacgtg

SEQ ID NO: 35970 - RNA, 27 nt, synthetic construct
  misc_feature 1..27: note = Prelamin-A/C (199-207)
  source 1..27: mol_type = other RNA
atgcgcgcccggatgcagcagcagctg

SEQ ID NO: 35971 - RNA, 27 nt, synthetic construct
  misc_feature 1..27: note = Transcobalamin-2 (1-9)
  source 1..27: mol_type = other RNA
atgcgccacctgggcgccttcctcttc

SEQ ID NO: 35972 - RNA, 27 nt, synthetic construct
  misc_feature 1..27: note = Suppressor of SWI4 1 homolog (100-108)
  source 1..27: mol_type = other RNA
atgcgcctgcccggcgggccgaccctc

SEQ ID NO: 35973 - RNA, 27 nt, synthetic construct
  misc_feature 1..27: note = Calcium/calmodulin-dependent protein kinase II inhibitor 1 (17-25)
  source 1..27: mol_type = other RNA
atgaccgacaaggcccccccgggcgtg

SEQ ID NO: 35974 - RNA, 27 nt, synthetic construct
  misc_feature 1..27: note = Insulin receptor substrate 2 (543-551)
  source 1..27: mol_type = other RNA
atgaccatggaccgccccctgagccac

SEQ ID NO: 35975 - RNA, 27 nt, synthetic construct
  misc_feature 1..27: note = Necdin (58-66)
  source 1..27: mol_type = other RNA
atggtgaaggacgtcatcggcagctac

SEQ ID NO: 35976 - RNA, 36 nt, synthetic construct
  misc_feature 1..36: note = ATP-citrate synthase (529-540)
  source 1..36: mol_type = other RNA
atggtgtaccccttcaccggcgaccacaagcagaag

SEQ ID NO: 35977 - RNA, 27 nt, synthetic construct
  misc_feature 1..27: note = Melanoma-associated antigen D2 (110-118)
  source 1..27: mol_type = other RNA
aacgccgacccccaggccgtgaccatg

SEQ ID NO: 35978 - RNA, 27 nt, synthetic construct
  misc_feature 1..27: note = FERM domain-containing protein 8 (198-206)
  source 1..27: mol_type = other RNA
aacgcctaccgccaggtgcaggaggtc

SEQ ID NO: 35979 - RNA, 27 nt, synthetic construct
  misc_feature 1..27: note = Rapamycin-insensitive companion of mTOR (139-147)
  source 1..27: mol_type = other RNA
aacgaggtggagcgcacccaggccctg

SEQ ID NO: 35980 - RNA, 27 nt, synthetic construct
  misc_feature 1..27: note = 26S protease regulatory subunit 4 (119-127)
  source 1..27: mol_type = other RNA
aaccacgccatcgtgagcacctccgtc

SEQ ID NO: 35981 - RNA, 24 nt, synthetic construct
  misc_feature 1..24: note = Serine/threonine-protein phosphatase 2A catalytic subunit beta isoform (229-236)
  source 1..24: mol_type = other RNA
aaccacgccaacggcctgaccctc

SEQ ID NO: 35982 - RNA, 30 nt, synthetic construct
  misc_feature 1..30: note = Transcription factor 4 (402-411)
  source 1..30: mol_type = other RNA
aaccacgccgtgggccccagcaccgccatg

SEQ ID NO: 35983 - RNA, 27 nt, synthetic construct
  misc_feature 1..27: note = Translationally-controlled tumor protein (75-83)
  source 1..27: mol_type = other RNA
aaccaccacctgcaggagaccagcttc

SEQ ID NO: 35984 - RNA, 27 nt, synthetic construct
  misc_feature 1..27: note = SHC-transforming protein 4 (284-292)
  source 1..27: mol_type = other RNA
aaccaccacatgcagagcatctccttc

SEQ ID NO: 35985 - RNA, 27 nt, synthetic construct
  misc_feature 1..27: note = E3 ubiquitin-protein ligase synoviolin (308-316)
  source 1..27: mol_type = other RNA
aaccacatcttccacaccagctgcctg

SEQ ID NO: 35986 - RNA, 27 nt, synthetic construct
  misc_feature 1..27: note = Dedicator of cytokinesis protein 8 (737-745)
  source 1..27: mol_type = other RNA
aaccacctggagaagttcttcaccctc

SEQ ID NO: 35987 - RNA, 27 nt, synthetic construct
  misc_feature 1..27: note = Cytochrome c oxidase subunit 6C (21-29)
  source 1..27: mol_type = other RNA
aaccacatggccgtggccttcgtcctg

SEQ ID NO: 35988 - RNA, 27 nt, synthetic construct
  misc_feature 1..27: note = Ankyrin repeat domain-containing protein 54 (187-195)
  source 1..27: mol_type = other RNA
aaccacgtgcccgtcatcaccaccctg

SEQ ID NO: 35989 - RNA, 30 nt, synthetic construct
  misc_feature 1..30: note = Transcription factor jun-B (150-159)
  source 1..30: mol_type = other RNA
aaccacgtgacccccccgaacgtcagcctg

SEQ ID NO: 35990 - RNA, 27 nt, synthetic construct
  misc_feature 1..27: note = Periodic tryptophan protein 2 homolog (866-874)
  source 1..27: mol_type = other RNA
aaccactacaacatgcagtacgccctg

SEQ ID NO: 35991 - RNA, 27 nt, synthetic construct
  misc_feature 1..27: note = Alpha-2-macroglobulin receptor-associated protein (292-300)
  source 1..27: mol_type = other RNA
aaccactaccagaagcagctggagatc

SEQ ID NO: 35992 - RNA, 27 nt, synthetic construct
  misc_feature 1..27: note = Protein SCAF11 (912-920)
  source 1..27: mol_type = other RNA
aacatcttcccctacccggtgggcgtc

SEQ ID NO: 35993 - RNA, 27 nt, synthetic construct
  misc_feature 1..27: note = RUS1 family protein C16orf58 (197-205)
  source 1..27: mol_type = other RNA
aacctggccaagtgcatcgtgagcgtc

SEQ ID NO: 35994 - RNA, 27 nt, synthetic construct
  misc_feature 1..27: note = Pterin-4-alpha-carbinolamine dehydratase (19-27)
  source 1..27: mol_type = other RNA
aacctggccagcttcatcgagcaggtg

SEQ ID NO: 35995 - RNA, 27 nt, synthetic construct
  misc_feature 1..27: note = E3 ubiquitin-protein ligase RNF123 (595-603)
  source 1..27: mol_type = other RNA
aacctgttcgaccgcgtggtcaccctc

SEQ ID NO: 35996 - RNA, 27 nt, synthetic construct
  misc_feature 1..27: note = Plastin-3 (327-335)
  source 1..27: mol_type = other RNA
aacctgttcaacaagtaccccgccctc

SEQ ID NO: 35997 - RNA, 30 nt, synthetic construct
  misc_feature 1..30: note = THO complex subunit 2 (162-171)
  source 1..30: mol_type = other RNA
aacctgatcgacctcgacgacctgtacgtg

SEQ ID NO: 35998 - RNA, 27 nt, synthetic construct
  misc_feature 1..27: note = Tyrosine-protein phosphatase non-receptor type 13 (472-480)
  source 1..27: mol_type = other RNA
aacctgatcaaccaggagatcatgctc

SEQ ID NO: 35999 - RNA, 27 nt, synthetic construct
  misc_feature 1..27: note = Trifunctional purine biosynthetic protein adenosine-3 (39-47)
  source 1..27: mol_type = other RNA
aacctgatcagcgccctcgaggaggcc

SEQ ID NO: 36000 - RNA, 27 nt, synthetic construct
  misc_feature 1..27: note = Protein virilizer homolog (623-631)
  source 1..27: mol_type = other RNA
aacctgctcgaggaggtgttccacctg

SEQ ID NO: 36001 - RNA, 27 nt, synthetic construct
  misc_feature 1..27: note = Chloride intracellular channel protein 5 (187-195)
  source 1..27: mol_type = other RNA
aacctgctccccaagctgcacgtggtc

SEQ ID NO: 36002 - RNA, 27 nt, synthetic construct
  misc_feature 1..27: note = PHD finger protein 20-like protein 1 (210-218)
  source 1..27: mol_type = other RNA
aacctgctcacccacatcgagaacgtg

SEQ ID NO: 36003 - RNA, 27 nt, synthetic construct
  misc_feature 1..27: note = AP-3 complex subunit mu-2 (268-276)
  source 1..27: mol_type = other RNA
aacctggtggccatccccgtctacgtg

SEQ ID NO: 36004 - RNA, 30 nt, synthetic construct
  misc_feature 1..30: note = 55 kDa erythrocyte membrane protein (337-346)
  source 1..30: mol_type = other RNA
aacatgttcggcaccaagttcgagaccgtg

SEQ ID NO: 36005 - RNA, 27 nt, synthetic construct
  misc_feature 1..27: note = Tetratricopeptide repeat protein 4 (260-268)
  source 1..27: mol_type = other RNA
aacccccacggcgcccgcctgagcctc

SEQ ID NO: 36006 - RNA, 27 nt, synthetic construct
  misc_feature 1..27: note = General transcription factor 3C polypeptide 1 (336-344)
  source 1..27: mol_type = other RNA
aaccccaaggagagctccagctccctg

SEQ ID NO: 36007 - RNA, 33 nt, synthetic construct
  misc_feature 1..33: note = Talin-1 (1623-1633)
  source 1..33: mol_type = other RNA
aacccccgcgacccgcccagctggtccgtgctg

SEQ ID NO: 36008 - RNA, 33 nt, synthetic construct
  misc_feature 1..33: note = Roundabout homolog 1 (1497-1507)
  source 1..33: mol_type = other RNA
aacccccgcgacccgagctccagctccagcatg

SEQ ID NO: 36009 - RNA, 27 nt, synthetic construct
  misc_feature 1..27: note = Clathrin interactor 1 (379-387)
  source 1..27: mol_type = other RNA
aaccaggcccccagcggcccggtggcc

SEQ ID NO: 36010 - RNA, 27 nt, synthetic construct
  misc_feature 1..27: note = Coiled-coil domain-containing protein 134 (154-162)
  source 1..27: mol_type = other RNA
aaccagggcccccacagcccgatcctg

SEQ ID NO: 36011 - RNA, 27 nt, synthetic construct
  misc_feature 1..27: note = Transcription factor p65 (186-194)
  source 1..27: mol_type = other RNA
aaccgcgcccccaacaccgccgagctg

SEQ ID NO: 36012 - RNA, 27 nt, synthetic construct
  misc_feature 1..27: note = Putative methyltransferase NSUN3 (57-65)
  source 1..27: mol_type = other RNA
aaccgcttcaactaccccttcgagctg

SEQ ID NO: 36013 - RNA, 27 nt, synthetic construct
  misc_feature 1..27: note = Toll-like receptor 9 (425-433)
  source 1..27: mol_type = other RNA
aaccgcatcagcggcgcctccgagctg

SEQ ID NO: 36014 - RNA, 27 nt, synthetic construct
  misc_feature 1..27: note Dolichyl-diphosphooligosaccharide-proteinosyltransferase subunit 2 (618-626)
  source 1..27: mol_type = other RNA
aaccgcatgctggcccagcaggccgtg

SEQ ID NO: 36015 - RNA, 27 nt, synthetic construct
  misc_feature 1..27: note Dolichyl-diphosphooligosaccharide-proteinosyltransferase subunit 2 (358-366)
  source 1..27: mol_type = other RNA
aacgtggccgacgtcgtgatcaagttc

SEQ ID NO: 36016 - RNA, 27 nt, synthetic construct
  misc_feature 1..27: note = Calcium homeostasis endoplasmic reticulum protein (14-22)
  source 1..27: mol_type = other RNA
aacgtgatcgacaagctggcccagttc

SEQ ID NO: 36017 - RNA, 30 nt, synthetic construct
  misc_feature 1..30: note = E3 ubiquitin-protein ligase DTX3L (376-385)
  source 1..30: mol_type = other RNA
aacgtgatcgaggtcgacagcgcccactac

SEQ ID NO: 36018 - RNA, 27 nt, synthetic construct
  misc_feature 1..27: note = U5 small nuclear ribonucleoprotein 200 kDa helicase (1517-1525)
  source 1..27: mol_type = other RNA
aacgtgcgccccgtcccgctggagctc

SEQ ID NO: 36019 - RNA, 27 nt, synthetic construct
  misc_feature 1..27: note = Arf-GAP with SH3 domain, ANK repeat and PH domain-containing protein 1 (87-95)
  source 1..27: mol_type = other RNA
aactacgcccaggtgctggacaagttc

SEQ ID NO: 36020 - RNA, 27 nt, synthetic construct
  misc_feature 1..27: note = GRB2-related adapter protein (100-108)
  source 1..27: mol_type = other RNA
aactacggcgaccaggtgcagcacttc

SEQ ID NO: 36021 - RNA, 27 nt, synthetic construct
  misc_feature 1..27: note = Heat shock protein HSP 90-alpha (249-257)
  source 1..27: mol_type = other RNA
aactacaagaagttctacgagcagttc

SEQ ID NO: 36022 - RNA, 27 nt, synthetic construct
  misc_feature 1..27: note = Fructosamine-3-kinase (284-292)
  source 1..27: mol_type = other RNA
aactacctgaaccactggaaccacttc

SEQ ID NO: 36023 - RNA, 33 nt, synthetic construct
  misc_feature 1..33: note = SEC14-like protein 1 (424-434)
  source 1..33: mol_type = other RNA
aactaccccgagaccctgggccgcctcctgatc

SEQ ID NO: 36024 - RNA, 30 nt, synthetic construct
  misc_feature 1..30: note = TATA element modulatory factor (751-760)
  source 1..30: mol_type = other RNA
caggaggccgagaaccgcaaccaggagctg

SEQ ID NO: 36025 - RNA, 27 nt, synthetic construct
  misc_feature 1..27: note = Threonine-tRNA ligase, cytoplasmic (318-326)
  source 1..27: mol_type = other RNA
caggagctgtacttcttccacgagctc

SEQ ID NO: 36026 - RNA, 30 nt, synthetic construct
  misc_feature 1..30: note = Nuclear autoantigen Sp-100 (132-141)
  source 1..30: mol_type = other RNA
caggagtaccccgacctgatccacatctac

SEQ ID NO: 36027 - RNA, 27 nt, synthetic construct
  misc_feature 1..27: note = Myosin-9 (709-717)
  source 1..27: mol_type = other RNA
cagggcttccccaaccgcgtggtcttc

SEQ ID NO: 36028 - RNA, 27 nt, synthetic construct
  misc_feature 1..27: note = MOB kinase activator 1A (165-173)
  source 1..27: mol_type = other RNA
cagcacttcgacagcgtgatgcagctg

SEQ ID NO: 36029 - RNA, 27 nt, synthetic construct
  misc_feature 1..27: note = ATP-citrate synthase (996-1004)
  source 1..27: mol_type = other RNA
cagcacttccccgccaccccgctgctc

SEQ ID NO: 36030 - RNA, 30 nt, synthetic construct
  misc_feature 1..30: note = Cullin-3 (489-498)
  source 1..30: mol_type = other RNA
cagcacctgcaggccaccggcgtgagcctc

SEQ ID NO: 36031 - RNA, 27 nt, synthetic construct
  misc_feature 1..27: note = Angio-associated migratory cell protein (356-364)
  source 1..27: mol_type = other RNA
cagcaccagagcggcatcgtgcagctg

SEQ ID NO: 36032 - RNA, 27 nt, synthetic construct
  misc_feature 1..27: note = Protein PML (767-775)
  source 1..27: mol_type = other RNA
cagcacgtgtaccccttcagctccctg

SEQ ID NO: 36033 - RNA, 27 nt, synthetic construct
  misc_feature 1..27: note = Solute carrier family 41 member 3 (91-99)
  source 1..27: mol_type = other RNA
cagcactggcccgtgttcgtcgaggtg

SEQ ID NO: 36034 - RNA, 27 nt, synthetic construct
  misc_feature 1..27: note = Putative Polycomb group protein ASXL2 (1383-1391)
  source 1..27: mol_type = other RNA
cagatcctgcccaagccgctcaccaag

SEQ ID NO: 36035 - RNA, 27 nt, synthetic construct
  misc_feature 1..27: note = Programmed cell death 6-interacting protein (435-443)
  source 1..27: mol_type = other RNA
cagctgatcaaggagctccccgagctg

SEQ ID NO: 36036 - RNA, 27 nt, synthetic construct
  misc_feature 1..27: note = Dynactin subunit 1 (1167-1175)
  source 1..27: mol_type = other RNA
cagctgatggagcaggtggcccagctc

SEQ ID NO: 36037 - RNA, 27 nt, synthetic construct
  misc_feature 1..27: note = E3 ubiquitin-protein ligase DTX3L (447-455)
  source 1..27: mol_type = other RNA
cagctgatgcgcgaggtgctcctgctg

SEQ ID NO: 36038 - RNA, 27 nt, synthetic construct
  misc_feature 1..27: note = Non-specific lipid-transfer protein (539-547)
  source 1..27: mol_type = other RNA
cagctgcagcccggcaacgccaagctc

SEQ ID NO: 36039 - RNA, 27 nt, synthetic construct
  misc_feature 1..27: note = Poly (ADP-ribose) polymerase 14 (218-226)
  source 1..27: mol_type = other RNA
cagctgagcccccgcctcctggaggtg

SEQ ID NO: 36040 - RNA, 27 nt, synthetic construct
  misc_feature 1..27: note = Protein ZGRF1 (2047-2055)
  source 1..27: mol_type = other RNA
cagctgtggggccgcgtgatccagcac

SEQ ID NO: 36041 - RNA, 27 nt, synthetic construct
  misc_feature 1..27: note = Myosin-10 (655-663)
  source 1..27: mol_type = other RNA
cagctgtacaaggagagcctcaccaag

SEQ ID NO: 36042 - RNA, 27 nt, synthetic construct
  misc_feature 1..27: note = Signal recognition particle subunit SRP72 (247-255)
  source 1..27: mol_type = other RNA
cagctgtacaaccagatcatcaagctc

SEQ ID NO: 36043 - RNA, 27 nt, synthetic construct
  misc_feature 1..27: note = Casein kinase I isoform alpha (119-127)
  source 1..27: mol_type = other RNA
cagatgatcagccgcatcgagtacgtg

SEQ ID NO: 36044 - RNA, 30 nt, synthetic construct
  misc_feature 1..30: note = rRNA 2'-O-methyltransferase fibrillarin (236-245)
  source 1..30: mol_type = other RNA
cagcccgaccagacccgcatcgtggccctg

SEQ ID NO: 36045 - RNA, 27 nt, synthetic construct
  misc_feature 1..27: note = Eukaryotic translation initiation factor 4 gamma 3 (664-672)
  source 1..27: mol_type = other RNA
cagcccaagctgccgatgcgcaccctc

SEQ ID NO: 36046 - RNA, 27 nt, synthetic construct
  misc_feature 1..27: note = Activating transcription factor 7-interacting protein 1 (787-795)
  source 1..27: mol_type = other RNA
cagcccctgccggtgatcctccacgtc

SEQ ID NO: 36047 - RNA, 27 nt, synthetic construct
  misc_feature 1..27: note = Transmembrane emp24 domain-containing protein 5 (50-58)
  source 1..27: mol_type = other RNA
cagcccatgccgctgaaggccagcctc

SEQ ID NO: 36048 - RNA, 27 nt, synthetic construct
  misc_feature 1..27: note = E3 ubiquitin-protein ligase RNF31 (125-133)
  source 1..27: mol_type = other RNA
cagccccgcccgcagagcacctccctg

SEQ ID NO: 36049 - RNA, 30 nt, synthetic construct
  misc_feature 1..30: note = Nuclear factor of activated T-cells, cytoplasmic 2 (486-495)
  source 1..30: mol_type = other RNA
cagccctactacccgcagcaccccatggtg

SEQ ID NO: 36050 - RNA, 27 nt, synthetic construct
  misc_feature 1..27: note = Threonylcarbamoyladenosine tRNA methylthiotransferase (88-96)
  source 1..27: mol_type = other RNA
cagcagatcgaccgcgtggtcgaggtg

SEQ ID NO: 36051 - RNA, 27 nt, synthetic construct
  misc_feature 1..27: note = 60S ribosomal protein L26 (65-73)
  source 1..27: mol_type = other RNA
cagcagatcggcaaggtggtccaggtg

SEQ ID NO: 36052 - RNA, 27 nt, synthetic construct
  misc_feature 1..27: note = Long-chain-fatty-acid-CoA ligase 3 (405-413)
  source 1..27: mol_type = other RNA
cagcgcaacctgttcatcctcgcctac

SEQ ID NO: 36053 - RNA, 27 nt, synthetic construct
  misc_feature 1..27: note = B-cell receptor-associated protein 29 (101-109)
  source 1..27: mol_type = other RNA
cagcgcaacctgtacatcagcggcttc

SEQ ID NO: 36054 - RNA, 33 nt, synthetic construct
  misc_feature 1..33: note = Nucleolar RNA helicase 2 (558-568)
  source 1..33: mol_type = other RNA
cagcgcagcctgatcaactccaacgtgggcttc

SEQ ID NO: 36055 - RNA, 27 nt, synthetic construct
  misc_feature 1..27: note = GPI transamidase component PIG-T (351-359)
  source 1..27: mol_type = other RNA
cagcgctacgtgagcggctacgggctg

SEQ ID NO: 36056 - RNA, 36 nt, synthetic construct
  misc_feature 1..36: note = Zinc finger protein 143 (64-75)
  source 1..36: mol_type = other RNA
caggtgatccagctggaggacggcagcgccgcctac

SEQ ID NO: 36057 - RNA, 27 nt, synthetic construct
  misc_feature 1..27: note = mRNA cap guanine-N7 methyltransferase (448-456)
  source 1..27: mol_type = other RNA
caggtgcgcctgcccctcggcaccctg

SEQ ID NO: 36058 - RNA, 27 nt, synthetic construct
  misc_feature 1..27: note = Elongation of very long chain fatty acids protein 1 (201-209)
  source 1..27: mol_type = other RNA
cagtaccccgtgatcatccacctgatc

SEQ ID NO: 36059 - RNA, 27 nt, synthetic construct
  misc_feature 1..27: note = Arf-GAP with SH3 domain, ANK repeat and PH domain-containing protein 2 (74-82)
  source 1..27: mol_type = other RNA
cagtacacccaggccctggagaagttc

SEQ ID NO: 36060 - RNA, 27 nt, synthetic construct
  misc_feature 1..27: note = Telomerase protein component 1 (820-828)
  source 1..27: mol_type = other RNA
cgcgccgccccccaccggatcagcctg

SEQ ID NO: 36061 - RNA, 27 nt, synthetic construct
  misc_feature 1..27: note = MICOS complex subunit MIC60 (432-440)
  source 1..27: mol_type = other RNA
cgcgccttcgacagcgccgtggcgaag

SEQ ID NO: 36062 - RNA, 30 nt, synthetic construct
  misc_feature 1..30: note = Uromodulin (615-624)
  source 1..30: mol_type = other RNA
cgcgccttcagctccctgggcctcctgaag

SEQ ID NO: 36063 - RNA, 27 nt, synthetic construct
  misc_feature 1..27: note = Signal transducer CD24 (3-11)
  source 1..27: mol_type = other RNA
cgcgccatggtggcccggctgggcctc

SEQ ID NO: 36064 - RNA, 27 nt, synthetic construct
  misc_feature 1..27: note = Eukaryotic translation initiation factor 4H (185-193)
  source 1..27: mol_type = other RNA
cgcgcccagcggccccgcctgcagctc

SEQ ID NO: 36065 - RNA, 27 nt, synthetic construct
  misc_feature 1..27: note = Cytochrome b-c1 complex subunit 8 (25-33)
  source 1..27: mol_type = other RNA
cgcgcctacccccacgtgttcaccaag

SEQ ID NO: 36066 - RNA, 30 nt, synthetic construct
  misc_feature 1..30: note = CLIP-associating protein 1 (519-528)
  source 1..30: mol_type = other RNA
cgcgaggccgagcacctgtaccacaccctc

SEQ ID NO: 36067 - RNA, 27 nt, synthetic construct
  misc_feature 1..27: note = Integrin alpha-6 (29-37)
  source 1..27: mol_type = other RNA
cgcgaggacaacgtgatccggaagtac

SEQ ID NO: 36068 - RNA, 27 nt, synthetic construct
  misc_feature 1..27: note = Eukaryotic initiation factor 4A-III (260-268)
  source 1..27: mol_type = other RNA
cgcgaggagtggaagttcgacaccctg

SEQ ID NO: 36069 - RNA, 33 nt, synthetic construct
  misc_feature 1..33: note = TCF3 fusion partner (90-100)
  source 1..33: mol_type = other RNA
cgcgagatcgagcaggtgaacgagcgggtcctg

SEQ ID NO: 36070 - RNA, 33 nt, synthetic construct
  misc_feature 1..33: note = Ataxin-2-like protein (324-334)
  source 1..33: mol_type = other RNA
cgcgagatcgagagctccccccagtaccggctg

SEQ ID NO: 36071 - RNA, 33 nt, synthetic construct
  misc_feature 1..33: note = NF-kappa-B essential modulator (319-329)
  source 1..33: mol_type = other RNA
cgcgagaagctggccgagaagaaggagctcctg

SEQ ID NO: 36072 - RNA, 30 nt, synthetic construct
  misc_feature 1..30: note = ER membrane protein complex subunit 7 (192-201)
  source 1..30: mol_type = other RNA
cgcgagatggagcagagcatgaacatgctg

SEQ ID NO: 36073 - RNA, 33 nt, synthetic construct
  misc_feature 1..33: note = HMG box-containing protein 1 (104-114)
  source 1..33: mol_type = other RNA
cgcgagaacgaggtggactggctgaccgagctc

SEQ ID NO: 36074 - RNA, 30 nt, synthetic construct
  misc_feature 1..30: note = Kinesin-like protein KIFC1 (639-648)
  source 1..30: mol_type = other RNA
cgcgagacccaggccatcaacagctccctg

SEQ ID NO: 36075 - RNA, 27 nt, synthetic construct
  misc_feature 1..27: note = Translation machinery-associated protein 16 (109-117)
  source 1..27: mol_type = other RNA
cgcgagaccgtgatcaagcagaccatg

SEQ ID NO: 36076 - RNA, 30 nt, synthetic construct
  misc_feature 1..30: note = Protein timeless homolog (623-632)
  source 1..30: mol_type = other RNA
cgcgaggtgtggcccgagggcgacgtcttc

SEQ ID NO: 36077 - RNA, 27 nt, synthetic construct
  misc_feature 1..27: note = E3 SUMO-protein ligase PIAS3 (145-153)
  source 1..27: mol_type = other RNA
cgcttcgaggaggcccacttcaccttc

SEQ ID NO: 36078 - RNA, 27 nt, synthetic construct
  misc_feature 1..27: note = Tubulin alpha-1C chain (334-342)
  source 1..27: mol_type = other RNA
cgcatccacttccccctggccacctac

SEQ ID NO: 36079 - RNA, 27 nt, synthetic construct
  misc_feature 1..27: note = Poly (ADP-ribose) polymerase 4 (631-639)
  source 1..27: mol_type = other RNA
cgcatcatcgacaccgtggcccaggtc

SEQ ID NO: 36080 - RNA, 27 nt, synthetic construct
  misc_feature 1..27: note = Moesin (275-283)
  source 1..27: mol_type = other RNA
cgcatcaacaagcggatcctggccctc

SEQ ID NO: 36081 - RNA, 27 nt, synthetic construct
  misc_feature 1..27: note = Valine-tRNA ligase (530-538)
  source 1..27: mol_type = other RNA
cgcatccccgcctacttcgtgaccgtc

SEQ ID NO: 36082 - RNA, 36 nt, synthetic construct
  misc_feature 1..36: note = COMM domain-containing protein 9 (145-156)
  source 1..36: mol_type = other RNA
cgcatccgggaccagctgagcgccgtggcctccaag

SEQ ID NO: 36083 - RNA, 27 nt, synthetic construct
  misc_feature 1..27: note = SUN domain-containing protein 2 (117-125)
  source 1..27: mol_type = other RNA
cgcatccggcccaccgccgtgaccctg

SEQ ID NO: 36084 - RNA, 30 nt, synthetic construct
  misc_feature 1..30: note = 28S ribosomal protein S21, mitochondrial (50-59)
  source 1..30: mol_type = other RNA
cgcatctacaacatggagatggcccggaag

SEQ ID NO: 36085 - RNA, 30 nt, synthetic construct
  misc_feature 1..30: note = Heterogeneous nuclear ribonucleoprotein A1 (14-23)
  source 1..30: mol_type = other RNA
cgcaagctgttcatcggcgggctcagcttc

SEQ ID NO: 36086 - RNA, 30 nt, synthetic construct
  misc_feature 1..30: note = Catenin beta-1 (124-133)
  source 1..30: mol_type = other RNA
cgcctggccgagcccagccagatgctcaag

SEQ ID NO: 36087 - RNA, 27 nt, synthetic construct
  misc_feature 1..27: note = Kalirin (2002-2010)
  source 1..27: mol_type = other RNA
cgcctggcccagctcttcatcaagcac

SEQ ID NO: 36088 - RNA, 27 nt, synthetic construct
  misc_feature 1..27: note = Thyroid adenoma-associated protein (345-353)
  source 1..27: mol_type = other RNA
cgcctggccagcaaggtgatctcccac

SEQ ID NO: 36089 - RNA, 27 nt, synthetic construct
  misc_feature 1..27: note = Prostaglandin F2 receptor negative regulator (3-11)
  source 1..27: mol_type = other RNA
cgcctggccagccggcccctcctgctg

SEQ ID NO: 36090 - RNA, 27 nt, synthetic construct
  misc_feature 1..27: note = Transcription factor 4 (368-376)
  source 1..27: mol_type = other RNA
cgcctggacgacgccatccacgtgctc

SEQ ID NO: 36091 - RNA, 27 nt, synthetic construct
  misc_feature 1..27: note = Fanconi anemia group D2 protein (253-261)
  source 1..27: mol_type = other RNA
cgcctggaccccaacttcctcctgaag

SEQ ID NO: 36092 - RNA, 33 nt, synthetic construct
  misc_feature 1..33: note = Ubiquitin carboxyl-terminal hydrolase 19 (1354-1364)
  source 1..33: mol_type = other RNA
cgcctgttcgacgacagcaccgtgaccacggtc

SEQ ID NO: 36093 - RNA, 33 nt, synthetic construct
  misc_feature 1..33: note = BTB/POZ domain-containing protein 2 (2-12)
  source 1..33: mol_type = other RNA
cgcctgttcgacgagccccagctcgccagcctg

SEQ ID NO: 36094 - RNA, 27 nt, synthetic construct
  misc_feature 1..27: note = Heat shock protein beta-1 (27-35)
  source 1..27: mol_type = other RNA
cgcctgttcgaccaggccttcggcctc

SEQ ID NO: 36095 - RNA, 27 nt, synthetic construct
  misc_feature 1..27: note = V-type proton ATPase subunit S1 (315-323)
  source 1..27: mol_type = other RNA
cgcctgttcggcaccaccgtgacgttc

SEQ ID NO: 36096 - RNA, 30 nt, synthetic construct
  misc_feature 1..30: note = V-type proton ATPase subunit S1 (225-234)
  source 1..30: mol_type = other RNA
cgcctgttcggcaccaccgtgacgttcaag

SEQ ID NO: 36097 - RNA, 30 nt, synthetic construct
  misc_feature 1..30: note = Dol-P-Man:Man(5)GlcNAc(2)-PP-Dol alpha-1,3-mannosyltransferase (123-132)
  source 1..30: mol_type = other RNA
cgcctgttcaacgaccccgtggccatggtc

SEQ ID NO: 36098 - RNA, 27 nt, synthetic construct
  misc_feature 1..27: note = tRNA-dihydrouridine(20) synthase (NAD(P)+)-like (362-370)
  source 1..27: mol_type = other RNA
cgcctgttcagctccatcgtgaccgtc

SEQ ID NO: 36099 - RNA, 27 nt, synthetic construct
  misc_feature 1..27: note = Surfeit locus protein 6 (121-129)
  source 1..27: mol_type = other RNA
cgcctgcacgagaagatccaggaggcc

SEQ ID NO: 36100 - RNA, 27 nt, synthetic construct
  misc_feature 1..27: note = Proteasome subunit alpha type-4 (20-28)
  source 1..27: mol_type = other RNA
cgcctgatcgcccagcggtacctcctg

SEQ ID NO: 36101 - RNA, 27 nt, synthetic construct
  misc_feature 1..27: note = Lysine-specific demethylase 5B (975-983)
  source 1..27: mol_type = other RNA
cgcctgatcgacctcggcgtggggctg

SEQ ID NO: 36102 - RNA, 30 nt, synthetic construct
  misc_feature 1..30: note = Rho GTPase-activating protein 19 (65-74)
  source 1..30: mol_type = other RNA
cgcctgatcgacctccccggcaccgagctg

SEQ ID NO: 36103 - RNA, 27 nt, synthetic construct
  misc_feature 1..27: note = General transcription factor 3C polypeptide 1 (377-385)
  source 1..27: mol_type = other RNA
cgcctgatcgagagcctcttcaccatc

SEQ ID NO: 36104 - RNA, 33 nt, synthetic construct
  misc_feature 1..33: note = Heat shock 70 kDa protein 1-like (51-61)
  source 1..33: mol_type = other RNA
cgcctgatcggcgacgccgccaagaaccaggtg

SEQ ID NO: 36105 - RNA, 27 nt, synthetic construct
  misc_feature 1..27: note = Short coiled-coil protein (55-63)
  source 1..27: mol_type = other RNA
cgcctgatcaaccaggtgctcgagctg

SEQ ID NO: 36106 - RNA, 27 nt, synthetic construct
  misc_feature 1..27: note = Importin-9 (241-249)
  source 1..27: mol_type = other RNA
cgcctgatccccaccctcgtgagcatc

SEQ ID NO: 36107 - RNA, 27 nt, synthetic construct
  misc_feature 1..27: note = Eukaryotic translation initiation factor 4E (61-69)
  source 1..27: mol_type = other RNA
cgcctgatcagcaagttcgacaccgtg

SEQ ID NO: 36108 - RNA, 27 nt, synthetic construct
  misc_feature 1..27: note = C-X-C motif chemokine 14 (14-22)
  source 1..27: mol_type = other RNA
cgcctgctcgccgccgcgctgctgctc

SEQ ID NO: 36109 - RNA, 30 nt, synthetic construct
  misc_feature 1..30: note = Engulfment and cell motility protein 1 (697-706)
  source 1..30: mol_type = other RNA
cgcctgctcgacctggagaacatccagatc

SEQ ID NO: 36110 - RNA, 27 nt, synthetic construct
  misc_feature 1..27: note = PX domain-containing protein kinase-like protein (219-227)
  source 1..27: mol_type = other RNA
cgcctgctcgacctggagaacagcctg

SEQ ID NO: 36111 - RNA, 27 nt, synthetic construct
  misc_feature 1..27: note = Collagen alpha-1(XVIII) chain (14-22)
  source 1..27: mol_type = other RNA
cgcctgctcgacgtgctggcccccctg

SEQ ID NO: 36112 - RNA, 27 nt, synthetic construct
  misc_feature 1..27: note = Baculoviral IAP repeat-containing protein 6 (2177-2185)
  source 1..27: mol_type = other RNA
cgcctgctcgactacgtggccaccgtc

SEQ ID NO: 36113 - RNA, 27 nt, synthetic construct
  misc_feature 1..27: note = Lysine-specific histone demethylase 1A (180-188)
  source 1..27: mol_type = other RNA
cgcctgctcgaggccaccagctacctg

SEQ ID NO: 36114 - RNA, 27 nt, synthetic construct
  misc_feature 1..27: note = Isochorismatase domain-containing protein 2 (49-57)
  source 1..27: mol_type = other RNA
cgcctgctcgaggtgcccgtcatgctg

SEQ ID NO: 36115 - RNA, 36 nt, synthetic construct
  misc_feature 1..36: note = Histone H2B type 1-K (100-111)
  source 1..36: mol_type = other RNA
cgcctgctcctgcccggcgagctggccaagcacgcc

SEQ ID NO: 36116 - RNA, 30 nt, synthetic construct
  misc_feature 1..30: note = Attractin (51-60)
  source 1..30: mol_type = other RNA
cgcctgctcagccccccgctgcggccccgc

SEQ ID NO: 36117 - RNA, 27 nt, synthetic construct
  misc_feature 1..27: note = Heat shock protein 105 kDa (183-191)
  source 1..27: mol_type = other RNA
cgcctgatgaacgacatgaccgccgtg

SEQ ID NO: 36118 - RNA, 27 nt, synthetic construct
  misc_feature 1..27: note = Heat shock 70 kDa protein 4L (128-136)
  source 1..27: mol_type = other RNA
cgcctgatgaacgagaccaccgccgtg

SEQ ID NO: 36119 - RNA, 33 nt, synthetic construct
  misc_feature 1..33: note = Heat shock 70 kDa protein 4L (128-138)
  source 1..33: mol_type = other RNA
cgcctgatgaacgagaccaccgccgtggccctc

SEQ ID NO: 36120 - RNA, 27 nt, synthetic construct
  misc_feature 1..27: note = Cyclin-D1-binding protein 1 (55-63)
  source 1..27: mol_type = other RNA
cgcctgaacgaggccgccgtgaccgtc

SEQ ID NO: 36121 - RNA, 30 nt, synthetic construct
  misc_feature 1..30: note = Coatomer subunit gamma-2 (708-717)
  source 1..30: mol_type = other RNA
cgcctgcccgacgacgacccgaccgccgtg

SEQ ID NO: 36122 - RNA, 27 nt, synthetic construct
  misc_feature 1..27: note = Glyoxylate reductase/hydroxypyruvate reductase (125-133)
  source 1..27: mol_type = other RNA
cgcctgcccgaggccatcgaggaggtg

SEQ ID NO: 36123 - RNA, 27 nt, synthetic construct
  misc_feature 1..27: note = EH domain-containing protein 4 (337-345)
  source 1..27: mol_type = other RNA
cgcctgcccgagatctacatccagctc

SEQ ID NO: 36124 - RNA, 27 nt, synthetic construct
  misc_feature 1..27: note = Sorting nexin-1 (13-21)
  source 1..27: mol_type = other RNA
cgcctgcccccgcccttccccggcctc

SEQ ID NO: 36125 - RNA, 27 nt, synthetic construct
  misc_feature 1..27: note = DNA-directed RNA polymerase III subunit RPC1 (218-226)
  source 1..27: mol_type = other RNA
cgcctgcccccgcccaccatcctcaag

SEQ ID NO: 36126 - RNA, 27 nt, synthetic construct
  misc_feature 1..27: note = Kazrin (78-86)
  source 1..27: mol_type = other RNA
cgcctgcaggaggaggtgcacctcctg

SEQ ID NO: 36127 - RNA, 33 nt, synthetic construct
  misc_feature 1..33: note = Synaptojanin-2-binding protein (58-68)
  source 1..33: mol_type = other RNA
cgcctgcaggagggcgacaagatcctcagcgtg

SEQ ID NO: 36128 - RNA, 27 nt, synthetic construct
  misc_feature 1..27: note = Centrosomal protein of 85 kDa (243-251)
  source 1..27: mol_type = other RNA
cgcctgcagatggagcagatgcagctc

SEQ ID NO: 36129 - RNA, 36 nt, synthetic construct
  misc_feature 1..36: note = KIF1-binding protein (494-505)
  source 1..36: mol_type = other RNA
cgcctgcgggaccccgacagccacatcgtgaagaag

SEQ ID NO: 36130 - RNA, 27 nt, synthetic construct
  misc_feature 1..27: note = Transmembrane protein 69 (146-154)
  source 1..27: mol_type = other RNA
cgcctgagcgaggccatcgtgaccgtc

SEQ ID NO: 36131 - RNA, 30 nt, synthetic construct
  misc_feature 1..30: note = WASH complex subunit strumpellin (31-40)
  source 1..30: mol_type = other RNA
cgcctgagcgagttcatccccgccgtgttc

SEQ ID NO: 36132 - RNA, 27 nt, synthetic construct
  misc_feature 1..27: note = COP9 signalosome complex subunit 8 (199-207)
  source 1..27: mol_type = other RNA
cgcctgaccgactacgtggccttcctc

SEQ ID NO: 36133 - RNA, 27 nt, synthetic construct
  misc_feature 1..27: note = Proliferating cell nuclear antigen (5-13)
  source 1..27: mol_type = other RNA
cgcctggtgcagggcagcatcctcaag

SEQ ID NO: 36134 - RNA, 33 nt, synthetic construct
  misc_feature 1..33: note = Serine-threonine kinase receptor-associated protein (167-177)
  source 1..33: mol_type = other RNA
cgcctgtgggaccacgccaccatgaccgaggtg

SEQ ID NO: 36135 - RNA, 27 nt, synthetic construct
  misc_feature 1..27: note = Probable ubiquitin carboxyl-terminal hydrolase FAF-Y (1674-1682)
  source 1..27: mol_type = other RNA
cgcctgtggggcgagcccgtgaacctc

SEQ ID NO: 36136 - RNA, 33 nt, synthetic construct
  misc_feature 1..33: note = Lariat debranching enzyme (301-311)
  source 1..33: mol_type = other RNA
cgcctgtggaacatgcccgagaacaacggcctc

SEQ ID NO: 36137 - RNA, 27 nt, synthetic construct
  misc_feature 1..27: note = DNA damage-inducible transcript 4 protein (184-192)
  source 1..27: mol_type = other RNA
cgcctgtggcccaagatccagggcctc

SEQ ID NO: 36138 - RNA, 30 nt, synthetic construct
  misc_feature 1..30: note = Serine/threonine-protein kinase mTOR (2035-2044)
  source 1..30: mol_type = other RNA
cgcctgtacttcggcgagcggaacgtgaag

SEQ ID NO: 36139 - RNA, 30 nt, synthetic construct
  misc_feature 1..30: note = Filamin-A (142-151)
  source 1..30: mol_type = other RNA
cgcctgtacagcgtgtcctacctcctgaag

SEQ ID NO: 36140 - RNA, 27 nt, synthetic construct
  misc_feature 1..27: note = C-1-tetrahydrofolate synthase, cytoplasmic (746-754)
  source 1..27: mol_type = other RNA
cgcatgttcggcatccccgtggtcgtg

SEQ ID NO: 36141 - RNA, 30 nt, synthetic construct
  misc_feature 1..30: note = Hemoglobin subunit alpha (3-12)
  source 1..30: mol_type = other RNA
cgcatgttcctgagcttccccaccaccaag

SEQ ID NO: 36142 - RNA, 27 nt, synthetic construct
  misc_feature 1..27: note = Transaldolase (28-36)
  source 1..27: mol_type = other RNA
cgcatgttcaacgccgagaacggcaag

SEQ ID NO: 36143 - RNA, 27 nt, synthetic construct
  misc_feature 1..27: note = Receptor activity-modifying protein 2 (21-29)
  source 1..27: mol_type = other RNA
cgccccgccgccctgcggctcctgctg

SEQ ID NO: 36144 - RNA, 33 nt, synthetic construct
  misc_feature 1..33: note = Nucleolar protein 11 (53-63)
  source 1..33: mol_type = other RNA
cgccccgccgacccggagaagaaccagagcctg

SEQ ID NO: 36145 - RNA, 27 nt, synthetic construct
  misc_feature 1..27: note = F-box only protein 32 (160-168)
  source 1..27: mol_type = other RNA
cgccccgccttcaagggcctgaccttc

SEQ ID NO: 36146 - RNA, 27 nt, synthetic construct
  misc_feature 1..27: note = Transcription cofactor vestigial-like protein 4 (144-152)
  source 1..27: mol_type = other RNA
cgccccgccggcctgagcccgaccctc

SEQ ID NO: 36147 - RNA, 30 nt, synthetic construct
  misc_feature 1..30: note = 26S proteasome non-ATPase regulatory subunit 13 (284-293)
  source 1..30: mol_type = other RNA
cgccccgccaaccaccggcagctgaccttc

SEQ ID NO: 36148 - RNA, 27 nt, synthetic construct
  misc_feature 1..27: note = SH3 domain-binding protein 1 (567-575)
  source 1..27: mol_type = other RNA
cgccccgccccggcccggcccaccatg

SEQ ID NO: 36149 - RNA, 27 nt, synthetic construct
  misc_feature 1..27: note = Epsin-2 (471-479)
  source 1..27: mol_type = other RNA
cgccccgccccgcccgcccagagcctg

SEQ ID NO: 36150 - RNA, 27 nt, synthetic construct
  misc_feature 1..27: note = Sterol regulatory element-binding protein 2 (1026-1034)
  source 1..27: mol_type = other RNA
cgccccgcctaccggaaggtgttcctg

SEQ ID NO: 36151 - RNA, 30 nt, synthetic construct
  misc_feature 1..30: note = Protein O-GlcNAcase (828-837)
  source 1..30: mol_type = other RNA
cgccccgacgacaagcggatcctggagttc

SEQ ID NO: 36152 - RNA, 27 nt, synthetic construct
  misc_feature 1..27: note = Transcription factor 25 (211-219)
  source 1..27: mol_type = other RNA
cgccccgagaaccggagcttctacctg

SEQ ID NO: 36153 - RNA, 27 nt, synthetic construct
  misc_feature 1..27: note = NFX1-type zinc finger-containing protein 1 (350-358)
  source 1..27: mol_type = other RNA
cgccccttcctgcggccgaacatcatc

SEQ ID NO: 36154 - RNA, 27 nt, synthetic construct
  misc_feature 1..27: note = Procollagen-lysine,2-oxoglutarate 5-dioxygenase 2 (137-145)
  source 1..27: mol_type = other RNA
cgcccccaccacgacgccagcaccttc

SEQ ID NO: 36155 - RNA, 27 nt, synthetic construct
  misc_feature 1..27: note = Transducin beta-like protein 3 (564-572)
  source 1..27: mol_type = other RNA
cgcccccacaccgtgctgaccgtcatc

SEQ ID NO: 36156 - RNA, 30 nt, synthetic construct
  misc_feature 1..30: note = Mitogen-activated protein kinase 3 (229-238)
  source 1..30: mol_type = other RNA
cgccccatcttcccgggcaagcactacctg

SEQ ID NO: 36157 - RNA, 27 nt, synthetic construct
  misc_feature 1..27: note = Ragulator complex protein LAMTOR2 (3-11)
  source 1..27: mol_type = other RNA
cgccccaaggccctgacccaggtgctc

SEQ ID NO: 36158 - RNA, 30 nt, synthetic construct
  misc_feature 1..30: note = Pre-mRNA-processing factor 19 (62-71)
  source 1..30: mol_type = other RNA
cgccccaagccgcccagcgccacctccatc

SEQ ID NO: 36159 - RNA, 30 nt, synthetic construct
  misc_feature 1..30: note = Poly(rC)-binding protein 2 (183-192)
  source 1..30: mol_type = other RNA
cgccccaagccgagctccagccccgtgatc

SEQ ID NO: 36160 - RNA, 27 nt, synthetic construct
  misc_feature 1..27: note = Mitogen-activated protein kinase 9 (263-271)
  source 1..27: mol_type = other RNA
cgccccaagtacccgggcatcaagttc

SEQ ID NO: 36161 - RNA, 27 nt, synthetic construct
  misc_feature 1..27: note = Probable ATP-dependent RNA helicase DDX27 (196-204)
  source 1..27: mol_type = other RNA
cgccccctgctcaaggccatcaccgcc

SEQ ID NO: 36162 - RNA, 30 nt, synthetic construct
  misc_feature 1..30: note = Protein transport protein Sec23B (243-252)
  source 1..30: mol_type = other RNA
cgccccctgcggagcaccggcgtggccctc

SEQ ID NO: 36163 - RNA, 27 nt, synthetic construct
  misc_feature 1..27: note = RNA-binding protein 39 (297-305)
  source 1..27: mol_type = other RNA
cgccccatgaaggtgggccacgtcacc

SEQ ID NO: 36164 - RNA, 27 nt, synthetic construct
  misc_feature 1..27: note = UAP56-interacting factor (71-79)
  source 1..27: mol_type = other RNA
cgccccaacggcgtgatcaccgggctg

SEQ ID NO: 36165 - RNA, 27 nt, synthetic construct
  misc_feature 1..27: note = Adipocyte plasma membrane-associated protein (337-345)
  source 1..27: mol_type = other RNA
cgccccaacccgggcttcagcatgctg

SEQ ID NO: 36166 - RNA, 27 nt, synthetic construct
  misc_feature 1..27: note = Induced myeloid leukemia cell differentiation protein Mcl-1 (78-86)
  source 1..27: mol_type = other RNA
cgccccccgcccatcggcgccgaggtg

SEQ ID NO: 36167 - RNA, 27 nt, synthetic construct
  misc_feature 1..27: note = Sterol regulatory element-binding protein 1 (1003-1011)
  source 1..27: mol_type = other RNA
cgcccccaggccagcgccctggagctc

SEQ ID NO: 36168 - RNA, 27 nt, synthetic construct
  misc_feature 1..27: note = (Pyruvate dehydrogenase (acetyl-transferring))-phosphatase 1, mitochondrial (443-451)
  source 1..27: mol_type = other RNA
cgcccccaggacaagttcctggtgctc

SEQ ID NO: 36169 - RNA, 27 nt, synthetic construct
  misc_feature 1..27: note = RuvB-like 1 (249-257)
  source 1..27: mol_type = other RNA
cgcccccagggcgggcaggacatcctg

SEQ ID NO: 36170 - RNA, 27 nt, synthetic construct
  misc_feature 1..27: note = 28S ribosomal protein S12, mitochondrial (55-63)
  source 1..27: mol_type = other RNA
cgcccccagctgaagggcgtggtcctc

SEQ ID NO: 36171 - RNA, 30 nt, synthetic construct
  misc_feature 1..30: note = WD repeat and FYVE domain-containing protein 1 (8-17)
  source 1..30: mol_type = other RNA
cgcccccagagctcccggccggtgctgctc

SEQ ID NO: 36172 - RNA, 27 nt, synthetic construct
  misc_feature 1..27: note = Renin receptor (59-67)
  source 1..27: mol_type = other RNA
cgcccccgggccaccgtgatggtcatg

SEQ ID NO: 36173 - RNA, 30 nt, synthetic construct
  misc_feature 1..30: note = Protein OS-9 (186-195)
  source 1..30: mol_type = other RNA
cgcccccgggaggccgaggtgcgcttcctg

SEQ ID NO: 36174 - RNA, 24 nt, synthetic construct
  misc_feature 1..24: note = Protein disulfide-isomerase A4 (2-9)
  source 1..24: mol_type = other RNA
cgcccccggaaggccttcctgctc

SEQ ID NO: 36175 - RNA, 30 nt, synthetic construct
  misc_feature 1..30: note = Protein disulfide-isomerase A4 (2-11)
  source 1..30: mol_type = other RNA
cgcccccggaaggccttcctgctcctgctg

SEQ ID NO: 36176 - RNA, 33 nt, synthetic construct
  misc_feature 1..33: note = Glycogen synthase kinase-3 beta (306-316)
  source 1..33: mol_type = other RNA
cgcccccggaccccgcccgaggccatcgccctg

SEQ ID NO: 36177 - RNA, 30 nt, synthetic construct
  misc_feature 1..30: note = Apolipoprotein L1 (285-294)
  source 1..30: mol_type = other RNA
cgcccccgggtgaccgagccgatcagcgcc

SEQ ID NO: 36178 - RNA, 27 nt, synthetic construct
  misc_feature 1..27: note = ATP-dependent RNA helicase A (272-280)
  source 1..27: mol_type = other RNA
cgccccagcgccgccggcatcaacctg

SEQ ID NO: 36179 - RNA, 27 nt, synthetic construct
  misc_feature 1..27: note = Protein DEPP (195-203)
  source 1..27: mol_type = other RNA
cgccccagctccgtgctgcggaccctc

SEQ ID NO: 36180 - RNA, 27 nt, synthetic construct
  misc_feature 1..27: note = Filamin-B (69-77)
  source 1..27: mol_type = other RNA
cgccccaccttccggcagatgcagctg

SEQ ID NO: 36181 - RNA, 27 nt, synthetic construct
  misc_feature 1..27: note = Antigen peptide transporter 2 (168-176)
  source 1..27: mol_type = other RNA
cgccccgtgctgaagggcctcaccttc

SEQ ID NO: 36182 - RNA, 27 nt, synthetic construct
  misc_feature 1..27: note = FAS-associated factor 1 (77-85)
  source 1..27: mol_type = other RNA
cgccccgtgatgccgagccggcagatc

SEQ ID NO: 36183 - RNA, 27 nt, synthetic construct
  misc_feature 1..27: note = CDC42 small effector protein 1 (69-77)
  source 1..27: mol_type = other RNA
cgcccctggagcaactcccggggcctg

SEQ ID NO: 36184 - RNA, 30 nt, synthetic construct
  misc_feature 1..30: note = Cyclin-dependent kinase 13 (254-263)
  source 1..30: mol_type = other RNA
cgcccctacaccaacaaggtgatcaccctg

SEQ ID NO: 36185 - RNA, 36 nt, synthetic construct
  misc_feature 1..36: note = Rac GTPase-activating protein 1 (547-558)
  source 1..36: mol_type = other RNA
cgccagggcaacttcttcgccagccccatgctgaag

SEQ ID NO: 36186 - RNA, 33 nt, synthetic construct
  misc_feature 1..33: note = SEC14-like protein 1 (168-178)
  source 1..33: mol_type = other RNA
cgccagctggaggaggagggcatcaccttcgtg

SEQ ID NO: 36187 - RNA, 30 nt, synthetic construct
  misc_feature 1..30: note = Ubiquitin carboxyl-terminal hydrolase 22 (419-428)
  source 1..30: mol_type = other RNA
cgccggaagatcaccacctacgtgagcttc

SEQ ID NO: 36188 - RNA, 27 nt, synthetic construct
  misc_feature 1..27: note = MICOS complex subunit MIC10 (38-46)
  source 1..27: mol_type = other RNA
cgccggatgtggcccctggccttcggc

SEQ ID NO: 36189 - RNA, 27 nt, synthetic construct
  misc_feature 1..27: note = Protein transport protein Sec23B (569-577)
  source 1..27: mol_type = other RNA
cgccggagccccttcctgcaggtgttc

SEQ ID NO: 36190 - RNA, 27 nt, synthetic construct
  misc_feature 1..27: note = Protein transport protein Sec23A (585-593)
  source 1..27: mol_type = other RNA
cgccggagctccttcctgcaggtgttc

SEQ ID NO: 36191 - RNA, 27 nt, synthetic construct
  misc_feature 1..27: note = Nicastrin (225-233)
  source 1..27: mol_type = other RNA
cgccggagctccatccagagcaccttc

SEQ ID NO: 36192 - RNA, 27 nt, synthetic construct
  misc_feature 1..27: note = Protein FAM73A (222-230)
  source 1..27: mol_type = other RNA
cgccggtgggagcaggccctgaccttc

SEQ ID NO: 36193 - RNA, 27 nt, synthetic construct
  misc_feature 1..27: note = Complement C1q subcomponent subunit C (184-192)
  source 1..27: mol_type = other RNA
cgcagcggcgtgaaggtcgtgaccttc

SEQ ID NO: 36194 - RNA, 33 nt, synthetic construct
  misc_feature 1..33: note = RNA polymerase II subunit A C-terminal domain phosphatase SSU72 (18-28)
  source 1..33: mol_type = other RNA
cgcagcatggaggcccacaacatcctgtccaag

SEQ ID NO: 36195 - RNA, 30 nt, synthetic construct
  misc_feature 1..30: note = Heterogeneous nuclear ribonucleoproteins A2/B1 (60-69)
  source 1..30: mol_type = other RNA
cgcagccggggcttcgggttcgtgaccttc

SEQ ID NO: 36196 - RNA, 27 nt, synthetic construct
  misc_feature 1..27: note = Dynamin-2 (199-207)
  source 1..27: mol_type = other RNA
cgcaccatcggcgtgatcaccaagctg

SEQ ID NO: 36197 - RNA, 33 nt, synthetic construct
  misc_feature 1..33: note = Profilin-1 (87-97)
  source 1..33: mol_type = other RNA
cgcaccaagagcaccggcggggcccccacgttc

SEQ ID NO: 36198 - RNA, 33 nt, synthetic construct
  misc_feature 1..33: note = 28S ribosomal protein S7, mitochondrial (198-208)
  source 1..33: mol_type = other RNA
cgcaccctgatgcccgagaagctcagccacaag

SEQ ID NO: 36199 - RNA, 30 nt, synthetic construct
  misc_feature 1..30: note = Protein SDA1 homolog (403-412)
  source 1..30: mol_type = other RNA
cgcaccctgaacccccagatgctccagaag

SEQ ID NO: 36200 - RNA, 27 nt, synthetic construct
  misc_feature 1..27: note = Serine/threonine-protein kinase TAO1 (49-57)
  source 1..27: mol_type = other RNA
cgcaccaacgaggtggtcgccatcaag

SEQ ID NO: 36201 - RNA, 30 nt, synthetic construct
  misc_feature 1..30: note = Serine/threonine-protein kinase TAO1 (49-58)
  source 1..30: mol_type = other RNA
cgcaccaacgaggtggtcgccatcaagaag

SEQ ID NO: 36202 - RNA, 30 nt, synthetic construct
  misc_feature 1..30: note = Ras GTPase-activating protein 3 (360-369)
  source 1..30: mol_type = other RNA
cgcacccaggaccccaacaccatcttccgg

SEQ ID NO: 36203 - RNA, 33 nt, synthetic construct
  misc_feature 1..33: note = Zinc finger protein 706 (45-55)
  source 1..33: mol_type = other RNA
cgcacccagatgcccgacccgaagaccttcaag

SEQ ID NO: 36204 - RNA, 36 nt, synthetic construct
  misc_feature 1..36: note = Fructose-bisphosphate aldolase A (259-270)
  source 1..36: mol_type = other RNA
cgcaccgtgcccccggccgtcaccggcatcacgttc

SEQ ID NO: 36205 - RNA, 27 nt, synthetic construct
  misc_feature 1..27: note = Protein LDOC1L (175-183)
  source 1..27: mol_type = other RNA
cgcacctacaagagccccctgcggcac

SEQ ID NO: 36206 - RNA, 33 nt, synthetic construct
  misc_feature 1..33: note = Sorting nexin-4 (243-253)
  source 1..33: mol_type = other RNA
cgcgtggccgaccggctgtacggcgtctacaag

SEQ ID NO: 36207 - RNA, 27 nt, synthetic construct
  misc_feature 1..27: note = Cell division cycle and apoptosis regulator protein 1 (148-156)
  source 1..27: mol_type = other RNA
cgcgtgttcaccggcgtcgtgaccaag

SEQ ID NO: 36208 - RNA, 30 nt, synthetic construct
  misc_feature 1..30: note = Centrosomal protein of 57 kDa (325-334)
  source 1..30: mol_type = other RNA
cgcgtgatcaacagcatccccctggccaag

SEQ ID NO: 36209 - RNA, 27 nt, synthetic construct
  misc_feature 1..27: note = Hom s 1 (22-30)
  source 1..27: mol_type = other RNA
cgcgtgaaggcccccaacaagagcctg

SEQ ID NO: 36210 - RNA, 27 nt, synthetic construct
  misc_feature 1..27: note = Cytosolic 10-formyltetrahydrofolate dehydrogenase (894-902)
  source 1..27: mol_type = other RNA
cgcgtgaagaccgtcaccttcgagtac

SEQ ID NO: 36211 - RNA, 30 nt, synthetic construct
  misc_feature 1..30: note = E3 ubiquitin-protein ligase HUWE1 (812-821)
  source 1..30: mol_type = other RNA
cgcgtgctggacttcgacgtcaagcggaag

SEQ ID NO: 36212 - RNA, 30 nt, synthetic construct
  misc_feature 1..30: note = Eukaryotic translation initiation factor 4 gamma 3 (1045-1054)
  source 1..30: mol_type = other RNA
cgcgtgctggaccccagcaagttcctcaag

SEQ ID NO: 36213 - RNA, 27 nt, synthetic construct
  misc_feature 1..27: note = Paired amphipathic helix protein Sin3a (631-639)
  source 1..27: mol_type = other RNA
cgcgtgctggaggccatccagaagaag

SEQ ID NO: 36214 - RNA, 30 nt, synthetic construct
  misc_feature 1..30: note = Smoothelin (476-485)
  source 1..30: mol_type = other RNA
cgcgtgctgctccccaccggcaaccagcgg

SEQ ID NO: 36215 - RNA, 36 nt, synthetic construct
  misc_feature 1..36: note = 40S ribosomal protein S18 (14-25)
  source 1..36: mol_type = other RNA
cgcgtgctgaacaccaacatcgacggccggcgcaag

SEQ ID NO: 36216 - RNA, 27 nt, synthetic construct
  misc_feature 1..27: note = WASH complex subunit strumpellin (573-581)
  source 1..27: mol_type = other RNA
cgcgtgaaccccagcatggtcaccaag

SEQ ID NO: 36217 - RNA, 27 nt, synthetic construct
  misc_feature 1..27: note = Transcription factor 4 (552-560)
  source 1..27: mol_type = other RNA
cgcgtgcgggacatcaacgaggccttc

SEQ ID NO: 36218 - RNA, 27 nt, synthetic construct
  misc_feature 1..27: note = WW domain-binding protein 5 (82-90)
  source 1..27: mol_type = other RNA
cgcgtgcggaacaagctgatcgtcatg

SEQ ID NO: 36219 - RNA, 33 nt, synthetic construct
  misc_feature 1..33: note = Phosphatidylinositide phosphatase SAC1 (35-45)
  source 1..33: mol_type = other RNA
cgcgtgagcaccgaggtcaccctggccgtgaag

SEQ ID NO: 36220 - RNA, 33 nt, synthetic construct
  misc_feature 1..33: note = Periodic tryptophan protein 1 homolog (244-254)
  source 1..33: mol_type = other RNA
cgcgtgtgggacatcagcaccgtctccagcgtg

SEQ ID NO: 36221 - RNA, 33 nt, synthetic construct
  misc_feature 1..33: note = 39S ribosomal protein L3, mitochondrial (250-260)
  source 1..33: mol_type = other RNA
cgcgtgtggcccggcaccaagatgccggggaag

SEQ ID NO: 36222 - RNA, 27 nt, synthetic construct
  misc_feature 1..27: note = Inositol-trisphosphate 3-kinase B (33-41)
  source 1..27: mol_type = other RNA
cgcgtgtggcagggcaccatggagaag

SEQ ID NO: 36223 - RNA, 30 nt, synthetic construct
  misc_feature 1..30: note = Guanine nucleotide-binding protein subunit beta-2-like 1 (308-317)
  source 1..30: mol_type = other RNA
cgcgtgtggcaggtcaccatcggcacccgg

SEQ ID NO: 36224 - RNA, 27 nt, synthetic construct
  misc_feature 1..27: note = Cip1-interacting zinc finger protein (591-599)
  source 1..27: mol_type = other RNA
cgctacttcaagaccccccggaagttc

SEQ ID NO: 36225 - RNA, 27 nt, synthetic construct
  misc_feature 1..27: note = Signal transducer and activator of transcription 3 (93-101)
  source 1..27: mol_type = other RNA
cgctacctggagaagcccatggagatc

SEQ ID NO: 36226 - RNA, 27 nt, synthetic construct
  misc_feature 1..27: note = Erythrocyte band 7 integral membrane protein (251-259)
  source 1..27: mol_type = other RNA
cgctacctgcagaccctcaccacgatc

SEQ ID NO: 36227 - RNA, 27 nt, synthetic construct
  misc_feature 1..27: note = Telomerase protein component 1 (464-472)
  source 1..27: mol_type = other RNA
cgctaccccagcaacctgcagctcttc

SEQ ID NO: 36228 - RNA, 27 nt, synthetic construct
  misc_feature 1..27: note = Histone H3.1 (41-49)
  source 1..27: mol_type = other RNA
cgctaccggcccggcaccgtggccctg

SEQ ID NO: 36229 - RNA, 27 nt, synthetic construct
  misc_feature 1..27: note = 26S proteasome non-ATPase regulatory subunit 6 (267-275)
  source 1..27: mol_type = other RNA
cgctacagcgtgttcttccagtccctg

SEQ ID NO: 36230 - RNA, 27 nt, synthetic construct
  misc_feature 1..27: note = G1/S-specific cyclin-D3 (37-45)
  source 1..27: mol_type = other RNA
cgctacgtgccccgggccagctacttc

SEQ ID NO: 36231 - RNA, 24 nt, synthetic construct
  misc_feature 1..24: note = Heterogeneous nuclear ribonucleoprotein H (23-30)
  source 1..24: mol_type = other RNA
agcgccgacgaggtgcagcgcttc

SEQ ID NO: 36232 - RNA, 27 nt, synthetic construct
  misc_feature 1..27: note = Solute carrier family 35 member E1 (53-61)
  source 1..27: mol_type = other RNA
agcgccttccccttcccggtgaccgtc

SEQ ID NO: 36233 - RNA, 33 nt, synthetic construct
  misc_feature 1..33: note = Probable 28S rRNA (cytosine(4447)-C(5))-methyltransferase (511-521)
  source 1..33: mol_type = other RNA
agcgccatcgactccgtgaacgccaccagcaag

SEQ ID NO: 36234 - RNA, 27 nt, synthetic construct
  misc_feature 1..27: note = Catenin alpha-2 (667-675)
  source 1..27: mol_type = other RNA
agcgcccgcgccatcatggcgcagctg

SEQ ID NO: 36235 - RNA, 27 nt, synthetic construct
  misc_feature 1..27: note = Large proline-rich protein BAG6 (145-153)
  source 1..27: mol_type = other RNA
agcgccgtggacgtccacatcaacatg

SEQ ID NO: 36236 - RNA, 27 nt, synthetic construct
  misc_feature 1..27: note = Gamma-interferon-inducible protein 16 (280-288)
  source 1..27: mol_type = other RNA
agcgaggccggccccaaccagaccttc

SEQ ID NO: 36237 - RNA, 27 nt, synthetic construct
  misc_feature 1..27: note = Y-box-binding protein 3 (149-157)
  source 1..27: mol_type = other RNA
agcgaggacgccgagaagaaggtgctg

SEQ ID NO: 36238 - RNA, 27 nt, synthetic construct
  misc_feature 1..27: note = Proline-, glutamic acid- and leucine-rich protein 1 (231-239)
  source 1..27: mol_type = other RNA
agcgaggacggcgacgcccacgtgctg

SEQ ID NO: 36239 - RNA, 33 nt, synthetic construct
  misc_feature 1..33: note = Vacuolar protein sorting-associated protein 35 (500-510)
  source 1..33: mol_type = other RNA
agcgaggaccccgaccagcagtacctgatcctc

SEQ ID NO: 36240 - RNA, 36 nt, synthetic construct
  misc_feature 1..36: note = Actin-binding protein anillin (796-807)
  source 1..36: mol_type = other RNA
agcgagttcatgccctccaagggcagcgtgaccctg

SEQ ID NO: 36241 - RNA, 27 nt, synthetic construct
  misc_feature 1..27: note = Actin-related protein 2 (295-303)
  source 1..27: mol_type = other RNA
agcgagttctacaagcacatcgtgctg

SEQ ID NO: 36242 - RNA, 30 nt, synthetic construct
  misc_feature 1..30: note = Neutral amino acid transporter A (22-31)
  source 1..30: mol_type = other RNA
agcgagggcgaggacctgatccgcttcttc

SEQ ID NO: 36243 - RNA, 30 nt, synthetic construct
  misc_feature 1..30: note = HCLS1-binding protein 3 (72-81)
  source 1..30: mol_type = other RNA
agcgagatcgaggagttctaccagaagctg

SEQ ID NO: 36244 - RNA, 27 nt, synthetic construct
  misc_feature 1..27: note = Poly (ADP-ribose) polymerase 1 (25-33)
  source 1..27: mol_type = other RNA
agcgagtccatccccaaggacagcctg

SEQ ID NO: 36245 - RNA, 33 nt, synthetic construct
  misc_feature 1..33: note = ATP-citrate synthase (769-779)
  source 1..33: mol_type = other RNA
agcgagaccgccgtggccaagaaccaggcgctg

SEQ ID NO: 36246 - RNA, 33 nt, synthetic construct
  misc_feature 1..33: note = Antigen KI-67 (2326-2336)
  source 1..33: mol_type = other RNA
agcgagacctccggccacacccaggagagcctg

SEQ ID NO: 36247 - RNA, 24 nt, synthetic construct
  misc_feature 1..24: note = 40S ribosomal protein S23 (45-52)
  source 1..24: mol_type = other RNA
agccacgccaagggcatcgtgctg

SEQ ID NO: 36248 - RNA, 27 nt, synthetic construct
  misc_feature 1..27: note = Mitogen-activated protein kinase kinase kinase 1 (497-505)
  source 1..27: mol_type = other RNA
agccacgacttctactcccacgagctg

SEQ ID NO: 36249 - RNA, 33 nt, synthetic construct
  misc_feature 1..33: note = Bax inhibitor 1 (17-27)
  source 1..33: mol_type = other RNA
agccacatcaccccctccacccagcagcacctg

SEQ ID NO: 36250 - RNA, 27 nt, synthetic construct
  misc_feature 1..27: note = Hypoxia-inducible factor 1-alpha (52-60)
  source 1..27: mol_type = other RNA
agccacctggacaaggcctccgtgatg

SEQ ID NO: 36251 - RNA, 27 nt, synthetic construct
  misc_feature 1..27: note = Ubiquitin carboxyl-terminal hydrolase 37 (54-62)
  source 1..27: mol_type = other RNA
agccacaacatcaagaacgtggtcctg

SEQ ID NO: 36252 - RNA, 27 nt, synthetic construct
  misc_feature 1..27: note = Protein-L-isoaspartate(D-aspartate) O-methyltransferase (9-17)
  source 1..27: mol_type = other RNA
agccactccgagctgatccacaacctc

SEQ ID NO: 36253 - RNA, 27 nt, synthetic construct
  misc_feature 1..27: note = Cyclin-T1 (431-439)
  source 1..27: mol_type = other RNA
agccactccagcgtgatcctgaagatg

SEQ ID NO: 36254 - RNA, 27 nt, synthetic construct
  misc_feature 1..27: note = Transcriptional activator Myb (257-265)
  source 1..27: mol_type = other RNA
agccacgtgccctacccggtcgccctg

SEQ ID NO: 36255 - RNA, 27 nt, synthetic construct
  misc_feature 1..27: note = Ubiquitin carboxyl-terminal hydrolase 22 (354-362)
  source 1..27: mol_type = other RNA
agccacgtgtccggcaccaccacgctg

SEQ ID NO: 36256 - RNA, 27 nt, synthetic construct
  misc_feature 1..27: note = MAP kinase-activating death domain protein (181-189)
  source 1..27: mol_type = other RNA
agccactaccccttcttctccaccttc

SEQ ID NO: 36257 - RNA, 27 nt, synthetic construct
  misc_feature 1..27: note = Abnormal spindle-like microcephaly-associated protein (532-540)
  source 1..27: mol_type = other RNA
agcatcttccgcacccccatctccaag

SEQ ID NO: 36258 - RNA, 27 nt, synthetic construct
  misc_feature 1..27: note = ATPase family AAA domain-containing protein 5 (1793-1801)
  source 1..27: mol_type = other RNA
agcatcatcgagtacctgcccaccctc

SEQ ID NO: 36259 - RNA, 27 nt, synthetic construct
  misc_feature 1..27: note = Exportin-4 (345-353)
  source 1..27: mol_type = other RNA
agcatcatctccaacctgatcaccgtg

SEQ ID NO: 36260 - RNA, 27 nt, synthetic construct
  misc_feature 1..27: note = LIM domain and actin-binding protein 1 (168-176)
  source 1..27: mol_type = other RNA
agcatcaaggaccgcatggccaagtac

SEQ ID NO: 36261 - RNA, 27 nt, synthetic construct
  misc_feature 1..27: note = GMP reductase 1 (115-123)
  source 1..27: mol_type = other RNA
agcatcctggaggccgtgccccaggtc

SEQ ID NO: 36262 - RNA, 27 nt, synthetic construct
  misc_feature 1..27: note = DNA replication licensing factor MCM4 (252-260)
  source 1..27: mol_type = other RNA
agcatcctggagcaccagatccaggtg

SEQ ID NO: 36263 - RNA, 27 nt, synthetic construct
  misc_feature 1..27: note = Sperm-associated antigen 7 (79-87)
  source 1..27: mol_type = other RNA
agcatcctgcacgacgtggtcgaggtg

SEQ ID NO: 36264 - RNA, 27 nt, synthetic construct
  misc_feature 1..27: note = Regulation of nuclear pre-mRNA domain-containing protein 2 (432-440)
  source 1..27: mol_type = other RNA
agcatcctgtccagcctcacctccgtg

SEQ ID NO: 36265 - RNA, 27 nt, synthetic construct
  misc_feature 1..27: note = E3 ubiquitin-protein ligase TRIP12 (580-588)
  source 1..27: mol_type = other RNA
agcatcaacgcccagcgcaacgccctg

SEQ ID NO: 36266 - RNA, 27 nt, synthetic construct
  misc_feature 1..27: note = Pre-mRNA-processing-splicing factor 8 (1693-1701)
  source 1..27: mol_type = other RNA
agcatctacccctccccgaccggcgtg

SEQ ID NO: 36267 - RNA, 30 nt, synthetic construct
  misc_feature 1..30: note = 40S ribosomal protein S3a (70-79)
  source 1..30: mol_type = other RNA
agcctggccgacctccagaacgacgaggtg

SEQ ID NO: 36268 - RNA, 27 nt, synthetic construct
  misc_feature 1..27: note = All-trans-retinol 13,14-reductase (241-249)
  source 1..27: mol_type = other RNA
agcctggccgaggtgctccagcagctg

SEQ ID NO: 36269 - RNA, 33 nt, synthetic construct
  misc_feature 1..33: note = Condensin complex subunit 1 (928-938)
  source 1..33: mol_type = other RNA
agcctggccggcgacgtggccctccagcagctg

SEQ ID NO: 36270 - RNA, 27 nt, synthetic construct
  misc_feature 1..27: note = AP-3 complex subunit delta-1 (220-228)
  source 1..27: mol_type = other RNA
agcctggcccccctcttcttcaagctg

SEQ ID NO: 36271 - RNA, 27 nt, synthetic construct
  misc_feature 1..27: note = Poly(rC)-binding protein 1 (337-345)
  source 1..27: mol_type = other RNA
agcctggcccagtacctcatcaacgcc

SEQ ID NO: 36272 - RNA, 33 nt, synthetic construct
  misc_feature 1..33: note = Tyrosine-protein kinase Fer (665-675)
  source 1..33: mol_type = other RNA
agcctggacgccgccgcgggcatgctctacctg

SEQ ID NO: 36273 - RNA, 27 nt, synthetic construct
  misc_feature 1..27: note = Hemoglobin subunit alpha (29-37)
  source 1..27: mol_type = other RNA
agcctggacaagttcctcgcctccgtg

SEQ ID NO: 36274 - RNA, 27 nt, synthetic construct
  misc_feature 1..27: note = General transcription factor 3C polypeptide 1 (202-210)
  source 1..27: mol_type = other RNA
agcctggacaagacctcccacagcgtg

SEQ ID NO: 36275 - RNA, 27 nt, synthetic construct
  misc_feature 1..27: note = Regulator of nonsense transcripts 1 (683-691)
  source 1..27: mol_type = other RNA
agcctgttcgagcgcctcgtggtcctg

SEQ ID NO: 36276 - RNA, 27 nt, synthetic construct
  misc_feature 1..27: note = MKL/myocardin-like protein 2 (820-828)
  source 1..27: mol_type = other RNA
agcctgttcggctcccccgtggccaag

SEQ ID NO: 36277 - RNA, 30 nt, synthetic construct
  misc_feature 1..30: note = Protein flightless-1 homolog (1009-1018)
  source 1..30: mol_type = other RNA
agcctgttccccggcaagctcgaggtggtc

SEQ ID NO: 36278 - RNA, 30 nt, synthetic construct
  misc_feature 1..30: note = Cip1-interacting zinc finger protein (720-729)
  source 1..30: mol_type = other RNA
agcctgggccacttcgagaacctccagaag

SEQ ID NO: 36279 - RNA, 27 nt, synthetic construct
  misc_feature 1..27: note = T-complex protein 1 subunit eta (301-309)
  source 1..27: mol_type = other RNA
agcctgcacgacgccatcatgatcgtg

SEQ ID NO: 36280 - RNA, 30 nt, synthetic construct
  misc_feature 1..30: note = Coronin-1B (173-182)
  source 1..30: mol_type = other RNA
agcctgcaccccgacctcatctacaacgtg

SEQ ID NO: 36281 - RNA, 27 nt, synthetic construct
  misc_feature 1..27: note = T-complex protein 1 subunit zeta-2 (75-83)
  source 1..27: mol_type = other RNA
agcctgatcgccaaggtggccaccgcg

SEQ ID NO: 36282 - RNA, 27 nt, synthetic construct
  misc_feature 1..27: note = Tyrosine-protein kinase JAK2 (367-375)
  source 1..27: mol_type = other RNA
agcctgatcgacggctactaccgcctc

SEQ ID NO: 36283 - RNA, 30 nt, synthetic construct
  misc_feature 1..30: note = Acidic leucine-rich nuclear phosphoprotein 32 family member B (48-57)
  source 1..30: mol_type = other RNA
agcctgatcaacgtgggcctcatctccgtc

SEQ ID NO: 36284 - RNA, 27 nt, synthetic construct
  misc_feature 1..27: note = Protein Smaug homolog 2 (238-246)
  source 1..27: mol_type = other RNA
agcctgatccccacctccccgcaggtg

SEQ ID NO: 36285 - RNA, 27 nt, synthetic construct
  misc_feature 1..27: note = Syntaxin-binding protein 2 (433-441)
  source 1..27: mol_type = other RNA
agcctgatccgcaacctcgagcagctg

SEQ ID NO: 36286 - RNA, 27 nt, synthetic construct
  misc_feature 1..27: note = Phospholipase A-2-activating protein (670-678)
  source 1..27: mol_type = other RNA
agcctgatctccaccatcctcgaggtg

SEQ ID NO: 36287 - RNA, 27 nt, synthetic construct
  misc_feature 1..27: note = Serine/threonine-protein phosphatase PP1-beta catalytic subunit (10-18)
  source 1..27: mol_type = other RNA
agcctgatcacccgcctcctggaggtg

SEQ ID NO: 36288 - RNA, 27 nt, synthetic construct
  misc_feature 1..27: note = Schlafen family member 5 (473-481)
  source 1..27: mol_type = other RNA
agcctgaagcagaagctcgtgaacaag

SEQ ID NO: 36289 - RNA, 27 nt, synthetic construct
  misc_feature 1..27: note = Caprin-1 (184-192)
  source 1..27: mol_type = other RNA
agcctgctcgacgagttctacaagctg

SEQ ID NO: 36290 - RNA, 30 nt, synthetic construct
  misc_feature 1..30: note = Macrophage erythroblast attacher (64-73)
  source 1..30: mol_type = other RNA
agcctgctcgacggcgtggtcgagaagctg

SEQ ID NO: 36291 - RNA, 24 nt, synthetic construct
  misc_feature 1..24: note = Cyclin-I (71-78)
  source 1..24: mol_type = other RNA
agcctgctcgaccgcttcctggcc

SEQ ID NO: 36292 - RNA, 30 nt, synthetic construct
  misc_feature 1..30: note = Cyclin-I (71-80)
  source 1..30: mol_type = other RNA
agcctgctcgaccgcttcctggccaccgtg

SEQ ID NO: 36293 - RNA, 33 nt, synthetic construct
  misc_feature 1..33: note = Splicing factor 3B subunit 3 (509-519)
  source 1..33: mol_type = other RNA
agcctgctcggcgacgacgccctggtgcaggtc

SEQ ID NO: 36294 - RNA, 27 nt, synthetic construct
  misc_feature 1..27: note = Histidine triad nucleotide-binding protein 1 (72-80)
  source 1..27: mol_type = other RNA
agcctgctcggccacctgatgatcgtg

SEQ ID NO: 36295 - RNA, 33 nt, synthetic construct
  misc_feature 1..33: note = Acyl-CoA desaturase (80-90)
  source 1..33: mol_type = other RNA
agcctgctccacctgggcgccctgtacgggatc

SEQ ID NO: 36296 - RNA, 27 nt, synthetic construct
  misc_feature 1..27: note = Splicing factor 3B subunit 1 (643-651)
  source 1..27: mol_type = other RNA
agcctgctccccttcctgaaggccgtg

SEQ ID NO: 36297 - RNA, 27 nt, synthetic construct
  misc_feature 1..27: note = Transformation/transcription domain-associated protein (819-827)
  source 1..27: mol_type = other RNA
agcctgctcccctacctgccgatgctg

SEQ ID NO: 36298 - RNA, 27 nt, synthetic construct
  misc_feature 1..27: note = Histone acetyltransferase KAT2A (320-328)
  source 1..27: mol_type = other RNA
agcctgctccgctccatcttcaccgtg

SEQ ID NO: 36299 - RNA, 27 nt, synthetic construct
  misc_feature 1..27: note = Mitotic spindle assembly checkpoint protein MAD2B (114-122)
  source 1..27: mol_type = other RNA
agcctgctctcccacgtggagcagctg

SEQ ID NO: 36300 - RNA, 27 nt, synthetic construct
  misc_feature 1..27: note = Gamma-secretase C-terminal fragment 59 (436-444)
  source 1..27: mol_type = other RNA
agcctgctctacaacgtgcccgccgtc

SEQ ID NO: 36301 - RNA, 30 nt, synthetic construct
  misc_feature 1..30: note = Syntenin-1 (289-298)
  source 1..30: mol_type = other RNA
agcctgatggaccacaccatccccgaggtg

SEQ ID NO: 36302 - RNA, 27 nt, synthetic construct
  misc_feature 1..27: note = DNA topoisomerase 2-alpha (763-771)
  source 1..27: mol_type = other RNA
agcctgatgatgaccatcatcaacctc

SEQ ID NO: 36303 - RNA, 27 nt, synthetic construct
  misc_feature 1..27: note = Phospholipase A-2-activating protein (625-633)
  source 1..27: mol_type = other RNA
agcctgatgtcccacgccatcgagctc

SEQ ID NO: 36304 - RNA, 27 nt, synthetic construct
  misc_feature 1..27: note = RecQ-mediated genome instability protein 1 (437-445)
  source 1..27: mol_type = other RNA
agcctgaacaacaagatcctcaaccgc

SEQ ID NO: 36305 - RNA, 30 nt, synthetic construct
  misc_feature 1..30: note = A-kinase anchor protein 13 (131-140)
  source 1..30: mol_type = other RNA
agcctgcccaccgtgatcatgcgcaacaag

SEQ ID NO: 36306 - RNA, 27 nt, synthetic construct
  misc_feature 1..27: note = Lon protease homolog 2, peroxisomal (51-59)
  source 1..27: mol_type = other RNA
agcctgcagtccaccatcctcggcgtg

SEQ ID NO: 36307 - RNA, 27 nt, synthetic construct
  misc_feature 1..27: note = Up-regulator of cell proliferation (550-558)
  source 1..27: mol_type = other RNA
agcctgtccgagaagcagtacttcctc

SEQ ID NO: 36308 - RNA, 27 nt, synthetic construct
  misc_feature 1..27: note = Pleiotropic regulator 1 (232-240)
  source 1..27: mol_type = other RNA
agcctgaccggccacatctccaccgtg

SEQ ID NO: 36309 - RNA, 27 nt, synthetic construct
  misc_feature 1..27: note = Tyrosine-protein kinase JAK1 (405-413)
  source 1..27: mol_type = other RNA
agcctggtggacggctacttccgcctc

SEQ ID NO: 36310 - RNA, 27 nt, synthetic construct
  misc_feature 1..27: note = Long-chain-fatty-acid-CoA ligase 1 (410-418)
  source 1..27: mol_type = other RNA
agcctgtgggaccgcctcatcttccac

SEQ ID NO: 36311 - RNA, 27 nt, synthetic construct
  misc_feature 1..27: note = Nucleoside diphosphate kinase (246-254)
  source 1..27: mol_type = other RNA
agcctgtggttcaagcccgaggagctc

SEQ ID NO: 36312 - RNA, 27 nt, synthetic construct
  misc_feature 1..27: note = Eukaryotic translation initiation factor 3 subunit C-like protein (382-390)
  source 1..27: mol_type = other RNA
agcctgtacgactacaaccccaacctc

SEQ ID NO: 36313 - RNA, 27 nt, synthetic construct
  misc_feature 1..27: note = DNA repair and recombination protein RAD54B (618-626)
  source 1..27: mol_type = other RNA
agcctgtacaagggcctcctgtccgtg

SEQ ID NO: 36314 - RNA, 27 nt, synthetic construct
  misc_feature 1..27: note = C-myc promoter-binding protein (1841-1849)
  source 1..27: mol_type = other RNA
agcctgtaccgcgagatcctcttcctg

SEQ ID NO: 36315 - RNA, 27 nt, synthetic construct
  misc_feature 1..27: note = Molybdate-anion transporter (297-305)
  source 1..27: mol_type = other RNA
agcctgtaccgcatcgccacctccaag

SEQ ID NO: 36316 - RNA, 33 nt, synthetic construct
  misc_feature 1..33: note = 60S ribosome subunit biogenesis protein NIP7 homolog (135-145)
  source 1..33: mol_type = other RNA
agcatggccgacatccccctgggcttcggggtg

SEQ ID NO: 36317 - RNA, 27 nt, synthetic construct
  misc_feature 1..27: note = Eukaryotic translation initiation factor 3 subunit L (348-356)
  source 1..27: mol_type = other RNA
agcatgttccagcgcaccacctacaag

SEQ ID NO: 36318 - RNA, 27 nt, synthetic construct
  misc_feature 1..27: note = Probable ATP-dependent RNA helicase DDX6 (451-459)
  source 1..27: mol_type = other RNA
agcaacatcgacaagtccctgtacgtg

SEQ ID NO: 36319 - RNA, 27 nt, synthetic construct
  misc_feature 1..27: note = Integrator complex subunit 5 (495-503)
  source 1..27: mol_type = other RNA
agccccgccggcctgaaggccgtgctc

SEQ ID NO: 36320 - RNA, 27 nt, synthetic construct
  misc_feature 1..27: note = Centrosomal protein of 170 kDa (1260-1268)
  source 1..27: mol_type = other RNA
agccccgccctgaagaccacccgcctc

SEQ ID NO: 36321 - RNA, 24 nt, synthetic construct
  misc_feature 1..24: note = Cellular tumor antigen p53 (2-9)
  source 1..24: mol_type = other RNA
agccccgccctgaacaagatgttc

SEQ ID NO: 36322 - RNA, 27 nt, synthetic construct
  misc_feature 1..27: note = E3 ubiquitin-protein ligase HUWE1 (376-384)
  source 1..27: mol_type = other RNA
agccccgccccgaccatcacctccctg

SEQ ID NO: 36323 - RNA, 27 nt, synthetic construct
  misc_feature 1..27: note = Type II inositol 3,4-bisphosphate 4-phosphatase (439-447)
  source 1..27: mol_type = other RNA
agccccgactccctgaagaacagcctc

SEQ ID NO: 36324 - RNA, 27 nt, synthetic construct
  misc_feature 1..27: note = N6-adenosine-methyltransferase 70 kDa subunit (525-533)
  source 1..27: mol_type = other RNA
agccccggcacccgcaagatcgagctg

SEQ ID NO: 36325 - RNA, 27 nt, synthetic construct
  misc_feature 1..27: note = Integrator complex subunit 1 (254-262)
  source 1..27: mol_type = other RNA
agcccccacggcggggccctggtgatg

SEQ ID NO: 36326 - RNA, 27 nt, synthetic construct
  misc_feature 1..27: note = Protein CASC5 (837-845)
  source 1..27: mol_type = other RNA
agccccatcgagaagtccggcgtgctg

SEQ ID NO: 36327 - RNA, 27 nt, synthetic construct
  misc_feature 1..27: note = Ephrin-A4 (18-26)
  source 1..27: mol_type = other RNA
agccccctgcgcggcgggtccagcctc

SEQ ID NO: 36328 - RNA, 27 nt, synthetic construct
  misc_feature 1..27: note = Cullin-7 (801-809)
  source 1..27: mol_type = other RNA
agccccaacaccgaccgcgaggtgctg

SEQ ID NO: 36329 - RNA, 27 nt, synthetic construct
  misc_feature 1..27: note = Tumor suppressor p53-binding protein 1 (1028-1036)
  source 1..27: mol_type = other RNA
agcccccagaagaccatgtccgtgctg

SEQ ID NO: 36330 - RNA, 27 nt, synthetic construct
  misc_feature 1..27: note = Stromal interaction molecule 2 (531-539)
  source 1..27: mol_type = other RNA
agcccccagccgcagcgcgcccagctg

SEQ ID NO: 36331 - RNA, 30 nt, synthetic construct
  misc_feature 1..30: note = Polyadenylate-binding protein-interacting protein 1 (120-129)
  source 1..30: mol_type = other RNA
agcccccagtccggcaacttccgccagctg

SEQ ID NO: 36332 - RNA, 27 nt, synthetic construct
  misc_feature 1..27: note = Proteasomal ATPase-associated factor 1 (195-203)
  source 1..27: mol_type = other RNA
agcccccgcgccccggtgcaggtcatc

SEQ ID NO: 36333 - RNA, 30 nt, synthetic construct
  misc_feature 1..30: note = Gephyrin (270-279)
  source 1..30: mol_type = other RNA
agcccccgcgcccaggccacctcccggctg

SEQ ID NO: 36334 - RNA, 27 nt, synthetic construct
  misc_feature 1..27: note = Tumor suppressor p53-binding protein 1 (1656-1664)
  source 1..27: mol_type = other RNA
agcccccgcgcctccatgggcgtgctg

SEQ ID NO: 36335 - RNA, 30 nt, synthetic construct
  misc_feature 1..30: note = Ras-related protein Rab-7a (111-120)
  source 1..30: mol_type = other RNA
agcccccgcgacccggagaacttccccttc

SEQ ID NO: 36336 - RNA, 27 nt, synthetic construct
  misc_feature 1..27: note = Ankyrin repeat and LEM domain-containing protein 2 (512-520)
  source 1..27: mol_type = other RNA
agcccccgcgacccggtgctgaccctc

SEQ ID NO: 36337 - RNA, 27 nt, synthetic construct
  misc_feature 1..27: note = Helicase SKI2W (1016-1024)
  source 1..27: mol_type = other RNA
agcccccgcttcccggcccagtacctg

SEQ ID NO: 36338 - RNA, 33 nt, synthetic construct
  misc_feature 1..33: note = Pleckstrin homology domain-containing family G member 2 (45-55)
  source 1..33: mol_type = other RNA
agcccccgcggctccgggagctccaccagcctg

SEQ ID NO: 36339 - RNA, 27 nt, synthetic construct
  misc_feature 1..27: note = Serine/threonine-protein kinase receptor R3 (5-13)
  source 1..27: mol_type = other RNA
agcccccgcaagggcctgctcatgctg

SEQ ID NO: 36340 - RNA, 27 nt, synthetic construct
  misc_feature 1..27: note = Procollagen-lysine,2-oxoglutarate 5-dioxygenase 2 (174-182)
  source 1..27: mol_type = other RNA
agcccccgcaagggctggtccttcatg

SEQ ID NO: 36341 - RNA, 27 nt, synthetic construct
  misc_feature 1..27: note = Tyrosine-protein kinase BAZ1B (197-205)
  source 1..27: mol_type = other RNA
agcccccgcaagctgccgacctccctc

SEQ ID NO: 36342 - RNA, 27 nt, synthetic construct
  misc_feature 1..27: note = Mitochondrial carrier homolog 1 (89-97)
  source 1..27: mol_type = other RNA
agcccccgcctgatgtccaacgccctc

SEQ ID NO: 36343 - RNA, 30 nt, synthetic construct
  misc_feature 1..30: note = Intercellular adhesion molecule 1 (5-14)
  source 1..30: mol_type = other RNA
agcccccgcccggccctgcccgccctcctg

SEQ ID NO: 36344 - RNA, 27 nt, synthetic construct
  misc_feature 1..27: note = AP-5 complex subunit mu-1 (117-125)
  source 1..27: mol_type = other RNA
agcccccgcccgcccctgatctccgtg

SEQ ID NO: 36345 - RNA, 27 nt, synthetic construct
  misc_feature 1..27: note = Integrator complex subunit 1 (211-219)
  source 1..27: mol_type = other RNA
agcccccgcccggtggccctggccctc

SEQ ID NO: 36346 - RNA, 33 nt, synthetic construct
  misc_feature 1..33: note = Nuclear receptor subfamily 1 group D member 1 (405-415)
  source 1..33: mol_type = other RNA
agcccccgccagggcaactccaagaacgtgctg

SEQ ID NO: 36347 - RNA, 27 nt, synthetic construct
  misc_feature 1..27: note = Sorbin and SH3 domain-containing protein 2 (230-238)
  source 1..27: mol_type = other RNA
agcccccgctcctacagctccaccctg

SEQ ID NO: 36348 - RNA, 27 nt, synthetic construct
  misc_feature 1..27: note = Baculoviral IAP repeat-containing protein 6 (4258-4266)
  source 1..27: mol_type = other RNA
agcccccgcgtgccgaactccagcgtc

SEQ ID NO: 36349 - RNA, 33 nt, synthetic construct
  misc_feature 1..33: note = Thymidine kinase, cytosolic (13-23)
  source 1..33: mol_type = other RNA
agcccctccaagacccgcggccagatccaggtg

SEQ ID NO: 36350 - RNA, 27 nt, synthetic construct
  misc_feature 1..27: note = Histone deacetylase 9 (322-330)
  source 1..27: mol_type = other RNA
agcccctccctgccgaacatcaccctc

SEQ ID NO: 36351 - RNA, 24 nt, synthetic construct
  misc_feature 1..24: note = Nucleolin (67-74)
  source 1..24: mol_type = other RNA
agccccaccaagaaggtggccgtc

SEQ ID NO: 36352 - RNA, 27 nt, synthetic construct
  misc_feature 1..27: note = Nucleolar protein 11 (166-174)
  source 1..27: mol_type = other RNA
agccaggaccccggcacccacgtggtc

SEQ ID NO: 36353 - RNA, 27 nt, synthetic construct
  misc_feature 1..27: note = Unconventional myosin-If (124-132)
  source 1..27: mol_type = other RNA
agccgcttcggcaagtacttcgagatc

SEQ ID NO: 36354 - RNA, 30 nt, synthetic construct
  misc_feature 1..30: note = DnaJ homolog subfamily B member 2 (131-140)
  source 1..30: mol_type = other RNA
agccgccactccggccccttcttcaccttc

SEQ ID NO: 36355 - RNA, 27 nt, synthetic construct
  misc_feature 1..27: note = Hyccin (228-236)
  source 1..27: mol_type = other RNA
agccgcatccccgtgtccagcggcttc

SEQ ID NO: 36356 - RNA, 27 nt, synthetic construct
  misc_feature 1..27: note = Merlin (587-595)
  source 1..27: mol_type = other RNA
agccgcgtggccttcttcgaggagctg

SEQ ID NO: 36357 - RNA, 27 nt, synthetic construct
  misc_feature 1..27: note = Catenin beta-1 (341-349)
  source 1..27: mol_type = other RNA
agccgcgtgctgaaggtcctctccgtg

SEQ ID NO: 36358 - RNA, 33 nt, synthetic construct
  misc_feature 1..33: note = Stomatin-like protein 2, mitochondrial (29-39)
  source 1..33: mol_type = other RNA
agctccggcctgccccgcaacaccgtggtcctc

SEQ ID NO: 36359 - RNA, 27 nt, synthetic construct
  misc_feature 1..27: note = General transcription factor 3C polypeptide 2 (775-783)
  source 1..27: mol_type = other RNA
agctccggcgtgcccaacccgcccaag

SEQ ID NO: 36360 - RNA, 30 nt, synthetic construct
  misc_feature 1..30: note = 60S ribosomal protein L10a (2-11)
  source 1..30: mol_type = other RNA
agctccaaggtgagccgcgacaccctgtac

SEQ ID NO: 36361 - RNA, 27 nt, synthetic construct
  misc_feature 1..27: note = Ashwin (155-163)
  source 1..27: mol_type = other RNA
agctccaacctgcccgtgaacaacaag

SEQ ID NO: 36362 - RNA, 27 nt, synthetic construct
  misc_feature 1..27: note = Transmembrane protein 176A (50-58)
  source 1..27: mol_type = other RNA
agctcccgcctgctcgtggccagctgg

SEQ ID NO: 36363 - RNA, 27 nt, synthetic construct
  misc_feature 1..27: note = Vimentin (72-80)
  source 1..27: mol_type = other RNA
agctccgtgcccggcgtccgcctgctc

SEQ ID NO: 36364 - RNA, 27 nt, synthetic construct
  misc_feature 1..27: note = Synaptotagmin-like protein 2 (282-290)
  source 1..27: mol_type = other RNA
agcaccgactccgagaccctgcgctac

SEQ ID NO: 36365 - RNA, 27 nt, synthetic construct
  misc_feature 1..27: note = Ribosomal protein S6 kinase alpha-3 (327-335)
  source 1..27: mol_type = other RNA
agcaccatcgactggaacaagctgtac

SEQ ID NO: 36366 - RNA, 33 nt, synthetic construct
  misc_feature 1..33: note = Serine/threonine-protein kinase RIO2 (494-504)
  source 1..33: mol_type = other RNA
agcaccatccccccggagctggtgaagcagaag

SEQ ID NO: 36367 - RNA, 36 nt, synthetic construct
  misc_feature 1..36: note = AP-3 complex subunit beta-1 (26-37)
  source 1..36: mol_type = other RNA
agcaccatctcccccagcggcgccttcgggctgttc

SEQ ID NO: 36368 - RNA, 33 nt, synthetic construct
  misc_feature 1..33: note = Forkhead box protein O1 (544-554)
  source 1..33: mol_type = other RNA
agcaccatgccccacacctccggcatgaaccgc

SEQ ID NO: 36369 - RNA, 27 nt, synthetic construct
  misc_feature 1..27: note = ATP-dependent RNA helicase DDX3X (410-418)
  source 1..27: mol_type = other RNA
agcacctccgagaacatcacccagaag

SEQ ID NO: 36370 - RNA, 30 nt, synthetic construct
  misc_feature 1..30: note = Elongation factor 1-alpha 1 (21-30)
  source 1..30: mol_type = other RNA
agcaccaccacgggccacctgatctacaag

SEQ ID NO: 36371 - RNA, 27 nt, synthetic construct
  misc_feature 1..27: note = Protein STON1-GTF2A1L (339-347)
  source 1..27: mol_type = other RNA
agcgtggccggcaagatccacaccgtc

SEQ ID NO: 36372 - RNA, 30 nt, synthetic construct
  misc_feature 1..30: note = Lysine-specific demethylase 7A (208-217)
  source 1..30: mol_type = other RNA
agcgtgttccccaagccgttcgtccagaag

SEQ ID NO: 36373 - RNA, 30 nt, synthetic construct
  misc_feature 1..30: note = Round spermatid basic protein 1-like protein (733-742)
  source 1..30: mol_type = other RNA
agcgtgttctccgacaagctgcacagcaag

SEQ ID NO: 36374 - RNA, 30 nt, synthetic construct
  misc_feature 1..30: note = Disintegrin and metalloproteinase domain-containing protein 10 (118-127)
  source 1..30: mol_type = other RNA
agcgtgatcgacggccgcttcgaggggttc

SEQ ID NO: 36375 - RNA, 27 nt, synthetic construct
  misc_feature 1..27: note = Inactive phospholipase C-like protein 2 (372-380)
  source 1..27: mol_type = other RNA
agcgtgatcgacatcatcaacaagtac

SEQ ID NO: 36376 - RNA, 27 nt, synthetic construct
  misc_feature 1..27: note = E3 ubiquitin-protein ligase UBR2 (812-820)
  source 1..27: mol_type = other RNA
agcgtgatcgaggccgtcgcccacttc

SEQ ID NO: 36377 - RNA, 27 nt, synthetic construct
  misc_feature 1..27: note = Transcription factor MafG (149-157)
  source 1..27: mol_type = other RNA
agcgtgatcaccatcgtcaagtccaag

SEQ ID NO: 36378 - RNA, 30 nt, synthetic construct
  misc_feature 1..30: note = Probable E3 ubiquitin-protein ligase HERC4 (549-558)
  source 1..30: mol_type = other RNA
agcgtgctggagcccccgctcttcctgaag

SEQ ID NO: 36379 - RNA, 30 nt, synthetic construct
  misc_feature 1..30: note = 40S ribosomal protein S6 (105-114)
  source 1..30: mol_type = other RNA
agcgtgctgaacctcgtcatcgtgaagaag

SEQ ID NO: 36380 - RNA, 30 nt, synthetic construct
  misc_feature 1..30: note = Pumilio homolog 1 (183-192)
  source 1..30: mol_type = other RNA
agcgtgtcccagcccatcatggtccagcgc

SEQ ID NO: 36381 - RNA, 27 nt, synthetic construct
  misc_feature 1..27: note = Phosphatidylinositol 3-kinase regulatory subunit gamma (51-59)
  source 1..27: mol_type = other RNA
agcgtggtcgagctgatcaaccactac

SEQ ID NO: 36382 - RNA, 27 nt, synthetic construct
  misc_feature 1..27: note Dolichyl-diphosphooligosaccharide-proteinosyltransferase subunit DAD1 (4-12)
  source 1..27: mol_type = other RNA
agcgtggtctccgtgatcagccgcttc

SEQ ID NO: 36383 - RNA, 27 nt, synthetic construct
  misc_feature 1..27: note = Protein TBRG4 (151-159)
  source 1..27: mol_type = other RNA
agcgtgtggcacggcaccctgtccaag

SEQ ID NO: 36384 - RNA, 27 nt, synthetic construct
  misc_feature 1..27: note = Nesprin-1 (4541-4549)
  source 1..27: mol_type = other RNA
agcgtgtacgactccgtcctgcagaag

SEQ ID NO: 36385 - RNA, 33 nt, synthetic construct
  misc_feature 1..33: note = Protein ELYS (1415-1425)
  source 1..33: mol_type = other RNA
agcgtgtacgagggcaagatcttcacccagaag

SEQ ID NO: 36386 - RNA, 30 nt, synthetic construct
  misc_feature 1..30: note = ATPase family AAA domain-containing protein 2 (757-766)
  source 1..30: mol_type = other RNA
agcgtgtacgagaacggcctgtcccagaag

SEQ ID NO: 36387 - RNA, 27 nt, synthetic construct
  misc_feature 1..27: note = Type I inositol 1,4,5-trisphosphate 5-phosphatase (94-102)
  source 1..27: mol_type = other RNA
agcgtgtactccggcatccgccacaag

SEQ ID NO: 36388 - RNA, 27 nt, synthetic construct
  misc_feature 1..27: note = Disks large homolog 3 (45-53)
  source 1..27: mol_type = other RNA
agctacggcgacatcctgcacgtgatc

SEQ ID NO: 36389 - RNA, 27 nt, synthetic construct
  misc_feature 1..27: note = Long-chain-fatty-acid-CoA ligase 5 (359-367)
  source 1..27: mol_type = other RNA
agctacctgcccctcgcccacatgttc

SEQ ID NO: 36390 - RNA, 27 nt, synthetic construct
  misc_feature 1..27: note = Trafficking protein particle complex subunit 1 (132-140)
  source 1..27: mol_type = other RNA
agctacgtgcgctccctgcccttcttc

SEQ ID NO: 36391 - RNA, 27 nt, synthetic construct
  misc_feature 1..27: note = HLA class I histocompatibility antigen, B-15 alpha chain (158-166)
  source 1..27: mol_type = other RNA
accgccgccgacaccgcggcccagatc

SEQ ID NO: 36392 - RNA, 27 nt, synthetic construct
  misc_feature 1..27: note = Bromodomain testis-specific protein (144-152)
  source 1..27: mol_type = other RNA
accgccgcccccccggcgcagcccctg

SEQ ID NO: 36393 - RNA, 24 nt, synthetic construct
  misc_feature 1..24: note = Heterochromatin protein 1-binding protein 3 (363-370)
  source 1..24: mol_type = other RNA
accgccctgaagaagtacgtgctc

SEQ ID NO: 36394 - RNA, 24 nt, synthetic construct
  misc_feature 1..24: note = Probable E3 ubiquitin-protein ligase HERC4 (592-599)
  source 1..24: mol_type = other RNA
accgccctgaaggtgctcgagatc

SEQ ID NO: 36395 - RNA, 24 nt, synthetic construct
  misc_feature 1..24: note = Histone H1.3 (4-11)
  source 1..24: mol_type = other RNA
accgcccccctggccccgaccatc

SEQ ID NO: 36396 - RNA, 27 nt, synthetic construct
  misc_feature 1..27: note = Malectin (10-18)
  source 1..27: mol_type = other RNA
accgccgtggccctgctccgcctgctg

SEQ ID NO: 36397 - RNA, 27 nt, synthetic construct
  misc_feature 1..27: note = Glyoxalase domain-containing protein 4 (117-125)
  source 1..27: mol_type = other RNA
accgaggcccccggcgggtacaagttc

SEQ ID NO: 36398 - RNA, 27 nt, synthetic construct
  misc_feature 1..27: note = SRSF protein kinase 2 (529-537)
  source 1..27: mol_type = other RNA
accgaggacatccagacccgccagtac

SEQ ID NO: 36399 - RNA, 36 nt, synthetic construct
  misc_feature 1..36: note = Twinfilin-2 (164-175)
  source 1..36: mol_type = other RNA
accgagatcagcgtggagtccaagcaccagaccctg

SEQ ID NO: 36400 - RNA, 27 nt, synthetic construct
  misc_feature 1..27: note = Nucleolar protein 14 (741-749)
  source 1..27: mol_type = other RNA
accgagatggagagccagaagcagctg

SEQ ID NO: 36401 - RNA, 27 nt, synthetic construct
  misc_feature 1..27: note = ATPase WRNIP1 (477-485)
  source 1..27: mol_type = other RNA
accgagaacgacgtgaaggagggcctg

SEQ ID NO: 36402 - RNA, 30 nt, synthetic construct
  misc_feature 1..30: note = 4F2 cell-surface antigen heavy chain (5-14)
  source 1..30: mol_type = other RNA
accgaggtggacatgaaggaggtcgagctg

SEQ ID NO: 36403 - RNA, 27 nt, synthetic construct
  misc_feature 1..27: note = Transgelin (191-199)
  source 1..27: mol_type = other RNA
accggctacgggcgcccccggcagatc

SEQ ID NO: 36404 - RNA, 27 nt, synthetic construct
  misc_feature 1..27: note = Splicing factor 3A subunit 3 (238-246)
  source 1..27: mol_type = other RNA
acccacgccggcgcccacctggacctc

SEQ ID NO: 36405 - RNA, 27 nt, synthetic construct
  misc_feature 1..27: note = Histone-binding protein RBBP4 (37-45)
  source 1..27: mol_type = other RNA
acccacgccctggagtggcccagcctc

SEQ ID NO: 36406 - RNA, 27 nt, synthetic construct
  misc_feature 1..27: note = Bifunctional glutamate/proline-tRNA ligase (614-622)
  source 1..27: mol_type = other RNA
acccacgccctgcccatcccggtgatc

SEQ ID NO: 36407 - RNA, 27 nt, synthetic construct
  misc_feature 1..27: note = Activator of 90 kDa heat shock protein ATPase homolog 1 (236-244)
  source 1..27: mol_type = other RNA
acccacgcccccgccaccctggaggcg

SEQ ID NO: 36408 - RNA, 27 nt, synthetic construct
  misc_feature 1..27: note = Integrin beta-7 (446-454)
  source 1..27: mol_type = other RNA
acccactgcctgcccgagccgcacctc

SEQ ID NO: 36409 - RNA, 30 nt, synthetic construct
  misc_feature 1..30: note = Echinoderm microtubule-associated protein-like 3 (848-857)
  source 1..30: mol_type = other RNA
acccacgacgacagccacctggtgtccctc

SEQ ID NO: 36410 - RNA, 27 nt, synthetic construct
  misc_feature 1..27: note = Double-stranded RNA-specific adenosine deaminase (1054-1062)
  source 1..27: mol_type = other RNA
acccacttcctgcagcccatctacctc

SEQ ID NO: 36411 - RNA, 27 nt, synthetic construct
  misc_feature 1..27: note = Histone deacetylase complex subunit SAP18 (85-93)
  source 1..27: mol_type = other RNA
acccacttcaacttcgccatcgtgttc

SEQ ID NO: 36412 - RNA, 27 nt, synthetic construct
  misc_feature 1..27: note = Ubiquitin carboxyl-terminal hydrolase 34 (2105-2113)
  source 1..27: mol_type = other RNA
acccacttcagcttccccctgcgcctc

SEQ ID NO: 36413 - RNA, 27 nt, synthetic construct
  misc_feature 1..27: note = Syntaxin-binding protein 1 (570-578)
  source 1..27: mol_type = other RNA
acccacatcctgaccccccagaagctc

SEQ ID NO: 36414 - RNA, 30 nt, synthetic construct
  misc_feature 1..30: note = Telomere-associated protein RIF1 (62-71)
  source 1..30: mol_type = other RNA
acccacatcagctcccagaacagcgagctg

SEQ ID NO: 36415 - RNA, 30 nt, synthetic construct
  misc_feature 1..30: note = RE1-silencing transcription factor (917-926)
  source 1..30: mol_type = other RNA
acccacatcagctccagcggccagaacctg

SEQ ID NO: 36416 - RNA, 27 nt, synthetic construct
  misc_feature 1..27: note = Microtubule-actin cross-linking factor 1, isoforms 1/2/3/5 (6374-6382)
  source 1..27: mol_type = other RNA
acccacatggagctgtacagccagctc

SEQ ID NO: 36417 - RNA, 27 nt, synthetic construct
  misc_feature 1..27: note = ATP-citrate synthase (409-417)
  source 1..27: mol_type = other RNA
acccacatgaccgccatcgtgggcatg

SEQ ID NO: 36418 - RNA, 27 nt, synthetic construct
  misc_feature 1..27: note = Protein tyrosine phosphatase type IVA 1 (22-30)
  source 1..27: mol_type = other RNA
acccacaaccccaccaacgccacgctg

SEQ ID NO: 36419 - RNA, 27 nt, synthetic construct
  misc_feature 1..27: note = Phospholipase D3 (389-397)
  source 1..27: mol_type = other RNA
acccacagcgacatccaggtgaagctg

SEQ ID NO: 36420 - RNA, 27 nt, synthetic construct
  misc_feature 1..27: note = General transcription factor IIH subunit 5 (41-49)
  source 1..27: mol_type = other RNA
acccacgtgttcgtcatcgccgagctg

SEQ ID NO: 36421 - RNA, 30 nt, synthetic construct
  misc_feature 1..30: note = DNA replication licensing factor MCM6 (781-790)
  source 1..30: mol_type = other RNA
acccactacgaccacgtgctgatcgagctc

SEQ ID NO: 36422 - RNA, 27 nt, synthetic construct
  misc_feature 1..27: note = Microfibrillar-associated protein 1 (372-380)
  source 1..27: mol_type = other RNA
accatcctgcccaaggtgatgcaggtc

SEQ ID NO: 36423 - RNA, 27 nt, synthetic construct
  misc_feature 1..27: note = Putative protein arginine N-methyltransferase 9 (164-172)
  source 1..27: mol_type = other RNA
accatctacaacgccgccatccagaag

SEQ ID NO: 36424 - RNA, 27 nt, synthetic construct
  misc_feature 1..27: note = Protein NYNRIN (1487-1495)
  source 1..27: mol_type = other RNA
accctggccgacatcatcgcccgcctc

SEQ ID NO: 36425 - RNA, 27 nt, synthetic construct
  misc_feature 1..27: note = Ankyrin repeat and KH domain-containing protein 1 (1028-1036)
  source 1..27: mol_type = other RNA
accctggacgacctcatcgccgccgtg

SEQ ID NO: 36426 - RNA, 27 nt, synthetic construct
  misc_feature 1..27: note = TGF-beta-activated kinase 1 and MAP3K7-binding protein 1 (426-434)
  source 1..27: mol_type = other RNA
accctggacgaggccacccccacgctc

SEQ ID NO: 36427 - RNA, 27 nt, synthetic construct
  misc_feature 1..27: note = Exocyst complex component 1 (91-99)
  source 1..27: mol_type = other RNA
accctgggcaacgtgctcgtcaccgtg

SEQ ID NO: 36428 - RNA, 30 nt, synthetic construct
  misc_feature 1..30: note = Spliceosome RNA helicase DDX39B (114-123)
  source 1..30: mol_type = other RNA
accctgcacggcctccagcagtactacgtg

SEQ ID NO: 36429 - RNA, 27 nt, synthetic construct
  misc_feature 1..27: note = Hexokinase-1 (35-43)
  source 1..27: mol_type = other RNA
accctgatcgacatcatgacccgcttc

SEQ ID NO: 36430 - RNA, 27 nt, synthetic construct
  misc_feature 1..27: note = Short transient receptor potential channel 4-associated protein (209-217)
  source 1..27: mol_type = other RNA
accctgatcgaggacatcctcggcgtg

SEQ ID NO: 36431 - RNA, 27 nt, synthetic construct
  misc_feature 1..27: note = Cullin-7 (386-394)
  source 1..27: mol_type = other RNA
accctgatcagcgagctcgtgcaggcc

SEQ ID NO: 36432 - RNA, 33 nt, synthetic construct
  misc_feature 1..33: note = T-complex protein 1 subunit eta (11-21)
  source 1..33: mol_type = other RNA
accctgctcgccgccgagttcctgaagcaggtg

SEQ ID NO: 36433 - RNA, 33 nt, synthetic construct
  misc_feature 1..33: note = NADH-cytochrome b5 reductase 1 (39-49)
  source 1..33: mol_type = other RNA
accctgctcgaccccaacgagaagtacctgctg

SEQ ID NO: 36434 - RNA, 27 nt, synthetic construct
  misc_feature 1..27: note = Centrosomal protein POC5 (254-262)
  source 1..27: mol_type = other RNA
accctgctcaagaaggtgtggaaggtc

SEQ ID NO: 36435 - RNA, 27 nt, synthetic construct
  misc_feature 1..27: note = Protrudin (88-96)
  source 1..27: mol_type = other RNA
accctgctcaacagcaccctgttcctg

SEQ ID NO: 36436 - RNA, 27 nt, synthetic construct
  misc_feature 1..27: note = Eukaryotic translation initiation factor 3 subunit M (163-171)
  source 1..27: mol_type = other RNA
accctgctccgcctgctgtacgaggcc

SEQ ID NO: 36437 - RNA, 27 nt, synthetic construct
  misc_feature 1..27: note = DNA mismatch repair protein Msh6 (739-747)
  source 1..27: mol_type = other RNA
accctgaacaacctcgagatcttcctg

SEQ ID NO: 36438 - RNA, 27 nt, synthetic construct
  misc_feature 1..27: note = Protein SDA1 homolog (404-412)
  source 1..27: mol_type = other RNA
accctgaacccccagatgctccagaag

SEQ ID NO: 36439 - RNA, 27 nt, synthetic construct
  misc_feature 1..27: note = Testis-expressed sequence 10 protein (436-444)
  source 1..27: mol_type = other RNA
accctgagcgacatcatggtgtccctc

SEQ ID NO: 36440 - RNA, 27 nt, synthetic construct
  misc_feature 1..27: note = Transcription initiation factor TFIID subunit 8 (89-97)
  source 1..27: mol_type = other RNA
accctgagcgacatcgtggtcaccctc

SEQ ID NO: 36441 - RNA, 27 nt, synthetic construct
  misc_feature 1..27: note = Serine/threonine-protein kinase SIK2 (269-277)
  source 1..27: mol_type = other RNA
accctgagcgaggtgaccaaccagctc

SEQ ID NO: 36442 - RNA, 27 nt, synthetic construct
  misc_feature 1..27: note = MAP kinase-activating death domain protein (291-299)
  source 1..27: mol_type = other RNA
accctggtggacttccccctccacctg

SEQ ID NO: 36443 - RNA, 33 nt, synthetic construct
  misc_feature 1..33: note = Motile sperm domain-containing protein 1 (39-49)
  source 1..33: mol_type = other RNA
accctgtacaacccctacgagttcgccctcaag

SEQ ID NO: 36444 - RNA, 27 nt, synthetic construct
  misc_feature 1..27: note = Chondroitin sulfate proteoglycan 4 (21-29)
  source 1..27: mol_type = other RNA
accatgctggcccgcctcgccagcgcg

SEQ ID NO: 36445 - RNA, 27 nt, synthetic construct
  misc_feature 1..27: note = Poly (ADP-ribose) polymerase 14 (1511-1519)
  source 1..27: mol_type = other RNA
accatgaacgagaagcagctgttccac

SEQ ID NO: 36446 - RNA, 27 nt, synthetic construct
  misc_feature 1..27: note = ATP-binding cassette sub-family F member 2 (218-226)
  source 1..27: mol_type = other RNA
acccccgccatgcagcgcaagaagctg

SEQ ID NO: 36447 - RNA, 27 nt, synthetic construct
  misc_feature 1..27: note = Splicing factor, arginine/serine-rich 19 (1147-1155)
  source 1..27: mol_type = other RNA
acccccgccccggtgcccaccagcctg

SEQ ID NO: 36448 - RNA, 27 nt, synthetic construct
  misc_feature 1..27: note = SCAN domain-containing protein 1 (132-140)
  source 1..27: mol_type = other RNA
acccccggcccggccgggagccgcctg

SEQ ID NO: 36449 - RNA, 27 nt, synthetic construct
  misc_feature 1..27: note Dolichyl-diphosphooligosaccharide-proteinosyltransferase subunit 2 (291-299)
  source 1..27: mol_type = other RNA
accccccaccagaccttcgtgcgcctg

SEQ ID NO: 36450 - RNA, 27 nt, synthetic construct
  misc_feature 1..27: note = Protein ELYS (1773-1781)
  source 1..27: mol_type = other RNA
acccccaagatgccgggccagagcgtg

SEQ ID NO: 36451 - RNA, 27 nt, synthetic construct
  misc_feature 1..27: note = Microtubule-associated protein 4 (892-900)
  source 1..27: mol_type = other RNA
acccccatgccgagccgcccctccacc

SEQ ID NO: 36452 - RNA, 24 nt, synthetic construct
  misc_feature 1..24: note = Nucleophosmin (95-102)
  source 1..24: mol_type = other RNA
acccccccggtggtcctgcgcctc

SEQ ID NO: 36453 - RNA, 33 nt, synthetic construct
  misc_feature 1..33: note = Filamin-A (812-822)
  source 1..33: mol_type = other RNA
accccccgcggcgccgggagctacaccatcatg

SEQ ID NO: 36454 - RNA, 33 nt, synthetic construct
  misc_feature 1..33: note = 40S ribosomal protein S9 (15-25)
  source 1..33: mol_type = other RNA
accccccgccggccgttcgagaagagccgcctg

SEQ ID NO: 36455 - RNA, 27 nt, synthetic construct
  misc_feature 1..27: note = BTB/POZ domain-containing adapter for CUL3-mediated RhoA degradation protein 2 (290-298)
  source 1..27: mol_type = other RNA
accccccgcgtgccggacaacagcctg

SEQ ID NO: 36456 - RNA, 27 nt, synthetic construct
  misc_feature 1..27: note = Sentrin-specific protease 3 (353-361)
  source 1..27: mol_type = other RNA
acccccagccgcaagggcctggtgctc

SEQ ID NO: 36457 - RNA, 24 nt, synthetic construct
  misc_feature 1..24: note = Interferon regulatory factor 1 (54-61)
  source 1..24: mol_type = other RNA
acccccgtgcgcctgccgagcatc

SEQ ID NO: 36458 - RNA, 27 nt, synthetic construct
  misc_feature 1..27: note = Replication protein A 70 kDa DNA-binding subunit (191-199)
  source 1..27: mol_type = other RNA
accccctaccagagcaagtggaccatc

SEQ ID NO: 36459 - RNA, 27 nt, synthetic construct
  misc_feature 1..27: note = Splicing factor U2AF 65 kDa subunit (179-187)
  source 1..27: mol_type = other RNA
acccaggcccccggcaacccggtgctg

SEQ ID NO: 36460 - RNA, 27 nt, synthetic construct
  misc_feature 1..27: note = GPN-loop GTPase 1 (88-96)
  source 1..27: mol_type = other RNA
acccgcttcgaccaggtgatgaagttc

SEQ ID NO: 36461 - RNA, 27 nt, synthetic construct
  misc_feature 1..27: note = RuvB-like 2 (391-399)
  source 1..27: mol_type = other RNA
acccgcatcggcctggagaccagcctc

SEQ ID NO: 36462 - RNA, 27 nt, synthetic construct
  misc_feature 1..27: note = 40S ribosomal protein S4, Y isoform 2 (220-228)
  source 1..27: mol_type = other RNA
acccgcatcagcaacatcttcgtgatc

SEQ ID NO: 36463 - RNA, 27 nt, synthetic construct
  misc_feature 1..27: note = 40S ribosomal protein S4, X isoform (201-209)
  source 1..27: mol_type = other RNA
acccgcctgagcaacatcttcgtgatc

SEQ ID NO: 36464 - RNA, 27 nt, synthetic construct
  misc_feature 1..27: note = Transmembrane protein 147 (157-165)
  source 1..27: mol_type = other RNA
acccgctacgacctgtaccacaccttc

SEQ ID NO: 36465 - RNA, 30 nt, synthetic construct
  misc_feature 1..30: note = Transcriptional regulator Kaiso (365-374)
  source 1..30: mol_type = other RNA
accagcttcgacggctccctgatccagaag

SEQ ID NO: 36466 - RNA, 24 nt, synthetic construct
  misc_feature 1..24: note = HCG2043421, isoform CRA_c (58-65)
  source 1..24: mol_type = other RNA
accagcaagcagcccgtgggcttc

SEQ ID NO: 36467 - RNA, 27 nt, synthetic construct
  misc_feature 1..27: note = WD repeat-containing protein 78 (675-683)
  source 1..27: mol_type = other RNA
accagcgtggtctacgacgtggcctgg

SEQ ID NO: 36468 - RNA, 27 nt, synthetic construct
  misc_feature 1..27: note = Non-POU domain-containing octamer-binding protein (127-135)
  source 1..27: mol_type = other RNA
accaccttcccccgcccggtgacggtc

SEQ ID NO: 36469 - RNA, 33 nt, synthetic construct
  misc_feature 1..33: note = Nicotinamide phosphoribosyltransferase (220-230)
  source 1..33: mol_type = other RNA
accgtggccggcctggccctcatcaagaagtac

SEQ ID NO: 36470 - RNA, 27 nt, synthetic construct
  misc_feature 1..27: note = 1,2-dihydroxy-3-keto-5-methylthiopentene dioxygenase (150-158)
  source 1..27: mol_type = other RNA
accgtggacgagaagaactacaccaag

SEQ ID NO: 36471 - RNA, 30 nt, synthetic construct
  misc_feature 1..30: note = Aldehyde dehydrogenase family 16 member A1 (661-670)
  source 1..30: mol_type = other RNA
accgtgttccccgccggcctggccaacgtc

SEQ ID NO: 36472 - RNA, 27 nt, synthetic construct
  misc_feature 1..27: note = Protein phosphatase 1D (261-269)
  source 1..27: mol_type = other RNA
accgtgatcgaccagatccccttcctg

SEQ ID NO: 36473 - RNA, 27 nt, synthetic construct
  misc_feature 1..27: note = Integrin beta-7 (200-208)
  source 1..27: mol_type = other RNA
accgtgctgcccttcgtcagcaccgtg

SEQ ID NO: 36474 - RNA, 27 nt, synthetic construct
  misc_feature 1..27: note = Caspase-1 (49-57)
  source 1..27: mol_type = other RNA
accgtgatggacaagacccgcgccctg

SEQ ID NO: 36475 - RNA, 27 nt, synthetic construct
  misc_feature 1..27: note = Kelch-like protein 8 (200-208)
  source 1..27: mol_type = other RNA
accgtgatgggcaagatcttcgccgtc

SEQ ID NO: 36476 - RNA, 27 nt, synthetic construct
  misc_feature 1..27: note CMP-N-acetylneuraminate-beta-galactosamide-alpha-2,3-sialyl transf erase 1 (229-237)
  source 1..27: mol_type = other RNA
acctacatccccgtgccggccaagatc

SEQ ID NO: 36477 - RNA, 27 nt, synthetic construct
  misc_feature 1..27: note = Vacuolar protein sorting-associated protein 13C (2564-2572)
  source 1..27: mol_type = other RNA
acctacatcagctggaaggaggagctg

SEQ ID NO: 36478 - RNA, 27 nt, synthetic construct
  misc_feature 1..27: note = Rho GTPase-activating protein 18 (597-605)
  source 1..27: mol_type = other RNA
acctacatgaaggacctgtaccagctc

SEQ ID NO: 36479 - RNA, 27 nt, synthetic construct
  misc_feature 1..27: note = Plexin-B2 (1279-1287)
  source 1..27: mol_type = other RNA
acctacaccgaccgcgtgttcttcctg

SEQ ID NO: 36480 - RNA, 27 nt, synthetic construct
  misc_feature 1..27: note = Poly (ADP-ribose) polymerase 14 (1544-1552)
  source 1..27: mol_type = other RNA
gtggcctacggcaaggggacctacttc

SEQ ID NO: 36481 - RNA, 27 nt, synthetic construct
  misc_feature 1..27: note = Zinc finger SWIM domain-containing protein 1 (322-330)
  source 1..27: mol_type = other RNA
gtggagagccacatccagcactccctg

SEQ ID NO: 36482 - RNA, 27 nt, synthetic construct
  misc_feature 1..27: note = Putative 40S ribosomal protein S10-like (27-35)
  source 1..27: mol_type = other RNA
gtgcacatgcccaagcacccggagctg

SEQ ID NO: 36483 - RNA, 30 nt, synthetic construct
  misc_feature 1..30: note = Inosine-5'-monophosphate dehydrogenase 2 (361-370)
  source 1..30: mol_type = other RNA
gtgatcgccgacggcgggatccagaacgtc

SEQ ID NO: 36484 - RNA, 27 nt, synthetic construct
  misc_feature 1..27: note = Protein DENND6A (261-269)
  source 1..27: mol_type = other RNA
gtgatcctgcccaccgtccacgaggtg

SEQ ID NO: 36485 - RNA, 27 nt, synthetic construct
  misc_feature 1..27: note = N-glycosylase/DNA lyase (58-66)
  source 1..27: mol_type = other RNA
gtgctggccgaccaggtctggaccctc

SEQ ID NO: 36486 - RNA, 27 nt, synthetic construct
  misc_feature 1..27: note = CREB-binding protein (238-246)
  source 1..27: mol_type = other RNA
gtgctggccgagaccctcacccaggtc

SEQ ID NO: 36487 - RNA, 27 nt, synthetic construct
  misc_feature 1..27: note = Transmembrane protein 209 (29-37)
  source 1..27: mol_type = other RNA
gtgctggcctggggcctcctgaacgtc

SEQ ID NO: 36488 - RNA, 27 nt, synthetic construct
  misc_feature 1..27: note = Kelch-like protein 5 (324-332)
  source 1..27: mol_type = other RNA
gtgctggacgacaagctctacgtcgtg

SEQ ID NO: 36489 - RNA, 27 nt, synthetic construct
  misc_feature 1..27: note = RNA-binding protein 40 (490-498)
  source 1..27: mol_type = other RNA
gtgctgttcggcaagcccatggtcgtg

SEQ ID NO: 36490 - RNA, 27 nt, synthetic construct
  misc_feature 1..27: note = Pre-mRNA-splicing factor ATP-dependent RNA helicase PRP16 (663-671)
  source 1..27: mol_type = other RNA
gtgctgttcggcctcctgcgcgaggtc

SEQ ID NO: 36491 - RNA, 36 nt, synthetic construct
  misc_feature 1..36: note = Translocon-associated protein subunit alpha (19-30)
  source 1..36: mol_type = other RNA
gtgctgttccgcggcgggccccggggcctcctggcc

SEQ ID NO: 36492 - RNA, 36 nt, synthetic construct
  misc_feature 1..36: note = Translocon-associated protein subunit alpha (19-30)
  source 1..36: mol_type = other RNA
gtgctgttccgcggcgggccccggggcagcctcgcc

SEQ ID NO: 36493 - RNA, 33 nt, synthetic construct
  misc_feature 1..33: note = Major prion protein (226-236)
  source 1..33: mol_type = other RNA
gtgctgttcagctcccccccggtcatcctcctg

SEQ ID NO: 36494 - RNA, 27 nt, synthetic construct
  misc_feature 1..27: note = Fibroblast growth factor receptor substrate 2 (252-260)
  source 1..27: mol_type = other RNA
gtgctgggccccaccccggtccagaag

SEQ ID NO: 36495 - RNA, 30 nt, synthetic construct
  misc_feature 1..30: note = Actin-related protein 2/3 complex subunit 4 (61-70)
  source 1..30: mol_type = other RNA
gtgctgatcgagggcagcatcaactccgtc

SEQ ID NO: 36496 - RNA, 30 nt, synthetic construct
  misc_feature 1..30: note = mRNA cap guanine-N7 methyltransferase (182-191)
  source 1..30: mol_type = other RNA
gtgctgatcggcgagttcctcgagaaggtc

SEQ ID NO: 36497 - RNA, 30 nt, synthetic construct
  misc_feature 1..30: note = Trabeculin-alpha (4505-4514)
  source 1..30: mol_type = other RNA
gtgctgatcaagaacctcctggtcagcgtg

SEQ ID NO: 36498 - RNA, 27 nt, synthetic construct
  misc_feature 1..27: note = ATP-binding cassette sub-family F member 3 (85-93)
  source 1..27: mol_type = other RNA
gtgctgctcgacgcccccatccagctg

SEQ ID NO: 36499 - RNA, 27 nt, synthetic construct
  misc_feature 1..27: note = Vacuolar protein sorting-associated protein 8 homolog (414-422)
  source 1..27: mol_type = other RNA
gtgctgctcgacagcgtcgagaagctg

SEQ ID NO: 36500 - RNA, 30 nt, synthetic construct
  misc_feature 1..30: note = Fragile X mental retardation protein 1 (19-28)
  source 1..30: mol_type = other RNA
gtgctgctcgactaccacctgaactacctg

SEQ ID NO: 36501 - RNA, 27 nt, synthetic construct
  misc_feature 1..27: note = Signal recognition particle 14 kDa protein (2-10)
  source 1..27: mol_type = other RNA
gtgctgctcgagagcgagcagttcctg

SEQ ID NO: 36502 - RNA, 36 nt, synthetic construct
  misc_feature 1..36: note = Signal recognition particle 14 kDa protein (2-13)
  source 1..36: mol_type = other RNA
gtgctgctcgagagcgagcagttcctgaccgagctg

SEQ ID NO: 36503 - RNA, 27 nt, synthetic construct
  misc_feature 1..27: note = Leucine-tRNA ligase, cytoplasmic (328-336)
  source 1..27: mol_type = other RNA
gtgctgatggagaacatcgtctacctc

SEQ ID NO: 36504 - RNA, 30 nt, synthetic construct
  misc_feature 1..30: note = E3 ubiquitin-protein ligase MARCH6 (457-466)
  source 1..30: mol_type = other RNA
gtgctgcccaacttcctcccgtacaacgtc

SEQ ID NO: 36505 - RNA, 27 nt, synthetic construct
  misc_feature 1..27: note = DNA replication licensing factor MCM5 (120-128)
  source 1..27: mol_type = other RNA
gtgctgcaggacatccaggtcatgctc

SEQ ID NO: 36506 - RNA, 27 nt, synthetic construct
  misc_feature 1..27: note = Sarcolemmal membrane-associated protein (140-148)
  source 1..27: mol_type = other RNA
gtgctgcaggagaagatcgaggtcgtg

SEQ ID NO: 36507 - RNA, 27 nt, synthetic construct
  misc_feature 1..27: note = Trabeculin-alpha (2088-2096)
  source 1..27: mol_type = other RNA
gtgctgcagggcaagctcgccgaggtc

SEQ ID NO: 36508 - RNA, 27 nt, synthetic construct
  misc_feature 1..27: note = Cytoplasmic dynein 1 heavy chain 1 (1781-1789)
  source 1..27: mol_type = other RNA
gtgctgagcaacgtcgaggtgaccctc

SEQ ID NO: 36509 - RNA, 27 nt, synthetic construct
  misc_feature 1..27: note = 5-formyltetrahydrofolate cyclo-ligase (35-43)
  source 1..27: mol_type = other RNA
gtgctgagccagaaggtcatcgcccac

SEQ ID NO: 36510 - RNA, 24 nt, synthetic construct
  misc_feature 1..24: note = Signal transducer and activator of transcription 1-alpha/beta (300-307)
  source 1..24: mol_type = other RNA
gtgctgtgggaccgcaccttcagc

SEQ ID NO: 36511 - RNA, 30 nt, synthetic construct
  misc_feature 1..30: note = Signal transducer and activator of transcription 1-alpha/beta (300-309)
  source 1..30: mol_type = other RNA
gtgctgtgggaccgcaccttcagcctcttc

SEQ ID NO: 36512 - RNA, 27 nt, synthetic construct
  misc_feature 1..27: note = Pre-rRNA-processing protein TSR1 homolog (678-686)
  source 1..27: mol_type = other RNA
gtgctgtggttcaagcccgtcgagctc

SEQ ID NO: 36513 - RNA, 27 nt, synthetic construct
  misc_feature 1..27: note = Dolichol-phosphate mannosyltransferase subunit 3 (58-66)
  source 1..27: mol_type = other RNA
gtgctgtggcccctcccggcctacctg

SEQ ID NO: 36514 - RNA, 33 nt, synthetic construct
  misc_feature 1..33: note = Msx2-interacting protein (557-567)
  source 1..33: mol_type = other RNA
gtgctgtacaacgagatcgagtacgcccaggcc

SEQ ID NO: 36515 - RNA, 27 nt, synthetic construct
  misc_feature 1..27: note = 2',5'-phosphodiesterase 12 (419-427)
  source 1..27: mol_type = other RNA
gtgctgtaccccagcgcccaggagaag

SEQ ID NO: 36516 - RNA, 27 nt, synthetic construct
  misc_feature 1..27: note = Serine/threonine-protein kinase ATR (2265-2273)
  source 1..27: mol_type = other RNA
gtgatgatccccaccctgccgagcatc

SEQ ID NO: 36517 - RNA, 27 nt, synthetic construct
  misc_feature 1..27: note = Receptor-type tyrosine-protein phosphatase U (975-983)
  source 1..27: mol_type = other RNA
gtgatgatcaccaagctggtcgaggtg

SEQ ID NO: 36518 - RNA, 27 nt, synthetic construct
  misc_feature 1..27: note = Translocon-associated protein subunit gamma (64-72)
  source 1..27: mol_type = other RNA
gtgatgaccctggtcagcacctacctc

SEQ ID NO: 36519 - RNA, 24 nt, synthetic construct
  misc_feature 1..24: note = 60S ribosomal protein L13a (120-127)
  source 1..24: mol_type = other RNA
gtgcccgccgccctgaaggtcgtg

SEQ ID NO: 36520 - RNA, 27 nt, synthetic construct
  misc_feature 1..27: note = Ankyrin repeat and KH domain-containing protein 1 (1721-1729)
  source 1..27: mol_type = other RNA
gtgcccgccagcgtcgtgtcccgcatc

SEQ ID NO: 36521 - RNA, 27 nt, synthetic construct
  misc_feature 1..27: note = Protein UXT (95-103)
  source 1..27: mol_type = other RNA
gtgcccgacaccagccgcatctacgtc

SEQ ID NO: 36522 - RNA, 27 nt, synthetic construct
  misc_feature 1..27: note = Guanine nucleotide-binding protein-like 3 (295-303)
  source 1..27: mol_type = other RNA
gtgcccctggacaagcagatcaccatc

SEQ ID NO: 36523 - RNA, 27 nt, synthetic construct
  misc_feature 1..27: note = Pumilio homolog 1 (345-353)
  source 1..27: mol_type = other RNA
gtgcccctggacccgatggagcacgtc

SEQ ID NO: 36524 - RNA, 27 nt, synthetic construct
  misc_feature 1..27: note = Myotubularin (85-93)
  source 1..27: mol_type = other RNA
gtgcccctgggcgtcatcagccgcatc

SEQ ID NO: 36525 - RNA, 24 nt, synthetic construct
  misc_feature 1..24: note = Ran-binding protein 6 (956-963)
  source 1..24: mol_type = other RNA
gtgcccctgctcgtcaaggtgatc

SEQ ID NO: 36526 - RNA, 27 nt, synthetic construct
  misc_feature 1..27: note = Cytoplasmic dynein 1 heavy chain 1 (2524-2532)
  source 1..27: mol_type = other RNA
gtgcccctgccgaccgcccccaacatc

SEQ ID NO: 36527 - RNA, 27 nt, synthetic construct
  misc_feature 1..27: note = Transcriptional regulator Kaiso (118-126)
  source 1..27: mol_type = other RNA
gtgcccctgagccaggtcaagtccatc

SEQ ID NO: 36528 - RNA, 27 nt, synthetic construct
  misc_feature 1..27: note = Transcription factor Sp4 (217-225)
  source 1..27: mol_type = other RNA
gtgcccaacctgcagaccgtcagcgtg

SEQ ID NO: 36529 - RNA, 27 nt, synthetic construct
  misc_feature 1..27: note = L-lactate dehydrogenase B chain (19-27)
  source 1..27: mol_type = other RNA
gtgcccaacaacaagatcaccgtcgtg

SEQ ID NO: 36530 - RNA, 27 nt, synthetic construct
  misc_feature 1..27: note = Histone deacetylase complex subunit SAP130 (800-808)
  source 1..27: mol_type = other RNA
gtgcccccgctggccaccaacaccgtc

SEQ ID NO: 36531 - RNA, 30 nt, synthetic construct
  misc_feature 1..30: note = Endoplasmic reticulum resident protein 29 (5-14)
  source 1..30: mol_type = other RNA
gtgccccgcgccgccttcctgagcccgctc

SEQ ID NO: 36532 - RNA, 27 nt, synthetic construct
  misc_feature 1..27: note = Myotubularin (35-43)
  source 1..27: mol_type = other RNA
gtgccccgcctgccgggcgagaccctc

SEQ ID NO: 36533 - RNA, 27 nt, synthetic construct
  misc_feature 1..27: note = Adapter protein CIKS (387-395)
  source 1..27: mol_type = other RNA
gtgccccgcccgcccagcaaccccccc

SEQ ID NO: 36534 - RNA, 27 nt, synthetic construct
  misc_feature 1..27: note = Histone H2A deubiquitinase MYSM1 (446-454)
  source 1..27: mol_type = other RNA
gtgccccgcccgaccaagagctccttc

SEQ ID NO: 36535 - RNA, 30 nt, synthetic construct
  misc_feature 1..30: note = PDZ and LIM domain protein 5 (203-212)
  source 1..30: mol_type = other RNA
gtgccccgccagccgaccgtcaccagcgtg

SEQ ID NO: 36536 - RNA, 33 nt, synthetic construct
  misc_feature 1..33: note = Filamin-A (1503-1513)
  source 1..33: mol_type = other RNA
gtgccccgcagcccgttcaaggtcaaggtgctg

SEQ ID NO: 36537 - RNA, 27 nt, synthetic construct
  misc_feature 1..27: note = Ankyrin repeat domain-containing protein 40 (223-231)
  source 1..27: mol_type = other RNA
gtgcccagcaagccgcccatgtccctg

SEQ ID NO: 36538 - RNA, 27 nt, synthetic construct
  misc_feature 1..27: note = Uroporphyrinogen decarboxylase (106-114)
  source 1..27: mol_type = other RNA
gtgccctacctggtcggccaggtggtg

SEQ ID NO: 36539 - RNA, 24 nt, synthetic construct
  misc_feature 1..24: note = Puromycin-sensitive aminopeptidase-like protein (298-305)
  source 1..24: mol_type = other RNA
gtgccctacccgctgcccaagatc

SEQ ID NO: 36540 - RNA, 36 nt, synthetic construct
  misc_feature 1..36: note = Elongation factor 1-beta (214-225)
  source 1..36: mol_type = other RNA
gtgcagagcatggacgtcgccgccttcaacaagatc

SEQ ID NO: 36541 - RNA, 30 nt, synthetic construct
  misc_feature 1..30: note = DNA repair protein RAD51 homolog 3 (23-32)
  source 1..30: mol_type = other RNA
gtgcgcgtcaagctggtgagcgccggcttc

SEQ ID NO: 36542 - RNA, 27 nt, synthetic construct
  misc_feature 1..27: note = CGG triplet repeat-binding protein 1 (6-14)
  source 1..27: mol_type = other RNA
gtgaccgcccccccggcccgcaaccgg

SEQ ID NO: 36543 - RNA, 27 nt, synthetic construct
  misc_feature 1..27: note = UDP-N-acetylhexosamine pyrophosphorylase-like protein 1 (35-43)
  source 1..27: mol_type = other RNA
gtgacctaccccaagggcatgtaccgc

SEQ ID NO: 36544 - RNA, 27 nt, synthetic construct
  misc_feature 1..27: note = Transformation/transcription domain-associated protein (246-254)
  source 1..27: mol_type = other RNA
gtggtcgccgagttcgtgcccctgatc

SEQ ID NO: 36545 - RNA, 27 nt, synthetic construct
  misc_feature 1..27: note = Ubiquitin carboxyl-terminal hydrolase BAP1 (172-180)
  source 1..27: mol_type = other RNA
gtggtcaagcccccgggcagctccctg

SEQ ID NO: 36546 - RNA, 27 nt, synthetic construct
  misc_feature 1..27: note = Ran-binding protein 9 (33-41)
  source 1..27: mol_type = other RNA
gtggtcctgcccgccccgcccgccgtg

SEQ ID NO: 36547 - RNA, 30 nt, synthetic construct
  misc_feature 1..30: note = ATP-dependent DNA helicase Q1 (430-439)
  source 1..30: mol_type = other RNA
gtggtcatggagaacgtgggccagcagaag

SEQ ID NO: 36548 - RNA, 27 nt, synthetic construct
  misc_feature 1..27: note = Heterogeneous nuclear ribonucleoprotein A1 (44-52)
  source 1..27: mol_type = other RNA
gtggtcatgcgcgaccccaacaccaag

SEQ ID NO: 36549 - RNA, 30 nt, synthetic construct
  misc_feature 1..30: note = G2/mitotic-specific cyclin-B1 (387-396)
  source 1..30: mol_type = other RNA
gtggtcatggtgaaccagggcctgaccaag

SEQ ID NO: 36550 - RNA, 27 nt, synthetic construct
  misc_feature 1..27: note = Ral GTPase-activating protein subunit beta (37-45)
  source 1..27: mol_type = other RNA
gtggtccgccccctgggccaggtgctc

SEQ ID NO: 36551 - RNA, 27 nt, synthetic construct
  misc_feature 1..27: note = CTD small phosphatase-like protein 2 (354-362)
  source 1..27: mol_type = other RNA
gtgtacgccgacaagctgctcaacatc

SEQ ID NO: 36552 - RNA, 27 nt, synthetic construct
  misc_feature 1..27: note = Sorting nexin-8 (400-408)
  source 1..27: mol_type = other RNA
gtgtacctgcccctcaccagccacatc

SEQ ID NO: 36553 - RNA, 27 nt, synthetic construct
  misc_feature 1..27: note = Tuftelin-interacting protein 11 (428-436)
  source 1..27: mol_type = other RNA
gtgtaccccctgatgaaggagtacttc

SEQ ID NO: 36554 - RNA, 27 nt, synthetic construct
  misc_feature 1..27: note = Syntaxin-binding protein 6 (92-100)
  source 1..27: mol_type = other RNA
tggatgctggagcagctccgccaggtg

SEQ ID NO: 36555 - RNA, 27 nt, synthetic construct
  misc_feature 1..27: note = Protein syndesmos (33-41)
  source 1..27: mol_type = other RNA
tacgccgccaaccccggccagctgttc

SEQ ID NO: 36556 - RNA, 27 nt, synthetic construct
  misc_feature 1..27: note = Heat shock cognate 71 kDa protein (545-553)
  source 1..27: mol_type = other RNA
tacgccttcaacatgaaggccaccgtg

SEQ ID NO: 36557 - RNA, 27 nt, synthetic construct
  misc_feature 1..27: note = HLA class I histocompatibility antigen, alpha chain G (115-123)
  source 1..27: mol_type = other RNA
tacgcctacgacggcaaggactacctg

SEQ ID NO: 36558 - RNA, 30 nt, synthetic construct
  misc_feature 1..30: note = RHO/RAC effector protein (1011-1020)
  source 1..30: mol_type = other RNA
tacgagatcgacatgaagcagtacaccctg

SEQ ID NO: 36559 - RNA, 27 nt, synthetic construct
  misc_feature 1..27: note = Actin, alpha skeletal muscle (36-44)
  source 1..27: mol_type = other RNA
tacgagctgcccgacggccaggtgatc

SEQ ID NO: 36560 - RNA, 36 nt, synthetic construct
  misc_feature 1..36: note = Mitogen-activated protein kinase kinase kinase 6 (112-123)
  source 1..36: mol_type = other RNA
tacgagtacaccgagaccggcgagcgcctggtgctc

SEQ ID NO: 36561 - RNA, 27 nt, synthetic construct
  misc_feature 1..27: note = Gametogenetin-binding protein 2 (25-33)
  source 1..27: mol_type = other RNA
tacatcgacgacaccctgaccatggtg

SEQ ID NO: 36562 - RNA, 27 nt, synthetic construct
  misc_feature 1..27: note = ATP-dependent 6-phosphofructokinase, muscle type (292-300)
  source 1..27: mol_type = other RNA
tacatcttcgaggagcccttcaccatc

SEQ ID NO: 36563 - RNA, 27 nt, synthetic construct
  misc_feature 1..27: note = Sphingomyelin phosphodiesterase 4 (105-113)
  source 1..27: mol_type = other RNA
tacaagttcgacttccccgtgagctac

SEQ ID NO: 36564 - RNA, 27 nt, synthetic construct
  misc_feature 1..27: note = Microsomal glutathione S-transferase 3 (36-44)
  source 1..27: mol_type = other RNA
tacaaggtggagtaccccatcatgtac

SEQ ID NO: 36565 - RNA, 27 nt, synthetic construct
  misc_feature 1..27: note = Zinc finger BED domain-containing protein 5 (476-484)
  source 1..27: mol_type = other RNA
tacctggccgacatcttcaccaagctc

SEQ ID NO: 36566 - RNA, 27 nt, synthetic construct
  misc_feature 1..27: note = SH3 domain-binding protein 1 (145-153)
  source 1..27: mol_type = other RNA
tacctggccgacctctaccacttcgtg

SEQ ID NO: 36567 - RNA, 27 nt, synthetic construct
  misc_feature 1..27: note = E3 ubiquitin-protein ligase UBR4 (824-832)
  source 1..27: mol_type = other RNA
tacctggccgacgtgaccaacgccctc

SEQ ID NO: 36568 - RNA, 27 nt, synthetic construct
  misc_feature 1..27: note = Exportin-4 (318-326)
  source 1..27: mol_type = other RNA
tacctggcccacttcatcgagggcctc

SEQ ID NO: 36569 - RNA, 27 nt, synthetic construct
  misc_feature 1..27: note = ATP-dependent RNA helicase DHX8 (756-764)
  source 1..27: mol_type = other RNA
tacctggacgccagcctcatcaccgtg

SEQ ID NO: 36570 - RNA, 30 nt, synthetic construct
  misc_feature 1..30: note = ADP-ribosylation factor-like protein 6-interacting protein 1 (32-41)
  source 1..30: mol_type = other RNA
tacctggaccccagcgtgctctccggcgtc

SEQ ID NO: 36571 - RNA, 33 nt, synthetic construct
  misc_feature 1..33: note = Protein dpy-30 homolog (56-66)
  source 1..33: mol_type = other RNA
tacctggaccagaccgtggtccccatcctcctg

SEQ ID NO: 36572 - RNA, 30 nt, synthetic construct
  misc_feature 1..30: note = Trafficking protein particle complex subunit 1 (7-16)
  source 1..30: mol_type = other RNA
tacctgttcgaccgcaacggcgtgtgcctc

SEQ ID NO: 36573 - RNA, 24 nt, synthetic construct
  misc_feature 1..24: note = Sphingomyelin phosphodiesterase 2 (372-379)
  source 1..24: mol_type = other RNA
tacctgttccacgtgcaggaggtc

SEQ ID NO: 36574 - RNA, 27 nt, synthetic construct
  misc_feature 1..27: note = Protein yippee-like 1 (49-57)
  source 1..27: mol_type = other RNA
tacctgttcaacagcgtggtcaacgtg

SEQ ID NO: 36575 - RNA, 27 nt, synthetic construct
  misc_feature 1..27: note = Coatomer subunit alpha (738-746)
  source 1..27: mol_type = other RNA
tacctgggcgacgtgagcgagcgcgtc

SEQ ID NO: 36576 - RNA, 27 nt, synthetic construct
  misc_feature 1..27: note = 26S protease regulatory subunit 6B (239-247)
  source 1..27: mol_type = other RNA
tacctgggcgaggggccccgcatggtg

SEQ ID NO: 36577 - RNA, 27 nt, synthetic construct
  misc_feature 1..27: note = U2 snRNP-associated SURP motif-containing protein (276-284)
  source 1..27: mol_type = other RNA
tacctgggcaacatcaacccccagatg

SEQ ID NO: 36578 - RNA, 27 nt, synthetic construct
  misc_feature 1..27: note = Mortality factor 4-like protein 1 (290-298)
  source 1..27: mol_type = other RNA
tacctgcacgacttcctcaagtacctg

SEQ ID NO: 36579 - RNA, 33 nt, synthetic construct
  misc_feature 1..33: note = Coatomer subunit epsilon (127-137)
  source 1..33: mol_type = other RNA
tacctgcacgaccagaaccccgacgccgccctc

SEQ ID NO: 36580 - RNA, 27 nt, synthetic construct
  misc_feature 1..27: note = Antigen peptide transporter 2 (25-33)
  source 1..27: mol_type = other RNA
tacctgcacagccaggtggtctccgtg

SEQ ID NO: 36581 - RNA, 27 nt, synthetic construct
  misc_feature 1..27: note = Signal recognition particle subunit SRP68 (347-355)
  source 1..27: mol_type = other RNA
tacctgcacagctacctcacctacatc

SEQ ID NO: 36582 - RNA, 30 nt, synthetic construct
  misc_feature 1..30: note = ATP-binding cassette sub-family E member 1 (483-492)
  source 1..30: mol_type = other RNA
tacctgatcgacgagcccagcgcctacctc

SEQ ID NO: 36583 - RNA, 27 nt, synthetic construct
  misc_feature 1..27: note = Probable ATP-dependent RNA helicase DDX6 (139-147)
  source 1..27: mol_type = other RNA
tacctgatccccctcctggagcgcctg

SEQ ID NO: 36584 - RNA, 27 nt, synthetic construct
  misc_feature 1..27: note = Mitotic checkpoint serine/threonine-protein kinase BUB1 (44-52)
  source 1..27: mol_type = other RNA
tacctgatcaccctcctggagcacctg

SEQ ID NO: 36585 - RNA, 27 nt, synthetic construct
  misc_feature 1..27: note = 60S ribosomal protein L19 (105-113)
  source 1..27: mol_type = other RNA
tacctgaaggtgaagggcaacgtcttc

SEQ ID NO: 36586 - RNA, 27 nt, synthetic construct
  misc_feature 1..27: note = E3 ubiquitin-protein ligase MARCH6 (514-522)
  source 1..27: mol_type = other RNA
tacctgctcgacctgcacagctacctg

SEQ ID NO: 36587 - RNA, 27 nt, synthetic construct
  misc_feature 1..27: note = Ras-like protein family member 11A (22-30)
  source 1..27: mol_type = other RNA
tacctgctccccaaggacatcaagctg

SEQ ID NO: 36588 - RNA, 27 nt, synthetic construct
  misc_feature 1..27: note = Nuclear pore complex protein Nup160 (542-550)
  source 1..27: mol_type = other RNA
tacctgctcccctacgagaacctgctg

SEQ ID NO: 36589 - RNA, 27 nt, synthetic construct
  misc_feature 1..27: note = E3 ubiquitin-protein ligase MGRN1 (248-256)
  source 1..27: mol_type = other RNA
tacctgctccaggagatctacggcatc

SEQ ID NO: 36590 - RNA, 27 nt, synthetic construct
  misc_feature 1..27: note = Eukaryotic initiation factor 4A-III (207-215)
  source 1..27: mol_type = other RNA
tacctgcccccggccacccaggtggtc

SEQ ID NO: 36591 - RNA, 27 nt, synthetic construct
  misc_feature 1..27: note = COP9 signalosome complex subunit 1 (211-219)
  source 1..27: mol_type = other RNA
tacctgcagaactggagccacgtgctc

SEQ ID NO: 36592 - RNA, 33 nt, synthetic construct
  misc_feature 1..33: note = Leucyl-cystinyl aminopeptidase (548-558)
  source 1..33: mol_type = other RNA
tacctgagcgaggacgtgttccagcacgccgtc

SEQ ID NO: 36593 - RNA, 27 nt, synthetic construct
  misc_feature 1..27: note = Core histone macro-H2A.1 (55-63)
  source 1..27: mol_type = other RNA
tacctgaccgccgagatcctcgagctg

SEQ ID NO: 36594 - RNA, 27 nt, synthetic construct
  misc_feature 1..27: note = U1 small nuclear ribonucleoprotein C (12-20)
  source 1..27: mol_type = other RNA
tacctgacccacgacagcccctccgtg

SEQ ID NO: 36595 - RNA, 27 nt, synthetic construct
  misc_feature 1..27: note = Cohesin subunit SA-2 (775-783)
  source 1..27: mol_type = other RNA
tacctgaccaacgtgaacaccacggtc

SEQ ID NO: 36596 - RNA, 27 nt, synthetic construct
  misc_feature 1..27: note = Vacuolar protein sorting-associated protein 16 homolog (308-316)
  source 1..27: mol_type = other RNA
tacctggtgcccgagctcgacggcgtc

SEQ ID NO: 36597 - RNA, 27 nt, synthetic construct
  misc_feature 1..27: note = Lamin-B receptor (474-482)
  source 1..27: mol_type = other RNA
tacctggtgagccaccccaacgaggtc

SEQ ID NO: 36598 - RNA, 30 nt, synthetic construct
  misc_feature 1..30: note = DNA topoisomerase 2-alpha (684-693)
  source 1..30: mol_type = other RNA
tacctgtacggccagaccaccacgtacctc

SEQ ID NO: 36599 - RNA, 27 nt, synthetic construct
  misc_feature 1..27: note = ER lumen protein-retaining receptor 2 (196-204)
  source 1..27: mol_type = other RNA
tacctgtacatcaccaaggtgctcaag

SEQ ID NO: 36600 - RNA, 27 nt, synthetic construct
  misc_feature 1..27: note = V-type proton ATPase subunit d 1 (27-35)
  source 1..27: mol_type = other RNA
tacatgatcgacaacgtgatcctgctc

SEQ ID NO: 36601 - RNA, 27 nt, synthetic construct
  misc_feature 1..27: note = Ras GTPase-activating protein-binding protein 2 (294-302)
  source 1..27: mol_type = other RNA
taccccgacagccaccagctgttcgtg

SEQ ID NO: 36602 - RNA, 27 nt, synthetic construct
  misc_feature 1..27: note = Transcription factor p65 (479-487)
  source 1..27: mol_type = other RNA
taccccgaggccatcacccgcctggtg

SEQ ID NO: 36603 - RNA, 27 nt, synthetic construct
  misc_feature 1..27: note = Neuropathy target esterase (299-307)
  source 1..27: mol_type = other RNA
taccccgagagcctggtgcgcgtcgtg

SEQ ID NO: 36604 - RNA, 27 nt, synthetic construct
  misc_feature 1..27: note = Ral GTPase-activating protein subunit beta (25-33)
  source 1..27: mol_type = other RNA
taccccgagagcgtgggccgcgaggtc

SEQ ID NO: 36605 - RNA, 24 nt, synthetic construct
  misc_feature 1..24: note = Ubiquitin-conjugating enzyme E2 L3 (61-68)
  source 1..24: mol_type = other RNA
taccccttcaagccgcccaagatc

SEQ ID NO: 36606 - RNA, 24 nt, synthetic construct
  misc_feature 1..24: note = Phosphatidate cytidylyltransferase 1 (350-357)
  source 1..24: mol_type = other RNA
taccccttccagatccacagcatc

SEQ ID NO: 36607 - RNA, 27 nt, synthetic construct
  misc_feature 1..27: note = LIM and SH3 domain protein 1 (57-65)
  source 1..27: mol_type = other RNA
taccccaagcagagcttcaccatggtg

SEQ ID NO: 36608 - RNA, 27 nt, synthetic construct
  misc_feature 1..27: note = Pumilio homolog 1 (841-849)
  source 1..27: mol_type = other RNA
taccccaacctgcagctccgcgagatc

SEQ ID NO: 36609 - RNA, 27 nt, synthetic construct
  misc_feature 1..27: note = Ubiquitin-associated protein 2-like (268-276)
  source 1..27: mol_type = other RNA
taccccccggcccccttcatgcacatc

SEQ ID NO: 36610 - RNA, 27 nt, synthetic construct
  misc_feature 1..27: note = Splicing factor 3A subunit 1 (44-52)
  source 1..27: mol_type = other RNA
taccccccgcccgaggtgcgcaacatc

SEQ ID NO: 36611 - RNA, 27 nt, synthetic construct
  misc_feature 1..27: note = Putative oxidoreductase GLYR1 (19-27)
  source 1..27: mol_type = other RNA
taccccccgtggcccggcaagatcgtg

SEQ ID NO: 36612 - RNA, 27 nt, synthetic construct
  misc_feature 1..27: note = ETS-related transcription factor Elf-1 (354-362)
  source 1..27: mol_type = other RNA
taccccacccagctgttccgcaccgtg

SEQ ID NO: 36613 - RNA, 27 nt, synthetic construct
  misc_feature 1..27: note = 39S ribosomal protein L37, mitochondrial (283-291)
  source 1..27: mol_type = other RNA
tacccctacccgtacccccacaccctg

SEQ ID NO: 36614 - RNA, 27 nt, synthetic construct
  misc_feature 1..27: note = LEM domain-containing protein 2 (134-142)
  source 1..27: mol_type = other RNA
tacccctacgtgggcatcctgcacgtc

SEQ ID NO: 36615 - RNA, 27 nt, synthetic construct
  misc_feature 1..27: note = HLA class II histocompatibility antigen, DQ beta 1 chain (78-86)
  source 1..27: mol_type = other RNA
taccagctggagctccgcaccaccctg

SEQ ID NO: 36616 - RNA, 27 nt, synthetic construct
  misc_feature 1..27: note = Farnesyl pyrophosphate synthase (158-166)
  source 1..27: mol_type = other RNA
taccagaccgagatcggccagaccctg

SEQ ID NO: 36617 - RNA, 24 nt, synthetic construct
  misc_feature 1..24: note = Mitogen-activated protein kinase 14 (188-195)
  source 1..24: mol_type = other RNA
taccgcgcccccgagatcatgctg

SEQ ID NO: 36618 - RNA, 24 nt, synthetic construct
  misc_feature 1..24: note = Mitogen-activated protein kinase 7 (227-234)
  source 1..24: mol_type = other RNA
taccgcgcccccgagctgatgctc

SEQ ID NO: 36619 - RNA, 27 nt, synthetic construct
  misc_feature 1..27: note = Endoplasmic reticulum lectin 1 (115-123)
  source 1..27: mol_type = other RNA
taccgcatcgagagctactggacctac

SEQ ID NO: 36620 - RNA, 27 nt, synthetic construct
  misc_feature 1..27: note = Transmembrane protein 258 (9-17)
  source 1..27: mol_type = other RNA
tacaccagccccgtgaacccggccgtc

SEQ ID NO: 36621 - RNA, 27 nt, synthetic construct
  misc_feature 1..27: note = Protein SZT2 (2368-2376)
  source 1..27: mol_type = other RNA
tacgtggccgaccacgccagctcctac

SEQ ID NO: 36622 - RNA, 30 nt, synthetic construct
  misc_feature 1..30: note = DDB1- and CUL4-associated factor 8 (338-347)
  source 1..30: mol_type = other RNA
tacgtgaaccccgccaacacccaccagttc

SEQ ID NO: 36623 - RNA, 24 nt, synthetic construct
  misc_feature 1..24: note = Tubulin beta chain (79-86)
  source 1..24: mol_type = other RNA
tacgtgccccgcgccatcctggtc

SEQ ID NO: 36624 - RNA, 27 nt, synthetic construct
  misc_feature 1..27: note = E3 ubiquitin-protein ligase MARCH7 (172-180)
  source 1..27: mol_type = other RNA
tacgtgcaggaccgcgtccccagctac

SEQ ID NO: 36625 - RNA, 27 nt, synthetic construct
  misc_feature 1..27: note = Single-stranded DNA-binding protein 2 (25-33)
  source 1..27: mol_type = other RNA
tacgtgtacgagtacctgctccacgtc

SEQ ID NO: 36626 - RNA, 27 nt, synthetic construct
  misc_feature 1..27: note = Tyrosine-protein kinase Fyn (213-221)
  source 1..27: mol_type = other RNA
tactacatcaccacccgcgcccagttc

SEQ ID NO: 36627 - RNA, 27 nt, synthetic construct
  misc_feature 1..27: note = Heat shock cognate 71 kDa protein (16-24)
  source 1..27: mol_type = other RNA
gccatgaaccccaccaacaccgtgttc

SEQ ID NO: 36628 - RNA, 27 nt, synthetic construct
  misc_feature 1..27: note = HLA class II histocompatibility antigen, DP alpha 1 chain (32-40)
  source 1..27: mol_type = other RNA
atcaaggccgaccacgtgagcacctac

SEQ ID NO: 36629 - RNA, 27 nt, synthetic construct
  misc_feature 1..27: note = Protein SSX2 (41-49)
  source 1..27: mol_type = other RNA
aaggccagcgagaagatcttctacgtg

SEQ ID NO: 36630 - RNA, 27 nt, synthetic construct
  misc_feature 1..27: note = Paired amphipathic helix protein Sin3a (790-798)
  source 1..27: mol_type = other RNA
gccgccgcgctgatcatccaccacgtg

SEQ ID NO: 36631 - RNA, 27 nt, synthetic construct
  misc_feature 1..27: note = Rho GTPase-activating protein 17 (420-428)
  source 1..27: mol_type = other RNA
gccgccgcgaccagcgtgcacgtcgtg

SEQ ID NO: 36632 - RNA, 33 nt, synthetic construct
  misc_feature 1..33: note = Abhydrolase domain-containing protein 2 (342-352)
  source 1..33: mol_type = other RNA
gccgccgacgaccccctggtgcacgagagcctc

SEQ ID NO: 36633 - RNA, 27 nt, synthetic construct
  misc_feature 1..27: note = Pre-mRNA-processing factor 19 (410-418)
  source 1..27: mol_type = other RNA
gccgccgacgacagctccgtgaagctg

SEQ ID NO: 36634 - RNA, 27 nt, synthetic construct
  misc_feature 1..27: note = Ubiquitin carboxyl-terminal hydrolase 4 (677-685)
  source 1..27: mol_type = other RNA
gccgccgacggcaagctgctcaagctg

SEQ ID NO: 36635 - RNA, 33 nt, synthetic construct
  misc_feature 1..33: note = EP300-interacting inhibitor of differentiation 1 (69-79)
  source 1..33: mol_type = other RNA
gccgccctggaggaggcggacaagatgttcctc

SEQ ID NO: 36636 - RNA, 27 nt, synthetic construct
  misc_feature 1..27: note = Vacuolar protein sorting-associated protein 51 homolog (131-139)
  source 1..27: mol_type = other RNA
gccgccaccgagatcgtggagcgcgtc

SEQ ID NO: 36637 - RNA, 30 nt, synthetic construct
  misc_feature 1..30: note = Codanin-1 (412-421)
  source 1..30: mol_type = other RNA
gccgcctacgagggcagcgtggcgaaggtc

SEQ ID NO: 36638 - RNA, 27 nt, synthetic construct
  misc_feature 1..27: note = Tetratricopeptide repeat protein 19, mitochondrial (92-100)
  source 1..27: mol_type = other RNA
gccgaggccgagatcatccagctgctc

SEQ ID NO: 36639 - RNA, 33 nt, synthetic construct
  misc_feature 1..33: note = 40S ribosomal protein S10 (140-150)
  source 1..33: mol_type = other RNA
gccgaggccggcgcggggagcgccaccgagttc

SEQ ID NO: 36640 - RNA, 27 nt, synthetic construct
  misc_feature 1..27: note = A-kinase anchor protein 11 (1199-1207)
  source 1..27: mol_type = other RNA
gccgaggccctggcgacccacatcctc

SEQ ID NO: 36641 - RNA, 27 nt, synthetic construct
  misc_feature 1..27: note = Staphylococcal nuclease domain-containing protein 1 (426-434)
  source 1..27: mol_type = other RNA
gccgaggccctggtgagcaagggcctc

SEQ ID NO: 36642 - RNA, 27 nt, synthetic construct
  misc_feature 1..27: note = DnaJ homolog subfamily C member 3 (124-132)
  source 1..27: mol_type = other RNA
gccgaggacgacttcaagaaggtgctg

SEQ ID NO: 36643 - RNA, 27 nt, synthetic construct
  misc_feature 1..27: note = Cyclin-dependent kinase 11B (701-709)
  source 1..27: mol_type = other RNA
gccgaggacggcctgaagcacgagtac

SEQ ID NO: 36644 - RNA, 30 nt, synthetic construct
  misc_feature 1..30: note = High affinity cationic amino acid transporter 1 (354-363)
  source 1..30: mol_type = other RNA
gccgaggacggcctgctcttcaagttcctg

SEQ ID NO: 36645 - RNA, 30 nt, synthetic construct
  misc_feature 1..30: note = Protein strawberry notch homolog 2 (92-101)
  source 1..30: mol_type = other RNA
gccgaggagctgggccacaccgagacctac

SEQ ID NO: 36646 - RNA, 30 nt, synthetic construct
  misc_feature 1..30: note = Casein kinase II subunit alpha (179-188)
  source 1..30: mol_type = other RNA
gccgagttctaccaccccggccaggagtac

SEQ ID NO: 36647 - RNA, 30 nt, synthetic construct
  misc_feature 1..30: note = Probable E3 ubiquitin-protein ligase HERC4 (886-895)
  source 1..30: mol_type = other RNA
gccgagcaccccaccatcaagatcttctgg

SEQ ID NO: 36648 - RNA, 24 nt, synthetic construct
  misc_feature 1..24: note = Rabankyrin-5 (229-236)
  source 1..24: mol_type = other RNA
gccgagatcatcgccagccactgg

SEQ ID NO: 36649 - RNA, 30 nt, synthetic construct
  misc_feature 1..30: note = 26S proteasome non-ATPase regulatory subunit 6 (244-253)
  source 1..30: mol_type = other RNA
gccgagatcctggaggtgctccacagcctg

SEQ ID NO: 36650 - RNA, 30 nt, synthetic construct
  misc_feature 1..30: note = Son of sevenless homolog 2 (963-972)
  source 1..30: mol_type = other RNA
gccgagatcaccggcgagatccagcagtac

SEQ ID NO: 36651 - RNA, 27 nt, synthetic construct
  misc_feature 1..27: note = Leucine-rich repeat and calponin homology domain-containing protein 3 (340-348)
  source 1..27: mol_type = other RNA
gccgagatcaccaaggagcagcgcctg

SEQ ID NO: 36652 - RNA, 30 nt, synthetic construct
  misc_feature 1..30: note = HEAT repeat-containing protein 6 (209-218)
  source 1..30: mol_type = other RNA
gccgagaaggacggcgtgagctccagcttc

SEQ ID NO: 36653 - RNA, 27 nt, synthetic construct
  misc_feature 1..27: note = Transformation/transcription domain-associated protein (2625-2633)
  source 1..27: mol_type = other RNA
gccgagaagacctgggtgcagctgttc

SEQ ID NO: 36654 - RNA, 33 nt, synthetic construct
  misc_feature 1..33: note = Glycerol-3-phosphate acyltransferase 3 (4-14)
  source 1..33: mol_type = other RNA
gccgagctggccggcaagatcctcagcacctgg

SEQ ID NO: 36655 - RNA, 27 nt, synthetic construct
  misc_feature 1..27: note = Hom s 1 (495-503)
  source 1..27: mol_type = other RNA
gccgagctggagctccagaagcagctg

SEQ ID NO: 36656 - RNA, 27 nt, synthetic construct
  misc_feature 1..27: note = HEAT repeat-containing protein 1 (617-625)
  source 1..27: mol_type = other RNA
gccgagatgaagatcgccatctacctg

SEQ ID NO: 36657 - RNA, 27 nt, synthetic construct
  misc_feature 1..27: note = Mitochondrial antiviral-signaling protein (471-479)
  source 1..27: mol_type = other RNA
gccgagaaccccagcatccagctgctc

SEQ ID NO: 36658 - RNA, 30 nt, synthetic construct
  misc_feature 1..30: note = Exocyst complex component 1 (513-522)
  source 1..30: mol_type = other RNA
gccgagcaggacttcatcagcaagttcttc

SEQ ID NO: 36659 - RNA, 27 nt, synthetic construct
  misc_feature 1..27: note = Liprin-alpha-1 (374-382)
  source 1..27: mol_type = other RNA
gccgagcagaagctgcagcagaccctc

SEQ ID NO: 36660 - RNA, 27 nt, synthetic construct
  misc_feature 1..27: note = Chromodomain-helicase-DNA-binding protein 9 (618-626)
  source 1..27: mol_type = other RNA
gccgagcagatgccccagcacaccctg

SEQ ID NO: 36661 - RNA, 30 nt, synthetic construct
  misc_feature 1..30: note = F-box DNA helicase 1 (868-877)
  source 1..30: mol_type = other RNA
gccgagcagcgcatcggccccctggccttc

SEQ ID NO: 36662 - RNA, 33 nt, synthetic construct
  misc_feature 1..33: note = Nuclear cap-binding protein subunit 1 (577-587)
  source 1..33: mol_type = other RNA
gccgagagcgacgagggcaagctgcacgtgctc

SEQ ID NO: 36663 - RNA, 33 nt, synthetic construct
  misc_feature 1..33: note = Ras-specific guanine nucleotide-releasing factor RalGPS2 (418-428)
  source 1..33: mol_type = other RNA
gccgagagcgaggacctggccgtgcacctctac

SEQ ID NO: 36664 - RNA, 27 nt, synthetic construct
  misc_feature 1..27: note = Transmembrane 9 superfamily member 1 (89-97)
  source 1..27: mol_type = other RNA
gccgagagcctgtacgagatccgcttc

SEQ ID NO: 36665 - RNA, 30 nt, synthetic construct
  misc_feature 1..30: note = Glycerol-3-phosphate dehydrogenase, mitochondrial (535-544)
  source 1..30: mol_type = other RNA
gccgaggtgaagtacggcatcaaggagtac

SEQ ID NO: 36666 - RNA, 30 nt, synthetic construct
  misc_feature 1..30: note = Protein PRRC2C (2815-2824)
  source 1..30: mol_type = other RNA
gccgaggtgctgcagagcacccagcgcttc

SEQ ID NO: 36667 - RNA, 24 nt, synthetic construct
  misc_feature 1..24: note = Eukaryotic translation initiation factor 3 subunit D (442-449)
  source 1..24: mol_type = other RNA
gccggcagcgagtacctgaagctc

SEQ ID NO: 36668 - RNA, 27 nt, synthetic construct
  misc_feature 1..27: note = Coatomer subunit gamma-2 (147-155)
  source 1..27: mol_type = other RNA
gccatcgtggacaaggtcagctccgtg

SEQ ID NO: 36669 - RNA, 33 nt, synthetic construct
  misc_feature 1..33: note = Dipeptidyl peptidase 2 (134-144)
  source 1..33: mol_type = other RNA
gccctggccgacttcgcggagctcctgcgcgcc

SEQ ID NO: 36670 - RNA, 27 nt, synthetic construct
  misc_feature 1..27: note = Mediator of RNA polymerase II transcription subunit 23 (388-396)
  source 1..27: mol_type = other RNA
gccctggccgacttcctccccgtgatg

SEQ ID NO: 36671 - RNA, 30 nt, synthetic construct
  misc_feature 1..30: note = Coatomer subunit gamma-2 (844-853)
  source 1..30: mol_type = other RNA
gccctggccgacggcgtgaccatgcaggtc

SEQ ID NO: 36672 - RNA, 27 nt, synthetic construct
  misc_feature 1..27: note = Nicastrin (466-474)
  source 1..27: mol_type = other RNA
gccctggccgacgtggcgaccgtcctc

SEQ ID NO: 36673 - RNA, 27 nt, synthetic construct
  misc_feature 1..27: note = Lysophosphatidylcholine acyltransferase 1 (178-186)
  source 1..27: mol_type = other RNA
gccctggccgagggccagctccgcctg

SEQ ID NO: 36674 - RNA, 27 nt, synthetic construct
  misc_feature 1..27: note = Filamin-A (1713-1721)
  source 1..27: mol_type = other RNA
gccctggccggcgaccagcccagcgtg

SEQ ID NO: 36675 - RNA, 27 nt, synthetic construct
  misc_feature 1..27: note = CAD protein (1492-1500)
  source 1..27: mol_type = other RNA
gccctggccggcgggatcaccatggtg

SEQ ID NO: 36676 - RNA, 27 nt, synthetic construct
  misc_feature 1..27: note = Microtubule-associated protein 4 (259-267)
  source 1..27: mol_type = other RNA
gccctggccaaggacatggcgctcgcc

SEQ ID NO: 36677 - RNA, 30 nt, synthetic construct
  misc_feature 1..30: note = E1A-binding protein p400 (910-919)
  source 1..30: mol_type = other RNA
gccctggccaagcccccggtggtcagcgtg

SEQ ID NO: 36678 - RNA, 27 nt, synthetic construct
  misc_feature 1..27: note = Transcription factor p65 (361-369)
  source 1..27: mol_type = other RNA
gccctggcccccgcgccgccccaggtg

SEQ ID NO: 36679 - RNA, 27 nt, synthetic construct
  misc_feature 1..27: note = HEAT repeat-containing protein 2 (159-167)
  source 1..27: mol_type = other RNA
gccctggccccccacctcgacgacgcg

SEQ ID NO: 36680 - RNA, 27 nt, synthetic construct
  misc_feature 1..27: note = DNA fragmentation factor subunit alpha (236-244)
  source 1..27: mol_type = other RNA
gccctggccagccacatcctcaccgcg

SEQ ID NO: 36681 - RNA, 27 nt, synthetic construct
  misc_feature 1..27: note = DNA mismatch repair protein Mlh1 (103-111)
  source 1..27: mol_type = other RNA
gccctggccagcatctcccacgtggcg

SEQ ID NO: 36682 - RNA, 27 nt, synthetic construct
  misc_feature 1..27: note = Intraflagellar transport protein 81 homolog (503-511)
  source 1..27: mol_type = other RNA
gccctggccagcgtgatcaaggagctc

SEQ ID NO: 36683 - RNA, 27 nt, synthetic construct
  misc_feature 1..27: note = T-complex protein 1 subunit zeta (19-27)
  source 1..27: mol_type = other RNA
gccctggccgtgaacatcagcgcggcc

SEQ ID NO: 36684 - RNA, 30 nt, synthetic construct
  misc_feature 1..30: note = Elongation factor 2 (191-200)
  source 1..30: mol_type = other RNA
gccctgtgcgaggagaacatgcgcggcgtg

SEQ ID NO: 36685 - RNA, 27 nt, synthetic construct
  misc_feature 1..27: note = DNA repair protein RAD50 (1090-1098)
  source 1..27: mol_type = other RNA
gccctggacgagcccaccaccaacctc

SEQ ID NO: 36686 - RNA, 27 nt, synthetic construct
  misc_feature 1..27: note = Perilipin-3 (400-408)
  source 1..27: mol_type = other RNA
gccctggaccacatggtggagtacgtc

SEQ ID NO: 36687 - RNA, 33 nt, synthetic construct
  misc_feature 1..33: note = Receptor-interacting serine/threonine-protein kinase 4 (482-492)
  source 1..33: mol_type = other RNA
gccctggacagcggcgcctccctcctgcacctg

SEQ ID NO: 36688 - RNA, 27 nt, synthetic construct
  misc_feature 1..27: note = Centrosomal protein of 104 kDa (617-625)
  source 1..27: mol_type = other RNA
gccctggagcaccgcgtgtacgaggtc

SEQ ID NO: 36689 - RNA, 27 nt, synthetic construct
  misc_feature 1..27: note = Alpha-tubulin N-acetyltransferase 1 (9-17)
  source 1..27: mol_type = other RNA
gccctgttccccgagcgcatcaccgtg

SEQ ID NO: 36690 - RNA, 33 nt, synthetic construct
  misc_feature 1..33: note = SEC14-like protein 1 (357-367)
  source 1..33: mol_type = other RNA
gccctgggcgaggaggccctcctgcgctacgtg

SEQ ID NO: 36691 - RNA, 33 nt, synthetic construct
  misc_feature 1..33: note = HLA class I histocompatibility antigen, B-40 alpha chain (204-214)
  source 1..33: mol_type = other RNA
gccctgggcttctaccccgccgagatcaccctc

SEQ ID NO: 36692 - RNA, 30 nt, synthetic construct
  misc_feature 1..30: note = Dystonin (3724-3733)
  source 1..30: mol_type = other RNA
gccctgatcgagcagaagctcaacgaggcc

SEQ ID NO: 36693 - RNA, 27 nt, synthetic construct
  misc_feature 1..27: note = RILP-like protein 1 (221-229)
  source 1..27: mol_type = other RNA
gccctgatcgagcagaaggtggagctc

SEQ ID NO: 36694 - RNA, 33 nt, synthetic construct
  misc_feature 1..33: note = Aminopeptidase B (193-203)
  source 1..33: mol_type = other RNA
gccctgatcgaggtgcccgacggcttcaccgcc

SEQ ID NO: 36695 - RNA, 33 nt, synthetic construct
  misc_feature 1..33: note = Coatomer subunit zeta-1 (3-13)
  source 1..33: mol_type = other RNA
gccctgatcctcgagcccagcctgtacaccgtg

SEQ ID NO: 36696 - RNA, 33 nt, synthetic construct
  misc_feature 1..33: note = Protein fem-1 homolog A (362-372)
  source 1..33: mol_type = other RNA
gccctgatcaccgaccccgacgagatgcgcatg

SEQ ID NO: 36697 - RNA, 27 nt, synthetic construct
  misc_feature 1..27: note = Rapamycin-insensitive companion of mTOR (226-234)
  source 1..27: mol_type = other RNA
gccctgatcaccaccatcctccacctg

SEQ ID NO: 36698 - RNA, 27 nt, synthetic construct
  misc_feature 1..27: note = DNA polymerase alpha catalytic subunit (520-528)
  source 1..27: mol_type = other RNA
gccctgaagcccgacctcgtgaacgtc

SEQ ID NO: 36699 - RNA, 27 nt, synthetic construct
  misc_feature 1..27: note = Agrin (1405-1413)
  source 1..27: mol_type = other RNA
gccctgctcgacggccgcgtgcagctg

SEQ ID NO: 36700 - RNA, 30 nt, synthetic construct
  misc_feature 1..30: note = Protein DGCR6L (54-63)
  source 1..30: mol_type = other RNA
gccctgctcgacggcaccgtgttcgagatc

SEQ ID NO: 36701 - RNA, 30 nt, synthetic construct
  misc_feature 1..30: note = Trabeculin-alpha (3432-3441)
  source 1..30: mol_type = other RNA
gccctgctcgaccaggccctgagcaacgcg

SEQ ID NO: 36702 - RNA, 27 nt, synthetic construct
  misc_feature 1..27: note = Talin-1 (1760-1768)
  source 1..27: mol_type = other RNA
gccctgctcgaccagaccaagaccctg

SEQ ID NO: 36703 - RNA, 33 nt, synthetic construct
  misc_feature 1..33: note = Histone deacetylase 10 (587-597)
  source 1..33: mol_type = other RNA
gccctgctcgaggagaacagcaccccccagctg

SEQ ID NO: 36704 - RNA, 27 nt, synthetic construct
  misc_feature 1..27: note = LEM domain-containing protein 2 (268-276)
  source 1..27: mol_type = other RNA
gccctgctcgagctgctgcacgagctc

SEQ ID NO: 36705 - RNA, 30 nt, synthetic construct
  misc_feature 1..30: note = Dystonin (5785-5794)
  source 1..30: mol_type = other RNA
gccctgctcgagctggtgccctggcgcgcc

SEQ ID NO: 36706 - RNA, 33 nt, synthetic construct
  misc_feature 1..33: note = Telomerase protein component 1 (281-291)
  source 1..33: mol_type = other RNA
gccctgctcgagcccgagttcatcctgaaggcc

SEQ ID NO: 36707 - RNA, 33 nt, synthetic construct
  misc_feature 1..33: note = Midasin (2257-2267)
  source 1..33: mol_type = other RNA
gccctgctcgagcccggcggggtgctgaccatc

SEQ ID NO: 36708 - RNA, 30 nt, synthetic construct
  misc_feature 1..30: note = DENN domain-containing protein 4B (1391-1400)
  source 1..30: mol_type = other RNA
gccctgctcgagagcgtgctgcgccacgtc

SEQ ID NO: 36709 - RNA, 27 nt, synthetic construct
  misc_feature 1..27: note = Transmembrane protein 102 (468-476)
  source 1..27: mol_type = other RNA
gccctgctcggcgagctggcccgcctg

SEQ ID NO: 36710 - RNA, 27 nt, synthetic construct
  misc_feature 1..27: note = Inhibitor of growth protein 4 (58-66)
  source 1..27: mol_type = other RNA
gccctgctcaagcagatccaggaggcc

SEQ ID NO: 36711 - RNA, 27 nt, synthetic construct
  misc_feature 1..27: note = Sorting and assembly machinery component 50 homolog (277-285)
  source 1..27: mol_type = other RNA
gccctgctcaaggtgaaccaggagctg

SEQ ID NO: 36712 - RNA, 27 nt, synthetic construct
  misc_feature 1..27: note = ATP-dependent RNA helicase A (638-646)
  source 1..27: mol_type = other RNA
gccctgctcaagtacatcgagaccctg

SEQ ID NO: 36713 - RNA, 30 nt, synthetic construct
  misc_feature 1..30: note = Nucleolar protein 11 (404-413)
  source 1..30: mol_type = other RNA
gccctgctcaacgccatcctgcacagcgcg

SEQ ID NO: 36714 - RNA, 27 nt, synthetic construct
  misc_feature 1..27: note = Rapamycin-insensitive companion of mTOR (91-99)
  source 1..27: mol_type = other RNA
gccctgctcaacgaggccaaggaggtg

SEQ ID NO: 36715 - RNA, 27 nt, synthetic construct
  misc_feature 1..27: note = Lysosomal alpha-glucosidase (501-509)
  source 1..27: mol_type = other RNA
gccctgctcccccacctgtacaccctg

SEQ ID NO: 36716 - RNA, 27 nt, synthetic construct
  misc_feature 1..27: note = Coiled-coil domain-containing protein 189 isoform 2 (146-154)
  source 1..27: mol_type = other RNA
gccctgctccaggacctgcacaaggcc

SEQ ID NO: 36717 - RNA, 27 nt, synthetic construct
  misc_feature 1..27: note = Cell differentiation protein RCD1 homolog (65-73)
  source 1..27: mol_type = other RNA
gccctgctccaggagatcgtgaacatc

SEQ ID NO: 36718 - RNA, 27 nt, synthetic construct
  misc_feature 1..27: note = GSK3-beta interaction protein (125-133)
  source 1..27: mol_type = other RNA
gccctgctccagcgcctggaggccctg

SEQ ID NO: 36719 - RNA, 27 nt, synthetic construct
  misc_feature 1..27: note = Mitochondrial import receptor subunit TOM5 homolog (36-44)
  source 1..27: mol_type = other RNA
gccctgctccgcgtgacccccttcatc

SEQ ID NO: 36720 - RNA, 27 nt, synthetic construct
  misc_feature 1..27: note = Catenin alpha-1 (130-138)
  source 1..27: mol_type = other RNA
gccctgctcagcgccgtgacccgcctg

SEQ ID NO: 36721 - RNA, 30 nt, synthetic construct
  misc_feature 1..30: note = DNA-dependent protein kinase catalytic subunit (2867-2876)
  source 1..30: mol_type = other RNA
gccctgctcagcctggaccccgccgcggtg

SEQ ID NO: 36722 - RNA, 27 nt, synthetic construct
  misc_feature 1..27: note = Multiple inositol polyphosphate phosphatase 1 (26-34)
  source 1..27: mol_type = other RNA
gccctgctcagctccctggcccgctgc

SEQ ID NO: 36723 - RNA, 27 nt, synthetic construct
  misc_feature 1..27: note = DNA-directed RNA polymerase I subunit RPA1 (343-351)
  source 1..27: mol_type = other RNA
gccctgatggcccaggagcagaagctc

SEQ ID NO: 36724 - RNA, 27 nt, synthetic construct
  misc_feature 1..27: note = Brefeldin A-inhibited guanine nucleotide-exchange protein 1 (924-932)
  source 1..27: mol_type = other RNA
gccctgatggaggccgtgagccacgtc

SEQ ID NO: 36725 - RNA, 30 nt, synthetic construct
  misc_feature 1..30: note = THAP domain-containing protein 11 (268-277)
  source 1..30: mol_type = other RNA
gccctgatggaggtgaagatgaaggagatg

SEQ ID NO: 36726 - RNA, 27 nt, synthetic construct
  misc_feature 1..27: note = Junction plakoglobin (178-186)
  source 1..27: mol_type = other RNA
gccctgatgggcagcccccagctcgtg

SEQ ID NO: 36727 - RNA, 27 nt, synthetic construct
  misc_feature 1..27: note = Probable E3 ubiquitin-protein ligase HECTD4 (327-335)
  source 1..27: mol_type = other RNA
gccctgatgccccagctcgtgcagctg

SEQ ID NO: 36728 - RNA, 33 nt, synthetic construct
  misc_feature 1..33: note = Synaptosomal-associated protein 29 (65-75)
  source 1..33: mol_type = other RNA
gccctgatgtacgagagcgagaaggtgggcgtc

SEQ ID NO: 36729 - RNA, 27 nt, synthetic construct
  misc_feature 1..27: note = F-box only protein 21 (284-292)
  source 1..27: mol_type = other RNA
gccctgaacctctacatgcaccaggtg

SEQ ID NO: 36730 - RNA, 30 nt, synthetic construct
  misc_feature 1..30: note = Immunoglobulin-binding protein 1 (279-288)
  source 1..30: mol_type = other RNA
gccctgcccgaccagggcatcgccaaggcg

SEQ ID NO: 36731 - RNA, 30 nt, synthetic construct
  misc_feature 1..30: note = Coatomer subunit gamma-1 (711-720)
  source 1..30: mol_type = other RNA
gccctgcccaaggaggacccgaccgccgtg

SEQ ID NO: 36732 - RNA, 27 nt, synthetic construct
  misc_feature 1..27: note = EVI5-like protein (617-625)
  source 1..27: mol_type = other RNA
gccctgcaggagaagctccagtacctg

SEQ ID NO: 36733 - RNA, 27 nt, synthetic construct
  misc_feature 1..27: note = Signal recognition particle receptor subunit alpha (360-368)
  source 1..27: mol_type = other RNA
gccctgcaggagagcctcgtgcagatc

SEQ ID NO: 36734 - RNA, 27 nt, synthetic construct
  misc_feature 1..27: note Dolichyl-diphosphooligosaccharide-proteinosyltransferase subunit 2 (5-13)
  source 1..27: mol_type = other RNA
gccctgagcgccctcaccgcgcgcctg

SEQ ID NO: 36735 - RNA, 27 nt, synthetic construct
  misc_feature 1..27: note = Fas apoptotic inhibitory molecule 1 (45-53)
  source 1..27: mol_type = other RNA
gccctgagcgacggcgtgcacaagatc

SEQ ID NO: 36736 - RNA, 30 nt, synthetic construct
  misc_feature 1..30: note = T-complex protein 1 subunit delta (308-317)
  source 1..30: mol_type = other RNA
gccctgagcgacctcgccctgcacttcctg

SEQ ID NO: 36737 - RNA, 27 nt, synthetic construct
  misc_feature 1..27: note = Coiled-coil domain-containing protein 93 (85-93)
  source 1..27: mol_type = other RNA
gccctgagcgagaagatcgtgtccgtc

SEQ ID NO: 36738 - RNA, 27 nt, synthetic construct
  misc_feature 1..27: note = Uncharacterized protein C1orf43 (148-156)
  source 1..27: mol_type = other RNA
gccctgagcgagctcgccaccgcggtg

SEQ ID NO: 36739 - RNA, 27 nt, synthetic construct
  misc_feature 1..27: note = Lanosterol 14-alpha demethylase (197-205)
  source 1..27: mol_type = other RNA
gccctgagcgagctcatcatcctgacc

SEQ ID NO: 36740 - RNA, 27 nt, synthetic construct
  misc_feature 1..27: note = 26S proteasome non-ATPase regulatory subunit 14 (135-143)
  source 1..27: mol_type = other RNA
gccctgagcgagcgcgccgtggcggtc

SEQ ID NO: 36741 - RNA, 27 nt, synthetic construct
  misc_feature 1..27: note = Inversin (365-373)
  source 1..27: mol_type = other RNA
gccctgagcggccacgtgtccaccgtc

SEQ ID NO: 36742 - RNA, 27 nt, synthetic construct
  misc_feature 1..27: note = Small integral membrane protein 10 (21-29)
  source 1..27: mol_type = other RNA
gccctgagcggcctcgccgtgcgcctg

SEQ ID NO: 36743 - RNA, 27 nt, synthetic construct
  misc_feature 1..27: note = Kinesin light chain 1 (87-95)
  source 1..27: mol_type = other RNA
gccctgagcaaccacctcaacgccgtg

SEQ ID NO: 36744 - RNA, 27 nt, synthetic construct
  misc_feature 1..27: note = tRNA-splicing endonuclease subunit Sen2 (347-355)
  source 1..27: mol_type = other RNA
gccctgagccgcgtgtccgtcaacgtg

SEQ ID NO: 36745 - RNA, 27 nt, synthetic construct
  misc_feature 1..27: note = FAST kinase domain-containing protein 2 (485-493)
  source 1..27: mol_type = other RNA
gccctgaccggctacctccacaccatc

SEQ ID NO: 36746 - RNA, 27 nt, synthetic construct
  misc_feature 1..27: note = Putative phospholipase B-like 2 (16-24)
  source 1..27: mol_type = other RNA
gccctgacccgcgccctcgcgctggcc

SEQ ID NO: 36747 - RNA, 27 nt, synthetic construct
  misc_feature 1..27: note = AP-1 complex subunit gamma-1 (331-339)
  source 1..27: mol_type = other RNA
gccctgaccagcctcctgaagaccgtg

SEQ ID NO: 36748 - RNA, 30 nt, synthetic construct
  misc_feature 1..30: note = E3 ubiquitin-protein ligase RFWD2 (46-55)
  source 1..30: mol_type = other RNA
gccctggtgagcggcggggtcgcccaggcg

SEQ ID NO: 36749 - RNA, 27 nt, synthetic construct
  misc_feature 1..27: note = Nesprin-2 (3479-3487)
  source 1..27: mol_type = other RNA
gccctgtgggagaagtggctcagcctg

SEQ ID NO: 36750 - RNA, 27 nt, synthetic construct
  misc_feature 1..27: note = Integrin alpha-X (412-420)
  source 1..27: mol_type = other RNA
gccctgtggaagggcgtgcagagcctc

SEQ ID NO: 36751 - RNA, 27 nt, synthetic construct
  misc_feature 1..27: note = Helicase with zinc finger domain 2 (1826-1834)
  source 1..27: mol_type = other RNA
gccctgtggaagcagctcctggagctg

SEQ ID NO: 36752 - RNA, 27 nt, synthetic construct
  misc_feature 1..27: note = Rabankyrin-5 (638-646)
  source 1..27: mol_type = other RNA
gccctgtggaccggcatgcacaccatc

SEQ ID NO: 36753 - RNA, 30 nt, synthetic construct
  misc_feature 1..30: note = CDK5 regulatory subunit-associated protein 3 (102-111)
  source 1..30: mol_type = other RNA
gccctgtacgagaaggacaacacctacctc

SEQ ID NO: 36754 - RNA, 27 nt, synthetic construct
  misc_feature 1..27: note = Small subunit processome component 20 homolog (799-807)
  source 1..27: mol_type = other RNA
gccctgtaccacgagcagctcgccctg

SEQ ID NO: 36755 - RNA, 33 nt, synthetic construct
  misc_feature 1..33: note = Prohibitin (26-36)
  source 1..33: mol_type = other RNA
gccctgtacaacgtggacgccggccaccgcgcg

SEQ ID NO: 36756 - RNA, 27 nt, synthetic construct
  misc_feature 1..27: note = Receptor expression-enhancing protein 3 (46-54)
  source 1..27: mol_type = other RNA
gccctgtacaccgtgatcgagaccgtc

SEQ ID NO: 36757 - RNA, 27 nt, synthetic construct
  misc_feature 1..27: note = Heterogeneous nuclear ribonucleoproteins A2/B1 (66-74)
  source 1..27: mol_type = other RNA
gccatggccgcgcgcccccacagcatc

SEQ ID NO: 36758 - RNA, 30 nt, synthetic construct
  misc_feature 1..30: note = Leucine-tRNA ligase, cytoplasmic (67-76)
  source 1..30: mol_type = other RNA
gccatggccgacgcgggcatcctgcgcctc

SEQ ID NO: 36759 - RNA, 33 nt, synthetic construct
  misc_feature 1..33: note = Translocon-associated protein subunit delta (3-13)
  source 1..33: mol_type = other RNA
gccatggccagcctgggcgcgctcgccctgctg

SEQ ID NO: 36760 - RNA, 33 nt, synthetic construct
  misc_feature 1..33: note = Phosphatidylinositol 4-kinase alpha (1043-1053)
  source 1..33: mol_type = other RNA
gccatggccaccgagagcatcctgcacttcgcg

SEQ ID NO: 36761 - RNA, 27 nt, synthetic construct
  misc_feature 1..27: note = Nuclear cap-binding protein subunit 1 (147-155)
  source 1..27: mol_type = other RNA
gccatgttcgagaacttcgtgagcgtc

SEQ ID NO: 36762 - RNA, 30 nt, synthetic construct
  misc_feature 1..30: note = Eukaryotic translation initiation factor 3 subunit K (2-11)
  source 1..30: mol_type = other RNA
gccatgttcgagcagatgcgcgccaacgtg

SEQ ID NO: 36763 - RNA, 27 nt, synthetic construct
  misc_feature 1..27: note = U4/U6 small nuclear ribonucleoprotein Prp3 (237-245)
  source 1..27: mol_type = other RNA
gccatgggcatcgcccccccgaaggtg

SEQ ID NO: 36764 - RNA, 27 nt, synthetic construct
  misc_feature 1..27: note = Chitobiosyldiphosphodolichol beta-mannosyltransferase (57-65)
  source 1..27: mol_type = other RNA
gccatgcacggcttcagcgtgaccctg

SEQ ID NO: 36765 - RNA, 27 nt, synthetic construct
  misc_feature 1..27: note = Tripartite motif-containing protein 44 (233-241)
  source 1..27: mol_type = other RNA
gccatgatcgagctggtggagcgcctc

SEQ ID NO: 36766 - RNA, 27 nt, synthetic construct
  misc_feature 1..27: note = Importin subunit beta-1 (122-130)
  source 1..27: mol_type = other RNA
gccatgaagagcgacatcgacgaggtg

SEQ ID NO: 36767 - RNA, 27 nt, synthetic construct
  misc_feature 1..27: note = Intraflagellar transport protein 172 homolog (30-38)
  source 1..27: mol_type = other RNA
gccatgctggagaagaactacaagctc

SEQ ID NO: 36768 - RNA, 27 nt, synthetic construct
  misc_feature 1..27: note = E3 ubiquitin-protein ligase RNF31 (159-167)
  source 1..27: mol_type = other RNA
gccatgctgaacgagccctgggccgtg

SEQ ID NO: 36769 - RNA, 30 nt, synthetic construct
  misc_feature 1..30: note = HLA class II histocompatibility antigen, DQ beta 1 chain (23-32)
  source 1..30: mol_type = other RNA
gccatgctgagcacccccgtggccgagggc

SEQ ID NO: 36770 - RNA, 27 nt, synthetic construct
  misc_feature 1..27: note = AP-1 complex subunit gamma-1 (266-274)
  source 1..27: mol_type = other RNA
gccatgaacgacatcctggcccaggtg

SEQ ID NO: 36771 - RNA, 27 nt, synthetic construct
  misc_feature 1..27: note = Splicing factor 3A subunit 3 (45-53)
  source 1..27: mol_type = other RNA
gccatgcaggaccgctacatggaggtg

SEQ ID NO: 36772 - RNA, 33 nt, synthetic construct
  misc_feature 1..33: note = Guanine nucleotide-binding protein G(s) subunit alpha isoforms short (95-105)
  source 1..33: mol_type = other RNA
gccatgagcaacctggtgcccccggtcgagctc

SEQ ID NO: 36773 - RNA, 27 nt, synthetic construct
  misc_feature 1..27: note = Heat shock 70 kDa protein 1-like (450-458)
  source 1..27: mol_type = other RNA
gccatgaccaaggacaacaacctgctc

SEQ ID NO: 36774 - RNA, 27 nt, synthetic construct
  misc_feature 1..27: note = F-box only protein 21 (416-424)
  source 1..27: mol_type = other RNA
gccatgtaccccgaccaggtgcagctg

SEQ ID NO: 36775 - RNA, 30 nt, synthetic construct
  misc_feature 1..30: note = Vascular endothelial growth factor A (130-139)
  source 1..30: mol_type = other RNA
gcccccgccgcgcgcgccccgcaggccctg

SEQ ID NO: 36776 - RNA, 27 nt, synthetic construct
  misc_feature 1..27: note = Sister chromatid cohesion protein PDS5 homolog A (368-376)
  source 1..27: mol_type = other RNA
gcccccgccgagcgccagatcgacctg

SEQ ID NO: 36777 - RNA, 27 nt, synthetic construct
  misc_feature 1..27: note = Host cell factor 1 (810-818)
  source 1..27: mol_type = other RNA
gcccccgccaagatcatcaccgcggtg

SEQ ID NO: 36778 - RNA, 30 nt, synthetic construct
  misc_feature 1..30: note = Histone H1.4 (11-20)
  source 1..30: mol_type = other RNA
gcccccgccccggcggagaagacccccgtg

SEQ ID NO: 36779 - RNA, 27 nt, synthetic construct
  misc_feature 1..27: note = Zinc finger protein 428 (123-131)
  source 1..27: mol_type = other RNA
gcccccgccccggagggccgcgcgctg

SEQ ID NO: 36780 - RNA, 30 nt, synthetic construct
  misc_feature 1..30: note = Pleckstrin homology domain-containing family B member 2 (137-146)
  source 1..30: mol_type = other RNA
gcccccgccccggaggtgggccgcaccctg

SEQ ID NO: 36781 - RNA, 33 nt, synthetic construct
  misc_feature 1..33: note = Cathepsin D (16-26)
  source 1..33: mol_type = other RNA
gcccccgccagcgcgctggtgcgcatcccgctc

SEQ ID NO: 36782 - RNA, 27 nt, synthetic construct
  misc_feature 1..27: note = Liprin-beta-1 (819-827)
  source 1..27: mol_type = other RNA
gcccccaacctgcgcggcagcggggtg

SEQ ID NO: 36783 - RNA, 33 nt, synthetic construct
  misc_feature 1..33: note = Double-stranded RNA-binding protein Staufen homolog 1 (362-372)
  source 1..33: mol_type = other RNA
gcccccaacccggccaaggcgaccgtgaccgcc

SEQ ID NO: 36784 - RNA, 30 nt, synthetic construct
  misc_feature 1..30: note = Zinc finger HIT domain-containing protein 2 (59-68)
  source 1..30: mol_type = other RNA
gcccccccgagccgcctggcctccgcgctc

SEQ ID NO: 36785 - RNA, 33 nt, synthetic construct
  misc_feature 1..33: note = Putative sodium-coupled neutral amino acid transporter 10 (841-851)
  source 1..33: mol_type = other RNA
gccccccgcgccgcgggcaccgtgaaggagctg

SEQ ID NO: 36786 - RNA, 33 nt, synthetic construct
  misc_feature 1..33: note = RELT-like protein 1 (2-12)
  source 1..33: mol_type = other RNA
gccccccgcgccctgccgggcagcgcggtgctc

SEQ ID NO: 36787 - RNA, 27 nt, synthetic construct
  misc_feature 1..27: note = Rhotekin (385-393)
  source 1..27: mol_type = other RNA
gccccccgcaagccgccccaggccctg

SEQ ID NO: 36788 - RNA, 27 nt, synthetic construct
  misc_feature 1..27: note = Long-chain fatty acid transport protein 1 (264-272)
  source 1..27: mol_type = other RNA
gccccctacgcccgcccgatcttcctg

SEQ ID NO: 36789 - RNA, 27 nt, synthetic construct
  misc_feature 1..27: note = Coiled-coil domain-containing protein 50 (69-77)
  source 1..27: mol_type = other RNA
gcccaggcccagctgcagaagcgctac

SEQ ID NO: 36790 - RNA, 27 nt, synthetic construct
  misc_feature 1..27: note = Pumilio homolog 2 (180-188)
  source 1..27: mol_type = other RNA
gcccagcagccccacatcgccggcgtg

SEQ ID NO: 36791 - RNA, 27 nt, synthetic construct
  misc_feature 1..27: note = E3 ubiquitin-protein ligase HUWE1 (1181-1189)
  source 1..27: mol_type = other RNA
gcccaggtggccctggtcaacgaggtg

SEQ ID NO: 36792 - RNA, 27 nt, synthetic construct
  misc_feature 1..27: note = Unconventional myosin-If (36-44)
  source 1..27: mol_type = other RNA
gcccagtacgagaaccccccgcacatc

SEQ ID NO: 36793 - RNA, 33 nt, synthetic construct
  misc_feature 1..33: note = Alpha-actinin-1 (231-241)
  source 1..33: mol_type = other RNA
gcccgccccgacgagaaggccatcatgacctac

SEQ ID NO: 36794 - RNA, 27 nt, synthetic construct
  misc_feature 1..27: note = Vacuolar protein sorting-associated protein 54 (467-475)
  source 1..27: mol_type = other RNA
gccaccctgaacatcatccacagcgtg

SEQ ID NO: 36795 - RNA, 30 nt, synthetic construct
  misc_feature 1..30: note = Cullin-2 (577-586)
  source 1..30: mol_type = other RNA
gccgtggacgaggaccgcaagatgtacctg

SEQ ID NO: 36796 - RNA, 33 nt, synthetic construct
  misc_feature 1..33: note = Erlin-1 (214-224)
  source 1..33: mol_type = other RNA
gccgtgatcgaggccgagaagatcgcgcaggtc

SEQ ID NO: 36797 - RNA, 27 nt, synthetic construct
  misc_feature 1..27: note = Ubiquitin carboxyl-terminal hydrolase 28 (743-751)
  source 1..27: mol_type = other RNA
gccgtgatggagagcatccagggcgtc

SEQ ID NO: 36798 - RNA, 27 nt, synthetic construct
  misc_feature 1..27: note = 40S ribosomal protein S5 (172-180)
  source 1..27: mol_type = other RNA
tgcctggccgacgagctcatcaacgcc

SEQ ID NO: 36799 - RNA, 30 nt, synthetic construct
  misc_feature 1..30: note = Protein transport protein Sec23B (288-297)
  source 1..30: mol_type = other RNA
gacgagctgaagatccccatccgcagctgg

SEQ ID NO: 36800 - RNA, 30 nt, synthetic construct
  misc_feature 1..30: note = Serine/threonine-protein kinase 11-interacting protein (963-972)
  source 1..30: mol_type = other RNA
gacgaggtgagccgcctggagtccttctgg

SEQ ID NO: 36801 - RNA, 27 nt, synthetic construct
  misc_feature 1..27: note = Guanine nucleotide-binding protein G(I)/G(S)/G(T) subunit beta-2 (170-178)
  source 1..27: mol_type = other RNA
gacatcgagaccggccagcagaccgtg

SEQ ID NO: 36802 - RNA, 24 nt, synthetic construct
  misc_feature 1..24: note = Tuberin (529-536)
  source 1..24: mol_type = other RNA
gacatcatcgagaaggtgatggcc

SEQ ID NO: 36803 - RNA, 24 nt, synthetic construct
  misc_feature 1..24: note = E3 ubiquitin-protein ligase RNF213 (2081-2088)
  source 1..24: mol_type = other RNA
gacatcaacggcaagatgtggctg

SEQ ID NO: 36804 - RNA, 27 nt, synthetic construct
  misc_feature 1..27: note = Echinoderm microtubule-associated protein-like 5 (1134-1142)
  source 1..27: mol_type = other RNA
gacatccgcggcaagctgctccaggtg

SEQ ID NO: 36805 - RNA, 24 nt, synthetic construct
  misc_feature 1..24: note = Negative elongation factor A (258-265)
  source 1..24: mol_type = other RNA
gacatcagcgagctggacatggtg

SEQ ID NO: 36806 - RNA, 27 nt, synthetic construct
  misc_feature 1..27: note = Golgin subfamily A member 4 (852-860)
  source 1..27: mol_type = other RNA
gacctggagaccgagcgcatcctcctg

SEQ ID NO: 36807 - RNA, 30 nt, synthetic construct
  misc_feature 1..30: note = GRB2-associated-binding protein 1 (123-132)
  source 1..30: mol_type = other RNA
gaccccgtgaagccgcccggcagctccctg

SEQ ID NO: 36808 - RNA, 27 nt, synthetic construct
  misc_feature 1..27: note = Signal recognition particle 54 kDa protein (388-396)
  source 1..27: mol_type = other RNA
gacagcaccgacggcgccaaggtgttc

SEQ ID NO: 36809 - RNA, 27 nt, synthetic construct
  misc_feature 1..27: note = Protein BANP (72-80)
  source 1..27: mol_type = other RNA
gaggccaagctgcaggccctcgaggcg

SEQ ID NO: 36810 - RNA, 27 nt, synthetic construct
  misc_feature 1..27: note = Endothelial differentiation-related factor 1 (36-44)
  source 1..27: mol_type = other RNA
gaggacgtggagaccagcaagaagtgg

SEQ ID NO: 36811 - RNA, 30 nt, synthetic construct
  misc_feature 1..30: note = Clathrin heavy chain 1 (1066-1075)
  source 1..30: mol_type = other RNA
gaggaggccttcgccatcttccgcaagttc

SEQ ID NO: 36812 - RNA, 30 nt, synthetic construct
  misc_feature 1..30: note = DNA excision repair protein ERCC-1 (203-212)
  source 1..30: mol_type = other RNA
gaggaggccggccgctacctggagacctac

SEQ ID NO: 36813 - RNA, 27 nt, synthetic construct
  misc_feature 1..27: note = cAMP-dependent protein kinase type I-alpha regulatory subunit (60-68)
  source 1..27: mol_type = other RNA
gaggaggccaagcagatccagaacctg

SEQ ID NO: 36814 - RNA, 27 nt, synthetic construct
  misc_feature 1..27: note = Zinc finger protein 548 (56-64)
  source 1..27: mol_type = other RNA
gaggaggcccccagccagcagggcttc

SEQ ID NO: 36815 - RNA, 30 nt, synthetic construct
  misc_feature 1..30: note = Zinc finger and BTB domain-containing protein 17 (715-724)
  source 1..30: mol_type = other RNA
gaggaggaccccaacacccacatcctgtac

SEQ ID NO: 36816 - RNA, 30 nt, synthetic construct
  misc_feature 1..30: note = Cullin-4A (268-277)
  source 1..30: mol_type = other RNA
gaggaggagggcgaccgcgtgatcacctac

SEQ ID NO: 36817 - RNA, 27 nt, synthetic construct
  misc_feature 1..27: note = S-phase kinase-associated protein 1 (120-128)
  source 1..27: mol_type = other RNA
gaggagatccgcaagaccttcaacatc

SEQ ID NO: 36818 - RNA, 24 nt, synthetic construct
  misc_feature 1..24: note = Nuclear transcription factor Y subunit gamma (28-35)
  source 1..24: mol_type = other RNA
gaggagatccgcaacctgaccgtg

SEQ ID NO: 36819 - RNA, 30 nt, synthetic construct
  misc_feature 1..30: note = Flotillin-1 (118-127)
  source 1..30: mol_type = other RNA
gaggagatctacaaggaccgccagaagttc

SEQ ID NO: 36820 - RNA, 27 nt, synthetic construct
  misc_feature 1..27: note = Microtubule-associated protein 4 (105-113)
  source 1..27: mol_type = other RNA
gaggagaagatggcctaccaggagtac

SEQ ID NO: 36821 - RNA, 27 nt, synthetic construct
  misc_feature 1..27: note = Eukaryotic translation initiation factor 3 subunit D (172-180)
  source 1..27: mol_type = other RNA
gaggagatggacttcccccagctgatg

SEQ ID NO: 36822 - RNA, 30 nt, synthetic construct
  misc_feature 1..30: note = HEAT repeat-containing protein 1 (411-420)
  source 1..30: mol_type = other RNA
gaggagatggacagcaacaaggtgtccctg

SEQ ID NO: 36823 - RNA, 27 nt, synthetic construct
  misc_feature 1..27: note = BRISC and BRCA1-A complex member 1 (257-265)
  source 1..27: mol_type = other RNA
gaggagatgagctggaaggacatgttc

SEQ ID NO: 36824 - RNA, 30 nt, synthetic construct
  misc_feature 1..30: note = Mitotic checkpoint serine/threonine-protein kinase BUB1 (35-44)
  source 1..30: mol_type = other RNA
gaggagaacttccccgagaacaaggagtac

SEQ ID NO: 36825 - RNA, 30 nt, synthetic construct
  misc_feature 1..30: note = Autophagy-related protein 16-1 (158-167)
  source 1..30: mol_type = other RNA
gaggagaaccaggagctggtgacccgctgg

SEQ ID NO: 36826 - RNA, 27 nt, synthetic construct
  misc_feature 1..27: note = Eukaryotic translation initiation factor 3 subunit C-like protein (786-794)
  source 1..27: mol_type = other RNA
gaggagagcctgcgcacctacctcttc

SEQ ID NO: 36827 - RNA, 27 nt, synthetic construct
  misc_feature 1..27: note = Segment polarity protein dishevelled homolog DVL-2 (23-31)
  source 1..27: mol_type = other RNA
gaggagaccccctacctggtgaagatc

SEQ ID NO: 36828 - RNA, 30 nt, synthetic construct
  misc_feature 1..30: note = GRIP1-associated protein 1 (706-715)
  source 1..30: mol_type = other RNA
gaggaggtggccgagctgttccagcgcctc

SEQ ID NO: 36829 - RNA, 27 nt, synthetic construct
  misc_feature 1..27: note = Glutaredoxin-3 (9-17)
  source 1..27: mol_type = other RNA
gagctggccaaggagctcccccaggtg

SEQ ID NO: 36830 - RNA, 27 nt, synthetic construct
  misc_feature 1..27: note = Nuclear factor of activated T-cells 5 (953-961)
  source 1..27: mol_type = other RNA
gagctgttcagctcccccccggccgtg

SEQ ID NO: 36831 - RNA, 24 nt, synthetic construct
  misc_feature 1..24: note = Cyclin-J-like protein (62-69)
  source 1..24: mol_type = other RNA
gagcagctgcgcctccaggagctg

SEQ ID NO: 36832 - RNA, 27 nt, synthetic construct
  misc_feature 1..27: note = Nucleolar RNA helicase 2 (172-180)
  source 1..27: mol_type = other RNA
ttcgccatccccctgatcgagaagctc

SEQ ID NO: 36833 - RNA, 27 nt, synthetic construct
  misc_feature 1..27: note = Tristetraprolin (304-312)
  source 1..27: mol_type = other RNA
ttcgcccccccgcagcccgtggccgcg

SEQ ID NO: 36834 - RNA, 30 nt, synthetic construct
  misc_feature 1..30: note = Laminin subunit gamma-1 (1227-1236)
  source 1..30: mol_type = other RNA
ttcgagatcgaggagctgaaccgcaagtac

SEQ ID NO: 36835 - RNA, 27 nt, synthetic construct
  misc_feature 1..27: note = Nucleolar pre-ribosomal-associated protein 1 (1554-1562)
  source 1..27: mol_type = other RNA
ttcgagcagaagaccgagcagaagtgg

SEQ ID NO: 36836 - RNA, 27 nt, synthetic construct
  misc_feature 1..27: note = Non-POU domain-containing octamer-binding protein (174-182)
  source 1..27: mol_type = other RNA
ttcgagtacgagtacgccatgcgctgg

SEQ ID NO: 36837 - RNA, 27 nt, synthetic construct
  misc_feature 1..27: note = Antizyme inhibitor 1 (4-12)
  source 1..27: mol_type = other RNA
ttcatcgacgacgccaactacagcgtg

SEQ ID NO: 36838 - RNA, 30 nt, synthetic construct
  misc_feature 1..30: note = Activator of 90 kDa heat shock protein ATPase homolog 1 (215-224)
  source 1..30: mol_type = other RNA
ttcatcgacaagaacggcgagaccgagctg

SEQ ID NO: 36839 - RNA, 27 nt, synthetic construct
  misc_feature 1..27: note = Ral GTPase-activating protein subunit alpha-1 (86-94)
  source 1..27: mol_type = other RNA
ttcatcttcgagaagatcctgcagctc

SEQ ID NO: 36840 - RNA, 27 nt, synthetic construct
  misc_feature 1..27: note = DENN domain-containing protein 5B (1150-1158)
  source 1..27: mol_type = other RNA
ttcatctgggacttcatcgagaaggtg

SEQ ID NO: 36841 - RNA, 30 nt, synthetic construct
  misc_feature 1..30: note = Dipeptidyl peptidase 8 (19-28)
  source 1..30: mol_type = other RNA
ttcatctacggcgggccccaggtgcagctg

SEQ ID NO: 36842 - RNA, 27 nt, synthetic construct
  misc_feature 1..27: note = Caspase recruitment domain-containing protein 19 (155-163)
  source 1..27: mol_type = other RNA
ttcctggccgacgacctcggcgggctg

SEQ ID NO: 36843 - RNA, 33 nt, synthetic construct
  misc_feature 1..33: note = Protein YIF1B (55-65)
  source 1..33: mol_type = other RNA
ttcctggccgaccccgtgagcaacatggccatg

SEQ ID NO: 36844 - RNA, 27 nt, synthetic construct
  misc_feature 1..27: note = Interferon-induced GTP-binding protein Mx2 (30-38)
  source 1..27: mol_type = other RNA
ttcctggccaaggacttcaacttcctc

SEQ ID NO: 36845 - RNA, 27 nt, synthetic construct
  misc_feature 1..27: note = Eukaryotic translation initiation factor 4 gamma 2 (315-323)
  source 1..27: mol_type = other RNA
ttcctggacaacggccccaagaccatc

SEQ ID NO: 36846 - RNA, 27 nt, synthetic construct
  misc_feature 1..27: note = Phospholipase DDHD1 (681-689)
  source 1..27: mol_type = other RNA
ttcctggacagcgcctacttccgcctc

SEQ ID NO: 36847 - RNA, 27 nt, synthetic construct
  misc_feature 1..27: note = Condensin complex subunit 3 (699-707)
  source 1..27: mol_type = other RNA
ttcctggacagcgaggtgtccgagctc

SEQ ID NO: 36848 - RNA, 27 nt, synthetic construct
  misc_feature 1..27: note = Microtubule-associated protein 1B (32-40)
  source 1..27: mol_type = other RNA
ttcctggacagcaagttctacctcctg

SEQ ID NO: 36849 - RNA, 27 nt, synthetic construct
  misc_feature 1..27: note = Catenin alpha-2 (392-400)
  source 1..27: mol_type = other RNA
ttcctggagaccaacgtgcccctcctg

SEQ ID NO: 36850 - RNA, 30 nt, synthetic construct
  misc_feature 1..30: note = Calnexin (139-148)
  source 1..30: mol_type = other RNA
ttcctgttcgacaccaagcccctcatcgtg

SEQ ID NO: 36851 - RNA, 27 nt, synthetic construct
  misc_feature 1..27: note = Vacuolar protein sorting-associated protein 51 homolog (106-114)
  source 1..27: mol_type = other RNA
ttcctgttcgagctccccagccgcctg

SEQ ID NO: 36852 - RNA, 30 nt, synthetic construct
  misc_feature 1..30: note = Ankyrin repeat and LEM domain-containing protein 2 (825-834)
  source 1..30: mol_type = other RNA
ttcctgttcggcgaggagcccagcaagctc

SEQ ID NO: 36853 - RNA, 27 nt, synthetic construct
  misc_feature 1..27: note = Cullin-4B (289-297)
  source 1..27: mol_type = other RNA
ttcctgttcctcgaccgcacctacgtg

SEQ ID NO: 36854 - RNA, 27 nt, synthetic construct
  misc_feature 1..27: note = Elongation of very long chain fatty acids protein 1 (87-95)
  source 1..27: mol_type = other RNA
ttcctgttcagcaagttcatcgagctc

SEQ ID NO: 36855 - RNA, 24 nt, synthetic construct
  misc_feature 1..24: note = Sacsin (645-652)
  source 1..24: mol_type = other RNA
ttcctgggcaagatctaccagatc

SEQ ID NO: 36856 - RNA, 27 nt, synthetic construct
  misc_feature 1..27: note = UDP-N-acetylglucosamine-dolichyl-phosphate N-acetylglucosaminephosphotransferase (221-229)
  source 1..27: mol_type = other RNA
ttcctgggcaccttcatcctcaaggtg

SEQ ID NO: 36857 - RNA, 27 nt, synthetic construct
  misc_feature 1..27: note = DNA ligase 3 (616-624)
  source 1..27: mol_type = other RNA
ttcctgcacgacaacatggtggagatc

SEQ ID NO: 36858 - RNA, 27 nt, synthetic construct
  misc_feature 1..27: note = Major facilitator superfamily domain-containing protein 1 (150-158)
  source 1..27: mol_type = other RNA
ttcctgatcgaccgcgtgttcggcatc

SEQ ID NO: 36859 - RNA, 27 nt, synthetic construct
  misc_feature 1..27: note = ATP-dependent RNA helicase DHX36 (519-527)
  source 1..27: mol_type = other RNA
ttcctgatcatccccctccacagcctg

SEQ ID NO: 36860 - RNA, 30 nt, synthetic construct
  misc_feature 1..30: note = Beta-glucuronidase (117-126)
  source 1..30: mol_type = other RNA
ttcctgatcaacggcaagcccttctacttc

SEQ ID NO: 36861 - RNA, 27 nt, synthetic construct
  misc_feature 1..27: note = Isoleucine-tRNA ligase, cytoplasmic (662-670)
  source 1..27: mol_type = other RNA
ttcctgatccagaacgtgctccgcctg

SEQ ID NO: 36862 - RNA, 27 nt, synthetic construct
  misc_feature 1..27: note = Puromycin-sensitive aminopeptidase (846-854)
  source 1..27: mol_type = other RNA
ttcctgatcagccgcctcatcaagctg

SEQ ID NO: 36863 - RNA, 27 nt, synthetic construct
  misc_feature 1..27: note = Myotubularin-related protein 2 (121-129)
  source 1..27: mol_type = other RNA
ttcctgatcaccatcctcgaccacctg

SEQ ID NO: 36864 - RNA, 27 nt, synthetic construct
  misc_feature 1..27: note = Putative protein PLEKHA9 (298-306)
  source 1..27: mol_type = other RNA
ttcctgaagggcttcctcaccgaggtg

SEQ ID NO: 36865 - RNA, 30 nt, synthetic construct
  misc_feature 1..30: note = Regulator of nonsense transcripts 1 (192-201)
  source 1..30: mol_type = other RNA
ttcctgctcggcttcatccccgccaaggcc

SEQ ID NO: 36866 - RNA, 30 nt, synthetic construct
  misc_feature 1..30: note = Alpha-N-acetylglucosaminidase (616-625)
  source 1..30: mol_type = other RNA
ttcctgctcggcagctggctggagcaggcc

SEQ ID NO: 36867 - RNA, 27 nt, synthetic construct
  misc_feature 1..27: note = Probable ATP-dependent RNA helicase DDX59 (257-265)
  source 1..27: mol_type = other RNA
ttcctgctccccgtgatcatgcgcgcc

SEQ ID NO: 36868 - RNA, 30 nt, synthetic construct
  misc_feature 1..30: note = HLA class II histocompatibility antigen, DP alpha 1 chain (22-31)
  source 1..30: mol_type = other RNA
ttcctgctcagcctgcgcggcgccggggcc

SEQ ID NO: 36869 - RNA, 27 nt, synthetic construct
  misc_feature 1..27: note = Putative histone H2B type 2-D (86-94)
  source 1..27: mol_type = other RNA
ttcctgaacgacatcttcgagcgcatc

SEQ ID NO: 36870 - RNA, 27 nt, synthetic construct
  misc_feature 1..27: note = A-kinase anchor protein 9 (956-964)
  source 1..27: mol_type = other RNA
ttcctgaacgaggaggtgaagagcctc

SEQ ID NO: 36871 - RNA, 27 nt, synthetic construct
  misc_feature 1..27: note = Osteopetrosis-associated transmembrane protein 1 (171-179)
  source 1..27: mol_type = other RNA
ttcctgaacctcttcaaccacaccctg

SEQ ID NO: 36872 - RNA, 30 nt, synthetic construct
  misc_feature 1..30: note = Structure-specific endonuclease subunit SLX1 (220-229)
  source 1..30: mol_type = other RNA
ttcctgcaggaggagcccggccagctcctg

SEQ ID NO: 36873 - RNA, 27 nt, synthetic construct
  misc_feature 1..27: note = Golgin subfamily A member 4 (1152-1160)
  source 1..27: mol_type = other RNA
ttcctgcaggagcagctcgtggagctg

SEQ ID NO: 36874 - RNA, 27 nt, synthetic construct
  misc_feature 1..27: note = Endoplasmic reticulum-Golgi intermediate compartment protein 3 (5-13)
  source 1..27: mol_type = other RNA
ttcctgagcgagctccagtactacctg

SEQ ID NO: 36875 - RNA, 27 nt, synthetic construct
  misc_feature 1..27: note = Nicalin (262-270)
  source 1..27: mol_type = other RNA
ttcctgagcaccctcgagcaccacctg

SEQ ID NO: 36876 - RNA, 27 nt, synthetic construct
  misc_feature 1..27: note = Uncharacterized protein KIAA1109 (19-27)
  source 1..27: mol_type = other RNA
ttcctgaccgagcacaacagcaacgtg

SEQ ID NO: 36877 - RNA, 27 nt, synthetic construct
  misc_feature 1..27: note = Zinc finger BED domain-containing protein 5 (533-541)
  source 1..27: mol_type = other RNA
ttcctgaccgagatcaacagcaccgtg

SEQ ID NO: 36878 - RNA, 30 nt, synthetic construct
  misc_feature 1..30: note = Signal transducer and activator of transcription 6 (163-172)
  source 1..30: mol_type = other RNA
ttcctggtggagaagcagcccccgcaggtc

SEQ ID NO: 36879 - RNA, 30 nt, synthetic construct
  misc_feature 1..30: note = Phospholipase D3 (58-67)
  source 1..30: mol_type = other RNA
ttcctgtgggagtacggcgacctccacctg

SEQ ID NO: 36880 - RNA, 27 nt, synthetic construct
  misc_feature 1..27: note = Transcription factor 25 (382-390)
  source 1..27: mol_type = other RNA
ttcctgtggaaggagcccgccaccatg

SEQ ID NO: 36881 - RNA, 27 nt, synthetic construct
  misc_feature 1..27: note = Cytochrome b (107-115)
  source 1..27: mol_type = other RNA
ttcctgtacagcgagacctggaacatc

SEQ ID NO: 36882 - RNA, 30 nt, synthetic construct
  misc_feature 1..30: note = E3 ubiquitin-protein ligase XIAP (52-61)
  source 1..30: mol_type = other RNA
ttcctgtacaccggcgagggggacaccgtg

SEQ ID NO: 36883 - RNA, 27 nt, synthetic construct
  misc_feature 1..27: note = Putative oxidoreductase GLYR1 (382-390)
  source 1..27: mol_type = other RNA
ttcatggccaccatcgccgagggcctg

SEQ ID NO: 36884 - RNA, 27 nt, synthetic construct
  misc_feature 1..27: note = Probable helicase senataxin (266-274)
  source 1..27: mol_type = other RNA
ttcatgcagagcatcctgcacaccatg

SEQ ID NO: 36885 - RNA, 27 nt, synthetic construct
  misc_feature 1..27: note = Alpha-adducin (97-105)
  source 1..27: mol_type = other RNA
ttcatgaccaccaacgtgcccaacgtc

SEQ ID NO: 36886 - RNA, 27 nt, synthetic construct
  misc_feature 1..27: note = Ubiquitin carboxyl-terminal hydrolase 11 (94-102)
  source 1..27: mol_type = other RNA
ttccaggacgagatcaactggcgcctg

SEQ ID NO: 36887 - RNA, 33 nt, synthetic construct
  misc_feature 1..33: note = E3 ubiquitin-protein ligase TRIP12 (633-643)
  source 1..33: mol_type = other RNA
ttccagcacgaggagaacctgctccagcaggtg

SEQ ID NO: 36888 - RNA, 27 nt, synthetic construct
  misc_feature 1..27: note = Threonine-tRNA ligase, cytoplasmic (598-606)
  source 1..27: mol_type = other RNA
ttccagctgcccatccgcttcaacctc

SEQ ID NO: 36889 - RNA, 27 nt, synthetic construct
  misc_feature 1..27: note = RNA-binding protein EWS (267-275)
  source 1..27: mol_type = other RNA
ttccgccaggaccaccccagctccatg

SEQ ID NO: 36890 - RNA, 24 nt, synthetic construct
  misc_feature 1..24: note = Spliceosome RNA helicase DDX39B (106-113)
  source 1..24: mol_type = other RNA
ttcgtggacgacgagaccaagctg

SEQ ID NO: 36891 - RNA, 27 nt, synthetic construct
  misc_feature 1..27: note = Cytoplasmic dynein 1 heavy chain 1 (4145-4153)
  source 1..27: mol_type = other RNA
ttcgtgttcgagcccccgcccggcgtc

SEQ ID NO: 36892 - RNA, 27 nt, synthetic construct
  misc_feature 1..27: note = General transcription factor IIH subunit 5 (44-52)
  source 1..27: mol_type = other RNA
ttcgtgatcgccgagctggtcaacgtg

SEQ ID NO: 36893 - RNA, 27 nt, synthetic construct
  misc_feature 1..27: note = Transmembrane protein 147 (181-189)
  source 1..27: mol_type = other RNA
ttcgtgatggagaccttcgtccacctg

SEQ ID NO: 36894 - RNA, 27 nt, synthetic construct
  misc_feature 1..27: note = Rhomboid domain-containing protein 2 (68-76)
  source 1..27: mol_type = other RNA
ttcgtgtacgagaaccccatcagcctg

SEQ ID NO: 36895 - RNA, 27 nt, synthetic construct
  misc_feature 1..27: note = ER degradation-enhancing alpha-mannosidase-like protein 1 (33-41)
  source 1..27: mol_type = other RNA
ttctaccagcgcttccccctgagcttc

SEQ ID NO: 36896 - RNA, 27 nt, synthetic construct
  misc_feature 1..27: note = Filamin-A (998-1006)
  source 1..27: mol_type = other RNA
ggcgccgacaacagcgtggtccgcttc

SEQ ID NO: 36897 - RNA, 27 nt, synthetic construct
  misc_feature 1..27: note = FACT complex subunit SPT16 (233-241)
  source 1..27: mol_type = other RNA
ggcgccgaccccagcaccgtggagatg

SEQ ID NO: 36898 - RNA, 30 nt, synthetic construct
  misc_feature 1..30: note = Telomere length regulation protein TEL2 homolog (189-198)
  source 1..30: mol_type = other RNA
ggcgaggaggtggtccgcgtgctgcaggcc

SEQ ID NO: 36899 - RNA, 30 nt, synthetic construct
  misc_feature 1..30: note = Leucine-rich repeat serine/threonine-protein kinase 2 (1802-1811)
  source 1..30: mol_type = other RNA
ggcgagggggagaccctgctcaagaagtgg

SEQ ID NO: 36900 - RNA, 30 nt, synthetic construct
  misc_feature 1..30: note = Nuclear factor erythroid 2-related factor 2 (521-530)
  source 1..30: mol_type = other RNA
ggcgagaacgacaagagcctgcacctcctg

SEQ ID NO: 36901 - RNA, 27 nt, synthetic construct
  misc_feature 1..27: note = AT-rich interactive domain-containing protein 2 (80-88)
  source 1..27: mol_type = other RNA
ggcgagagctccctgatcaagcagctc

SEQ ID NO: 36902 - RNA, 30 nt, synthetic construct
  misc_feature 1..30: note = Acetyl-CoA carboxylase 1 (1979-1988)
  source 1..30: mol_type = other RNA
ggcgggatccccgtgggcgtcgtggccgtg

SEQ ID NO: 36903 - RNA, 24 nt, synthetic construct
  misc_feature 1..24: note = DNA damage-binding protein 1 (59-66)
  source 1..24: mol_type = other RNA
ggcaagatcgccgtgatggagctg

SEQ ID NO: 36904 - RNA, 27 nt, synthetic construct
  misc_feature 1..27: note = Cyclin-dependent kinase 12 (1103-1111)
  source 1..27: mol_type = other RNA
ggcctggccgacatcacccagcagctc

SEQ ID NO: 36905 - RNA, 33 nt, synthetic construct
  misc_feature 1..33: note = ATPase WRNIP1 (548-558)
  source 1..33: mol_type = other RNA
ggcctggccgaccccagcgccctcacccaggcg

SEQ ID NO: 36906 - RNA, 30 nt, synthetic construct
  misc_feature 1..30: note = Negative regulator of reactive oxygen species (203-212)
  source 1..30: mol_type = other RNA
ggcctggccgagctccgccacctgaacctg

SEQ ID NO: 36907 - RNA, 27 nt, synthetic construct
  misc_feature 1..27: note = Flap endonuclease 1 (5-13)
  source 1..27: mol_type = other RNA
ggcctggccaagctcatcgccgacgtg

SEQ ID NO: 36908 - RNA, 27 nt, synthetic construct
  misc_feature 1..27: note = GPN-loop GTPase 1 (234-242)
  source 1..27: mol_type = other RNA
ggcctggacgagctcttcgtgcaggtc

SEQ ID NO: 36909 - RNA, 30 nt, synthetic construct
  misc_feature 1..30: note = Probable ATP-dependent RNA helicase DDX27 (497-506)
  source 1..30: mol_type = other RNA
ggcctggacatcgagggggtgaagaccgtc

SEQ ID NO: 36910 - RNA, 33 nt, synthetic construct
  misc_feature 1..33: note = U3 small nucleolar RNA-associated protein 18 homolog (107-117)
  source 1..33: mol_type = other RNA
ggcctggacaacgccgtgagcctcttccaggtc

SEQ ID NO: 36911 - RNA, 27 nt, synthetic construct
  misc_feature 1..27: note = 26S protease regulatory subunit 4 (189-197)
  source 1..27: mol_type = other RNA
ggcctggacaaccagatccaggagatc

SEQ ID NO: 36912 - RNA, 30 nt, synthetic construct
  misc_feature 1..30: note = DNA mismatch repair protein Msh2 (438-447)
  source 1..30: mol_type = other RNA
ggcctggaccccgggaagcagatcaagctc

SEQ ID NO: 36913 - RNA, 27 nt, synthetic construct
  misc_feature 1..27: note = CAP-Gly domain-containing linker protein 1 (270-278)
  source 1..27: mol_type = other RNA
ggcctgttcgcccccgtgcacaaggtc

SEQ ID NO: 36914 - RNA, 33 nt, synthetic construct
  misc_feature 1..33: note = Ras suppressor protein 1 (35-45)
  source 1..33: mol_type = other RNA
ggcctgttcaccctcagccacatcacccagctg

SEQ ID NO: 36915 - RNA, 33 nt, synthetic construct
  misc_feature 1..33: note = Autophagy-related protein 13 (84-94)
  source 1..33: mol_type = other RNA
ggcctgggggagggcttccagaccgtgcgcgtc

SEQ ID NO: 36916 - RNA, 33 nt, synthetic construct
  misc_feature 1..33: note = WD repeat and FYVE domain-containing protein 3 (1077-1087)
  source 1..33: mol_type = other RNA
ggcctgatcgacggggccgtggtcagcggcatc

SEQ ID NO: 36917 - RNA, 33 nt, synthetic construct
  misc_feature 1..33: note = Structural maintenance of chromosomes flexible hinge domain-containing protein 1 (829-839)
  source 1..33: mol_type = other RNA
ggcctgctcgacctgcccttccgcgtgggggtc

SEQ ID NO: 36918 - RNA, 30 nt, synthetic construct
  misc_feature 1..30: note = Nucleolar complex protein 4 homolog (332-341)
  source 1..30: mol_type = other RNA
ggcctgctcgaccccagcgtgttccacgtc

SEQ ID NO: 36919 - RNA, 27 nt, synthetic construct
  misc_feature 1..27: note = Transcription initiation factor TFIID subunit 4B (694-702)
  source 1..27: mol_type = other RNA
ggcctgctcgagaagctgaccgccatc

SEQ ID NO: 36920 - RNA, 27 nt, synthetic construct
  misc_feature 1..27: note = Vigilin (1000-1008)
  source 1..27: mol_type = other RNA
ggcctgctcgagcgcgtgaaggagctg

SEQ ID NO: 36921 - RNA, 33 nt, synthetic construct
  misc_feature 1..33: note = Vigilin (354-364)
  source 1..33: mol_type = other RNA
ggcctgctcgagcgcgtgaaggagctgcaggcc

SEQ ID NO: 36922 - RNA, 27 nt, synthetic construct
  misc_feature 1..27: note = Phosphatidylinositol N-acetylglucosaminyltransferase subunit H (75-83)
  source 1..27: mol_type = other RNA
ggcctgctcgggtacctgcacttcgtg

SEQ ID NO: 36923 - RNA, 27 nt, synthetic construct
  misc_feature 1..27: note = Thyroid adenoma-associated protein (229-237)
  source 1..27: mol_type = other RNA
ggcctgctcagcatcttcaccaaggtg

SEQ ID NO: 36924 - RNA, 33 nt, synthetic construct
  misc_feature 1..33: note = Trafficking protein particle complex subunit 2-like protein (29-39)
  source 1..33: mol_type = other RNA
ggcctgctctaccccaccgaggactacaaggtg

SEQ ID NO: 36925 - RNA, 27 nt, synthetic construct
  misc_feature 1..27: note = Nuclear receptor corepressor 1 (313-321)
  source 1..27: mol_type = other RNA
ggcctgatggaggaccccatgaaggtg

SEQ ID NO: 36926 - RNA, 33 nt, synthetic construct
  misc_feature 1..33: note = Importin-4 (301-311)
  source 1..33: mol_type = other RNA
ggcctgatgggggagggcctcgccccccacctg

SEQ ID NO: 36927 - RNA, 27 nt, synthetic construct
  misc_feature 1..27: note = Adiponectin receptor protein 2 (286-294)
  source 1..27: mol_type = other RNA
ggcctgagcgggatcatccccaccctc

SEQ ID NO: 36928 - RNA, 27 nt, synthetic construct
  misc_feature 1..27: note = Protein GPR107 (398-406)
  source 1..27: mol_type = other RNA
ggcctgtggaaggacagcctcttcctg

SEQ ID NO: 36929 - RNA, 27 nt, synthetic construct
  misc_feature 1..27: note = Chromodomain-helicase-DNA-binding protein 8 (115-123)
  source 1..27: mol_type = other RNA
ggcatggacgagaaggagttcaccgtg

SEQ ID NO: 36930 - RNA, 27 nt, synthetic construct
  misc_feature 1..27: note = DnaJ homolog subfamily A member 1 (168-176)
  source 1..27: mol_type = other RNA
ggcatggtgcagcagatccagagcgtc

SEQ ID NO: 36931 - RNA, 30 nt, synthetic construct
  misc_feature 1..30: note = Cysteine and histidine-rich protein 1 (139-148)
  source 1..30: mol_type = other RNA
ggcatgtgggggggcgccatgctgggggtg

SEQ ID NO: 36932 - RNA, 33 nt, synthetic construct
  misc_feature 1..33: note = Rab GTPase-activating protein 1-like (35-45)
  source 1..33: mol_type = other RNA
ggcatgtggaaccccaacgccccggtgttcctg

SEQ ID NO: 36933 - RNA, 27 nt, synthetic construct
  misc_feature 1..27: note = Tumor protein p53-inducible protein 13 (212-220)
  source 1..27: mol_type = other RNA
ggcccccagccgacccgcagcgccctg

SEQ ID NO: 36934 - RNA, 27 nt, synthetic construct
  misc_feature 1..27: note = Ubiquitin carboxyl-terminal hydrolase 48 (545-553)
  source 1..27: mol_type = other RNA
ggcccccgcctgaccgtgaaggccctc

SEQ ID NO: 36935 - RNA, 30 nt, synthetic construct
  misc_feature 1..30: note = Filamin-A (2186-2195)
  source 1..30: mol_type = other RNA
ggcccccgcctggtgagcaaccactccctc

SEQ ID NO: 36936 - RNA, 27 nt, synthetic construct
  misc_feature 1..27: note = Apoptosis-stimulating of p53 protein 2 (99-107)
  source 1..27: mol_type = other RNA
ggcccccgcagccaggacccgtccctg

SEQ ID NO: 36937 - RNA, 27 nt, synthetic construct
  misc_feature 1..27: note = Interleukin-6 receptor subunit beta (849-857)
  source 1..27: mol_type = other RNA
ggccaggtggagcgcttcgagaccgtc

SEQ ID NO: 36938 - RNA, 30 nt, synthetic construct
  misc_feature 1..30: note = HLA class I histocompatibility antigen, B-15 alpha chain (25-34)
  source 1..30: mol_type = other RNA
ggcagccactccatgcgctacttctacacc

SEQ ID NO: 36939 - RNA, 30 nt, synthetic construct
  misc_feature 1..30: note = Nucleolar protein 56 (116-125)
  source 1..30: mol_type = other RNA
ggcgtgatcgccgagatcctgcgcggggtc

SEQ ID NO: 36940 - RNA, 30 nt, synthetic construct
  misc_feature 1..30: note = Perilipin-2 (347-356)
  source 1..30: mol_type = other RNA
ggcgtgatggccggggacatctacagcgtc

SEQ ID NO: 36941 - RNA, 33 nt, synthetic construct
  misc_feature 1..33: note = Golgi resident protein GCP60 (488-498)
  source 1..33: mol_type = other RNA
cacgaggaggtgtacgccggcagccaccagtac

SEQ ID NO: 36942 - RNA, 27 nt, synthetic construct
  misc_feature 1..27: note = Small subunit processome component 20 homolog (748-756)
  source 1..27: mol_type = other RNA
cacgagatggagaacaagcagttctgg

SEQ ID NO: 36943 - RNA, 27 nt, synthetic construct
  misc_feature 1..27: note = Kelch domain-containing protein 3 (196-204)
  source 1..27: mol_type = other RNA
cacatcctggacttcagcccctccctc

SEQ ID NO: 36944 - RNA, 33 nt, synthetic construct
  misc_feature 1..33: note = Leucine-rich repeat and calponin homology domain-containing protein 3 (744-754)
  source 1..33: mol_type = other RNA
cacatcctggaggagaagggcctcagccaggtg

SEQ ID NO: 36945 - RNA, 33 nt, synthetic construct
  misc_feature 1..33: note = Leucine-rich repeat and calponin homology domain-containing protein 1 (668-678)
  source 1..33: mol_type = other RNA
cacatcctggaggagaagggcctcgtgaaggtc

SEQ ID NO: 36946 - RNA, 30 nt, synthetic construct
  misc_feature 1..30: note = Vascular endothelial growth factor receptor 1 (327-336)
  source 1..30: mol_type = other RNA
cacatctacgacaaggccttcatcaccgtg

SEQ ID NO: 36947 - RNA, 33 nt, synthetic construct
  misc_feature 1..33: note = Phenylalanine-tRNA ligase alpha subunit (365-375)
  source 1..33: mol_type = other RNA
cacctggccgagttccaccagatcgagggcgtg

SEQ ID NO: 36948 - RNA, 27 nt, synthetic construct
  misc_feature 1..27: note = ZW10 interactor (166-174)
  source 1..27: mol_type = other RNA
cacctggccgaggtgagcgccgaggtc

SEQ ID NO: 36949 - RNA, 27 nt, synthetic construct
  misc_feature 1..27: note = Gamma-adducin (155-163)
  source 1..27: mol_type = other RNA
cacctggccaacacctacatcagcgtg

SEQ ID NO: 36950 - RNA, 27 nt, synthetic construct
  misc_feature 1..27: note = Transcription factor E2-alpha (182-190)
  source 1..27: mol_type = other RNA
cacctggacgaggccatccacgtgctc

SEQ ID NO: 36951 - RNA, 27 nt, synthetic construct
  misc_feature 1..27: note = Pre-mRNA-processing factor 17 (71-79)
  source 1..27: mol_type = other RNA
cacctggaccccgccgtgaaggaggtc

SEQ ID NO: 36952 - RNA, 27 nt, synthetic construct
  misc_feature 1..27: note = Membrane-associated tyrosine- and threonine-specific cdc2-inhibitory kinase (162-170)
  source 1..27: mol_type = other RNA
cacctggacgtgaagcccgccaacatc

SEQ ID NO: 36953 - RNA, 27 nt, synthetic construct
  misc_feature 1..27: note = DEP domain-containing protein 1B (290-298)
  source 1..27: mol_type = other RNA
cacctgttcgacgccttcgtgagcgtc

SEQ ID NO: 36954 - RNA, 27 nt, synthetic construct
  misc_feature 1..27: note = Clathrin heavy chain 1 (1233-1241)
  source 1..27: mol_type = other RNA
cacctgggcgagtaccaggccgccgtg

SEQ ID NO: 36955 - RNA, 27 nt, synthetic construct
  misc_feature 1..27: note = Neutral alpha-glucosidase AB (77-85)
  source 1..27: mol_type = other RNA
cacctgatccacgaggtgaccaaggtc

SEQ ID NO: 36956 - RNA, 30 nt, synthetic construct
  misc_feature 1..30: note = Heat shock protein HSP 90-beta (110-119)
  source 1..30: mol_type = other RNA
cacctgaaggaggaccagaccgagtacctc

SEQ ID NO: 36957 - RNA, 27 nt, synthetic construct
  misc_feature 1..27: note = Centromere protein F (2031-2039)
  source 1..27: mol_type = other RNA
cacctgcaggagaagctccagagcctg

SEQ ID NO: 36958 - RNA, 27 nt, synthetic construct
  misc_feature 1..27: note = Late secretory pathway protein AVL9 homolog (517-525)
  source 1..27: mol_type = other RNA
cacctgagcgacgccatcgtggaggtc

SEQ ID NO: 36959 - RNA, 27 nt, synthetic construct
  misc_feature 1..27: note = Leupaxin (99-107)
  source 1..27: mol_type = other RNA
cacctgaccgagatgcaggccaaggtg

SEQ ID NO: 36960 - RNA, 33 nt, synthetic construct
  misc_feature 1..33: note = Transmembrane protein 2 (1314-1324)
  source 1..33: mol_type = other RNA
cacctgtacgacaagggcagcaccatcttcctc

SEQ ID NO: 36961 - RNA, 27 nt, synthetic construct
  misc_feature 1..27: note = Huntingtin-interacting protein 1 (192-200)
  source 1..27: mol_type = other RNA
cacctgtacgactacaccgtgaagctc

SEQ ID NO: 36962 - RNA, 27 nt, synthetic construct
  misc_feature 1..27: note = Beta-lactamase-like protein 2 (145-153)
  source 1..27: mol_type = other RNA
cacaccgacgaccacatggccctgctc

SEQ ID NO: 36963 - RNA, 24 nt, synthetic construct
  misc_feature 1..24: note = DNA topoisomerase 2-beta (834-841)
  source 1..24: mol_type = other RNA
cacaccgacaccacggtgaagttc

SEQ ID NO: 36964 - RNA, 27 nt, synthetic construct
  misc_feature 1..27: note = NIPA-like protein 3 (122-130)
  source 1..27: mol_type = other RNA
atcgccatcaccgccggcgcgatcttc

SEQ ID NO: 36965 - RNA, 27 nt, synthetic construct
  misc_feature 1..27: note = Cyclin-dependent kinase 1 (136-144)
  source 1..27: mol_type = other RNA
atcgacgacaagggcaccatcaagctg

SEQ ID NO: 36966 - RNA, 27 nt, synthetic construct
  misc_feature 1..27: note = Glucosamine-6-phosphate isomerase 2 (146-154)
  source 1..27: mol_type = other RNA
atcgaggagggcgtgaaccacatgtgg

SEQ ID NO: 36967 - RNA, 30 nt, synthetic construct
  misc_feature 1..30: note = Zinc finger protein ZPR1 (195-204)
  source 1..30: mol_type = other RNA
atcatcgacgaccccagcggcaactccttc

SEQ ID NO: 36968 - RNA, 27 nt, synthetic construct
  misc_feature 1..27: note = U5 small nuclear ribonucleoprotein 200 kDa helicase (612-620)
  source 1..27: mol_type = other RNA
atcatcctggacgagatccacctcctg

SEQ ID NO: 36969 - RNA, 27 nt, synthetic construct
  misc_feature 1..27: note = ATP-dependent RNA helicase DDX1 (707-715)
  source 1..27: mol_type = other RNA
atcctggcccccaccgtgcaggagctc

SEQ ID NO: 36970 - RNA, 30 nt, synthetic construct
  misc_feature 1..30: note = Prohibitin (164-173)
  source 1..30: mol_type = other RNA
atcctggacgacgtgagcctcacccacctg

SEQ ID NO: 36971 - RNA, 27 nt, synthetic construct
  misc_feature 1..27: note = Dihydroxyacetone phosphate acyltransferase (106-114)
  source 1..27: mol_type = other RNA
atcctggacgagatgagccacaagctc

SEQ ID NO: 36972 - RNA, 27 nt, synthetic construct
  misc_feature 1..27: note = ATP-binding cassette sub-family F member 3 (633-641)
  source 1..27: mol_type = other RNA
atcctggacgagcccaccaaccacctc

SEQ ID NO: 36973 - RNA, 27 nt, synthetic construct
  misc_feature 1..27: note = ATP-binding cassette sub-family F member 1 (765-773)
  source 1..27: mol_type = other RNA
atcctggacgagcccaccaacaacctc

SEQ ID NO: 36974 - RNA, 27 nt, synthetic construct
  misc_feature 1..27: note = U6 snRNA-associated Sm-like protein LSm8 (16-24)
  source 1..27: mol_type = other RNA
atcctggacgagagccacgagcgcgtg

SEQ ID NO: 36975 - RNA, 27 nt, synthetic construct
  misc_feature 1..27: note = Coiled-coil domain-containing protein 66 (307-315)
  source 1..27: mol_type = other RNA
atcctggaccagagccgcgagaccgtg

SEQ ID NO: 36976 - RNA, 27 nt, synthetic construct
  misc_feature 1..27: note = Heterogeneous nuclear ribonucleoprotein U (458-466)
  source 1..27: mol_type = other RNA
atcctggaccagaccaacgtgagcgcc

SEQ ID NO: 36977 - RNA, 30 nt, synthetic construct
  misc_feature 1..30: note = Actin-like protein 6A (127-136)
  source 1..30: mol_type = other RNA
atcctggacagcggcgccacccacaccacg

SEQ ID NO: 36978 - RNA, 27 nt, synthetic construct
  misc_feature 1..27: note = Putative pre-mRNA-splicing factor ATP-dependent RNA helicase DHX16 (531-539)
  source 1..27: mol_type = other RNA
atcctgttcggcctcatcaaggacgtg

SEQ ID NO: 36979 - RNA, 27 nt, synthetic construct
  misc_feature 1..27: note = Pecanex-like protein 1 (1442-1450)
  source 1..27: mol_type = other RNA
atcctgttcaacaagctctgggagctg

SEQ ID NO: 36980 - RNA, 33 nt, synthetic construct
  misc_feature 1..33: note = Copper chaperone for superoxide dismutase (92-102)
  source 1..33: mol_type = other RNA
atcctgggcgggcccggcaccgtgcagggggtc

SEQ ID NO: 36981 - RNA, 27 nt, synthetic construct
  misc_feature 1..27: note = Major facilitator superfamily domain-containing protein 8 (444-452)
  source 1..27: mol_type = other RNA
atcctgggccccaagccgcagggggtg

SEQ ID NO: 36982 - RNA, 33 nt, synthetic construct
  misc_feature 1..33: note = Matrin-3 (67-77)
  source 1..33: mol_type = other RNA
atcctgggccccccgccccccagcttccacctc

SEQ ID NO: 36983 - RNA, 27 nt, synthetic construct
  misc_feature 1..27: note = Integrator complex subunit 7 (849-857)
  source 1..27: mol_type = other RNA
atcctgggcacccacaacatcaccgtg

SEQ ID NO: 36984 - RNA, 27 nt, synthetic construct
  misc_feature 1..27: note = Cytoplasmic dynein 1 light intermediate chain 2 (245-253)
  source 1..27: mol_type = other RNA
atcctgcacgagaacttcaccaccgtg

SEQ ID NO: 36985 - RNA, 33 nt, synthetic construct
  misc_feature 1..33: note = Adenosylhomocysteinase (339-349)
  source 1..33: mol_type = other RNA
atcctgctcgccgagggccgcctggtgaacctg

SEQ ID NO: 36986 - RNA, 27 nt, synthetic construct
  misc_feature 1..27: note = Protein angel homolog 1 (409-417)
  source 1..27: mol_type = other RNA
atcctgctcgccgaggtggacaaggtc

SEQ ID NO: 36987 - RNA, 33 nt, synthetic construct
  misc_feature 1..33: note = Arginine-tRNA ligase, cytoplasmic (564-574)
  source 1..33: mol_type = other RNA
atcctgctcgaccacgagaaggagtggaagctg

SEQ ID NO: 36988 - RNA, 27 nt, synthetic construct
  misc_feature 1..27: note = MAP kinase-activating death domain protein (316-324)
  source 1..27: mol_type = other RNA
atcctgctcgagcacaaggtggtcctg

SEQ ID NO: 36989 - RNA, 27 nt, synthetic construct
  misc_feature 1..27: note = Eukaryotic translation initiation factor 3 subunit K (69-77)
  source 1..27: mol_type = other RNA
atcctgctcaaggccctgaccaacctg

SEQ ID NO: 36990 - RNA, 33 nt, synthetic construct
  misc_feature 1..33: note = Serine/threonine-protein kinase TAO1 (157-167)
  source 1..33: mol_type = other RNA
atcctgctcaccgagcccggccaggtgaagctg

SEQ ID NO: 36991 - RNA, 27 nt, synthetic construct
  misc_feature 1..27: note = Ubiquitin carboxyl-terminal hydrolase 34 (46-54)
  source 1..27: mol_type = other RNA
atcctgatggacgagcgcaccttcctc

SEQ ID NO: 36992 - RNA, 30 nt, synthetic construct
  misc_feature 1..30: note = Protein BIVM-ERCC5 (1331-1340)
  source 1..30: mol_type = other RNA
atcctgaacgagttccccggccacgggctc

SEQ ID NO: 36993 - RNA, 30 nt, synthetic construct
  misc_feature 1..30: note = Unconventional myosin-Ic (579-588)
  source 1..30: mol_type = other RNA
atcctgcagagcaaggagcccgcctacgtg

SEQ ID NO: 36994 - RNA, 27 nt, synthetic construct
  misc_feature 1..27: note = Cohesin subunit SA-2 (1002-1010)
  source 1..27: mol_type = other RNA
atcctgagcgagttctccagcaagctc

SEQ ID NO: 36995 - RNA, 27 nt, synthetic construct
  misc_feature 1..27: note = TELO2-interacting protein 1 homolog (373-381)
  source 1..27: mol_type = other RNA
atcctgagcgagtccctccacagcctg

SEQ ID NO: 36996 - RNA, 27 nt, synthetic construct
  misc_feature 1..27: note = Nuclear pore complex protein Nup153 (39-47)
  source 1..27: mol_type = other RNA
atcctgagccgcgtgaccgagtccgtc

SEQ ID NO: 36997 - RNA, 27 nt, synthetic construct
  misc_feature 1..27: note = XAGE1D protein (105-113)
  source 1..27: mol_type = other RNA
atcctgaccagcatccagtccctcctg

SEQ ID NO: 36998 - RNA, 27 nt, synthetic construct
  misc_feature 1..27: note = Importin-11 (663-671)
  source 1..27: mol_type = other RNA
atcctgaccaccctcatccacctggtg

SEQ ID NO: 36999 - RNA, 27 nt, synthetic construct
  misc_feature 1..27: note = A-kinase anchor protein 10, mitochondrial (437-445)
  source 1..27: mol_type = other RNA
atcctgtacgacaagtacttcagcctc

SEQ ID NO: 37000 - RNA, 27 nt, synthetic construct
  misc_feature 1..27: note = Signal transducer and activator of transcription 3 (96-104)
  source 1..27: mol_type = other RNA
atcatggacgccaccaacatcctggtg

SEQ ID NO: 37001 - RNA, 27 nt, synthetic construct
  misc_feature 1..27: note = Long-chain-fatty-acid-CoA ligase 3 (386-394)
  source 1..27: mol_type = other RNA
atcatggaccgcatctacaagaacgtg

SEQ ID NO: 37002 - RNA, 33 nt, synthetic construct
  misc_feature 1..33: note = Syntaxin-binding protein 6 (160-170)
  source 1..33: mol_type = other RNA
atcatgggcgggaacagcatcctgcactccgcc

SEQ ID NO: 37003 - RNA, 30 nt, synthetic construct
  misc_feature 1..30: note = Small nuclear ribonucleoprotein E (64-73)
  source 1..30: mol_type = other RNA
atcatgctgaagggcgacaacatcaccctc

SEQ ID NO: 37004 - RNA, 27 nt, synthetic construct
  misc_feature 1..27: note = Talin-1 (100-108)
  source 1..27: mol_type = other RNA
atcatggtggacgacagcaagaccgtc

SEQ ID NO: 37005 - RNA, 27 nt, synthetic construct
  misc_feature 1..27: note = Zinc finger MIZ domain-containing protein 1 (736-744)
  source 1..27: mol_type = other RNA
atccagcacagcgagttcgaggaggtg

SEQ ID NO: 37006 - RNA, 27 nt, synthetic construct
  misc_feature 1..27: note = L-lactate dehydrogenase A chain (329-337)
  source 1..27: mol_type = other RNA
atcagcgacctggtgaaggtcaccctc

SEQ ID NO: 37007 - RNA, 27 nt, synthetic construct
  misc_feature 1..27: note = Protein cramped-like (737-745)
  source 1..27: mol_type = other RNA
atcagcaccgaggtgaaccccaagctg

SEQ ID NO: 37008 - RNA, 27 nt, synthetic construct
  misc_feature 1..27: note = Transmembrane protein 261 (13-21)
  source 1..27: mol_type = other RNA
atcaccgcccccccgggcaccgccgcg

SEQ ID NO: 37009 - RNA, 30 nt, synthetic construct
  misc_feature 1..30: note = Apoptosis-resistant E3 ubiquitin protein ligase 1 (140-149)
  source 1..30: mol_type = other RNA
atcaccgtgaagctgggcgggctcaacgtc

SEQ ID NO: 37010 - RNA, 27 nt, synthetic construct
  misc_feature 1..27: note = Alpha-adducin (206-214)
  source 1..27: mol_type = other RNA
atcgtggaccgcggcagcaccaacctg

SEQ ID NO: 37011 - RNA, 24 nt, synthetic construct
  misc_feature 1..24: note = NADH dehydrogenase (ubiquinone) 1 beta subcomplex subunit 10 (34-41)
  source 1..24: mol_type = other RNA
atcgtggaccgccccgtcaccctg

SEQ ID NO: 37012 - RNA, 27 nt, synthetic construct
  misc_feature 1..27: note = 1-phosphatidylinositol 3-phosphate 5-kinase (742-750)
  source 1..27: mol_type = other RNA
atcgtggacgtccgccccaccctggtg

SEQ ID NO: 37013 - RNA, 27 nt, synthetic construct
  misc_feature 1..27: note = Cytoplasmic dynein 1 heavy chain 1 (132-140)
  source 1..27: mol_type = other RNA
atcgtgatgcaggaggtcgagaccgtg

SEQ ID NO: 37014 - RNA, 27 nt, synthetic construct
  misc_feature 1..27: note = Eukaryotic translation initiation factor 3 subunit B (187-195)
  source 1..27: mol_type = other RNA
atcgtggtcgacaacgtgccccaggtg

SEQ ID NO: 37015 - RNA, 27 nt, synthetic construct
  misc_feature 1..27: note = Trifunctional purine biosynthetic protein adenosine-3 (125-133)
  source 1..27: mol_type = other RNA
aaggccttcaccaagcccgaggaggcc

SEQ ID NO: 37016 - RNA, 27 nt, synthetic construct
  misc_feature 1..27: note = T-complex protein 1 subunit zeta (84-92)
  source 1..27: mol_type = other RNA
aaggccctgcagttcctcgaggaggtg

SEQ ID NO: 37017 - RNA, 27 nt, synthetic construct
  misc_feature 1..27: note = Endonuclease G, mitochondrial (153-161)
  source 1..27: mol_type = other RNA
aaggccatggacgacaccttctacctg

SEQ ID NO: 37018 - RNA, 27 nt, synthetic construct
  misc_feature 1..27: note = Histone-lysine N-methyltransferase NSD2 (573-581)
  source 1..27: mol_type = other RNA
aaggccatggaggccgcgagctccctg

SEQ ID NO: 37019 - RNA, 27 nt, synthetic construct
  misc_feature 1..27: note = Tubulin alpha-1C chain (350-358)
  source 1..27: mol_type = other RNA
aaggcctaccacgagcagctgaccgtg

SEQ ID NO: 37020 - RNA, 30 nt, synthetic construct
  misc_feature 1..30: note = Melanoma-associated antigen 1 (160-169)
  source 1..30: mol_type = other RNA
aaggaggccgaccccaccggccacagctac

SEQ ID NO: 37021 - RNA, 30 nt, synthetic construct
  misc_feature 1..30: note = Melanoma-associated antigen D2 (337-346)
  source 1..30: mol_type = other RNA
aaggagatcgacaagaacgaccacctgtac

SEQ ID NO: 37022 - RNA, 27 nt, synthetic construct
  misc_feature 1..27: note = Lysine-specific demethylase 5A (1136-1144)
  source 1..27: mol_type = other RNA
aaggagatcgaggccatgcacagcctg

SEQ ID NO: 37023 - RNA, 27 nt, synthetic construct
  misc_feature 1..27: note = Something about silencing protein 10 (380-388)
  source 1..27: mol_type = other RNA
aaggagatcgaggaccgccagaagctg

SEQ ID NO: 37024 - RNA, 30 nt, synthetic construct
  misc_feature 1..30: note = Plectin (705-714)
  source 1..30: mol_type = other RNA
aaggagaacgccgcctacttccagttcttc

SEQ ID NO: 37025 - RNA, 27 nt, synthetic construct
  misc_feature 1..27: note = ATP-binding cassette sub-family F member 3 (472-480)
  source 1..27: mol_type = other RNA
aaggagagcgaggtggtcatgaagttc

SEQ ID NO: 37026 - RNA, 27 nt, synthetic construct
  misc_feature 1..27: note = Kinetochore protein Nuf2 (447-455)
  source 1..27: mol_type = other RNA
aagatcgacgagaagaccgccgagctg

SEQ ID NO: 37027 - RNA, 33 nt, synthetic construct
  misc_feature 1..33: note = Interferon-induced, double-stranded RNA-activated protein kinase (388-398)
  source 1..33: mol_type = other RNA
aagatcggcgacttcgggctggtgaccagcctc

SEQ ID NO: 37028 - RNA, 27 nt, synthetic construct
  misc_feature 1..27: note = Cyclin-dependent kinase 1 (9-17)
  source 1..27: mol_type = other RNA
aagatcggcgaggggacctacggcgtg

SEQ ID NO: 37029 - RNA, 27 nt, synthetic construct
  misc_feature 1..27: note = DNA mismatch repair protein Msh6 (740-748)
  source 1..27: mol_type = other RNA
aagatcatcggcatcatggaggaggtg

SEQ ID NO: 37030 - RNA, 33 nt, synthetic construct
  misc_feature 1..33: note = Arginine-tRNA ligase, cytoplasmic (587-597)
  source 1..33: mol_type = other RNA
aagatcctggacgacctcttcctgcacaccctg

SEQ ID NO: 37031 - RNA, 30 nt, synthetic construct
  misc_feature 1..30: note = Vacuolar protein sorting-associated protein 41 homolog (318-327)
  source 1..30: mol_type = other RNA
aagatcctggacatcggcctcgcctacatc

SEQ ID NO: 37032 - RNA, 30 nt, synthetic construct
  misc_feature 1..30: note = Signal transducer and activator of transcription 3 (658-667)
  source 1..30: mol_type = other RNA
aagatcatggacgccaccaacatcctggtg

SEQ ID NO: 37033 - RNA, 27 nt, synthetic construct
  misc_feature 1..27: note = UPF0568 protein C14orf166 (218-226)
  source 1..27: mol_type = other RNA
aagatcaacgaggccatcgtggccgtc

SEQ ID NO: 37034 - RNA, 27 nt, synthetic construct
  misc_feature 1..27: note = Cell division cycle protein 27 homolog (380-388)
  source 1..27: mol_type = other RNA
aagatcagcaccatcaccccccagatc

SEQ ID NO: 37035 - RNA, 27 nt, synthetic construct
  misc_feature 1..27: note = Calpain-7 (56-64)
  source 1..27: mol_type = other RNA
aagatcaccgagtacctggagcgcgtg

SEQ ID NO: 37036 - RNA, 33 nt, synthetic construct
  misc_feature 1..33: note = Pre-mRNA-processing factor 19 (375-385)
  source 1..33: mol_type = other RNA
aagatctgggacctgaaggagcgcaccaacgtg

SEQ ID NO: 37037 - RNA, 33 nt, synthetic construct
  misc_feature 1..33: note = Probable ATP-dependent RNA helicase DDX60 (16-26)
  source 1..33: mol_type = other RNA
aagctggccgacatgaaccaggagtaccagctc

SEQ ID NO: 37038 - RNA, 27 nt, synthetic construct
  misc_feature 1..27: note = WD repeat-containing protein 11 (1062-1070)
  source 1..27: mol_type = other RNA
aagctggccgagggcgtgcagctcctg

SEQ ID NO: 37039 - RNA, 27 nt, synthetic construct
  misc_feature 1..27: note = KAT8 regulatory NSL complex subunit 1 (21-29)
  source 1..27: mol_type = other RNA
aagctggcccccccgagctccaccctc

SEQ ID NO: 37040 - RNA, 27 nt, synthetic construct
  misc_feature 1..27: note = Dolichol-phosphate mannosyltransferase subunit 3 (24-32)
  source 1..27: mol_type = other RNA
aagctggcccagtggctctggggcctg

SEQ ID NO: 37041 - RNA, 27 nt, synthetic construct
  misc_feature 1..27: note = DnaJ homolog subfamily C member 7 (322-330)
  source 1..27: mol_type = other RNA
aagctggacgacacctacatcaaggcc

SEQ ID NO: 37042 - RNA, 27 nt, synthetic construct
  misc_feature 1..27: note = Nuclear transcription factor Y subunit gamma (53-61)
  source 1..27: mol_type = other RNA
aagctggacgaggacgtgaagatgatc

SEQ ID NO: 37043 - RNA, 27 nt, synthetic construct
  misc_feature 1..27: note = Coronin-1C (493-501)
  source 1..27: mol_type = other RNA
aagctggacgagatcctcaaggagatc

SEQ ID NO: 37044 - RNA, 27 nt, synthetic construct
  misc_feature 1..27: note = Protein LAP2 (759-767)
  source 1..27: mol_type = other RNA
aagctggaccacatcaacatgaacctc

SEQ ID NO: 37045 - RNA, 27 nt, synthetic construct
  misc_feature 1..27: note = Protein NPAT (88-96)
  source 1..27: mol_type = other RNA
aagctggaccacaccctcagccagatc

SEQ ID NO: 37046 - RNA, 27 nt, synthetic construct
  misc_feature 1..27: note = Rab3 GTPase-activating protein catalytic subunit (784-792)
  source 1..27: mol_type = other RNA
aagctggaggagatcatccaccagatc

SEQ ID NO: 37047 - RNA, 30 nt, synthetic construct
  misc_feature 1..30: note = Vacuolar protein sorting-associated protein 35 (323-332)
  source 1..30: mol_type = other RNA
aagctgttcgacatcttcagccagcaggtg

SEQ ID NO: 37048 - RNA, 27 nt, synthetic construct
  misc_feature 1..27: note = Transmembrane protein 223 (189-197)
  source 1..27: mol_type = other RNA
aagctgttcgacaacaccgtgggcgcc

SEQ ID NO: 37049 - RNA, 27 nt, synthetic construct
  misc_feature 1..27: note = tRNA wybutosine-synthesizing protein 2 homolog (32-40)
  source 1..27: mol_type = other RNA
aagctgttcgacacccagcaccgcgtg

SEQ ID NO: 37050 - RNA, 33 nt, synthetic construct
  misc_feature 1..33: note = Testin (65-75)
  source 1..33: mol_type = other RNA
aagctgttcgaggacaccaagtacaccacgctc

SEQ ID NO: 37051 - RNA, 27 nt, synthetic construct
  misc_feature 1..27: note = T-complex protein 11-like protein 2 (131-139)
  source 1..27: mol_type = other RNA
aagctgttcgaggagatccgcgagatc

SEQ ID NO: 37052 - RNA, 27 nt, synthetic construct
  misc_feature 1..27: note = Exportin-1 (568-576)
  source 1..27: mol_type = other RNA
aagctgttcgagttcatgcacgagacc

SEQ ID NO: 37053 - RNA, 27 nt, synthetic construct
  misc_feature 1..27: note = TATA box-binding protein-associated factor RNA polymerase I subunit B (312-320)
  source 1..27: mol_type = other RNA
aagctgttcgagaagaagtacagcgtg

SEQ ID NO: 37054 - RNA, 33 nt, synthetic construct
  misc_feature 1..33: note = Retinoic acid-induced protein 1 (1841-1851)
  source 1..33: mol_type = other RNA
aagctgttcggcctccaggaggccatgaaggtg

SEQ ID NO: 37055 - RNA, 27 nt, synthetic construct
  misc_feature 1..27: note = Rab-like protein 2A (105-113)
  source 1..27: mol_type = other RNA
aagctgttcaacgacgccatccgcctc

SEQ ID NO: 37056 - RNA, 27 nt, synthetic construct
  misc_feature 1..27: note = WD repeat-containing protein 3 (837-845)
  source 1..27: mol_type = other RNA
aagctgttcaacgagttcatccagctc

SEQ ID NO: 37057 - RNA, 33 nt, synthetic construct
  misc_feature 1..33: note = Asparagine synthetase (glutamine-hydrolyzing) (138-148)
  source 1..33: mol_type = other RNA
aagctgttccccggcttcgagatcgagaccgtg

SEQ ID NO: 37058 - RNA, 27 nt, synthetic construct
  misc_feature 1..27: note = Splicing factor 3B subunit 3 (769-777)
  source 1..27: mol_type = other RNA
aagctgggcgccgtgttcaaccaggtc

SEQ ID NO: 37059 - RNA, 27 nt, synthetic construct
  misc_feature 1..27: note = Membrane-associated tyrosine- and threonine-specific cdc2-inhibitory kinase (179-187)
  source 1..27: mol_type = other RNA
aagctgggcgacttcgggctcctggtg

SEQ ID NO: 37060 - RNA, 24 nt, synthetic construct
  misc_feature 1..24: note = Pre-mRNA-splicing factor ATP-dependent RNA helicase PRP16 (474-481)
  source 1..24: mol_type = other RNA
aagctgggcgacatcatgggggtg

SEQ ID NO: 37061 - RNA, 27 nt, synthetic construct
  misc_feature 1..27: note = Inactive ubiquitin carboxyl-terminal hydrolase 54 (272-280)
  source 1..27: mol_type = other RNA
aagctgggcgacctcttcttccgcgtg

SEQ ID NO: 37062 - RNA, 27 nt, synthetic construct
  misc_feature 1..27: note = Probable ATP-dependent RNA helicase DHX37 (678-686)
  source 1..27: mol_type = other RNA
aagctgggcgacctcatggtgctgctg

SEQ ID NO: 37063 - RNA, 24 nt, synthetic construct
  misc_feature 1..24: note = Ras GTPase-activating-like protein IQGAP1 (161-168)
  source 1..24: mol_type = other RNA
aagctgggcctcgccccccagatc

SEQ ID NO: 37064 - RNA, 27 nt, synthetic construct
  misc_feature 1..27: note = Neutral amino acid transporter B(0) (45-53)
  source 1..27: mol_type = other RNA
aagctgggccccgagggggagctcctg

SEQ ID NO: 37065 - RNA, 30 nt, synthetic construct
  misc_feature 1..30: note = Nicotinamide phosphoribosyltransferase (189-198)
  source 1..30: mol_type = other RNA
aagctgcacgacttcggctaccgcggggtg

SEQ ID NO: 37066 - RNA, 27 nt, synthetic construct
  misc_feature 1..27: note = AP-2 complex subunit beta (147-155)
  source 1..27: mol_type = other RNA
aagctgcacgacatcaacgcccagatg

SEQ ID NO: 37067 - RNA, 27 nt, synthetic construct
  misc_feature 1..27: note = Inner nuclear membrane protein Man1 (532-540)
  source 1..27: mol_type = other RNA
aagctgcacgaccgcctcgcccagctg

SEQ ID NO: 37068 - RNA, 27 nt, synthetic construct
  misc_feature 1..27: note = Ribosomal protein S6 kinase alpha-4 (94-102)
  source 1..27: mol_type = other RNA
aagctgcacctcatcctggactacgtg

SEQ ID NO: 37069 - RNA, 27 nt, synthetic construct
  misc_feature 1..27: note = E3 ubiquitin-protein ligase HECTD1 (525-533)
  source 1..27: mol_type = other RNA
aagctgatcgccgtgctcgagagcatc

SEQ ID NO: 37070 - RNA, 27 nt, synthetic construct
  misc_feature 1..27: note = Serine/threonine-protein phosphatase 6 regulatory subunit 3 (43-51)
  source 1..27: mol_type = other RNA
aagctgatcgagttcctcctgaaggcc

SEQ ID NO: 37071 - RNA, 27 nt, synthetic construct
  misc_feature 1..27: note = ATP-dependent RNA helicase DDX18 (507-515)
  source 1..27: mol_type = other RNA
aagctgatcgagaagaactacttcctc

SEQ ID NO: 37072 - RNA, 27 nt, synthetic construct
  misc_feature 1..27: note = Early endosome antigen 1 (1075-1083)
  source 1..27: mol_type = other RNA
aagctgatccaggagctcaagaccgcc

SEQ ID NO: 37073 - RNA, 27 nt, synthetic construct
  misc_feature 1..27: note = Centrosomal protein of 57 kDa (383-391)
  source 1..27: mol_type = other RNA
aagctgatccaggagagccccaccgtg

SEQ ID NO: 37074 - RNA, 27 nt, synthetic construct
  misc_feature 1..27: note = Transmembrane protein 209 (50-58)
  source 1..27: mol_type = other RNA
aagctgatcagctcctactacaacgtg

SEQ ID NO: 37075 - RNA, 27 nt, synthetic construct
  misc_feature 1..27: note = Kelch-like protein 7 (25-33)
  source 1..27: mol_type = other RNA
aagctgctcgccggcttcatgggggtg

SEQ ID NO: 37076 - RNA, 30 nt, synthetic construct
  misc_feature 1..30: note = Vacuolar protein sorting-associated protein 35 (14-23)
  source 1..30: mol_type = other RNA
aagctgctcgacgaggccatccaggccgtg

SEQ ID NO: 37077 - RNA, 33 nt, synthetic construct
  misc_feature 1..33: note = 40S ribosomal protein S17 (107-117)
  source 1..33: mol_type = other RNA
aagctgctcgacttcggcagcctgtccaacctg

SEQ ID NO: 37078 - RNA, 27 nt, synthetic construct
  misc_feature 1..27: note = Ligand of Numb protein X 2 (105-113)
  source 1..27: mol_type = other RNA
aagctgctcgacaagctgctggtgctc

SEQ ID NO: 37079 - RNA, 33 nt, synthetic construct
  misc_feature 1..33: note = DDB1- and CUL4-associated factor 16 (79-89)
  source 1..33: mol_type = other RNA
aagctgctcgaccccagcaccccggtgcacatc

SEQ ID NO: 37080 - RNA, 33 nt, synthetic construct
  misc_feature 1..33: note = HCG2044777 (36-46)
  source 1..33: mol_type = other RNA
aagctgctcgacaccatggtggacaccttcctg

SEQ ID NO: 37081 - RNA, 33 nt, synthetic construct
  misc_feature 1..33: note = E3 ubiquitin-protein ligase DTX3L (386-396)
  source 1..33: mol_type = other RNA
aagctgctcgagaccgagctgctgcaggagatc

SEQ ID NO: 37082 - RNA, 27 nt, synthetic construct
  misc_feature 1..27: note = GRIP and coiled-coil domain-containing protein 2 (1083-1091)
  source 1..27: mol_type = other RNA
aagctgctcgaggtgcagatcctggag

SEQ ID NO: 37083 - RNA, 30 nt, synthetic construct
  misc_feature 1..30: note = GRIP and coiled-coil domain-containing protein 2 (1083-1092)
  source 1..30: mol_type = other RNA
aagctgctcgaggtgcagatcctggaggtc

SEQ ID NO: 37084 - RNA, 33 nt, synthetic construct
  misc_feature 1..33: note = V-type proton ATPase subunit H (396-406)
  source 1..33: mol_type = other RNA
aagctgctcgaggtgagcgacgacccccaggtc

SEQ ID NO: 37085 - RNA, 27 nt, synthetic construct
  misc_feature 1..27: note = TELO2-interacting protein 2 (122-130)
  source 1..27: mol_type = other RNA
aagctgctcggcaaggtggagaccgcc

SEQ ID NO: 37086 - RNA, 30 nt, synthetic construct
  misc_feature 1..30: note = TELO2-interacting protein 1 homolog (409-418)
  source 1..30: mol_type = other RNA
aagctgctcggccccaagatcaacttcgtg

SEQ ID NO: 37087 - RNA, 27 nt, synthetic construct
  misc_feature 1..27: note = Bromodomain-containing protein 9 (476-484)
  source 1..27: mol_type = other RNA
aagctgctccaggacctgcacgaggcc

SEQ ID NO: 37088 - RNA, 27 nt, synthetic construct
  misc_feature 1..27: note = Zinc finger protein 644 (475-483)
  source 1..27: mol_type = other RNA
aagctgatggaggagatccgcgagctc

SEQ ID NO: 37089 - RNA, 27 nt, synthetic construct
  misc_feature 1..27: note = ATP-binding cassette sub-family F member 2 (188-196)
  source 1..27: mol_type = other RNA
aagctgatggagctctacgagcgcctg

SEQ ID NO: 37090 - RNA, 27 nt, synthetic construct
  misc_feature 1..27: note = Dual specificity protein phosphatase 10 (474-482)
  source 1..27: mol_type = other RNA
aagctgatgggcgtggagaccgtcgtg

SEQ ID NO: 37091 - RNA, 27 nt, synthetic construct
  misc_feature 1..27: note = Tax1-binding protein 1 (296-304)
  source 1..27: mol_type = other RNA
aagctgatgagcgaggtgcagaccctc

SEQ ID NO: 37092 - RNA, 27 nt, synthetic construct
  misc_feature 1..27: note = S-adenosylmethionine synthase isoform type-2 (159-167)
  source 1..27: mol_type = other RNA
aagctgaacgccaagctcgccgagctg

SEQ ID NO: 37093 - RNA, 27 nt, synthetic construct
  misc_feature 1..27: note = Coatomer subunit alpha (1002-1010)
  source 1..27: mol_type = other RNA
aagctgaacgacctcatccagcgcctg

SEQ ID NO: 37094 - RNA, 27 nt, synthetic construct
  misc_feature 1..27: note = THAP domain-containing protein 4 (389-397)
  source 1..27: mol_type = other RNA
aagctgcaggagaagctcgacgagctg

SEQ ID NO: 37095 - RNA, 27 nt, synthetic construct
  misc_feature 1..27: note = E3 ubiquitin-protein ligase BRE1A (194-202)
  source 1..27: mol_type = other RNA
aagctgcaggagaaggtggagctcctg

SEQ ID NO: 37096 - RNA, 27 nt, synthetic construct
  misc_feature 1..27: note = DNA topoisomerase I, mitochondrial (529-537)
  source 1..27: mol_type = other RNA
aagctgcaggagcagctcgcccagctg

SEQ ID NO: 37097 - RNA, 33 nt, synthetic construct
  misc_feature 1..33: note = Ectopic P granules protein 5 homolog (535-545)
  source 1..33: mol_type = other RNA
aagctgcagcccaccccgggcatccagaaggtg

SEQ ID NO: 37098 - RNA, 27 nt, synthetic construct
  misc_feature 1..27: note = Unconventional myosin-Id (406-414)
  source 1..27: mol_type = other RNA
aagctgcagcagctcttcatccagctg

SEQ ID NO: 37099 - RNA, 27 nt, synthetic construct
  misc_feature 1..27: note = NFATC2-interacting protein (17-25)
  source 1..27: mol_type = other RNA
aagctgagcgaggtgaacaagcgcctc

SEQ ID NO: 37100 - RNA, 27 nt, synthetic construct
  misc_feature 1..27: note = ATPase family AAA domain-containing protein 1 (68-76)
  source 1..27: mol_type = other RNA
aagctgagcgagtacgagatgtccatc

SEQ ID NO: 37101 - RNA, 27 nt, synthetic construct
  misc_feature 1..27: note = Serpin H1 (262-270)
  source 1..27: mol_type = other RNA
aagctgagctccctcatcatcctgatg

SEQ ID NO: 37102 - RNA, 27 nt, synthetic construct
  misc_feature 1..27: note = Coiled-coil domain-containing protein 93 (26-34)
  source 1..27: mol_type = other RNA
aagctgaccgagatcctcgagctgctg

SEQ ID NO: 37103 - RNA, 27 nt, synthetic construct
  misc_feature 1..27: note = Protein Hook homolog 1 (556-564)
  source 1..27: mol_type = other RNA
aagctgaccgaggtgcacgaggagctc

SEQ ID NO: 37104 - RNA, 27 nt, synthetic construct
  misc_feature 1..27: note = Polypeptide N-acetylgalactosaminyltransferase 18 (204-212)
  source 1..27: mol_type = other RNA
aagctgaccgagtacgtggacaaggtc

SEQ ID NO: 37105 - RNA, 27 nt, synthetic construct
  misc_feature 1..27: note = Kinesin-like protein KIF1C (839-847)
  source 1..27: mol_type = other RNA
aagctgaccggcatcctccaggaggtg

SEQ ID NO: 37106 - RNA, 27 nt, synthetic construct
  misc_feature 1..27: note = Actin-related protein 2/3 complex subunit 4 (130-138)
  source 1..27: mol_type = other RNA
aagctggtggacttcgtcatccacttc

SEQ ID NO: 37107 - RNA, 33 nt, synthetic construct
  misc_feature 1..33: note = Caprin-1 (191-201)
  source 1..33: mol_type = other RNA
aagctggtggaccccgagcgcgacatgagcctc

SEQ ID NO: 37108 - RNA, 27 nt, synthetic construct
  misc_feature 1..27: note = Lysine-tRNA ligase (474-482)
  source 1..27: mol_type = other RNA
aagctggtgggcgagttcctcgaggtc

SEQ ID NO: 37109 - RNA, 27 nt, synthetic construct
  misc_feature 1..27: note = Baculoviral IAP repeat-containing protein 6 (860-868)
  source 1..27: mol_type = other RNA
aagctggtgaacatcctcgtccagctg

SEQ ID NO: 37110 - RNA, 27 nt, synthetic construct
  misc_feature 1..27: note = Eukaryotic peptide chain release factor GTP-binding subunit ERF3A (239-247)
  source 1..27: mol_type = other RNA
aagctggtgcccttcctcaagaaggtc

SEQ ID NO: 37111 - RNA, 27 nt, synthetic construct
  misc_feature 1..27: note = Trafficking protein particle complex subunit 11 (245-253)
  source 1..27: mol_type = other RNA
aagctgtgggccgaccgcatcagcctc

SEQ ID NO: 37112 - RNA, 27 nt, synthetic construct
  misc_feature 1..27: note = Pecanex-like protein 1 (1446-1454)
  source 1..27: mol_type = other RNA
aagctgtgggagctcctgtacaagctg

SEQ ID NO: 37113 - RNA, 27 nt, synthetic construct
  misc_feature 1..27: note = Intraflagellar transport protein 27 homolog (77-85)
  source 1..27: mol_type = other RNA
aagctgtgggagagccccaacgtgctc

SEQ ID NO: 37114 - RNA, 33 nt, synthetic construct
  misc_feature 1..33: note = Transducin-like enhancer protein 4 (308-318)
  source 1..33: mol_type = other RNA
aagctgtggaccggcgggctcgacaacaccgtg

SEQ ID NO: 37115 - RNA, 30 nt, synthetic construct
  misc_feature 1..30: note = Cytochrome P450 4V2 (91-100)
  source 1..30: mol_type = other RNA
aagctgtgggtgggccccgtcccgatggtg

SEQ ID NO: 37116 - RNA, 27 nt, synthetic construct
  misc_feature 1..27: note = Intraflagellar transport protein 172 homolog (352-360)
  source 1..27: mol_type = other RNA
aagctgtacgacgacatgatccgcctc

SEQ ID NO: 37117 - RNA, 27 nt, synthetic construct
  misc_feature 1..27: note = General transcription factor II-I repeat domain-containing protein 2B (841-849)
  source 1..27: mol_type = other RNA
aagctgtacgagagcgagctcaccctg

SEQ ID NO: 37118 - RNA, 27 nt, synthetic construct
  misc_feature 1..27: note = DNA-directed RNA polymerase I subunit RPA1 (386-394)
  source 1..27: mol_type = other RNA
aagctgtacaacatctggatccgcctc

SEQ ID NO: 37119 - RNA, 33 nt, synthetic construct
  misc_feature 1..33: note = Regulator of nonsense transcripts 1 (816-826)
  source 1..33: mol_type = other RNA
aagctgtaccaggaggtggagatcgccagcgtc

SEQ ID NO: 37120 - RNA, 27 nt, synthetic construct
  misc_feature 1..27: note = Glutamine-tRNA ligase (401-409)
  source 1..27: mol_type = other RNA
aagatggaccccgtggcctaccgcgtc

SEQ ID NO: 37121 - RNA, 27 nt, synthetic construct
  misc_feature 1..27: note = Adiponectin receptor protein 1 (79-87)
  source 1..27: mol_type = other RNA
aagatggaggagttcgtgtacaaggtc

SEQ ID NO: 37122 - RNA, 27 nt, synthetic construct
  misc_feature 1..27: note = NADH dehydrogenase (ubiquinone) iron-sulfur protein 2, mitochondrial (1-9)
  source 1..27: mol_type = other RNA
aagatgttcgagttctacgagcgcgtg

SEQ ID NO: 37123 - RNA, 30 nt, synthetic construct
  misc_feature 1..30: note = cAMP-dependent protein kinase type II-alpha regulatory subunit (222-231)
  source 1..30: mol_type = other RNA
aagatgttcgagagcttcatcgagtccgtg

SEQ ID NO: 37124 - RNA, 30 nt, synthetic construct
  misc_feature 1..30: note = 3-hydroxy-3-methylglutaryl-coenzyme A reductase (314-323)
  source 1..30: mol_type = other RNA
aagatgatcagcatggacatcgagcaggtg

SEQ ID NO: 37125 - RNA, 33 nt, synthetic construct
  misc_feature 1..33: note = Serine/threonine-protein kinase SIK2 (72-82)
  source 1..33: mol_type = other RNA
aagatgctggaccacccccacatcatcaagctc

SEQ ID NO: 37126 - RNA, 27 nt, synthetic construct
  misc_feature 1..27: note = Transmembrane protein 245 (455-463)
  source 1..27: mol_type = other RNA
aagatgctggacaagatcatcagcatc

SEQ ID NO: 37127 - RNA, 30 nt, synthetic construct
  misc_feature 1..30: note = Acetyl-CoA acetyltransferase, mitochondrial (365-374)
  source 1..30: mol_type = other RNA
aagatgctggagatcgacccccagaaggtg

SEQ ID NO: 37128 - RNA, 33 nt, synthetic construct
  misc_feature 1..33: note = HLA class II histocompatibility antigen, DQ beta 1 chain (229-239)
  source 1..33: mol_type = other RNA
aagatgctgagcggcatcgggggcttcgtgctc

SEQ ID NO: 37129 - RNA, 33 nt, synthetic construct
  misc_feature 1..33: note = HLA class II histocompatibility antigen, DRB1-11 beta chain (227-237)
  source 1..33: mol_type = other RNA
aagatgctgagcggcgtggggggcttcgtcctc

SEQ ID NO: 37130 - RNA, 27 nt, synthetic construct
  misc_feature 1..27: note = DNA replication licensing factor MCM4 (578-586)
  source 1..27: mol_type = other RNA
aagatgaacgagagcacccgctccgtg

SEQ ID NO: 37131 - RNA, 27 nt, synthetic construct
  misc_feature 1..27: note = MAP kinase-activating death domain protein (389-397)
  source 1..27: mol_type = other RNA
aagatgcccgacgacgtgtggctggtc

SEQ ID NO: 37132 - RNA, 27 nt, synthetic construct
  misc_feature 1..27: note = Mitotic spindle assembly checkpoint protein MAD1 (294-302)
  source 1..27: mol_type = other RNA
aagatgcaggagaccctggtgggcctc

SEQ ID NO: 37133 - RNA, 27 nt, synthetic construct
  misc_feature 1..27: note = Rho GTPase-activating protein 5 (514-522)
  source 1..27: mol_type = other RNA
aagatgagcgagatccacaccgtgctg

SEQ ID NO: 37134 - RNA, 27 nt, synthetic construct
  misc_feature 1..27: note = Centromere protein F (1431-1439)
  source 1..27: mol_type = other RNA
aagatgagcgagctgcagacctacgtg

SEQ ID NO: 37135 - RNA, 27 nt, synthetic construct
  misc_feature 1..27: note = Nucleolar protein 56 (288-296)
  source 1..27: mol_type = other RNA
aagatgagccaggtggccccctccctg

SEQ ID NO: 37136 - RNA, 27 nt, synthetic construct
  misc_feature 1..27: note = AP-1 complex subunit sigma-1A (29-37)
  source 1..27: mol_type = other RNA
aagatggtgcgcgagctgatgcaggtc

SEQ ID NO: 37137 - RNA, 33 nt, synthetic construct
  misc_feature 1..33: note = mRNA export factor (111-121)
  source 1..33: mol_type = other RNA
aagatgtgggacctgagctccaaccaggccatc

SEQ ID NO: 37138 - RNA, 27 nt, synthetic construct
  misc_feature 1..27: note = Ski oncogene (28-36)
  source 1..27: mol_type = other RNA
aagcccagctcctggctgcgcaccctc

SEQ ID NO: 37139 - RNA, 27 nt, synthetic construct
  misc_feature 1..27: note = Breast cancer type 2 susceptibility protein (1180-1188)
  source 1..27: mol_type = other RNA
aagcagttcgagggcaccgtggagatc

SEQ ID NO: 37140 - RNA, 27 nt, synthetic construct
  misc_feature 1..27: note = E3 UFM1-protein ligase 1 (402-410)
  source 1..27: mol_type = other RNA
aagcagatcagcaccctggagtccgtg

SEQ ID NO: 37141 - RNA, 27 nt, synthetic construct
  misc_feature 1..27: note = General transcription factor II-I (532-540)
  source 1..27: mol_type = other RNA
aagcaggtggaggagatcttcaacctg

SEQ ID NO: 37142 - RNA, 27 nt, synthetic construct
  misc_feature 1..27: note = Ribonuclease H2 subunit B (295-303)
  source 1..27: mol_type = other RNA
aagagcatcgacaccttcttcggcgtg

SEQ ID NO: 37143 - RNA, 27 nt, synthetic construct
  misc_feature 1..27: note = Zinc finger MYM-type protein 3 (414-422)
  source 1..27: mol_type = other RNA
aagaccggcgaggtgctgcacgaggtc

SEQ ID NO: 37144 - RNA, 33 nt, synthetic construct
  misc_feature 1..33: note = PRELI domain-containing protein 1, mitochondrial (157-167)
  source 1..33: mol_type = other RNA
aagaccatgaagggcttcgagtacatcctggcc

SEQ ID NO: 37145 - RNA, 27 nt, synthetic construct
  misc_feature 1..27: note = Sister chromatid cohesion protein PDS5 homolog A (1070-1078)
  source 1..27: mol_type = other RNA
aagaccaacgagaagctgtacaccgtg

SEQ ID NO: 37146 - RNA, 27 nt, synthetic construct
  misc_feature 1..27: note = Pre-rRNA-processing protein TSR1 homolog (106-114)
  source 1..27: mol_type = other RNA
aaggtggccgacaccatcctgttcctc

SEQ ID NO: 37147 - RNA, 27 nt, synthetic construct
  misc_feature 1..27: note = TNFAIP3-interacting protein 2 (330-338)
  source 1..27: mol_type = other RNA
aaggtggccagcctgctccaccaggtc

SEQ ID NO: 37148 - RNA, 27 nt, synthetic construct
  misc_feature 1..27: note = Polyadenylate-binding protein 4 (602-610)
  source 1..27: mol_type = other RNA
aaggtggacgaggccgtcgccgtgctg

SEQ ID NO: 37149 - RNA, 30 nt, synthetic construct
  misc_feature 1..30: note = Beta-secretase 2 (314-323)
  source 1..30: mol_type = other RNA
aaggtgttcgacgccgtcgtggaggccgtg

SEQ ID NO: 37150 - RNA, 27 nt, synthetic construct
  misc_feature 1..27: note = Melanoma inhibitory activity protein 3 (259-267)
  source 1..27: mol_type = other RNA
aaggtgctggacaaggtcttccgcgcc

SEQ ID NO: 37151 - RNA, 27 nt, synthetic construct
  misc_feature 1..27: note = Lipopolysaccharide-responsive and beige-like anchor protein (136-144)
  source 1..27: mol_type = other RNA
aaggtgctgggcaagatcgagaaggtc

SEQ ID NO: 37152 - RNA, 27 nt, synthetic construct
  misc_feature 1..27: note = Protein SET (137-145)
  source 1..27: mol_type = other RNA
aaggtgctgagcaaggagttccacctc

SEQ ID NO: 37153 - RNA, 33 nt, synthetic construct
  misc_feature 1..33: note = E3 ubiquitin-protein ligase RNF213 (3249-3259)
  source 1..33: mol_type = other RNA
aaggtgagcgaggaggccaagtccatcctgctc

SEQ ID NO: 37154 - RNA, 30 nt, synthetic construct
  misc_feature 1..30: note = T-complex protein 1 subunit delta (232-241)
  source 1..30: mol_type = other RNA
aaggtgagcaactccggcatcacccgcgtc

SEQ ID NO: 37155 - RNA, 30 nt, synthetic construct
  misc_feature 1..30: note = Inhibitor of nuclear factor kappa-B kinase subunit alpha (394-403)
  source 1..30: mol_type = other RNA
aaggtgtgggccgaggccgtccactacgtg

SEQ ID NO: 37156 - RNA, 27 nt, synthetic construct
  misc_feature 1..27: note = TRIO and F-actin-binding protein (548-556)
  source 1..27: mol_type = other RNA
aagtaccaggacgtgtacgtcgagctg

SEQ ID NO: 37157 - RNA, 27 nt, synthetic construct
  misc_feature 1..27: note = Growth arrest-specific protein 7 (317-325)
  source 1..27: mol_type = other RNA
ctggccgacgaggccgaggtgcacctc

SEQ ID NO: 37158 - RNA, 24 nt, synthetic construct
  misc_feature 1..24: note = Heat shock protein HSP 90-beta (497-504)
  source 1..24: mol_type = other RNA
ctggacaagaaggtggagaaggtc

SEQ ID NO: 37159 - RNA, 27 nt, synthetic construct
  misc_feature 1..27: note = Glutamine-tRNA ligase (170-178)
  source 1..27: mol_type = other RNA
ctggaggccgacctcgagaagaagttc

SEQ ID NO: 37160 - RNA, 27 nt, synthetic construct
  misc_feature 1..27: note = GRIP and coiled-coil domain-containing protein 2 (490-498)
  source 1..27: mol_type = other RNA
ctggagaacgagcaggtgcagaagctc

SEQ ID NO: 37161 - RNA, 27 nt, synthetic construct
  misc_feature 1..27: note = ERO1-like protein alpha (69-77)
  source 1..27: mol_type = other RNA
ctggagagcgactacttccgctactac

SEQ ID NO: 37162 - RNA, 33 nt, synthetic construct
  misc_feature 1..33: note = Lethal(2) giant larvae protein homolog 2 (69-79)
  source 1..33: mol_type = other RNA
ctgcaccaggagaacaacgccgtgacccagatc

SEQ ID NO: 37163 - RNA, 27 nt, synthetic construct
  misc_feature 1..27: note = Beta-hexosaminidase subunit beta (194-202)
  source 1..27: mol_type = other RNA
ctgatcgacaccagccgccactacctc

SEQ ID NO: 37164 - RNA, 27 nt, synthetic construct
  misc_feature 1..27: note = mRNA cap guanine-N7 methyltransferase (183-191)
  source 1..27: mol_type = other RNA
ctgatcggcgagttcctcgagaaggtg

SEQ ID NO: 37165 - RNA, 27 nt, synthetic construct
  misc_feature 1..27: note = Activating signal cointegrator 1 complex subunit 3 (1174-1182)
  source 1..27: mol_type = other RNA
ctgatcatcgacgagatccacctcctg

SEQ ID NO: 37166 - RNA, 27 nt, synthetic construct
  misc_feature 1..27: note = Elongation factor 2 (292-300)
  source 1..27: mol_type = other RNA
ctgatcctcgaccccatcttcaaggtg

SEQ ID NO: 37167 - RNA, 27 nt, synthetic construct
  misc_feature 1..27: note = Zinc finger protein 532 (468-476)
  source 1..27: mol_type = other RNA
ctgaagctcgccaacaacaccaccgtg

SEQ ID NO: 37168 - RNA, 27 nt, synthetic construct
  misc_feature 1..27: note = Protein TBRG4 (214-222)
  source 1..27: mol_type = other RNA
ctgctcgccgagctgctgacccacctc

SEQ ID NO: 37169 - RNA, 27 nt, synthetic construct
  misc_feature 1..27: note = Cytoplasmic dynein 1 heavy chain 1 (1716-1724)
  source 1..27: mol_type = other RNA
ctgctcgccgagagcgtgaccgaggtc

SEQ ID NO: 37170 - RNA, 27 nt, synthetic construct
  misc_feature 1..27: note = m7GpppX diphosphatase (297-305)
  source 1..27: mol_type = other RNA
ctgctcgccgaggtgatcgagaacctg

SEQ ID NO: 37171 - RNA, 27 nt, synthetic construct
  misc_feature 1..27: note = E3 ubiquitin-protein ligase UBR2 (617-625)
  source 1..27: mol_type = other RNA
ctgctcgccggcctgcacgtgctgctc

SEQ ID NO: 37172 - RNA, 33 nt, synthetic construct
  misc_feature 1..33: note = MAP kinase-activating death domain protein (367-377)
  source 1..33: mol_type = other RNA
ctgctcgcccccaccccgtacatcatcggcgtg

SEQ ID NO: 37173 - RNA, 27 nt, synthetic construct
  misc_feature 1..27: note = Peroxiredoxin-5, mitochondrial (164-172)
  source 1..27: mol_type = other RNA
ctgctcgacgacagcctggtgtccatc

SEQ ID NO: 37174 - RNA, 30 nt, synthetic construct
  misc_feature 1..30: note = Beta-adrenergic receptor kinase 1 (324-333)
  source 1..30: mol_type = other RNA
ctgctcgacgagcacggccacgtgcgcatc

SEQ ID NO: 37175 - RNA, 27 nt, synthetic construct
  misc_feature 1..27: note = Lon protease homolog 2, peroxisomal (678-686)
  source 1..27: mol_type = other RNA
ctgctcgacaacaccgacatccacctg

SEQ ID NO: 37176 - RNA, 27 nt, synthetic construct
  misc_feature 1..27: note = Coatomer subunit gamma-1 (848-856)
  source 1..27: mol_type = other RNA
ctgctcgacaccgtgaccatgcaggtc

SEQ ID NO: 37177 - RNA, 27 nt, synthetic construct
  misc_feature 1..27: note = Serine-protein kinase ATM (1590-1598)
  source 1..27: mol_type = other RNA
ctgctcgaggagatcaaccacttcctg

SEQ ID NO: 37178 - RNA, 33 nt, synthetic construct
  misc_feature 1..33: note = DNA-directed RNA polymerase II subunit RPB11-a (11-21)
  source 1..33: mol_type = other RNA
ctgctcttcgagggcgagaagaagatcaccatc

SEQ ID NO: 37179 - RNA, 27 nt, synthetic construct
  misc_feature 1..27: note = GCN1 general control of amino-acid synthesis 1-like 1 (1599-1607)
  source 1..27: mol_type = other RNA
ctgctcggcgacctgctgttccacatc

SEQ ID NO: 37180 - RNA, 27 nt, synthetic construct
  misc_feature 1..27: note = Transport and Golgi organization protein 6 homolog (991-999)
  source 1..27: mol_type = other RNA
ctgctcggcagcgtggtccacgaggtg

SEQ ID NO: 37181 - RNA, 27 nt, synthetic construct
  misc_feature 1..27: note = Nucleoprotein TPR (1158-1166)
  source 1..27: mol_type = other RNA
ctgctccacgaccagatcgagaagctg

SEQ ID NO: 37182 - RNA, 27 nt, synthetic construct
  misc_feature 1..27: note = Sentrin-specific protease 5 (328-336)
  source 1..27: mol_type = other RNA
ctgctcatccccatccacctggaggtg

SEQ ID NO: 37183 - RNA, 27 nt, synthetic construct
  misc_feature 1..27: note = cAMP-dependent protein kinase type I-alpha regulatory subunit (30-38)
  source 1..27: mol_type = other RNA
ctgctcaaggacagcatcgtgcagctg

SEQ ID NO: 37184 - RNA, 30 nt, synthetic construct
  misc_feature 1..30: note = Coatomer subunit gamma-1 (847-856)
  source 1..30: mol_type = other RNA
ctgctcctggacaccgtgaccatgcaggtc

SEQ ID NO: 37185 - RNA, 27 nt, synthetic construct
  misc_feature 1..27: note = ATP-binding cassette sub-family B member 8, mitochondrial (150-158)
  source 1..27: mol_type = other RNA
ctgctcctgggccagctggtggaggtc

SEQ ID NO: 37186 - RNA, 33 nt, synthetic construct
  misc_feature 1..33: note = Ubiquitin/ISG15-conjugating enzyme E2 L6 (38-48)
  source 1..33: mol_type = other RNA
ctgctcctgcccgaccagccgccctaccacctg

SEQ ID NO: 37187 - RNA, 33 nt, synthetic construct
  misc_feature 1..33: note = E3 ubiquitin-protein ligase listerin (646-656)
  source 1..33: mol_type = other RNA
ctgctcatgcccagctccgaggacctgctgctc

SEQ ID NO: 37188 - RNA, 27 nt, synthetic construct
  misc_feature 1..27: note = Kelch-like protein 12 (470-478)
  source 1..27: mol_type = other RNA
ctgctcaacgaccacatctacgtggtc

SEQ ID NO: 37189 - RNA, 27 nt, synthetic construct
  misc_feature 1..27: note = Polyadenylate-binding protein 4 (162-170)
  source 1..27: mol_type = other RNA
ctgctcaacgaccgcaaggtgttcgtc

SEQ ID NO: 37190 - RNA, 30 nt, synthetic construct
  misc_feature 1..30: note = Staphylococcal nuclease domain-containing protein 1 (187-196)
  source 1..30: mol_type = other RNA
ctgctccccgactactacctggtgaccgtc

SEQ ID NO: 37191 - RNA, 30 nt, synthetic construct
  misc_feature 1..30: note = tRNA-dihydrouridine(47) synthase (NAD(P)(+))-like (208-217)
  source 1..30: mol_type = other RNA
ctgctccccgagctgcgcgactggggcgtg

SEQ ID NO: 37192 - RNA, 27 nt, synthetic construct
  misc_feature 1..27: note = Activating molecule in BECN1-regulated autophagy protein 1 (810-818)
  source 1..27: mol_type = other RNA
ctgctccccgagtacctgccgtacgcc

SEQ ID NO: 37193 - RNA, 27 nt, synthetic construct
  misc_feature 1..27: note = Transportin-1 (394-402)
  source 1..27: mol_type = other RNA
ctgctcccccacatcctgccgctgctc

SEQ ID NO: 37194 - RNA, 27 nt, synthetic construct
  misc_feature 1..27: note = Angiomotin-like protein 1 (845-853)
  source 1..27: mol_type = other RNA
ctgctccccccgccccccaccagcgcc

SEQ ID NO: 37195 - RNA, 27 nt, synthetic construct
  misc_feature 1..27: note = ATP-citrate synthase (43-51)
  source 1..27: mol_type = other RNA
ctgctccaggaccacccctggctgctg

SEQ ID NO: 37196 - RNA, 27 nt, synthetic construct
  misc_feature 1..27: note = Pleckstrin homology domain-containing family A member 4 (400-408)
  source 1..27: mol_type = other RNA
ctgctccaggaccgcctggtgagcgtc

SEQ ID NO: 37197 - RNA, 27 nt, synthetic construct
  misc_feature 1..27: note = T-complex protein 1 subunit epsilon (314-322)
  source 1..27: mol_type = other RNA
ctgctccagaacaacctgcccgccgtg

SEQ ID NO: 37198 - RNA, 27 nt, synthetic construct
  misc_feature 1..27: note = Nuclear factor erythroid 2-related factor 1 (371-379)
  source 1..27: mol_type = other RNA
ctgctccgcgagaaggtggagttcctg

SEQ ID NO: 37199 - RNA, 27 nt, synthetic construct
  misc_feature 1..27: note = Eukaryotic translation initiation factor 4 gamma 3 (1361-1369)
  source 1..27: mol_type = other RNA
ctgctcagcgagatcctgcacctgctc

SEQ ID NO: 37200 - RNA, 27 nt, synthetic construct
  misc_feature 1..27: note = Liprin-alpha-3 (437-445)
  source 1..27: mol_type = other RNA
ctgctcagcgagtccaacgagcgcctg

SEQ ID NO: 37201 - RNA, 30 nt, synthetic construct
  misc_feature 1..30: note = Cyclin-dependent kinase 11B (556-565)
  source 1..30: mol_type = other RNA
ctgctcagccacgccggcatcctgaaggtg

SEQ ID NO: 37202 - RNA, 27 nt, synthetic construct
  misc_feature 1..27: note = TATA-binding protein-associated factor 172 (43-51)
  source 1..27: mol_type = other RNA
ctgctcagcaaggtgctgatctacctg

SEQ ID NO: 37203 - RNA, 27 nt, synthetic construct
  misc_feature 1..27: note = Ras GTPase-activating protein-binding protein 1 (97-105)
  source 1..27: mol_type = other RNA
ctgctcagcaacaacaaccaggccctg

SEQ ID NO: 37204 - RNA, 27 nt, synthetic construct
  misc_feature 1..27: note = Fasciculation and elongation protein zeta-2 (365-373)
  source 1..27: mol_type = other RNA
ctgctcaccgactacatcctgaaggtg

SEQ ID NO: 37205 - RNA, 27 nt, synthetic construct
  misc_feature 1..27: note = 5'-nucleotidase domain-containing protein 3 (276-284)
  source 1..27: mol_type = other RNA
ctgctctgggacaagatccacaagctg

SEQ ID NO: 37206 - RNA, 30 nt, synthetic construct
  misc_feature 1..30: note = Cyclic AMP-dependent transcription factor ATF-6 beta (206-215)
  source 1..30: mol_type = other RNA
ctgctctgggacgtgcccgccccgagcctg

SEQ ID NO: 37207 - RNA, 33 nt, synthetic construct
  misc_feature 1..33: note = Protein KIAA0100 (525-535)
  source 1..33: mol_type = other RNA
ctgctctggagccccccggaccacatgtacctg

SEQ ID NO: 37208 - RNA, 27 nt, synthetic construct
  misc_feature 1..27: note = Growth arrest-specific protein 8 (22-30)
  source 1..27: mol_type = other RNA
ctgctctacgagcaccagaacaacctg

SEQ ID NO: 37209 - RNA, 30 nt, synthetic construct
  misc_feature 1..30: note = ATP-dependent RNA helicase DHX29 (149-158)
  source 1..30: mol_type = other RNA
ctgctctacggcggggacctgcacagcgcc

SEQ ID NO: 37210 - RNA, 27 nt, synthetic construct
  misc_feature 1..27: note = Catenin alpha-1 (702-710)
  source 1..27: mol_type = other RNA
ctgatgaacgccgtggtccagaccgtg

SEQ ID NO: 37211 - RNA, 27 nt, synthetic construct
  misc_feature 1..27: note = Transient receptor potential cation channel subfamily V member 2 (644-652)
  source 1..27: mol_type = other RNA
ctgatgagcgagaccgtgaactccgtc

SEQ ID NO: 37212 - RNA, 27 nt, synthetic construct
  misc_feature 1..27: note = 5'-3' exoribonuclease 2 (347-355)
  source 1..27: mol_type = other RNA
ctgccccacctcccgagcctggagatc

SEQ ID NO: 37213 - RNA, 27 nt, synthetic construct
  misc_feature 1..27: note = Exosome component 10 (544-552)
  source 1..27: mol_type = other RNA
ctgcccaaggagccgcagggcatcatc

SEQ ID NO: 37214 - RNA, 24 nt, synthetic construct
  misc_feature 1..24: note = Girdin (733-740)
  source 1..24: mol_type = other RNA
ctgccccgcgccagctccgtgatc

SEQ ID NO: 37215 - RNA, 27 nt, synthetic construct
  misc_feature 1..27: note = Cytoskeleton-associated protein 5 (598-606)
  source 1..27: mol_type = other RNA
ctgccctggaccgccgagcaggtggtc

SEQ ID NO: 37216 - RNA, 27 nt, synthetic construct
  misc_feature 1..27: note = SLIT-ROBO Rho GTPase-activating protein 2 (519-527)
  source 1..27: mol_type = other RNA
ctgcagcacgagggcatcttccgcgtg

SEQ ID NO: 37217 - RNA, 33 nt, synthetic construct
  misc_feature 1..33: note = DNA dC-dU-editing enzyme APOBEC-3A (64-74)
  source 1..33: mol_type = other RNA
ctgcagctcgaccccgcccagatctaccgcgtg

SEQ ID NO: 37218 - RNA, 27 nt, synthetic construct
  misc_feature 1..27: note = N-acetylgalactosamine kinase (236-244)
  source 1..27: mol_type = other RNA
ctgcagtgggacaaggtgctccgcctg

SEQ ID NO: 37219 - RNA, 27 nt, synthetic construct
  misc_feature 1..27: note = ATP-binding cassette sub-family A member 7 (407-415)
  source 1..27: mol_type = other RNA
ctgagcctcgacaagctggaggccgcc

SEQ ID NO: 37220 - RNA, 27 nt, synthetic construct
  misc_feature 1..27: note = U6 snRNA-associated Sm-like protein LSm4 (4-12)
  source 1..27: mol_type = other RNA
ctgagcctcctgaagaccgcccagaac

SEQ ID NO: 37221 - RNA, 27 nt, synthetic construct
  misc_feature 1..27: note = Pre-mRNA-processing-splicing factor 8 (249-257)
  source 1..27: mol_type = other RNA
ctggtggacgacaactacttctacctc

SEQ ID NO: 37222 - RNA, 30 nt, synthetic construct
  misc_feature 1..30: note = Protein PRRC2B (148-157)
  source 1..30: mol_type = other RNA
ctggtgtacgagggccagctcagccaggcc

SEQ ID NO: 37223 - RNA, 27 nt, synthetic construct
  misc_feature 1..27: note = E3 ubiquitin-protein ligase Hakai (268-276)
  source 1..27: mol_type = other RNA
atggcccccccgcccccccgcagcgtg

SEQ ID NO: 37224 - RNA, 27 nt, synthetic construct
  misc_feature 1..27: note = Eukaryotic translation initiation factor 4 gamma 1 (1290-1298)
  source 1..27: mol_type = other RNA
atggagatcgacatcccccacgtgtgg

SEQ ID NO: 37225 - RNA, 30 nt, synthetic construct
  misc_feature 1..30: note = Keratinocyte-associated transmembrane protein 2 (176-185)
  source 1..30: mol_type = other RNA
atggagatcgagcagagcgtgaagtccttc

SEQ ID NO: 37226 - RNA, 27 nt, synthetic construct
  misc_feature 1..27: note = E3 ubiquitin-protein ligase UBR1 (380-388)
  source 1..27: mol_type = other RNA
atggagatggagtacaagaagctgttc

SEQ ID NO: 37227 - RNA, 27 nt, synthetic construct
  misc_feature 1..27: note = Intron-binding protein aquarius (94-102)
  source 1..27: mol_type = other RNA
atggagcagagcctgttcacccgcttc

SEQ ID NO: 37228 - RNA, 27 nt, synthetic construct
  misc_feature 1..27: note = Riboflavin kinase (85-93)
  source 1..27: mol_type = other RNA
atggagacccacatcatgcacaccttc

SEQ ID NO: 37229 - RNA, 27 nt, synthetic construct
  misc_feature 1..27: note = Adenosylhomocysteinase (210-218)
  source 1..27: mol_type = other RNA
atgatcgccggcaaggtggccgtcgtg

SEQ ID NO: 37230 - RNA, 27 nt, synthetic construct
  misc_feature 1..27: note = TFIIH basal transcription factor complex helicase XPB subunit (438-446)
  source 1..27: mol_type = other RNA
atgatcctggacgaggtgcacaccatc

SEQ ID NO: 37231 - RNA, 27 nt, synthetic construct
  misc_feature 1..27: note = GPN-loop GTPase 3 (162-170)
  source 1..27: mol_type = other RNA
atgatcagcctggagatcccccaggtg

SEQ ID NO: 37232 - RNA, 27 nt, synthetic construct
  misc_feature 1..27: note = DNA replication licensing factor MCM5 (531-539)
  source 1..27: mol_type = other RNA
atgctggccaagcacgtgatcaccctc

SEQ ID NO: 37233 - RNA, 27 nt, synthetic construct
  misc_feature 1..27: note = Microtubule-associated protein RP/EB family member 1 (20-28)
  source 1..27: mol_type = other RNA
atgctggcctggatcaacgagagcctc

SEQ ID NO: 37234 - RNA, 27 nt, synthetic construct
  misc_feature 1..27: note = Protein SSXT (28-36)
  source 1..27: mol_type = other RNA
atgctggacgacaacaaccacctcatc

SEQ ID NO: 37235 - RNA, 27 nt, synthetic construct
  misc_feature 1..27: note = Nucleoporin NUP188 homolog (296-304)
  source 1..27: mol_type = other RNA
atgctggacgaccgcgcctacctcgtg

SEQ ID NO: 37236 - RNA, 27 nt, synthetic construct
  misc_feature 1..27: note = Nitrogen permease regulator 3-like protein (542-550)
  source 1..27: mol_type = other RNA
atgctgttcgacaagttccgcagcgtg

SEQ ID NO: 37237 - RNA, 33 nt, synthetic construct
  misc_feature 1..33: note = Protein zyg-11 homolog B (424-434)
  source 1..33: mol_type = other RNA
atgctgatcgaggagggcgggctccagcacctg

SEQ ID NO: 37238 - RNA, 27 nt, synthetic construct
  misc_feature 1..27: note = AP-3 complex subunit beta-1 (138-146)
  source 1..27: mol_type = other RNA
atgctgatcgaggtgatcgagaagctc

SEQ ID NO: 37239 - RNA, 27 nt, synthetic construct
  misc_feature 1..27: note = 1-phosphatidylinositol 3-phosphate 5-kinase (763-771)
  source 1..27: mol_type = other RNA
atgctgctcgagcacggcatcaccctg

SEQ ID NO: 37240 - RNA, 30 nt, synthetic construct
  misc_feature 1..30: note = Eukaryotic translation initiation factor 3 subunit C-like protein (692-701)
  source 1..30: mol_type = other RNA
atgctgctcgagatcccctacatggccgcc

SEQ ID NO: 37241 - RNA, 27 nt, synthetic construct
  misc_feature 1..27: note = Mitochondrial import receptor subunit TOM20 homolog (121-129)
  source 1..27: mol_type = other RNA
atgctgctcaccaagctgcccaccatc

SEQ ID NO: 37242 - RNA, 27 nt, synthetic construct
  misc_feature 1..27: note = Beta-2-syntrophin (451-459)
  source 1..27: mol_type = other RNA
atgctgaacggccaggaggtgcgcctc
